United States Patent Application Publication US 2004/0031072 A1 - sequence listing, part 42

SEQ ID NO: 265501 - protein, 563 aa, Glycine max
  unsure (1)..(563): unsure at all Xaa locations
  Clone ID: PAT_MRT3847_81768C.1.pep
MGKNQKTGVGRALVKQHNQQSKENGRLQKKNVLESFTEISDIDAIIEQAEHPQQPLFSIPQRPINLDLSSSIGKNEMTLEEMRKQPRREKPLHALIISNKLTVCGCAYMAVAELSXQERQAFLIWRRIQTRLEENENLVLTPFEKNLDIWRQLWRVVERSDLLVMVVDSRDPLFYRCPDLEAYAREVDPHKRTLLLVNKADLLPASVRLEKWVEYFHAHNILYIFWSAKAASAAVEGKMFRSPLEADDSGKNNNPDTKIYDRDELLARMQSEAEKIVEMRRNSSSDTGPSNIQSSGENVGGSSSSNNVIVGFVGYPNVGKSSTINALVGKKRTGVTSTPGKTKHFQTLIISDKLTVCDCPGLVFPSFSSSRYKMIACGVLPIDRMTEHREAVQVVADKVPRHVIEEIYKIXNLTYXPQSRPPLASELLRAYCASRRYVTASGLPDETRAARQILKDYIDGKLPHHEMPPGMSNVEPDPVNLHGSVSYGTEDVDSKVAPDFEQVLDDLNSFDLANGLVSNEVTIKKSDASHNHHKKPQGKKDRSQRTENNDADGMPVVKFLRNH

SEQ ID NO: 265502 - protein, 200 aa, Glycine max
  Clone ID: PAT_MRT3847_81769C.1.pep
MSVEELDDNERQAFLIWRRRLARLEENENLVLTPFEKNLDIWRQLWRVVERSDLLVMVVDSRDPLFYRCPDLEAYAREVDDHKRTLLLVNKADLLPASVREKWVEYFCAHNILYIFWSAKAASAAVEGKMLRSPLEADDSGKNNNPDTKIYDRDELLARMQSEAEKIVEMRRNSSSDTGPSNIQSSGENVGGSSSSNNVI

SEQ ID NO: 265503 - protein, 265 aa, Glycine max
  unsure (1)..(265): unsure at all Xaa locations
  Clone ID: PAT_MRT3847_8176C.1.pep
TLLLFAIRPRMAICKKDVWRVECRIPFGFPLTVVCNNLFHEMLIIYSYXKLLRQAKAPSMFLQSFKNFVSLCVYGDDNLISVHEYVKPYFSGSKLKSFLAGHNITITDGIDKTSATLQFRKLADCDFLKRNFKQMSNVLWVAPEDKASLWSQLHYVSCNNLEMQEAYLVNLVNVLRELYLHSPDEARQLRRKALSRIAWLQXADVPTIAQIEDVHSMQMMMNAPDSDDNIDLLLSIDLLVYNEHVQLCEQDRYDDQLVLVTHNIL

SEQ ID NO: 265504 - protein, 63 aa, Glycine max
  unsure (1)..(63): unsure at all Xaa locations
  Clone ID: PAT_MRT3847_81770C.1.pep
XGXXMCKLGXXFLQEXGVCFTLXAXLSIIEIENXVSLXVKCCGCIVXTVXTLRSSKXVXCXFX

SEQ ID NO: 265505 - protein, 53 aa, Glycine max
  Clone ID: PAT_MRT3847_81771C.1.pep
QTRVVNNCRIKDLPLKDIVNLHYHTFPVKTIILHFMGIGNTPVPSFGKPYSRF

SEQ ID NO: 265506 - protein, 113 aa, Glycine max
  Clone ID: PAT_MRT3847_81772C.1.pep
SSIAEDDDGVERGGITVVLLFNFAASRHSNPDLTLTPSSKPNHPTQLKAVSISMASNQRPTHPSLNLNVVANKEPPPKHPIEVIARIRESINYFQNGFLLILHFQILNSVVIG

SEQ ID NO: 265507 - protein, 62 aa, Glycine max
  Clone ID: PAT_MRT3847_81773C.1.pep
HLHSCAFDSYFITHNNACSHKNQNFHNHLISIQYISFINSSRTSHSLLLISYVYIMQFLFNE

SEQ ID NO: 265508 - protein, 95 aa, Glycine max
  Clone ID: PAT_MRT3847_81774C.1.pep
PPHLILCWRPVPDNHRLLPDFDLYVKFGVRQALQHSMPCVSVWQVAVLALSFFVFDPSCFAWCHVSCYISIPSNTSGVARCHLGLLACYYKAPIP

SEQ ID NO: 265509 - protein, 49 aa, Glycine max
  Clone ID: PAT_MRT3847_81775C.1.pep
LGLCGSSFCLPTPRCISMKQGKCITSNLCHIHSLNLNRSCSLTHPMTRK

SEQ ID NO: 265510 - protein, 67 aa, Glycine max
  Clone ID: PAT_MRT3847_81776C.1.pep
SFFDIFWCEFINRFVIDFVFLDSSYFWSDLLPIVLCLVIIFVFVCNLNTYSRGFAPSHVHGYACVNC

SEQ ID NO: 265511 - protein, 63 aa, Glycine max
  Clone ID: PAT_MRT3847_81777C.1.pep
IGVNFGANELLMSVSKDPVRMKKKMRDLAAARIVSTDMAYTTKDMCSFISTQPILNGYPILHD

SEQ ID NO: 265512 - protein, 146 aa, Glycine max
  unsure (1)..(146): unsure at all Xaa locations
  Clone ID: PAT_MRT3847_81778C.1.pep
LEGLRMLACWVADPNGDAXKNHLARDPDYLWAYEDGMTMHSFGRPECDAGFAAQAVLATNIIEEIGPTIAQGHDTIXKSQDTDYPHGDYNSMHLHISKGTLTFSDQEHGWHVSDCTAXTLXKCCLLLXLLPPENAGYKMEPDRLYD

SEQ ID NO: 265513 - protein, 173 aa, Glycine max
  Clone ID: PAT_MRT3847_81779C.1.pep
MFYEMLWDTVCKYKNDAGFGSVKSVNATKISYTLSTDPTAIPRTLAILDHLLSEEMTKKSHFDTIGSAVTGYSFSLAGIADGFRKRYLKDYTQHNIAVLQQAKAQLMEFDCNKVDINNLHNVEGIGILNAVQLQSKHEVSKFLQLKGKWDGKKFMNDAVVAIFTLVGRGWMLW

SEQ ID NO: 265514 - protein, 302 aa, Glycine max
  unsure (1)..(302): unsure at all Xaa locations
  Clone ID: PAT_MRT3847_8177C.1.pep
GPTRAFCVRTITDGIDETSATLPLRKSADCDFLKRNSKQMPNVLWLAPVDTASLWSQLHYVSCHNLEMQEAYLGNLGNVLRELYLHSPEEARHLRRKALSRLEWLQQADVPTIAQIEEFHSMQRMMNAPDSTDNIDLLLSIDLLGLQGAGEALPNKIVFDDKLVLANTQEFFDGHYPVDSWLPIFANXLYPVSQXLPSEAVVANDTCGRGRDGLPTTVWISSAVTNRSSDINKWIRTALGKGKKIVILTRVDPSPLAVLAVLFGDKNEIVSSNATNPMLTRLLENCKRLKYLVDECPFAFVN

SEQ ID NO: 265515 - protein, 53 aa, Glycine max
  Clone ID: PAT_MRT3847_81780C.1.pep
KVRERVPSDVFIPARYRNKRSLVRLVSNYHQIRSSFRHKFIMSGLAVLRCKRR

SEQ ID NO: 265516 - protein, 92 aa, Glycine max
  unsure (1)..(92): unsure at all Xaa locations
  Clone ID: PAT_MRT3847_81781C.1.pep
VVGLSNLLKTNPVKGIHGDYVDLLKXRNAFGSNNHPWKKGRNFLSPFCFSCLLQMFMWDACKDLTLIILMVVATASLALGIKSKVRAGKVMM

SEQ ID NO: 265517 - protein, 64 aa, Glycine max
  Clone ID: PAT_MRT3847_81782C.1.pep
TSPDLYKLGSLDQTICQFTTGLHDTKRYNTKLSKRIPFIYTKYCSFTVAQHISCQLPIKKQTIT

SEQ ID NO: 265518 - protein, 65 aa, Glycine max
  Clone ID: PAT_MRT3847_81783C.1.pep
DRALSGVSLEDVEDEADDFYLTDINFIREWLPSVSDALKSFSVSDFWVQSCWRRSEALSLISSTC

SEQ ID NO: 265519 - protein, 69 aa, Glycine max
  Clone ID: PAT_MRT3847_81784C.1.pep
SLGSGPKVIPPRGSSSLPDFNWRNFQGLLKCPQLKEKLALVFKGFGVPQSMEWGLGHLLVPTNGLFSIN

SEQ ID NO: 265520 - protein, 187 aa, Glycine max
  Clone ID: PAT_MRT3847_81785C.1.pep
MEAPKLKVVTLKAIEATPSTFKEFGQVVEASRDGQEFGPHDAQLDLSQGTPRFYIIKLEKCPLKFSSITHHAIVTQCLGSIGGHVWYLGVAKSSVVDSNEIKDDTGKKIVQSRSGHSYVPPAIEDVQVFKISGSKFLKLNRGTWHAGPLFKAAAMDFYNLELSNTNETDHTTHYFKKDDGVMFVIDD

SEQ ID NO: 265521 - protein, 65 aa, Glycine max
  Clone ID: PAT_MRT3847_81786C.1.pep
LLWPCYTCIMFIVNDVNPVYFLNHMIFMKILIPKLFLFLSFKSPSFDTSMLNIYPFGATILRSSV

SEQ ID NO: 265522 - protein, 143 aa, Glycine max
  unsure (1)..(143): unsure at all Xaa locations
  Clone ID: PAT_MRT3847_81787C.1.pep
MPTGKKAGESIKETATLIGDDAKAGRGKIKAICKERSERMTACDXVQKELPTQKTVAEMNHVMLHKHAVRQPNTMAQQSVTTAALMAHGHHTTDTATGAPRYCTTDEYGHTMWTHLSSSKSGHRIVQPKGHVTERVVVSHAIG

SEQ ID NO: 265523 - protein, 49 aa, Glycine max
  Clone ID: PAT_MRT3847_81788C.1.pep
RPRVRPRVHSGVKRPQNVAAEEQFIFRSENFNHVDASVPGLSPSLLNLK

SEQ ID NO: 265524 - protein, 86 aa, Glycine max
  Clone ID: PAT_MRT3847_81789C.1.pep
GVIYLLFCFILIQSFKHTFFLSRPHSHIKNGKKSQTLKSWGGGFILPKKGKGEKGPFLTRRGTSTIFKKGLSFIPQAGPPRLYNRV

SEQ ID NO: 265525 - protein, 200 aa, Glycine max
  unsure (1)..(200): unsure at all Xaa locations
  Clone ID: PAT_MRT3847_8178C.1.pep
AGPLTLAKDLLLDGSXGPFFILNADIICDYPLKEXFHIERGXEAFMLVTQAVEPSKYDVAVMNHITGLVQSFQEKPXTIVGNKXGVYLMNPSVLDRIELTPTSLKTEVFPNIVSDRKLYAMVFPQEGFXMEIGQRDYISGMRLYLNWLRNNSLSELANDPHXTVGNVVVHETAKLVMHVKLVHPGCIIEKGVGLKSYTVM

SEQ ID NO: 265526 - protein, 62 aa, Glycine max
  Clone ID: PAT_MRT3847_81790C.1.pep
GGNGSIWGAPTYSSITMRKSDLRSSFITKRWVSWFDLFPQDRFKSNKSHLRGWTIKRSFDIF

SEQ ID NO: 265527 - protein, 266 aa, Glycine max
  Clone ID: PAT_MRT3847_81791C.1.pep
MGTSILDALNVRVEGSGDKYLFLAHGFGTDQSAWQRVLPYFTRNYSVILYDLVCAGSVNPDHFDYRRYTTLDAYVDDLLNILDALRVPRCVYVGHSISAMIGMLASIRRPDLFSKLILIGASPRFLNDKDYHGGFEQGEIEQVFSAMEANYEAWVNGFAPLSVGADVPAAVREFSRTLFNMRPDISLFVSRTVFHSDLRGILGLVNVPCCIMQTARDMSVPASVATYMKDHIGGKSSIQWLDTEGHLPHLSAPSYLARQLEIALSQ

SEQ ID NO: 265528 - protein, 239 aa, Glycine max
  unsure (1)..(239): unsure at all Xaa locations
  Clone ID: PAT_MRT3847_81792C.1.pep
MFLSIFCLNDPLVIGSSRKRDPWDFVTMSLFGLGNRNQKTFRPKXSAPSGSKGAQLQKHIDATGNLREAVKLPPGEDINEWLAVNTVDFFNQVNILFGTLTEFCTPSNCPSMTAGPKYEYRWADGVTIKKPIEVSAPKYVEYLMDWIESQLDDETIFPQRLGAPFPTNFRDVVKTIFKRLFRVYAHIYHSHFQKIVSLKEEAHLNTCFKHFVLFTWEFRLIDKAELAPLEDLVESIVQL

SEQ ID NO: 265529 - protein, 70 aa, Glycine max
  Clone ID: PAT_MRT3847_81793C.1.pep
GGQMPTLIEKSNIFKFWPILIPLRYQCTQIRSLVKPFKHFAKLNLKLYNKKFFKLNFNFQTKPLCSLEAS

SEQ ID NO: 265530 - protein, 134 aa, Glycine max
  Clone ID: PAT_MRT3847_81794C.1.pep
MAYQSHEAKQQDNSPLKLKIRVISASSLQAADRGGTSDPFVHFKQGHMGVKTTVKNKELNPVWNEDLQFGIYEKDAQTGTLSIEVLDKDMLSDDCIGTYKVSLSEVPHNQPREYDVHLTGGQSGKPQNGRLKFS

SEQ ID NO: 265531 - protein, 85 aa, Glycine max
  Clone ID: PAT_MRT3847_81795C.1.pep
GPAFVEEPISLLVCVTTHLETPIKAPIPSGRLTRTYHQTRTLHKPPSLDSHSDSSSTSISETIILTTIEQDVTDKTSAHDNVANA

SEQ ID NO: 265532 - protein, 77 aa, Glycine max
  Clone ID: PAT_MRT3847_81796C.1.pep
CATDNIISVRAIVSGCPLCDNSLTTWTHIGYIHNVFQNGTTCIRVYESNVHHISCVTLCMECLIWIRHAYVVRCNYL

SEQ ID NO: 265533 - protein, 387 aa, Glycine max
  Clone ID: PAT_MRT3847_81797C.1.pep
MAEEITKNDVGVTSKTTRSSSRFWPRWIPTSTDHIIAAEKRLLSVVKTGYVQEHVNIGSGPPGSKVRWFRSSSNEPRFINTVTFDSKPHSPTLVMIHGYAASQGFFFRNFDALASRFRVIAVDQLGWGGSSRPDFTCKSTEETEAWFIDSFEEWRKAKNLSNFILLGHSFGGYVAAKYALKHPEHVQHLILVGSAGFSSESDAKSEWITRFRATWKGAVLNHLWESNFTPQKLVRGLGPWGPNIVRKYTSARFGTHSTGEILTEEESTLLTDYVYHTLAAKASGELCLKYIFSFGAFARMPLLLSASEWKVPTTFMYGFQDWMNYQGAQEARKHMKVPCEIIRIPQGGHFAFIDNPTAFHSAVFYACRRFLTPDPDNESLPKGLTSA

SEQ ID NO: 265534 - protein, 34 aa, Glycine max
  Clone ID: PAT_MRT3847_81798C.1.pep
LLEGCKYLSNGWDYFCIWGPGTHTLSIKCTKLRI

SEQ ID NO: 265535 - protein, 96 aa, Glycine max
  Clone ID: PAT_MRT3847_81799C.1.pep
NCRDSYCRGFEQIWRKGEIFLDWHSYWHGTTPPFIFIEIIWEECMSFENPMPWISFNRSLHRVIPPDMLKSPPVVGKPGGIIPKFGESDLRFLKKI

SEQ ID NO: 265536 - protein, 334 aa, Glycine max
  unsure (1)..(334): unsure at all Xaa locations
  Clone ID: PAT_MRT3847_8179C.1.pep
QSFRNFVSLCAHGDDNLITVHEYVKPYFNGSKLKSFLSGHNITITDGIDKTSATLQFRKLAYCDFLNRNFNHMTNVLWLAPDDNASLWSQLHYVSCNNLEMQEAYLVNLVNVLRELYLHTPDEARQLIRKALSRIEXLQQADVPTIAQIEEFHSMYRMMNAPDSYDNIDLLLSIDLLGLQGACKAFTNKIVFDDKLVLANTQEFFDGNFPVDSWVPIIVNCLYPVSQLPSEAVCVNVTCWRGRGALPTTAWISSAANNRSSNINKRIRTALGKGQKIVFLTRVDPFPVALLAVLFGVKNEILSSNATNPMLTRLLENCKSLKYLVDECPFAFVN

SEQ ID NO: 265537 - protein, 133 aa, Glycine max
  Clone ID: PAT_MRT3847_817C.1.pep
LYPPPHWPTGAPFGPRSARLWGASLWGNLVGLPGPVRPSRVGPRVLLSAPLAKVPVLPPFGDIVGVGPASGSPPRVGRLGIFGPGGPEIFGALPGEPLRNICRSPPGLFCFWGRRVGVAGNVRFKVFPPGVRS

SEQ ID NO: 265538 - protein, 91 aa, Glycine max
  Clone ID: PAT_MRT3847_81800C.1.pep
SVLLRKYPITNYAFEGCWQFHLEIFEDSFDHPIHRARCFSIFIQQERIGLTSSDQGNLVALVGYRCITLAILIKYCFIMLVKRCICTHSYF

SEQ ID NO: 265539 - protein, 49 aa, Glycine max
  Clone ID: PAT_MRT3847_81801C.1.pep
QPEESETMIVSAWQKLTGSFHQRPEQKIACGTQQGSLPLTDIASKAQNT

SEQ ID NO: 265540 - protein, 81 aa, Glycine max
  Clone ID: PAT_MRT3847_81802C.1.pep
DIYIVIALSCNRRGYFCDSKASFPRSQGYTLSYAKVHTFKMRAQKRKKKRHRKHNMAFGVWISLTSLLSLQVIQVSQSSCE

SEQ ID NO: 265541 - protein, 71 aa, Glycine max
  Clone ID: PAT_MRT3847_81803C.1.pep
YRLIKLTITDFNTKIEQATVVECKGHDAARFHSIDHAHGWDKDITGMIEPKDGKKRISVSFECETLKAGKA

SEQ ID NO: 265542 - protein, 63 aa, Glycine max
  Clone ID: PAT_MRT3847_81804C.1.pep
ATETIRVLSRDSRAKSDAQCTHGLIMIMVKIQRRVVLAHQYQTPVDRCLYPTALVFLRPPLGV

SEQ ID NO: 265543 - protein, 43 aa, Glycine max
  Clone ID: PAT_MRT3847_81805C.1.pep
HTYQCRSASALYGSAVAAFDLMTRVFPRLYIFRFLYPRFQLKS

SEQ ID NO: 265544 - protein, 103 aa, Glycine max
  unsure (1)..(103): unsure at all Xaa locations
  Clone ID: PAT_MRT3847_81806C.1.pep
ARRQHNGERNREIDNTGVLSANDAFGNPEFAVERTYANVSRALQTVTGKIVALKMTLLHDDXQRVSHTTHREVSILRLRSRNTHVLTLIDVTECHDDERNTVL

SEQ ID NO: 265545 - protein, 109 aa, Glycine max
  Clone ID: PAT_MRT3847_81807C.1.pep
MRGAVVCGYFVPTVPYSSVFKPLLQFVGPLYFDIGKIALELIAAYVSTWPAPVLGKLMDLPIGNAMLKVNLPPAHSLPKENGVSLDESAAPVAPFLPNNQYYPTGAFFT

SEQ ID NO: 265546 - protein, 82 aa, Glycine max
  unsure (1)..(82): unsure at all Xaa locations
  Clone ID: PAT_MRT3847_81808C.1.pep
CDADWAGRAYDRKSTSGXCWWVRNNRMRGVSKNHINVSRSTAEAYHMAACISRSQLACMKQMLKDYNVXQDVMTLYCANLNT

SEQ ID NO: 265547 - protein, 53 aa, Glycine max
  Clone ID: PAT_MRT3847_81809C.1.pep
QLFVSCNISCGPVDFSMHQDELYQIMPVACVSISIYIAVRQVSQLQLWCMCSL

SEQ ID NO: 265548 - protein, 51 aa, Glycine max
  unsure (1)..(51): unsure at all Xaa locations
  Clone ID: PAT_MRT3847_8180C.1.pep
GHFTERRQQXQFNILLIDCNDNTFTLYYQSSKLIDHQFIHIPITFNHYLLR

SEQ ID NO: 265549 - protein, 96 aa, Glycine max
  Clone ID: PAT_MRT3847_81810C.1.pep
GGWVFSEGGRGGTGLSKPRPMGGGVFSGPKWGVFRFFSWGKKDKPLGSRGETSRFFGTGGNLFLDKGSIGPSKVRVMRPRGKRGLTPFRKGQKNRL

SEQ ID NO: 265550 - protein, 42 aa, Glycine max
  Clone ID: PAT_MRT3847_81811C.1.pep
KFFLPDMYFVFSFLSNHFRSKNLLLIQVSFSIMLYNVDFLSL

SEQ ID NO: 265551 - protein, 39 aa, Glycine max
  Clone ID: PAT_MRT3847_81812C.1.pep
ILKHVMLGKDLYGCNLSKQSMYPPQKLRVCVLKRQLLVI

SEQ ID NO: 265552 - protein, 54 aa, Glycine max
  Clone ID: PAT_MRT3847_81813C.1.pep
RIIMILLKIIYQSETTTKYNEKKVILCLNLFISFINKIKFDFNFKLYKKEMHVF

SEQ ID NO: 265553 - protein, 95 aa, Glycine max
  Clone ID: PAT_MRT3847_81814C.1.pep
MDNYQSDLSDIIRASGASYGTCSTGTPSSEAANPFSRGHLQFSSDPMIFSCVLEGFNSNFGDPFSNMRDPFLHELDLPPSAYFNITTSSSAEMSS

SEQ ID NO: 265554 - protein, 340 aa, Glycine max
  Clone ID: PAT_MRT3847_81815C.1.pep
NPLFFVGGSMSSSSSSNAYDVPWVEKYRPSKVADIVGNEDAVSRLQVIARDGNMPNLILSGPPGTGKTTSILALAHELLGGPNCKEAVLELNASDDRGIDVVRNKIKMFAQKKVTLTPGRHKIVILDEADSMTTGAQQALRRTMEIYSNTTRFALACNTSAKIIEPIQSRCAIVRFSRLSDQEILGRLMVVVQAEKVPYVPEGLEAIIFTADGDMRQALNNLQATYSGFQFVNQANVFKVCDQPHPLHVKNMVRNVIEGNFDEACSGLKQLYDLGYSPTDIITTLFRIIKNYDMAEYLKLEFMKETGFAHMRICDGVGSYLQLCGLLAKLSLVRETAKAV

SEQ ID NO: 265555 - protein, 451 aa, Glycine max
  Clone ID: PAT_MRT3847_81816C.1.pep
MKGTIVLHPAMGRGHLVPMVELGKFIYTHHHQNLPIKILLPSPPNSTTLQYIAAVSATTPSITFHHLSPSQHLLHVLQTLISQSSKPKAFILDFFNHSAADVTRTLKIPTYYYFPNSASCVALFLYTPTIHYNTKKGFSSYSDTLRRIPGLPPLSPEDMPTSLLDRRSFESFANMSIQMRKTDGIIVNTFEKLENKAFFALKNGICMSLETHKSHSSTPETRNPRVFCMGPLVSNGGGEHDNDDSGCMSWLDSQPSRTVVFLSFGSYGRFSKSQIREIALGLERSGQRFLWVMRNPYERSELILEELLPKGFLERTKERGMVMKNWAPQVKILSHDSVGGFVTHCGWNSVLEAVSWGVPMVSWPLYAEQRLNRVVMVEEMKVALALKENEDGFVRASELEERVRELMDSERGRGKEVRERVLSARYDAVAALSDGGSSRVELNDLVELWMQ

SEQ ID NO: 265556 - protein, 61 aa, Glycine max
  Clone ID: PAT_MRT3847_81817C.1.pep
GSSGSSLFRFCFVVLLLSLYLHELFLTQPGPRTTIRIMKKYQRRTKIFALKTYSVTDYEYN

SEQ ID NO: 265557 - protein, 112 aa, Glycine max
  Clone ID: PAT_MRT3847_81818C.1.pep
IGSFFYYKWRGWSSIHTSLLKTEGHTAEAPAAARRDWGEAVPPTTNKYLYLPMGVVLFNHLALIKLACNDAIILSRPSILVHRPFFEPKYGGKTVAYALVFLLCYNRLKHYD

SEQ ID NO: 265558 - protein, 66 aa, Glycine max
  Clone ID: PAT_MRT3847_81819C.1.pep
FSYSKFKSITFWLEARFTYIRTYAYVVVESVRKVEKPNIFYKSIHLGLDVSKSNFGHVIDVEKLKT

SEQ ID NO: 265559 - protein, 57 aa, Glycine max
  Clone ID: PAT_MRT3847_8181C.1.pep
SKSLSYNEWLLQNVINPHGRGELPYKCYPATRAPYHSRRIGMSPPIVLLPEGASPPP

SEQ ID NO: 265560 - protein, 61 aa, Glycine max
  unsure (1)..(61): unsure at all Xaa locations
  Clone ID: PAT_MRT3847_81820C.1.pep
MHAYVSSEFGSWWSWVRLGIAGXVGDYAFKAFXATLGXAXIYLXATXSVNVYXGFXXHNAQ

SEQ ID NO: 265561 - protein, 96 aa, Glycine max
  Clone ID: PAT_MRT3847_81821C.1.pep
EPPKLKFFYFFPQKIFGAPFFNQFNFYPKKINKKRGFFKKKLELRKTGGTPLNFIFWDPAFFTGGQIYPKGLGKKNFSQRERGPLGPLFFFRPQTE

SEQ ID NO: 265562 - protein, 185 aa, Glycine max
  unsure (1)..(185): unsure at all Xaa locations
  Clone ID: PAT_MRT3847_81822C.1.pep
SLNEEPVARYTLLFLFVLNSLSLFLYFNHKPSSSSQLKKPNTHTYLTPLSHQTHFSKPWPNLPSYLPWSQGPTTAPPRSCEAYFGNGFTRRRELLRPRAGAGWFRCRHSDTLRSSVCEGGRLRMVPERIAMAKGGEPLTAVMGRREGEELXRFQNGAFEVDGGEVIDRELLVDQKFLDEYVPRGG

SEQ ID NO: 265563 - protein, 71 aa, Glycine max
  unsure (1)..(71): unsure at all Xaa locations
  Clone ID: PAT_MRT3847_81823C.1.pep
GGIFLGGPQISXTGFGEKNFFLLADFIQGGGQIIFIAKNCVSARKFQNFFKFAPFFEFPLEKKVSNLRRKV

SEQ ID NO: 265564 - protein, 85 aa, Glycine max
  unsure (1)..(85): unsure at all Xaa locations
  Clone ID: PAT_MRT3847_81824C.1.pep
NVFSKYARTVPDKLTLGEVWDMTEGNRNAFDIFGWLAAKLEWGVLYILARDEEGFLSKEAVRRCFDGSLFDXCAKMHATSDAKMG

SEQ ID NO: 265565 - protein, 42 aa, Glycine max
  Clone ID: PAT_MRT3847_81825C.1.pep
QAYDFLSMQRIVSSNLNPLSARYIFTKNYPITLCSCNLLNPL

SEQ ID NO: 265566 - protein, 144 aa, Glycine max
  unsure (1)..(144): unsure at all Xaa locations
  Clone ID: PAT_MRT3847_81826C.1.pep
NSLTLTFFDLLWLRFPPDERLFFYCFPHPTSSFLHCLVPTLQHYMXLTLHHFLPFYGTLTWPSHSPKPIINYTPGDAVSFTVAESNQNFNNLTCRLCEASQRHRLIPHLTASHDKASVLALQVTVLPHAGFCIGITTHHAAFDG

SEQ ID NO: 265567 - protein, 388 aa, Glycine max
  unsure (1)..(388): unsure at all Xaa locations
  Clone ID: PAT_MRT3847_81827C.1.pep
SNNLATFREAIDEKTKLGPKRRKAIDEKAKKLLNAGFIREVQYTTWLANMMMVKNSNEKLRMRTNYTDLYKACPIDSYPLPSKDFLVDEASKFSILSFSYAYFEYNNNTYVLXDEEKIAFMTDTTYYCYSIMPFGLKNVMDKIFVHQLGRNLEVYVNDMVVKKTNTTYHAEELVEIFAEIRKPNIRLKPKKCVFRVLGRKFLGFILTHKKIKANPKKCVAIIEMRCPNTLKEVQRHIGXLAALSRFLSSATDTTIPFFKLLKNQEGTERNGKCEXSFKSSKEFLASPPILTRPXTREGIDLYLVVSEQAISSIIMVEEGKNQTPIYYVNPIIMDGKTXYHMVEKLVLVLVTSSRXLRLCFQSHQIVVQTDHPMVLKKPKHVSNDSLVD

SEQ ID NO: 265568 - protein, 78 aa, Glycine max
  Clone ID: PAT_MRT3847_81828C.1.pep
PSDLHNQIVLALRELDKIGEMKETKNKFCFKKLQTLEFNREKNSPLVLKQELQVRNRIIKLPTNSTSELKETPKLQQH

SEQ ID NO: 265569 - protein, 29 aa, Glycine max
  Clone ID: PAT_MRT3847_81829C.1.pep
IPHEIFTNSQVQTINETQLYFVKPVVQNE

SEQ ID NO: 265570 - protein, 83 aa, Glycine max
  unsure (1)..(83): unsure at all Xaa locations
  Clone ID: PAT_MRT3847_8182C.1.pep
QTKPSSXIEISSVLAAGPALVPILCLVAXVYYLXVIYSARNQIXCXVRXRXFADGXFRLXXVQTXXTNXXRXLXXXGXXXXXX

SEQ ID NO: 265571 - protein, 53 aa, Glycine max
  Clone ID: PAT_MRT3847_81830C.1.pep
PQMMGQLFCLSYSIFLAVPCVMARAYANTILLPLFCIGNQACKVRNDFWAATS

SEQ ID NO: 265572 - protein, 88 aa, Glycine max
  Clone ID: PAT_MRT3847_81831C.1.pep
GANRPTPFFLSPPWGARPFLLKTKIVILKNAHLGRKRAFQEVDQFESGGIRPLRDQGVYLDSSLHEWQHCNCQIDLEQTSKGYGQLFF

SEQ ID NO: 265573 - protein, 55 aa, Glycine max
  Clone ID: PAT_MRT3847_81832C.1.pep
WFNSATIFIHNRVVRFLSQIINNTLKNKLIHFSEWIEREEKVVFILSNTITLMGW

SEQ ID NO: 265574 - protein, 61 aa, Glycine max
  Clone ID: PAT_MRT3847_81833C.1.pep
MANAASGMAVHDDCKLRFQELKAKRVYRFITFKIEQQQVVVDKIGESTESYDDFQASLPAD

SEQ ID NO: 265575 - protein, 66 aa, Glycine max
  Clone ID: PAT_MRT3847_81834C.1.pep
NVVKLYQTAKTKVINSCLNPVWNEELNFTLTEPLGVLNLVSSMIFSMPLHSCFLQSWLILSLTQVS

SEQ ID NO: 265576 - protein, 337 aa, Glycine max
  unsure (1)..(337): unsure at all Xaa locations
  Clone ID: PAT_MRT3847_81835C.1.pep
SMLIKEAIHVISCGYEEKTLWGKEIGWIYGSVTEDILSGFKMQCRGWKSIYCMPLRPAFKGSAPINLSDRLHQVLRWALGSIEIFLSRHCPLWYGFSGGRLKWLQRMAYINTIVYPFTSLPLVAYCSLPAICLLTGKFIIPTLSNVASVLFLGLFLSIIITSVLELRWSGVSIEDLWRNEQFWVIGGVSAHLFAVFQGLLKMLAXVDTNFTVTAKAAEDSEFGELYLVKWTTLLIPPTTLIVVNMVGVVAGFSDALNGGYESWGPLFGKVFFAFWVIFHLYPFLKGLMGRQNRTPTIVILWSVLLASVFSLIWVKINPFVNTVDSETIAETCIAIDC

SEQ ID NO: 265577 - protein, 102 aa, Glycine max
  Clone ID: PAT_MRT3847_81836C.1.pep
ERDRSRYQLPHYSDIPPTPVCVVVCEELATKRSVGTFNEGDLKGKRVFVRVDVMLPLDDCRNIVQDSVVRAAVVTIEYLTGHGARVILFEPMGPPIGVIASD

SEQ ID NO: 265578 - protein, 293 aa, Glycine max
  unsure (1)..(293): unsure at all Xaa locations
  Clone ID: PAT_MRT3847_81837C.1.pep
LRQLIWLAMNNSVPDWNFGSDSCVTTTNQKKPMIGVDQELVELQWQNGQVVMHSQTHRKPVVNSSTPSPLRGTVPSTLCPREPPGDPGFWSHLVAALAPCEVESYKQIKPFEEGKFTKLDASSAPHVTVSSQSPTMKSSSFQDFSGIPIPAPRFHVSDSPQKNNNHLGGSCKVQNFSHFSAPLNVSSASANVHFGDKITGNMSRNEIRECSLMTVGSSYCGSNHIPQDPDASRASSNGVWTTTLSVEPEAVRDDVPKTIPQKEKGKSEMLEPAVTSSSGGSXSSLGKTCSLST

SEQ ID NO: 265579 - protein, 63 aa, Glycine max
  Clone ID: PAT_MRT3847_81838C.1.pep
ITTLLCLVIFSIQTLINVKHHVASVVFFTLLFIMMMIKRNSRSGVIFINLRTNAALRHRILLL

SEQ ID NO: 265580 - protein, 59 aa, Glycine max
  Clone ID: PAT_MRT3847_81839C.1.pep
RSKWSYLKNTCAFKHTCASVIISGDNRVTENTIFTCRELDILGVYYTIATQFRIWPPYY

SEQ ID NO: 265581 - protein, 335 aa, Glycine max
  Clone ID: PAT_MRT3847_8183C.1.pep
MCTLSLPCLSYSLHTHTYQSGRFSPPCSFIFTPHRRSHSHFLTPCSSLRQRERESKKQLGKINTAPSESGLKRLFSPNNNKTEVEGDADADADADLDFQDGTALKGTLLAGLLLLGVVGGFASVGYIYKDQVNSFLNHLSVFIEGYGPAGYALFVAVYAGLEILAIPAIPLTMSAGLLFGSVVGTIIVSISGTVAASVAFLIARYFARERIVKLVEGNKKFVAIDKAIGENGFRVVTLLRLSPLLPFSLGNYLYGLTSVKFIPYVLGSWLGMLPGTWAYVSAGAFGRAIIQDESELSNIFGGNSQLLTLGLGLLATALAAAYVTRLAKDAIKDIE

SEQ ID NO: 265582 - protein, 39 aa, Glycine max
  unsure (1)..(39): unsure at all Xaa locations
  Clone ID: PAT_MRT3847_81840C.1.pep
IRKDRGKQWWVKHGSFKIDTKSKEFYXRPFNISKYFSFV

SEQ ID NO: 265583 - protein, 676 aa, Glycine max
  Clone ID: PAT_MRT3847_81841C.1.pep
MPPSNFPLRWESTGDRWWYASPIDYAAANGLYDLVTELLHLDTNLLIKLTSLRRIRRLEAVWDDESKFEDVARCRSKVARNLMIECETGRGHKHNSLILAGYGGWLLYTAASAGDVDFVLELLGRDPLLVFGEGEYGVTDMFYAAARGKNCEVFKLLLHSALSRKECLGGSEAELEEKLDEGSKVFKRDVMNRAIHAAARGGNWEILKQILASVSVSQVLSYRDSQGCTVLHAAAARGQVEVVRNLIESYDIINSANAQGNTALHVASYRGYLPVVEILIGASHSLATLTNHYGDTFLHMAVVGFRSPGFCRLDKHTELMKQLTSEKIVKMKDIINVRNNDGRTALHVAVVHNIQFDVVELLMSVPSIDLNICDADGMTPLDHLRQKSRSVSSEILIKQLISAGGISNYQDYVTRNALVKHLRTHGIGGSPGTSFRIPDSEILLYTGIENSCDDNYDQASVESNSWSSEINNYDTANSPCNSKSSSVNYGARHLKFLLQSSRRRDTKEAASDLEDDVSVNSFGSRNNLEDFPIPLRQRYSKMCSLPNNKRTLSIRTYLPSPSAKKHFHAGLVQGVIKVKPQMPLPVHSTSNLFQELSISSHSSNNKQKRVDIMGPSCSNRPMDGDGTLQLSYKQGSFNKKLMNRYFSFGAHGQALEDANSCTMSNGSSKHFSSLVA

SEQ ID NO: 265584 - protein, 37 aa, Glycine max
  Clone ID: PAT_MRT3847_81842C.1.pep
IAYHNSFFNIYPVPEHRARDTLLMSFDRCISPIITHD

SEQ ID NO: 265585 - protein, 38 aa, Glycine max
  Clone ID: PAT_MRT3847_81843C.1.pep
ILHLDHINPLLITFKLVILIFLYCFHTIICVHFLDPLH

SEQ ID NO: 265586 - protein, 78 aa, Glycine max
  unsure (1)..(78): unsure at all Xaa locations
  Clone ID: PAT_MRT3847_81844C.1.pep
KKTLGGGPQPIAPNKQGNYRHNRAVIXQPRNRKNPGXTNLNHLEYHPLFPPNEKRKKPRTNRPSQKWRTLNAKGNRPF

SEQ ID NO: 265587 - protein, 110 aa, Glycine max
  Clone ID: PAT_MRT3847_81845C.1.pep
TRPHDSRRTPRRPDARSPACALSQAVMHRSPALDSRLELDDSQPEVLSTATAKSKTLAGGAELTRASGPARFVCCAACGHAKPAGGVTGVHSKNHAATSYNGLAKAQVER

SEQ ID NO: 265588 - protein, 63 aa, Glycine max
  Clone ID: PAT_MRT3847_81846C.1.pep
LEIQILRSVLMVTVEPCQIARISFNIHGTRVVHNLIDTIKTRQRILLVVAALEPRLLALIKDL

SEQ ID NO: 265589 - protein, 56 aa, Glycine max
  Clone ID: PAT_MRT3847_81847C.1.pep
ANMHFTRLRIHLADNSFTLIFSQGKRSRHKSILRCKVFTENLVEVSRFLYIFSDAW

SEQ ID NO: 265590 - protein, 151 aa, Glycine max
  Clone ID: PAT_MRT3847_81848C.1.pep
EGFYIYLNIHLLLFCSMVRHNLTSSVIQIDYLDKKKKKKKKKKKKKKKKKKKKKKKKPFPYSKSRQSNGCFFKKTKKTFSFQFRQGAHREKGGISRATTRGKSAETRRVSSVPTTKPRSGRASTRASTWKVTTRSSKTTLHNNPLPKPFSP

SEQ ID NO: 265591 - protein, 79 aa, Glycine max
  Clone ID: PAT_MRT3847_81849C.1.pep
VPPVVTPRAVAAPAFIPCASQTLLLVPLAVTTLSESVPLGALRVNVIGPFRVKKRSAVVKQIKPVVNMQKDSQSGCKLF

SEQ ID NO: 265592 - protein, 40 aa, Glycine max
  Clone ID: PAT_MRT3847_8184C.1.pep
LIFKLWGFLHADWLPNRHLDFLSHEEPSIMILKKKVDWRT

SEQ ID NO: 265593 - protein, 243 aa, Glycine max
  unsure (1)..(243): unsure at all Xaa locations
  Clone ID: PAT_MRT3847_81850C.1.pep
MENRGYYACNTKVGSAMDVDHCQEDQQKEEEEEQEEDPFLKFVDYARSELLSLEGDRNGDDDGSDGLGWSWIVSRILKTCVAYSSGVTPAILLSELSQAWSEQRRVGAPKKPLELISHLKKNYRRTKLPNTVTIDSIYEKNFLSLNSVLEAVIIDAFVLPGTNIHMLTLGDYWSSNIIDVYLHRRFYDLTGLQNGILKRGREIFLTGCYLRTPTGGSGHSRLLPXEYLVILLDERNQDDDAML

SEQ ID NO: 265594 - protein, 356 aa, Glycine max
  unsure (1)..(356): unsure at all Xaa locations
  Clone ID: PAT_MRT3847_81851C.1.pep
HASDLQKEVARLESELKTPGPATSNCDYAALLRKKDLQIEKMEKEIRELTKQRDLAQSRVEDLLRMVGKDQISGKVVSIFINNHLNLQEGEDIWEDDCSVSESSSICGPHRPNTHIREFNNPHYNDGDSDPDAFACTEDPDDYCKEVRCVENGELALPISGDESGISQEISSHLNEDTGDSQIQENSTLLEQRLALQRTPANGYEKGFPGRPDGLQRKFPPLNYDGSTRLLRNGSQSSMGSLSVDDLRASSIRTSADEDITSIQTFVAGMKEMVKQEYEKQLVDGQDQETGRKNVKDVGVDPMLEAPGGTPLDWSLQFKRHXKEIIELWQSCCVPLTHRTYFFLLFRGDPSDSIYM

SEQ ID NO: 265595 - protein, 143 aa, Glycine max
  Clone ID: PAT_MRT3847_81852C.1.pep
NFFFGAPKFNSRARVLKRGGGENPGGPPIKSLGKKPPFPQGGKKKKGPPDPPFQKLAPPKGKRDPPLYRPLNRGGGGVSPKGARYFGRALSPRSFRFFPFFFPPVAGFPPEGLKWGPPFGVPIKGLRDPYPKKIFLGGGSPWG

SEQ ID NO: 265596 - protein, 125 aa, Glycine max
  Clone ID: PAT_MRT3847_81853C.1.pep
LACTGPYLYRDTVLLQKVCRVLRGYYLSALELVSHGNGVLNPQLQVPGNPHLHLKEARLRVEDALGACLLPSLQLIPANPAVGQEIWELLSLLPYEVRYRLYGEWEKDDERIPMLLSARQTAKVD

SEQ ID NO: 265597 - protein, 62 aa, Glycine max
  Clone ID: PAT_MRT3847_81854C.1.pep
PRDPLGPAAPDLTVVSLPTVYERAIGRNYANTGLLPMATLESLTHMPCLSRRLVSHPSFSVS

SEQ ID NO: 265598 - protein, 110 aa, Glycine max
  unsure (1)..(110): unsure at all Xaa locations
  Clone ID: PAT_MRT3847_81855C.1.pep
MAFTFLHTSDRVNEGHPXDMLCDQFSDAGLDSCXLTYLTTMALPWSSCTRTNLXVMVEDFYSSNAAVDYFRIFRDSLLNITFVSHVMQLKAYPCKALFNMEQQSPGTAQG

SEQ ID NO: 265599 - protein, 92 aa, Glycine max
  Clone ID: PAT_MRT3847_81856C.1.pep
HAGWQKWVKGFGKLLKRKGKSLFMPLRLLLTGKIHGPDMGASVVLLYKAGTSNAVAPDAGFVTLDERFKILGQINWETLSKDQTVKETADPV

SEQ ID NO: 265600 - protein, 53 aa, Glycine max
  Clone ID: PAT_MRT3847_81857C.1.pep
KLLHQFLSDNWLAVMLLIVVLMSRFIWIGSVISHLRHPIYHHSFTIITEKKCN

SEQ ID NO: 265601 - protein, 164 aa, Glycine max
  unsure (1)..(164): unsure at all Xaa locations
  Clone ID: PAT_MRT3847_81858C.1.pep
MQQSNGSDSTTTMEQSAPPPPRQSPAVARPQQWVPMQYPAAAAMVMPHHMLPPQHYAPPPYVPYHHQYAAQPQHQHQNGSGGENKTIWIGDLHHWMDENYLHRCFASTGEISSIKVIRNKQTCPSEGYGFVEFYSHATAEKVLQNMLXLMPNAEQPFRLNLGTF

SEQ ID NO: 265602 - protein, 79 aa, Glycine max
  Clone ID: PAT_MRT3847_81859C.1.pep
MEEGYPRSKFKTVCVFCGSNRGIRQVFSDAAIQLGNELVKRNIDLVYGGGRVVLMCLISQRVDDGGCHFTWTIPKIFKP

SEQ ID NO: 265603 - protein, 65 aa, Glycine max
  Clone ID: PAT_MRT3847_8185C.1.pep
EAVVNLAEGFNEADLRNVCTEAGMAAIRAERDYVIHEDFMKAVRKLNDAKKLESSAHYSADFGKD

SEQ ID NO: 265604 - protein, 81 aa, Glycine max
  Clone ID: PAT_MRT3847_81860C.1.pep
NCNFSHKNADFFFGQIYSVFSKDRAVLCCFFESHESTLLGLKHKRRAQPKRLVYFWHHLKLLSRNPTSFTFHFVHIFFRNH

SEQ ID NO: 265605 - protein, 388 aa, Glycine max
  Clone ID: PAT_MRT3847_81861C.1.pep
MGKREKQKQRHEKGHRGRGSFNYLQEDHDFDDTPRPSPSEEECADDSNEEKEEEEEEEGHENQSHDMPSKFLLYQQSVQSPKGDISYLQKFFLMYVGGRMPLHLQEDFCGTALLSTEWLRSDSRRTVVGLDLDLEALNWCMENNIPKVGADGFSRMSLFHGNVLQPLQSKLVKIDPQQLVSNISLSQNEENLQTDVPESDAPTGSVAQDDKYTKRNIILPGRDIVCAFNYSCCCLHKRAELVLYFKHAREALSTKGGIFVMDLYGGTSSEHKLRLQRRFPNFTYVWEQAEFDIIQRKTRISLHFHMKKEQRKLRHAFSYSWRLWTLPEIRDCLEEAGFRSVHFWVREMPDTTEIMRTEGFGAGKNVKYEEATSFQQQDSWNAYIVGVA

SEQ ID NO: 265606 - protein, 183 aa, Glycine max
  Clone ID: PAT_MRT3847_81862C.1.pep
MGFIKIVKNKAYFKRYQVQFRRRRECKTDYYARKRLIIQDKNKYKTPKYRLVVRVTNRDIITQIVAADINHDVVLASAYAHELPRYGIKLGLTNYAAAYATGLLLARRVNDKFKLKYEGNTEVNGEDYNVEADEEGAKPFKALLDVGLARTTSGARVFGALKGATDGGLDVPHNDHRFPGSKR

SEQ ID NO: 265607 - protein, 49 aa, Glycine max
  Clone ID: PAT_MRT3847_81863C.1.pep
FNATHSHAPVWATSHHVLKTPRSLVSVAGNQALSGLALAYVRLAEIILQ

SEQ ID NO: 265608 - protein, 116 aa, Glycine max
  Clone ID: PAT_MRT3847_81864C.1.pep
LFFFSSSLLFPIASPSLAFYFFWKISTSIFPEKKKKEENAERRIIVLSQFGFCTCIKSKYHCQLLVDYVSCMLNLKNCFCTRKVVFLYTIYLTWYWLPYQKRQKEGKLYKIEGFVE

SEQ ID NO: 265609 - protein, 40 aa, Glycine max
  Clone ID: PAT_MRT3847_81865C.1.pep
KSCSHLFIYEMCLIILNYFYRSCLMSPPIGVTRSKFPFYG

SEQ ID NO: 265610 - protein, 115 aa, Glycine max
  Clone ID: PAT_MRT3847_81866C.1.pep
MSEQVSLKLMENKESDNVIFAEAGQDFVGVATMPGQVSLKLVVNKETNKVVFAEAGKDFVDVLLSFLTFPLGTIARLVQKDSDVGPVQVGCLSSLYESVANLEKECLWTEACKEM

SEQ ID NO: 265611 - protein, 120 aa, Glycine max
  Clone ID: PAT_MRT3847_81867C.1.pep
TYVMMRKRDRKRKRKIIVNLNGLHPPWKNRSQVHTQIQIRYRCRLKLWQIAFARCIRLPFHYPRQHAFFLKKRVLSQPNYRTGGTRHAQGAKRAFAPLSRHRQHLQGVGAGLHWRWVPHR

SEQ ID NO: 265612 - protein, 54 aa, Glycine max
  Clone ID: PAT_MRT3847_81868C.1.pep
EAHISEKKKPVFPMPHFKGRFVSIKICGFTTPFSLACPCGKQQNKRLAQCTKSG

SEQ ID NO: 265613 - protein, 61 aa, Glycine max
  unsure (1)..(61): unsure at all Xaa locations
  Clone ID: PAT_MRT3847_81869C.1.pep
ARGTXIYIFTNCYKSKXKRHTVVLQILEDEPQPIMAYTRYYHYLDHPCLLTTNEQEADQAL

SEQ ID NO: 265614 - protein, 86 aa, Glycine max
  Clone ID: PAT_MRT3847_8186C.1.pep
HSSACCFPSTSHILEHLTLFMAPSTEQNPSLSIQKLHCRASFPCQTLQLSSLSPFRTTQCLLTATLLLGTPHYPPHSLPDCTTSTW

SEQ ID NO: 265615 - protein, 153 aa, Glycine max
  Clone ID: PAT_MRT3847_81870C.1.pep
WNTRIKRMQRAGLPIYPEELCQRILNCNQESQNISILSNEASQHGDLSQTDFDIPDVEFKIFKFRHGLSHGQSIFDMPESSLFDQSSDSSHSYNLFPTMRPTKRPRESEMLYDSFESCTINAAPLFDQYDNYTSEKISDHWVSLSMDPVLNTH

SEQ ID NO: 265616 - protein, 455 aa, Glycine max
  Clone ID: PAT_MRT3847_81871C.1.pep
MSEESERDTNPAAAPPCPTVSQRDQWMVESQVFQIYQLFATIPGSAQNLMSELQRDNHMQYLSKGLRHLSSAFSVLDANRPWLCYWIFHSIALLGESVDDELEDNTIDFLNRCQDPNGGYAGGPGQMPHIATTYAAVNSLITLGGEKSLASINRDKLYGFLRRMKQPNGGFRMHDEGEIDVRACYTAISVASVLNILDDELIQNVGDYIISCQTYEGGIAGEPGSEAHGGYTFCGLATMILIGEVNHLDLPRLVDWVVFRQGKECGFQGRTNKLVDGCYSFWQGGAVALLQRLSSIINKQMEETSQIFAVSYVSEAKESLDGTSSHATCRGEHEGTSESSSSDFKNIAYKFINEWRAQEPLFHSIALQQYILLCAQEQEGGLRDKPGKRRDHYHTCYCLSGLSLCQYSWSKHPDSPPLPNLVLGPYSNLLEPIHPLFNVVLGRYREAHEFFFTES

SEQ ID NO: 265617 - protein, 53 aa, Glycine max
  Clone ID: PAT_MRT3847_81872C.1.pep
VEQIMAPPGVFCRLWSSGNYCDYYILQQQQRPCLSLAGRAGSLLADPTKRNGL

SEQ ID NO: 265618 - protein, 53 aa, Glycine max
  unsure (1)..(53): unsure at all Xaa locations
  Clone ID: PAT_MRT3847_81873C.1.pep
SSRDRPLLLFFFPHFXXQNXXXHRGENLRQISLKIQTTPFYYSXFTHIKLTYN

SEQ ID NO: 265619 - protein, 69 aa, Glycine max
  unsure (1)..(69): unsure at all Xaa locations
  Clone ID: PAT_MRT3847_81874C.1.pep
ACSKKGIFISQRKYAIDLLRETSKLGRKTYGELIKQNHWIGMGELKXGXYQRLXGKLIYLAHTRPDIVF

SEQ ID NO: 265620 - protein, 57 aa, Glycine max
  Clone ID: PAT_MRT3847_81875C.1.pep
VSFNSCLLLRGQRVKGTNTTLCAGHIMRGSFAIALENYLAAHSSHQKWDTMLQKNCF

SEQ ID NO: 265621 - protein, 56 aa, Glycine max
  Clone ID: PAT_MRT3847_81876C.1.pep
IYGTFYHTLQLLPLNFPHGVKVNMLNQPFFGPNCLGLCKFPPNEIQFQEKFAVQMA

SEQ ID NO: 265622 - protein, 110 aa, Glycine max
  Clone ID: PAT_MRT3847_81877C.1.pep
TVAKRRQKGTAARRRQKGTAARRRQKGTVARRRQKGTAARRRQKGTAARRRQKGAEAEAHQSHLIYRSSSPLHFPTTHSFLFFLHSALWEEFVTWLLYLLRSLVMQMQHM

SEQ ID NO: 265623 - protein, 101 aa, Glycine max
  Clone ID: PAT_MRT3847_81878C.1.pep
LQNTTLSQNNANVITSARRLLTRILLPTPCHCKPIVSYPADSSSRHLKIPFCPYSSIPHKPLERKRKVRLGISFSTETASQVGNSASVEGFLSVWVFNGEK

SEQ ID NO: 265624 - protein, 110 aa, Glycine max
  Clone ID: PAT_MRT3847_81879C.1.pep
ALLPYRLRTKITSTKDLSTSTLVYLNAITNSTTTLTTTSTTTTNTHTDYNIVNHKLIANFKTSASTLIYTLTINKRIDDTSNMHCNSPILQLVISDLHPNTELYTSTLNS

SEQ ID NO: 265625 - protein, 65 aa, Glycine max
  unsure (1)..(65): unsure at all Xaa locations
  Clone ID: PAT_MRT3847_8187C.1.pep
MPIRNIAVGRPEEATHPDTLKAALADSSHLIFXFAGXGSGIATTAPDXGLAPCGLSSLHCHAFAL

SEQ ID NO: 265626 - protein, 50 aa, Glycine max
  Clone ID: PAT_MRT3847_81880C.1.pep
IFSSTQGLQDGFSRVTDIVREGFQRADKRFDDFDKHFEDLQYLYQQVSSQ

SEQ ID NO: 265627 - protein, 123 aa, Glycine max
  Clone ID: PAT_MRT3847_81881C.1.pep
EQASLDTQITSSNIGFKLLQKMGWKGKGLGKDEQGIIEPIKSGIRDPRLGIGKQEEDDFFTAEENIQRKKLDVELEETEEHVKKREVLAEREQKIQTEVQEIRKVFYCDLCNKQYKLAMEIEA

SEQ ID NO: 265628 - protein, 114 aa, Glycine max
  unsure (1)..(114): unsure at all Xaa locations
  Clone ID: PAT_MRT3847_81882C.1.pep
FKQMKEMHGSSSRXDRQKREQQRQEREMAKFAQIADAQKQQRLQLQQESGSATVPSESKTATALTDQEQRNTLKFGFSSKGSGSKITFGAKKQNVAKKQNVPISSIFSNDSDED

SEQ ID NO: 265629 - protein, 90 aa, Glycine max
  Clone ID: PAT_MRT3847_81883C.1.pep
VLSCDRLRNMNMDMAGSLPQSRVLHGGVGTSYKRRSVGQLGCFDFRGRDFGCASFGDSRSVSRLRRSGMNVSACWNNSRVVTGREFKVLN

SEQ ID NO: 265630 - protein, 163 aa, Glycine max
  unsure (1)..(163): unsure at all Xaa locations
  Clone ID: PAT_MRT3847_81884C.1.pep
MGLCLGIIEPIKSGIRDPRLGIGKQEEDDFFTAEENIQRKKLDVELEETEEHVKKREKAAYSIYACLLTGLVCHMESSTLEGLENFLQFLLPGGFFXCFVHIMKIQVLAEREQKIQTEVQEIRKVFYCDLCNKQYKLAMEFEAHLSSYDHNHRKRFIQMKEMH

SEQ ID NO: 265631 - protein, 311 aa, Glycine max
  Clone ID: PAT_MRT3847_81885C.1.pep
MEYRRTSGRQETGGRDRRQSKREQAYQDSLIEDLSQDFRLPINHRPTENVDLDNVEQASLDTQITSSNIGFKLLQKMGWKGKGLGKDEQGIIEPIKSGIRDPRLGIGKQEEDDFFTAEENIQRKKLDVELKETEEHVKKRENLAYRIYVLAEREQKIQTEVKEIRKVFYCDLCNKQYKLAMEFEAHLSSYDHNHRKRFKQMKEMHGGSSRDDRQKREQLRQEREMAKFAQIADAQKQQQLQLQQESGSATVPSESKTATALTDQEQRNTLKFGFSSKGSASKITFGAKKQNVAKKQNVPISSIFSNDSDEE

SEQ ID NO: 265632 - protein, 68 aa, Glycine max
  Clone ID: PAT_MRT3847_81886C.1.pep
MRIVNFILLIDGHEVVVNITSYKKMLCILMVRNDDFNFALSKKRILGAAYSYSIGKRCRSNSYSLNNT

SEQ ID NO: 265633 - protein, 57 aa, Glycine max
  Clone ID: PAT_MRT3847_81887C.1.pep
RLNKEIPNFSYTIKAYQSYPNCIFHTTLKLEHCHIIIWYGETFPILSFGESALMMGT

SEQ ID NO: 265634 - protein, 375 aa, Glycine max
  Clone ID: PAT_MRT3847_81888C.1.pep
MVTDSKPIIPRRGLVVGNYCHDVLHRDGETVAETLGGAASFISVILDALSLPFHTVSKVGPNFAYTADTSNHPPLIIPTSQTTLFHAHFGSGHPDRLLNRVRSCDSIQPTDLPDQQPRFGFGLAVGVGGEILPETVEKMLSICDHVFVDIQALIRRFDNINGRVSHVALRESGFFHLLPRVAFLKASADEAVFIDVEEVRKWCCVVVTHGKDGCEVFCENGAFKVAPFEADQVDPTGAGDCFLGGFAAGIVRGLAVPDAALLGNFFGSIAVAQVGPPKLDFNLIQMVKDEMHKRKLQDIPFLERRDESPGFQKPPEQDQFYASLVTAKAIITCQIQESGRNLLSSPKVFEQNNAKTRLSLASVHEEPIPSVDGKP

SEQ ID NO: 265635 - protein, 145 aa, Glycine max
  Clone ID: PAT_MRT3847_81889C.1.pep
LLKVAKIKPVTNQIEVHPYLNQSKLISYCKERDVLVTAYSPFASPDRPWAKPTDPSLLDDPIIISIADKHKKSNAHVILRYLIQRGTVPIPKSVTPSRIQTNFQVFDFELTAEEIKTIDGLDCNGRICPFNEATDHKDWPFNIDF

SEQ ID NO: 265636 - protein, 52 aa, Glycine max
  Clone ID: PAT_MRT3847_81890C.1.pep
HFMPYCLRYFFRFSFFFIILTLLLFMLSLHDLTFVSFIFSICFYRLWVGFLF

SEQ ID NO: 265637 - protein, 82 aa, Glycine max
  Clone ID: PAT_MRT3847_81891C.1.pep
ARPSRSVRFHSLSCLMLPFVKEQETSPRSVLRFDGGNDCPVGCTDTRRLVRNHRRLHRGNGLLVLVTVVVVCDVQTYSCDHS

SEQ ID NO: 265638 - protein, 116 aa, Glycine max
  unsure (1)..(116): unsure at all Xaa locations
  Clone ID: PAT_MRT3847_81892C.1.pep
ELFSSNVFAQTLSVAKVVFVFEKAFVPPRLGSSPSIGKLWMVTGVSGPPGFKXPPLGGGRGISSIYVKKNPVVLGNNNIPGGKKLLKTLQGSAPVYANAFLTAAEAVKTPMCPLLF

SEQ ID NO: 265639 - protein, 52 aa, Glycine max
  Clone ID: PAT_MRT3847_81893C.1.pep
GSNVNDNLTATFYSLKPVWDWDWEFWIQFEMEKAFLQGFALNNNKPFNILKD

SEQ ID NO: 265640 - protein, 216 aa, Glycine max
  Clone ID: PAT_MRT3847_81894C.1.pep
MLARSSLCTCHMVFSVDRITPTFVSVFSAKARVLAFRFQLRRNTDLVTAQLSNSFAFNFGLDSQSLNSIESHAAPQLPWTGPVPGDIAEVEAYCRIFRNSERLHSALMHALCNPLTGECSVSYEVPYDEKPLLEDKIVSVLGCIVALVNGGRQYVLSGRSSIGTPFCSAEVSVMEDTLPPLALFRSEMKKCCESLHVALENYFIPGNGSSLDVWRK

SEQ ID NO: 265641 - protein, 101 aa, Glycine max
  Clone ID: PAT_MRT3847_81895C.1.pep
MSSNPNDPRQPSAARPYVAPQISPQDLPIDYAGFIAVIFGVAGVMFRYKLSSWLALIFCAQSVANMRNVENDLKQVMMAMMFSLMGLITNYFGPPRPGKQS

SEQ ID NO: 265642 - protein, 114 aa, Glycine max
  unsure (1)..(114): unsure at all Xaa locations
  Clone ID: PAT_MRT3847_81896C.1.pep
MNSSVHWEGDLVSMGNAVNTYKQTERERISRSRRTTPPGVPYGGHTIXTNAGNWSIGGDLHVIETMEXNAGRDHIEMCATELHAXFTRRTADAAVGFQLRNPVHNGHAMLMTDT

SEQ ID NO: 265643 - protein, 80 aa, Glycine max
  Clone ID: PAT_MRT3847_81897C.1.pep
RLREDDRRVLTSKSISTTSHTSICISVRFMFTHPIEQNNLIHTTSSQISSVDSIQGFKLQLQSQSWLPKFQANVADTAQN

SEQ ID NO: 265644 - protein, 77 aa, Glycine max
  Clone ID: PAT_MRT3847_81898C.1.pep
APQRRSQRHARGQMPEGNAVGVRSLLDHGRDAGYAELARWLQSTGLLHLDYPLDTTVIYRRLLPNLSMHGYGAQTTD

SEQ ID NO: 265645 - protein, 42 aa, Glycine max
  unsure (1)..(42): unsure at all Xaa locations
  Clone ID: PAT_MRT3847_81899C.1.pep
SSLXLLSLAKKHSIKIFAWCRIYLHVHNIWIVLLYYFWHHKI

SEQ ID NO: 265646 - protein, 442 aa, Glycine max
  unsure (1)..(442): unsure at all Xaa locations
  Clone ID: PAT_MRT3847_8189C.1.pep
MVVFSVKPFFRILVVSLSLLFLLALQLPSSLFSQVHIYGEPSLGEVDIWSVRRLMEWRPCNWWLQGRQTALPLETYGYIRVDCYGGLNQMRRDFCDGVGIARLLNATLVLPKFEVASYWNETSGFADVYDVDYFIQHMNGFVKVVKELPPEIASRDPVRVVCRNRSGPCLFHGSVPPPFLKTQXTQLLPAIPKPFLYLHLRAKAALCQACHKALRVXLTRSLEMKASQLLDAIPKPFLSLHLRFEPDMVAYSQCEYPDLSPASMKAIEAAQVDRKPWTGELARVWRLRGKCPLTPNETALILQSLSIPLTTNIYLAAGDGLMEIEGLTDTYTNIVTKSSILSREDFTSMHGNTKAALDYYVSINSDSYIATYFGNMDKMVAAMRAFNGLYKTLFLSRRGFAQLTSQGLRGKKLMQALWKLHRDDFANGRGSALSECFCEFKL

SEQ ID NO: 265647 - protein, 52 aa, Glycine max
  Clone ID: PAT_MRT3847_818C.1.pep
VSDFYYFLLAPDDTRRPQLNFGFKFLTTKIMFLLERRVLKESFGELILCLEV

SEQ ID NO: 265648 - protein, 420 aa, Glycine max
  Clone ID: PAT_MRT3847_81900C.1.pep
MDGTFDDEAEPAVTIREYLEEVEERELEADLVLGGDDGKECTYSKGYMKRQAIFSCLTCTPDGNAGVCTACSLSCHDGHQIVELWTKRNFRCDCGNSKFGEFYCKIFPNKDVENVENSYNHNFKGSYCSCGRPYPDLDAEEQVEMIQCCLCEDWFHEEHLGLESSAEIPKDDEGEPMYEEFICKACSEVCFFLKLYPEEIWAAGKQPDATVQISKDKGVLEDILSTCRSEKPTCDTSCCSPKVDDVQATVDSKSISDGKSLSQGENCNGSMASNQCTKSTDLHVNCLLGVNIITVSPVLPGKPMFLSKNWRDALCKCNNCLEFYKQKQIAFLLDKEDSIAEYEQMAKQKREEKLQQQEGAELSFFNKLGHVEKVEILKGIEEMKDGLRAFLESADSSKPITAADVHQFFDDIKNKRRRVQ

SEQ ID NO: 265649 - protein, 158 aa, Glycine max
  unsure (1)..(158): unsure at all Xaa locations
  Clone ID: PAT_MRT3847_81901C.1.pep
MMRARFPLLLLGLVSLASVSVSFVIAYCEKENPKHIKCLQSCNIETHSYRNQACHALCNLLTVXTEDCEQGEITRPXPRPQHPEREPQQPSEKDEDDYEQPRAIQFSRPQPRHEEDHEQRXEQDWPPTEEKRAXKASEYDDXDEDEEQDERQFPFSHS

SEQ ID NO: 265650 - protein, 58 aa, Glycine max
  Clone ID: PAT_MRT3847_81902C.1.pep
VSEQTSVISLHFDLMLRLLYNCIIVSSSPHRQTLFRGGGAKPCWQQYLCAMSSLADAN

SEQ ID NO: 265651 - protein, 50 aa, Glycine max
  Clone ID: PAT_MRT3847_81903C.1.pep
CVAAWYVLPAESSKTLVVVLSIKCTPGPQTCLLCMASMVSALYAGILVLE

SEQ ID NO: 265652 - protein, 67 aa, Glycine max
  unsure (1)..(67): unsure at all Xaa locations
  Clone ID: PAT_MRT3847_81904C.1.pep
VXXXXXXXNHXXXNXRHSXMHPXKLXNXHHPCSIPEPSCFXXXLXXRMTXXXKXQXMDSXNYIXTTG

SEQ ID NO: 265653 - protein, 146 aa, Glycine max
  Clone ID: PAT_MRT3847_81905C.1.pep
HASGPVAVAVAAYNVQRYCFQDKIELREGSWFEPLKDMEGKLAGLVSNPPYIPSKDISGLQAEVGRHEPRVALDGGTDGMDALLHLCDGAALMLKPAGFFAFETNGEQQCRALVDYMENYRNGSFCNLEIRSDVAGILRFVIGFHQ

SEQ ID NO: 265654 - protein, 122 aa, Glycine max
  Clone ID: PAT_MRT3847_81906C.1.pep
FLLFFFFFFFLFFFFLLIRRGFFIFFLSCRCYFCGFLLFLPGGKTLFGPPRPTSLRSVCEPIEGSHRRTKIPSCCYLPGGAEQYCPTLSCKSYSGGSTPGGNDQVPPLNIDGPPQPAHPLYQ

SEQ ID NO: 265655 - protein, 462 aa, Glycine max
  Clone ID: PAT_MRT3847_81907C.1.pep
MEGLGMLKQLIGQLQQLLDTYQSQSHSSSTLILQPPHTLIFQQQHPRWTTSLDIEDNSVDDFCGLVMTAGKSGSFRMSEPGKPPPTKKSRRDRSRGKSSGRSCTTEVMEQEIWKDFPEDLFEAVIARLPISTFFRFRSVCRQWNSMLNSQSFSQHCTQVTQENPWFYTITHENVNSGAMYDPSLKKWHHPTISTPPTKLIVLPVASSGGLVCFLDIGHRNFFVCNPLTQSFKELPARSVKVWSRVAVGMMANGNFAGSGYKIVWVGCDGEYEVYDSVRNSWSRPGNMPAGMKLPLSLNFRSQAVSIGSTLYFMRSDPDGIVSYDMATGVWKQYIIPAPLHLTDHTLAECDGQIMLVGLLTKNAATCVCIWELQKMTLLWKEVDRMPNIWCLDFYGKHVRMTCLGNKGLLMLSLRSKQMNRLVTYNIAKKEWLKVPGCVVPRGRKRQWIACGTAFHPCLTAVA

SEQ ID NO: 265656 - protein, 52 aa, Glycine max
  unsure (1)..(52): unsure at all Xaa locations
  Clone ID: PAT_MRT3847_81908C.1.pep
XRXXCXVVXXQPQXXQASRXQEQMQXFIQXXDYXLXRSCLPKXWPDXXRREX

SEQ ID NO: 265657 - protein, 178 aa, Glycine max
  Clone ID: PAT_MRT3847_81909C.1.pep
VYFTIPLLQSITIQCLEALQFLHSLGLIHCDLKPENILVKSYSRCEVKVIDLGSSCFETDHLCSYVQSRSYRAPEVILGLPYDKKIDIWSLGCILAELCTGNVLFQNDSPATLLARVIGIIDPIDQSMLAKGRDTYKYFTKNHMLYERNQAFTSSKLETLHHHLCHFAQLKELEIEEC

SEQ ID NO: 265658 - protein, 35 aa, Glycine max
  Clone ID: PAT_MRT3847_8190C.1.pep
SKPFLCRHISGAQNQMKNQVANQMEIFFGWGKKSL

SEQ ID NO: 265659 - protein, 438 aa, Glycine max
  Clone ID: PAT_MRT3847_81910C.1.pep
EFGKLEEECRLEKSSSKNSEDSNSINSKHEQSVKPNSQALATIDLEDSNRFDTLWEHQDLIEQLKMELKKVRATGLPTILEDSESPRIMEDLKPWKIDEKLQHGSTTNELPKFYRSYRERMRKFDILNYQKMYALGVLQSKDPLQSFSTHKNPSPAFTSILPRGFCLSRRKNTEADPMRKFIRDLYSDLEMVYVGQLCLSWEFLQWEYEKALKLWESDQYGLLRFNEVAGEFQQFHVLLQRFIENEPFLQGPRVENYARNRCAMRNLLQVPVIREDNAKDRRKFRKREADKDAITSDMLVEILEESIRTIWRFIRADKDASSLALKGQRENQVELQDPSDSQLLVEIRMDLQKKEKRLRELLRSGNCILKKFQKHYHEDGADQVLYFFSQVDMRLVWRVLNMSRITTDQLAWCRSKLNKINFVNRRIHVEPSFLLFPS

SEQ ID NO: 265660 - protein, 63 aa, Glycine max
  Clone ID: PAT_MRT3847_81911C.1.pep
IKVLSGRVRCYRHEINASSLPKPCCIRMGCIFIFLIKPWELVSCYPPVGLVVPFHMVKQSTLF

SEQ ID NO: 265661 - protein, 181 aa, Glycine max
  Clone ID: PAT_MRT3847_81912C.1.pep
CHMLSEEAQRGVRNLRADFERGGIHLCPEKLDRVNKLNIEISQLCREYNENIVMDPGTVDIYPSSRIPKNLHYLVKPIYCSKSLITKDLSGSGDTLKEKGFRITTNPQTLTSVLQFSSDDEVRKMVYIRGNSVPHANVDVLKRLISARHELAQIMGSRSYAEFSVKPNMAVSPKVVTSFLL

SEQ ID NO: 265662 - protein, 53 aa, Glycine max
  Clone ID: PAT_MRT3847_81913C.1.pep
KNSNSAFLTMARCYCDRLEAHDDSWYYFYVGKSSSWVRIMEVDTVLTTSAITA

SEQ ID NO: 265663 - protein, 36 aa, Glycine max
  Clone ID: PAT_MRT3847_81914C.1.pep
ESQFSVSIIFNTQVLCDFKPRIGHRIQFVTDCNPVS

SEQ ID NO: 265664 - protein, 80 aa, Glycine max
  Clone ID: PAT_MRT3847_81915C.1.pep
FSNIHHFSILYLRINFDNISLAAAMTCRKLIGNKYSTKKSLGKVKAVYANEFWAPETSSSQGIWSIRAFIFSDLFYFLLG

SEQ ID NO: 265665 - protein, 86 aa, Glycine max
  unsure (1)..(86): unsure at all Xaa locations
  Clone ID: PAT_MRT3847_81916C.1.pep
HFYLSRXYCLKDLYEGYISQXGNLHTKXISNLFVRNGNRIKVFGNAIIRGHSHFLTASNHLHVLKSGANSSIASSPENLFSCSNPT

SEQ ID NO: 265666 - protein, 82 aa, Glycine max
  Clone ID: PAT_MRT3847_81917C.1.pep
LHETPSPKFFSSIPTMDFSSTVDTSRPFTSVKEAVAIFGERLLSEKSISIKRDHLEAVITSHHLHKTMKMMRDNTIKWQLLY

SEQ ID NO: 265667 - protein, 72 aa, Glycine max
  Clone ID: PAT_MRT3847_81918C.1.pep
FTVCTTKKVLFSFMHSSTNGWLPTFKGGNVLHREINTVLQLPKKKSKPFQYLFFDSTLTGWAIAHFGKEIDQ

SEQ ID NO: 265668 - protein, 65 aa, Glycine max
  Clone ID: PAT_MRT3847_81919C.1.pep
SQIRKKRVSIHMNTQDIDACIVVKELVKIPTPDITDVRHEQRGSLSRIVDLAPIPTLMVSPTKRR

SEQ ID NO: 265669 - protein, 132 aa, Glycine max
  Clone ID: PAT_MRT3847_8191C.1.pep
TNIYLAAGDGLMEIEGLIDTYANIVTKSSLLSREDFTSMHGNTKAALDYYVSINSDSYIATYFGNMDKMVSAMRAFNGLYKTLFFSRRGFAQLTSQGLNGKELKQALWKLHRDDFAKGRGSALSECFCEFKL

SEQ ID NO: 265670 - protein, 101 aa, Glycine max
  Clone ID: PAT_MRT3847_81920C.1.pep
MLDEYSHTGTELRVDTKMSPFLKPDADMACCHDLEAYLHLVDGFLASNSPFRANAKRSLARLMQDQGANVKKLYTSKAKPLSVNLERQGSFSISGCLPSPS

SEQ ID NO: 265671 - protein, 89 aa, Glycine max
  unsure (1)..(89): unsure at all Xaa locations
  Clone ID: PAT_MRT3847_81921C.1.pep
IFLTXSSKSFCHSXNWLENVIXHCSVHGPRMDLGPXMLTXPWEQRRWVSFLGAIGNNPIFPXFKIQTLLEFSPPKNLVGKKXLEXLVNM

SEQ ID NO: 265672 - protein, 108 aa, Glycine max
  unsure (1)..(108): unsure at all Xaa locations
  Clone ID: PAT_MRT3847_81922C.1.pep
MISKPRNNDHTPIVGHADLNTLIASLNLGADIPAMHHNMVANDQCLSGTGSSQVGDEHXVPHNKQRHIHMPAFTWGNHPHRFQLSSACLSPYTATMHYADDDLTFIDV

SEQ ID NO: 265673 - protein, 65 aa, Glycine max
  Clone ID: PAT_MRT3847_81923C.1.pep
HLFIIIKNVIYTIIYKTVCKIAFFLCLALPFIHLLHYLMTDRGDENKKNILYKLLYVYHIFYIKK

SEQ ID NO: 265674 - protein, 59 aa, Glycine max
  Clone ID: PAT_MRT3847_81924C.1.pep
RRILVYFTTKKKDLISKLTNFGRAWLVPKGDKSHLPSPAMGTKGCSRPPRLCYDWDTLS

SEQ ID NO: 265675 - protein, 54 aa, Glycine max
  Clone ID: PAT_MRT3847_81925C.1.pep
KMNGFYPRPIIPSSKLTFSMDYIDIIKILGKLKFPKIYDEKTINEVGNKIPPRN

SEQ ID NO: 265676 - protein, 111 aa, Glycine max
  unsure (1)..(111): unsure at all Xaa locations
  Clone ID: PAT_MRT3847_81926C.1.pep
PSNLPVLATPDLLIGSAKRGLIGGGPLCEVNQPMYPSGSFPPVGPPXLPQAFSKLHVPVLXDDLLTLFSKVGVVFRANFPXKGPIQNLSDLPSEPVXSQEWAYAAKFVSGK

SEQ ID NO: 265677 - protein, 77 aa, Glycine max
  Clone ID: PAT_MRT3847_81927C.1.pep
TAARRRQKGKQKMETQSASLLCLFLSLAILLASGTAASVTPRSAMPKPQCLHIHQKPFSFNFPLWNWSSCYPAEGAA

SEQ ID NO: 265678 - protein, 52 aa, Glycine max
  Clone ID: PAT_MRT3847_81928C.1.pep
EDYSNYKTDISTFQACQNIILTRFLILSTLESHDNLSQISDILVRYSTEDIR

SEQ ID NO: 265679 - protein, 90 aa, Glycine max
  unsure (1)..(90): unsure at all Xaa locations
  Clone ID: PAT_MRT3847_81929C.1.pep
SAAGCAGGPTMGERALKXPEIDEAEGHIVAPRINAWISDHLPIYKPRLDDGAKPXRGKNMLHRLKCEKYVGRADIXYGEVNTPTKTDALG

SEQ ID NO: 265680 - protein, 188 aa, Glycine max
  Clone ID: PAT_MRT3847_8192C.1.pep
VKLFFSIVVVCLSLLFLLALLLPSSLFSQIHIYGEASLGEVDIWSVRRLMEWRPCNWWLQGHQTDNCFPLPLETYGYIRVDCYGGLNQMRRDFCDGVGIARLLNATLVLPKFEVASYWNETSGFADVYDVDYFIQHMNGFVKVVKELPPEIASKEPVRVDCSKRKGQFDYVESVLPSLLKHKFISITP

SEQ ID NO: 265681 - protein, 383 aa, Glycine max
  unsure (1)..(383): unsure at all Xaa locations
  Clone ID: PAT_MRT3847_81930C.1.pep
MEKKQGFFSALKDEVVRGLSPSRSRSISPARTLSPISALLRRKKRSPSPDSSVARSASLRPLGETLTPLMEGPDPDGTENGDPKRIGSGLGHWMKGQLSRAPSVSYKRSDLRLLLGVMGAPLAPVHVSSTDPLPHLSIKDTPIETSSAQYILQQYTAASGGLKLQNSIVRAYAMGKVRMVASEFETATRVVKNRSRCAESGGFVLWQMDPDMWYVELAVGGSKVHAGCNGKLVWRHTPWLGAHTAKGPVRPLRRALQGIDPRTTASMFADAKCIGEKNINGEDCFILKLCTDPETLKARSEGPAEIIRHVLFGYFSQKTGLLVHIEDSHLTRIQSNGGDAVYWETTINSFLSDYKPVGGIMIAHSGHSVXTLFRFGEMGMSHT

SEQ ID NO: 265682 - protein, 145 aa, Glycine max
  Clone ID: PAT_MRT3847_81931C.1.pep
PVIIAALSPCRRPHFALISSLCCSCQSLRRGIRPLFSKFHVPPRIPLGSLESVVNPFQPTLATEAMGAGSFTLNISRVNGSVAINTGIVHASITQTVFDQNPVAIFGVSKVLLPREIFGKNPTVSTKPLDNAPPPDDDALSPENS

SEQ ID NO: 265683 - protein, 54 aa, Glycine max
  Clone ID: PAT_MRT3847_81932C.1.pep
PPIALFRSGKTSSNSIVGFCIENKTREILCSIYRTIWRHTQTSTKNQLNPYSKI

SEQ ID NO: 265684 - protein, 459 aa, Glycine max
  unsure (1)..(459): unsure at all Xaa locations
  Clone ID: PAT_MRT3847_81933C.1.pep
MEKKQGFFSALKDEVVRGLSPSRSRSTSPARTVSPITGLLRRKKRSPSPDSSVARSVSLRPLGETLTPLMEGPDPDGTENGDPKRIGSGLGHWMKGQLSRAPSVSSYKRSDLRLLLGVMGAPLAPVHVSSTDPLPHLSIKDTPIETSSAQYILQQYTAASGGLKLQNSIRNAYAMGKVRMVASEFETATRVVKNRSRCAESGGFVLWQMDPDMWYVELAVGGXSKVHAGCNGKLVWRHTPWLGPXLALTACTWRGTSMFEKIVNVVVFDIHREKNINGEXCFILKLCTDPETLKARSEGPAEIIRHVLFGYFSQKTGLLVHIEDSHLTRIQSNGGDAVYWETTINSFLSDYKPVEGIMIAHSGHSVVTLFRFGEMAMSHTKTRMEEAWTIDEVAFNVQGLSVDCFIPPADLRTASVSEACELPQDERAKNSLAVHRAKVVALEKSHNCSIDSMIWKMEI

SEQ ID NO: 265685 - protein, 209 aa, Glycine max
  Clone ID: PAT_MRT3847_81934C.1.pep
MATEEVLVDEITYPTKITTTKPLSLLGHGITDMEIHFIHVKFYSIGVYLEPEVVGHLDQFKGKSAKELEDNEEFFNALISAPVEKFIRLVVIKEIKGAQYGVQIETAVRDRLAAEDKYEEEEEEALEKVIEFFQSKYFKKLSVITYHFPANSATAEIVVSLEGKEDSKYVIENANVVEAIKKWYLGGSSAVSSSTIQSLASTFSQELSK

SEQ ID NO: 265686 - protein, 209 aa, Glycine max
  Clone ID: PAT_MRT3847_81935C.1.pep
MATEEVLVDEITYPSKITTTKPLSLLGHGITDMEIHFIHVKFYSIGIYLEPEVVGHLEQFKGISAKELEENDEFFNALISAPVEKFIRLVVIKEIKGAQYGVQIETAVRDRLAAEDKYEEEEEEALEKVIEFFQSKYFKKHSVITYHFPTNSATAEIVVSLEGKEDSKYVIENANVVEAVKKWYLGGSSAVSSSTIRSLASTFSQELSK

SEQ ID NO: 265687 - protein, 101 aa, Glycine max
  Clone ID: PAT_MRT3847_81936C.1.pep
LLPFFVPFFFFFFSLFFFFFFVQNKLLWPINIFFRLKQKTFWGLGGKKNCLKGIAWVPFFLKKRAPTKGLGIFGFFFLKKGGFSNFSTPGWGFKNYNAFFF

SEQ ID NO: 265688 - protein, 394 aa, Glycine max
  unsure (1)..(394): unsure at all Xaa locations
  Clone ID: PAT_MRT3847_81937C.1.pep
MGAMTINRKRPEECMNVNHTNSDSQRKRAKFSTKPVPSATSAVARLSRYPEVHAPLAREVHAPCRQRKFERARVSVSVSASDAMGNVLAAKFKEAKRSAAAKCRILVEEGKEVTEVDAETESEGRYENSSVEGAGGDGDKVVRVQQQSQSTLSFDSEVTNAKLKVASGEKVWGYETQRDLENVHMYKKLLGDVGRRSGTLQRLNFEIDLNEKRREHYNLLRPKKELVEEQEVPQEPFVALTSEEEDEVECAFSSNWRRILVTHENSNIVITGEKFQCLRPTGWLNDEVINLYLELLKEREQREPQKFLKCHFFNTFFYKKLISXPKGYDFKSVRRWTSQRKLGYSLLECDKIFVPIHQEIHWCLAVINKKDKKFQYLDSMKGEDSFVLEKLAKY

SEQ ID NO: 265689 - protein, 101 aa, Glycine max
  unsure (1)..(101): unsure at all Xaa locations
  Clone ID: PAT_MRT3847_81938C.1.pep
GNRSGDTALGGLHTSACLPIRIDVGTCKGKLQLGDLXIGLLHAAPPGHDYVDLMHEFMTACTQTYGEKVLCHFDHLGIHTAFHLLEKYQSTPLVCTDDFQG

SEQ ID NO: 265690 - protein, 61 aa, Glycine max
  Clone ID: PAT_MRT3847_81939C.1.pep
GAGAGGLMTVLSAAPIFFKANGPKLTPLEEMQDYKKLGPKQLEPTTAWSKIVEPATTSGDV

SEQ ID NO: 265691 - protein, 210 aa, Glycine max
  unsure (1)..(210): unsure at all Xaa locations
  Clone ID: PAT_MRT3847_8193C.1.pep
MNIVHQEHLVPAPESLTSAAGCGLLHQHQEAAGSNFIINNNHHHHQHHHHHTTKQLDFMDLSLGSSKDEGNLPGSSSSVYAHHHHAASASSSANGNNNNSSSSNLQQQQXRPAEKEHMFDKVVTPSDVGKLNRLVIPKQHAEKYFPLDSSANEKGLLLNFEDRNGKLWRFRYSYWNSSQSYVMTKCWSRFVEEKKLDAGDMVSFQRGVGE

SEQ ID NO: 265692 - protein, 284 aa, Glycine max
  Clone ID: PAT_MRT3847_81940C.1.pep
MSTKKNTWKSVILILSCYKVKCSLEESEKQVLKQGSFQRLCLSDVSNSSSTQAIEDISISFAGSKLYAFTLEELREATNSFSWSNMLGEGGFGPVYKGFVDDKLRSGLKAQTVAVKRLDLDGLQGHREWLAEIIFLGQLRHPHLVKLIGYCYEDEHRLLMYEYMPRGSLENQLFRKYSAAMPWSTRMKIALGAAKGLTFLHEADKPVIYRDFKASNILLDSDFTAKLSDFGLAKDGPEGEDTHVTTRIMGTQGYAAPEYIMTGHLTTKSDVYSYGVVLLELLTG

SEQ ID NO: 265693 - protein, 89 aa, Glycine max
  Clone ID: PAT_MRT3847_81941C.1.pep
HNRMTKTIVMFTFTKTFCLMFSNLWPVLIMPGNVVRLKELKIRRKFIKRKSGRSTGLVNQSIKNSLIQKMTLLRGENERLVMKFLTRSI

SEQ ID NO: 265694 - protein, 122 aa, Glycine max
  unsure (1)..(122): unsure at all Xaa locations
  Clone ID: PAT_MRT3847_81942C.1.pep
NKGHNIEVCFLIMGERVXXINTITTVKGVIRTSINIIRGVFYTRTALASHISIHFIQSTKDHRHTXRKSSKATTVRTHVXLPTYRAGEDAYDNHFEWNNDFRIPSSFYIKNFMHVQFYLKSL

SEQ ID NO: 265695 - protein, 195 aa, Glycine max
  unsure (1)..(195): unsure at all Xaa locations
  Clone ID: PAT_MRT3847_81943C.1.pep
MGIKVMQLSQPVLPHSPSSSHTLASAIFSPSSSKTRTLVCRFVHRSSLFPTTTTRLLRRTKSFEQHALFTRRGNIRRACSASLEPFSDEEFAKKIEDLALKFQLSDDATTNANDLESEDFQEISSTVNFAEEFEPPEEIIPANIERKANSVELPFSLRIIKKKLQWKERFRGAGESAYCSVKKAFSSXMVFIIRE

SEQ ID NO: 265696 - protein, 66 aa, Glycine max
  Clone ID: PAT_MRT3847_81944C.1.pep
FGCIKKHNLPTHGRLSTCVLPCISSYIPLRITHKYLNQLYINVNHSLLTHFRHTSHPTTLPFVYLT

SEQ ID NO: 265697 - protein, 72 aa, Glycine max
  unsure (1)..(72): unsure at all Xaa locations
  Clone ID: PAT_MRT3847_81945C.1.pep
MAQDPFLFTCETLTEGHPDKLXDPISDAELHACXEQDPDNKVACQTCTKTIMQLAFEEITTYANVDYDKIVH

SEQ ID NO: 265698 - protein, 179 aa, Glycine max
  Clone ID: PAT_MRT3847_81946C.1.pep
MSSINPSRATAPSAFATRRPWEEFFALHSFTRPYTLGETTLRVKRNLGHFRVNYAMVVLLFVFLSLLWFPISLVVFLAVFAAWFFLYFFRDGPIVVLRRELDDRLVLAALSAVTVAGLVLTGVWLNVVVALLFAAAAVALHAALRNTEDLYVDELEVSDGGLVSVVGGSPTKRTGYARI

SEQ ID NO: 265699 - protein, 88 aa, Glycine max
  unsure (1)..(88): unsure at all Xaa locations
  Clone ID: PAT_MRT3847_81947C.1.pep
CGLWCSNTCYFTKKRSGRSRGSRLSYTIQPYVRLHVTSYIFYRXPKFNKLATGKQLADWKNIGLTQINLLAADAIVNRWRNIEQANTG

SEQ ID NO: 265700 - protein, 51 aa, Glycine max
  Clone ID: PAT_MRT3847_81948C.1.pep
EPYDVVLNCCLKQNVETKVDIGNQLLLCRPCASGVDLQKTNFHPIYTAKTN

SEQ ID NO: 265701 - protein, 58 aa, Glycine max
  Clone ID: PAT_MRT3847_81949C.1.pep
KKESEFKCIEVFELTIGPAKRCNMKNNKRFCLKRTRVEYYTNLRIFKDEMFEATMKQR

SEQ ID NO: 265702 - protein, 39 aa, Glycine max
  Clone ID: PAT_MRT3847_8194C.1.pep
NCGIADAAQSAQGLDASTSDLPLFTVTKPNKTSASASLP

SEQ ID NO: 265703 - protein, 33 aa, Glycine max
  Clone ID: PAT_MRT3847_81950C.1.pep
IAPFIPSKLEMIADISFNIYHKSRQPYIMYNNL

SEQ ID NO: 265704 - protein, 59 aa, Glycine max
  Clone ID: PAT_MRT3847_81951C.1.pep
PVKSLKEVSIRLGTLSLRINNTKHKQKKRTNQPPPMQMWLGCYLMLVYIQCLNILLEEF

SEQ ID NO: 265705 - protein, 168 aa, Glycine max
  Clone ID: PAT_MRT3847_81952C.1.pep
MSVVGFDIGNENCVIAVVRQRGIDVLLNYESKRETPAVVCFSEKQRILGSAGAASAMMHIKSTISQIKRLIGRKFADPDVEKELKMLPVETSEGQDGGILIHLKYMGEIHVFTPVQLLSILFAHLKTMTENDLEMLISDCVIGIPSYFTDLQRRAYLDAAKIARVEAF

SEQ ID NO: 265706 - protein, 214 aa, Glycine max
  Clone ID: PAT_MRT3847_81953C.1.pep
MTTHPTTKSKPPHVFFLLLIQLLISITRVKGSCVTGCNLALASYYLGNGTNLTYISNLFGRPTSEILKYNPSVKNPNVILSQTRINVPFSCDCLNGAFLGHTFSYAIQHGNTYKIVVEVDFSNLTTEDWVGRVNSYPPNQIPDNVNINVTVNCSCGNRHVSKDYGLFMTYPLRVGDSLQRVAAEAGVPAELLLRYNPTADFGAGNGLVFVPAKE

SEQ ID NO: 265707 - protein, 79 aa, Glycine max
  Clone ID: PAT_MRT3847_81954C.1.pep
AIKLFPWVFPAKNENVKGFKNCWAQIEKLGKNPRCLGAVKLSHPPKKFGADPKGAKTIPKRGNPANCPVGYKGGPHPLP

SEQ ID NO: 265708 - protein, 67 aa, Glycine max
  Clone ID: PAT_MRT3847_81955C.1.pep
IRPDSCPSLLAFASWIFVIPRASLSSDADEAMRAQIDRISGCAVISPYQSHPRSLHYSKSIRSRAWV

SEQ ID NO: 265709 - protein, 79 aa, Glycine max
  Clone ID: PAT_MRT3847_81956C.1.pep
FSSSLAFSDSDLRVPYPPTLLLPHASLSFFFSLIQPFPLKLRFFAFYFFFIFFVVCLYCFVRELGIFDFQAPLISFVCW

SEQ ID NO: 265710 - protein, 88 aa, Glycine max
  unsure (1)..(88): unsure at all Xaa locations
  Clone ID: PAT_MRT3847_81957C.1.pep
GLCTRDAVFVFVQAHTCFWLVLHGGVPKXYASEGTRGFYRGLIPLRGQNLSFFMGMRSTFGHCLDFLYRYVVNRNMDDCRKHQQLGVT

SEQ ID NO: 265711 - protein, 279 aa, Glycine max
  Clone ID: PAT_MRT3847_81958C.1.pep
MSCSSSSGSEEDDEGFDSYRKGGYHAVRVADQFAAGRYIAQRKLGWGQFSTVWLAYDTTTSSYVALKIQKSSAQFAQAALHEINLLSSIADRDPSNSKFVVQLIDHFKHTGPNGQHLCMVLEFLGDSLLRLIRYNRYKGLPLNKVREICKCVLTGLDYLHTDRGMIHTDLKPENILLCSTIDPAKDPLRSGLSPILERPEGNTNGGVTSLIEKRLRRRARTAVAKISGRRASMGGIGDAAKTGRNIDGIDVRCKIVDFGHACWADTAARRRQKGKQTCV

SEQ ID NO: 265712 - protein, 77 aa, Glycine max
  Clone ID: PAT_MRT3847_81959C.1.pep
IKGFFFFLFRECWCFPPFQLVLWVCGIFFGTNVFLMVNGGLGGWFPMNGSKPKRGVDVFLFKISMGGSPRGFGFPFL

SEQ ID NO: 265713 - protein, 102 aa, Glycine max
  unsure (1)..(102): unsure at all Xaa locations
  Clone ID: PAT_MRT3847_8195C.1.pep
MERVKIRLQQKKIDVHXTGKAVQLLGALGFDPNSSARPVXRVITRMVINWTAMGVLRVDFRAEVSIFVDHDVTLSGKERSPLNNLVNNKLDSPNSNSMVVND

SEQ ID NO: 265714 - protein, 49 aa, Glycine max
  Clone ID: PAT_MRT3847_81960C.1.pep
RSQCRFGEAKDNTNGSYHATKLVATRKTRTTMFSTLNITMWNMKLSCAP

SEQ ID NO: 265715 - protein, 86 aa, Glycine max
  unsure (1)..(86): unsure at all Xaa locations
  Clone ID: PAT_MRT3847_81961C.1.pep
NTLMSQMHKSETFLPLKKINKMGKFGGTASSFLGTSTLPENKXYIYIYIYVSMYLFPIYKKKKNFSGGGVLMRFLNISPRRQVFIF

SEQ ID NO: 265716 - protein, 46 aa, Glycine max
  Clone ID: PAT_MRT3847_81962C.1.pep
ALCGHVACMTEKEALALSRQRPDAGGNNKEYPGLHGTSVPGAAASR

SEQ ID NO: 265717 - protein, 135 aa, Glycine max
  unsure (1)..(135): unsure at all Xaa locations
  Clone ID: PAT_MRT3847_81963C.1.pep
PPPPPPPXAPRPGPRPRPPPAALPRRPPGPPPXPXPAGRRCPPGXXLCXSPSPSAPPXSXRGPARASAXXWGWGRRXPXXXPPSSPSSVPXPSSSAPRRXGXGWPPACRRWWRWPAPRVAWGGGGWGVGVWGFWV

SEQ ID NO: 265718 - protein, 95 aa, Glycine max
  Clone ID: PAT_MRT3847_81964C.1.pep
MRGGVSLLLALASVAAAATVSCGGLAGTFLPLERAIPLNQQVELEALRARDRARHGRILQGVVGGVVDFSVQGTSDPYFVGYDLYFTKVKLGSPA

SEQ ID NO: 265719 - protein, 58 aa, Glycine max
  unsure (1)..(58): unsure at all Xaa locations
  Clone ID: PAT_MRT3847_81965C.1.pep
DEELMKKVEAKNALENYAYIMRNTVXDDTIGDKLVSTVMTKIEDALEHAIIMIYSIQL

SEQ ID NO: 265720 - protein, 138 aa, Glycine max
  Clone ID: PAT_MRT3847_81966C.1.pep
KTETSQEFDGSLFGADDGLSDFEFYISDFTCNQQFKTELDEYLEEPLEPRVQEFDILSWWRINGLKYPTLSRLASDILCMPISTLSADAVFDTEIRKMDSYRTSLDSLTLEALICTKDWFQYKSLPMNVPNALVKVEC

SEQ ID NO: 265721 - protein, 66 aa, Glycine max
  Clone ID: PAT_MRT3847_81967C.1.pep
VKVFRRSKIITTRGAQSAIYTFLASIPPNFQYNSRQRISHMNKWIMTKANPEFGVKESHPPSLGSM

SEQ ID NO: 265722 - protein, 86 aa, Glycine max
  Clone ID: PAT_MRT3847_81968C.1.pep
GIVKTTIPVTPCTVEYACTSVYVTAHGVHAKKSLLIISTMTKGFIHLPKMKRFPICLIMRGDGMIRSLSYDGAVRPAAIQRQVWVR

SEQ ID NO: 265723 - protein, 122 aa, Glycine max
  Clone ID: PAT_MRT3847_81969C.1.pep
KRGGSQCSPWSHATHPIYRTGTLNQTFHRPKRISRTYRTSPPPHHMQTITPLVCSTPKLEKKALYLRDGAYVLTACVCRSTNKLAHIPHIQLKQEEETVIIFMLGLNKGAGCCCSPCRHSGG

SEQ ID NO: 265724 - protein, 216 aa, Glycine max
  unsure (1)..(216): unsure at all Xaa locations
  Clone ID: PAT_MRT3847_8196C.1.pep
SLLFLLALLLPSSLFSQIHIYGEASLGEVDIWSVRRLVEWRPCNWWLQGHQTALPXQTNGYIRVDCYGGLNQMRRDFCDGVGIARLLNATLVLPKFEVASYWNETSGFADVYDVDYFIKHMNGFVKVVKELPPDIASKEPVRIDCSKRKGQFDYFESVLPSLLKHKYISITPAMSQRRDRYPLYAKAALCQACYKALRLTRSLEMKASQLVDAIPK

SEQ ID NO: 265725 - protein, 103 aa, Glycine max
  Clone ID: PAT_MRT3847_81970C.1.pep
KISWWWRISKKTMKSLTTPRGREMVTNKTARSVAEILEMLASFFNSVVFYASDKIYFYNMYVCQYVVILNYEAGTSYFVSCVQHDNTDTRVYVVSDICISVLC

SEQ ID NO: 265726 - protein, 79 aa, Glycine max
  Clone ID: PAT_MRT3847_81971C.1.pep
GAPESYICESLPGKPAHRSVSVRCTLRAYSVARIWVSVPFPIIAFRQRVGRREKGVYLSPSPLWEVLSSENGFERVRSS

SEQ ID NO: 265727 - protein, 40 aa, Glycine max
  Clone ID: PAT_MRT3847_81972C.1.pep
SSGSHVTGLCNSAWSWIKDREFGYNTSFNRWSSDIKDHSG

SEQ ID NO: 265728 - protein, 78 aa, Glycine max
  Clone ID: PAT_MRT3847_81973C.1.pep
VPARLGFLVVLRLFFLPCAVPGRGVSVSLLGVGVPAFPVCCVGAGFPFFRPPPSLCVVFARMRARGGVPPVFCGGCPR

SEQ ID NO: 265729 - protein, 67 aa, Glycine max
  Clone ID: PAT_MRT3847_81974C.1.pep
LYSIHYINYKLHKKIQNSGGYPLSCYIGFSVGCYVPLLKIQNILVILEHVKFFFPGFRMPLYYYYYC

SEQ ID NO: 265730 - protein, 58 aa, Glycine max
  Clone ID: PAT_MRT3847_81975C.1.pep
RKISFLLKNICLHVFFFVCKMIFLFSYFQEIFCPKMNKIFHLLIQILVKIKILTGVHR

SEQ ID NO: 265731 - protein, 116 aa, Glycine max
  unsure (1)..(116): unsure at all Xaa locations
  Clone ID: PAT_MRT3847_81976C.1.pep
PLCFPPXTPNTRGGEIKHQGRHTPTKKQARPKNRGAKPPEKATNGSPARQRLSSLWHDHHYHQHGQTYEGSPQANRTIQETRFRAPTSIERHFLSHSIRRGEYDLKETPSDASPSR

SEQ ID NO: 265732 - protein, 59 aa, Glycine max
  Clone ID: PAT_MRT3847_81977C.1.pep
DGKVPTLMIIYQSFSCVMGFCVSSLRKQERQRPIMATLALCCFYMYALSSPCVLAFERF

SEQ ID NO: 265733 - protein, 52 aa, Glycine max
  Clone ID: PAT_MRT3847_81978C.1.pep
DMQVGELSRPEDHCLESISVEGRPMNFPAAFLSTVVRRITIFSSLSILFKVN

SEQ ID NO: 265734 - protein, 98 aa, Glycine max
  Clone ID: PAT_MRT3847_81979C.1.pep
SSTFSIPYFFPLPKIFNEDIYLTEHVMLSTNAFDRIVSCSGKLVTPSKSMSIVWVTKFGVVKEQCILKHPRYSLIHDPHLRFLQALLVLWHFLWKLWA

SEQ ID NO: 265735 - protein, 69 aa, Glycine max
  Clone ID: PAT_MRT3847_8197C.1.pep
QTITNAGNWLIGGDLHVFDPIHYNVVLDHFRISLTHLLAYMTLRNGAAVLAFLLLNPCPFSHASALTGS

SEQ ID NO: 265736 - protein, 45 aa, Glycine max
  Clone ID: PAT_MRT3847_81980C.1.pep
CVRLNAESGSLVRSSWLILVLLPAAIHVSRGIHRRDMWCRFRRGG

SEQ ID NO: 265737 - protein, 82 aa, Glycine max
  Clone ID: PAT_MRT3847_81981C.1.pep
IRQLTATMEALTASSTIDVSAACSGARACCSLDACFTGLSAMNCLNTNKARRVIAAVARNCASLQSVPALPANVKADRVTTS

SEQ ID NO: 265738 - protein, 52 aa, Glycine max
  unsure (1)..(52): unsure at all Xaa locations
  Clone ID: PAT_MRT3847_81982C.1.pep
MPLTLLLFPGLVFFTIRWWNPATFEAMHPEGTAXRPTWPYVEDKSYLWTWLF

SEQ ID NO: 265739 - protein, 112 aa, Glycine max
  unsure (1)..(112): unsure at all Xaa locations
  Clone ID: PAT_MRT3847_81983C.1.pep
PPRXSXPPLTFKTSWRAPTTGSLTTSSTFHCSRTTPTTSTAAKSPTDNSTTTTPPPLRTTRRLALIPPPSTTTSSTPNSPLRRRGKGRTWNGWPGSTKILIARTSLCPSPPP

SEQ ID NO: 265740 - protein, 77 aa, Glycine max
  unsure (1)..(77): unsure at all Xaa locations
  Clone ID: PAT_MRT3847_81984C.1.pep
LLLNKFSMKVHXYICWKILFVTNIFVNFYMDVFLLLVKRRKIHVYKNESVHYFSPHLLILCYQKCQQSVTPRRRGLL

SEQ ID NO: 265741 - protein, 99 aa, Glycine max
  unsure (1)..(99): unsure at all Xaa locations
  Clone ID: PAT_MRT3847_81985C.1.pep
KNFKIVVKVWVLLLFLVQLTSALIQLSFFKSDQSLTYDDYEYSXPFCNLCMCTRSIPTQYICEYIMLNSFHSYCNISMFTLSQPIQCRCLDTNDLCYKP

SEQ ID NO: 265742 - protein, 95 aa, Glycine max
  Clone ID: PAT_MRT3847_81986C.1.pep
CPGLWGSPSMKQGSFRIFFFLRKQPKGGVKPCQILKANLSSKGFVVPPGGPKQNKIGHKREYRLEPQALPNKGPTDFGVGFGPPYVPPNFKKNPK

SEQ ID NO: 265743 - protein, 556 aa, Glycine max
  Clone ID: PAT_MRT3847_81987C.1.pep
MARLKIGGTWAGVLEEVDLQAWTLATLRDLVAARSNSPSSDSINLICAGKILKDDAVPPQTLAQLGVKSNAKILATRTSTPQQGHSFLAQEERSSRLARIRAAANAMADRHADGALPVEDFNIEVEDQSGQKVRLGSETDQRAVMMGLMLHAKGKRLIRQGNYKDALEVLSMGEESFSLCDPKVIELIDNVPILQIDMVWCYFMIRDIRWLSDAGKRLEMAREGIERAHGKDSFRLRLLQVGRYPELALHLRLELLEGVVAYHIGQLEKSKKTLASARTKFIQLQVPDEALSLVMSMGFVERDAKRALRMNNQDVGGAIDFLAEEKTKKLRKREEDIRRRNEIKEQKRYGMTPLKKAVDLERLKELVSIGFDKELAAEALRRNENDTQKALDDLTNPETNSALQVNIESRKRKRQKAARDSEIEKVVQMGFERSRVVAAFEAGGSLDEVLQRLTAQPGTDPTQPRENSASASHGGASSSAPLPDNVDADLAMYKVEDHSKTEQRDVEMEDELSADIAKADALADYDIEVTVEGEAITEYLALVESASCRGETVPSQ

SEQ ID NO: 265744 - protein, 92 aa, Glycine max
  Clone ID: PAT_MRT3847_81988C.1.pep
QENSASASHGGASSSAPLPDNVDSDIAMTEVEDPSITEQRDVEMEDELSADIAKADALADYDIEVNVEGEAITEYLSLVESAGSCGKTAPSQ

SEQ ID NO: 265745 - protein, 72 aa, Glycine max
  Clone ID: PAT_MRT3847_81989C.1.pep
RPPPSFFFIFYSKEPLKLTYIGKKGAGLVTMTCKTILPYFRQHQCTLILPTSVGAHLIPGTLDNTHSTVWIT

SEQ ID NO: 265746 - protein, 81 aa, Glycine max
  unsure (1)..(81): unsure at all Xaa locations
  Clone ID: PAT_MRT3847_8198C.1.pep
ADGSDDNLSEDRGESLDSEDDDDGLKDSGKGSIGHSGIPAEEMLSDEYYEQNGEEQSVSLHCRVVRQPTXXNSRXQQMPIK

SEQ ID NO: 265747 - protein, 141 aa, Glycine max
  unsure (1)..(141): unsure at all Xaa locations
  Clone ID: PAT_MRT3847_81990C.1.pep
ANELTSALWAQVELAEGAAARLXAFLSASFSPRVMDPDLXXVWVVFWSLIRHSPHVNQSHENSYRAYLALIQQLLDDLARSENLLIHDSHLAAIGLSAMLDGLWLEGCLNPGTFSPANGLHICRCWVQGLRYGAFGADHIL

SEQ ID NO: 265748 - protein, 71 aa, Glycine max
  unsure (1)..(71): unsure at all Xaa locations
  Clone ID: PAT_MRT3847_81991C.1.pep
DILIERSRISAVLPRLLQTCVHTLTLAKDIHNTRLLIRQRYICIXLLIANVLYFIKRLDSQIHIDLCLTSP

SEQ ID NO: 265749 - protein, 94 aa, Glycine max
  Clone ID: PAT_MRT3847_81992C.1.pep
MFISHGTYNNVYLLAMFQGQSDKKPLNSALYGNCLNVTNLHFEDGDIRLLFSELVLEHTAMRRYSPRHESLKSTTLNCLDACPSFSYSPHSCKM

SEQ ID NO: 265750 - protein, 44 aa, Glycine max
  Clone ID: PAT_MRT3847_81993C.1.pep
RVNPKNILTDNYDSRILKTIYQFYLRTPHARTAIEKHCYVVDLL

SEQ ID NO: 265751 - protein, 44 aa, Glycine max
  Clone ID: PAT_MRT3847_81994C.1.pep
LLCAPVVHARQLAQEPIWLTDSHLWMLVAGEAADEDLSRSSATT

SEQ ID NO: 265752 - protein, 55 aa, Glycine max
  Clone ID: PAT_MRT3847_81995C.1.pep
LGLELICEHSYHWELRKHVGAKRNTLCIVVVSFPAETQNCFRKITISDSLTVVLL

SEQ ID NO: 265753 - protein, 178 aa, Glycine max
  Clone ID: PAT_MRT3847_81996C.1.pep
MEKCVQLLLQVLICRNEAEKCLIETSINSLRISLKVKQADELENILTKKFLRFLSMRAEAFQVLRRKPVQGYDISFLITNYHCTRPYTTTFKWGKDIDKEISELKMSVNTRGRLVATEFLKQSSFTYEVLGPLSQWFYIKKNDKPVCHAEKMKLQKLAVSTFPFPCPTVFRFSKNLSK

SEQ ID NO: 265754 - protein, 169 aa, Glycine max
  Clone ID: PAT_MRT3847_81997C.1.pep
MASTLRLYLTCIRNTLEAAMCLQNFPCQEVERHNKPEVELKTSPELLLNPVLICRNEAEKCLIETSINSLRISLKVKQADELENILTKKFLRFLSMRAEAFQVLRRKPVQGYDISFLITNYHCEEMQKHKLIDFIVQFMEDIDKEISELKMSVNTRGRLVATEFLKQFI

SEQ ID NO: 265755 - protein, 67 aa, Glycine max
  Clone ID: PAT_MRT3847_81998C.1.pep
HNKQYFFYGLRQTQMETLSKKISLEQLAFQKRGKKPKNHALLRVREEQGARSKFVQGTLCLDNDQNT

SEQ ID NO: 265756 - protein, 42 aa, Glycine max
  Clone ID: PAT_MRT3847_81999C.1.pep
NIFKSITKTVKGIKSISTTLWNNWVDFIFIEHNNTINYLSCI

SEQ ID NO: 265757 - protein, 106 aa, Glycine max
  Clone ID: PAT_MRT3847_8199C.1.pep
MKVVALVSGGKDSCYAMMKAIHYGHEIVALANLMPLDDSVDELDSYMYQTVGHQIIVRYAECMGLPLFRRRIQGSSRHQELGYKETQGDEVEDLCILLREVKRQIP

SEQ ID NO: 265758 - protein, 62 aa, Glycine max
  unsure (1)..(62): unsure at all Xaa locations
  Clone ID: PAT_MRT3847_819C.1.pep
FDAGNXMKPGMXXFXHRANSLMYHECTPQVSSITHXTYQXESLCYDLXXVYRXPXEXNFRXX

SEQ ID NO: 265759 - protein, 154 aa, Glycine max
  Clone ID: PAT_MRT3847_81C.1.pep
RFVRLLTVVLAMAMVLAAPAHAQISTPCSTSMINGFFNPCMNFLTNSSGNGNGTSPTAECCNSIKSLTSGGMDCLCLIMTGNVPFRIPINRTLAISLPRACNLPRLPLQCKSSPLPAPGPAAFGPSLSPSAPSLSPEASSVLPSPSLAPLSDIT

SEQ ID NO: 265760 - protein, 80 aa, Glycine max
  unsure (1)..(80): unsure at all Xaa locations
  Clone ID: PAT_MRT3847_82000C.1.pep
XFRVXKGIPXAXDXYHXXYXHXXXVYXEVATPKMKXGGKVTSVGTXRXXVXPXXRXXXXPXSPXXNXXLEPNXELTYAXX

SEQ ID NO: 265761 - protein, 47 aa, Glycine max
  Clone ID: PAT_MRT3847_82001C.1.pep
LLRLILILFGSGEPAGKATTEGRSHTTEVSRVNTPPCNTNYRKYSQS

SEQ ID NO: 265762 - protein, 67 aa, Glycine max
  Clone ID: PAT_MRT3847_82002C.1.pep
GTYKLLKPRFSEENIFNLINIYLRSSPPTKLIFTTAGYHPLTALENGKRKNGKTPLSEVTNATHDSF

SEQ ID NO: 265763 - protein, 149 aa, Glycine max
  unsure (1)..(149): unsure at all Xaa locations
  Clone ID: PAT_MRT3847_82003C.1.pep
IPGDFVIGVKLTTINNMCAYGLNPGILGTRLLGTIPQSIXQQICWNQMASVRTPLNSDSSKQSXFCQLFIDLLCGGILVDKTGDWITLIQNSSISYLLRVAAWKKGCXMAKIVIAGNASLKRVIVPHCYKLFLTNSNHSEFFGACKCPK

SEQ ID NO: 265764 - protein, 85 aa, Glycine max
  Clone ID: PAT_MRT3847_82004C.1.pep
FFFKLYFVFFPPGPCPGFWGIFPFPGGFYGWPGFPYPNFFFYPFFGGWNPFLLGGGACFSGKTFFLIGGEGFLDFYGFKNFFFFS

SEQ ID NO: 265765 - protein, 34 aa, Glycine max
  Clone ID: PAT_MRT3847_82005C.1.pep
MPNWNKILSNCKCDIYTKNFLKEKQAVCPEADFS

SEQ ID NO: 265766 - protein, 122 aa, Glycine max
  Clone ID: PAT_MRT3847_82006C.1.pep
MAYAAMKPTKPGLEESQEQIHKIRITLSSKNVKNLEKVCADLVRGAKDKHLRVKGPVRMPTKVLNITTRKSPCGEGTNTWDRFELRVHKRVIDLYSSPDVVKQITSITIEPGVEVEVTIADA

SEQ ID NO: 265767 - protein, 82 aa, Glycine max
  unsure (1)..(82): unsure at all Xaa locations
  Clone ID: PAT_MRT3847_82007C.1.pep
KASIIDSKLHENYFLCPCQNTSTRTYKLTAAICTRSRTVYYLFWIRFHYIGERTKNLMKYLLGRIQENRFLYQNQXYXHXIS

SEQ ID NO: 265768 - protein, 73 aa, Glycine max
  unsure (1)..(73): unsure at all Xaa locations
  Clone ID: PAT_MRT3847_82008C.1.pep
RYTTCDLWAESDKPLAVCIPYPAAGNINAMLLLAXIVSSXGVHITCVNTEYHHKRLLTARRADSRNGLSSMRL

SEQ ID NO: 265769 - protein, 83 aa, Glycine max
  Clone ID: PAT_MRT3847_82009C.1.pep
VIMFNGLAELSMVVSRLPVFYKQRDYLFFPSWVYALPAWILKIPLTFVEVGVWVFLTYYAIGFDPYVGRLFRQYLVLVLVNQM

SEQ ID NO: 265770 - protein, 70 aa, Glycine max
  Clone ID: PAT_MRT3847_8200C.1.pep
LLLLELKLSFLPYLGSLCLAFFFFSFFFMAIGLLLWLLLAKGLAMEGAVGVTFSSRLIHRFSEEAKAHLA

SEQ ID NO: 265771 - protein, 293 aa, Glycine max
  Clone ID: PAT_MRT3847_82010C.1.pep
EIMEESGKPNLADFFPVLKFMDPQGIKTRTTVYTGKIIDTFRALIHQRLKLRENNHGHDTNNDMLNTLLNCQEMDQTKIEHLALTLFVAGTDTITSTVEWAMAELLQNEKAMSKAKQELEETIGRGKAVEESDIGRLPYLQAVIKETFRLHPAVPFLIPRKANADVEISGGYTIPKDAQVFVNVWAIGRNSSIWKNNANVFSPERFLMDSEDIDVKGHSFELTPFGAGRRICLGLPLAMRMLYLVLGSLINCFNWKLVEDDDVMNMEDSFGITLAKAQPVILIPEKVHGVIVS

SEQ ID NO: 265772 - protein, 57 aa, Glycine max
  Clone ID: PAT_MRT3847_82011C.1.pep
LTGSSVHTVRYKHLCNNSKCKVGPPINKRRVARSHASPQVIRHKCLRSFSHPIRDAG

SEQ ID NO: 265773 - protein, 49 aa, Glycine max
  Clone ID: PAT_MRT3847_82012C.1.pep
PRVRTKDVSCPYCTSRFVPSQEGQLCTVCDLAVVGADASGLLCSPSQIR

SEQ ID NO: 265774 - protein, 198 aa, Glycine max
  Clone ID: PAT_MRT3847_82013C.1.pep
VALLACTRCLHAIPLIVVESRREVDEVRELIIIVKEYVLGLQMELKRREMKDNLTRQQELAAYFTHCNLQTPHLRLALLNAMTVCFKAKNLASAANFARRLLETNPTVETQAKTARKVLAAAETNMTDAKPLNYDFRNPFVTCGATYVPIYRGQKDVSCPYCTSRFVPSQEGQLCTVCDLAVVGADASGLLCSPSQIR

SEQ ID NO: 265775 - protein, 269 aa, Glycine max
  unsure (1)..(269): unsure at all Xaa locations
  Clone ID: PAT_MRT3847_82014C.1.pep
MIMGASASSVWYNVRVPHPTKEVPILDYDLALLFQPMLMLGITVGVALSVVFPYWLITVLIIILFIGTSSRSFFKGIEMWREETIFKREKTKQRATLVDSHGEDKTVRIDTKYEPLIPKEEKSTIQILCLNLRWKRILVLIVVWVAFLLVQVIKNDVEACSPWYWVLFGLQFPIALLVFGYEAVKLYKEHKRRMSTRNLECICEASIEWTAMNLAFCSLCGIVGGIVGGLLGSGSGFVLGPLLLEIGVIPXXASATATFVMMFSSSLSV

SEQ ID NO: 265776 - protein, 111 aa, Glycine max
  Clone ID: PAT_MRT3847_82015C.1.pep
VCNQRDYLAPIVAKMRVLLACSAALLLLAVAHVTMGLEDDGTKSVEQLWEEWKVENGRKYFSPEEEKKRFGIFKDNKKRIDEHNEKFKKGEVSFSQGLTLWADITSEEFKA

SEQ ID NO: 265777 - protein, 93 aa, Glycine max
  Clone ID: PAT_MRT3847_82016C.1.pep
MSNPQTSNNRRQPSRLQRRAPSSLQINRAVEWNVAIPLLSPLASSPTPIELKPPQEPPQREPEKVTLSFKKWQHPAAPFCYEPAPMVPPFVPV

SEQ ID NO: 265778 - protein, 53 aa, Glycine max
  Clone ID: PAT_MRT3847_82017C.1.pep
GPRSEATRNTGLDRVVGQNSKKLRRFEMVSLCRMCQRLLVTILDSPHLSSLWT

SEQ ID NO: 265779 - protein, 63 aa, Glycine max
  Clone ID: PAT_MRT3847_82018C.1.pep
RERKWKRNGSAIALENEFSFHTAFFAILFVLCSSAFWLSSWLKKSNVFLSFYMFHQLIGQSKF

SEQ ID NO: 265780 - protein, 88 aa, Glycine max
  Clone ID: PAT_MRT3847_82019C.1.pep
RNFFYFHFLYLHHLIKPPLKGVWGPFMNKWGGFSLVKIFSPSFIFLRANALIGPMAFNSQSFFEIERAPNGSPANSPITLFHEGSKFP

SEQ ID NO: 265781 - protein, 127 aa, Glycine max
  unsure (1)..(127): unsure at all Xaa locations
  Clone ID: PAT_MRT3847_8201C.1.pep
QHSTDTQGAEEETAAAGRGGAPKGAATTDPRGATRNTKRGGGRXXGRAXEEXAAAAPATATPPXEAEAKPNPPPTGPNRGAKAKSPRKEAHGDKGTGPXGAADQDPNTRDPXARRRNKANHANGATN

SEQ ID NO: 265782 - protein, 64 aa, Glycine max
  Clone ID: PAT_MRT3847_82020C.1.pep
MILMLLYSGCHDHLTTVHAHSICIQLLHIAHEGMGPVLLQPLAHFYRMLPIYTNPLNSEQHTLH

SEQ ID NO: 265783 - protein, 222 aa, Glycine max
  Clone ID: PAT_MRT3847_82021C.1.pep
MRPLALSANRSCLCSSTTFHPHPLLNPSPSLHFSPSTFHPQPLCSLIKQHIIPQPSHKASIHRRRCSNSLATSDAQFASIIALFQDIGIGFEETQVLLCNNHDLASVPIDSLHVRFLSLRSLGFDPLTLCKLVTKRPTILTANEIDPLLTFLRDNLQGKLEKQQLNRLLSSTEQEFLESFPQKVQFLVDRGIPVDQVVHVLNKVNLSKVLCRKSLEETTDHI

SEQ ID NO: 265784 - protein, 69 aa, Glycine max
  unsure (1)..(69): unsure at all Xaa locations
  Clone ID: PAT_MRT3847_82022C.1.pep
TYGSXQVRSALGLRAYXERANQLXKLKDKVVALEINMKRLRGELXAAEGEXEXPRSGFXEVRKASMRWM

SEQ ID NO: 265785 - protein, 69 aa, Glycine max
  unsure (1)..(69): unsure at all Xaa locations
  Clone ID: PAT_MRT3847_82023C.1.pep
IPSSIKELLLLPGIGPKIAHLEFFVKXDNVQGICVDTHVHRICNRLGRELMRQKLLGRMLLNSKLTFLT

SEQ ID NO: 265786 - protein, 42 aa, Glycine max
  Clone ID: PAT_MRT3847_82024C.1.pep
IKVGPGNFLRPCDFTLLYEGSQKNARVQNCKLPESGGQKKET

SEQ ID NO: 265787 - protein, 376 aa, Glycine max
  Clone ID: PAT_MRT3847_82025C.1.pep
MSFSRLLRVQNPGLCLLFNYSQPLTSSSSSSLPLTRDRAALTFTTKVSYSSDMVKAIRVHELGGPQVLKWEDVEIGDPKEGEVRVRNKAIGVNFIDVYFRKGVYKAPSFPFTPGMEAVGVVTAVGAGLTGRQVGDLVAYAGQPMGSYAEEQILPANKVVPVPSSIDPAVAASIILKGMTTQFLLRRCFQVEPGHTILVHAAAGGVGSLLCQWANALGATVIGTVSNKEKAAQAKEDGCHHVIIYKEEDFVARVNEITSGNGVEVVYDSVGKDTFEGSLACLKLRGYMVSFGQSSGSPDPVPLSSLAAKSLFLTRPSLMQYVVTRDELLEAAGEVFANVASGVLKVRVNHTYPLSEAAKAHEDLENRKTSGSVVLIP

SEQ ID NO: 265788 - protein, 43 aa, Glycine max
  Clone ID: PAT_MRT3847_82026C.1.pep
CDPAIEGAAFIVMTFIAVIYIIFPYVKAHVNVNNTPRHKIFAF

SEQ ID NO: 265789 - protein, 36 aa, Glycine max
  Clone ID: PAT_MRT3847_82027C.1.pep
DLRGGALISLAIYPYLNIGISFNTRRFTMFLTQHLA

SEQ ID NO: 265790 - protein, 120 aa, Glycine max
  unsure (1)..(120): unsure at all Xaa locations
  Clone ID: PAT_MRT3847_82028C.1.pep
GDLEECCRAWVQVVHIAEERLSQTKYLDGDFSSSADISHFPVLEYVVINMGKEXLLQNRKHVGGCWKGIICSPSWSKVLKLGRAPFQFDTSVRGMTATSVSSLDMLVEYYDTLSRFQCKL

SEQ ID NO: 265791 - protein, 51 aa, Glycine max
  Clone ID: PAT_MRT3847_82029C.1.pep
HFLITRASTHSFPPFKQLPIPLEISLTGHTTGVLLSWRWPQLSFKYFYFPH

SEQ ID NO: 265792 - protein, 105 aa, Glycine max
  unsure (1)..(105): unsure at all Xaa locations
  Clone ID: PAT_MRT3847_8202C.1.pep
NYSVGNIVFSLLSHKLXFPHCSIAHSLEMTYFPEYYFYWYTLNYRYHFFCLFSDDLLAMNHTYFIIIRTFYEISGSKDTVGQFESHTFFTFTGLYRVVLLFSFFD

SEQ ID NO: 265793 - protein, 123 aa, Glycine max
  unsure (1)..(123): unsure at all Xaa locations
  Clone ID: PAT_MRT3847_82030C.1.pep
GFDATRGVEHPNEKWXRHHTAKEYPPDXGVRVLGINFSRDGMNLRDRIFLVGDHNGSWMVFETLYIGSRINRIERKRAFNLINKLTTDFEGVTYKKSVXDKTSADSGSKSTSITIRSKYGKFK

SEQ ID NO: 265794 - protein, 102 aa, Glycine max
  unsure (1)..(102): unsure at all Xaa locations
  Clone ID: PAT_MRT3847_82031C.1.pep
KWRAPEEFFLKRFXVSPIDFXGQDVELFPPGAGSIGRPGLLMXFAPKDIKLGNLLCLLGWELPXGCKRDPXDSLFLPGFVQNKKKPLRFLAERHKKKYVPPD

SEQ ID NO: 265795 - protein, 43 aa, Glycine max
  Clone ID: PAT_MRT3847_82032C.1.pep
VSILDVCKNAWTYNNHSMSSNDFPMKSFLFVLLKVIIFRASNP

SEQ ID NO: 265796 - protein, 53 aa, Glycine max
  Clone ID: PAT_MRT3847_82033C.1.pep
AKSFFFIKNKSRRKNSSTYLHRKRGTRTYSDDRNKRINESTQQKGLREDVYTS

SEQ ID NO: 265797 - protein, 88 aa, Glycine max
  unsure (1)..(88): unsure at all Xaa locations
  Clone ID: PAT_MRT3847_82034C.1.pep
LGPPKEVLPRLIFPGMEVFXIYGAPRMGPPFGPIFFXGQKTPPLAFRPLGLPQALDSVGNVFPWLFLTGGESPENFWGLFIFPPIWFK

SEQ ID NO: 265798 - protein, 167 aa, Glycine max
  unsure (1)..(167): unsure at all Xaa locations
  Clone ID: PAT_MRT3847_82035C.1.pep
MASEVIEYRCFVGGLAWATDSDALEKAFSHYGEIVESKVIIDRETGRSRGFGFVTFASVQAMKDEIEAMNGPVLXGVYGGGGGYGGGGYSRGGGGYGGGGRREGGGGGYNRNGGGGGYGGGGGYGGGGGHGGGGGYGGGGRDRGYGGDGGSRYSRGGGASDGGSWRN

SEQ ID NO: 265799 - protein, 172 aa, Glycine max
  Clone ID: PAT_MRT3847_82036C.1.pep
MASEVIEYRCFVGGLAWATDSDALEKAFSHYGEIVESKVIIDRETGRSRGFGFVTFASEQAMKDAIEGMNGQNLDGRSITVNEAQSRGRGGGGGGYGGGGGYGGGGYSRGGGGYGGGGRREGGGGGYNRNGGGGGYGGGGGYGGGFICCTGGVTGAPVPTTNLRISPPPPSF

SEQ ID NO: 265800 - protein, 87 aa, Glycine max
  Clone ID: PAT_MRT3847_82037C.1.pep
GIPGSTYASGNAFKDTESMDLNTKAINTRLSDLKIEGMQELEAVTSEIVRLIETATVPILAVDFYVPPIDQQKYLKSQISSWEKFSR

SEQ ID NO: 265801 - protein, 364 aa, Glycine max
  Clone ID: PAT_MRT3847_82038C.1.pep
LEQIFALKPDILSLALNFVPSKMNEVDFWNKYFKAEYLHSTKNAVAAAAEAAEDEDLAVFLKDDEILEIEARLQVRRVDPTLDMEADQGDDYTHLPDHGIFRDGSKDISEAQNSLYKRTLLQDLNRQGAVVLEGKTLDMEMEHPRTVAEILARRKQECDGVVDEERRNRISKMTPIDDLQAQDNHPYAPLCIKDPRDYFDSQRANAVKTLDDSQAGMEQMKCSLGSEEAYDSLRASISKIKTTGLRDPLFSPDVALKVLNGLTKNITSTKYHLGKSSQESVLDILPNSTKEKLLDHWVCSQELLRHFWSSYPVSTQNLVSKTRRLKDSISQIYSKLEDIKVSAESDLRHHVSLVVHPMQQALNA

SEQ ID NO: 265802 - protein, 52 aa, Glycine max
  Clone ID: PAT_MRT3847_82039C.1.pep
AMHEHFRPCCSSQFSCIQLPLIALALASLPCLRKECCFHSVRSLWMPPMLVP

SEQ ID NO: 265803 - protein, 247 aa, Glycine max
  unsure (1)..(247): unsure at all Xaa locations
  Clone ID: PAT_MRT3847_8203C.1.pep
FDCVDEEDXFEEVSLSAALNGVEGLDYMXEGIPLATSEGFPHVLSRKNGDKGIRRFVSGDGEEMTLIPGTSVEEAYNKLIVELEKSVPTLVGIECPKDEKLSRRTIVDKPKTRCLTILPMEFNIEVRHEXRNYVRIIMKKRDKLSCQVGINPYSMEWTGLANRLLSKGNDILXCDYASFDGSITKQVMSKMAEMINSFCGGDEKLMRERTHLLLACCLRIGISXNDVWRVKCGISSGFPLTVICSSI

SEQ ID NO: 265804 - protein, 207 aa, Glycine max
  Clone ID: PAT_MRT3847_82040C.1.pep
FGSSRGRSGKSCRLRWFNQLDPRINRSPFTEEEEERLLASHRIHGNRWAVIARHFPGRTDNAVKNHWHVMMARIRRERSKNYSPKQPLFPPNLQVDLETNFETIPSFVDKYYEKYSHPCVALTHSSFQFPTKNFYFQDPSSAGSTVPRDNCESVEFYDFLQVNTDSNKSEVTDNARRDEEEVSQDAVGMKNKDNGVPFIDFLSTGGC

SEQ ID NO: 265805 - protein, 49 aa, Glycine max
  unsure (1)..(49): unsure at all Xaa locations
  Clone ID: PAT_MRT3847_82041C.1.pep
QAYLIDWAPVPVTGYYRTGIHTPKLAPLXIWLRLNPSPPLKLIEVSGQP

SEQ ID NO: 265806 - protein, 77 aa, Glycine max
  Clone ID: PAT_MRT3847_82042C.1.pep
DQHTSTCNNNNNNNNNNNNNNNNIKLHKKIRHRIKTEQENCTHQNDHGTHMKMMLHGHLLSESHRETLLICEDHNCR

SEQ ID NO: 265807 - protein, 46 aa, Glycine max
  Clone ID: PAT_MRT3847_82043C.1.pep
WQQADVCHLVYFIIFVANQTSASIRETNCFSSVLTSGYINKSLYSS

SEQ ID NO: 265808 - protein, 64 aa, Glycine max
  Clone ID: PAT_MRT3847_82044C.1.pep
DFLSLIPFGFLSLYSDGVLEGFSFSFFFPPFPILLNQPTSIPKQNLYYHSLQETKAMIKLHIIC

SEQ ID NO: 265809 - protein, 78 aa, Glycine max
  Clone ID: PAT_MRT3847_82045C.1.pep
LNLEATAATEEIDGPASVSASDKKVSNTQTHQIAARKEKQMEALKAALGIVSSEANERNADGTDELGNDGGNGSNVEG

SEQ ID NO: 265810 - protein, 222 aa, Glycine max
  Clone ID: PAT_MRT3847_82046C.1.pep
ARGLVAWETGGSIPHHRLSTMPSSLSLSLTPLSVFPPRRVPTPSPKPYRLSVKSSINKPPDAGTTKPSSWLSPDWLTSLSRSLTAGNDVSGIPVASAKLDDVSDLLGGALFLPLFKWMQDYGPIYRLAAGPRNFVVVSDPAIAKHVLRNYGKYAKGLVAEVSEFLFGSGFAIAEGPLWTARRRAVVPSLHKRYLSVIVDRVFCRCAERLVEKLQPDALNGTA

SEQ ID NO: 265811 - protein, 68 aa, Glycine max
  Clone ID: PAT_MRT3847_82047C.1.pep
VLYGSLVWIADGSPARSTRCSPVRSGSSDAARSRARLFHMPGSSAARSEAIWTLLMISSISFMRWTTR

SEQ ID NO: 265812 - protein, 129 aa, Glycine max
  Clone ID: PAT_MRT3847_82048C.1.pep
KCSQSRTLSAFEIVPVRGCKLSKSSSRRPEFCECCPIPRSGHRVFADSDFIYVFGGYNPFHSPDSTYTDFWRFNRLTHLWQKCGLSSSDPTTQLPNSLASFALASSSRPSECFIFGGTRHSFGLAVSNE

SEQ ID NO: 265813 - protein, 48 aa, Glycine max
  Clone ID: PAT_MRT3847_82049C.1.pep
IALRLTRNLINHLLKGSILFPNETGLNGRPKSMDLILLLVCNTTVNLL

SEQ ID NO: 265814 - protein, 336 aa, Glycine max
  unsure (1)..(336): unsure at all Xaa locations
  Clone ID: PAT_MRT3847_8204C.1.pep
SQCFKKGGAFCENGAVFSKSGHEYVKPYSNGSKLKSYPAGHNITITDGFDKTSATLQFRKLAHCDSVTRNLKQMSNVLWVAPADKASSWPQLDYVSSNNLEMQQPYXLVNLGNVLLELCLLSPEEARQWRRKALSSIEWLQKADVPTIAQIEEFHPMHRMMNAPDSNDNIDLLLSIDLLGLQGAGQAFPNKIVFDDKLVLANTQEFFDGNFPVDSWLPIFVNCLYPVSQLPSEAVVVNVTCGSGRGGLPTTAWISSAVYNRSLDINKWIRTVLGKGKKIDFLTRVDPFPVTLLAVLSGVNNEILSSNATNPMLTRLLENCMILKYLVDECTFAFVN

SEQ ID NO: 265815 - protein, 54 aa, Glycine max
  Clone ID: PAT_MRT3847_82050C.1.pep
AKKEKEKEKVKPAEVPVPLHQAYPLIYYQMTPPPYPQIYYVKSYDENPCGCVIC

SEQ ID NO: 265816 - protein, 68 aa, Glycine max
  Clone ID: PAT_MRT3847_82051C.1.pep
RIHYVQDGSPLAKYFGMPSLSTAEKVTSAHVADDVDVHPKVVQSMPLCRRVEVSAMNVHIARPHATCI

SEQ ID NO: 265817 - protein, 89 aa, Glycine max
  Clone ID: PAT_MRT3847_82052C.1.pep
ERVSCSVIFDLIISTLNFFLYIHQSAKCKFRIFHVMGSSLFPLRHRSIQCSSHRYDLTHQAQSQIGSSRGHGCWEIQPRFAHCQRSNSR

SEQ ID NO: 265818 - protein, 46 aa, Glycine max
  Clone ID: PAT_MRT3847_82053C.1.pep
TGMVTDFCKFLSGSVLMLACVICDKLEIALRCSSWILSFNFQSSSI

SEQ ID NO: 265819 - protein, 197 aa, Glycine max
  unsure (1)..(197): unsure at all Xaa locations
  Clone ID: PAT_MRT3847_82054C.1.pep
PPREGPGFRAEGGHLFDFPFPHPYXGPRVWAQLFWPVFSPEFYLFPKEGGGPFQLVFFGPFWISRPRKKGPPPGKELGWAMDGVFCGPPGPSGRKPIVGCRLKGAPRKKVFFLNRNFFFFPKPLFRGLGFFFPGGFLFVRSPPPLGGSPLFFFFSGVRFPPHFRKGGLQGKVVLWGFFSFWGFSLRKKWPPLGRVVC

SEQ ID NO: 265820 - protein, 186 aa, Glycine max
  Clone ID: PAT_MRT3847_82055C.1.pep
RPGPQKKEKNSQQKKIFGGRPLLKKREKNPPPRNLGQPFPKIYSTISKSPPIPQGGFQALEPQKTLNFPKEKKFPGGGLFGGGPNPPTLKKRGYYGPFQLNQKEPLSFYKNQFPKNFWNLKIWGKKRVFPQNQKGFFTFKGGKFPRNFCNPRGNKGLFPPPQMGTPTFGKNGFLRNFCNHWGKKKF

SEQ ID NO: 265821 - protein, 314 aa, Glycine max
  Clone ID: PAT_MRT3847_82056C.1.pep
MAMASLASSSVLLNLLFIVSALHLGAAAARILSEKEDQQQLQFQYHKGPLLSGNISVNLIWYGSFKPSQRAIISDFITSLSSSPKSTAQPSVATWWKGTEKYYQLIKSAPKPSLTLALGAQILDENYSLGKSLTTDNIVSLASKGAPNDAINVALTFSDVTVEGFCSSRCGTHGSSVGHGKLAYVWVGNSETQCPGQCAWPFHQPIYGPQSPPLVAPNNDVGLDGMVINVATLLAGTVTNPWGNGYFQGPKEAPLEAASACTGLYGKGAYPGYAGELLLDPTTAASYNANAVNHRKYLLPALFDPTTSACSTLP

SEQ ID NO: 265822 - protein, 91 aa, Glycine max
  unsure (1)..(91): unsure at all Xaa locations
  Clone ID: PAT_MRT3847_82057C.1.pep
WWAVYLEIHYIGDLLPLLELFIIPLXNILNKRLSHLIKQFMLSTLLFLKESDHYPCCKKYMELYNELRENFERLYLYXAHTKNLSHDHSNY

SEQ ID NO: 265823 - protein, 161 aa, Glycine max
  Clone ID: PAT_MRT3847_82058C.1.pep
FGSSWYYGNGINDYLVPRDQDLLDRHPSPDYWSNWGISATEGFNSPKNLFIMDFFEERFNNQIELEPSLHDKDHSSSSSVCGGLPEQSFQQTAFSCDQPNYQLQDLPRFEPMNDTFLDSVPEGLPCVDVENLDKSINISSEKPWQQYTWYFAVRYSTFKVC

SEQ ID NO: 265824 - protein, 60 aa, Glycine max
  Clone ID: PAT_MRT3847_82059C.1.pep
WVGTERLSSKQDRLSSFTSHLALCLFNLTTLSSSLSIYLYRCPIWHRCFSHALIDHHIAT

SEQ ID NO: 265825 - protein, 347 aa, Glycine max
  unsure (1)..(347): unsure at all Xaa locations
  Clone ID: PAT_MRT3847_8205C.1.pep
AKAPSMILQSFKNSVSLCVYGEDNLISDHEYVTPYFTGSKLHSFLAGHNITITDGIDNTSATLLFTKLAYCDLLKRNFKQMSNVMRVAPADNASLWPQLHYVPCHNLDMQEAYLDYLVNVLRELYLHSPEEARQLRRKALSRIEWLQKADVPTIAQIEEFHSMQRMMNAPDSNDNIDLLLSIDLLGLQGAGXAFPNKIVFDDKLVLANTQEFFDGNFPVDSWLPIFVNCLYPVSQLPSEAVVVNVTCGSGRGGLPTTACIIYAVNNRSSNINKKITRSXLRKGNKIVLFTRIEPFPVALLXLLFEIXNEIPGTNATNSMPTLLLXNCMRVKFIVNDWAFAFEYQTQI

SEQ ID NO: 265826 - protein, 72 aa, Glycine max
  Clone ID: PAT_MRT3847_82060C.1.pep
SLWTYLKIEHLVCCQKISLAQLIVKSLRLLSCLLLLSILSPIFFFFLGSYYSIIFEALYLVQKKNELMVFFF

SEQ ID NO: 265827 - protein, 38 aa, Glycine max
  Clone ID: PAT_MRT3847_82061C.1.pep
NQPLSISSTLQRPAKFDEKQYCFWLKYFLLTYPLCSCI

SEQ ID NO: 265828 - protein, 49 aa, Glycine max
  Clone ID: PAT_MRT3847_82062C.1.pep
TSCQKVHHVVSQIASRERNERAEMVGLGYEGGQTEDPFPPIFSMPSQSI

SEQ ID NO: 265829 - protein, 155 aa, Glycine max
  unsure (1)..(155): unsure at all Xaa locations
  Clone ID: PAT_MRT3847_82063C.1.pep
PQPLWDRPSRHTNWSQSDINNQGXGIEGDIVKNLRIHMVRLHPRMNNMHRMLEACMDMQLELQRSIRQEVSAADDQVEFITGIHDGVSTDDKSKWECVRKGLCCICCESNIDSLLYRCGHMCTCSKCANDLLQSRRKCPMCQAPVVEVIRAYSIQ

SEQ ID NO: 265830 - protein, 111 aa, Glycine max
  Clone ID: PAT_MRT3847_82064C.1.pep
SNKRNLKTATNFSLFRSHTYSLASFSSSIFASRSIFGTLMASIAGSSCVALRTANFASSDNRKIGQIRQWSPILTNLRPVSGLRHRSNTPFSSSGVRAQVATLEEAGTRAT

SEQ ID NO: 265831 - protein, 38 aa, Glycine max
  Clone ID: PAT_MRT3847_82065C.1.pep
SMLLHYVNVMLWILAPPDPIWWLLPLLAYGWLVIECGK

SEQ ID NO: 265832 - protein, 70 aa, Glycine max
  Clone ID: PAT_MRT3847_82066C.1.pep
MGFSNFLLGRFGLLKVSTFFFSSIFFFCRKPLSDSPDKTPKWSERAIKSYAMGELEARKLKYSNTGTGAI

SEQ ID NO: 265833 - protein, 95 aa, Glycine max
  Clone ID: PAT_MRT3847_82067C.1.pep
KLKRTLKVHHAHDSTRELLQNGSGYGSDETPEMVSHHASRSFSLPREQHREAEIKKKVFTRAATFEPVRSLEARHVHPKLPDCDDLAARIAALRA

SEQ ID NO: 265834 - protein, 67 aa, Glycine max
  Clone ID: PAT_MRT3847_82068C.1.pep
KWKMEEVFNFTHINVGNIVHVIKSDRIGKDQKLVLGKTVRSSDSQRSHWSRPKETLTETMLFSKCQL

SEQ ID NO: 265835 - protein, 125 aa, Glycine max
  Clone ID: PAT_MRT3847_82069C.1.pep
IKLFISDNEFNLTIIARRSRHYAGTRYLKRGVNEKGRVANDVETEQIIFTDARDGRPMQISSVVQIRGSIPLFWSQETSRLNIKPDIILSRKDSNFEATRLHFENLVKRYGHPIIILNLIKTREK

SEQ ID NO: 265836 - protein, 555 aa, Glycine max
  unsure (1)..(555): unsure at all Xaa locations
  Clone ID: PAT_MRT3847_8206C.1.pep
SRVRRFVSGDGEEMTLIPGTSVEEAYNKLIVELEKSVATLVGIECAKDEKLSCCITFDKPKTRCFTILPMEFNLVVRQKFLNFVRFIMKKRDKLSLXVGINPYSMEWTGLANRLLSKGNDMLCCDYARFDGLITKQVMSKMAEMINSLCGGDEKLMRERTHLLLACCXSRMAICKKDVWRVECGIPFGFPFTGFCYSLFNEMLHXFSYEKLLRQAKAPSLFLQSFKNFVSLCVYGDDNLISGHEYVKPYFSGSLXLKAFLVGNNITIPVGIDKTXCNFAIKKVANWDFLXKRNFKXQCLNVLWVAXPEDKASLWSQLHYVSCNNLEMQEAYLVNLVNVLRELYLHSPEEARQLRRKALSRIEWLQKADVPTIAQIEEVHSMQRMNNASESNGXNLTYLWNIDLVGLXQGAGKAFPXKNVFNDKLVLANTQEFFDGNFPVDSWLPIFVNCLYPVSQLPSEAVVVNVTCGSGRVVYPPMVCISCGLNNLFSHIHKEIRTALEKGKKIVFLTRVDPFPVALLAVLFGVKNEILSSNATNPMLTRLLENCKSLKYLVDE

SEQ ID NO: 265837 - protein, 98 aa, Glycine max
  Clone ID: PAT_MRT3847_82070C.1.pep
LWVLIFVIFLFPVRVFSFYSSTHYITGQLRREQNGTTKLQPSISCQMEPHDRTEDGNSYQLKRPMQTKPDQTPQERHHHADMALDALWPIISTHRYRY

SEQ ID NO: 265838 - protein, 663 aa, Glycine max
  unsure (1)..(663): unsure at all Xaa locations
  Clone ID: PAT_MRT3847_82071C.1.pep
MDSNSTKEKLQNSVVVADGAELKSCYMQKFRLYETRSKFYMIGRDKNRTFWRVLKIDRLEPSELNIFEDSTLYSDIECCDLLRRIHEGNKSTGGLKFVTTCYGIIGFIKFLEPYYMLLITKRKKIGTICGHTIYAITKSEMVPIPHATVRSKMAYSKDENRYKKLVCSVDLTKDFFFSYSYNVMLSLQRNLSDHNTAGQSLYETLFVWLXNEFLTRGIRNNLQNTSWTVALVYGFFKQIKLFISDNEFNLTIIVRRSKFYAETRFLKCVVYEKGKVFNYVETEQIVFTDARVGRPMQISSVMQIRGSIPLFWSQEASRLNIKPDIILSRKDSNFEATRLHFENLVKRYGNPIIILNLIKTREKKPRETILRAEFANAVRSLNKNLKGENRLRFLHWDLHRHSRCSKATNVLGQLGKVAAYALKLTGIFYCPVTSNVRLDGFSHYSYTENNNVTDHCITEQASINKDNVDKETEIINCYCSSDENKDYSVKPQMLQSGVLRTNCIDCLDRTNVAQYAYGLAALGCQLQALGFVETPYIDLDNPLAKELMEIYESMGDTLAFQYGGSAAHNKIFSERRGQWKAAAQSQEFIRTLQRYYNNTYLDGDKQKAINLLLGHFQPQQGKPALWELDSDQHYTVKKHGLYVADDSVRSTIKRSLSDGNILS

SEQ ID NO: 265839 - protein, 107 aa, Glycine max
  unsure (1)..(107): unsure at all Xaa locations
  Clone ID: PAT_MRT3847_82072C.1.pep
SMYTVHLXPNREVVLSGYQAAXEAVVDHGEEFIARCDYPVFFNFTKGNGIGFFSGDRWRVLRQFSIHILRNFGMGKRIIDERILQDGSYLLADLQKTECYPFDPTFV

SEQ ID NO: 265840 - protein, 781 aa, Glycine max
  unsure (1)..(781): unsure at all Xaa locations
  Clone ID: PAT_MRT3847_82073C.1.pep
AEEEVLIRGEELSGRLGQGVDSDVLHPKLIEALXSTNIELVACGENHSCAVTLSGDLYTWGNGTYNYGLLGHGNQVSHWVPKRVNGPLEGIHVSYISCGPWHTAVVTSAGQLFTFGDGTFGALGHGDRKSVSLPREVESLKGLRTVRAACGVWHTAAVVEVMVGNSSSSNCSSVDLFTWGDGDKGRLGHVDKEAKLVPTCVALAEHNVCQVACGHSLTVALTTSGRVYTMGSPVYGQLGNPQADGKLPILVEGKLSESFVQEIACGAYHVAVLTSRTEVYTWGKGANGRLGHGDTDDRNTPTLVEALKDKDVKSIACGTTFTAAICLHKWVSGVDQSMCSGCRMPFNFKRKRHNCYNCGLVFCHSCSMNMTRLNPMAPNPNKPYRVCDNCLNKLIKTTXTDAGIGTIGENREVIXDFVIPLFFSILNTLSNXSLYVACVGVVEEFKQVESRSSKKNKILEFNSRRVSPIPNGGSQWGASNISKSFNPVFGSSKKFFSASVPGSRIVSRATSPISRRPSPPRSTTPTPTLGGLASPKIVVDDAKRTNDSLSQEVIKLRSQVENLTRKAQLQEVELERTTKQLKDAIAIAGEETAKCKAAKEVIKSLTAQLKDMAERLPVGAARTVKSPTLTASFGSNPCSNDVSYASIDRLNIQATSPEADLTGSNNHLHSNGSSTVSSRSTGHTKQSQPDSTNRNGSRTKDSESRNETEWVEQDEPGVYITLTSLPGGIIDLKRVRFSRKRFSEKQAEQWWAENRGRVYEQYNVCMIDKSSVGVGSEDLAH

SEQ ID NO: 265841 - protein, 66 aa, Glycine max
  Clone ID: PAT_MRT3847_82074C.1.pep
RQVFFLRELAKLSAKLRGSPLELAVPCPSSSSSSSSFVSHKLILKVPLVAGISVVWQYYSQRISSN

SEQ ID NO: 265842 - protein, 29 aa, Glycine max
  Clone ID: PAT_MRT3847_82075C.1.pep
QFRHLDRPDTGSFKVYGRLKFEKSAKLKG

SEQ ID NO: 265843 - protein, 81 aa, Glycine max
  Clone ID: PAT_MRT3847_82076C.1.pep
YMAAGNKLSLPIHIKPPIKLSITPSINNPSPNIITRTEHHCDYYYNKTTQLFTKTICFLKEFLASFIGVPNLRDRKFSYIL

SEQ ID NO: 265844 - protein, 41 aa, Glycine max
  Clone ID: PAT_MRT3847_82077C.1.pep
HQKLRRNIILLRRVSGTNGLHVFTIPFYIHLRRIVLQSLHG

SEQ ID NO: 265845 - protein, 74 aa, Glycine max
  unsure (1)..(74): unsure at all Xaa locations
  Clone ID: PAT_MRT3847_82078C.1.pep
DFWWLXXRGCCKGHHWVVINTSAVMENSETVKEKVVLNGIRQIDCHFGNDDGLIREGQSEVDDVDLDLCYTYDC

SEQ ID NO: 265846 - protein, 88 aa, Glycine max
  Clone ID: PAT_MRT3847_82079C.1.pep
RKNFSKRVHLPRKNQTPVSALGLKELKFWDFVPLKFFSLGPRQVSPVSGRPPPSFFFLPQERFSFFSRGFFFFFFFFFGEKPPLLVFF

SEQ ID NO: 265847 - protein, 741 aa, Glycine max
  unsure (1)..(741): unsure at all Xaa locations
  Clone ID: PAT_MRT3847_8207C.1.pep
IVGFHVAGSKGRLGYASLIPYVEPVVQAQSAEVYFDFFPVEVDSQEGVAHIGELKSGVYVPLPTKTNLVETPKEWQLDLPCDKIPSVLTTTDERLVGTEHEGYDPFLGGIQKYATPMMPLDEEILSKVAQDMVEEWFDCVDEEDSFEEVSLSAALNGVEGLDYMERIPLATSEGFPHVLSRKNGEKGKRRFVTGDGEEMSLIPGTSVEEAYNKLTVELEKCVPTLVGIECPKDEKLPRRKIFDKPKTRCFTILPMEFNLVVRQKFLNFVRFIMKKRDKLSCQVGINPYSMEWTGLANRLLSKGNDILCCDYASFDGLITKQVMSKMAEMINSLCGGDEKLMRERTHLLLACCSRMAICKKDVWRVECGIPSGFPLTVICNSIFNEMLIRYSYEKLLRQAKAPSMFLQSFKNFISLCVYGDDNLISVHEYVKPYFSGSKLKSFLASHNITITDGIDKTSATLQFRKLSECDFLKRNFKQMSNVLWVAPEDKASLWSQLHYVSCNNLEMQEAYLVNLVNVLRELYLHSPEEARQLRRKALSRIEWLQKADVPTIAQIEEFHSMQRMMNAPDSNDNIDLLLSIDLLGLQGAGKAFPNKIVFDDKLVLANTQEFFDGNFPVDSWLPIFVNCLYPVSQLPSEAVVVNVTCGSGRGGLPTTAWISSAVNNRSSDINKWIRTALDKGKKIAFLTRNDPFPVSILTAFSGVQNEILSSNATNPMLTLLLVNCDTLKYLVXDECTLSFEN

SEQ ID NO: 265848 - protein, 78 aa, Glycine max
  Clone ID: PAT_MRT3847_82080C.1.pep
EFLKKKKKKSEIEAAQWMAIEDYMAQPFVRENELFDFLTKIGLSKFNGKYSGFSTVLSSTSSCKKSYFYFNNNDAGHI

SEQ ID NO: 265849 - protein, 156 aa, Glycine max
  Clone ID: PAT_MRT3847_82081C.1.pep
GSRLDWEAIGKILARGHSRVPVYSGNPKNIIGLLLVKNLLTVRAETETPVSAVSIRRIPRVPADMPLYDILNEFQKGSSHMAAVVKVIRERNNPQSPNDTEKSKDKEVIKHNSQLTIPLLSRFYEKSENVVNIDKPKLAADQQFQKDGPATNGVYH

SEQ ID NO: 265850 - protein, 77 aa, Glycine max
  unsure (1)..(77): unsure at all Xaa locations
  Clone ID: PAT_MRT3847_82082C.1.pep
PAATTVNRAGARMDTPFTVLKSMVGSPKRNTNNDITCIANYGGRVQCMQVRPPICTNKLXTISYMTYHDDAQLAKEV

SEQ ID NO: 265851 - protein, 94 aa, Glycine max
  unsure (1)..(94): unsure at all Xaa locations
  Clone ID: PAT_MRT3847_82084C.1.pep
LPRRRQKGSFQNYRPTKKNILVVGPVPGQKYXRITFPILSPDSTTKRDVQCLKYPKYVGGNRGRGQINLEGSKSINIVYNATAAGMVKKIIRKE

SEQ ID NO: 265852 - protein, 94 aa, Glycine max
  unsure (1)..(94): unsure at all Xaa locations
  Clone ID: PAT_MRT3847_82085C.1.pep
FINMSWDFXYYWLKLGVYIGVVGCFGSINLNVGTGYNSILAIGXCASLVXGFVTVMSLGGFLSFVEDMKVVQRERLNGHYGVTFIWHEYHIICC

SEQ ID NO: 265853 - protein, 197 aa, Glycine max
  unsure (1)..(197): unsure at all Xaa locations
  Clone ID: PAT_MRT3847_82086C.1.pep
PPPPPPAPPPPPPPPPPPPQPPPSSHYSRPPPPTVLVPPPPPTPPPPPPPPPPPPPHAQHLRVRPXGFPPSPHPPPPPQAPAPLAPSPAPASVSQRPCASPIGPPRFFSTGPRLLLLLCTSDRSSLLLLQVVVVQGICALLSCYCNTCETPTQWKKQKILIQDSFFVCVALPHMTPQGHPKCKFWLDQHSFAPVNDS

SEQ ID NO: 265854 - protein, 53 aa, Glycine max
  Clone ID: PAT_MRT3847_82087C.1.pep
NLSGFSLQLFPIRGTIIGVKARRSSCCFYFVKLPTYWPLAHFVHPHHRPFLWT

SEQ ID NO: 265855 - protein, 222 aa, Glycine max
  Clone ID: PAT_MRT3847_82088C.1.pep
DFISWIIWGQAGGSSTFLSRSIDLAFILFKHGQYGAAEQLLMIAEAHLLKEKTSQSIQDDDGGWCIRHHLLGCCLLAQVQCGLHATQKDKKVSEAIRCFFRSSSGNGASEALQSLSDDLGIPYLGFSGCTSIAAWKLQYYQWAMQLFERYSISEGACQFALAALEQVDEALYMKDDKCTNNSTNESVTTIKGRLWANVFIFAVDLGRFYDAYCAIISNPDEE

SEQ ID NO: 265856 - protein, 185 aa, Glycine max
  Clone ID: PAT_MRT3847_82089C.1.pep
MSTSRPSQSSSNSGRSRRSARAMALATVDAKLHATFEESGSSFDYSSSVRISGTADGVNQPRVRKVTTAYLHHMQKGKMIQPFGCLLALDEKTCKVIAYSENAPEMLTMVSHAVPSVGDHPALGIGTDIKTLFTAPSASALQKALGFAEVLLLNPVLIHCKTSWKPFYAIIHRVTGSVMIDFEPE

SEQ ID NO: 265857 - protein, 401 aa, Glycine max
  unsure (1)..(401): unsure at all Xaa locations
  Clone ID: PAT_MRT3847_8208C.1.pep
MCLQPKNGEKGKRGFVFGDGEEITLDPGTKCEKAYNKLICELEKSVXTLGGIECPKDEKLXRRKNFDKPKTRCFTILPMEFNLVVRQKFLNFVRFIMKKRDKLSCQVGINPYSMEWTGLANRLLSKGNDILCCDYASFDGLITKQVMSKMAEMINSLCGGDEKLMRERTHLLLACCSRMAICKKDVWRVECGIPSGFPLTVICNSIFNEMLIRYSYEKLLRQAKAPSMFLQSFKNFVSLCVYGDDNLISVHEYVKPYFNGSKLKSFLASHNITITDGIDKTSATLQFRKLADCEFLKRNFKHTSNALWVAPEDKASSWSQLHYVSCNNLEMQEAYLVNLVNAFRELYLYSPKEACXCRKKALSRIEWLAKSXIVPTIAQNEEFHPLHRMMNAPDTYDILNY

SEQ ID NO: 265858 - protein, 105 aa, Glycine max
  unsure (1)..(105): unsure at all Xaa locations
  Clone ID: PAT_MRT3847_82090C.1.pep
VPFFPKPFLKLSKKPPTFAPLLNPPPPPPKNPLKSKVSPPEPPKETPGPGGPPKKKKKASPTKVPXVVLKARSPPXKKPPPVPLARPPKKKKKGPPKPPNFFWVG

SEQ ID NO: 265859 - protein, 84 aa, Glycine max
  Clone ID: PAT_MRT3847_82091C.1.pep
KSGVHPNVVIFTTVISGWCSVGRMDNAMRVFDKMGEFGVSPNLKTFETLIWGYAEAKQPWKAEGMLQIMEEFHVQPKKSTILLV

SEQ ID NO: 265860 - protein, 48 aa, Glycine max
  Clone ID: PAT_MRT3847_82092C.1.pep
MPNPKVFVDMTIGGQSTGRIVIELYSDLTLITAENLRALCIFNKGTWR

SEQ ID NO: 265861 - protein, 433 aa, Glycine max
  unsure (1)..(433): unsure at all Xaa locations
  Clone ID: PAT_MRT3847_82093C.1.pep
MVSPSQVVKVKRNTLRPCMTCPLCHKFFKDATTISLCLHTFCRKCIYEKLSDEEMDCCPVCHIDLGCLPVEKLRPDHNLHDIRAKIFPFKRKKIKAQEVLSSISLPAKRKERSLSSLVVSAPKVSMQPGFTGKRTKNSTRKAAALRGCSFLLDESIKKEQTNGDDNMDSPMPEHSKKHKPHEDTENSVQHTEGKVDLWTPLNCLVEAANRTKSSRSNSQATPLAKLESPTTPHGGQDASETTTKTDLPASAQSELNIPKSKNKDTGLKPIFGDDKDANSLPLGPVKRRRLRPAGQKRVAASEMSASSPAPLDATGGKCNRKNSPIWFSLVASEDQKGDFPLPQISACYLRIKDGTVPVSFIQKYLMKKLNLASEAEVEIMCRGQPVLPSLQLHNLVDLWFXTASTSKKIPASVGSSAKDFVMVLSYCRKALPP

SEQ ID NO: 265862 - protein, 395 aa, Glycine max
  Clone ID: PAT_MRT3847_82094C.1.pep
MVSPSQVVKVKRNTLRPCMTCPLCHKFFKDATTISLCLHTFCRKCIYEKLSDEEMDCCPVCHIDLGCLPVEKLRPDHNLHDIRAKIFPFKRKKIKAQEVLSSISLPAKRKERSLSSLVVSAPKVSMQPGFTGKRTKSSTRKAAALRGCSFLLDESIKKEQTNGDDNMDSPMPEHSKKHKPHEDTENSVQHTEGKVDLWTPLNCLVEAANRTKSSRSNSQATPLAKLESPTTPHGGQDASETTTKTDLPASAQSELNIPKSKNKDTGLKPIFGDDKDANSLPLGPVKRRRLRPAGQKRVAASEMSASSPAPLDATGGKCNRKNSPIWFSLVASEDQKGDFPLPQISACYLRIKDGTVPVSFIQKYLMKKLNLASEAEEVKQHIASLVDIVWGLRLS

SEQ ID NO: 265863 - protein, 256 aa, Glycine max
  Clone ID: PAT_MRT3847_82095C.1.pep
MLSSRCSTASMLLPLLFSIFLFLFIIHLKGNQHLSFEFPNFSLSSIKGITTQLLRPHGQYLANSAYRSLEHRSKKRTSFDVVEEGLAKARASIREAILYRNHSNSGKQEHFIPKGSIYRNPHAFHQSHMEMVKRFKVWVYEEGEQPLVHYGPVNDIYAIEGQFIDEIDNSKRSPFKARNPDEAHAFFLPLSVVNVVHYVYKPYMSQNDYSRDRLQRLVEDYIGVVADKYPYWNRKHGADHFLLSCHDWAPEISHAN

SEQ ID NO: 265864 - protein, 122 aa, Glycine max
  unsure (1)..(122): unsure at all Xaa locations
  Clone ID: PAT_MRT3847_82096C.1.pep
EIHKPGPSPKSHNMKDGGTNVEVSEDGSKREDTTSESGGGGGLINNLVSTLIAPLSPSIGKATEHESGADDDGEKEGVDGCEEGGGIIRKMVSNFFHQSEGEGVVXAEEDKEVVDEIMAGGE

SEQ ID NO: 265865 - protein, 69 aa, Glycine max
  unsure (1)..(69): unsure at all Xaa locations
  Clone ID: PAT_MRT3847_82097C.1.pep
GTVSAGCPQRGPVWIXENGVETDLEHVDLDQGEHKTPEYFIKQTCGQGPPEQEGDLRLYEYRAMIRYSA

SEQ ID NO: 265866 - protein, 79 aa, Glycine max
  unsure (1)..(79): unsure at all Xaa locations
  Clone ID: PAT_MRT3847_82098C.1.pep
LKQITLDDVKRYIINPDKVSKQIERICCKCSCYFFLLXLSCTIKCKWPTKVDSVMQPPFCSKSLQEFGLQTSKSHRSHF

SEQ ID NO: 265867 - protein, 84 aa, Glycine max
  Clone ID: PAT_MRT3847_82099C.1.pep
ATVEFISHLRAEHPKNGSQCAMQAKSGSMENKVVEWICPAFKVKQVVWLYPSETGVMILRVDGIIACSRRRTYIRIVKFLKGPT

SEQ ID NO: 265868 - protein, 400 aa, Glycine max
  unsure (1)..(400): unsure at all Xaa locations
  Clone ID: PAT_MRT3847_8209C.1.pep
IPGSSAEEAYNMLIAELEKSVPTLVGIECPKDEKLPRRIIFDIPMTRCFTILPMEFNLVVRQKFLNFVRFIMKKXRDKLSCQVGINPYSMEWTGLANRLLSKGNDILCCHLAHNLLGNQTIKTSIMAXEMINSLCGGDEKLMRERTHLLLACCSRMAICKKDVWRVECGIPSGFPLTVICNSIFNEMLIRYSYEKLLRQAKAPSMFLQSFKNFVSLCVYGDDNLISVHEYVKPYFSGSKLKSFLAGHNITITDGIDKTSATLQFRKLADCDFLKRNFKQMSNVLWVAPEDKASLWSQLHYVSCNNLEMQXEAYLCNXLVNVLRELYLRSPKEARQLEKESSLSFWKGRXKLXCPTLAXMEEFHSLPRMMNAPGSKEILIYCRTIDXLGFQGPGKAFQTKM

SEQ ID NO: 265869 - protein, 220 aa, Glycine max
  unsure (1)..(220): unsure at all Xaa locations
  Clone ID: PAT_MRT3847_820C.1.pep
MSSSSSGLIFRGHEAHPMDDAYYPKPQKPWLSFGYLLREQRLHFLLLGFVLATLFFFLLPSSSPSQPLGAHDPFPTPYLEPTRWPTNSRSYDVVSVHSVGKIPLGIKRKGLRIVVTGGAGFVGSHLVDRLIARGDSVIVVDNFFTGMKENVMHHFGNPNFELIRHDVVEPLLLEVDQIYHLACPASPVHYKFNPVKTIKTNVGRTLNMXGLAKKVGPGSC

SEQ ID NO: 265870 - protein, 76 aa, Glycine max
  Clone ID: PAT_MRT3847_82100C.1.pep
KAGCPNMEIKRANPGVPQQRKCRTTDRGWHAGGQIRSLSPGKPGGLKTWIPQTPSPLFFFSFFFFFFFFFFFFFFF

SEQ ID NO: 265871 - protein, 206 aa, Glycine max
  Clone ID: PAT_MRT3847_82101C.1.pep
MGSFETELMNLKATELRLGLPGCDETNEKSSSSSGSVVRSNKRSSPEPSVEESRCNSNGSSDSTTTSDHDQDSAQPEKVQVVGWPPIRSFRKNSLQQQKKVEQLQGDGGGMYVKVSMAGAPYLRKIDLKVYNSYPELLAALQSLFTCTFGEYSEREGYNGSEYAPTYEDKDGDWMLVGDVPWNMFVSSCKRLKIIKGSEAKGLGCL

SEQ ID NO: 265872 - protein, 204 aa, Glycine max
  Clone ID: PAT_MRT3847_82102C.1.pep
MGSFETELNLKATELRLGLPGCDETHDKSSSSSGSVVRSNKRSSPEPSVEESRCNSNGSSDSTTTSDHDEDSVQPAKVQVVGWPPIRSFRKNSLQQQKKVEQQGDGSGTYLKVSMAGAPYLRKIDLKVYNSYPELLMALQNLFKCTFGEYSEREGYNGSEYAPTYEDKDGDWMLVGDVPWNMFVSSCKRLKIIKGSEAKGLGCL

SEQ ID NO: 265873 - protein, 60 aa, Glycine max
  Clone ID: PAT_MRT3847_82103C.1.pep
PNNFFIWFLINKGIKPWWPAIPKLICFWLAEGKREVFHHLCSLACQGTKKEKTFFRIKGP

SEQ ID NO: 265874 - protein, 65 aa, Glycine max
  Clone ID: PAT_MRT3847_82104C.1.pep
ASRLLAPCIQDILAESKSRHVNKTGLIIPTRIKSHIQSISFICYRKCCSILQKSARMELCLISGF

SEQ ID NO: 265875 - protein, 77 aa, Glycine max
  Clone ID: PAT_MRT3847_82105C.1.pep
CFSKFPVYMCEKNLKPTTTESKQIELVCLGINSHPTVHYWAQQAEKRVITEVMDLEKTETSTYDNPARCVAESVRGI

SEQ ID NO: 265876 - protein, 24 aa, Glycine max
  Clone ID: PAT_MRT3847_82106C.1.pep
TIRKLLFALDFHTLWGLTSGGYFT

SEQ ID NO: 265877 - protein, 31 aa, Glycine max
  Clone ID: PAT_MRT3847_82107C.1.pep
IYHRGSIFNLECLMIIFQIHNRVSYLGGFWV

SEQ ID NO: 265878 - protein, 250 aa, Glycine max
  Clone ID: PAT_MRT3847_82108C.1.pep
GTLVTVAGAMLMTLYKGPMVWTKDAPHNGQINNATNTTTYSDKDWFIGSILLIIATLAWASLFVLQAKAIETYKNHQLSLTSLICFIGTLQAIAVTFVMEHKPSVWTIGWDMNLLAAAYAGIVTSSITYYVQGLVIKKKGPVFATAFSPLMMIIVAIMGSFILSEQLFLGGVLGAILIVIGLYSVLWGKHKEQVVKNEVEDIPLPVKGAQLDGNPETLIDSTDQKSDSNKISSHIINVSIPELPMKSNNS

SEQ ID NO: 265879 - protein, 56 aa, Glycine max
  Clone ID: PAT_MRT3847_82109C.1.pep
MKIVKRVSGAFIKYIFIMIYYLVSKTLLRHTRTTTFRTTLYQTYKVNCCKTHFLQL

SEQ ID NO: 265880 - protein, 56 aa, Glycine max
  Clone ID: PAT_MRT3847_8210C.1.pep
GYISAASAAVAEYTDDYETTVTTTAREFQNREDPDTDTEQQKTTNDLQQHSLTQLN

SEQ ID NO: 265881 - protein, 65 aa, Glycine max
  Clone ID: PAT_MRT3847_82110C.1.pep
ELYAGAIREVKEETGIDTEFVEVIAFRHARNVAFEKSDLFFICMLRPLSAEIIVDDPEIEAAKVR

SEQ ID NO: 265882 - protein, 46 aa, Glycine max
  Clone ID: PAT_MRT3847_82111C.1.pep
QTVSWMITFLLMRLALVGSLSLRSLQVKTAAFGGIFNFHSNVEVLT

SEQ ID NO: 265883 - protein, 378 aa, Glycine max
  Clone ID: PAT_MRT3847_82112C.1.pep
MLPLRLSAVVSSLILCFLFPPLLCLGIRSFPTTADDGAFFHYSEAPEYRNGAGCPVSSTRVSLPSWDPSLVHIAMTLDSGYLRGSIAAVNSVLRHSSCPENVFFHFIAAEFDPASPRVLTRLVGSIFPSLNFKVYIFREDTVINLISSSIRQALENPLNYARNYLGDMLDACVSRVIYLDSDVVVVDDVGKLWRAPITRERVIAAPEYCHANFTKYFTDEFWNDPLLSRVFSTRKPCYFNTGVMVMDLAKWREGNYRRKIENWMELQRKKRIYELGSLPPFLLVFGGNVEAIDHRWNQHGLGGDNLNGVCRSLHPGPVSLLHWSGKGKPWVRLDEKKPCPLDSLWEPYDLYKQVKDRVRDQNWGFSSSILVGYAHDLL

SEQ ID NO: 265884 - protein, 64 aa, Glycine max
  Clone ID: PAT_MRT3847_82113C.1.pep
THCNLTVAFPFFPLIICLVLGSNLHCSKTSHTLFYFPVKYIMTSAQFNNLRGKLENQSMVSNLF

SEQ ID NO: 265885 - protein, 110 aa, Glycine max
  unsure (1)..(110): unsure at all Xaa locations
  Clone ID: PAT_MRT3847_82114C.1.pep
AAIVCQSSRIHRLMLASPKPPPQQPFKSCLWENNYSYKPDSTTACSSIEALSSTVSNYEAEVSLLRLSPKSLELCTENLRNETDRDDIITXTGIELLSSSSSSXTREPEK

SEQ ID NO: 265886 - protein, 42 aa, Glycine max
  Clone ID: PAT_MRT3847_82115C.1.pep
QLIRKMHGFGKATNPPSDQSLTYYNLIKYQFFFFYERRFYYS

SEQ ID NO: 265887 - protein, 137 aa, Glycine max
  unsure (1)..(137): unsure at all Xaa locations
  Clone ID: PAT_MRT3847_82116C.1.pep
QTMHIPWDEAGCLCLVGDLFNYDAPGMEPSGIEDLEHFLSNSSIHDTSLLNGDNNIMVXQTTLILTQRLTDGWFEEDVNAYCFYSRAHYKKGDQVLLCYGIYTNLELVEHYGFLLQENPNDKVFIPLEPAVYSSTSW

SEQ ID NO: 265888 - protein, 301 aa, Glycine max
  Clone ID: PAT_MRT3847_82117C.1.pep
NSARADLKRGMFSQQEEDLIISLHEVLGNRWAQIAAQLPGRTDNEIKNFWNSCLKKKLMKQGIDPATHKPLLSAQEHIIIKEEKETILETPPPMLLPMSQGILASSQESPLVVNNSSYCDGGLNVTEAASREVFMSKNAALDPLSYFEFQMGYNPIRQFDQNHVGTNSSYGFSSLPCLNSSSDHGNVSVAAEFSDNNSASKISSLMKESSSNSSSMSVYPAGGGCQMMENAGFSWDGENNNTKIDPLLQFHVNVLKSEEFKTSSWQEEQILTQNLIDFTNYPLMSLSEDLTGANFDVFQQM

SEQ ID NO: 265889 - protein, 89 aa, Glycine max
  unsure (1)..(89): unsure at all Xaa locations
  Clone ID: PAT_MRT3847_82118C.1.pep
IASRKEGPHLPTRHEATGTNPEKPPQEIGTVSRRKPPPLYRGKQGTHLWPPATLGHLXTVPESIRCALAGTXADIPLIXEAANIQIPYD

SEQ ID NO: 265890 - protein, 87 aa, Glycine max
  Clone ID: PAT_MRT3847_82119C.1.pep
PPRKTSSKVTRATRRPADKYLYLTFTYAGGLGPAPSSITPIKTQHGASEEEKLDAEETRDGNGEEESPTRRTLVAHTDYIYTQKHKP

SEQ ID NO: 265891 - protein, 362 aa, Glycine max
  unsure (1)..(362): unsure at all Xaa locations
  Clone ID: PAT_MRT3847_8211C.1.pep
SRVYLRVLYDCLDEEDSFGEVFLSAFLFVAEGLDYMERIPLATSEGFPHVLSRKNGEKGKRRFVSGDGEEMTLIPGTSVEEAYNKLIVELEKSVPTLVGIECPKDEKLPRRKIFDKPKTRCFTILPMEFNLVVRQKFLNFVRFIMKKRDKLSCQVGINPYSMEWTGLANRLLSKGNDILCCDYASFDGLITKQVMSKMAEMINSLCGGDEKLMRERTHLLLXACCSRMAICKKDVWRVECGIPSGFPLTXICNSIFNEMLIRYSYEKLLRQAKAPSMFLQSFKNFVSLCVYGDDNLISVHEYVKPYFSGSKLKSFLAGHNITITDGIDKTSATLAMTWIFKGQYVPRNSEPKCVDLTNYTAV

SEQ ID NO: 265892 - protein, 65 aa, Glycine max
  unsure (1)..(65): unsure at all Xaa locations
  Clone ID: PAT_MRT3847_82120C.1.pep
RDRNIMKKLLVDRGAIRFVLAGANIMCPGLTSSGGVXDEDVRAKCPVAIMAKGKQHSLAIGFTKM

SEQ ID NO: 265893 - protein, 41 aa, Glycine max
  unsure (1)..(41): unsure at all Xaa locations
  Clone ID: PAT_MRT3847_82121C.1.pep
NGYLLNKCFERDEHSLTTIDVVSPVAAISYYXSHNIKAIFV

SEQ ID NO: 265894 - protein, 70 aa, Glycine max
  Clone ID: PAT_MRT3847_82122C.1.pep
FLIPLKPREGLKIESCGKNNNYKPRAHKKLLKIFHSSINLLFKEHYHMFFKVHGSPKYSILGNTKNFQHF

SEQ ID NO: 265895 - protein, 86 aa, Glycine max
  Clone ID: PAT_MRT3847_82123C.1.pep
EYTKCFLLIGGRLLKGKKITLCAGHRLRESCTVPLSVYWLNTLLLDIGLRVRFKLFLCLPQLSAEFQVQAGAILDECSHSPIWHRT

SEQ ID NO: 265896 - protein, 515 aa, Glycine max
  Clone ID: PAT_MRT3847_82124C.1.pep
MANLDLDPFQTSILILVPIALLVALLSRTRRRAPYPPGPKGLPIIGNMLMMEQLTHRGLANLAKHYGGIFHLRMGFLHMVAISDPVAARQVLQVQDNIFSNRPATIAISYLTYDRADMAFAHYGPFWRQMRKLCVMKLFSRKRAESWQSVRDEVDSAVRAVASSVGKPVNIGELVFNLTKNIIYRAAFGSSSQEGQDEFIKILQEFSKLFGAFNIADFIPYLGCVDPQGLNSRLARARGALDSFIDKIIDEHVHKMKNDKSSEIVDGETDMVDELLAFYSEEAKLNNESDDLQNSIRLTKDNIKAIIMDVMFGGTETVASAIEWAMAELMRSPEDQKRVQQELADVVGLDRRAEESDFEKLTYLKCALKETLRLHPPIPLLLHETAEDATVGGYLVPKKARVMINAWAIGRDKNSWEEPESFKPARFLKPGVPDFKGSNFEFIPFGSGRRSCPGMVLGLYALELAVAHLLHCFTWELPDGMKPSEMDMGDVFGLTAPRSTRLIAVPTKRVVCPLF

SEQ ID NO: 265897 - protein, 164 aa, Glycine max
  unsure (1)..(164): unsure at all Xaa locations
  Clone ID: PAT_MRT3847_82125C.1.pep
RVEESDFEKLTYLKCALKETXRLHPXIPLLLHETAEDATVGGYFVPRKARVMINAWAIGRDKNSWEEPETFKPARFLKPGVPDFKGSNFEFIPFGSGRRSCPGMVLGLYALELAVAHLLHCFTWELPDGMKPSEMDMGDVFGLTAPRSTRLIAVPTKRVVCPLF

SEQ ID NO: 265898 - protein, 120 aa, Glycine max
  Clone ID: PAT_MRT3847_82126C.1.pep
GDWVLVKLRPHRQGSASETTYSKLTKRYYGPFEVQERLGKVVYRLKLTAHSRIHPVFHVSLLKAFVGDPETTHAGPLPVMMTEESTNTPLTVIDFKLVPADNGPRRMVLVQWPSASRQDA

SEQ ID NO: 265899 - protein, 109 aa, Glycine max
  Clone ID: PAT_MRT3847_82127C.1.pep
KSSTLFALFLLSAIFTSYLPSTTANIILNTNSDVLQNGNQYSILPIIRRSNGKLLLHTTKNKKYPLTITQTRNKLNRRIRTIISSPLRIAIIAENHPLSIAFNFFPVIP

SEQ ID NO: 265900 - protein, 39 aa, Glycine max
  Clone ID: PAT_MRT3847_82128C.1.pep
MRSCHLYRSMISTPVPIRNSLPVFIYSSASHHHHSCPDG

SEQ ID NO: 265901 - protein, 69 aa, Glycine max
  Clone ID: PAT_MRT3847_82129C.1.pep
MGEGEKFQLGTVGALSMSVVSSVSIVICNKALMSSLHFIFATTLTSWHLLVTFCSLHVALKLRLFEHKP

SEQ ID NO: 265902 - protein, 607 aa, Glycine max
  unsure (1)..(607): unsure at all Xaa locations
  Clone ID: PAT_MRT3847_8212C.1.pep
FDCFDEEDSFEEVSLSAALNGVEGLDYMERISLATCEGFTHVLSRKNGEKGXRRFVSGDGXXMTLIPGTSVQESYNKLIVALEKSVPTLAGIGCAKDEKLARRKIFDKPKTRCFTILPMEFNLVVRQKILNFVRVIMKKRDKLSCQGGMNPYSMEWTGLANRLLSKGNDILCCHLAHNLLGNQTIKTSIMAEMINSLCGGDEKLMPERTHLLVAWWSKVGIWKKKCWXVDCEIPSEFPLTVICISIFNEMLIRYSYEKLLRQAKAPSMFLQSFKNFVSLCAYGDDNLISVQEYVKPYFSGSNLKSFLASHXNITITDGIDKTTATLQFIKLAYCDFLKRNFKQMSNDLRAATEDKAXLWSQLHYVSCXNLEMQEGYLVNLVNELREMYLHSPKEARRLRRKALFRIEWLQKADVPTIAQIEEFHSMQRMMNAPDSNDNIDLLLSIDLLGLQGAGKAFPNKIVFDDKLVLANTQEFFDGNFPVDSWLPIFVNCLYPISQLPSEAVVVNVTCGSGRXGGLPTTAWISSAVNNLSSDINKRIRTALGKGKKIVFLTTVDPFPXVALLAVLFGVKNEILSSNAANPMLTRLLENCKSLKYLVDECPFAFVN

SEQ ID NO: 265903 - protein, 166 aa, Glycine max
  Clone ID: PAT_MRT3847_82130C.1.pep
RGLAPPWWPTGAENWWGEQGLLAHEHGPPPYKKPHDLKKAWKVSLLAAVIKHMSPDLYKLRRSVTQSKTLQDKMTTRDTATWSKVMNQEETLLQLANKCLKISPSEEDDKNECESSTSSSTIIHEGSHLGGSIEKRKSDLVFDLDAVIDKLYARALCLPILSVSTK

SEQ ID NO: 265904 - protein, 343 aa, Glycine max
  unsure (1)..(343): unsure at all Xaa locations
  Clone ID: PAT_MRT3847_82131C.1.pep
PRRPQNAPGAIAKYMPLLETDELDPSSYIHLLNDLQDXTLSSLLSALMQHCIPPQRRFPLERGLAPPWWPRGAENWWGEQGFLAHEHGPPPYKKPHDLKKAWKVSLLAAIIKHMSPNLDKLRRLVTQSKTLQDKMTARDTATWSKVMNQEETLLQLANKCLRISPSSEEDENECESSTASNIIEKRKSDLFDLDAVVDKLYACQYYQCPQSLTGMGFLNKNSRMNHESLCAYRTNESQSVLLQDSQSNDTQIASVDDWMMNLEAARANQNENNHPVGHPINDQFRDIAGKTSEEDYGCLWPKSLEDLDLQAALNQMDMDLNPNPEQDTPQGQEVTSIWDLPYK

SEQ ID NO: 265905 - protein, 102 aa, Glycine max
  unsure (1)..(102): unsure at all Xaa locations
  Clone ID: PAT_MRT3847_82132C.1.pep
ALINLSTCNMWGIVKCIEELXMKLKEGKYASVXDPXKPQVRXXQVLXNDCXNGYVEDPLQEDDQVQPPSDGVLRGKRHVLHVTTCKIIIYMVKLKKVICLVE

SEQ ID NO: 265906 - protein, 45 aa, Glycine max
  Clone ID: PAT_MRT3847_82133C.1.pep
KNTSGEHFHVSQQTRGWRLLQIRAKLTSHREDYEKSCATICFNRK

SEQ ID NO: 265907 - protein, 124 aa, Glycine max
  unsure (1)..(124): unsure at all Xaa locations
  Clone ID: PAT_MRT3847_82134C.1.pep
WKHWAPCLTYLVRPVVLPLATNAGAFXLQKERVADSAQFVMXENAERTVADDRVLACXTLRPPYVEFAVLHRARSMGTLHLLKGXTWIAVKERVSLPYIRLRAEHXNKALKMLNLKPDNVSMCH

SEQ ID NO: 265908 - protein, 86 aa, Glycine max
  unsure (1)..(86): unsure at all Xaa locations
  Clone ID: PAT_MRT3847_82135C.1.pep
MPVADNIAPAQEGSLESVTEYKTVSGVAGPLAIFDQVTEPKWDETGNICWPDXSTRGEPELEVDGEXADVPVFEGTSRIVKKTKTG

SEQ ID NO: 265909 - protein, 84 aa, Glycine max
  Clone ID: PAT_MRT3847_82136C.1.pep
FFPPFLFFKGKHWILLTLSRFQHSKVVCHSSMMVVQIAKECLVGTCQELQPLVWDTIALLQDQCYCMDCTLVQKIGLRCGCAPE

SEQ ID NO: 265910 - protein, 66 aa, Glycine max
  Clone ID: PAT_MRT3847_82137C.1.pep
NVFLTRFVDKMIIKSIQQPSRKYKTEEKTCLERQRLVTTEKCYKCHPYRKYIDSQIQMNLETYFNN

SEQ ID NO: 265911 - protein, 65 aa, Glycine max
  unsure (1)..(65): unsure at all Xaa locations
  Clone ID: PAT_MRT3847_82138C.1.pep
STSYARVKSTGILSKFSKFCTFVMKLLVTSLXHVLTSILKFLDYYLHLFFSKESFKDKIESMILS

SEQ ID NO: 265912 - protein, 58 aa, Glycine max
  unsure (1)..(58): unsure at all Xaa locations
  Clone ID: PAT_MRT3847_82139C.1.pep
LQDISGNDVSLNNYQRKALLIVKCRXSTCGLTQTNYKELNVLYEKYKNQGFEILAFPC

SEQ ID NO: 265913 - protein, 1285 aa, Glycine max
  unsure (1)..(1285): unsure at all Xaa locations
  Clone ID: PAT_MRT3847_8213C.1.pep
CILASSCALGLVEKCLMSLGMISESVDLVGLFVRSAIVGAFCVSIKTGKFVSNSELITCATIAVSTIATVMSQAFKPSEEIKGQFQALSVLEGLATQLTSFCDTSLIAMGKTCTAFNQICTAGKNVKVIAGRLLDVVSNFVRKLLGLDSAFLRDAALIFSQDVDGWLRNISWCQEQFLLKAYMSQDDLIVLRSLVVKGERMREQMLEGEVKVSPSVCNLIVKGCEEASKLMRESVLHCSKTVRKIPFVIFAHGDSRVGKSLLVDRLITDFCDHLEIGEDAVYSRNPSDPFWSGYRRQPIVTIDDFAAVASEPSGEAQLIPLISSAPYPLNMASLEEKGMHFDSQIMMCSSNFLEPSPEAKIRDDMAFRNRRHVLITVELKPGVEYDESDFTKNQRYLLKTWFHDHYVVDQTFESYADLLAYCFTKWERHVKEQESNLSQIKGKKSESGHFNNFQQLMDLAVSWNLSANIMKERIKADKSDMVYVFSAGRKDKIVHCFLNKEGECSIRPDSIEDPEAQLLLKASETMLMKAYAFLKYNNATNLIVRTHLAELVNEDFYDEKFNFIGTIGTPAFHRQIAAHLEKMPLWQKAILCGMGHCLSRKSKETWYSGMKEKFVQMMKSIYETEVTDWPVPLKIISGTILATILGTTFWKLFSFLRDAGNGGVFVGNVASAFTTSSVLEAQSRKPNRYEVSQYRYRNVPIKRRAWVEGQMSFDQSVVAIMSKCKASMRMGNTDAQILMVPGRRFIAHGHFFKNLTQKVRVQIVTSEKSYWHVYDPDKFQMFDNSEIGLYSNPTLEDIPHSAWDLFCWDSEKTLPNNFSAELLSCXKLDTVTGQYYPEWAPINCRVHRQPIHITEGNYVRKQDVSIEYDACTIPNDCGSLVVAKVGNHKQIVGFHVAGSKRRLGYASLIPYVEPVVQAQSAEVYFDFFPVEVDSQEGVAHIGELKSGVYVPLPTKTNLVETPKEWQLDLPCDKIPSVLTTTDERLVGTXHEGYDPFLGGIQKYATPMMPLDEEILSKVAQDMVEEWFDCVDEEDSFEEVSLSAALNGVXGLDYMERIPLATSEGFPXHVLSRKNGEKGKRRFVSGDGEEMTLIPGTTVEEAYNKLIVELEKSVPTLVGIECPKDEKLPRRKIFDKPKTRCFTILPMEFNLVVRQKFLNFVRFIMKKRDKLSCQVGINPYSMEWTGLANRLLSKGNDILCCDYASFDGLXTKQVMSKMAEMINSLCGGDEXLMRXTHLLLACCSLMAIRXKEVCRDECRIPYGFALTGICNRIYNEMLTTYSYEKL

SEQ ID NO: 265914 - protein, 42 aa, Glycine max
  Clone ID: PAT_MRT3847_82140C.1.pep
TRKTIKLHIFLTVRASNPTRPSSFVQHFCTCISLPNIYYLSA

SEQ ID NO: 265915 - protein, 84 aa, Glycine max
  Clone ID: PAT_MRT3847_82141C.1.pep
MRSVFLKCRMQEMDCGGLIRVPSPKCDPLKNFGVVFPMLEDILSCARVIQMVVMEDGFKVMCMEDPLAREVALYRQNEGFWNEL

SEQ ID NO: 265916 - protein, 74 aa, Glycine max
  Clone ID: PAT_MRT3847_82142C.1.pep
IIQMLLHPFESSLVKFGAPAVVFLTTVTFCGHFASAPMCRFYQHVFYCRCNHESHFVYGSSSTHQMNSSGGNQF

SEQ ID NO: 265917 - protein, 173 aa, Glycine max
  unsure (1)..(173): unsure at all Xaa locations
  Clone ID: PAT_MRT3847_82143C.1.pep
IRLEKISREVDPTGERTFGVFTKIDLMDKGTDAVEMVEGRAYRLKYPWIGVVNRSQADINKNVDMIAARRKEREYFSNTPEYNHLANRMGSEHLAXMLSKHLEAVIKSKIPGIQSLISKTIAELEAELSRLGKPIAADDGGKLYSIMEICRSFDHIFKEHLDGVRPGGDKIYN

SEQ ID NO: 265918 - protein, 75 aa, Glycine max
  unsure (1)..(75): unsure at all Xaa locations
  Clone ID: PAT_MRT3847_82144C.1.pep
GFSTCKSLSEECPHHXMMXDDGDCFMRLVSQVTGETXSTLPLPIDEKVFTLAYISCNKGNCMSLTVTQWHHMQRL

SEQ ID NO: 265919 - protein, 42 aa, Glycine max
  Clone ID: PAT_MRT3847_82145C.1.pep
PSAWSKQSHCCSYVASLEVCLMGNRCISQQYLPIRQQQLFTR

SEQ ID NO: 265920 - protein, 156 aa, Glycine max
  unsure (1)..(156): unsure at all Xaa locations
  Clone ID: PAT_MRT3847_82146C.1.pep
VFDGSVAKWFADAQVYSQRFLTRNVAPEEISTLRGGMVATFNTLELMIGQLPHEGARPQTVRNTKELRGRMIHLLPVIDALXDXVYAIEHRAPEFLDRFTPLLQDANAWLESTTEQAPLERWRVLRDKIDAAQPQGEALDDRHTLLFSNALYRLGE

SEQ ID NO: 265921 - protein, 66 aa, Glycine max
  Clone ID: PAT_MRT3847_82147C.1.pep
RGWALSCCHCSFPRGSQLCTALSCHGAFTFEGRRSHALLAPHEAYASWLVNHVRPAFRMDVLPVCR

SEQ ID NO: 265922 - protein, 72 aa, Glycine max
  unsure (1)..(72): unsure at all Xaa locations
  Clone ID: PAT_MRT3847_82148C.1.pep
SWNLRESPFSSWACATLTMPELRSRPHISRLVDSANANPTTQPASPXAVGACRRKPAVAXAPTGRNRXLNNA

SEQ ID NO: 265923 - protein, 73 aa, Glycine max
  unsure (1)..(73): unsure at all Xaa locations
  Clone ID: PAT_MRT3847_82149C.1.pep
MPICLVGIMPCFMEWTGLANRILSRGNDILCCEYARXDGLITKQAMXSRWHXMINRLWGGDEKLMRERTHLLL

SEQ ID NO: 265924 - protein, 51 aa, Glycine max
  Clone ID: PAT_MRT3847_8214C.1.pep
LECSSRIGSSDVTPFLDEHADCDAVLLTSTGSQFLFVGWFILSVCRSVKQK

SEQ ID NO: 265925 - protein, 50 aa, Glycine max
  Clone ID: PAT_MRT3847_82150C.1.pep
TMNHMHYWTNIAASIVHTNQQGVLYEYCDCNTQWTAPRNRITTAGRLVAN

SEQ ID NO: 265926 - protein, 76 aa, Glycine max
  Clone ID: PAT_MRT3847_82151C.1.pep
TPHTRLSADADGLSFVTDSTEITVHVVHPSSECRAISSSLVMDSTPQNHCHMGPFIRQLVKVIPFQDKPNSPRLVT

SEQ ID NO: 265927 - protein, 117 aa, Glycine max
  Clone ID: PAT_MRT3847_82152C.1.pep
MASAAAADGLFRPIYEGCISAYDNDVERRPYHKNCGCALHSKSRRNSSRACRHKLPKCNNVSYPMRRAWSEGNLSMVSSTTSTHSSPSSSPAAGFRPQHDEEGNTKNKLVVLFEMNN

SEQ ID NO: 265928 - protein, 94 aa, Glycine max
  Clone ID: PAT_MRT3847_82153C.1.pep
VKKPKPVQIIMGLLQACYIRKALLLNSTRWEIIIEESHASDSTMEDWSVIVEDAKRSTERDMSNLIEQMVGKGWMVKNILLSTQEQTRYNFVCD

SEQ ID NO: 265929 - protein, 205 aa, Glycine max
  Clone ID: PAT_MRT3847_82154C.1.pep
MNQVLVKSCYGFARKLKSHGFHWGDLSSKPLHQPSPFPNIDKCDLECRGSQTLACDFHKVLLRTHSFFPYFMLVAFEGGSIFRAFFLLCSCPMLWILNYEMKLRVMIFISFCGLRMKDMENTSRAVLPKFYLENLNLEAYEVVASVGSRVFFTTMPKVMVEGFLKEYLNADAVIATELHTSGCYFTGLLSKSGLLVKHSALMDYF

SEQ ID NO: 265930 - protein, 122 aa, Glycine max
  Clone ID: PAT_MRT3847_82155C.1.pep
DYDDHAHYGPSSEGEAGSLSEIEEECFLKQLDENKKGFSEESAVYLDKYVSTRSFSGYNMEPSISVTDGKAGNSCLSTTLTDLASNVDSSSSSIGCTGTKDVEMMDKFADSISPVPPLLASS

SEQ ID NO: 265931 - protein, 135 aa, Glycine max
  Clone ID: PAT_MRT3847_82156C.1.pep
MVSYLVPLRLANWVMNQVLVKSCYGFSRKLKSLGFRWGDLSSKPLHQPSPFPNITKCDLEGRGSQTLACDFHKVLLRTHSFFPYFMLVAFEGGSIFRAFLLLCSCPILWILNYEMKLRVMIFISFCGLRMKDMDN

SEQ ID NO: 265932 - protein, 50 aa, Glycine max
  Clone ID: PAT_MRT3847_82157C.1.pep
HLSVSSLLSNILTNDHYYLYFSSYMAPECTFIYLFLDQEKSTSSEEGGGE

SEQ ID NO: 265933 - protein, 48 aa, Glycine max
  Clone ID: PAT_MRT3847_82158C.1.pep
LRATEIELQTFDMPMACRKSSIILLYFTLFFTFFITGSAVELLCILNW

SEQ ID NO: 265934 - protein, 421 aa, Glycine max
  unsure (1)..(421): unsure at all Xaa locations
  Clone ID: PAT_MRT3847_82159C.1.pep
MQSSPLLLEEPIRMASILEPSKPSFFPAMTKIVGTLGPKSRSVDVISQCLEAGMSVARFDFSWGDPEYHQETLENLRAAIKSTKKLCAVMLDTVGPELQVVNKTEHPISLQADTLVVLTPDQNKEATSNLLPVNFSGLXIXYMMHARNRCHAREFLCKLGIFYQTQIFGGGGTXIFFTFXXILXEEDGIILSRGNLGIDLPPEKVFLFQKGGIYKCNMVGKPGVVTRVVDTXDGSDAILLGAETLRGQYPVETISIVGKICAEAEKVHNQDLYFKKAVKYVGEPMSHLESIASSAVRAAIKVKASVIICFTSSGRAARLIAKYRPIMPVISVVIPQLKTNQLRWTFTGAFEARQSLIVRGLFPMLADPRHPAESKSGTNESILKVALDHGKAFGIIKPHDRVVVCQKVADSSVVKILELED

SEQ ID NO: 265935 - protein, 97 aa, Glycine max
  Clone ID: PAT_MRT3847_8215C.1.pep
ESIQIFFFKQLWSRCRRFWGLDLLDIVKPGAYLVQKCCLVLPISVLCSFQRPKKSGSSCCFKVYRRSYIFSPSFSIIGHQRSSPYLRCQSSRTHFLQ

SEQ ID NO: 265936 - protein, 97 aa, Glycine max
  Clone ID: PAT_MRT3847_82160C.1.pep
RPLEAAGGSSHYVSFHQSRASLFSYLRKGMGPKPGSDMKMNAIRSGIVVLGALAFGYLSIQIGFKPYLEKAQNQNALYESDPSSQEESSSAFPERTS

SEQ ID NO: 265937 - protein, 334 aa, Glycine max
  unsure (1)..(334): unsure at all Xaa locations
  Clone ID: PAT_MRT3847_82161C.1.pep
MEVLLQFAPMQSSVDEGFWHRLSSLKLNKLGIDHSPIPLFGFYAPCSHSQVSNHLTVLAESLPSELSEASLIPEPSRGNRNRCSVPGILYNTNTVESFHALDKSDLLKKEAAKIWDDILTGKAVEDCSVLSTFLVISFADLKKWTFNYWFAFPALMLDPPATVVNLKPASQWFSAAEAESLSAACNEWRSSKSKTDVPFFLVTIDPNSRATVRLLKDWEACQSNAHKILFGFYDPCHLPNNPGWPLRNFLALISARWNLNSVQFFCYRRXRGFAIXRLSLVGEALITXSQGWKDTVPSAVGWELIRGEKXRCISLAQSMDPTRLAISAADLNLS

SEQ ID NO: 265938 - protein, 44 aa, Glycine max
  Clone ID: PAT_MRT3847_82162C.1.pep
DYASDLNFQEFLPQCSAEWEGQPGENKDKCSHSPMWYRTSRVDF

SEQ ID NO: 265939 - protein, 42 aa, Glycine max
  Clone ID: PAT_MRT3847_82163C.1.pep
NPNAKSQSHQSVTKETHLNSIFQFNPSPDRDFYRLLHHSSTP

SEQ ID NO: 265940 - protein, 110 aa, Glycine max
  Clone ID: PAT_MRT3847_82164C.1.pep
GCLVWDSFVILSSKRCIEGAAEYEKMNEKFSGNLAAGCTCAKKYLKICNTTPDYPPLTLQKPPNYPPPTESAKLNKHTQKSSSSTNNTTFFVSSNIIFLFLFFNRKAFYN

SEQ ID NO: 265941 - protein, 204 aa, Glycine max
  unsure (1)..(204): unsure at all Xaa locations
  Clone ID: PAT_MRT3847_82165C.1.pep
MFKHNTTTTKKVHNNDHSVICSFFFLSCTYMGARCSKFSFCWFHSHLKPSVLESSDPENGMKGVRKLCSRFAXFNLEQLPIDTNEWSSENIVSEHGEKAPNVVYKGKLDNGQWIAIKRFNKFAWPDSRQFLEEAKQVGSLSSERLANLVSYCYEGEERLLVAEFMPHETLAKHLFHWEAQPMKWAMKLRVAIYLAQALEYCTSK

SEQ ID NO: 265942 - protein, 79 aa, Glycine max
  Clone ID: PAT_MRT3847_82166C.1.pep
GGGSDTRWLTLAFKTSVSTARPLISVYSEKNEATGRTVALPAVFKAPIRPDVVNFVHQNMAKNHRQPYCVNDQAGHQTS

SEQ ID NO: 265943 - protein, 69 aa, Glycine max
  unsure (1)..(69): unsure at all Xaa locations
  Clone ID: PAT_MRT3847_82167C.1.pep
MPIRNIAVGRPEEATHPDTMKAALAEFISTFIFVXAGSGSGIRYNKLSDNGAGTPAGLISASIAHAFAL

SEQ ID NO: 265944 - protein, 200 aa, Glycine max
  Clone ID: PAT_MRT3847_82168C.1.pep
DFPPQALWSQMSHIPSNTVSESRSGSTMLGNCFQHQTMRDAELLNLVTELHMNPLTLSADNTKKTYRFGLNSEADEHNVLQKDLGSVRYQGYDFTSDAMWSQMSHIPSNTVSESRIGSTMLGNCFQHQTMRDAELLNLETARTKDLVFSGQLSSAGGMKQEYQSPQSLFSDWDWKKDLSSSALEYRPNKDFNCNPDVNVD

SEQ ID NO: 265945 - protein, 79 aa, Glycine max
  Clone ID: PAT_MRT3847_82169C.1.pep
HGWKHNLRQIPEKLIASKKSWTTNKSYLKASQIQFEPNTPHVLTTTGLGACLPPVWVHLGFSSQGCRKCSLGFFQIFIR

SEQ ID NO: 265946 - protein, 176 aa, Glycine max
  unsure (1)..(176): unsure at all Xaa locations
  Clone ID: PAT_MRT3847_8216C.1.pep
LVGTDHMAFXSPQKARGIDDFRKMPNGVNGIEERMHLVWDIMVESGQISVTDYVRITSTECAKIFNIYPRKGAILPGSDADIIILNPNSSFEMSAKSHHSRLDTNVYEGRRGKGKIEVTIVGGRVVWENNELKVTPGTGRYIQMPPYSYLFDGLDKKDAIYLNSLQAPVKRAKAST

SEQ ID NO: 265947 - protein, 192 aa, Glycine max
  Clone ID: PAT_MRT3847_82170C.1.pep
MSALNRTIISFNKTSSFNHRRTLGIASPRVIHNNRFGCVSLRFQVLIITVSVVSFFVAVGGYMYVLPSLSRAFFNGQVPLLSEHNSNGSVRECDVFDGSWVQVKDHTLYNATECPFVERGFDCLGNGRGDRDYLGWRWKPRSCDIPRFDVRGVLEMLRSKRVVFVGDSMSRTQWESLNCMLMAGVEDKRGVY

SEQ ID NO: 265948 - protein, 46 aa, Glycine max
  Clone ID: PAT_MRT3847_82171C.1.pep
HSQVRGLYNLNCSTKVYHKITQVNLEVKASLLCPLQIILAVTSVSK

SEQ ID NO: 265949 - protein, 131 aa, Glycine max
  Clone ID: PAT_MRT3847_82172C.1.pep
AWISGADHTRPPTGFGERKYSSKFLAKRPGRFPGVSPMKIFPVPIGRTGPVDAVLWQKLWGNWGEAVGTTAGGSTKDKLKHALKGLGAFLPGGGATRCFGRVDATHAGEFGGAEMEPLLQYLRPHGFGKYS

SEQ ID NO: 265950 - protein, 60 aa, Glycine max
  Clone ID: PAT_MRT3847_82173C.1.pep
SRVGIALKFDSVRLLAWVALTMLNYDWGKSLSVATTTEQGVKEKRVRLYHTALTYGSGEH

SEQ ID NO: 265951 - protein, 39 aa, Glycine max
  Clone ID: PAT_MRT3847_82174C.1.pep
TTEGDIIIVEYAGQHDIIGLVNFKWDLKMSVNNSYLDDL

SEQ ID NO: 265952 - protein, 51 aa, Glycine max
  Clone ID: PAT_MRT3847_82175C.1.pep
SYARADARADACSFKHLFHVHPRFLTLVLKAYIYRKKDSLFSYLGRIITGF

SEQ ID NO: 265953 - protein, 72 aa, Glycine max
  Clone ID: PAT_MRT3847_82176C.1.pep
PPHSGKNPLGLRLKAGNGTLLTCLGSGVFPTPVRRPLKFPQNHFRAPNWGFGKWSKFMKGEPWGFSPKVKFP

SEQ ID NO: 265954 - protein, 147 aa, Glycine max
  unsure (1)..(147): unsure at all Xaa locations
  Clone ID: PAT_MRT3847_82177C.1.pep
STRCRVLYSHTTTAFKILQDPIRTLPAXMISLSQALVSLGRLDRYMSSGELMDSGERDQGCGGHPAPEGKDGTFSWDDDGHLKDSKNINLTMNKGEPTAIAGTVGSGKSSLLAXILGEMHKLSGKAQGXGTTAYVAQTSWILNGTIE

SEQ ID NO: 265955 - protein, 203 aa, Glycine max
  Clone ID: PAT_MRT3847_82178C.1.pep
VHNGRNYHVSNKKNRDILVYWSSSRCLPRRNELAKKLLSLLPHHSFGKCLNNVGGLDMALSLYPECANDANVTPKWWDHGSSAMSHYKFVLAIENTFTESYVTEKLFYALDSGAVPIYFGAPNVMDFVPPHSIIDGRKFNSLEELASHVKAVANDPVAYAEYHAWRRCGVLGNYGKTRAVSLDTLPCRLCEAVSRKGGRNAGS

SEQ ID NO: 265956 - protein, 45 aa, Glycine max
  Clone ID: PAT_MRT3847_82179C.1.pep
FVHPIWLCNLKHLKKKKQYSIIYMYKQIIQTPKISICTQNPRARA

SEQ ID NO: 265957 - protein, 41 aa, Glycine max
  unsure (1)..(41): unsure at all Xaa locations
  Clone ID: PAT_MRT3847_8217C.1.pep
XTSXRXNEFXSSHYMLCXGXXWSTTTLLICTARSSFTIALV

SEQ ID NO: 265958 - protein, 65 aa, Glycine max
  unsure (1)..(65): unsure at all Xaa locations
  Clone ID: PAT_MRT3847_82180C.1.pep
HKPQLHIIFTQDLNISNLXFSTRLHXELLPHKLVTPHINQLYQLTKKFQRTIPQNPSHKTSQQNI

SEQ ID NO: 265959 - protein, 330 aa, Glycine max
  unsure (1)..(330): unsure at all Xaa locations
  Clone ID: PAT_MRT3847_82181C.1.pep
MSKCISVEETYSNSTLVINKKEHDHIKGLEFPKDVDLEDLLDAVVGNFCGAAADTSSISNSVRSLTTMPTEFTGSIQPENYSEESTLIVDSSDVKNDLMPAIMVKGKDEFSNHFTSSFDGNACLLIDEARQEKANSHMQPIGGPKLSSTSKKRTRVGNNQKSRPRDRQLIMDRMKELRELVPEGGRCSIDNLLERTIKHMLYLRKITSQAEKLKRIANXGGFLINASHPGRSCAFDFESQLSWPIVIEDLECSGHMLIEMICNEHGLFLEIAQVIRKLDVTILKGILENRSSNSWACFIVEVPRGFHRMDVLCPLLHLLQLRRNPVSCKS

SEQ ID NO: 265960 - protein, 31 aa, Glycine max
  Clone ID: PAT_MRT3847_82182C.1.pep
LISSECLITINSLQHFIFSLVIDLFKFAYYL

SEQ ID NO: 265961 - protein, 127 aa, Glycine max
  Clone ID: PAT_MRT3847_82183C.1.pep
ITSSRCTAAIDLSLLCTNALEAADQAFVTPVDKWFDKSLCWRSIQTNDQLNPCLWQELALCRATVLETRGKLMLRGAQFDIGDDLIRKAVYIRTSICGEDHPDTISARETLSKLARLIANVQIRASI

SEQ ID NO: 265962 - protein, 127 aa, Glycine max
  unsure (1)..(127): unsure at all Xaa locations
  Clone ID: PAT_MRT3847_82184C.1.pep
LGIRLEGGRRSFSYEFFPKEGQPSDKPIFFPFLYETSDIDENNLYPFVHLSSDGNLFIFANNRSLLLNPTTNTVVRTYPXLPGGSRNYPAFGMSSILPIKLDGTELSSAFIKVEVLVCGGNSHDSFI

SEQ ID NO: 265963 - protein, 34 aa, Glycine max
  Clone ID: PAT_MRT3847_82185C.1.pep
IFPFSLTQLNLSNPIPKHKLPLLTFKHLPQLLTI

SEQ ID NO: 265964 - protein, 56 aa, Glycine max
  Clone ID: PAT_MRT3847_82186C.1.pep
PLSPTTFSTTSKEAVLTTLTTRSFTISTSPFSLYNKVLCFYFSYSGEIYLYLFQSL

SEQ ID NO: 265965 - protein, 39 aa, Glycine max
  unsure (1)..(39): unsure at all Xaa locations
  Clone ID: PAT_MRT3847_82187C.1.pep
CAXCKKALELYSEARYLPFKHIYHYDCILPWLSIQNSYP

SEQ ID NO: 265966 - protein, 75 aa, Glycine max
  Clone ID: PAT_MRT3847_82188C.1.pep
LKILMQLFDLSGILTAFFCGILMSHYAWYNVTETSRITTRHVFATMSFIAETFIFLYVGMDALDIEKWKMTQLRS

SEQ ID NO: 265967 - protein, 29 aa, Glycine max
  Clone ID: PAT_MRT3847_82189C.1.pep
APARAFFDNIPLRKKLERLFHCSLFFPTR

SEQ ID NO: 265968 - protein, 336 aa, Glycine max
  Clone ID: PAT_MRT3847_8218C.1.pep
MRKPEVSGNNNNNNNINNKLRKGLWSPEEDDKLMNYMLNSGQGCWSDVARNAGLQRCGKSCRLRWINYLRPDLKRGAFSQQEEELIIHLHSLLGNRWSQIAARLPGRTDNEIKNFWNSTIKKRLKNMSSNTSPNGSESSYEPNNRDLNMAGFTTSNTQDQQHADFMPMFNSSSQSPSMHAMVLNSIIDRLPMLEHGLNMPCSGGFFNSTGPCFSSSQSGVDNKGIYLENGGVFGSVNIGAEGDVYVPPLESVSTTSDHNLKVESTCNTDTNNSYFDDINSILLNNCNINSNNKRAENRAGGVENLFQEELTIGEWDLEELMKDVSSFPFLDFSNIQ

SEQ ID NO: 265969 - protein, 82 aa, Glycine max
  unsure (1)..(82): unsure at all Xaa locations
  Clone ID: PAT_MRT3847_82190C.1.pep
MVLAXDLLNPSPQHEARQHKLKTLVPGPRSFFMDVKCPGCFTITTVFSHAQTVVVCAGCSQVLCQPTGGKARLTEGCSFRRK

SEQ ID NO: 265970 - protein, 57 aa, Glycine max
  unsure (1)..(57): unsure at all Xaa locations
  Clone ID: PAT_MRT3847_82191C.1.pep
YTSTTYDFCDDISLNXDANFSGTYKLKKRAIQNNHFIISTLFRCVHLFTIPNNFWSY

SEQ ID NO: 265971 - protein, 32 aa, Glycine max
  Clone ID: PAT_MRT3847_82192C.1.pep
YVQYICLVRYRFGCHGVKVIEIVFIVEYANSS

SEQ ID NO: 265972 - protein, 47 aa, Glycine max
  Clone ID: PAT_MRT3847_82193C.1.pep
PRVRSRSRAAPFFFFFFLFGFWVFFFCCTVFKDSMLFFLKILTAQLI

SEQ ID NO: 265973 - protein, 183 aa, Glycine max
  Clone ID: PAT_MRT3847_82194C.1.pep
MSTLPKHQPEAKPQDLPPDQPASAPSDAKPEDLHPNQPGSESPEAKAEGEEEDEEEEGECGFCLFMKGGGCRDEFIGWENCVQEAENNNEDLLEKCAQVTAALKRCMDAHSDYYEPILRAEKLAEEQAIVELEKEKQNQQQPPQDQKAEKVVEEVAIIELEVEKQNLPPNESQPPSPSSQDQK

SEQ ID NO: 265974 - protein, 49 aa, Glycine max
  Clone ID: PAT_MRT3847_82195C.1.pep
KVHGVSPENVLLSVISDDSETHSFAKSYVRVFTYLQILATSFQPPRTPN

SEQ ID NO: 265975 - protein, 64 aa, Glycine max
  Clone ID: PAT_MRT3847_82196C.1.pep
LLDRRMRTIDLSESLQMVSSDIGYWIPEVLLSVSGCIVPLNAALHANAVVNTAYMAFYAVYSIE

SEQ ID NO: 265976 - protein, 136 aa, Glycine max
  Clone ID: PAT_MRT3847_82197C.1.pep
TATHDSQMEYEQDNSMEDFLSRGGVLTLGDLTAGIMGVSSGEECRKLGAHIAAPPAEPAPDQVPPPDTTDAGTPPYKKLGLDDGVDGLHYCPDEAEKLEKLRKQRAELFHRRDMLTARNTFLTSSAPPLKEHPRHT

SEQ ID NO: 265977 - protein, 101 aa, Glycine max
  Clone ID: PAT_MRT3847_82198C.1.pep
YDFETPTRSYGPWFLQRSMIASPISLGDDDDAHERHNCHATLGKSPEPSLSWSGSIARYTFRIHQLQLCYSNHRCYLVAALMWVNCLNPATSVPWQLQPSS

SEQ ID NO: 265978 - protein, 71 aa, Glycine max
  Clone ID: PAT_MRT3847_82199C.1.pep
RQYSIDNMLTYLLLILYSHTYCHLVSSSCALTVYIYMYTYICFDAHSSLVWTVNLKEKGSFCFIVAYICML

SEQ ID NO: 265979 - protein, 210 aa, Glycine max
  unsure (1)..(210): unsure at all Xaa locations
  Clone ID: PAT_MRT3847_8219C.1.pep
MLARSCLRSTRTFNGLRNGPSAVTKRAASSSSSAASDASATRLNLAAAASTTLALGSMAWYYHLYGPVAFAMTPAEEGLHATKYPWVHNKWFKTFDHQALRRGFQVYQEVCQSCHSLSRIPYRTLVGSVLTVDEAKALAEENEYPGEPDEQGEIQMRPGKLADYMLPPYKNEEAARFANNGALXPPDLSLIIKARHGGCDYIFSLLTGYP

SEQ ID NO: 265980 - protein, 409 aa, Glycine max
  Clone ID: PAT_MRT3847_821C.1.pep
LDPEAEVVALSPKTLLATNRFICEICNKGFQRDQNLQLHRRGHNLPWKLKQRSSKDIIRKKVYVCPEPSCVHHEPSRALGDLTGIKKHFCRKHGEKKWKCDKCSKKYAVQSDWKAHSKTCGTREYRCDCGTLFSRRDSFITHRAFCDALAEESARSVTGIVANSTTQPTEAAGVVISSSSLHQDMIHASNNNFPLKKEQQGCIPHWLGQPSPSSASSSFLFSHQDHHLHENPNPRGGPTLLPPPYHQTAPHMSATALLQKAAQMGATMSKTGSMIRTHQQQAHVSANAALNLSSRDHQMNPTPHDLLPFGNNKAVDNGVGVSPSLLHHVINSFSSSPFEGTFEDTFGGGDAMTADEGGGGGAGGNNNEGLTRDFLGLRHLSHTDILNIAGVGNCMNSSQHNQTRNPWQG

SEQ ID NO: 265981 - protein, 66 aa, Glycine max
  Clone ID: PAT_MRT3847_82200C.1.pep
KTNCEEDFLHGWLSRVDNDLGLLLMSSIRCIRSESIDLNPMVNTWTVRNREVPKESALLISLSLLY

SEQ ID NO: 265982 - protein, 74 aa, Glycine max
  Clone ID: PAT_MRT3847_82201C.1.pep
KGRDLNVTNIEPGLADPLYRELASYIIHYGQRAQPTSDAFNSKLTLGQPNNSDTVENIPHTEEDWKPDTLSNTR

SEQ ID NO: 265983 - protein, 69 aa, Glycine max
  Clone ID: PAT_MRT3847_82202C.1.pep
GGDKRLPVTWRLLGDCMDKLLLQCEFGDGYVQSILRNRALLRYPCACLRDKGVCGLLQCPGPFLLVSVW

SEQ ID NO: 265984 - protein, 57 aa, Glycine max
  Clone ID: PAT_MRT3847_82203C.1.pep
LFVLRGIRHYRVGSIMHALPRELVSVNNSTLIMACNHNGTEHFLEFNNEIVNKGAQI

SEQ ID NO: 265985 - protein, 153 aa, Glycine max
  Clone ID: PAT_MRT3847_82204C.1.pep
AARRRQKGEEMISKTSSYGCTTALYLNLSCLEEAKPMIGVTQAVQFLIQLLQSDSDVQCKQDSLHALYNLSTVPSNIPCLLSFGIISGLQSLLVGEGDSIWTEKCVAVLINLATSQVGREEIVSTPGLIGALASILDTGELIEQEQAVSCLLI

SEQ ID NO: 265986 - protein, 100 aa, Glycine max
  unsure (1)..(100): unsure at all Xaa locations
  Clone ID: PAT_MRT3847_82205C.1.pep
PVGEVYLPANEGWHANTWSLAKANGEVNDAFYQQIIPHWLSTHAVGEPSWIPTNRHLPVVHPKYKLMFPHYLHTMHHKSLARLALSTAXGIIKKTFSLAW

SEQ ID NO: 265987 - protein, 172 aa, Glycine max
  Clone ID: PAT_MRT3847_82206C.1.pep
SSRSLQSLLVGEGDCIWTEKCVAVLINLATSQVGREEIVSTPGLIGALASILDTGELIEQEQAVSCLLILCNRSEECSEMVLQEGVIPALVSISVNGTPRGQEKAQKLLMLFREQRRDPSPVKTHKCPPETASDLSMPPAEMKPICKSILRRKSGRAFSFFWKNKSYSVYQC

SEQ ID NO: 265988 - protein, 121 aa, Glycine max
  unsure (1)..(121): unsure at all Xaa locations
  Clone ID: PAT_MRT3847_82207C.1.pep
RYLEDQLARTKHIALPTAGGRAAMKQLATKAARKLAPSTGGETKPHRYHSGTDAPREIRNYQRSTXLLMRKLPFQRLDREXAQDLKTDLRVQSHAALALQEGAGAXVAGQFEDSILSAIHA

SEQ ID NO: 265989 - protein, 104 aa, Glycine max
  Clone ID: PAT_MRT3847_82208C.1.pep
RKNHKPSFKIWAPFFKLDLDQPLDFLGRAPHRRGKFWGYLKGCFYKPHPRKGFQPLFLKGENLIIKKKKCGLFNFSGNFFWGRVSPPWVFFPVETGAKKFWLEG

SEQ ID NO: 265990 - protein, 157 aa, Glycine max
  Clone ID: PAT_MRT3847_82209C.1.pep
RKQRRRHREPIRKNTGRKHQAATPKQKKKQPTTRQTKRPTQTTGTRPPGPKPTPTTTDGPTPTTNKRPPPRRHSTQTNTRPMAQTPDPHPRTQTHTQNNPATNTNPRTQKQTAHHKTTQRTRTRQSHHQETRHGATEPGGQRTTHTGDRPELKSQTT

SEQ ID NO: 265991 - protein, 53 aa, Glycine max
  Clone ID: PAT_MRT3847_8220C.1.pep
MLLVSRGCSPHIIWALHIPKMNSGILLFFGYPKIRSWDLNLSVSHILFSGHGS

SEQ ID NO: 265992 - protein, 88 aa, Glycine max
  Clone ID: PAT_MRT3847_82210C.1.pep
PVLTAMSAGHVLHVFINDQLAGTVWGGLANPKLTFSDNVKLRVGNNKLSLLNGAVGLPNVGVHFETWNAGVLGPVTLKGLNCGTNLFW

SEQ ID NO: 265993 - protein, 92 aa, Glycine max
  Clone ID: PAT_MRT3847_82211C.1.pep
IRASKYPSGGACFQLRLSYSQAAKFFLFLVQWTDCHLAGALGFIRILIYKVFSSFFSWSINISLFSLYPYPFKAYFPLSNMIMPFCRLLAAV

SEQ ID NO: 265994 - protein, 65 aa, Glycine max
  unsure (1)..(65): unsure at all Xaa locations
  Clone ID: PAT_MRT3847_82212C.1.pep
DSDWWLNNGYCXCXWXFTRLXLLGGXATXPTTENXTXTLXEEHAXXXVXXXLXXLHAYXLQRERX

SEQ ID NO: 265995 - protein, 91 aa, Glycine max
  Clone ID: PAT_MRT3847_82213C.1.pep
FIPRIIKPLLITFYELSPNLLLDPIIHNFIPTHITSPTISYFFAYNPYSFYSLTIYCSCTLQNDMLPSIRFDNHTPTPFYSHLKNWNQVHP

SEQ ID NO: 265996 - protein, 63 aa, Glycine max
  Clone ID: PAT_MRT3847_82214C.1.pep
MLVCSKKKKKKKKKKKKKKKKKKKKKKKKKKKKTKKKKNKTIYIQILLGLHRHVQKPDINQRI

SEQ ID NO: 265997 - protein, 63 aa, Glycine max
  Clone ID: PAT_MRT3847_82215C.1.pep
LSLYCSCSIQLCTGTGFQSKGSYLFGHFSMYIKMVPGDSAGTVTAFYLSSQNAEHDEIDFEFL

SEQ ID NO: 265998 - protein, 138 aa, Glycine max
  Clone ID: PAT_MRT3847_82216C.1.pep
MGSSSSIWTVCLILASLASAALCANPRRPVDVQFGRNYVPTWAFDHIKYFNGGSDIQLHLDKYTGTGFQSKGSYLFGHFSMYIKMVPGDSAGTVTAFYLSSQNAEHDEIDFEFLGNRTGQPYILQTNVFTGGKGDREQ

SEQ ID NO: 265999 - protein, 82 aa, Glycine max
  Clone ID: PAT_MRT3847_82217C.1.pep
MNRKINDRLKLEKASLSYADFRHEITKNDKDNSLKPYGNKQKQATYQWASEEDELVKYMSNLPGYLEKGEKIPDKALNVGVL

SEQ ID NO: 266000 - protein, 296 aa, Glycine max
  Clone ID: PAT_MRT3847_82218C.1.pep
MGSSSSMWTVCVILASLASAALCANPRRPVDVQFGRNYVPTWAFDHIKYFNGGSDIQLHLDKYTGTGFQSKGSYLFGHFSMYIKMVPGDSAGTVTAFYLSSQNAEHDEIDFEFLGNRTGQPYILQTNVFTGGKGDREQRIYLWFDPTKEYHRYSILWNLYQIVFFVDEVPIRVFKNSKDLGVKFPFDQPMKIYNSLWNADDWATRGGLEKTDWSKAPFIAAYKGFHIDGCEASVNAKFCDTQGKRWWDQPEFRDLDAAQWRRLRWVRQKYTIYNYCTDTKRYPHISPPECKRDRDI

SEQ ID NO: 266001 - protein, 104 aa, Glycine max
  Clone ID: PAT_MRT3847_82219C.1.pep
DSLNKSLDIYNSYMSIFASLYLHNVELDFGEEFGYHFLWVQDRLNNKANDYNSYMNVCAALFLENVELEFVEEFRSHFLWLQDRPNKKANDSNSYMNSFCVVIS

SEQ ID NO: 266002 - protein, 67 aa, Glycine max
  Clone ID: PAT_MRT3847_8221C.1.pep
MEESKAKPVCAEEALALLNCVTHSPYEEDKCLPLLHSLRHCVLAKKVKNFSLAGQEKQETKPSGKKA

SEQ ID NO: 266003 - protein, 144 aa, Glycine max
  unsure (1)..(144): unsure at all Xaa locations
  Clone ID: PAT_MRT3847_82220C.1.pep
MEALLCRKLGDATVSLEDNDDSPIVLSKNHPIAXLDVPTAARVRIIATCLNFANYLQILGKYQXKPFLPCIPGSDFFGFVDAVGYKVCKFLVRDACCSFIGLGFLSQFMIVDESHMFQVPQGCDLAAAAALAVASETSYLAHCR

SEQ ID NO: 266004 - protein, 500 aa, Glycine max
  unsure (1)..(500): unsure at all Xaa locations
  Clone ID: PAT_MRT3847_82221C.1.pep
MKKSGEENGGKFKLKGADRSAYFARREAAKVLKVVLEGDAKRRALASIKSLIYQPSVRNKKATFALICQTLKHLPIINYVLEAASILNSKWKRQRELIYIIVYDILFGQAVPLVGDAEKFLMRHQDALRSTLKQLLLQRNVKTVKQLIALHQVPDVSVPRYVRVNTLKLDVDSALLELQKNYSVQKDHLLPDLLILPPGTDLHVAKGMGPSLGIFFLTLRQTYVKGKASSMAAPALSPEPGWEVLDACAAPGNKTVHLAALMKRKGKIIACELQRERIKRLKDTIKLSGASNIQVLNDDFLNQNPKDPSYSKVXAILLDPSCSGSGTAASRLDHLLPSKAAGQDTDTERLNKLATFQRKALQHALLFPAVERIVYSTCSINQIENEDVIKSVLPIAESNGFQLAKPFPEWQCRGLPVFEGSECLVRTDPAKHGEGFFIALFTRKDANFSGGSNKNETRISHSTPEIKNARRKKKRVPFVSTNLFKMWLYDSTIVKSWRSN

SEQ ID NO: 266005 - protein, 76 aa, Glycine max
  Clone ID: PAT_MRT3847_82222C.1.pep
EQLKISSYLNVVQVRGLPCAHNFHVECIDEWLRLNVNCPRCRCSVFPNLDLSALSNIRSESEQSSATAVTSRDMTG

SEQ ID NO: 266006 - protein, 121 aa, Glycine max
  Clone ID: PAT_MRT3847_82223C.1.pep
MKKTKKSGEENGGKLKFKGAERSAYFARREAAKVLKVILEGDAKRRALASIKSLIYQPSVRNKKATFALICQTLKHLPIIKDVLEAASILNTKWKRQRELIYIIVYDILLGQAVSLVGDAE

SEQ ID NO: 266007 - protein, 71 aa, Glycine max
  unsure (1)..(71): unsure at all Xaa locations
  Clone ID: PAT_MRT3847_82224C.1.pep
WLRSYHQIPHYLIFITISIKAIKITLLIKIKGQRITNSKVVVFGSNFNKCIYXAESGSNEIIKNRNKHATD

SEQ ID NO: 266008 - protein, 50 aa, Glycine max
  Clone ID: PAT_MRT3847_82225C.1.pep
LYRAPVFLNYLICFCIASNITTSSTDAPTTNVSSYTYDLSASNSSSVINL

SEQ ID NO: 266009 - protein, 95 aa, Glycine max
  unsure (1)..(95): unsure at all Xaa locations
  Clone ID: PAT_MRT3847_82226C.1.pep
MPTPYVXSSXXFGFEKXRSXXWVXXLXXWICXXSISXXLYXXSVVPLCRFKGTRIPFVPFSFFXFFXSXCLTPLXXLXXLXPYPXLGXREXERKE

SEQ ID NO: 266010 - protein, 114 aa, Glycine max
  Clone ID: PAT_MRT3847_82227C.1.pep
KNTPPPAKQIIPFPRQVVRVCLRQLLSGFSLLRQSFLPPPIVLNIAPLGAPPGSPFYFPVGFFLEMGARAFFSPGRQLAHPIPLMLIGPPNWKLWGFHLWLWLLLWGPRCRFLH

SEQ ID NO: 266011 - protein, 68 aa, Glycine max
  Clone ID: PAT_MRT3847_82228C.1.pep
KLITSILGATVRFLVLRTLNSTQSFSFFFFLLLKRHNLETHKYAFLNHFRIVDLILIWSTRLQVFALC

SEQ ID NO: 266012 - protein, 44 aa, Glycine max
  Clone ID: PAT_MRT3847_82229C.1.pep
IFFFFFFLHPALNTYAGSYFILNVTTQLAKSLKKISCRKFLCLL

SEQ ID NO: 266013 - protein, 43 aa, Glycine max
  Clone ID: PAT_MRT3847_8222C.1.pep
ILCTSSFFGRQLSLKMSSSIGVKAPKRVTTQPTNNSMCSKRGN

SEQ ID NO: 266014 - protein, 161 aa, Glycine max
  unsure (1)..(161): unsure at all Xaa locations
  Clone ID: PAT_MRT3847_82230C.1.pep
YRSGTRSQIVESGRNRSGEFKHLTGAEMREKREKGLRFRCVEPFTREHRCKNRQFRMIILEAEEEVEEEDKKTVXQTFKSLQLSLCSMSGFTTSKSWKVEGLLQGHSIVILLDCGASHNFIATELVDKLNLRVQDTPPYLVEVGDGHKVRSKGKCPKLKIQ

SEQ ID NO: 266015 - protein, 87 aa, Glycine max
  Clone ID: PAT_MRT3847_82231C.1.pep
AADAHPPPPPPPAVLAAVVPDPGHDAGHCSDPRWPCLEPCLSMKGVMLVALFSSSLSISRDRYRPWSKQCGGWCSYANPKARRTDAK

SEQ ID NO: 266016 - protein, 141 aa, Glycine max
  unsure (1)..(141): unsure at all Xaa locations
  Clone ID: PAT_MRT3847_82232C.1.pep
PDRNTWDPRRTAARRRQKGEQERAKRXAPKGLIFLAVLCFSALSLSRCLAEDNDPFLNWCKEXXXQXEDIINEQGGRRDNHHKNXAXXGPRNTPHDRAXQXXDXXQXPDPTRRSXXEKETXRSXGRRNXRDTETXKEAXER

SEQ ID NO: 266017 - protein, 59 aa, Glycine max
  Clone ID: PAT_MRT3847_82233C.1.pep
LNKASSTYLYMALKVSQRATTTIVETLQVHMHVFLASYVAALFACNLYCKARAEKTYIH

SEQ ID NO: 266018 - protein, 78 aa, Glycine max
  Clone ID: PAT_MRT3847_82234C.1.pep
NLQIILLVGTKLQMIITEMALRIQDRGEVVKGAPVVEPGDGLFWFNRPRFILFLIHLVLFQVNFMIYFPMIQPTVKLK

SEQ ID NO: 266019 - protein, 47 aa, Glycine max
  Clone ID: PAT_MRT3847_82235C.1.pep
ANQKKLEGICTPIIVKMYQGAAGPGENVPMGANKPAAGGGPKIKKVD

SEQ ID NO: 266020 - protein, 160 aa, Glycine max
  Clone ID: PAT_MRT3847_82236C.1.pep
FEALKQIIEENSTFQESSMVVVAEDGPWGARYTDLGANMLVLGPLEQAELASFYNAIDVFVNPTLRAQGLDHTLLEAMLTGKPVMATRLASIIGSVIVGNEMGYTFAPTVSALKKAIYELWVSGREVLDKKGHVALQRGVQLFTATKMVYAYERLFLGRM

SEQ ID NO: 266021 - protein, 91 aa, Glycine max
  Clone ID: PAT_MRT3847_82237C.1.pep
DPLPRPLGKAVFKFFLDTERERVPTQHRRRPPKDAKVYGAKAGAGKKGEGPRAGPPCQRGGGNPRKKGAGKKPPRRGGGGRPNILDRGGGE

SEQ ID NO: 266022 - protein, 390 aa, Glycine max
  unsure (1)..(390): unsure at all Xaa locations
  Clone ID: PAT_MRT3847_82238C.1.pep
DRSNRMCLMIMKRSIPEAFRGSISEGQSAKKFLEDIEQXFAKNEKVETSNLLAKLISMKYKGKGNIREYIMEMSNLASKLKSLKLELGEDLLVHLVLISLPAHFGQFKVSYNTQKDKWSLNELISHCVQEEERLXRDRTESAHNKKRKKTKDVAEKTSXQKKQQKDEEFTCYFCKKSRHMKKKCPKYAAWRVKKGKFLTLVCSEVNLAFVPKDTWWVDSGATTHISMTMQGCLWSRLPSDDESXIFVGDGKKVAVEAIETFRLQLKTGFYLDLFETFVAPSSRXEFNFFSSLDKFGFSYSFGNNKVSLYQNSNLIDSGSLIDNLYMVDVNCSYNEILQTNSRGTKRKLKENSTTLXHKHLGHISKQRIXRLVSDEILEPLDLSDSEVYVE

SEQ ID NO: 266023 - protein, 102 aa, Glycine max
  unsure (1)..(102): unsure at all Xaa locations
  Clone ID: PAT_MRT3847_82239C.1.pep
PKKNSNGKNKSVLKRVIFNSKKKRTFGSLLENLPFKCTVKPSPKLILETNPQRXQTRNFXTFFAHVSPKKPKKKEFLDSRKFTFSLQEPKKLCFIYKIINLN

SEQ ID NO: 266024 - protein, 36 aa, Glycine max
  unsure (1)..(36): unsure at all Xaa locations
  Clone ID: PAT_MRT3847_8223C.1.pep
PYHLFDGGGMRHALRVGHGXRPTLCSRYVRTYEYTM

SEQ ID NO: 266025 - protein, 104 aa, Glycine max
  unsure (1)..(104): unsure at all Xaa locations
  Clone ID: PAT_MRT3847_82240C.1.pep
RSKRLXVSSSFEAFKAYFPQYSVXFYNSILEKAPAAKDLFSFLANGVDPTNPKLTGHAEKLFALARDSDGQLKTNETAAPDAELVSMHDPHAPKEKFFAAFPPP

SEQ ID NO: 266026 - protein, 215 aa, Glycine max
  unsure (1)..(215): unsure at all Xaa locations
  Clone ID: PAT_MRT3847_82241C.1.pep
MQVKHVSEHVWNGEENRKLHIRRAVLRRRRNIRGNIPLLRQCSFYXIMKMGYLKINASLMTVLIERWRPETHTFHMXMRCEECTITLQDVSVLLGLRVDGTPLIGQTNLDWAELCERXLGVTPPEGELQGSVVKLSWMAHHFSQINNHDGNVEQLQRFTRAXSLDFIGGVLFADKSSSKVSLRYLQLLRDFEQCNTYAXGPVVLAFSHREMCSAS

SEQ ID NO: 266027 - protein, 104 aa, Glycine max
  Clone ID: PAT_MRT3847_82242C.1.pep
FPLFSLPQKNPLAGWDPVPKLASAILPPRERRRPNLEPRLRKPKSPNLKRVSDLGTLPINLYSKKWVKKPLPCLREKPGRAHTPMARLLRRTQPFHRLQKLLLH

SEQ ID NO: 266028 - protein, 144 aa, Glycine max
  unsure (1)..(144): unsure at all Xaa locations
  Clone ID: PAT_MRT3847_82243C.1.pep
REKRGAATNTAPPSTSWGGKAVKPGPTTREEGRESTRKTDTKQDGPRSPWHGPDRGKNRGPCTGEPPDNTTGEEPGEHGRDTAGAHERPKRTAXKNRELGAEQSRGAKRGDPGCVXPELQARNGGNKGETGGQKDGAQSSREGG

SEQ ID NO: 266029 - protein, 524 aa, Glycine max
  Clone ID: PAT_MRT3847_82244C.1.pep
KDNKEAFERPYKVARVSSGATVAAAIVEAENNLEIDAQDNKDELKTKLKEILREKSDVFNSKNAEEDKIKLGEPGWKERYYDEKFSAKTPEELEAIRKDVVLKYTEGLCWVMHYYYEGVCSWNWFYPYHYAPFASDLKGLGELDISFKLGTPFKPYDQLLGVFPAASSHALPEPYRRLMTDPSSPIIDFYPIDFEVDMNGKRFAWQGIAKLPFIDEVRLLAEVQKIENLLTPDEKRRNAIMFDLLFVNSCHPLSACISTLDNKCKNMPNSERAVVKEKINPKERDTCSGGMNGYISLCGGEPCPPIFRSPIASMEDIMDNHVICAIYRLPDAHKHITRPPQGVKFPKKIVEIGDLKPEPVLWHEDSGRRHHAENGRKNPPGSISGRELGDAAHRLIVNSLQAKVDTNGYRHPHNGPPISYPAPMGHHRQPLPSHGYESSPGYVAMPPPISAPSLQGRPQFAPYNAVPTAPQYGYNQPYPAPPVGYNHPRQQSNPVERNDYQHPRSHNYERNHHQDHWGYFKARI

SEQ ID NO: 266030 - protein, 73 aa, Glycine max
  Clone ID: PAT_MRT3847_82245C.1.pep
KGVFLRNQVLGSKTTGNCSQKKKVSALTKSPLKNRADFVIFFGTKKHKVNARRPIVGKLRRGFPPVFYNFILF

SEQ ID NO: 266031 - protein, 43 aa, Glycine max
  Clone ID: PAT_MRT3847_82246C.1.pep
LASLAHKINKYAATLRLLHRYNESLVTHAPIECGRIHQPIMDL

SEQ ID NO: 266032 - protein, 81 aa, Glycine max
  Clone ID: PAT_MRT3847_82247C.1.pep
GATQLPLREPGPPPALKKENRPGQRHKGICQPAGRGVSPMGPQRAFFFYPSNRKKIKAFHPLPFKKKKKIPTLGGPRGQKT

SEQ ID NO: 266033 - protein, 84 aa, Glycine max
  Clone ID: PAT_MRT3847_82248C.1.pep
DSPKNLSLVSTQKENPLKVLNPEVTKRKILKGEVNQIAPAFANRQKSLFSFQRVLKPKIENWRAQTPIWGPKFFGFQAKKCCNS

SEQ ID NO: 266034 - protein, 106 aa, Glycine max
  Clone ID: PAT_MRT3847_8224C.1.pep
GRKAPKMVLVLPVVLLILGSLALKMDLAPEVLIKKGIPPPPMVLEGAPIICLFPGPVPPMAVLKVPRLKNTPARPPLQKNDSRLFLKTRKGPLIVVLFPGWAKNFL

SEQ ID NO: 266035 - protein, 92 aa, Glycine max
  unsure (1)..(92): unsure at all Xaa locations
  Clone ID: PAT_MRT3847_82250C.1.pep
LSRSNCPRSCHVQVRNHPYFHNCAHYSVQLRWQLAWQYHLHTNRLAHIAININSRSRGPHSIININRHEQNRRSHIASQRPGSVQQRXVARA

SEQ ID NO: 266036 - protein, 257 aa, Glycine max
  unsure (1)..(257): unsure at all Xaa locations
  Clone ID: PAT_MRT3847_82251C.1.pep
KFNVVVSSEDGEKGEDENKDGEAVESEDELLVIEAIDDVAVEQAPPQDDKSQDISDSSVSLEWFLGCRNRVSLTSERPTKKRRLLGVEAGLEKVVMTCPFDEGQLFCHYCGRGDTGRDSNRLIVCASCKVAVHRKCYGVHDDIDEAWLCSWCKQKVDVDVSVNPCVLCPMKGGALKPVNSSXEGVGSVPFVHLVCSLWXPEVYIDDLKKMXPVMNXGEIKETPKKLMCXXCKAKCGACVPWNHGTSXLLSSLCPREA

SEQ ID NO: 266037 - protein, 86 aa, Glycine max
  unsure (1)..(86): unsure at all Xaa locations
  Clone ID: PAT_MRT3847_82252C.1.pep
LVPXXIXGACVVEYXRXIWRXXRXLTTERGCFAATXEKSAFVEDXDVDXLSXXXXPXXVRXGXKXVAXVVLXGXVGENXXXVRGSE

SEQ ID NO: 266038 - protein, 89 aa, Glycine max
  unsure (1)..(89): unsure at all Xaa locations
  Clone ID: PAT_MRT3847_82253C.1.pep
MPSLSPTMTEDNISXCLKNKXDLISSAKLLCKIQTHKTTVETEYIEESFTAKIILDDVAKEIKVIEVIAPTFENXCDIAKFKDYQPSTS

SEQ ID NO: 266039 - protein, 87 aa, Glycine max
  Clone ID: PAT_MRT3847_82254C.1.pep
RVLLSNFEKNCSRQVLHYGPVLFLAPMSHQVEHFALFLDLGKQHDELIFLAEIGNHCVSTYQENNYEFNRPCTFSVIFLYYQPNKKI

SEQ ID NO: 266040 - protein, 152 aa, Glycine max
  Clone ID: PAT_MRT3847_82255C.1.pep
LRWASFQRNQKRDKTDYGSEAKERVKQHSLRHGEKAKESDSRKRSSHVDVKDDKKEAEKSHRGSATDDTSRKREHAKDKGEHKSRQKDASNNDRHRRRRSSSVSSRGRTKKDCINHAGDSSGEGSDGSKRKLHSRKRDLSPSPVRSKRRNVD

SEQ ID NO: 266041 - protein, 130 aa, Glycine max
  Clone ID: PAT_MRT3847_82256C.1.pep
NPHRGSATDDTSRKREHAKDKGEHKSRQKDASNNDRHRRRRSSSVSSRGRTKKDCINHAGDSSGEGSDGSKRKLHSRKRDLSPSPVRSKRRQLLRSPHSKRSQRRHSPYTSLDSSRGRRSRSRSPVRRQR

SEQ ID NO: 266042 - protein, 48 aa, Glycine max
  Clone ID: PAT_MRT3847_82257C.1.pep
RTNHPSGNWSMALPDLETVFSLRASRPSLPLAPFLIYSPASISATRRN

SEQ ID NO: 266043 - protein, 101 aa, Glycine max
  Clone ID: PAT_MRT3847_82258C.1.pep
THQVSTVVSFLDNFCGLLIASIFSAGILPILLLILPGLLPEFFKIKIYVFQTNFHHHIRLSCTGEFVRLHIYVTMVPCLFTVTLLCRGRRSRSRSPVRRQK

SEQ ID NO: 266044 - protein, 49 aa, Glycine max
  Clone ID: PAT_MRT3847_82259C.1.pep
FFFFFFFFFFFFFVFFFFFFFFFWGGTLKLRGKDFLTYPKKRRGSLVLI

SEQ ID NO: 266045 - protein, 94 aa, Glycine max
  Clone ID: PAT_MRT3847_8225C.1.pep
LRPCSAFLGLEQRCQFIACFSVPPFIILCGMRYAPCSSFSQLFRHVLVCFKIVTRVLSPTLYFLASLYGFEFQYRCMIIYFCYPQPLFLVMTNC

SEQ ID NO: 266046 - protein, 134 aa, Glycine max
  Clone ID: PAT_MRT3847_82260C.1.pep
MTATRQRPLRPLSSATDLTDLTEYTNSALDPDEPRNADGDDIADFESETQSLTPSIWDYVRQYGRTYHRYMAGAYLFPNDAREVERLDMQHAIIKALFNHRNWFAPLKRPKRMLDIGCGTGKWCLEMARHFPGS

SEQ ID NO: 266047 - protein, 47 aa, Glycine max
  Clone ID: PAT_MRT3847_82261C.1.pep
RNSSSAKRHQGFLHHVWTYLILGSGIVFKQCSFVPLVNRKEGFCGLK

SEQ ID NO: 266048 - protein, 78 aa, Glycine max
  Clone ID: PAT_MRT3847_82262C.1.pep
IQLSLNYDLKYIAEELEYQVELGNAYLIQYLNLSAQPIQSNLLVIHHSYSIRASILNSPPFFTSLNVNSVLYFTNIAQ

SEQ ID NO: 266049 - protein, 58 aa, Glycine max
  unsure (1)..(58): unsure at all Xaa locations
  Clone ID: PAT_MRT3847_82263C.1.pep
QIVSLFLPPLGIAPKGTVDXNKMLLKTAVYLPRGGELGIFFPKHMIFCRKPHEKGDHN

SEQ ID NO: 266050 - protein, 88 aa, Glycine max
  Clone ID: PAT_MRT3847_82264C.1.pep
IKNGRLALLAFVGFWVHQSAYPGPGPLKNLAAPWGDPGPPTIGNVIIPPSIFPLKNIYPCFKGPFYNPGSPFFINPLYRGKLVSLSCN

SEQ ID NO: 266051 - protein, 120 aa, Glycine max
  unsure (1)..(120): unsure at all Xaa locations
  Clone ID: PAT_MRT3847_82265C.1.pep
DTHHTEPDFSDHFTLDRTIRGARPIRLVTFPNTIVQIEPHMNSRFQLLSTTTNGDYVQGKDLALFKVYVSCAPAVLTSTYTTTTLLXSGLQKDIWIIVQNFXRMTYVAHYVNHPQKKDLF

SEQ ID NO: 266052 - protein, 52 aa, Glycine max
  Clone ID: PAT_MRT3847_82266C.1.pep
GKVQDPFFLYHFMVKRLKSLFTFWVGYIKRFLQIRAFFYNPKIPSLHFYPLL

SEQ ID NO: 266053 - protein, 86 aa, Glycine max
  unsure (1)..(86): unsure at all Xaa locations
  Clone ID: PAT_MRT3847_82267C.1.pep
XVXLPWRXPQLXXXXGGKPPKXILLYGPPGXGXXLIXRXXANETXAFXXCINGXEIMSKXAGESESXLRKXFEEAXKNXPXXXFMM

SEQ ID NO: 266054 - protein, 45 aa, Glycine max
  unsure (1)..(45): unsure at all Xaa locations
  Clone ID: PAT_MRT3847_82268C.1.pep
XPPNGTLKTLAXSPSXXPCXIASLXXXAAXXSGXDXXXXEXXXXG

SEQ ID NO: 266055 - protein, 35 aa, Glycine max
  Clone ID: PAT_MRT3847_82269C.1.pep
NKENNYIKSNNDYKRLKSLLCSSLVIFNLDLQSKE

SEQ ID NO: 266056 - protein, 100 aa, Glycine max
  Clone ID: PAT_MRT3847_8226C.1.pep
SFPPIAGGPLGEVIDPIYLEGSIDPLGLADDPEVFAELKVKEFKNRRLAMFSMFGFFVQAIVTGKGSLENLTNHLANPVNNNAWAYATMRNYECEFHVVI

SEQ ID NO: 266057 - protein, 58 aa, Glycine max
  Clone ID: PAT_MRT3847_82270C.1.pep
MYGLLFIMFVSFVILFFFPSSKILSMCAFVYVNGWFVSCIRLSILENLIIFALLLPFM

SEQ ID NO: 266058 - protein, 829 aa, Glycine max
  Clone ID: PAT_MRT3847_82271C.1.pep
EEVIHDKEAQFSSPNLNVAYKMNVREYQSLTPYATALEENWGKPPGNLNSDGENLLVYGKQYGNVFIGVQPTFGYEGDPMRLLFSKSASPHHGFAAYYSFVEKIFKADAVLHFGTHGSLEFMPGKQVGMSDVCYPDSLIGNIPNIYYYAANNPSEATIAKRRSYANTISYLTPPAENAGLYKGLKQLSELISSYQSLKDTGRGPQIVSSIISTARQCNLDKDVELPEEGEEIPAKDRDLVVGKVYAKIMEIESRLLPCGLHVIGEPPSALEAVATLVNIAALDRPEDGISSLPSILAETVGRSIEEVYRGSDKGILKDVELLRQITEASRGAITSFVQRTTNKKGQVVDVADKLTSILGFGINEPWVEYLSNTKFYRADREKLRTLFDFLGECLKLVVADNELGSLKQALEGKYVEPGPGGDPIRNPKVLPTGKNIHALDPQAIPTTAAMQSAKIVVDRLIERQKAENGGKYPETVALVLWGTDNIKTYGESLAQVLWMIGVNPVADTFGRVNRVEPVSLEELGRPRIDVVVNCSGVFRDLFINQMNLLDRAVKMVAELDEPAEQNFVRKHALEQAQALGIDVREAATRVFSNASGSYSSNINLAVENSSWNDEKQLQDMYLSRKSFAFDCDAPGAGMTEKRKVFEMALSTADATFQNLDSSEISLTDVSHYFDSDPTNLVQSLRKDGKKPSAYVADTTTANAQVRTLAETVRLDARTKLLNPKWYEGMLSTGYEGVREIEKRLTNTVGWSATSGQVDNWVYEEANTTFIQDEEMLKKLMNTNPNSFRKLVQTFLEANGRGYWETSEDNIDKLRQLYSEVEDKIEGIDR

SEQ ID NO: 266059 - protein, 90 aa, Glycine max
  Clone ID: PAT_MRT3847_82272C.1.pep
LPKPWGGETAPIFFYQNFFFWGFFLPNTWEIPFHTYSLRAPRALRAKAIRGKLGLPIMLRGGNIHVNRLEVVFFKFFLNTIIFSLGAISF

SEQ ID NO: 266060 - protein, 167 aa, Glycine max
  unsure (1)..(167): unsure at all Xaa locations
  Clone ID: PAT_MRT3847_82273C.1.pep
TRPEQHNITTICPIWLSLNPALRAQIKXFLLRTLSCPSIDARYSVSQGIGTGAGIDLPHKTXDSESIGSLLSNAHQLAGPTXMLHWKTLEYIVRRDLPICSAHRIMISKXLTADDKGINSAAKTPMSGLVAYLAFDNALGFAQPCFSNDMERDYLMRMVSETTRSPV

SEQ ID NO: 266061 - protein, 83 aa, Glycine max
  Clone ID: PAT_MRT3847_82274C.1.pep
GNCVCVKVVVIVVIQGLGSAQAGQVTGLGFKALLRCTAKASSTSITACAHIVVTNLKNRVVVVVELVVPVLSVALGILLYGPV

SEQ ID NO: 266062 - protein, 55 aa, Glycine max
  Clone ID: PAT_MRT3847_82275C.1.pep
GPDPDSPSPNKGQIQNAFLFSNLAKQLCFLKQKGGTLFGVQRKHFEFELYVAWQS

SEQ ID NO: 266063 - protein, 86 aa, Glycine max
  Clone ID: PAT_MRT3847_82276C.1.pep
SLELEPHNSFSSHDNLNKFFLFSYSVVSSQDSTPRRGGVPISSTPFSNSITSKTPLSLLNMIFSLPPNNLFNFLKQLFQIFFKLIF

SEQ ID NO: 266064 - protein, 39 aa, Glycine max
  Clone ID: PAT_MRT3847_82277C.1.pep
HRFNNILLPRPSLDSITKVPGNLLTSYYHSGITRAKWLN

SEQ ID NO: 266065 - protein, 59 aa, Glycine max
  unsure (1)..(59): unsure at all Xaa locations
  Clone ID: PAT_MRT3847_82278C.1.pep
VTRKVLQAYQREASPYXSTARLWIDEIIDPTHAREVIGLCSTASLSRASEDSRYGVHRM

SEQ ID NO: 266066 - protein, 205 aa, Glycine max
  Clone ID: PAT_MRT3847_82279C.1.pep
MATFAVATTLSTSSIAPLNARRGFGFGFGSFLSPTTKPKRPSITTTLAVATDSSVCFNPNPNPNPNPNQLVLPSNESSEMLLRIRHTSAHVMAMAVQKLYPDAKVTIGPWIENGFYYDFDMEPLTDKDLKRIKKEMDRIIGKNLPLVREEVSRGEAHRRISALNEPYKLEILESIKDDPITIYHIGDEWWDLCAGPHVDSTGHIN

SEQ ID NO: 266067 - protein, 59 aa, Glycine max
  Clone ID: PAT_MRT3847_8227C.1.pep
EESQQTRKEKQDEVTNKGTTYAKLAKQDVTNNTKGLLEAKGSAGSKLYEAQKEKQQLQA

SEQ ID NO: 266068 - protein, 567 aa, Glycine max
  unsure (1)..(567): unsure at all Xaa locations
  Clone ID: PAT_MRT3847_82280C.1.pep
RTKALAFAPGKHTIWLVGPYLENGFYYDFDMEPLTDKDLKRIKKEMDRIIGKNLPLVREEVSRGEAHRRISALNEPYKLEILESIKDDPITIYHIXNENGQCNWWDLCAGPHVDSTGHINKKAVELESIAGAYWRGDERKPMLQRIYGTAWENEEQLKAYLHFKEEAKRRDHRRLGQDLDLFSIQDDAGGGLVFWHPKGAMVRHIIEDFWKKIHMKRGYDLLYTPHVAKADLWKISGHLDFYKENMYDQMSVEDELYQLRPMNCPYHILVYKSKLHSYRDFPIRVAELGTVYRYELSGSLHGLFRVRGFTQDDAHIFCLDDQIKDEIRGVLDLTEEILLQFGFEKYEVNLSTRPEKAVGDDDIWEKATSALEDALDDKGWTYQIDDGGGAFYGPKVDIKIEDALGRKWQCSTIQVDFNLPQRFDITYVDSNTEKRRPIMIHRAVLGSLERFFGILIEHYAGDFPLWLSPIQARVLPVTDAQLEYCNVVTNKLKMYGIRAEVCHGERLPKLIRNAEKQKIPLMVVVGSKEVETETVTVRSRFGGELGTMPVDDFIDRIKLGTENPISL

SEQ ID NO: 266069 - protein, 316 aa, Glycine max
  Clone ID: PAT_MRT3847_82281C.1.pep
MAVELMGFPKLDEQKAIQEAASEGLKGMKHLIRTLSNQPSHLNTELTDVTVSKFKKLISLLNRTGHARFRRAPVQYSSPHAPVHNTNASTSSIQLPPPPQNPNIPALAQFPTPAPVAVHHTPVTLDFTKPHNALLSSNAKSVELEFSKETFSVSSNSSFMSSAITGDGSVSNGKIFLAPPATSAGKRPAFKKRCHEHREHSDDVSGNSKCHCVKRRKNRVKSTVRVPAISSKVADIPPDEYSWRKYGQKPIKGSPYPRGYYKCSTIRGCPARKHVERAPDDPAMLIVTYEGEHRHAVQAAMQENAAGVVGLVFEST

SEQ ID NO: 266070 - protein, 79 aa, Glycine max
  Clone ID: PAT_MRT3847_82282C.1.pep
ALSKQQHTNNIFLNSHMEHHVGQINFPNSSSLFHIYLCLLVHNTMVIHLLERIAGYKMCYTFICEIASPTGVVQGTWDP

SEQ ID NO: 266071 - protein, 98 aa, Glycine max
  Clone ID: PAT_MRT3847_82283C.1.pep
GVKSTVRVPAISSKVADIPPDEYSWRKYGQKPIKGSPYPRGYYKCSTIRGCPARKHVERAPDDPAMLIVTYEGEHRHAVQAAMQENPAGVVGLVFEST

SEQ ID NO: 266072 - protein, 164 aa, Glycine max
  unsure (1)..(164): unsure at all Xaa locations
  Clone ID: PAT_MRT3847_82284C.1.pep
NHSQHNTDSETKPETLVAMAEEEKHRLQEDTDKLFCSYIGASFSMFLAMLANNSVPALQGKVRPLSLRAAEAAEELRQMKSRRQEDSKANARVVEIFASHRNAWQAEEKRLLQQIDAAAEEIACLRGRVAELEDAAAHGXXDVAERDEMIGFMSRRIEEEGLGG

SEQ ID NO: 266073 - protein, 151 aa, Glycine max
  Clone ID: PAT_MRT3847_82285C.1.pep
EKTGAGKTNKNNPPGKGWVLPPPKPRNKRKNGNPPPPLGKKGGKGKGTPGGGHQKKRSILANQKKNLLKPSFLTQNGGGGAFFINPRGRKPTWNFINPRNRNPLNNFKRGPGPSPHLLGGVLTLTHHEMHKQVLRVKLGPKTHLFRVFTGQ

SEQ ID NO: 266074 - protein, 44 aa, Glycine max
  Clone ID: PAT_MRT3847_82286C.1.pep
IDVFLFGVIKKEMNHWYFKLLILLLFSLIFINNKMRSLDIMLSL

SEQ ID NO: 266075 - protein, 52 aa, Glycine max
  Clone ID: PAT_MRT3847_82287C.1.pep
LRASFELRGERRVLEVDEEVRVWEEASESGRVLERCSHAPPYMCTRIKSKWQ

SEQ ID NO: 266076 - protein, 94 aa, Glycine max
  Clone ID: PAT_MRT3847_82288C.1.pep
ILFSFTFTSITSIKLRLPSSTTSFKLSLSHTLYHSFSRSLFLFHYNFPDSVSSLLQFSILTSSLSSTYLICFHFFHFLSIFSHLVPFHFFSPRI

SEQ ID NO: 266077 - protein, 123 aa, Glycine max
  Clone ID: PAT_MRT3847_82289C.1.pep
MLRGLRMRRLQDRRIGNQPPFRQDIQLRHEGVRDVRRKLLDLQHIFLDIAVLVNAQGDMLDNIETQVSSAVDHVQQGNNALQKAKKLQRNSRKWMCIAIMILLIVVIIIVVAVIKPWVTKKGA

SEQ ID NO: 266078 - protein, 864 aa, Glycine max
  unsure (1)..(864): unsure at all Xaa locations
  Clone ID: PAT_MRT3847_8228C.1.pep
LKPGVEYDESDFTKNQRYLLKTWFHDHYVVDQTFESYADLLAHCFTKWERHVKEQESNLSQIKGKKSESGHFYNFQQLMDLAVSWNLNADIMKNRIKAERSDMVYVFSAGRKDKILHCFLNKEGECTVRPDSIDDPEAQALLKASETMLMKAYAFLKYNNATNLIVRTHLAELVNEDFYDEKFNFIGTIGTPAFHRQIAAHLEKMPLWQKAILCGMGHCLSRKSKETWYSGMKEKFVQMMKSIYETEVTDWPVPLKIISGTILATILGTTFWKLFSFLRDAGNGGVFVGNVASAFTTSSVLEAQSRKPNRYEVSQYRYRNVPIKRRAWVEGQMSFDQSVVAIMSKCKASMRMGNTDAQILMVPGRRFIAHGHFFKNLTQKVRVQIVTSEKSYWHVYDPDKFQMFDNSEIGLYSNPTLEDIPHSAWDLFCWDSEKTLPNNFSAELLSCKLDTVTGPYYPEWAPXNCRVHRQPIHITEGNYVRKQDVSIEYDACTIPNDCGSLVDAKVGNHKQIVGFHVAGSKGRLGYASLIPYVEPVVXQAQSAEVYFDFFPVXRVDSQEGVAHIGELKSGVYVPLPTKTNLVETPKEWQLDLPCDKIPSVLTTTDERLVGTEHEGYDPFLGGIQKYATPMMPLDEEILSKVAQDMVEEWFDCVDEEDSFEEVSLSAALNGVEGLDYMERIPLATSEGFPHVLSRKNGEKGKRRFVSGDGEEMTLIPGTTVEEAYNKLISELEKSVPTLVGIECPKDEKLSRRKNFDKPKTRWYTIFPMEYNIVVRQKFXLNFVRLILTKRDKLSCQVGMNPYCMEWTGLANMLLSKGNDILCRDYASSDGLITKLVMSKMADMINSLXGGDEKLMPERTHLLMA

SEQ ID NO: 266079 - protein, 69 aa, Glycine max
  Clone ID: PAT_MRT3847_82290C.1.pep
SKRSCFKKGKGVVCDLDPTMWLYYRKHLDGSLHKRFLCINSILSFLLQQEKKNKNNPNSPEPHRHINMT

SEQ ID NO: 266080 - protein, 217 aa, Glycine max
  Clone ID: PAT_MRT3847_82291C.1.pep
MPHASHLVPKPANEAKSSVVLHPSTVDIKPSGRSELPEDLFTVKYSPFPAPVPGWQMGPPPSMGISIQYNNAVPMPSYAQPSKSTNPFDVSSEPTPVQAPMFPSMSSLQGALPSVTPSVTMHPSNMGNISHAWNPHSSSPSYVSPPQVQTLAPAMGPGAYMGQQMATNMPMPRHQGIGSFATEATAFGFSNPDQQLTGRLSTAATPNTYHAGGNPFG

SEQ ID NO: 266081 - protein, 65 aa, Glycine max
  Clone ID: PAT_MRT3847_82292C.1.pep
VIADKYIYIYIYIYITKDQRFIDYIKIQSFGSINLEHLYVTILTECLDVKITDPCKLHINLLILS

SEQ ID NO: 266082 - protein, 187 aa, Glycine max
  unsure (1)..(187): unsure at all Xaa locations
  Clone ID: PAT_MRT3847_82293C.1.pep
MRLSSADFSPPPQEGEKRVLDSELWHACAGPLVSLPAVGSRVVYFPQGHSEQVAVSTNKEVDAHIPNYPSLPPQLICQLHNMTMHADVETDEVYAQMTLQPLNPQEQNEAYLPAELGTASKQPTNYFCKTLTASDTSTHGGFSVPRRAAEKVFPPLDFSXQPPAQELIARDLHGNEWKFRHIFRGPA

SEQ ID NO: 266083 - protein, 89 aa, Glycine max
  Clone ID: PAT_MRT3847_82294C.1.pep
HVQTYQPRASQEWRVKAIATHIQSCTNLDATTSVTLAAMSNVKNCCFRLDQTNASPAVYCEGYARIKRRNVLTWNTRFLVLSNTKLLFF

SEQ ID NO: 266084 - protein, 77 aa, Glycine max
  Clone ID: PAT_MRT3847_82295C.1.pep
KLKGHRLGHCCCHSPSAEAHSHSVHHATVFQLHDHPYTLIFAPIGPADHTFPRFLRVASSGRDNTRTGGPLYSPHCH

SEQ ID NO: 266085 - protein, 86 aa, Glycine max
  Clone ID: PAT_MRT3847_82296C.1.pep
HYCHSVTVHQAAASHPSVIRLALVCMPPMSQSCAITPVGCFSWFTLIVGSTCLTCRAPRPPASQRAGSNSSEESMFTRIGDRKLTR

SEQ ID NO: 266086 - protein, 238 aa, Glycine max
  unsure (1)..(238): unsure at all Xaa locations
  Clone ID: PAT_MRT3847_82297C.1.pep
MEPPQARPLGTAGRKPMHDFLSLYSNSTAQQDPRPPSQGSYLKTHDFLQPLERVETKASAKEEATDEISSVVQKPRSPSVEHLLPGGIGTYSISHISYVNNNNNNNQRGVLKPETSSLFVRQATSTDRNEENSNCSSNTXHGFTLWEESSGKRGKTGKENNAGEKPSLGESAAKLGQWTTTERTSQSFSNNRHASFSSRYSSHRTGLKXSQSFIEVMRSERNRAQKEDRERDETIFIN

SEQ ID NO: 266087 - protein, 109 aa, Glycine max
  Clone ID: PAT_MRT3847_82298C.1.pep
MGVKWAAIRRMIKKEGADMICLQETKKEAVDKAMCQALWGDVEVCWEMLPANNIVGGVLCLWSETTFRLQSKLIGNGFIHLAGEWIKEAQHINLVTVYSPCDIHNKRLL

SEQ ID NO: 266088 - protein, 327 aa, Glycine max
  unsure (1)..(327): unsure at all Xaa locations
  Clone ID: PAT_MRT3847_82299C.1.pep
SIEVERVKCLLELFRKCYLNPFPFLVHLGGMLGVVNAVGAGAGILVNMNFPNYSRQSGYQKESSSVMGPLLSSSDFEPYLTSLVQEMFLVAQNSDNHQLQQFASWVLAFLRHHLWSKELLGVDSDRSVAATNSKSVSQSFSEDNIVLKLSLWLTSFKYTEPGTIVHISRVIAVLRCLSTAPRLPSLDWGSIIRRCMRYEAKVAELLPKDSASKNGTLREECIMFAMAHANQFDSLLTFLDELSDFSRFRTLEINLQSCLLNHLADLVKVYSNSRLEKLFGDVSNHLSSFTSTKSLAXPQSLLCISCWKGSTXCLDEVSVDSSXYISI

SEQ ID NO: 266089 - protein, 410 aa, Glycine max
  Clone ID: PAT_MRT3847_8229C.1.pep
MEQEGHQWIVHPHEEEEEIMEDGALIRKQTVSHNKGNFITDELTFSSSSSSSSSSNGSEHSNGVCSVVTAPPDGYPVQKEEEVAEIGGVGENCNHVNGDIVDYAAAGLAQVAEFAGAETNGEAITGVVVSQNKNSVYFDEQQDDEVNGVQNGDAFWSVHPTNLGGRDFDVQADQSVVQNSLCSEITNQCMKTVDDKLPSVTEISHLHNSSDIQATAITNFPEETSTKEAPNLIEEIDPQLEEFDVEAVLAKQETHDLFCPNCSSCITKRVILKKRKRNTKKSGSKSKRDKPENTHNLDNEANPEPSADNNQPHEEPEVFRCLACLSFFIPSGKCFDRFRFDGANKSESARNLPSIPASNLQNPSIPQGSNANWLISLFPWKKGSKTSDAPLEYSGTGSAEQPNSTLTSND

SEQ ID NO: 266090 - protein, 45 aa, Glycine max
  Clone ID: PAT_MRT3847_822C.1.pep
KNILESAKTMFGQCKTQVWPSQQLIIACGIENRVGGQIKKFNRPN

SEQ ID NO: 266091 - protein, 39 aa, Glycine max
  Clone ID: PAT_MRT3847_82300C.1.pep
PSARGRCVTHGVCAPRKEYARSRHQRLFEENVGKTGKDV

SEQ ID NO: 266092 - protein, 66 aa, Glycine max
  unsure (1)..(66): unsure at all Xaa locations
  Clone ID: PAT_MRT3847_82301C.1.pep
GFKLLNINANFISDEGIDELKNIFKNSPDMLGPLDENNPDGEDPYXEAEEDADHDELESKLKGLDI

SEQ ID NO: 266093 - protein, 89 aa, Glycine max
  Clone ID: PAT_MRT3847_82302C.1.pep
LQSKLDTAATRIGINPMSLFKGVWSLFCSKTVEQKAEEHEIEQTLSLFLHDIGRTMSSDLSEYKIIKERVAEILMDAKDEVFYNKTQGN

SEQ ID NO: 266094 - protein, 38 aa, Glycine max
  Clone ID: PAT_MRT3847_82303C.1.pep
RQWTECHPVIRHTGTLHLNAILPSDTFELHIIEQNNSH

SEQ ID NO: 266095 - protein, 56 aa, Glycine max
  Clone ID: PAT_MRT3847_82304C.1.pep
GVHPCLVLACMAVFSFLISNASPEIDAVRRHDRGRRHRARPLAIHGWSTHHGFVLT

SEQ ID NO: 266096 - protein, 231 aa, Glycine max
  unsure (1)..(231): unsure at all Xaa locations
  Clone ID: PAT_MRT3847_82305C.1.pep
KLQLVLQEFQVNPASQNIDQFYWVMNWASAIPIHLMVDMMDKFFFAKWLQVLYHWLCSNPNFEEVTKWYLGWKELIPKELLANESIRYQLNRGLDMMNQAVEGXEVVQPGLKENISYLRVLEQRQFEAQQKAAAYTQQQAAASLGGAVNADGAHELSLKEVIEAHAQQHGLLFKIKPGRMHNGHQIYGFGNVSIIIDSLNQKVYAQNEEMWSLESLHGLLELHNKSLSKRR

SEQ ID NO: 266097 - protein, 229 aa, Glycine max
  Clone ID: PAT_MRT3847_82306C.1.pep
PTRPPNIKSALRSKLPSFHVVKQLTISNIKEEMEKTLHWLVLIATNTAKAHQGSGRVGEWASSGCELNKKTMKADVLRIETLHHADKDKVENYILELLLWLHRLAVKSKAGIDTGETRSTLKSQVGTALQTTNQQSTKALSPLLTTDEQKMLQDVSNKIRIRRISKSLDFDSVMADNDRLTKSSSYSYSSTSRSKELSFNRILSKLPVIDFGIDKKRALDVIDRLDVVR

SEQ ID NO: 266098 - protein, 42 aa, Glycine max
  Clone ID: PAT_MRT3847_82307C.1.pep
FQDTIYLYTIMVFDMTVTIQNYYTHITMIVYYDLTRDAVLMT

SEQ ID NO: 266099 - protein, 85 aa, Glycine max
  Clone ID: PAT_MRT3847_82308C.1.pep
PIRVCVKFQGHLSGSGWKSFGGIRGSNPQWGLDFGDYKNFLLLYPDPSAKGFRKFSQNGILKREKLLTMTGGGFGIIMGLIFFPS

SEQ ID NO: 266100 - protein, 75 aa, Glycine max
  Clone ID: PAT_MRT3847_82309C.1.pep
EILNKVGSYWFSKKASKEFNSVGDDINVNNTILNTLFLSISFFFGRFIFIFILLLFGKVPFFFFVFSVLLFHTSD

SEQ ID NO: 266101 - protein, 602 aa, Glycine max
  Clone ID: PAT_MRT3847_8230C.1.pep
MDALRVAPTTPPLLRRHPLRKMAPHPLTARPRRAPLIVATLSMPPEATHSSAVAIVEDPSEAAPPPRPRVSPDSLQYPPGFVGAIPASSRSDGGDGDGMNNAMTYLTNILSSKVYDVAIESPLQLAPKLSARLGVKVWLKREDLQPVFSFKLRGAYNMMAKLPTELLEKGVICSSAGNHAQGVALAAKRLNCSAVIAMPVTTPEIKWKSVEALGATVVLVGDSYDEAQAYAKKRGVEEGRTFVPPFDHPDVIMGQGTIGMEIVRQMQGPIFAIFVPVGGGGLIAGIAAYVKRVKPEVKIFGVEPTDANAMALSLHHDQRVILDQVGGFADGVAVKEVGEETFRICKELIDGVVLVSRDSICASIKDMFEEKRNILEPAGALALAGAEAYCKHHGVQGKDIVVITSGANMNFDKLRVVTELANVGRKQEAVLATVLPEEPGSFKQFCELVGQMNITEFKYRYNSNEKAVVLYSVGIHTVSELRAMQERMESSQLKTYNLTESDLVKDHLRYLMGGRSNIQNEVLCRFTFPERPGALMKFLDPFSPRWNISLFHYRGEGETGANVLVGIQVPKSEMDEFHDRANKLGYDYKVVNNDDDFQLLMH

SEQ ID NO: 266102 - protein, 84 aa, Glycine max
  Clone ID: PAT_MRT3847_82310C.1.pep
FVSRGHFHKDHVCLNGCRHVYGESCPRQGLLCASCSSRSYSSVSAACFVCFSWFIRPCVSFSVERRFPLWSERLRFVAPARVSV

SEQ ID NO: 266103 - protein, 87 aa, Glycine max
  Clone ID: PAT_MRT3847_82311C.1.pep
MPCVEERKVAPPSDPPLPFDPSRMIGIIKRKALIKDLAAVYHAECLAYCQELLELQTKWEEPFIDLKTPEESKKETARPSKRVKKLR

SEQ ID NO: 266104 - protein, 205 aa, Glycine max
  unsure (1)..(205): unsure at all Xaa locations
  Clone ID: PAT_MRT3847_82312C.1.pep
HASENADYIAVMEDGQLVEMGTHDELLTLDGLYAELLRCEEATKLPKRKSLCSHPXMPVRNYKETATFQIEKDSSESHSFKEPSSPKMIKSPSLQRVSAIFRPSDGFFNSQESPKIRSPPSEKLMENGQSLDSSDKEPSIKRQDSFEMRLPELPKIDVQCVHRQTXNGXSDPESPISPLLTSDPKNERSHSQTFSRPDCHLMIFW

SEQ ID NO: 266105 - protein, 83 aa, Glycine max
  Clone ID: PAT_MRT3847_82313C.1.pep
KNERPKRKRLTGFRLVKKALSIPKPRGSTRTPLKTSQIPPANNAREFFQQQRPGTRRGYFNLGRKPLRWRNPVGKRQRRAKEV

SEQ ID NO: 266106 - protein, 258 aa, Glycine max
  Clone ID: PAT_MRT3847_82314C.1.pep
FVVKAKNIQTQQMACSVPFNNKNLDISFFVFKPTIVIIDDLVHGLKHFSLTTESLGCVQSSIFRSIHGNMIIWYGAWQRRSSKEKEELTSTLKSMLSNISSMAVLIEHSFLEAYGGESRDGSSTAKFSTGDIISLNSAVTTTNDLNDLCYAVLAILRSRFAKMEGITAGLCFKGQSKPRVVCIHVWKSLHFCYSWILNSDHRNWMMPYLERFSINMKYDIFRVVYVRGDNVVDLNCISTHQMLENGKESSRQGQVMQN

SEQ ID NO: 266107 - protein, 74 aa, Glycine max
  Clone ID: PAT_MRT3847_82315C.1.pep
YYTGCLMRAYSPRAPTRTITDASPSRKSWNAIRITMNNDLRSLGMPIREIAHTVSMTKLCPDANRAIHEVKCRD

SEQ ID NO: 266108 - protein, 147 aa, Glycine max
  Clone ID: PAT_MRT3847_82316C.1.pep
ARKGARVGTSTKLREYELQYILQDNGVLLTTYDIVRNNSKSLQGNNYFDDEDNEEGATWDYMILDEGHLIKNPSTQRAKSLLEIPSAHRIIISGTPLQNNLKELWALFNFCCPELLGDHKWFKERFENPILRGNDKHASDREKRVGS

SEQ ID NO: 266109 - protein, 159 aa, Glycine max
  Clone ID: PAT_MRT3847_82317C.1.pep
SCTGVETVAQFGVVFLLFALGLEFSLAKLKAVGPVAVLGGLLQIIIFMFMCGILSMLFGAKLSEGVFVGSFLSMSSTAVVVKFLVERNSNNALHVQVTIGTLIFQDCAVGLLFALLPVLGGNSGLLQGIMSMGKLLLVLSLYITATSVLSWTFVPRFLK

SEQ ID NO: 266110 - protein, 90 aa, Glycine max
  Clone ID: PAT_MRT3847_82318C.1.pep
NAGYSQPLSYISTHTNPWDRHIPIGLHRPLLKLPACSLFSQPCLRRRQPLITPRSPSKRTTPPYTVTRGYTLFLKQPYPNWLNRTPTKTK

SEQ ID NO: 266111 - protein, 73 aa, Glycine max
  Clone ID: PAT_MRT3847_82319C.1.pep
TSDEKSFIPNGIGSYNSTLIRKAITYDSKMRRLQDQPYSEHVHNNTTKATQGRKNRQTPINRGSRLKRPGQTP

SEQ ID NO: 266112 - protein, 274 aa, Glycine max
  Clone ID: PAT_MRT3847_8231C.1.pep
MSKYGTSLLVPSVHELVKQPITKVPDQYLHPNQDPPDISNTTLPQVPVIDLSKLLSEDVTELEKLDDACKEWGFFQLINHGVNPSMVENVKRDVQEFLNLPMEKKKQFWQIPDELEGFGQLFVVSEDQKLEWADMFFIHTLPINARNLRLFPNFPQPLRDNIENYSSQLKKLCLTVKPLPNAFVINVGDILEILTNGIYRSIEHRATINKEKERISVATFHRPLMNKVIGPTPSLVTSERAAVFKRIAVEDYYKAYFSRGLKGKSCLDLIRVQK

SEQ ID NO: 266113 - protein, 274 aa, Glycine max
  Clone ID: PAT_MRT3847_82320C.1.pep
MFSRGRGSDIGGHGNTNVAEWELRPGGMVVQKRNSDLNQNSASKFTIKVKVKYGSSYHQIQISSHASFGELKKMLTEPTGLHVQDQKLIYKKKERDSKSYLDVERVKDGSKLVLVVDIESRERRILETLKIAKEKTSKSLTEIKVEVDKLAKKVAALEAAASTGGVIAELDIETLTENLMRTLIALDEINGEGELKLQRREQVRRVQKHIETLDMLRMARENSISLKNEEKNLARESKVHCGDHMQGRQGNPKKQQPLKHPESVVVTTKWETFD

SEQ ID NO: 266114 - protein, 69 aa, Glycine max
  Clone ID: PAT_MRT3847_82321C.1.pep
MTILVMTLNTMVTLKFYKTLYLQGLQLPKQTVFMTPQELATGYNTHSLFLSTSENGTTLHITQRLYYEL

SEQ ID NO: 266115 - protein, 68 aa, Glycine max
  Clone ID: PAT_MRT3847_82322C.1.pep
VRTAARRRQKGTVPPKIILALARSRWIGCKHATHVLGSAETWISSNCAVSTHCQHLYMRIQAVINDWR

SEQ ID NO: 266116 - protein, 80 aa, Glycine max
  Clone ID: PAT_MRT3847_82323C.1.pep
VLFLYVQGRNLEDSLFSLLDIYFFNNHKRVWVSFQNPNLKENLLFLDPHGLYWACNMVRGKRAMKERIREAQRVLEGYIE

SEQ ID NO: 266117 - protein, 236 aa, Glycine max
  unsure (1)..(236): unsure at all Xaa locations
  Clone ID: PAT_MRT3847_82324C.1.pep
KGPQGKFTKKKQKKXAAAQAAAAAAAAAPTASVQVRIVLDDGTSNILMRSVGTRSEPVIGLHGGALLGVAYRTSRRVSPIAATAISTIQSMPLSGYGSSGVSSFTTYDDGFSSQRPPTEAAPQNFQLYSWETFQPVGGLLPQPEWTAWDQTVEYCAFANQQKIIISSLRPQYRXLGNVAIPPPPSAVWHRRQLFVATPTTIEIVFVDAGVAQIDXATKKMKEEQKKKKKKKKKGNQ

SEQ ID NO: 266118 - protein, 152 aa, Glycine max
  unsure (1)..(152): unsure at all Xaa locations
  Clone ID: PAT_MRT3847_82325C.1.pep
MNTLNPNPPTRMLSKRKPLYRFPLIPVFALVICLSFLVLYRYYAKPDSQFNGLSKTSTMSHAPQCSGQALALGEKFVWYAPHSGFSNQLSEFKNAVLMAGILNRTLVVPPILDHHAVALGSCPKFRVVDPMDVRISXWDHVIELVQSRRYIS

SEQ ID NO: 266119 - protein, 86 aa, Glycine max
  Clone ID: PAT_MRT3847_82326C.1.pep
DLKSYPDHLIQNFQKITLTSSTSHSSVYLSTFLTFTYTLRPHHLAQNPIITCTILHQHHSKDLNTNSFSSELQKHLAIWYPIPYYD

SEQ ID NO: 266120 - protein, 97 aa, Glycine max
  Clone ID: PAT_MRT3847_82327C.1.pep
KRDNLMLVQAQKGLPRSNKPSLKPGFTSRIYNTNISRGLQRWAHKRLFMKHWVNGGPRIVCKKNQFGKSYLNRHLAIGSGSWDFYQQRLMGRCQGGV

SEQ ID NO: 266121 - protein, 60 aa, Glycine max
  Clone ID: PAT_MRT3847_82328C.1.pep
VRIRFIRSVDRHFNQLTLGCLEFSLLKSGSGGVESFYGSPSLWITISVCFGKRDWMVRLE

SEQ ID NO: 266122 - protein, 60 aa, Glycine max
  unsure (1)..(60): unsure at all Xaa locations
  Clone ID: PAT_MRT3847_82329C.1.pep
IKDAXXEIWLCVWETRPVLTKIRGRRXSIQTLYAKVAATATDTKVQYSLRRNYSCSQSRV

SEQ ID NO: 266123 - protein, 84 aa, Glycine max
  Clone ID: PAT_MRT3847_8232C.1.pep
TLPPSQMLIINSMNIVTEEVMEYLKRMFTWISKFSYKYTVDEQVRLHVHFGDIRCHVLLLDGPQMPLITIDAHATYHFPFERTP

SEQ ID NO: 266124 - protein, 122 aa, Glycine max
  Clone ID: PAT_MRT3847_82330C.1.pep
SNARGSVRISKQTQTPPTTAPHSMRSRRTANWGRARTSDDGYSSDSTLKNVTTDFKRMGKRIFVFIIGGATRSELRVCHKLTPKLKREVILGTTSMDDPPQYLTKLKLLFDNNVSQLNGLGI

SEQ ID NO: 266125 - protein, 156 aa, Glycine max
  Clone ID: PAT_MRT3847_82331C.1.pep
VIPGQRALALHLLSSVLDKALHYICKDRTGYMTKNENKVDKSVDWEAVWAFALGPEPELVLSLRICLDDNHNSVVLACTKVVQSVLSYDANENYCDMSEKIATCDMDICTAPVFRSRPDINDGFLQGGFWKYSAKPSNILPFSDDSMDNETEGKHT

SEQ ID NO: 266126 - protein, 69 aa, Glycine max
  Clone ID: PAT_MRT3847_82332C.1.pep
NQGFFGGKTWWQKNPFHYPPQKTTLGFFKMVNNQVKKIWAPNSLPKNFWFDPPLKFLKRNLLNQGKGRV

SEQ ID NO: 266127 - protein, 62 aa, Glycine max
  Clone ID: PAT_MRT3847_82333C.1.pep
FLIEMEFPHLTPSYIYTVFSLAHELMDFCIFFKCYYSHYFDETYLLGCLLLIALPLTLVLLV

SEQ ID NO: 266128 - protein, 149 aa, Glycine max
  unsure (1)..(149): unsure at all Xaa locations
  Clone ID: PAT_MRT3847_82334C.1.pep
MDLLLLEKTLIGLFLAAVVAIAVSTLRGRKFKLPPGPLPVPIFGNWLQVGDDLNHRNLTDLAKKFGDIFLLRMGQRNLVVVSSPELXQDMVFTVYGEHWRKMRRIMTVPFFTNKVVQQYRHGWESEAAAVVEDVKKNPDAAVSGTVIRR

SEQ ID NO: 266129 - protein, 168 aa, Glycine max
  Clone ID: PAT_MRT3847_82335C.1.pep
AEAAAVVEDVKKNPDAAVSGTVIRRRLQLMMYNNMYRIMFDRRFESEEDPIFQRLRALNGERSRLAQSFEYNYGDFIPILRPFLKGYLKICKEVKETRLKLFKDYFVDERKKLGSTKSTNNNNELKCAIDHRLTLVRKEGNLASTYSSIPPLWQSQGHFRLHHMIMII

SEQ ID NO: 266130 - protein, 505 aa, Glycine max
  Clone ID: PAT_MRT3847_82336C.1.pep
MDLLLLEKTLIGLFLAAVVAIAVSTLRGRKFKLPPGPLPVPIFGNWLQVGDDLNHRNLTDLAKKFGDIFLLRMGQRNLVVVSSPELAKEVLHTQGVEFGSRTRNVVFDIFTGKGQDMVFTVYGEHWRKMRRIMTVPFFTNKVVQQYRHGWESEAAAVVEDVKNNPDAAVSGTVIRRRLQLMMYNNMYRIMFDRRFESEEDPIFQRLRALNGERSRLAQSFEYNYGDFIPILRPFLKGYLKICKEVKETRLKLFKDYFVDERKKLGSIKSSNNNELKCAIDHILDAQRKGEINEDNVLYIVENINVAAIETTLWSIEWGIAELVNHPEIQQKVRDEIDRVLEAGHQVTEPDIQKLPYLQAVVKETLRLRMAIPLLVPHMNLHDAKLGGYDIPAESKILVNAWWLANNPAHWKKPEEFRPERFLEEELHVEANGNDFRYLPFGVGRRSCPGIILALPILAITLGRLVQNFELLPPPGQSQIDTSEKGGQFSLHILKHSTIVAKPRSF

SEQ ID NO: 266131 - protein, 506 aa, Glycine max
  Clone ID: PAT_MRT3847_82337C.1.pep
MDLLLLEKTLIGLFLAAVVAIAVSTLRGRKFKLPPGPLPVPIFGNWLQVGDDLNHRNLTDLAKKFGDIFLLRMGQRNLVVVSSPELAKEVLHTQGVEFGSRTRNVVFDIFTGKGQDMVFTVYGEHWRKMRRIMTVPFFTNKVVQQYRHGWESEAAAVVEDVKKNPDAAVSGTVIRRRLQLMMYNNMYRIMFDRRFESEEDPIFQRLRALNGERSRLAQSFEYNYGDFIPILRPFLKGYLKICKEVKETRLKLFKDYFVDERKKLGSTKSTNNNNELKCAIDHILDAQRKGEINEDNVLYIVENINVAAIETTLWSIEWGIAELVNHPEIQQKLRDEIDRVLGAGHQVTEPDIQKLPYLQAVVKETLRLRMAIPLLVPHMNLHDAKLGGYDIPAESKILVNAWWLANNPAHWKKPEEFRPERFFEEESLVEANGNDFRYLPFGVGRRSCPGIILALPILGITLGRLVQNFELLPPPGQSQIDTSEKGGQFSLHILKHSTIVAKPRSF

SEQ ID NO: 266132 - protein, 91 aa, Glycine max
  Clone ID: PAT_MRT3847_82338C.1.pep
HLSSHWSLDLYFLLFYMANRVFPNVPSLDSTNETSAPLTRPFLSMPLSDGKHLHSTIFFYSFSWVYYFGFIFIFSSHSIRKQNAMMIQLDV

SEQ ID NO: 266133 - protein, 234 aa, Glycine max
  Clone ID: PAT_MRT3847_82339C.1.pep
MGSMGNSNPNLNPNPNPNPWTPKDCSEGICSIYCPQWCYKVYSPPPPILLGDGDDDPSGFEFSPLIVAVIGILASTFILVTYYTIISRFCRRRNNTNDSTEDDGNSELARVSSSANSGLDEALIKSITVCKYNKRGGLVEGHDCSVCLIEFQENENLRLLPKCNHAFHLPCIDTWLKSHATCPLCRSSVTACPNPNPNSSMEPPPRVIVNALGHQLRSNHVVVVESSEEQQKDG

SEQ ID NO: 266134 - protein, 61 aa, Glycine max
  Clone ID: PAT_MRT3847_8233C.1.pep
SRRSHASLTIFTHSGRSLTRIPSRGCGPIQGPSLFFNPMRLKETGCYIILWSLIHFTCHTI

SEQ ID NO: 266135 - protein, 73 aa, Glycine max
  Clone ID: PAT_MRT3847_82340C.1.pep
RGTNYYEQLLERNKEHIAKPATVGEYDLRTKQLCYTHLTSIRNHNESFVERLSCVNNVMKNRKRAEMEDAALG

SEQ ID NO: 266136 - protein, 73 aa, Glycine max
  Clone ID: PAT_MRT3847_82341C.1.pep
LNWHSVGSHTSFPYILNRTTGLNICVYGTPRRVTFGETKGNMGKWFSDWGIISHFYGRGCKYILSHGIIAHRA

SEQ ID NO: 266137 - protein, 92 aa, Glycine max
  Clone ID: PAT_MRT3847_82342C.1.pep
HRLMWHFDLKKFRPSEVPRVKISLACVFAFIAIGWPLIIYKTGIMGWIKFWLMPWLGYHFWVISTLSCKFILCSSVLAPMSLFLSFCFLRGR

SEQ ID NO: 266138 - protein, 291 aa, Glycine max
  unsure (1)..(291): unsure at all Xaa locations
  Clone ID: PAT_MRT3847_82343C.1.pep
VLSRELPAMSVELKLSRSNRIYRPSEALEGKIIPPSSQHQGQIIVQSHSPISHYGIQLTVSGSVNLQVRGGSAGDVESFYGVINPSRFIIRTIXVNSSGKIGSGTWDIPFSLKLRKPDEELARRYQTIHCTVKLLNKFLXSCGYFYKSFSSTIDLTVGSDNSDLXNXPLNPYSSIFYISRDTXCINNTLHNNVXTAPFDLSNNFSWSLRPISGELTVETSAVPIHSIDLQLFRVESILLGEKIVTETSLVQTTQIADGDVCRNMTLPIYVIVPRLLTCPTTLAGRQWKHYR

SEQ ID NO: 266139 - protein, 121 aa, Glycine max
  Clone ID: PAT_MRT3847_82344C.1.pep
ISGELPVETSAVPIHSIDLQLFRVESILLGEKIVTETSLVQTTQIADGDVCRNMTLPIYVIVPRLLTCPTTLAGPFSVEFKVAIVISFQSELSKLPKKSDPKTPRLWLAMETLPLELIRTK

SEQ ID NO: 266140 - protein, 75 aa, Glycine max
  unsure (1)..(75): unsure at all Xaa locations
  Clone ID: PAT_MRT3847_82345C.1.pep
HFPFHEYVLMSYXVLLLDTESTKFDLNAIISCSPFSVEFKVAIVISFQSELSKLHKKSDPKTPRLWVGSGPLLDM

SEQ ID NO: 266141 - protein, 84 aa, Glycine max
  Clone ID: PAT_MRT3847_82346C.1.pep
RVRSSQFVSRSPLPTIFFFLLLVLNVVFYIFGSRGDLLHNFTIPYFVNIVALFSFITIVAIIINNTIKTAIQDINFYPTIFFKT

SEQ ID NO: 266142 - protein, 98 aa, Glycine max
  unsure (1)..(98): unsure at all Xaa locations
  Clone ID: PAT_MRT3847_82347C.1.pep
LGGFRVTGKXCTQCSLSGPISGELTVETSAVPIHSIDLQLFRVESILLGEKIVTETSLVQTTQATDGDVCRNMTLPIYVIVPRLLTCPTTLAGYVSLT

SEQ ID NO: 266143 - protein, 79 aa, Glycine max
  Clone ID: PAT_MRT3847_82348C.1.pep
YHIMYDKEKWKRCMIFILFFYILTIFSSTLSFDSTHPRFRPSTLTSIILCQPTRPPTSLIFKTNPLRARFISTQSYTYL

SEQ ID NO: 266144 - protein, 61 aa, Glycine max
  Clone ID: PAT_MRT3847_82349C.1.pep
MILVAIVAEVLEEYTALLARVVEQVFRSAPVPRRVRFLILRTLPFVSSRPRTILPPPTPSY

SEQ ID NO: 266145 - protein, 67 aa, Glycine max
  unsure (1)..(67): unsure at all Xaa locations
  Clone ID: PAT_MRT3847_8234C.1.pep
DKTSTQIKLNWPKAQDNTETNSITNTTXQADDFKCALEWKLNKEHVSELPNAGTKTKPVIQFPDQKP

SEQ ID NO: 266146 - protein, 117 aa, Glycine max
  Clone ID: PAT_MRT3847_82350C.1.pep
FPVKVPTPVVPPVRVVITFTKFVDLQPVEQFYTPFWSPRHLLLSASRGGDEHQSKAENRCSSSSSSPWVRRNNSVSNKQRCMALDSDPFAIPAGYTWTSVDDKSRKMKKSKSVRKSK

SEQ ID NO: 266147 - protein, 68 aa, Glycine max
  unsure (1)..(68): unsure at all Xaa locations
  Clone ID: PAT_MRT3847_82351C.1.pep
ASSVIALWITESFRVRLQHSLRLLNAEASRNVESSPVAGXCASTAAKNSTTNTSESESESIGGMVTKG

SEQ ID NO: 266148 - protein, 310 aa, Glycine max
  unsure (1)..(310): unsure at all Xaa locations
  Clone ID: PAT_MRT3847_82352C.1.pep
MGTVIESHFLAFTALVTIAYQFLFFVVTALLKFDKVTDFAGSTNFIIIAALTLVIKASWYFRQIILTLFVGTWGLRLCLFLLFRILQWGEDRRFDEMRSNLGRLAIFWIFQAVWVWVVSLPVTLVNASDRNPFLQVVDIVGWILWAVGFIVEGTADQPKLHFKXSSENRGKWCNVGLWKYSRHPNYFGEILLWWGIFVASTPVLKGAEWLVIIGPIFLTLLLLFVSGIPLLEDSADKKFGNVDGYRIYKKRTSPLIPLPRSIYGNLPAWFKTTFLFEFPFYSRNLPQEENRCLLKCRANSGKISDALKIG

SEQ ID NO: 266149 - protein, 64 aa, Glycine max
  Clone ID: PAT_MRT3847_82353C.1.pep
FACSLLDMYKFTYYICCVQVLWLVQVTNGSIMFFILFLLLQLSLWTCSMPTSADIEHKCFVDVS

SEQ ID NO: 266150 - protein, 91 aa, Glycine max
  unsure (1)..(91): unsure at all Xaa locations
  Clone ID: PAT_MRT3847_82354C.1.pep
NXXRAPGRGPEEPAAAAXATATPPXEAEAKPKPPPXGPKRXAKAKNRRKETNRXKGXGXADAADQDPNXRXPAAAPXNKDNQAXGTTNNHA

SEQ ID NO: 266151 - protein, 74 aa, Glycine max
  Clone ID: PAT_MRT3847_82355C.1.pep
ISEIKWTLTPHRRGARKTQHSTPEEIPMDQNAVAKHLFAAITRFVQLDPVFKHHPQYIIPYSRYILASIAFTVI

SEQ ID NO: 266152 - protein, 37 aa, Glycine max
  Clone ID: PAT_MRT3847_82356C.1.pep
LIPLPRSIYGNLPAWFKPTFLFEFPFYSRNLPQKENR

SEQ ID NO: 266153 - protein, 46 aa, Glycine max
  Clone ID: PAT_MRT3847_82357C.1.pep
VSFSLSLRPPLYLCHNLTPSLLHFHSDRLQLPKNPAQLQNPIIISL

SEQ ID NO: 266154 - protein, 51 aa, Glycine max
  unsure (1)..(51): unsure at all Xaa locations
  Clone ID: PAT_MRT3847_82358C.1.pep
RXGXDXKXXRLXKICGKGSXLDSXQXQGNXHXXSKRXXPHTKQLNFXXVFX

SEQ ID NO: 266155 - protein, 45 aa, Glycine max
  unsure (1)..(45): unsure at all Xaa locations
  Clone ID: PAT_MRT3847_82359C.1.pep
LVILLYIYTLRYQIFNPSLSSTFPLXXTXTXSPXYSPXTTTNNIF

SEQ ID NO: 266156 - protein, 86 aa, Glycine max
  Clone ID: PAT_MRT3847_8235C.1.pep
SPRQQRVLLSADPTRCLEVHVRGVRMRLRAISCLAPIRATKMADSRVEYRRSSSHAQGSLLVSVGKPEARPITEILNRWAHAKEDR

SEQ ID NO: 266157 - protein, 163 aa, Glycine max
  unsure (1)..(163): unsure at all Xaa locations
  Clone ID: PAT_MRT3847_82361C.1.pep
RRASSPPPKKGPHQRPPKTVLPLFFSGPPPGEFKTQKKKTSETWGLVKNQKKPVPRGGIIFFQKKKREIWFVENPRQQNFFKKGAPQNKTFLKIPPFLVIFSPPPRVKYPPKKIVSFFFQKKGRPSPFPPGLCXXEKAQQRQTSQQKCALLVSVNNAKVSKXP

SEQ ID NO: 266158 - protein, 36 aa, Glycine max
  Clone ID: PAT_MRT3847_82362C.1.pep
KSSVSNLIKQTMTLLADTQQLFLCWQFMLITYMVKI

SEQ ID NO: 266159 - protein, 40 aa, Glycine max
  Clone ID: PAT_MRT3847_82363C.1.pep
ANPKNKLKQPVFKAQLGQGQWSSNNPQNYKRTFGNQFPIG

SEQ ID NO: 266160 - protein, 124 aa, Glycine max
  Clone ID: PAT_MRT3847_82364C.1.pep
NFFYVTFLHISFFFMLHLDGYTETHHTISLGKAPIRGNMRVFKNITIIMGGTQTKPARLKILLGGTRPTGVTWEEKSSETLFLDKGTCHDGGGANLLRTKITPFKKDDLDEEVSRLKPPFLLVP

SEQ ID NO: 266161 - protein, 53 aa, Glycine max
  Clone ID: PAT_MRT3847_82365C.1.pep
KVYIPVWDGMKIQSFFAYTYIVNYHLIIRRSCPLGNTQCKNEWQIYESQTETI

SEQ ID NO: 266162 - protein, 118 aa, Glycine max
  Clone ID: PAT_MRT3847_82366C.1.pep
SGIPGLDPRVRSSSSSPWPEKPVPFSLTLLLCSGLELVATDAVACAHSYSYALRQPELLQRESLEIIIGGGGGGGYSAPFTCTSSAAYCLPPAPQPLVRLKYAPRVLHRFHTLIYDPD

SEQ ID NO: 266163 - protein, 159 aa, Glycine max
  unsure (1)..(159): unsure at all Xaa locations
  Clone ID: PAT_MRT3847_82367C.1.pep
KXDXKGQXVAVKIISKAKMTSAIAIEDVRREVKMLKALSGHKNLVKFYDAFEDVNNVYIVMELFFCGELLDRILDRCGRYPEDDAKAILVQILDVVAVCHLQGVVQRDLKPENFQSVLKEEDAGKKVNDFEISDFGRTDERLNEIGGKDYYVAPEGGHK

SEQ ID NO: 266164 - protein, 49 aa, Glycine max
  Clone ID: PAT_MRT3847_82368C.1.pep
EVVHIGYTIVGYSYQLRKLVCQHCICESQCKFSSNMNLGCHLVISSDEE

SEQ ID NO: 266165 - protein, 122 aa, Glycine max
  Clone ID: PAT_MRT3847_82369C.1.pep
TTRCAAARRRQKGNQNMRKAGEDIEMSRKTVWDMGAGIDDTEAQINNERVTIKDGELSPEIRTTVDDSDRAGMHPRRSSWGRKSGSWEMSPEVLALAARVGEPNRVGGGGSSSSLAHENRHV

SEQ ID NO: 266166 - protein, 117 aa, Glycine max
  Clone ID: PAT_MRT3847_8236C.1.pep
MGGGPARCYRQIKNKPSPKSMYCRGVPDPKNRIYYVGMKRKGVDEIPYCVHLVSWEKDTVSSDALEAAFIACNKYMTNSTGKDAFHLPVRVQPFHVLRINKMLSCAGADTLQTGMRG

SEQ ID NO: 266167 - protein, 122 aa, Glycine max
  Clone ID: PAT_MRT3847_82370C.1.pep
SSLLGIVVCSRAPFVLSLGEPRFGRGSSNFFVRVFLRVAFFSSGFFPPLFRVLFFFANFLVVMAQMAPFWGFIKKRGGLWGFLFALCFWFLPSLVIFFFFLVKSSIYRHKLENILIMNIENY

SEQ ID NO: 266168 - protein, 130 aa, Glycine max
  unsure (1)..(130): unsure at all Xaa locations
  Clone ID: PAT_MRT3847_82371C.1.pep
XXXGSXQXXXXAXXXEXXGXXXGDXDQRGXXXRXRQXXXXEXGXXXGXXXXEXXXXRKXXXXEXQXTVEXXGEXXXRXXXXXXXXRXEXXXXRXEXXEXXXRXXXEXXXXRXXXXEXXXGXGXEGXXDXX

SEQ ID NO: 266169 - protein, 61 aa, Glycine max
  Clone ID: PAT_MRT3847_82372C.1.pep
SINEDESLPNLHYSVRRDYISFFDKLTITPIYTSCHTSLFKIIFLQEALHIVYSLCNSITN

SEQ ID NO: 266170 - protein, 139 aa, Glycine max
  Clone ID: PAT_MRT3847_82373C.1.pep
MANAASGMAVHDECKLKFLELKAKRTYRYIVFKIEEKSKQVIVEKLGDPANGYDEFAASLPADECRYAVYDFDFVTEENCQKSRIFFIAWSPDTSRVRSKMIYASSKDRFKRELDGIQIELQATDPTEMGLDVFKSRAN

SEQ ID NO: 266171 - protein, 139 aa, Glycine max
  Clone ID: PAT_MRT3847_82374C.1.pep
MANAASGMAVHDDCKLKFLELKAKRTYRFIVFKIEEKQKQVIVEKLGEPANGYDDFAASLPADECRYAVYDFDFVTEENCQKSRIFFIAWSPDTSRVRSKMIYASSKDRFKRELDGIQIELQATDPTEMGLDVFKSRAN

SEQ ID NO: 266172 - protein, 417 aa, Glycine max
  unsure (1)..(417): unsure at all Xaa locations
  Clone ID: PAT_MRT3847_82375C.1.pep
MAAFHRKIKVANPIVEMDGXDEMNYGLSGRSIKDKLILPFLELDIKYYDLGLPYRDETDDKVTIESAEATLKYNVAIKCATITPDEARVKEFGLKSMWKSPNGTIRNILNGTVFREPILCKNIPRLVPGWTKAICIGRHAFGDQYRATDTXVIKGAGKLKLVFVPEGQGEETEFEVFNFTGEGGVSLAMYNTDESIRSFAEASMATALEKKWPLYLSTKNTILKKYDGRFKDIFQEVYEASWKSKFEAAGIWYEHRLIDDMVAYALKSEGGYVWACKNYDGDVQSDFLAQGFGSLGLMTSVLVCPDGKTIEAEAAHGTVTRHFRVHQKGGETSTNSIASIFAWTRGLAHRAKLDDNAKLLDFTEKLEAACIGVVEAGKMTKDLALILHGSKLSREHYLNTEEFIDAVAAELSAKLST

SEQ ID NO: 266173 - protein, 155 aa, Glycine max
  Clone ID: PAT_MRT3847_82376C.1.pep
STTPLISNPRERRRPTGAFLQKNPGKPAQRTPRAKRTTATRKKAPTGRPEKYKARKKKKKTDGKEGKRSPRKKTSNKTQEKKGGVNPHQKKTKPRLTRNKRGWNHTQPKTNEASKQKQSNPEQSLTRKTPAKPKERGGGKKPHGETPPGALREGK

SEQ ID NO: 266174 - protein, 126 aa, Glycine max
  unsure (1)..(126): unsure at all Xaa locations
  Clone ID: PAT_MRT3847_82377C.1.pep
CGNSRAATHTGLRFSFIISHLTFSSSQSQIRNLSXAMAAFQKIKVVNPIVEMDGDEMTRVIWKSIKDKLILPFLELDIKYYDLGLPYRDETDDKVTIESAEATLKXNVAIKCATITPDEARVKEFF

SEQ ID NO: 266175 - protein, 143 aa, Glycine max
  Clone ID: PAT_MRT3847_82378C.1.pep
AFKNYDGNVQSDFLAQGFGSLGLMTSVLVCPDGKTIEAEAAHGTVTRHFRVHQKGGETSTNSIASIFAWTRGLAHRAKLDDNAKLLDFTEKLEAACIGVVEAGKMTKDLALILHGSKLSREHYLNTEEFIDAVAAELSAKLST

SEQ ID NO: 266176 - protein, 99 aa, Glycine max
  unsure (1)..(99): unsure at all Xaa locations
  Clone ID: PAT_MRT3847_82379C.1.pep
WDYIEPXNLXKEREEGYFDAXGNFVEYVRENEIKDGWFDNVGVDXKYVXLRFVXXNDEDEGXXXXXFKDIGIMKRXNXNVFEXGEKXFEXLRKLKGKSD

SEQ ID NO: 266177 - protein, 57 aa, Glycine max
  Clone ID: PAT_MRT3847_8237C.1.pep
TLPTAIIAEDANNMVVDVLENSAPTLLALEGCKEADMSLPVVYDKPKTRCDTMLNMG

SEQ ID NO: 266178 - protein, 72 aa, Glycine max
  Clone ID: PAT_MRT3847_82380C.1.pep
SIRSFAEASMATALEKKWPLYLSTKNTILKKYDGRFKDIFQEVYEASWKSKFEAAGIWYEHRLIDDMVAYAL

SEQ ID NO: 266179 - protein, 56 aa, Glycine max
  Clone ID: PAT_MRT3847_82381C.1.pep
TSQTTLHIGVAITEGLRPSLSPHRGGYLTPKKLDWNSKPTKVSINAMNINRHFSKH

SEQ ID NO: 266180 - protein, 142 aa, Glycine max
  unsure (1)..(142): unsure at all Xaa locations
  Clone ID: PAT_MRT3847_82382C.1.pep
LSHAVELQPISLCNIPKDMVLTLHFXIPLWTRLLSDTSTNDNVXLPRHLHNNDSTRCPDSEPLLSYHPAIXILTHPGYCTXGPLSNSRVGFXHRAHDIKYAYATDARFIALIYKHSPDNLNKNLYWTHCRLFTRGWTVSDTY

SEQ ID NO: 266181 - protein, 359 aa, Glycine max
  Clone ID: PAT_MRT3847_82383C.1.pep
MAAQAEIEHPRKAFGWAARDSSGLLSPFNFCRREPGEKDVAFRVLYCGICHSDLHSIKNEWGTSIYPMVPGHEVAGVVTEVGSKVEKFKVGDKVGVGCLVDSCRTCQNCCDNLENYCPQSTFTYGAKYRDGTITYGGYSDSMVADEHFVVRIPDRLPLDAAAPLLCAGITVYSPLRYYGLDKPGLHVGVVGLGGLGHMAVKFAKAFGAKVTVISTSPNKKEEAIQNLGADSFLISRDQDQMQAAMGTLDGIIDTVSAVHPLLPLIGLLKSHGKLVMVGAPEKPLELPVFPLLAGRKIVAGTLIGGLMETQEMIDFAAKHNVKPDIEVIPMDYVNTAMERLLKADVKYRFVIDIGNTLKF

SEQ ID NO: 266182 - protein, 127 aa, Glycine max
  unsure (1)..(127): unsure at all Xaa locations
  Clone ID: PAT_MRT3847_82384C.1.pep
NFSFTSRATDEGKRGDSDTIEWTALXNPTATLLDIYIAGGVAGLSQAIHNGCQSLRPVVEKLXLFFWLTVHLYPHLKGLMGLQNTTPTIWWMWSVLLAGTFXLLWVRIATYVLKTKEPETKLCGINC

SEQ ID NO: 266183 - protein, 92 aa, Glycine max
  unsure (1)..(92): unsure at all Xaa locations
  Clone ID: PAT_MRT3847_82385C.1.pep
IKSCWYSFFCVHVCVHTPKTSXRSQQTVQLLIMYIYMCSLPGEIFCFKPREHYQLFLTETSHPHKHNPPSVLELGSANASGSSPKGSKLSPG

SEQ ID NO: 266184 - protein, 133 aa, Glycine max
  unsure (1)..(133): unsure at all Xaa locations
  Clone ID: PAT_MRT3847_82386C.1.pep
HSCPPSPSKTLFKSTVSANPLHTPXLSLEPHRPRDPSNTVALRHAAIVWFCNDLGLLDNDGLTAANKEALVVLPVYCFDKINPYHVAFLIDSVFNLRCNFXARQSNVVVRIGKLKVMLVELAKAAGANVVLYM

SEQ ID NO: 266185 - protein, 93 aa, Glycine max
  unsure (1)..(93): unsure at all Xaa locations
  Clone ID: PAT_MRT3847_82387C.1.pep
MSSSYSLADSLVTWGAAQLYANLYRQEYDPHAXALSCALLSNGLSCGSWYEMRCDDDPRWCKPGSTAVTATNFCPPNPSLPNNNGGCCKGGLH

SEQ ID NO: 266186 - protein, 196 aa, Glycine max
  Clone ID: PAT_MRT3847_82388C.1.pep
MANPFPTFLPSSLIFFSFFFFLFSPLTAAKTHRFARTISPSSLGLDGEPEKLSHLHFFFHDVVSGQNQTAVRVAAAPATDKSPTLFGAVVMMDDPLTEQPEATSKVVGRAQGIYASASQSELGFLMAMNFAFTEGKYNGSSLAVLGRNTVASAVREMPVVGGSELFRFARGYAQAKTHSFSAVEAIVEYNVYVFHY

SEQ ID NO: 266187 - protein, 88 aa, Glycine max
  unsure (1)..(88): unsure at all Xaa locations
  Clone ID: PAT_MRT3847_82389C.1.pep
NYPXTXRLSVSSSSAAPFPVHSTSLXXSXNADXXLXARIREXRREXLEVTWTXXGVXCRTEFGGRRYGXWXXXAERGSGVXVTGEEXT

SEQ ID NO: 266188 - protein, 89 aa, Glycine max
  Clone ID: PAT_MRT3847_8238C.1.pep
PMETGPKEKYLLPVRGFHPLAIVQRDAPERTIWSGPFILPTNILQLIQPLRSVFFTGALLKVHAFGSAKGNDCLTGFPCPRLLTQRPMP

SEQ ID NO: 266189 - protein, 281 aa, Glycine max
  Clone ID: PAT_MRT3847_82390C.1.pep
TFARRRQKGTAARRRQKGTAARRRQKGTAARRRQKGGPTNLDQDDRRVDFNIISGTSMACPHASGIAALIKSFHPDWSPAAIRSALMTTAYTTYNNGKKLLDSATNGPSTPFEVGAGHVNPVAALNPGLVYDLAVDDYLNFLCALNYTPDRIEVVARRKFRCNAHKHYSVTDLNYPSFGVVFKPKVGGSGATIVKHKRTLTNVGDAGTYKVSVTVDISSVKIAVEPNVLSFNKNEKKSYTITFTVSGPPPPSNFGFGRLEWSNGKNVVGSPISITWESGRA

SEQ ID NO: 266190 - protein, 51 aa, Glycine max
  unsure (1)..(51): unsure at all Xaa locations
  Clone ID: PAT_MRT3847_82391C.1.pep
MNARDLPADPPLPLGFVAVKKGFSPPPPXXLSXRPPPXPXXXXGWGPLPPA

SEQ ID NO: 266191 - protein, 73 aa, Glycine max
  Clone ID: PAT_MRT3847_82392C.1.pep
ISKNINLCQPWLAKPSYLFKMIQNGETATLVFSSAGVIIFIERYTLFGGLKAFYFLVSPPSSPSSAFLGKKKL

SEQ ID NO: 266192 - protein, 153 aa, Glycine max
  unsure (1)..(153): unsure at all Xaa locations
  Clone ID: PAT_MRT3847_82393C.1.pep
MKKFVQVLFSLWLVLLFGLLDGKPPHTSNRLIMDASAGQMFPSTPYYLMPRHHELGGGGIKLIKTGNSTYPNTILQYFPNDNFGLPIHLYISVISLLLIFEGIPLAICMEQNPACVISSVSVPIEGSGNPNSSRWLVFVDNSIQRXCVGTGGP

SEQ ID NO: 266193 - protein, 54 aa, Glycine max
  Clone ID: PAT_MRT3847_82394C.1.pep
AVRRTMFGLMKTSRNTSRPNSVRDSMNLIFSRPCSLLYGLVHWPGVQCVVAPRR

SEQ ID NO: 266194 - protein, 122 aa, Glycine max
  Clone ID: PAT_MRT3847_82395C.1.pep
SIVMTKKEMKTTGVIIMIMIMLGFSQARYNPLFVQTRPTHVSDKLNCRDKCTLDCSPLLLPPFAGAFLICYFPCMKKCHNNPIDVVHSCKSDCALTKSINANSDARDPATDMVDSCVQECHK

SEQ ID NO: 266195 - protein, 69 aa, Glycine max
  unsure (1)..(69): unsure at all Xaa locations
  Clone ID: PAT_MRT3847_82396C.1.pep
ARNSARGVTXNPIXACXXXTXFXSXIRXXXQXKHALXXXVXGRTGSXXXVXQVRVKXXDDXSRHIXXNV

SEQ ID NO: 266196 - protein, 115 aa, Glycine max
  unsure (1)..(115): unsure at all Xaa locations
  Clone ID: PAT_MRT3847_82397C.1.pep
IFFSVFIFNHTQVYFFFFFKKNRPKDQSTGQKRKPRDWQKAAPPQLKRLAEKPPFSTWSNSQKARTKRPHQQXHRQNGKRDAPCRGHXSAAVVEVTRGXTKTLATPIKPAPPPPL

SEQ ID NO: 266197 - protein, 46 aa, Glycine max
  Clone ID: PAT_MRT3847_82398C.1.pep
KMGKGSRTFHRRVNPPKGFFKLTHGIQGDRFAKEPRFPNQPKNHKV

SEQ ID NO: 266198 - protein, 75 aa, Glycine max
  Clone ID: PAT_MRT3847_82399C.1.pep
YPRVRTVARWAMMHIWPFIRQLVTTLLQNSIQVKWNLLLMTPYEATPEVPRNNIYMTSSFNDIQYAEAVEMMETR

SEQ ID NO: 266199 - protein, 45 aa, Glycine max
  Clone ID: PAT_MRT3847_8239C.1.pep
HVTKLVARKNTRTVIIVTLFLDISINKLNCAPYCCLLVIVTERVG

SEQ ID NO: 266200 - protein, 274 aa, Glycine max
  unsure (1)..(274): unsure at all Xaa locations
  Clone ID: PAT_MRT3847_823C.1.pep
MDAERLLSDMLRKGCSPSVVTFNILINFLCRKRLLGRAIDVLEKMPKHGCVPNSLSYNPLLHGFCQEKKMDRAIEYLEIMVSRGCYPDIVTYNTLLTALCKDGKVDAAVEILNQLSSKGCSPVLITYNTVIDGLTKGGKNXSMPVELLEEMRRKGLKPDIITYSTLRSGLGREGKVDEAIKIFHDMEGLSIKPSVVTYNAIMLGLCKAQQTSRAIDFLAYMVEKGCRPTEATYAILIEGIADEGLAEQALELLNELCSRGFVKKSSAEQVVVKM

SEQ ID NO: 266201 - protein, 120 aa, Glycine max
  unsure (1)..(120): unsure at all Xaa locations
  Clone ID: PAT_MRT3847_82400C.1.pep
CXXXFXXXPXXXXXXXVPLSXXPXLFXGXLVXXXXXXXFVXLVLPXCXXLIHXLXFXXFXXXXXLXPXLLXLXXXLXXWXXVPXAXSXSXXXXYXXXXXXXXXXXXXCXSSXFSXFYNXT

SEQ ID NO: 266202 - protein, 164 aa, Glycine max
  Clone ID: PAT_MRT3847_82401C.1.pep
LLCFGITWIPIAGVLFPLLIMLLVPVRQYFLPKFFKGAHLQELDAAAYEEAPAIAFNMSFEGPSNQAPTVNISGGEILDEVITRSRGEFRHTQSPKTTSSTPTSMGDIRPANSPQLTRRISSPPVTELRGESSLRPTRKEIKLMQTPSPRSPGLGKVTKDSPST

SEQ ID NO: 266203 - protein, 100 aa, Glycine max
  unsure (1)..(100): unsure at all Xaa locations
  Clone ID: PAT_MRT3847_82402C.1.pep
MTRPQDAIRAFFRSGNASRMISPKGPRTSSQLATIVHAFEATVDERLKKLIPPSLDDILHLTWMALCXQALCKSHNDFLTPEPQTELTGPECDEKRIDEY

SEQ ID NO: 266204 - protein, 69 aa, Glycine max
  Clone ID: PAT_MRT3847_82403C.1.pep
TSQYATSLCKFITFGNSLRSHNLFTYMPAILMVMSCLYITPVYLLPVPAYKFLLIVLPGPTHVSAYRFG

SEQ ID NO: 266205 - protein, 83 aa, Glycine max
  Clone ID: PAT_MRT3847_82404C.1.pep
KKVCFLFAKLPPLIFSPILGPKNGKSFFRGGENPVGTNILRVGFLPKSQGGPMYPPWDKGFGASWNPACWGPYLAINKTPWGK

SEQ ID NO: 266206 - protein, 330 aa, Glycine max
  Clone ID: PAT_MRT3847_82405C.1.pep
MTLPSHDAWIHTSHTLLPRWKSLSLPHQQSTLPISISRVNQVDAARLDVEMSAMLKEQLVKVFSLMKPGMLFQYEAELDAFLEFLIWRFSIWVDKPTPGIALMNLRYRDERAVEPRDKVRTGLEGPGLTVAQNGCERIADVGGQYIWARLQSFSAFRRWGDTEQRPLARRLWILIQRIEGIYRAASFGNLLIFLCTGRYRNLIERALRARLVYGSPNMNRAVSFEYMNRQLVWNEFSEMLLLLLPLLNSSSVKNLLRPFSKDKSLSSAEDGSACPICQATPTIPYVALPCQHRYCYYCLRTRCAAAPSFRCSRCSEPVVAMQRHGGVPSE

SEQ ID NO: 266207 - protein, 277 aa, Glycine max
  unsure (1)..(277): unsure at all Xaa locations
  Clone ID: PAT_MRT3847_82406C.1.pep
MLKCINVYMKQMKIVSVAVRSISANLPNQFHQSHLLRSLSTWKFTDNATGNRQFNNSESPEESEQFGGNRGKYAQLDSIFEKFNQQGMARQRPGSVNGASSERMHDLEETYDTLTDGMDGKLMNAATYFEFDEDEIEKEDYAFRYDANFPLGSKYDVKDLDLTNLVYTSPPKGRNSQXTTKEVLSKADFRNVRFLAKFITEAGILIKRSQTGISAKAQRKVAREIKTARAFGLMPFTTMGTKSFVFGRTMQNLDEDFAYQSRVADMDGEPDMEGDHA

SEQ ID NO: 266208 - protein, 85 aa, Glycine max
  unsure (1)..(85): unsure at all Xaa locations
  Clone ID: PAT_MRT3847_82407C.1.pep
QATGGGDYWGEHEGVKAKVYFRASEYQAEGRSYLQVEDLKMDFSVKSIQMGIQNVYNGNXIIEAALNLFINSNAQDLLREMKPSI

SEQ ID NO: 266209 - protein, 41 aa, Glycine max
  Clone ID: PAT_MRT3847_82408C.1.pep
PAHASGSRSRGPPFFFFFFFFFFFFFFFFFSRLSISFMLSC

SEQ ID NO: 266210 - protein, 70 aa, Glycine max
  Clone ID: PAT_MRT3847_82409C.1.pep
FSLLPLCTRVTCCVLAGAGDVWLPYSMACFCCFNNQAVRTSCRSGPGTRHQGSVQYGFRLVHGQANHPMA

SEQ ID NO: 266211 - protein, 85 aa, Glycine max
  Clone ID: PAT_MRT3847_8240C.1.pep
FGGGVNLVPPNLISPFEKLQVEIFQTLCCHGICPAFRGFDNFEGKKNISWGWLCLILLHACHAKRVGYNFHCQNFWNVFAWCNFF

SEQ ID NO: 266212 - protein, 30 aa, Glycine max
  unsure (1)..(30): unsure at all Xaa locations
  Clone ID: PAT_MRT3847_82410C.1.pep
KQFRFHLLSYKLIKYADXKELYIYGYRSLF

SEQ ID NO: 266213 - protein, 115 aa, Glycine max
  Clone ID: PAT_MRT3847_82411C.1.pep
ICSCCSHPNEDNIYTLRDCPYSKEIWMRMAEIHSLVFYHNNSDICLQAIVRHKDTTRLMIVLWWIWRFRNNHIFEDNKWTPTNICHMVNVMVVENHKLLNRRTQVTHNGALLQFR

SEQ ID NO: 266214 - protein, 108 aa, Glycine max
  Clone ID: PAT_MRT3847_82412C.1.pep
ATNHIRVFSESQKNNAIFITKLSNSKTPNPRSELKKTNHQSPRHPPINAENLNYHVHRPNHAHHNLPLWHQWWLRIPFSFLIKQQRDAQTRGRVVGREQQTETSGSER

SEQ ID NO: 266215 - protein, 160 aa, Glycine max
  Clone ID: PAT_MRT3847_82413C.1.pep
SSSCYYSSTCSSASSFSRSCLSKTMSSERDRLRNGVKRTVRFYPVSVIVDEDSRPCGDKRLCEEEEAFGEFLREYNRHNSKIKSNDNLVLKDLPLRKTNLVEDGDDNDDHDDDASSYASSDLFELDHLAVFGSGRYSEELPVYETTHVSTNRAIANGLIV

SEQ ID NO: 266216 - protein, 71 aa, Glycine max
  Clone ID: PAT_MRT3847_82414C.1.pep
GAFQTILSNFQVLQSFSMMVMGHFPGLYVSNVLSRLPSNVLSLCKCVFKSSYEFITDSHFVSNYYCDYNSL

SEQ ID NO: 266217 - protein, 50 aa, Glycine max
  Clone ID: PAT_MRT3847_82415C.1.pep
ILVKKVPNLYQLLNHQGGFYHNQRKGGPNFHPTLFFLGPSFGGPPSKPKA

SEQ ID NO: 266218 - protein, 55 aa, Glycine max
  Clone ID: PAT_MRT3847_82416C.1.pep
RPPPRPPAPTTPRPQHTQPPAPVPPTPSPAHQPPPPIPPPTCPPSPSYQRVKHSH

SEQ ID NO: 266219 - protein, 271 aa, Glycine max
  Clone ID: PAT_MRT3847_82417C.1.pep
MGSTMKNKHLHDGRTIAALNPESFLVIRIPDALVLRILSRSLFVAMVLAALPFLGTVLKGFYFSSSFVPNVETAAASGSLDVGLLNSILHDFAHEGLLRENDKALVLNSPLPNVFREKIDVVMDSDWESKSLFADVSYDFVFTSGDIDAEFIDRILKIDGIVALPLGSKPSNSAFKEQNNYRVVSLKRYGTAVVVALKKTGPAVRLVDSDSSPKRKLLATKTEAKSVALKGLEDVLLEPPRKALVKSRKYLNKIKYLPDLVGDSLEVTKEE

SEQ ID NO: 266220 - protein, 55 aa, Glycine max
  unsure (1)..(55): unsure at all Xaa locations
  Clone ID: PAT_MRT3847_82418C.1.pep
HGRCGYELFQXDGNRGISIDELPSELGLGPSVPDHADLHNCITHPDRNLIFLGVV

SEQ ID NO: 266221 - protein, 68 aa, Glycine max
  unsure (1)..(68): unsure at all Xaa locations
  Clone ID: PAT_MRT3847_82419C.1.pep
XXXQNHPWXXNXSHXCLLXNXXQIQLFGELXXRVQILDYXXSGTSNEXXLSRXDXLTVXIVHKVIKXR

SEQ ID NO: 266222 - protein, 183 aa, Glycine max
  unsure (1)..(183): unsure at all Xaa locations
  Clone ID: PAT_MRT3847_8241C.1.pep
MDWGNVTAEDLIDALREVDWSSPPRPLSEFFSRFTVPRSSSKWNSRLKCNLYYYRTNYFILIVSVLILGFLRRPLAIVAALLTALSIAFLNDSFAGTFSEKVTRTVRQFSPHLAAKMRPPLTPVIRGRPSSKRAIYICGRPRWVFGLDISXLQFLSLGWFCWSPDSFXASCYWSSCYHPACKL

SEQ ID NO: 266223 - protein, 47 aa, Glycine max
  Clone ID: PAT_MRT3847_82420C.1.pep
KEAAVIENKAVSAAVLETMIGEHAVSPDLKRSLASRLPAVLSPGLIV

SEQ ID NO: 266224 - protein, 77 aa, Glycine max
  Clone ID: PAT_MRT3847_82421C.1.pep
EMHGYLYTITHFSEKYPPILNAVAPYISRLHCYYDCECHFKVQLYITAWRQKKNETEYLLVLSTTIYTFPNSCNFVR

SEQ ID NO: 266225 - protein, 88 aa, Glycine max
  unsure (1)..(88): unsure at all Xaa locations
  Clone ID: PAT_MRT3847_82422C.1.pep
EDWGPGKRKRXXKESDAVDSLMTLHXSENRHPNNEXNMXXXDSXSIKXKRXCFRIXRDAVEXLXXVFAENXXPPRSIRXGXSKXLGLD

SEQ ID NO: 266226 - protein, 85 aa, Glycine max
  Clone ID: PAT_MRT3847_82423C.1.pep
DRSGVLLRWTRTTVFNRYILLEGQIMRILKSVDPFDDGGRWLSIGYYSSEHILKTSQNTCIHGSIWSASSCMNLPKRSTRTKVDR

SEQ ID NO: 266227 - protein, 398 aa, Glycine max
  Clone ID: PAT_MRT3847_82424C.1.pep
MRWLFPLLFLFSLGLTVTGQESIEFLNLCETTEDILQASSHAELPLAISVNGGNLNEVSFSILLAEKWLRHNVLAHYPASNITTIVVETTAFCQQDHQHNNNLAVVLSSLKNVYHSLKRWGLEKDIKVSVAFNLDCLSLNSVSLNNDLKLVKPLIEFLQEVNSTYSVIPHYGFSRFSDKSLSLVSSHLESLKKPGFFYLNNINVLAIVPKGRKNIARKLSVVDFSPIGPFPVRPAPVPEIAKSPMTPSNVAPRARGRVGSSPPPILSPTFAPEEPPFPFGVPANSPHGFSLPPCNPLHDGSPQIFPIQKLWCVAKPSVPEETLQQAMDYACGEGGADCMEISPQGNCYNPDTLVAHASYAFNSYWQKHKRSGGTCSFGGTAMLINSDPSFLHCRFILS

SEQ ID NO: 266228 - protein, 67 aa, Glycine max
  unsure (1)..(67): unsure at all Xaa locations
  Clone ID: PAT_MRT3847_82425C.1.pep
TRKKIHVTHAQNQLLFACVLFMCLENKIACHLTVPSLWHSLLCSQVCIFKTFRNKWLXXSFYLFSFP

SEQ ID NO: 266229 - protein, 342 aa, Glycine max
  Clone ID: PAT_MRT3847_82426C.1.pep
MKDTIVLYPNLGRGHLVSMVELGKLILTHHPSLSITILILTPPTTPSTTTTTLACDSNAQYIATVTATTPSITFHRVPLAALPFNTPFLPPHLLSLELTRHSTQNIAVALQTLAKASNLKAIVIDFMNFNDPKALTENLNNNVPTYFYYTSGASPLALLLYYPPINPTPYRKKDTDQPLQIQIPGLPTITADDFPNECKDPLSYVCQVFLQIAETMMGGAGIIVNTFEAIEEEAIRALSEDATVPPPLFCVGPVISAPYGEEDKGCLSWLNLQPSQSVVLLCFGSMGRFSRAQLKEIAIGLEKSEQRFLWVVRTELGGADDSRRTESGRVLPEGFLRGPREG

SEQ ID NO: 266230 - protein, 86 aa, Glycine max
  unsure (1)..(86): unsure at all Xaa locations
  Clone ID: PAT_MRT3847_82427C.1.pep
MYHRKPLLSTLCYAAPYPHTAXDLILAICTLLLLSSLVAFXGYRASNTPHADXASATSNDEQRTPTSVPSAKXTRIRIGVSSGVSH

SEQ ID NO: 266231 - protein, 82 aa, Glycine max
  Clone ID: PAT_MRT3847_82428C.1.pep
NIEDGKSCLLNFAFGFGNFVVIDSCAIIFPCSFYIARTIQIFKAACGTTIRRRRSKSRREGTAERFSDGRTRGEGTTTGISC

SEQ ID NO: 266232 - protein, 249 aa, Glycine max
  unsure (1)..(249): unsure at all Xaa locations
  Clone ID: PAT_MRT3847_82429C.1.pep
MIKQILSKLPKKVPKSDSSDSARSDSSNTTTFGNVFQCTNVGSTISSKLNVVKRVSSVVFPASMSAGVEAVDPCLSFKDVSNTQKQSLFISKLNLCCKVYDMSDPDKNTTEQDLKRKTLLELVDYVSSGSVKFTEPAIAALCKMCATNLFRAFPPKFRTSTTGGETEDEEPIFDPAWSHLQVVYDLLLQFINYNSLDVKLAKAHIDHAFILRLLDLFXSEDREILKTINFGGVSVLNKPWSLSSAVLNC

SEQ ID NO: 266233 - protein, 209 aa, Glycine max
  unsure (1)..(209): unsure at all Xaa locations
  Clone ID: PAT_MRT3847_8242C.1.pep
MDWGNVTAEDLIDALREVDWSSPPRPLSEFFSRFTVPRSSSKWNSRLKCNLYYYRTNYFILIVSVLILGFLRRPLAIVAXLLTALNIAFLNDSFAGTFSEKVTRTVRQFSPHLAAKMRPPLTPVIRGRPSSKRAIYICGRPRWVFVLIFSSASFFLWFVSAGLLTVLWALAIGLLATILHASFRTPNLKARLNTFREEFRAVWRNYSEL

SEQ ID NO: 266234 - protein, 93 aa, Glycine max
  Clone ID: PAT_MRT3847_82430C.1.pep
EGAISEHSAIHGGIHLDASKCSLSIHFPNLAFFFGSNAIFLSSLFTSKQNKETQHSLPPLNKIKKHNTHSHLCPSSSSSSSFFFLFPFQFSPM

SEQ ID NO: 266235 - protein, 76 aa, Glycine max
  unsure (1)..(76): unsure at all Xaa locations
  Clone ID: PAT_MRT3847_82431C.1.pep
MAVLNACLLLLFIVGVTPAPIELNIFTSDQSSXSYNYYHSPSSCYDLSMCTRAMFPQSTCSHIMMNSFQSDRTNSS

SEQ ID NO: 266236 - protein, 61 aa, Glycine max
  Clone ID: PAT_MRT3847_82432C.1.pep
IQCHVLVSILLFLLVMVHPHPQSRRRRLRLGAFITGAALDLHFRSGLNDLRRVHVEERCVN

SEQ ID NO: 266237 - protein, 94 aa, Glycine max
  Clone ID: PAT_MRT3847_82433C.1.pep
TYSTSDTNKTEVFDQVKVYHHKIFSQHTTIKNSIHLLNMTENQSNLRPNFINSSGDSQFQKGFPNTSIIITSHSNFSNPSLLLLSSSSATTTTK

SEQ ID NO: 266238 - protein, 84 aa, Glycine max
  Clone ID: PAT_MRT3847_82434C.1.pep
KNFRKKDFSAHTRRNSAAPLIVIIALFRGPRIVVLGSRLISCMNVHLHNNLPDEPVIALNAPIYNRIQYRKIWYHSRNRCGIAG

SEQ ID NO: 266239 - protein, 71 aa, Glycine max
  Clone ID: PAT_MRT3847_82435C.1.pep
GGPEHPEQVRAPIFGLPKDHMTFSFNFFKRPFYISLFLKGGGDFSGNFFKLLLQRAKNLGLGLSKNLFFFL

SEQ ID NO: 266240 - protein, 246 aa, Glycine max
  Clone ID: PAT_MRT3847_82436C.1.pep
MGTTSTTIKLLPLSPLPKPTTSSSWLSCKPISHPFPNSRPRGNVAVSVSYNPQGNFDLSLFDDDDETKAAPPLPPTEGRFEVVIDNDVISRLDLSPFQAATGMKSPLSVKPKEFLDRTIGFTINYTREDPRDPRELSEYPDIRVWFVRLDATYPWLPVLLDWRAGELARYAAMLVPHQMNIKMGVVFNPEALELFVMKKVFIVYSWLKHHNIPKPKLKANDMARMLGFTIGDELYDFIDKHPLDLS

SEQ ID NO: 266241 - protein, 174 aa, Glycine max
  unsure (1)..(174): unsure at all Xaa locations
  Clone ID: PAT_MRT3847_82437C.1.pep
LPFSRKSSEDFHSVIAFQTYAVGSSGGYKKGVTEAKLKVAINGFGRIGRNFLRCWHGRKDSPLVSSTXNPANLPWKDLGIDLVIEGTGVFVDREGAGKHIQAGAKKVLITAPGKGDIPTYVVGVNEYDYSPDEPIISNASCTTNCLAPFVKVLDQKFGIIKGTMTTTHSYTGDQ

SEQ ID NO: 266242 - protein, 122 aa, Glycine max
  unsure (1)..(122): unsure at all Xaa locations
  Clone ID: PAT_MRT3847_82438C.1.pep
NDTGGVKQASHLLKYDSILGTFDADVKPVGSDIISVDGKEIKVVSDRNPANLPWXDLGIDLVIEGTGVFVDREGAGKHIQAGAKKVLITAPGKGDIPTYVVGVNEYDYSPDEPIISNASCTT

SEQ ID NO: 266243 - protein, 121 aa, Glycine max
  unsure (1)..(121): unsure at all Xaa locations
  Clone ID: PAT_MRT3847_82439C.1.pep
KRVPTCCGVECPKEGKLPRRKIFDKPKTRWLTIIPMEINLAVRQKMLNFARYIMKKRDKLRCQVGINPYSMEWTDLANRXLSKGNDILCCDYAKFDGLITKHVMSKMAEMINSLCGGDEKL

SEQ ID NO: 266244 - protein, 140 aa, Glycine max
  unsure (1)..(140): unsure at all Xaa locations
  Clone ID: PAT_MRT3847_8243C.1.pep
MGREKAHIIIVVIGHVDSXGKSTTTVHLIYKLVGIVKRVIERLEKEAANMNNRXFKYAWVLDKLRADRDRRITIDIAVWKDETTNFYCTVIDAAGHRDFINNMITGTSHADCADLIIDSTTGGCEAGITNDGQTPEHALL

SEQ ID NO: 266245 - protein, 266 aa, Glycine max
  unsure (1)..(266): unsure at all Xaa locations
  Clone ID: PAT_MRT3847_82440C.1.pep
HIYRECSEDFHSVIAYQTYAVGSSGGYKMGVXISIRXKFPDAGXGRIVWNSLRCWHGLKDFPLDVIAIYDTGGVKQAYHLLKYDSILGTFDADVXPVGSDIISVDGKEIKVVSDRNPANLPWKDSGIDLVIEXTGVFVDIEGSWKHISAGAXKVLITAPGXXDIRTYVVGVNEYDYMQDEPIISDAYGTTDWLAPFVKVLDQKFGIIKGSMTTIYYYIXKLKAYMSEPSLARARXSAALNIVPTLLGALEQLSLVLLTIRGILNGL

SEQ ID NO: 266246 - protein, 157 aa, Glycine max
  unsure (1)..(157): unsure at all Xaa locations
  Clone ID: PAT_MRT3847_82441C.1.pep
SSAWSPTFFSMVVXGNLASRVLLFLCNLAVXPEGRTAMLDANAVEILVSLLRGNELDSEATRENCVAALYALXSHRSLRFKGLAKEARVAEVLKEIEETGTERAREKARKVLHMLRTVGDGDGDEIDEFYDSAGLTRNRYRAGAARNSDNLVNTTTF

SEQ ID NO: 266247 - protein, 405 aa, Glycine max
  unsure (1)..(405): unsure at all Xaa locations
  Clone ID: PAT_MRT3847_82442C.1.pep
MASATLSVAKPALQANGKGFSEFSGLRSSSGFLPFSRKSSEDFHSVIAFQTYAVGSSGGYKKGVTEAKLKVAINGFGRIGRNFLRCWHGRKDSPLDVIAINDTGGVKQASHLLKYDSILGTFDADVKPVGSNVISVDGKEIKVVSDRNPANLPWKDLGIDLVIEGTGVFVDREGAGKHIQAGAKKVLITAPGKGDIPTYVVGVNEYDYSPDEPIISNASCTTNCLAPFVKVLDQKFGIIKGTXMTTTHSYTGDQRLLDXASHRDLRRARAAALNIVPTSTGAAKAVALVLPTLKGKLNGIALRVPTPNVSVVDLVVQVSKKTFAEEVNAAFRESADNELKGILSVCDEPLVSVDFRCTDVSSTVDSSLTMVMGDDMVKVIAWYDNEWGYSQRVVDLADIVANKWK

SEQ ID NO: 266248 - protein, 405 aa, Glycine max
  unsure (1)..(405): unsure at all Xaa locations
  Clone ID: PAT_MRT3847_82443C.1.pep
MASATLSVAKPALQANGKGFSEFSGLRSSSGFLPFSRKSSEDFHSVIAFQTYAVGSSGGYKKGVTEAKLKVAINGFGRIGRNFLRCWHGRKDSPLDVIAINDTGGVKQASHLLKYDSILGTFDADVKPVGSDIISVDGKEIKVVSDRNPANLPWKDLGIDLVIEGTGVFVDREGAGKHIQAGAKKVLITAPGKGDIPTYVVGVNEYDYSPDEPIISNASCTTNCLAPFVKVLDQKFGIIKGTMTTTHXSYTGDQRLLDAXHRDLRRAXRAAALNIVPTSTGAAKAVALVLPTLKGKLNGIALRVPTPNVSVVDLVVQVSKKTFAEEVNAAFRESADNELQGILSVCDEPLVSVDFRCTDVSSTVDSSLTMVMGDDMVKVIAWYDNEWGYSQRVVDLADIVANKWK

SEQ ID NO: 266249 - protein, 43 aa, Glycine max
  Clone ID: PAT_MRT3847_82444C.1.pep
KLGFLLMRTSLLLRCHNWIQGSYDVLSRTPSSIRSQRDPNPNP

SEQ ID NO: 266250 - protein, 104 aa, Glycine max
  Clone ID: PAT_MRT3847_82445C.1.pep
GEDDRRGLNMMPVLLILKVVPVSSPSGNVMGDLGDVYSTMLTSLDLGLACFSEKVSNLSNFVMHVETKECELEALEKEDHIGEKGLEVDLVSGGVGSKGKELEG

SEQ ID NO: 266251 - protein, 66 aa, Glycine max
  Clone ID: PAT_MRT3847_82446C.1.pep
RKMLENLQVPPSTTESTPVLKCYAPPNQRNVSANRRKSSGKLTPYFLPIFLFTCTLLTFFFNVKEI

SEQ ID NO: 266252 - protein, 49 aa, Glycine max
  Clone ID: PAT_MRT3847_82447C.1.pep
ENRCSRSSPRCGITYSLESGSREIAAGTIPDPGSLKASDTRMVDGLDGW

SEQ ID NO: 266253 - protein, 129 aa, Glycine max
  Clone ID: PAT_MRT3847_82448C.1.pep
MEDGDNILDAIYDEDTLDDDVDMVDVEEGELVEPDSQNVLGQSSAGDINEPNQEPLSKNQKRRANKKKNKKKRKGSGSNAMDINRFVLDTCRRLKEKKSYMVYTAVGCHGDSAFNDLGNEVDAIQYLLR

SEQ ID NO: 266254 - protein, 43 aa, Glycine max
  Clone ID: PAT_MRT3847_82449C.1.pep
DYSSQPSWNFLDELRCVKPQEMPLTPLSQGQRLVKKKKKKKTN

SEQ ID NO: 266255 - protein, 219 aa, Glycine max
  Clone ID: PAT_MRT3847_8244C.1.pep
YVDGGPTENTAPPSVYGTLTQMNSADDPRSNFNVTWQFDVEPQFQYLVRLHFCDIISKSLNELYFNVYINSWFVAKDLDLSTINNNILAAPFFKDMITAPSASTKIFISIGPSTVNSNYPNAILNGLEIMKMNNSVSSLSSSTAVPLSSTSGSGSKKVGLIVGVSVGAFLAVVIVGVFFFLLCRKRKRLEKEGHSKTWVPLSINDGTSHTMGSKYSNAS

SEQ ID NO: 266256 - protein, 136 aa, Glycine max
  Clone ID: PAT_MRT3847_82450C.1.pep
KNGFVQGFLLDQKKQGGGDQPFFGKEPGLIFHPRFVGKKGYTLFLPETRVLRATRIYNTFPKCVPLGGNSNGGGKTHFLFSKKRGGEKKRLVFTPPVHFKEKRGGKKKRGKNGGNWLFLNPLGRPRANGGSTNEGG

SEQ ID NO: 266257 - protein, 74 aa, Glycine max
  Clone ID: PAT_MRT3847_82451C.1.pep
KKKVTTGGQGARIFLFKSLFPPKGTRLDKVKKIFLFGFYPLIKGPSGLAVLKKFWFWKIASGMVKTLPKAKPSK

SEQ ID NO: 266258 - protein, 84 aa, Glycine max
  unsure (1)..(84): unsure at all Xaa locations
  Clone ID: PAT_MRT3847_82452C.1.pep
MTKRYGNIIXXGMMXGXGHXXXXXLGRWNARMXXLYMLXXRGXXMMNVRGTGRVLSEACDLVFDAGSEGKRFLIGGYKKKSRGI

SEQ ID NO: 266259 - protein, 67 aa, Glycine max
  Clone ID: PAT_MRT3847_82453C.1.pep
SIFKKKKKKNKKKKKKKKNIKKKIIIKKNKRSQNTKRTEKKKKKIPGGAPLKNQISLPGRCKCKLLF

SEQ ID NO: 266260 - protein, 178 aa, Glycine max
  Clone ID: PAT_MRT3847_82454C.1.pep
LVPSSRVPPVVVFKNPAQPEKKVKPKTYGKSIKKKKEKWTDLKVGDIWSGTPTKTERKTRLKLKSVLPALELPHPGTSINPAIEDHQDLIKKAAEVELKKLKKDEKIQRLLHGGVTKKTQSQMQKEWLEEMSAGLPVANEDDQEKDDDEIVAEDPDLANPKKVIRAEDRKSKSKRRRE

SEQ ID NO: 266261 - protein, 50 aa, Glycine max
  unsure (1)..(50): unsure at all Xaa locations
  Clone ID: PAT_MRT3847_82455C.1.pep
ELNLKITSWCESLVVDGKXGLMSDKKNYIRDCRYSINALVYVSEPSTLAI

SEQ ID NO: 266262 - protein, 75 aa, Glycine max
  Clone ID: PAT_MRT3847_82456C.1.pep
RRVADQSAYCDYRTPPSRIVNVANTKDTHLASEDCRKHTRDHVTQYKREHDSVRAHGKRRCDRKPYGYGGQTNPV

SEQ ID NO: 266263 - protein, 87 aa, Glycine max
  Clone ID: PAT_MRT3847_82457C.1.pep
TTILTFYFPSKNLNTPLSLPYHTLIFHTLCHNPISLTLHIHLFSTFTNLLLLPSQTLIHSHLNHNPLTLIHSNYSYSLTIINSYYYY

SEQ ID NO: 266264 - protein, 328 aa, Glycine max
  Clone ID: PAT_MRT3847_82458C.1.pep
FKEHCFFRRDESKFIDDLATDIFKIVSSKDLSREMFIVGREYRVKELKLLLDLESRDITCLLGIHGTGGIGKTTLAKALYDSIYKQFDGTSFLNVGETSNPKTDLKHLQEKLLSEILEDDKIHWRNIEEGTAKIERRLGFKRVLIVLDNVDDIKQLNNLAGKCAWFGPGSRIIITTRDKHLLDLGEVEKRYEVKMLDEKESLELFCHYAFRKSCPESNYKDLSNRAMSCCKGLPLALEVLGSHLFKKNVDVWKDALDRYEKSPHGNVQKVLRISYDSLFRHEKSIFLDVACFFKGQRLDYVKTVLDASDFSSGDGITTLVNKSLLTVD

SEQ ID NO: 266265 - protein, 182 aa, Glycine max
  unsure (1)..(182): unsure at all Xaa locations
  Clone ID: PAT_MRT3847_82459C.1.pep
DETFQMVRRKLLKAQSRMKEQADRRRRDVNYNSGDWVWLKLRXIDRPXAKGSQSSSGKLARRYYGPFRVIEAIGKVAHHLQLPPDTKIHEVFHYSLLKPFRGQLETTSPAPLPDQFHNDQPIITPAAIVDYRRTPLDAWEVLVQWHGLSPDDTSWEDWSTLCHDYHLEDKVISQGPRDDRET

SEQ ID NO: 266266 - protein, 82 aa, Glycine max
  Clone ID: PAT_MRT3847_8245C.1.pep
SSRIGSRYKRIEPRGPFQQTTYNTCMNYQRPGARDAFRSPPPGWNRTRQAPVNANLNPTIDNNRIAFTPPGPRYSMPSHENI

SEQ ID NO: 266267 - protein, 152 aa, Glycine max
  Clone ID: PAT_MRT3847_82460C.1.pep
MSNETRHALPIALKKLFQTHKVCSFKLICEGLREMAVSKAMLSKGDSKMAVDAAHSLDGPHNELMAVISEVACEINGSYVLKSSPDDPFRDVVIDMLCGSGPNAKLKKAEILEAARRKLGREVASNEYTKVMSELCVSKGSVWVLKSGDGSK

SEQ ID NO: 266268 - protein, 447 aa, Glycine max
  unsure (1)..(447): unsure at all Xaa locations
  Clone ID: PAT_MRT3847_82461C.1.pep
MQRWKWNRKKPPIFPLLVLILLFFIAFSTLHSEHTIQRIHENPDHVHNHQEVSSATFVKPNLSGHLKQAPEVLDRFSRCNSTVEYSGRKIAWLGDSRHSGHWSARPESCDVFSGKWVFDNVSHPLYNESDCPYMSDQLACHKHGRSDLGYQYWRWQPHNCNLKRWNVKEMWEKLRGKRLMFVXDSLNRGQWISMVCLLQSVIPADKRSMSPNAHLTIFRAEEYNATVEFLWAPLLAESNSDDPVNHRLDERIIRPDTVLRHASLWENADILVFNTYLWWRQGPVKLLWTHEENGACEELDGHGAMELAMGAWADWVSSKVDPLKKRVFFVTMSPTHLWSREWKPGSEGNCYGEKDPIDNEGYWGSGSDLPTMSTVEKILSNLSSKVSVINITQLSEYRKDGHPSIFRKFWEPLRPEQLSNPPSYSDCIHWCLPGVPDVWNELLFHFL

SEQ ID NO: 266269 - protein, 223 aa, Glycine max
  Clone ID: PAT_MRT3847_82462C.1.pep
MQSWKWNRKKPPVFPLLVLILLFFIAFSTLHSEHIIQRIHENPDHVHNHQEVSSATFVKPNLSGHLKQAAEVLDRFSRCNSTVEYNGRKVAWLGDSQHSGHWSARPESCDVFSGKWVFDNVSHPLYNESDCPYMSDQLACHKHGRSDLGYQYWRWQPHNCNLKRCSSLLLTLLTEVEGKDMNYTQQIFINGRPRRMGFSGDYKPIYRGLKIYFNPPTKGWSGW

SEQ ID NO: 266270 - protein, 134 aa, Glycine max
  unsure (1)..(134): unsure at all Xaa locations
  Clone ID: PAT_MRT3847_82463C.1.pep
SHSSDLALVFSSLPPTYVIRGVSHHASVCXIILIVNFKPRHAWYTDYKLMIFNNHAAIIVIALLVHVNEAIISYKAFSLKNELKKLIHLVFHAIALILVIGGVYTAFNVYNERQIAILYSLHSLLWIGVICLYG

SEQ ID NO: 266271 - protein, 66 aa, Glycine max
  Clone ID: PAT_MRT3847_82464C.1.pep
PLCQVGFTLVCEYHGCKSAQASTAGVFATFLRELLMGAFGLVYKHRLPINFHFRRQHVKSSCLYEV

SEQ ID NO: 266272 - protein, 104 aa, Glycine max
  Clone ID: PAT_MRT3847_82465C.1.pep
FRAEIRVQFMLVPGNLYNRGFCTDLGRATNELVIRVQPDEAIYLKINNKVPGLGMKLDRSNLNLHYAARYFPFTLKINFMGPLKYTLHWIINSQTYLILSFLSS

SEQ ID NO: 266273 - protein, 66 aa, Glycine max
  Clone ID: PAT_MRT3847_82466C.1.pep
YCQNQLTYLAGSFGASATKCEAVAFILVEGHGVICQLHAFTLNRVDDKCIGYYDPNQTSCNHKINN

SEQ ID NO: 266274 - protein, 93 aa, Glycine max
  Clone ID: PAT_MRT3847_82467C.1.pep
TINNNLYCSHMLCSSVRLAIFRPHAVLKSLAYKIEVSSCNIFGYIFYMFSTFTNTIVSNKLTSILICFSLYSKITTCTVSMVRSCCSGIIVSI

SEQ ID NO: 266275 - protein, 125 aa, Glycine max
  Clone ID: PAT_MRT3847_82468C.1.pep
SVFRQVLTAGLCLGVKYGGKAADTWAVGVTLYCMILGEYPFLGDTLQDTYDKIVNNPLVLPNDMNPPLKNLIEGLLSKDPSLRMTLGAVAEDSWVIGDDGPIPDYLCWCKRKSLGIEDNDESNTD

SEQ ID NO: 266276 - protein, 48 aa, Glycine max
  unsure (1)..(48): unsure at all Xaa locations
  Clone ID: PAT_MRT3847_82469C.1.pep
XVAGXRTSARXSARXPFQRQXFIQTXXLVXXXRGRXSGEAXXVXXXXG

SEQ ID NO: 266277 - protein, 95 aa, Glycine max
  unsure (1)..(95): unsure at all Xaa locations
  Clone ID: PAT_MRT3847_8246C.1.pep
MFTLRTPYPGGFLNPPGSHKSTTPASSKSSTTVPSPPTQPSPPFPPSSSSPSXPPFDLTLPLLPSTPTTSSPPMTSPSTPPSGPHSTSSSPKPTP

SEQ ID NO: 266278 - protein, 70 aa, Glycine max
  Clone ID: PAT_MRT3847_82470C.1.pep
QIQGCNIVLKFGLKGRLFGCCYQRKSNCLCSRLMVCNMSPNFALAQHRTHQSHKKFYDSEVFALRTSPVL

SEQ ID NO: 266279 - protein, 51 aa, Glycine max
  Clone ID: PAT_MRT3847_82471C.1.pep
LDPCFRPLLLTTVRSRTICRSHRYIASDIDRYICRHTIQCDQVISINVFHR

SEQ ID NO: 266280 - protein, 138 aa, Glycine max
  Clone ID: PAT_MRT3847_82472C.1.pep
FFPLGGPYRFGLSPLVMDSTLFLNPADFELPHDYDENAEANLIEIPADFGLSHDDDDDDETDDEEEDDDDDEDEEYVPAGAPPRVSHDAPRVSTSNSEVVTLIESQNKRRRTEGGEASCSFANGSLSQENEWASPDVD

SEQ ID NO: 266281 - protein, 56 aa, Glycine max
  Clone ID: PAT_MRT3847_82473C.1.pep
QAFDWVEKAFGRQPAHLTDDRTAPMGVVQLTAHQLADILCDDANSRSYMKLSFTKG

SEQ ID NO: 266282 - protein, 71 aa, Glycine max
  unsure (1)..(71): unsure at all Xaa locations
  Clone ID: PAT_MRT3847_82474C.1.pep
LTYHLXFHTTTNNFQHITTLILTMFSTIKLFIKRILFYYPASSTFFTTTLKLIIKSMSWNINKFLYIPLFY

SEQ ID NO: 266283 - protein, 396 aa, Glycine max
  Clone ID: PAT_MRT3847_82475C.1.pep
TLFSFQFETIRRSLHLLPPILSLLSTPLSAFIYDITLITPLLSVIEKLSCPSYLYFTSSARMFSFFARVSVLSASNPGQTPSSFIGDDGVKIPGFTSPIPRSSVPPAILQASSNLFQRIMLEDSANVTKLNNGVFINSFEELEGEALAALNGGKVLEGLPPVYGVGPLMACEYEKGDEEGQKGCMSSIVKWLDEQSKGSVVYVSLGNRTETRREQIKDMALGLIECGYGFLWVVKLKRVDKEDEEGLEEVLGSELSSKVKEKGVVVKEFVDQVEILGHPSVGGFLSHGGWNSVTETVWKGVPCLSWPQHSDQKMSAEVIRMSGMGIWPEEWGWGTQDVVKGDEIAKRIKEMMSNESLRVKAGELKEAALKAAGVGGSCEVTIKRQIEEWKRNAQAN

SEQ ID NO: 266284 - protein, 115 aa, Glycine max
  Clone ID: PAT_MRT3847_82476C.1.pep
VELVMQDTSILGAESHPLHLHGFNFFVVGQGFGNFDPKKDPVNFNLVDPVERNTVGVPSGGWVAIRFLTDNPGVWFMHCHLEVHTSWGLKMAWIVLDGKLPNQKLLPPPADLPNC

SEQ ID NO: 266285 - protein, 51 aa, Glycine max
  Clone ID: PAT_MRT3847_82477C.1.pep
SQNKRVKLRSAIGQSSHGVLYDIPEWEHLMQECHQVALILYQRVKTETEGV

SEQ ID NO: 266286 - protein, 123 aa, Glycine max
  Clone ID: PAT_MRT3847_82478C.1.pep
LSRARTLGFGDRLDRSKGKRAPERFVTEHIRTNAPLIVQLPDSGITNLGRGRYLRTYFVEKDGQLITDWQGGTRGRATHWGVAPENTRPILGCSAKELQGRDNTSKGTNALIATNTGMSLMHG

SEQ ID NO: 266287 - protein, 77 aa, Glycine max
  Clone ID: PAT_MRT3847_82479C.1.pep
VVLYVNYVQAKSILMLANRKLEERVRTPTGSEPSSPTVMQSNNQLYSPGTGPSMRKSLQRFLQKRRNRVQEASPYRH

SEQ ID NO: 266288 - protein, 44 aa, Glycine max
  Clone ID: PAT_MRT3847_8247C.1.pep
NPLQNIHQTASVCNQIPGYHQTPSCVQEPCMLLGMATNQCTSVD

SEQ ID NO: 266289 - protein, 58 aa, Glycine max
  Clone ID: PAT_MRT3847_82480C.1.pep
IAEFHSTLLFVFAGGDSDIPYGTLSSNASLYPARLLPVAICHGCAFLVSQAVGANISG

SEQ ID NO: 266290 - protein, 117 aa, Glycine max
  unsure (1)..(117): unsure at all Xaa locations
  Clone ID: PAT_MRT3847_82481C.1.pep
GYSSANIMTLRDDKAYVCYTLLVAGESARPLKERGSYDRMGTNTPKYXPVELSRTLXYEETRHETXAVMGDYAWPGGDRDDAWIXESLWEGVVTAINKKDETTITGHSTADGETMTV

SEQ ID NO: 266291 - protein, 55 aa, Glycine max
  unsure (1)..(55): unsure at all Xaa locations
  Clone ID: PAT_MRT3847_82482C.1.pep
FQLRLSYSAAAQFRLFLVQXTDCHVAGALGVTRMLIHKVQPSCFSWSTNTSIETL

SEQ ID NO: 266292 - protein, 428 aa, Glycine max
  Clone ID: PAT_MRT3847_82483C.1.pep
MVFGNSLFYPILGFASFVVFIYMSFGGIKFSFLEEGPELSFVERNGTQFVLDGKAFYVNGWNSYWLMVQSVDVYSRSKVREMMKTGAKMGLTVCRTWAFNDGDYNALQTSPGRFDEQAFQALDYVIAEARQHGIRLLLSLVNNLQAYGGKSQYVKWAWQEGVGLSSSNDSFFFDPSIRTYFKNYIKTVLTRKNTITGIEYRNDPSIFGWELINEPRCMSDPSGDTLQGWIDEMSTFVKMIDKNHLLTVGLEGFYGPNDPKSSTVNPELWASRLGSDFIRNSKISNIDFASVHIYPDHWFHEQVFEDQLKFVSKWMLSHIEDGDKVLKKPVLFSEFGLSETNQNFSMSDREKMHRAVLDIIYKSAKRNRSGAGALVWQFLVGGMKEFSDEYGMVPWESSSTPHVFIEQSCRLANAKGWTQLDVSFKEHC

SEQ ID NO: 266293 - protein, 85 aa, Glycine max
  Clone ID: PAT_MRT3847_82484C.1.pep
SPPSSVPVCLLHMLLGGVFLDVFDAEQASILEDARARSKKALQRVPADIRTQCGVARMNDPQLIMDIKRSVTIHVMVQARIGHFV

SEQ ID NO: 266294 - protein, 219 aa, Glycine max
  Clone ID: PAT_MRT3847_82485C.1.pep
AKLQHRNLVRLLGYCIQSEERLLVYEFMASKSLDSFIFDENKSMLLDWPTRSLIINGVARGLLYLHQDSRHTIVHRDLKAGNVLLDSEMNPKISDSGLARSFGGNEIEATTKHVVGTYGYLPPEYIIDGAYSTKSDVFSFGVLILEIVSGKRNKGFCHQDNLLAHVWRLFTEGKCSEIVDATIIDSLNLPEVLRTIHVGLLCVQLSPDDRPNMSSVVLM

SEQ ID NO: 266295 - protein, 47 aa, Glycine max
  Clone ID: PAT_MRT3847_82486C.1.pep
AQINVSINPRGILARTPIILDKHYITIGVGEILKNSRSEKRLHNPRG

SEQ ID NO: 266296 - protein, 90 aa, Glycine max
  Clone ID: PAT_MRT3847_82487C.1.pep
LYVDAMHDVELLFILFLFFRSYQCWLLFLLCPILLLSIENCSLYLRVLPLYSNVLYLVDSFIDNCNKDLCGIIFSQKKKKKEKKKSVPAV

SEQ ID NO: 266297 - protein, 58 aa, Glycine max
  Clone ID: PAT_MRT3847_82488C.1.pep
SKTQSGPLVAEKLRIGFEKSHPIIFQHYNGRTIKRLILSIIFLLFLVLKLVFKKVNHI

SEQ ID NO: 266298 - protein, 437 aa, Glycine max
  Clone ID: PAT_MRT3847_82489C.1.pep
MAEYDLTPRMAPNLDRHLVFPLLEFLQERQLYDDDHILKAKIDLLNNTNMVDYAMDIHKSLYHTEDVPNDMVDRRAEVVARLKSLEEAAAPLVAFLQNEAAVQELRADKQYNLQMLNDRYQIGPAQIEALYQYAKFQFECGNYSGAADYLYQYRALCTNSERSLSALWGKLAAEILMQNWDIALEELNRLKEIIDSKNFASPLNQVQSRIWLMHWSLFIFFNHDNGRTQIIDLFNQDKYLNAIQTSAPHLLRYLATAFIVNKRRRPQFKDFIKVIQQEQHSYKDPITEFLACVYVNYDFDGAQKKMRECEEVILNDPFLGKRVEESNFSTVPLRDEFLENARLFIFETYCRIHQRIDMGVLAEKLNLNYEEAERWIVNLIRSSKLDAKIDSETGAVIMEPNHLNVYEQLIDHTKALNGRTYKLVSQLLEHAQAQTTR

SEQ ID NO: 266299 - protein, 156 aa, Glycine max
  Clone ID: PAT_MRT3847_8248C.1.pep
LLPRLALASSFLVLFAPLSDSANVLFSSTSLYPVHRFIQRELASELLRRNHSVTWFEYGLSPNQISLPKGIDEIFLQVENSPKTAALKNKAGNVQLISNDQLWREGFWQPVEKPGGWLASLELCERVLEQPEHRKAFQTLLEKPFAVVVVDDLYNP

SEQ ID NO: 266300 - protein, 130 aa, Glycine max
  Clone ID: PAT_MRT3847_82490C.1.pep
IYEYSIEKIWKDWTWTEKYPDWQELRSYFAYVEEKLQIKKDTAFDSRVVGAQFNLKTHKWDVKTQDGRTAHAKYLINAIGFAAKRYFPDWQGLDSFKGEMYHSSFWPEGGVSTKGKKVAVIGTGSTGIQI

SEQ ID NO: 266301 - protein, 67 aa, Glycine max
  Clone ID: PAT_MRT3847_82491C.1.pep
PIYEAHYSLRVLTSITKLYPRGETSALTGRKNLWILHYKPLKASVSYHQENGGLGITWGPNLFGSGA

SEQ ID NO: 266302 - protein, 198 aa, Glycine max
  Clone ID: PAT_MRT3847_82492C.1.pep
MTPPSSAKFSNSRLKKFPSKLKDLLATGILEGLPVMYMKGAKTRWKAGEKGLQGVIQDSGVLCFCKICNGVEVVTPTVFELHAGSANKRPPEYIYIHDGNCGKTLRDVMNACCCCDFPLESMDEAVQKLLGDFTMKKSSICLNCKGACKGVSKLVCDLCLASPPQTAMASRKVISQPVQPRSPEPVVIQKSLDNEVQP

SEQ ID NO: 266303 - protein, 348 aa, Glycine max
  Clone ID: PAT_MRT3847_82493C.1.pep
MDALRKQASKLREQVAKQQQAVIKQFSSSGYESSDVVVIDEVEMQRHHQLEKLYRATRAGKDFQKEIVKAAETFTAIGYKHIETGTKLSEDCCKYGAENNSDNILSKAASVYGDARKHVEKEHEELNRLLSTQVLDPLRQMINGVPLEDARHLAQRYSRMRQEAEAQREEIARRQARVREAPTAEQVAKLHAAEARMQELKANMAVLGKEAAAALAAVEAQQQRLTFQRLVAMVEGEKTFHLRVAAILGEIEAEMVSDRQKKESAPPVGISENGSEKTMYFLAEATHPFSAESEKELSFSKGDFVVVRKVSPSGWSEGECNGKAGWFPSAYVEKRQRIPSSNMAGEVY

SEQ ID NO: 266304 - protein, 107 aa, Glycine max
  Clone ID: PAT_MRT3847_82494C.1.pep
RSFRVDHASGNSQMVSDRQKKESAPPVGISENGSEKTMYFLAEATHPFSAESEKELSFSKGDFVVVRKVSPSGWSEGECNGKAGWFPSAYVEKRQRIPSSNMAGEVY

SEQ ID NO: 266305 - protein, 98 aa, Glycine max
  Clone ID: PAT_MRT3847_82495C.1.pep
KISGFPKNRVIGSGCNLDSARFRYLMGERLGVHPLSCHGWVLGEHGDSSVPVWSGMNVAGVSLKTLHPDLGTDKDKEQWQEVHKQVVESAYEVIKLKG

SEQ ID NO: 266306 - protein, 85 aa, Glycine max
  Clone ID: PAT_MRT3847_82496C.1.pep
FSLFSVANTCSFMSSTFAIILLLPMTNVMWILLYSPPFFLQLSFFIAMMVISPTPLNVYVVTIFLAVYMLLFYSFFPFTYYKLLE

SEQ ID NO: 266307 - protein, 165 aa, Glycine max
  Clone ID: PAT_MRT3847_82497C.1.pep
TRPVTFALAVFVPLIFAGASSARELRPSDHGLTFQTLSPAGPHSSPEMRSFFNSANSSPSMSSSSDVALPRAMDSGEASPPAWWQTDGGHSVEGVGKALTMASLGCGVAGAVLLVASGLIYLLKYRNRNRNRKQKLNAAFCGENENRGENIDEENNKLQLVVRNP

SEQ ID NO: 266308 - protein, 98 aa, Glycine max
  unsure (1)..(98): unsure at all Xaa locations
  Clone ID: PAT_MRT3847_82498C.1.pep
VSIVKREKKKKKKRGVYEETTSNPXHXTPTEXTPPATPTKPPPPHERTGNPGPRREHATTAPTPHKXNSRGSNGTKTPARRENPPRTRNAAKRHGGEP

SEQ ID NO: 266309 - protein, 69 aa, Glycine max
  Clone ID: PAT_MRT3847_82499C.1.pep
MSEAKTQIESIRKWVVEHKLRTVGCLWLSGISGSIAYNWSRPNMKTSVKIIHARFGSYNFLSFRILFLT

SEQ ID NO: 266310 - protein, 53 aa, Glycine max
  unsure (1)..(53): unsure at all Xaa locations
  Clone ID: PAT_MRT3847_8249C.1.pep
FFPGIHEAGKMAKNLPTAESWPXAQHEVWKVLRVLQPALAGFNSGYPPGSQIN

SEQ ID NO: 266311 - protein, 463 aa, Glycine max
  unsure (1)..(463): unsure at all Xaa locations
  Clone ID: PAT_MRT3847_824C.1.pep
IFDVPKTMSNLTSASGEASASSGNRTEIGTDYSQQYFAPPLSQAQPPPLKKKRNLPGNPDPEAEVVALSPKTLLATNRFICEICNKGFQRDQNLQLHRRGHNLPWKLKQRSSNEIIRKKVYVCPEASCVHHDPSRALGDLTGIKKHFCKKHGEKXKWKCDKCSKKYAVQSDWKAHSKTCGTREYRCDCGTLFSRRDSFITHRAFCDALAEESSRSVTGIGIVANSTSTQPTAAAASHQQDIIHGNSNNFSLKKEQQAGFRPPWIGQPSPSSASSFLVSHQENPNPRGGGPIPTLLPPYQTAPHMSATALLQKASHMGATMSKTGSMIGTHQQQAHVSANAALNLSSRDHQMTPTLHGLVPFGNKAVPAVGNGVSPSLLHHIIDSFSSPFEGTSFEDTFGGAGGDAMTKTTTADDGARGNNNEALTRDFLGLRPLSHTDILNIAGMGSCINSSQHNQTPNPWQG

SEQ ID NO: 266312 - protein, 83 aa, Glycine max
  Clone ID: PAT_MRT3847_82500C.1.pep
MFYAKTLFEFQWMRVVVHTLRKLGCLWLSGISGSIAYNWSRPNMKTSVKIIHARLHAQALTLGALAGAALVEYYDRKTGAKAS

SEQ ID NO: 266313 - protein, 102 aa, Glycine max
  Clone ID: PAT_MRT3847_82501C.1.pep
MGNCIHSCCSFFSLRSEISFLSARATMSEAKTQIESIRKWVVEHKLRTVGCLWLSGISGSIAYNWSRANMKTSVKIIHARLHAQALTLGALAGAAPLESYDS

SEQ ID NO: 266314 - protein, 71 aa, Glycine max
  Clone ID: PAT_MRT3847_82502C.1.pep
QRNKVHNSIQCFVIKSREIINTERRNLISVINSSRAVICSNLIYNSSPIGLRNLISGLGMLHKNEHKQLRS

SEQ ID NO: 266315 - protein, 81 aa, Glycine max
  Clone ID: PAT_MRT3847_82503C.1.pep
LYLRPISIYRLAYSNYPLLNWNLWIVSILKKLVLYINVYILLSCLATQKFDYFRTYYLPTFLHLTKLWKNNLLMRYTWTDG

SEQ ID NO: 266316 - protein, 92 aa, Glycine max
  Clone ID: PAT_MRT3847_82504C.1.pep
VRIRRQTGRGSQVVNHRIPVSTLVATIPCDLSVCSCSGSDFTSRFKSLGQYSLMSVPNDDNLSYSQLSYAILDLLDSIIVYVASECHILPTL

SEQ ID NO: 266317 - protein, 67 aa, Glycine max
  Clone ID: PAT_MRT3847_82505C.1.pep
GVNSWKAKNPREKNWGKKGYIWNQKNSGNVLGGCGMNYFASNPTKEESETLGSARVKGHRKVDPPPL

SEQ ID NO: 266318 - protein, 117 aa, Glycine max
  unsure (1)..(117): unsure at all Xaa locations
  Clone ID: PAT_MRT3847_82506C.1.pep
MNPSEQFVEHGMSQQNXKRTSCATVLTLAYQSLGIVYGDLSTSPLYVYKTTFSGKLRLKEDEEEIFGVLSFIFWTFTIIALFKYVLIVMSADDNGEGGTFALYSLLCRHARLSILPN

SEQ ID NO: 266319 - protein, 81 aa, Glycine max
  Clone ID: PAT_MRT3847_82507C.1.pep
RRKDLEMLLKGLLSESDWLSKAHPLNEEVSLLSEYKILENVESESSAQPTRPARMLSLLALSAQPLILAQLDMLAEHAFIS

SEQ ID NO: 266320 - protein, 34 aa, Glycine max
  Clone ID: PAT_MRT3847_82508C.1.pep
SHGFCLLQRCRIILTQRVPKKSGFCSNPITLPWL

SEQ ID NO: 266321 - protein, 95 aa, Glycine max
  unsure (1)..(95): unsure at all Xaa locations
  Clone ID: PAT_MRT3847_82509C.1.pep
MEMFSSMISFPAVATVNRAGAGMVAPFTGLKSMAGFRTRKTYYVITSIASVGVRVQCMHVWPLIGWKTFATFHYLPDLDDALFAXVVAFLVRKGW

SEQ ID NO: 266322 - protein, 150 aa, Glycine max
  unsure (1)..(150): unsure at all Xaa locations
  Clone ID: PAT_MRT3847_8250C.1.pep
KSKASFPTRRHNNDIHSIASNVERVQSMQAWPPDGRQKCETLSYLPDIDHAQLATEVEYLFRKGCIPCMEFELEHGFVHREHDRSAGSFDGGSWTTCKMPTFGCTEASQVFKEXLYRVRXACPYGFIRIIGIVNVRRVQGIGFFADKPTG

SEQ ID NO: 266323 - protein, 59 aa, Glycine max
  unsure (1)..(59): unsure at all Xaa locations
  Clone ID: PAT_MRT3847_82510C.1.pep
GVVSPSFGFFLLGGVQVHALNVSGLVIKAAGGVRYSYAEYPQXKSKPVKLVPDVQAHRK

SEQ ID NO: 266324 - protein, 91 aa, Glycine max
  Clone ID: PAT_MRT3847_82511C.1.pep
FWEKKKMGPLGGGQSMVGNLENRGQEIKNGVPCLFPWGPLKKKVFLAFPFSRQSLKFEKFYGLTPQFLFPFRKQYLLEVKGFQKSLYSFSF

SEQ ID NO: 266325 - protein, 313 aa, Glycine max
  Clone ID: PAT_MRT3847_82512C.1.pep
GRQVYLGGYDMEEKAARAYDMAALKYWGPSSHINFPLENYQNELEEMKNMTRQEYVAHLRRKSSGFSRGASMYRGVTRSHRLAFTQHHQHGRWQARIGRVAGNKDLYLGTFSTQEEAAEAYDIAAIKFRGFNAVTNFDITRYDVERIMESNNLLSSEQAKRKREMDDGTRSEATVNQKPCTTQETVLMQKRCRSQSEWKMVQYPSSQQLDQNPQRIECSRTESLSTALDNMFHHQVEESSNMGTHLSNPSSLVTSLSSSREESPDKTSLPMLFGMPSTVSKLLADVDSLDLSSNLRPSLSIPQMPIFAAWTDA

SEQ ID NO: 266326 - protein, 91 aa, Glycine max
  Clone ID: PAT_MRT3847_82513C.1.pep
FVNIPLNFLSLIWCNLFFNNFHTKMENKRYNLHLYHSSTFTFPCGGLFTFTCGGLSFNTQQFNICSSLHTYISKVPTQSKYLFKITFSRLE

SEQ ID NO: 266327 - protein, 310 aa, Glycine max
  Clone ID: PAT_MRT3847_82514C.1.pep
CVTSSPAITNTVATDTKKRGLQMVDQNQKQIGHRKSIDTFGQRTSQYRGVTRHRWTGRYEAHLWDNSCKKEGQGRKGRQVYLGGYDMEEKAARAYDMAALKYWGPSSHINFPLENYQNELEEMKNMTRQEYVAHLRRKSSGFSRGASMYRGVTRHHQHGRWQARIGRVAGNKDLYLGTFSTQEEAAEAYDIAAIKFRGVNAVTNFDITRYDVEKIMESNNLLSSEQAKRKREMDDGTRSEATVNQKPSTTQETVLMQKRCRSQSEWKMVQFPSSQQLDQYPQRIEGCRTQPFSTALDNMFLKQVERKRRT

SEQ ID NO: 266328 - protein, 51 aa, Glycine max
  Clone ID: PAT_MRT3847_82515C.1.pep
VNIELMNDRFPNHNCEDVELQSYVRMMAMSEVNPTQALRMFSSITRCFDRA

SEQ ID NO: 266329 - protein, 65 aa, Glycine max
  Clone ID: PAT_MRT3847_82516C.1.pep
LAEHGSVVQAAQENAVYVIPSREEPIVNVGLVIKCNRLAKRRSENILSERHRERSQYHGIVQPVH

SEQ ID NO: 266330 - protein, 105 aa, Glycine max
  unsure (1)..(105): unsure at all Xaa locations
  Clone ID: PAT_MRT3847_82517C.1.pep
MEQKSILISALGVGVGVGVGIGLASGQSVGKWGANTFSSNAITAEMMEHXTLIQVVVRRDRNAPLDQFPYFLTEHTMLLMTRAGYVHLKHAVVYKYTRHHWCCMP

SEQ ID NO: 266331 - protein, 95 aa, Glycine max
  Clone ID: PAT_MRT3847_82518C.1.pep
FLKTIQHQSRGRLYQRRIKNAFDKKVRPCKFNEGDLVLKKMSHVVKDNRGKWAPNYEGPFVVKRAFSGGALILTHMDGEELPSPVNSDVVKRYYA

SEQ ID NO: 266332 - protein, 51 aa, Glycine max
  unsure (1)..(51): unsure at all Xaa locations
  Clone ID: PAT_MRT3847_82519C.1.pep
MEQKSILISALGVGVGVGVGIGLASGQSVGKWGANTFSXNAITAQKMEQRN

SEQ ID NO: 266333 - protein, 134 aa, Glycine max
  Clone ID: PAT_MRT3847_8251C.1.pep
GRSRRRAGYSENGGRRPLCIPTVKDRTVMTAAMLVIGAIFEADLLENQYGFRPKVDAKMAVRRVFWHIRDHRRSEIVDADLRDYFTSIPHAPLMKCLTRRIADGRLLSMIKGWLTVAVIEKDGRRITRTAEART

SEQ ID NO: 266334 - protein, 101 aa, Glycine max
  Clone ID: PAT_MRT3847_82520C.1.pep
SNRLPPGVGRFFYTACQAGFPISNRAVSPTPLIWGSSLLRHPRFFPLFFRLVSCREFSSAHNFPPGSALSLFSPSFYTPPGRSGWYAFRVRSCIPGSAPAS

SEQ ID NO: 266335 - protein, 49 aa, Glycine max
  Clone ID: PAT_MRT3847_82521C.1.pep
HSKVGPKIHLVTVSYLARSIIVKHQFTFNRIVSVSNRTQFNYHATQFQL

SEQ ID NO: 266336 - protein, 168 aa, Glycine max
  Clone ID: PAT_MRT3847_82522C.1.pep
MSNSNPNNRNRHAPSPPEPKPMPPSSWAKKTGFRPKLSGETNVTDSGPITTPPPNVDLEAGRVRTPATANGVTNGDKAPVPVPPPPAAAKKRRDSDGVPKSSVLSTNGQAPAAEPPPRRTARHEEVVDGLPADDDEFVSRHSHMKYELRDSPGLVPIGVYGIQHYFSI

SEQ ID NO: 266337 - protein, 63 aa, Glycine max
  Clone ID: PAT_MRT3847_82523C.1.pep
SLIMWCPSQAIQEPPRCSPKKASIPSHSDQPSLLCLFLSLPAFLPTSLLQLLLSCSVQVSAIS

SEQ ID NO: 266338 - protein, 103 aa, Glycine max
  Clone ID: PAT_MRT3847_82524C.1.pep
PCESSNWFRVIVEISCRSVCPCTSSVSEEWSLCVNGSSSSGTGSLGARVPNSMFESDPRNLPSNGWVRVVWHGPTRGMLLSKSSRRQGINNKMLVTRYMCWCT

SEQ ID NO: 266339 - protein, 278 aa, Glycine max
  unsure (1)..(278): unsure at all Xaa locations
  Clone ID: PAT_MRT3847_82525C.1.pep
MSNLQLQLHSPPPSSLLSSSSSPSSLYSSSSLKLFPNHPFSTKSLPFNTHKHFSLRCRHTDLFDQNTIASTPRPTRPSASVGALPPRVYVGYSIYKGKAALTLTPRPPEFMPLDSGAYKISKEGYVLLQFAPAVGTRQYDWNRKQVFSLSVSEMGXVISLGARDSYELFHDPFKGKSDEGKVRKILKVEPLPDGSGHFFNLRMHLXPFTKSVQNNLVNVDESIYIPVTKAELAVLTSTFNFIMPYLLGWHTFANSIKPEDNGVNNANPRYGGDYEWNR

SEQ ID NO: 266340 - protein, 99 aa, Glycine max
  Clone ID: PAT_MRT3847_82526C.1.pep
KSRACKKVLQVKSGQVIKGGQNKARAKVLGRQVSIGQNFSNQGVNDFNVPQGQYAAVVRKNYQEAFCHRGYFQFAGLGNFGRLRTRGCQRGPEGPRPGN

SEQ ID NO: 266341 - protein, 294 aa, Glycine max
  unsure (1)..(294): unsure at all Xaa locations
  Clone ID: PAT_MRT3847_82527C.1.pep
MASDPMQQVALILGPDSAQLESLISQLMSSSNHHRSQAESLFNLCKQARPEALLLGLAHLLHSSPNPETRXLSAILLRRHLTRHHDSFLWPLLSPPARSSLHSLLLSSLHNEPLKSITKKLCDTVSELAAATLPDDSAAWPDLLPLLFQWVTSPDPRLQEISLLIFAQLAHYIGQTLLPQISTLHSVFLRSLHSSTPADVRIAALAAAITFIQCLTNSSDTDRLQIILPLIECXQLTAALNSGLEALAHYAPXLLIELAGTEPRFLRRQIVDVVGSMLQVAEAETLEEGTRHLA

SEQ ID NO: 266342 - protein, 415 aa, Glycine max
  Clone ID: PAT_MRT3847_82528C.1.pep
MQLLRPLLAAALLLLATLSDAHNITSILAKHPELSTFNHYLTLTHLAPEINGKTTITVCAVDNAAMSDLLSKHPSIYTIKNVLSLHVLLDYFGAKKLHQITNGTALAATMYQATGTAPGSAGFVNITDLHGGKVAFGPENNDGTLSSTFVKSVEEIPYNISVIQISKVLPSAAAEAPAPAPTQQNLTNIMSKHGCKVFADTLSAQPDALNTFNDNLDGGLTVFCPLDDAFKAFLPKFKNLTKSGKAALLEFHAVPVYQSKATLKSNNGLQNTLATDGANKFDFTVQNDGEDVTLKTKLTTAKITDTLIDEQPLAIFAINKVLQPKELFKGEAEAPAPAPEPSAADAPAPAKKGKKKKKAADAPADDSDAPADSPDDAADVTADDSNDAVRRNGGRYGGGVVALVLSLVFGLPLML

SEQ ID NO: 266343 - protein, 50 aa, Glycine max
  Clone ID: PAT_MRT3847_82529C.1.pep
KPDQDLIAQPPGGSSLSDLSAQAAAIDLTSTPPLKTVPRALHTSESALKQ

SEQ ID NO: 266344 - protein, 37 aa, Glycine max
  Clone ID: PAT_MRT3847_8252C.1.pep
NRTCVKEFSFTLYWIGVVYLQLTVLLIDIYFDLMNIL

SEQ ID NO: 266345 - protein, 53 aa, Glycine max
  Clone ID: PAT_MRT3847_82530C.1.pep
FFFFFGLFFFLFYFFFLVIFGAHWQIGGKLKSFSRNEVGKSFLNTRRGRFFPC

SEQ ID NO: 266346 - protein, 60 aa, Glycine max
  Clone ID: PAT_MRT3847_82531C.1.pep
KVPASQVGKGCNQSINQSINQSSSSHPCLAFLPQQIHTPAQRLCFYYHFLFGLQKVTVFI

SEQ ID NO: 266347 - protein, 104 aa, Glycine max
  Clone ID: PAT_MRT3847_82532C.1.pep
PPSIPLKILSLKSSKRRRMRNGFMCHSEASTTVCMRSCDTITGSVVVPRTRSRRHQRSVSLDDTRLIKYAKYSKLVDSSTSSRLFNSAHKKGDSVSVPNIKPQE

SEQ ID NO: 266348 - protein, 104 aa, Glycine max
  unsure (1)..(104): unsure at all Xaa locations
  Clone ID: PAT_MRT3847_82533C.1.pep
RKAREPRTDKVKSRESKRASKDRAKGGKRTPNKPAAKAXPTDRRPXXKRPQRGEQKRTTPQRNRLWGGDNTHHKMPWVKWEDISQPKHEGGQRAKDISKQNTWL

SEQ ID NO: 266349 - protein, 38 aa, Glycine max
  Clone ID: PAT_MRT3847_82534C.1.pep
TMPSSGQMSLTMWGFQVELLKKVFVLNEIVAINKRYVR

SEQ ID NO: 266350 - protein, 85 aa, Glycine max
  Clone ID: PAT_MRT3847_82535C.1.pep
HISFWIMTKISFTTILALALFLTLISQTSETLIENQCSTVLDPNDCNLSWCQCNCRQQYQRFGSCVDVNLHKCVRIYDCTPKLIY

SEQ ID NO: 266351 - protein, 130 aa, Glycine max
  Clone ID: PAT_MRT3847_82536C.1.pep
AGQAVFVMAYQLFYVLSPRTAHRFVGYLEEEAVWTYTHCLHDMQQPGSLYNWNTEKAPETAVNYWNLNPNSTVTDMIVTIRADEMMHREVNHRFADLTSDQPMDHMEIIVRESVEKVNKEESAQSASSAS

SEQ ID NO: 266352 - protein, 65 aa, Glycine max
  unsure (1)..(65): unsure at all Xaa locations
  Clone ID: PAT_MRT3847_82537C.1.pep
LLVEQIELCSLSLANFLLNLFFFTLLILRGIKEYGYYSLPCGLWVSXTTMXRTFVSXLSMKLISV

SEQ ID NO: 266353 - protein, 88 aa, Glycine max
  Clone ID: PAT_MRT3847_82538C.1.pep
QRWQPTRPVPLAVHAPNNLPPKAQGHPRQGPRSGPPLSPTIPPPPTAAPPVTASPLTPPSQASPPSPPSATRSPKTPTSTTSPKSVPP

SEQ ID NO: 266354 - protein, 132 aa, Glycine max
  Clone ID: PAT_MRT3847_82539C.1.pep
GVLRLAFSSLLFSLLQLRALLFAASLLALGLVPWGPLCFPFLLFAPFVSCGFCALSAPGVSFLWAFVPVVCFLFFVRWGGGPSGVPLFLALSLGSLRGLPAPCFCFGVCLFWPCRCLCTNARGWVGPVLPGP

SEQ ID NO: 266355 - protein, 214 aa, Glycine max
  Clone ID: PAT_MRT3847_8253C.1.pep
MDDAELDAAFGFPSEFPYEFDSVGAEPADSGSTGTESSDEEDFFAGLTRRLSHTSLNETRKEQQKLNVPICNSDKTENQKMMARGLAGSPQSILSGIGSWSGRSGRSGDGSPNGSSRVASPTTTPFEGSNDALDVLYAAAGQVARLKMNDEVSSKFDFQSRGVLGGLPPPVAAENAFFANQSVSQVRYQQVRTEQVLEQQCGSVWGRQEKAYWA

SEQ ID NO: 266356 - protein, 105 aa, Glycine max
  unsure (1)..(105): unsure at all Xaa locations
  Clone ID: PAT_MRT3847_82540C.1.pep
XGSKQSHFCREDYLPWIRPTHLPSLLSHAFHTVPLRPPPPAFFLFLFLFLLPHLRRQKPLLLLRQSMTERPRFRQFRTHFQSLTNANVVLTCDGSDCVCGIDIDI

SEQ ID NO: 266357 - protein, 52 aa, Glycine max
  Clone ID: PAT_MRT3847_82541C.1.pep
IMREKVALRQSLLQKQKQTRVSCSVLCVTHDLPLQKGNAAHEWQVPQDRERE

SEQ ID NO: 266358 - protein, 72 aa, Glycine max
  Clone ID: PAT_MRT3847_82542C.1.pep
LTNFLVAYLVWGNTPKKNLFKLTIKKKPSLKNGGEINTRMGGALGWAILIQNALIYHLGRKDPTDGSLKQND

SEQ ID NO: 266359 - protein, 106 aa, Glycine max
  unsure (1)..(106): unsure at all Xaa locations
  Clone ID: PAT_MRT3847_82543C.1.pep
PFDVCFNTENILTGFWGSVPTXDLFLQXTQKRVWMIFGTNWMVTVNNDKVLYLMFVNGCENPMTWIVIAXYDVDYNVVQVXVPTSRCXFRCLLCGSRTTGANFNLA

SEQ ID NO: 266360 - protein, 61 aa, Glycine max
  Clone ID: PAT_MRT3847_82544C.1.pep
KSPPKAFDQRFQVSFCVGMGPHTGGSRTPARLPKVVQGYLLEEKGLVFTEPQPGLFRVVIY

SEQ ID NO: 266361 - protein, 58 aa, Glycine max
  Clone ID: PAT_MRT3847_82545C.1.pep
FSPQAFCVYYTLFSIRGLQKKVVGLWIPKQIFMVVSQSRNRISWHLMWLEVRVFLAES

SEQ ID NO: 266362 - protein, 116 aa, Glycine max
  Clone ID: PAT_MRT3847_82546C.1.pep
CVEKQTTTLKREGGPSKTNAKQNDKHSACTQLQNKWTGKLHKRKPPKIKGETEKNESRMEDYTQQDAGENGRSSIMTGCCSDGNVAANPKSNGNLRPPLLEGGIGSGKPSGGTTNI

SEQ ID NO: 266363 - protein, 274 aa, Glycine max
  unsure (1)..(274): unsure at all Xaa locations
  Clone ID: PAT_MRT3847_82547C.1.pep
MADRVHPSHSPSVSADSQPPSPQDSSVVPKPPSPPSPEKPVPPPGTYVIKIPKDQVYRVPPPENARRYDQYARRKHRRSRCCCCFCWLIGILFILVVLLAIAAGVLYLVFRPEAPKYSIENITVRGINLTSPSSVAAISPEFNVTVKADNPNDKIGIRYLKDSSAEVFYKDARLCNGALPAFYQPSNNVTVFGTALRGDGIXLTVRIRAPVKIKVGSVRTXEYNLRIRLSVKIKVGSVRGQNIFVKVNCDGTVNELTAQAKIVSKRCSYDVDLW

SEQ ID NO: 266364 - protein, 38 aa, Glycine max
  Clone ID: PAT_MRT3847_82548C.1.pep
GLGNDSMREFCSFTVSAIKIMMEVSMLMLYDLLRLGKR

SEQ ID NO: 266365 - protein, 273 aa, Glycine max
  Clone ID: PAT_MRT3847_82549C.1.pep
MADRVHPSHSPSVSADSQPPSPQDSSVVPKPPSPPSPEKPVPPPGTYVIKIPKDQVYRVPPPENARRYDQYARRKHRRSRCCCCFCWLIGILFILVVLLAIAAGVLYLVFRPEAPKYSIENIAVRGINLSSPSSTAAMSPVFNVTVKADNPNDKIGIRYLKDSSAEVFYKDARLCNGALPAFYQPSNNVTVFGTALRGDGIELRSEVRRALLEAQTKRRVPLTVRIRAPVKIKVGSVKTWKITVKVNCHMTVNELTARAKIVSKRCNYDVDLW

SEQ ID NO: 266366 - protein, 53 aa, Glycine max
  Clone ID: PAT_MRT3847_8254C.1.pep
EYNTDEESIKMTLQQKRKVILALVAKTKDKSKDILPIIERLIPKEDSYFGAHI

SEQ ID NO: 266367 - protein, 271 aa, Glycine max
  Clone ID: PAT_MRT3847_82550C.1.pep
MAIHLYKTSTPSTRNGAVDSQVKSNPRNHLIYGQHRCGKGRNARGIITAGHRGGGHKRLYRKIDFRRNEKNIYGRIVTIEYDPNRNAYICLIHYGDGEKKYILHPRGAIIGDTIVSGTEVPIKMGNALPLTDMPLGTAIHNIEITLGKGGQLARAAGAVAKLIAKEGKSATLKLPSGEVRLISKNCSATVGQVGNVGVNQKNLGRAGSKCWLGKRPVVRGVVMNPVDHPHGGGEGRAPIGRKKPATCRIPKKFFDFLRKQMIIHLLLTFHE

SEQ ID NO: 266368 - protein, 281 aa, Glycine max
  unsure (1)..(281): unsure at all Xaa locations
  Clone ID: PAT_MRT3847_82551C.1.pep
MAIHLYKTSTPSTRNGAVDSQVKSNPRNHLIYGQHRCGKGRNARGIITAGHRGGGHKRLYRKIDFRRNEKNIYGRIVTIEYDPNRNAYICLIHYGDGEKKYILHPRGAIIGDTIVSGTEVPIKMGNALPLKSTSTDMPLGTAIHNIEITLGKGGQLARAAGAVAKLIAKEGKSATLKLPSGEVRLISKNCSATVGQVGNVGVNQKNLGRAGSKCWLGKRPVVRGVVMNPVDHPXHGGGEGRAXPIGRKKPATPLGXFPALGRRSRKRKKYSDNLILRRRTK

SEQ ID NO: 266369 - protein, 82 aa, Glycine max
  Clone ID: PAT_MRT3847_82552C.1.pep
ILHKNCDVRNLQYTKRIDRASLNQRIHNLGAPPLSISIPANLITCGSFGGEQFFLIEVCLTHGQISILPFSWAKLVSSPIYP

SEQ ID NO: 266370 - protein, 63 aa, Glycine max
  Clone ID: PAT_MRT3847_82553C.1.pep
KIVTYQVTIIHPQQMSISTHCNRPWFKTTKISDGDTKLVLFKQRYNYFKYHINSGRHMNKLRS

SEQ ID NO: 266371 - protein, 105 aa, Glycine max
  Clone ID: PAT_MRT3847_82554C.1.pep
KFKAATWHLTKVEREDHLVAAFAYFEKDGRGGITQDELQQACEEYGIGDVRLEEMIPKADQDKDGRIDPQEPAGMMQKGNAKLGKRVRKGSASLRGGFREALPVC

SEQ ID NO: 266372 - protein, 71 aa, Glycine max
  Clone ID: PAT_MRT3847_82555C.1.pep
RSHRTPYRKPWTLLGGARPPPPPPPTHPHPPPSDKSKGLYQQNSKREFLGSISKAASNKIIYSRNNAHTTL

SEQ ID NO: 266373 - protein, 105 aa, Glycine max
  Clone ID: PAT_MRT3847_82556C.1.pep
PGIKVGRSGVQLPLKVEVEEVTVPEGFVQKLNDHLLLVYTGKTRLARNLLQDVLRSWYARLPAVVQNAHSLVRQTEECAEGFRQGEGLPLGGSGHWERVFCHLWV

SEQ ID NO: 266374 - protein, 57 aa, Glycine max
  Clone ID: PAT_MRT3847_82557C.1.pep
CFFSIIHKIASVWCFAEVCLQMYPIMYPIQPLPLYFTPKISLVLLLRESWHTPTILV

SEQ ID NO: 266375 - protein, 54 aa, Glycine max
  Clone ID: PAT_MRT3847_82558C.1.pep
HMPRPKRAGMIITKRLWIELPGRAEFLIIAANIIHPTFHFDIFDVGRISILTLE

SEQ ID NO: 266376 - protein, 47 aa, Glycine max
  Clone ID: PAT_MRT3847_82559C.1.pep
FQALQETAEAYLVGLFENTNLCAIDAKRVTIMPKNIQLARRIRGKRA

SEQ ID NO: 266377 - protein, 48 aa, Glycine max
  Clone ID: PAT_MRT3847_8255C.1.pep
VQMSVQQRGDHRRGTVLLFTLHILFILVTVYRYLGRVDLFLWHIPSTL

SEQ ID NO: 266378 - protein, 101 aa, Glycine max
  Clone ID: PAT_MRT3847_82560C.1.pep
SLFITVGDVCRSFVLPDPSFPSTVFARAVCFSLSGIVLSVHIDSNNSSLSLSRRRYYAHSFRWCLIQCSKRLSTSYSQRIPFQHLQKLTHPQLSPLQSVIS

SEQ ID NO: 266379 - protein, 134 aa, Glycine max
  unsure (1)..(134): unsure at all Xaa locations
  Clone ID: PAT_MRT3847_82561C.1.pep
QTQKKPIYGFGKILKKKWILKNFLKMGGENKTLPLNLDDLIQGFKGTWAFEGGTPLKGKPLGVCLKPPAFKTFRFWGSFFSSSLGAXGHLLFFFFPGLRGGGQTPGGGFHPPLNLHPRPLKKNLCPPFFCWARF

SEQ ID NO: 266380 - protein, 130 aa, Glycine max
  Clone ID: PAT_MRT3847_82562C.1.pep
VDPSMDHLVIQGNESDRLELQMYASQYFHQISELLRRLPRVILLMLKTNDCLRAVNNSLLQGSSLETFFVIGKVSSEAVIEAKMLQSKSLLTWLNIKLDKILLEVRLWGMQVALWLLQLRKSLSWYNQAL

SEQ ID NO: 266381 - protein, 58 aa, Glycine max
  Clone ID: PAT_MRT3847_82563C.1.pep
SLVNKTFDKGSLYPWIRCCHLTRLSRLPNRTIDSNINCCETEKGKHREIHTNGSQTIT

SEQ ID NO: 266382 - protein, 225 aa, Glycine max
  unsure (1)..(225): unsure at all Xaa locations
  Clone ID: PAT_MRT3847_82564C.1.pep
MMPSVKPDASDKDSEPFVEVDPTRRYGRYSELLGYGAVKKVYRAFDQEEGIEVAWNQVKLRNFSYDPSMVDRLYSEVRLLRSLTNKNIISLYSVWREEKHNTLNFITEVCTSGNLREYRKKHKHVSMRALKKWSKQILEGLNYLHLHDPCIIHRDLNCSNVFVNGNTGQVKIGDLGLAAIVGKNHSAHSILGTPEFMAPELYEEDYTEMVDIYSFXMCVLEMVTL

SEQ ID NO: 266383 - protein, 49 aa, Glycine max
  Clone ID: PAT_MRT3847_82565C.1.pep
HLFFQPNAQRPSQTKAFYIYHINKKKKKDKKKKEHGHDHHGHSSSSDSD

SEQ ID NO: 266384 - protein, 134 aa, Glycine max
  Clone ID: PAT_MRT3847_82566C.1.pep
MANSSSGASQMKFVLVLFLLFISGLMDVASEQMPADSVPQIKYDVFVNFRGEDIRHSFLGYLTEAFYQKQINAFVDDKLEKGDEIWTSLDGAIQGSSISLTIFSENYTSSRWCLDELVKILECREIYGQIVIPV

SEQ ID NO: 266385 - protein, 123 aa, Glycine max
  unsure (1)..(123): unsure at all Xaa locations
  Clone ID: PAT_MRT3847_82567C.1.pep
MRRYLSKLIHGPIGFNPSNSFPLNCEMGSYCAARRTNRQASFSGNNEYATRAFATTSCASLAEDQPKDNPVSDMVVDSFGRLHTYLGISLTGGCNLRMQYCMPXDGVEPHSSPQLLTKTEILR

SEQ ID NO: 266386 - protein, 37 aa, Glycine max
  Clone ID: PAT_MRT3847_82568C.1.pep
LANIESLQSVDNTALYEKAGTILETYWLDEEDETIPP

SEQ ID NO: 266387 - protein, 46 aa, Glycine max
  Clone ID: PAT_MRT3847_82569C.1.pep
KKKKKKKKKNKKKKKKGRGRRRKKRIKKTCMKKKKKKNRGALNLMD

SEQ ID NO: 266388 - protein, 54 aa, Glycine max
  Clone ID: PAT_MRT3847_8256C.1.pep
HFLYMKNISGDESITKELIGGKQSISIISCNLACFFVMFLLIKTCMLPMEVAQA

SEQ ID NO: 266389 - protein, 66 aa, Glycine max
  Clone ID: PAT_MRT3847_82570C.1.pep
VDESIYTGEIPMPRGEHDGASTCHEILRYLCFQWIIILTDSKHLYSVKNVNSVDSLRRTALLWMMY

SEQ ID NO: 266390 - protein, 22 aa, Glycine max
  Clone ID: PAT_MRT3847_82571C.1.pep
PSWFSTFVQHPLLDSIKDVEIS

SEQ ID NO: 266391 - protein, 94 aa, Glycine max
  Clone ID: PAT_MRT3847_82572C.1.pep
GSSSRMVDIMLTQVTRLEWMRVFYQAMFIRTLMTVKRRLLLGLQTFPARLTSIQRQVEVSYMQCDWLWILMLLLCSFLHVSDSVWLCFVSYYLT

SEQ ID NO: 266392 - protein, 95 aa, Glycine max
  Clone ID: PAT_MRT3847_82573C.1.pep
FTSIFPLLSHVFSGDPLMLLVWFQQILFFVPISVICLIYAHHCFSVSVSLFLLCYVLHFTAHKLTLHESGLIVPFCFSINFHQLCFFPLLIPYTS

SEQ ID NO: 266393 - protein, 77 aa, Glycine max
  Clone ID: PAT_MRT3847_82574C.1.pep
IVRCSFSDYSSNVSSKSSTALTVLRIRMKTAVIDLLVISAVFYLLNALIYHGAFLMSSASMNNLCLTSDIEQNISTL

SEQ ID NO: 266394 - protein, 157 aa, Glycine max
  Clone ID: PAT_MRT3847_82575C.1.pep
MVPTPQLKYVLLLFYCTFAFNLLSTPACALNIGAETTGVAVSVSKECSRQCESSFCSVPPLLRYGKYCGLLYSGCPGERPCDGLDACCMKHDQCVSAKNNDYLSQECSQTFINCMNNFKNSRAPTFKGNTCDADDVIEVIHVVMEAALLAGRVLHKP

SEQ ID NO: 266395 - protein, 107 aa, Glycine max
  Clone ID: PAT_MRT3847_82576C.1.pep
MAWGLMTVPPLLRYGKYCGLLYSGCPGERPCDGLDACCMKHDQCVSAKNNDYLSQECSQTFINCMNNFKNSRAPTFKGNTCDADDVIEVIHVVMEAALLAGRVLHKP

SEQ ID NO: 266396 - protein, 68 aa, Glycine max
  Clone ID: PAT_MRT3847_82577C.1.pep
RSYTLMAKWRDYSDRMEEDLACECIEESAGDPLLGMERDGSCETLGGRKKRLILGNAGFPASCTEKGQ

SEQ ID NO: 266397 - protein, 67 aa, Glycine max
  Clone ID: PAT_MRT3847_82578C.1.pep
TYVSLFPFNKRICHMVVMSYYAINNALVNLQLFEDGLQLPQYIKLILAKKKKKKKKKKRRSRGSSYD

SEQ ID NO: 266398 - protein, 39 aa, Glycine max
  Clone ID: PAT_MRT3847_82579C.1.pep
DKNRETKGPEICVLIHQPIYSAINMAVLILVVAIISETG

SEQ ID NO: 266399 - protein, 180 aa, Glycine max
  Clone ID: PAT_MRT3847_8257C.1.pep
PRWPPKNLPRKTPKGFRKVACIGAGLPTRVLFPFSRAGQKGFPPRIEMDKKISRIGQGIPIKDGKVVKNNAPTGDHLAQKTLTPLGGFPPHGEGNHGSLMIKGWVVGPQKGVIPPKKALVPPPQRVALEKIHPKFIGPSSQVGQGRFQTPAEKAALMGPPKKNRIKEEKAAAAPAAPAPA

SEQ ID NO: 266400 - protein, 97 aa, Glycine max
  unsure (1)..(97): unsure at all Xaa locations
  Clone ID: PAT_MRT3847_82580C.1.pep
ARASSRIVRPPTKGAVVQRPRTRALTAVHDAMLXDVVCPAQIVGTRGTYIIEGSQILRVFLCPKERTTTVYTLETLSGEYIERTVKDVVYECPLSEA

SEQ ID NO: 266401 - protein, 117 aa, Glycine max
  unsure (1)..(117): unsure at all Xaa locations
  Clone ID: PAT_MRT3847_82581C.1.pep
LEVFNFTDAGGVAVSIYITDESIHAYDDSSVATAYEKKSPLDLRTKNTILNKYDGRFKDXIFHEVYEPGXKHRFDSCCIWSEHRLIDNMAEYSLNRGRGSSCACEIYDGNPQSDFLT

SEQ ID NO: 266402 - protein, 181 aa, Glycine max
  Clone ID: PAT_MRT3847_82582C.1.pep
MRLLCLCLTLLLFLASVAMAEEDSDHNKHSLKATSHAQIQCTMCSSCNNPCNQVPSPPPPSPPPPSPSTNNCPPPPSPPSSGGGGGGAPYYYSPPPPSQYTYSSPPPPASTGGGGGGGIYYYPPPSNGNYPRPPPPNPIVPYFPFYYYSPPPPGSTAAPPPSTASSLLCALAFSSFLLLLL

SEQ ID NO: 266403 - protein, 70 aa, Glycine max
  unsure (1)..(70): unsure at all Xaa locations
  Clone ID: PAT_MRT3847_82583C.1.pep
QXXXXXEXXMTLANWILRVXXXSYSXSNSXNLGLXSXNRRHXWNXLCLPITTKGRIHPXRXTMIXARTSX

SEQ ID NO: 266404 - protein, 57 aa, Glycine max
  unsure (1)..(57): unsure at all Xaa locations
  Clone ID: PAT_MRT3847_82584C.1.pep
LVDLRVFFIDPIIAWSRGLTWTLIWNPPPAAXFPPLFVFFFIFFIYCCFFFFFFFFF

SEQ ID NO: 266405 - protein, 87 aa, Glycine max
  Clone ID: PAT_MRT3847_82585C.1.pep
IVLRRVAPLFAVTGCESVARPGGGIVKLPSWSVTELRVYEPQSATATSSRRDLSQVSAKLTGAVLPLALCVKDPSCFIATGSINRKK

SEQ ID NO: 266406 - protein, 120 aa, Glycine max
  unsure (1)..(120): unsure at all Xaa locations
  Clone ID: PAT_MRT3847_82586C.1.pep
HRAYFPICSLLLFRATKILCPEVIAKDYNPPLYKPPTEKPPAYKPPVEKPPVYKPTVDNPPIAKPPLQKPPMYKPPVEKPPIYKPPVAEPPVYNPPVEKPPVYMPPVEKPPXYKPPVEKP

SEQ ID NO: 266407 - protein, 42 aa, Glycine max
  Clone ID: PAT_MRT3847_82587C.1.pep
PSTRVPCKPDQGSSMRWSHRHQSDANHEAKWGPHLSQDRSQL

SEQ ID NO: 266408 - protein, 57 aa, Glycine max
  Clone ID: PAT_MRT3847_82588C.1.pep
HNDFDFQSLKKKEGQTAYFSYNQNNLHPQRKALTYQARKKENLDCWHSFQVLEIARV

SEQ ID NO: 266409 - protein, 51 aa, Glycine max
  Clone ID: PAT_MRT3847_82589C.1.pep
PPGSKKLASHIIGNAMMDTEIIEAGLENTLLPDQNTLTGWLAIIGIQTLPF

SEQ ID NO: 266410 - protein, 96 aa, Glycine max
  Clone ID: PAT_MRT3847_8258C.1.pep
MASYLWRKYADYLYTKWEKTFLWDMVEPYRRPKSFTPLVTIYIAAFYSGVIGAAITEQLYKEKYWEEHPGKAVPLMRPKFYGGPWRVMGGNEPPSK

SEQ ID NO: 266411 - protein, 59 aa, Glycine max
  Clone ID: PAT_MRT3847_82590C.1.pep
GLPPTSILYFGHITPHAGSEHLEHKVCKTRHLLMVDSTMSPTTIIMIGFDTILQFISYH

SEQ ID NO: 266412 - protein, 94 aa, Glycine max
  Clone ID: PAT_MRT3847_82591C.1.pep
AAVALFFFFFFHFGTKITLTMDQCVHNPMLKHKRLYPFLPETSKGSYYRRYSFTNQHNSDTGGPHCYVHWPEFIIQMITINTHEGITLIHRLYP

SEQ ID NO: 266413 - protein, 133 aa, Glycine max
  unsure (1)..(133): unsure at all Xaa locations
  Clone ID: PAT_MRT3847_82592C.1.pep
MAFKRILKELKDLQKEATTSCSQVQKLLTCWTRRASFYRXAADSPYASVAFLVPTKYPSDYHIKPPKAAFWTKVKHPNVNSXGHLWVDILKEHXNPALTIFKVLAEIGSLGTDGMRADPLVPEIAHIFKTDRA

SEQ ID NO: 266414 - protein, 72 aa, Glycine max
  unsure (1)..(72): unsure at all Xaa locations
  Clone ID: PAT_MRT3847_82593C.1.pep
XXSRXRXFXNSEPKPGLRXSXXGESXFAYXESRVXGFDGGGDSAXGRADSGGXRLRGGEXNXRRXXLRGXAR

SEQ ID NO: 266415 - protein, 254 aa, Glycine max
  unsure (1)..(254): unsure at all Xaa locations
  Clone ID: PAT_MRT3847_82594C.1.pep
SRPAVDSLKSILSRVLGRIHSYQVWEKIHDYFHKQTRARAHQLLTELHVTVLADELIREXLKIKAISDSLASVGSPILPQEHIDAILEGLPRDYHSVISVIESKFEPLPAEEVEALLLAHEARLQKHAFSDSLSINYTQANPSFSSAHGSDGYNVANKASQTNSENFSSNSHSGFGHGGNFNRGNQHFANFQCQVCLKYGHTVSHSHYRYDQYYQPSSSLTLHDPLNPNSNSQNYSSQQSNSNSTGQTYGNTRP

SEQ ID NO: 266416 - protein, 169 aa, Glycine max
  Clone ID: PAT_MRT3847_82595C.1.pep
MERMKRVLLLLLAFTVLLMLPEASATKFTVGNNQFWNPNINYTEWAKGKHFYLGDWLYFVYDRNQASVLEVNKTDYETCNSDHPLTNWTRGAGRDVVPLNVTKTYYIISGRGFCFSGMKIAVHVEKLPPPPKAAPVKSAAPTLFSQDRILLMPVVFAIGAAWDAFIHFW

SEQ ID NO: 266417 - protein, 53 aa, Glycine max
  Clone ID: PAT_MRT3847_82596C.1.pep
QHHSLSLAGPNGSVYQPWQASFRNLIEHLSALLLFIRYSVSPKQVKRLNPYPF

SEQ ID NO: 266418 - protein, 57 aa, Glycine max
  Clone ID: PAT_MRT3847_82597C.1.pep
YWAQTSHLVLHLHLLKARVSTTNLKYLASSTGEMLSFDQENEQPETSMESRCYGLHR

SEQ ID NO: 266419 - protein, 142 aa, Glycine max
  unsure (1)..(142): unsure at all Xaa locations
  Clone ID: PAT_MRT3847_82598C.1.pep
MAGEIIYIMIMLFNLIMQGDYIYALPLFDILQKLLHLSGIKMTYIVSLQSYDTDELEKPYCNXSTKGGIYMVMKDMDRDRTGLADSPLMRYXIPIIRAXMRQLLTALHYCDGNHGLHRDSKGSNFQIDHEGNLMLAPLGLAR

SEQ ID NO: 266420 - protein, 120 aa, Glycine max
  unsure (1)..(120): unsure at all Xaa locations
  Clone ID: PAT_MRT3847_82599C.1.pep
MNQKPTVGSPEWHQVRKNNHKEGTXQVYPRPVYTNVVPVERRRREAINEGINQIARLVPNCDKNKGAILQRAIEYINQLHEEKRQMSERWEQSNMTTSHAINEISAQNSKLKVEVNRPGD

SEQ ID NO: 266421 - protein, 149 aa, Glycine max
  Clone ID: PAT_MRT3847_8259C.1.pep
MVAQKFVVDLNKPLVFQVGYLGEAYDDWVHDPIVSKEGPRFFQSGFLEIWNLVKLICTPSVAPAVFGGILLGYVMYDCTHYYLHHGQPKSDVPKSLKKYHLNHHFRIQDKGFGITSSLWDKVFGTLPPKMDAKNILCRPTSFLQPFVMK

SEQ ID NO: 266422 - protein, 71 aa, Glycine max
  Clone ID: PAT_MRT3847_825C.1.pep
PNTKKNSVQAVIEPYSPYRGEICKLDKENLIHYLTTNPRFTKDSSFAPNASQINITCPNQIILDAPCLERS

SEQ ID NO: 266423 - protein, 138 aa, Glycine max
  Clone ID: PAT_MRT3847_82600C.1.pep
VLDALLCEYEKSIQAPEKWQKLAVFLQQSFEGPVLDLTRRLINKVESDKSSLSLNYRLTEDKIALLNKRLETSESEKSEYIKRYEDAINDKKQLTDEYMNRITELRASCRSLDERYSSLSKTLDSTKQDPWIGKKYEQ

SEQ ID NO: 266424 - protein, 466 aa, Glycine max
  unsure (1)..(466): unsure at all Xaa locations
  Clone ID: PAT_MRT3847_82601C.1.pep
QVDNNKDKQKDTNGDADVSDTSSDSEDEDNGPSKEECIIQFKEMLKERGVAPFSKWEKELPKIVFDPRFKAIPSYSARRSLFEHYVKTRAEEERKEKRAAQKAAIEGFKRLLDEASEDINYNIDFQTFRKKWGNDPRFEALDRKEQEHLLNEREQXASLTFRESILKASSSAMFIGYPKFFCLLPLKKAVEEKSQAMRAAATTCFKSMLKERGDMSFNSRWSRVKENLRDDPRYKCVRHEDREVLFNEYISELKAAEHAAERETKAKREEQDKLRERERELRKRKEREEQEMERVRLKIRRKDAVTSFQALLVETIKDPLVSWTESKPKLEKDAQRRATNPDLDPLDTEKLFREHVKMLQERCAHEFRVLLAEVLTSDAASQETDDGKTVLNSWSTAKRLLKSDPRYNKVPRKEREALWRRYAEDMLRRQKASHDSREEKHTDAEGRNYLESSKHPLESGRSYERR

SEQ ID NO: 266425 - protein, 268 aa, Glycine max
  unsure (1)..(268): unsure at all Xaa locations
  Clone ID: PAT_MRT3847_82602C.1.pep
AIPSYSARRSLFEHYVKTRAEEERKEKRAALKAAIEGFKRLLDEASEDINYNTDYQTFRKKWRNDPRFEALDRKEQEHLLNEREMISIDNPXKQHESAGSRLMTDSRIRCGVLPLKKAAEEKAQAMRAAAAASFKSMLKERGDISFNSRWSRVKENLRDDPRYKCVRHEDREVLFNEYISELKAAEHAAERETKAKREEQDKLRERERELRKRKEREEQEMERVRLKIRRRDAVTLFQALLVETIKDPLVSWTESKPKLEKDAQRRAT

SEQ ID NO: 266426 - protein, 79 aa, Glycine max
  Clone ID: PAT_MRT3847_82603C.1.pep
GVIRFFKKFVVADFAGNGWSSLRIDPDAVATPVAAHVWFQHQSLLLPYLLSGCCKVDRTDAHFNVQQMDNLSPCPTQLS

SEQ ID NO: 266427 - protein, 93 aa, Glycine max
  Clone ID: PAT_MRT3847_82604C.1.pep
IERKRGFWFVHSHTLTPLSAASFPTPKVQSWNLSSEFRRGYDSLGVVVEQIVLGDDDDDGVGWTQSDRGLHSGSSNRVGFVRGGVACKESKFG

SEQ ID NO: 266428 - protein, 211 aa, Glycine max
  Clone ID: PAT_MRT3847_82605C.1.pep
MDQVAPPPILMHRKRDLSYAVVSPAPNPSWSWDWDSVRFAGKPPPPLSSPNDDVVFEESVAPPLQLNLGGRTNNSNSNKRVRSGSPGTSSYPMCQVDNCREDLSKAKDYHRRHKVCEAHSKASKALLANQMQRFCQQCSRFHPLSEFDEGKRSCRRRLAGHNRRRRKTQPEDVTSATPAPAAAANLEIFDLLTAIAGASQGKFEEKRSQVP

SEQ ID NO: 266429 - protein, 51 aa, Glycine max
  Clone ID: PAT_MRT3847_82606C.1.pep
LSSTMNLRTDEGHLITRRSTLILCSSLCGGQVHRMVSLQGNRYNSSRFHLS

SEQ ID NO: 266430 - protein, 95 aa, Glycine max
  Clone ID: PAT_MRT3847_82607C.1.pep
QSRKKAEMFLVRTDGFSCTREKVTESSLAFTHPSTQQQMLMWKSMPKNVLLLKKLGEELMEEAKMVMIFLDSKKHENGSKKLSSLVFLWSSHQSV

SEQ ID NO: 266431 - protein, 235 aa, Glycine max
  Clone ID: PAT_MRT3847_82608C.1.pep
MSWRTLASTSRHTFKRLNAILRSPSTTIPSSRASSSLFLHVPFSTTTLHSLPQPTNALIDPKLLAPQNDAVNNNDDETTNEFLSRFVWIMRKKVKEAYPDSDKPTVDGMLVAIVEMVVSEMEKGNIGTTSSLFCSADFSEDLWRTVWEVSSLVLEDMNKEIKKEKMKSFLQCEEVKEMCRFAGEVGIRGDLLRELKFKWAREKMEEHEFYEGLERLREEARSEGNGIGVITEKKE

SEQ ID NO: 266432 - protein, 56 aa, Glycine max
  Clone ID: PAT_MRT3847_82609C.1.pep
IHLIYIVCKFFSLMRVLVDLCKELIGFAQMTCIWLNRYFELYDIQLFLVSIFVVLI

SEQ ID NO: 266433 - protein, 67 aa, Glycine max
  Clone ID: PAT_MRT3847_8260C.1.pep
LIQGPIIRGVYGPVPFFNQEPYPRSKTTRRSISFLYLQKKYPTWFIKPMVDPRKPLPNSFPFFFLKW

SEQ ID NO: 266434 - protein, 473 aa, Glycine max
  Clone ID: PAT_MRT3847_82610C.1.pep
MGSEQNRFPLHERRKRWGGCWGAFSCFNSQKGGKRIVPASRIPDSSGPASQPNGPQVIGLTNQATGLAPSLLAPPSSPASFTHSALPSTAQSPSCFLSLSANSPGGPSSTMYATGPYAHEMQLVSPPVFSNFTTEPSTAPLTPPPELAHLTTPSSPDVPFAHFLSSSVDLKNSDKGNYITANDLQATYSLYPGSPASSLISPISRNSGDCLSSSFPEREFRPQWDSSLSPENGKYQRTGSGRVSGHDTNGVTMASQDTNFFCPATYAQFYLDQNPPFPHNGGRLSVSKDSDVQSNGGNGHQSRHARSPKQDVEEIEAYRASFGFSADEIISTSQYVEISDVMEDSFTMMPFASDKSTMEESIEPSLMKGFKAQETQVALQSLRSLRSDPGPVGKEAHNQAPICPGCEDHTSQGHCSNNSGLSTPEKRTLVDDEDIFSKMESSRICRKYQMGLSCSDAEVDYRRGRSLREGKGM

SEQ ID NO: 266435 - protein, 52 aa, Glycine max
  Clone ID: PAT_MRT3847_82611C.1.pep
FNYLFLFSFTTVDYMKGRAFIVVALAYKTYNIWHYNTLLILESHLLFLKIMT

SEQ ID NO: 266436 - protein, 109 aa, Glycine max
  Clone ID: PAT_MRT3847_82612C.1.pep
LFVLLAFGLSVSLIIWTYNMIIMVNHEIWFHTGEHNIDCNWVQASRGEPREGADPVYQCRKLKWYIHAPRKLLLIMMIDDQLLILDLPPASIFLLADITMVTFARVFIV

SEQ ID NO: 266437 - protein, 62 aa, Glycine max
  Clone ID: PAT_MRT3847_82613C.1.pep
IRILIRLYSLHKKFLRREILSLAYYHWIPSCFRFPDISPTTTSALHCCSTYTPVPTHHTLGN

SEQ ID NO: 266438 - protein, 38 aa, Glycine max
  unsure (1)..(38): unsure at all Xaa locations
  Clone ID: PAT_MRT3847_82614C.1.pep
PRLXXFXXLNXNPFIHNLEIWKMXNPPPXPYXVVXXTV

SEQ ID NO: 266439 - protein, 115 aa, Glycine max
  unsure (1)..(115): unsure at all Xaa locations
  Clone ID: PAT_MRT3847_82615C.1.pep
ILIRKKKMASEKEVETVIVGNYEEMESEGKPRDAKSRLLSLLWHGGSVYDAWFNCASNQVAQVLLTLPYSFSQLGMLYGTLFQLFYGLLGGWTAYLISALYVEYRTRXEREKFNF

SEQ ID NO: 266440 - protein, 92 aa, Glycine max
  Clone ID: PAT_MRT3847_82616C.1.pep
FWGPKKKILSSQPRGRKLGFFKGAALLYFIIFYLSPFFFFFFIFFLFYFFFFFFFFFFFFFFFLTIILEYFIATMLHYYLTHQFKVIVATIL

SEQ ID NO: 266441 - protein, 53 aa, Glycine max
  Clone ID: PAT_MRT3847_82617C.1.pep
SHPHPIIYLGAVFKKRGGFQNHMQETGLMPTLMLTQLKTSLTMNRRASIALSQ

SEQ ID NO: 266442 - protein, 81 aa, Glycine max
  Clone ID: PAT_MRT3847_82618C.1.pep
LSPVVVEVFYLEACEFGSIFEGLIPEDINIYATTTSNAEESSWGTYCPGEYPSPPPEYSTCLGNLYSVAWMEDKYVHNKES

SEQ ID NO: 266443 - protein, 53 aa, Glycine max
  Clone ID: PAT_MRT3847_82619C.1.pep
RSRWWLTQCSSSIGTSFSHCIRCRTCRSCISHSDHASETYSDNRRVAHRLRAT

SEQ ID NO: 266444 - protein, 236 aa, Glycine max
  Clone ID: PAT_MRT3847_8261C.1.pep
MVAQKFVVDLNKPLVFQVGHLGEAYDEWVHDPIVSKEGPRFFQNGFLELFTRTAWWVIPTVWVPVASWFISNSVKSGLPSLDVALLVFLGIFVWTLAEYTLHRFLFHVKTKSYWGNTLHYLLHGCHHKHPMDSYRLVFPPGAAAILFMPIWNLVKLMATPSTAPALFGGGLLGYVMYDCTHYYLHHGQPKTEVPRNLKKYHLNHHFRIQDKGFGITSSLWDKVFGTLPPKMDAKSM

SEQ ID NO: 266445 - protein, 53 aa, Glycine max
  Clone ID: PAT_MRT3847_82620C.1.pep
LILKIVYKKKIEDPPIPLFNNLIYFQSKRHKIEDTLESKWIGPHRIIKMSNKK

SEQ ID NO: 266446 - protein, 55 aa, Glycine max
  Clone ID: PAT_MRT3847_82621C.1.pep
HPSGGAGNAQTLVHCKNILTLIAHAEWKKNGQGLPERVTTHHFCSVASNTYHQWS

SEQ ID NO: 266447 - protein, 62 aa, Glycine max
  Clone ID: PAT_MRT3847_82622C.1.pep
LEFGAPKEELWLAKQGFINLEPLERPAHMYIILGHSFVHLILLLYGGVVHRSYIAHYFFFCY

SEQ ID NO: 266448 - protein, 67 aa, Glycine max
  Clone ID: PAT_MRT3847_82623C.1.pep
LIIIMFWVHYILECLLPFLKILYTTLLILIITYKHFLLLIKFLTFLQLYMYYLLKIKTYLEFLSLLN

SEQ ID NO: 266449 - protein, 68 aa, Glycine max
  Clone ID: PAT_MRT3847_82624C.1.pep
MKTKFISTHDSRIACFTLTLNAQLLATASTKGTLIHIFKTNHGSFLREVYFFSCFSLFASKLVYSFLV

SEQ ID NO: 266450 - protein, 76 aa, Glycine max
  Clone ID: PAT_MRT3847_82625C.1.pep
MKTNKIQLQLNLINIFFLIHCCPSRLNFPGSSTFEAMELHAKQPNLQPDLSFIFEALSHTTKSIKKSKPDPLHNQI

SEQ ID NO: 266451 - protein, 152 aa, Glycine max
  unsure (1)..(152): unsure at all Xaa locations
  Clone ID: PAT_MRT3847_82626C.1.pep
GLITKTWERCKSIGRSRKEASSNSLNTNTNTMRSKSWPNRNRAENKNKNKNSTIVAPEGCFSVYVGPQMQRXXIKTEYANHPLFKMLLEEAESEYGYNSQGPLALPCHVDVFYKVLMEMDSDETHGSCACVKRSPSAYQLLRTSPMLSINHF

SEQ ID NO: 266452 - protein, 40 aa, Glycine max
  unsure (1)..(40): unsure at all Xaa locations
  Clone ID: PAT_MRT3847_82627C.1.pep
MSCCRGNCGCXSACXCSNGCXGWKMYPDLSYIASTTTETF

SEQ ID NO: 266453 - protein, 89 aa, Glycine max
  unsure (1)..(89): unsure at all Xaa locations
  Clone ID: PAT_MRT3847_82628C.1.pep
MVDGAKAKGNATFSSGXIHHFSDAIALASTSHVLYSNRSAAYTSLKNYIEKKGIYKKSGGAKGVSIVDEKGEEENQKKVSKQERGTSSC

SEQ ID NO: 266454 - protein, 59 aa, Glycine max
  Clone ID: PAT_MRT3847_82629C.1.pep
VKAGIIDPLKVIRPPLVYPPSVSFFMPPTKAVVFELPTDNKDPPPMAGGMGGMGFPTFF

SEQ ID NO: 266455 - protein, 240 aa, Glycine max
  unsure (1)..(240): unsure at all Xaa locations
  Clone ID: PAT_MRT3847_8262C.1.pep
MVAQKFVVDLNKPLVFQVGHLGEAYDDWVHDPIVSKEGPRFFQSGFLELFTRTAWWVIPTGWVPVSSWFISNSVKSGXILLDVALLVFLFIFRSESCWVHPLTDFLYRFHTKHSMGDTIRVFLHGATPIFFMPFWNXVNLMATTATAPALFGGXYWCFASLILPIMVFAVILLGYVLYECSHCYLHYGQPKSDVPKSLKKYHLNHHYRLQNYGFGITSPLWDKVFGTVPPPQSKGDAKRR

SEQ ID NO: 266456 - protein, 71 aa, Glycine max
  unsure (1)..(71): unsure at all Xaa locations
  Clone ID: PAT_MRT3847_82630C.1.pep
GLIRLHGHQTGTCLWGEAPLLLKRTAGXRVRXSPDSDLEAFSHNPTHGSFAPLXXQPSAMTNCAXQRFSSY

SEQ ID NO: 266457 - protein, 93 aa, Glycine max
  unsure (1)..(93): unsure at all Xaa locations
  Clone ID: PAT_MRT3847_82631C.1.pep
RDLSRDLGIGYSRGIRKTWVNDRLGTRFREVNDNDSICILKKLVAAXLSHDPSRSTSXKWFTIYIEHITLNDYXIHDGLGLELYYNYTHIWCD

SEQ ID NO: 266458 - protein, 255 aa, Glycine max
  Clone ID: PAT_MRT3847_82632C.1.pep
MPPFLSTSKALCSLASRKSGGSQLIRSSKSSGKHDGCRCITTAITGGHHNHPSVSRIGFSSLIGGSCNSNNHYYNYNVVQSRRFLGCGDGEEGILSRTYEERRVLGYSTEQLFEVVSAVDFYHGFVPWCQRSDILRHYPDGSFDAELEIGFKFLVESYVSHVELDKPKRIKTTVSQSTLFEHLINIWEFNPGPVPGSCDLYFLVDFKFQSPLYRQIASVFFKEVASRMVGSFTERCRLIYGPEVRVLENSYGKRA

SEQ ID NO: 266459 - protein, 71 aa, Glycine max
  Clone ID: PAT_MRT3847_82633C.1.pep
ERWRNTNHHHNLLVLFMDECNVCMKTKILASLLCLTEDYADLNLCDICDQFHVTEHINLDLFLRIFKAHNL

SEQ ID NO: 266460 - protein, 35 aa, Glycine max
  Clone ID: PAT_MRT3847_82634C.1.pep
ASGGGSHSRMGMHCSSYGGGTQASYDGDIAAGMAS

SEQ ID NO: 266461 - protein, 62 aa, Glycine max
  unsure (1)..(62): unsure at all Xaa locations
  Clone ID: PAT_MRT3847_82635C.1.pep
NTCGNXDCAHNTICAGGDIYGVIVKTEKSYIXSVVMGVPTSEHEWKRECGANCAYAGCACAH

SEQ ID NO: 266462 - protein, 57 aa, Glycine max
  Clone ID: PAT_MRT3847_82636C.1.pep
IHGLTHASIRMQKNNKRGVSYLTHIVIHFAPFNQYQHLLCSHAHLYLQRFMSNFNLH

SEQ ID NO: 266463 - protein, 107 aa, Glycine max
  Clone ID: PAT_MRT3847_82637C.1.pep
FQASSAGVCAPGKFPFGPRFLYPLFLPVGVGLVFCFPGVSWFFFFLLCPVCLMYFPGPSRFPFSFFFFLYPLPVLFFCVFLRALHLSPALSILFLFQPPIKIIKEHH

SEQ ID NO: 266464 - protein, 69 aa, Glycine max
  Clone ID: PAT_MRT3847_82638C.1.pep
CKVEPFVARSDHNPKELKSWAKRTGFVSDYSGEAGTSASENFDGVDDQREGGSPPKIEIDLVLGLARPN

SEQ ID NO: 266465 - protein, 41 aa, Glycine max
  Clone ID: PAT_MRT3847_82639C.1.pep
THSPRCNRRALIEYRESPNKHHSWSRWSAQKLILYTFKHRS

SEQ ID NO: 266466 - protein, 126 aa, Glycine max
  unsure (1)..(126): unsure at all Xaa locations
  Clone ID: PAT_MRT3847_8263C.1.pep
TRLEVGATCLHYAAYYGHTNCLTAILSAAHSTPRCRDLGRGXFADIRHGNRATPMHLAARHRWADCLHALIDNGALGRASTGGYGYPASTPLHMADRGATIDLSPGRVGIKSITTTLSLLCIRNIP

SEQ ID NO: 266467 - protein, 186 aa, Glycine max
  unsure (1)..(186): unsure at all Xaa locations
  Clone ID: PAT_MRT3847_82640C.1.pep
MASNQEITVPCRYWVDNERKRVVMAEASGHFVDVLFSFLTLPLGTIIRLGNTFGQPIEIGCINNLFKSVEALNPDVFWNDICKRMLLSPRNPLEFSYQRLKLKVDDTQPTKYFVCHIYSKGSDFSLSTFDEVKCHCGNLMKRQLDMLVEPAGGNGVFVKGDAMFLIFDDLTVLRSSPSVXFNHHSN

SEQ ID NO: 266468 - protein, 96 aa, Glycine max
  Clone ID: PAT_MRT3847_82641C.1.pep
LLCSPTGSVLFSSIKIQKLGSLTFLYKSHRKVCSLQLPLPLLFLFFCKEWFQGKSAVLKIFYFVLFEGLKDTWCSALVSSSFSLSFSFVFFFLFPL

SEQ ID NO: 266469 - protein, 62 aa, Glycine max
  Clone ID: PAT_MRT3847_82642C.1.pep
VIEQSQLPVFGLISFLRIGFSHVYIYSQSLLLLLILPLPVSITVLKTGQTRTLVYNGLMENA

SEQ ID NO: 266470 - protein, 95 aa, Glycine max
  Clone ID: PAT_MRT3847_82643C.1.pep
SLGPPPGFWGSSEMFLVGYPLPGLGLSYLVGPSGEPAINFFVFWAAFKFEPSNIIFFRLGGLVVRFFLKPRSLGLLVSPGVLKANFFGVWGLSFP

SEQ ID NO: 266471 - protein, 326 aa, Glycine max
  unsure (1)..(326): unsure at all Xaa locations
  Clone ID: PAT_MRT3847_82644C.1.pep
MAIETLVLGAGQEVGKSCVVVTINAKRIMFDCGMHMGYLDHRRYPDFTRISPSRDLNSALSCIIITHFHLDHVGALAYFTEVLGYNGPVYMTYPTKALAPLMLEDYRKVMVDRRGEEELFSSDQIAECMKKVIAVDLRQTVQVEKDLQIRAYYAGHVIGAAMFYAKVGDAEMVYTGDYNMTPDRHLGAAQIDRLRLDLLITESTYATTIRDSRYAREREFLKAVHKCVSCGGKVLITTLALGRAQELCILLEDYWERMNLKVPIYFSAGLTIQANAYYKMLIRWTRQMIKDTYSKHNAIDSKNVQKLRRCMIDAPGPXDLFATPAM

SEQ ID NO: 266472 - protein, 122 aa, Glycine max
  Clone ID: PAT_MRT3847_82645C.1.pep
GSSSLATHPNAIIFPLGSSAQAFYGHQPQQNNPVFHNNIPNRTVTHCSVDPLDTSLCQNLAMQLSPLDVFNEGGSQFPLAFLEDDLHTIVQMGFGQAANRKTPIQSSSFNGSNNVPQMKVEL

SEQ ID NO: 266473 - protein, 127 aa, Glycine max
  Clone ID: PAT_MRT3847_82646C.1.pep
ASLLSLSNKMITNINTKTVSVLEPDMHRNTASRLRVIRARSCISSGIPATARIASSVSYNNPVKVWVVYLEGSLETEPVLYHSLDFPLSGRYTFPLHCLIMLRPGKTIITTLPNGLKLYSETSPTPT

SEQ ID NO: 266474 - protein, 119 aa, Glycine max
  Clone ID: PAT_MRT3847_82647C.1.pep
KILGKNLWVVRKATHPNSPKKNGKTATNFNHPPVFRGIYVSLKGVKKRHFGLKKKNFLVLKTLKPIPPRLYLKKKCWSFLTKGQRGQNWLTRHVFCFVFKNFHPDQRGKFFLGNIFPCF

SEQ ID NO: 266475 - protein, 103 aa, Glycine max
  Clone ID: PAT_MRT3847_82648C.1.pep
AGVEIGDHPMHIEDTQLPIPFFYREDLHPRMTVIAHISTPACQQPWGVGTWLKELKDSTRERYSFEELCIKTDAIAGEEKLCALIVSTVIGCAIIKLGKHIQV

SEQ ID NO: 266476 - protein, 68 aa, Glycine max
  Clone ID: PAT_MRT3847_82649C.1.pep
AANIVNKVLKNMKNQVYLLDITLLSQLRKDAPPSAYGGLDHTGNDCSHWCLPGVPDTWNELLYAALFM

SEQ ID NO: 266477 - protein, 116 aa, Glycine max
  Clone ID: PAT_MRT3847_8264C.1.pep
MVAQKFVVDLNKPLVFQVGHLGEAYDEWVHDPIVSKEGPRFFQNGFLELFTRTAWWVIPTVWVPVASWFISNSVKSGLPSLDVALLVFLGIFVWTLVEYTLRRFLFHVETKSYCGT

SEQ ID NO: 266478 - protein, 195 aa, Glycine max
  Clone ID: PAT_MRT3847_82650C.1.pep
MHNGVDCFCEDEENGFRNNVEASLNNSELRKDSAILINEMGVNGDCYDGRNKEVNPVLGESSEWEIQWEDLDIGERVVIGSYGEVYRADCNGTEVAVKKFLDQDFSGDALAQFKSEVEIMIRLRHPNVVLFMGAITRSPHFSILTEFLPRGSLYRLLHRPNLRLDEKKRLRMALDVAKGMNYLHTSHSPIVHRDL

SEQ ID NO: 266479 - protein, 42 aa, Glycine max
  Clone ID: PAT_MRT3847_82651C.1.pep
INYLRPDVKRGNFTPEEEETIIRLHKALGNKWSKIASGLPGR

SEQ ID NO: 266480 - protein, 53 aa, Glycine max
  unsure (1)..(53): unsure at all Xaa locations
  Clone ID: PAT_MRT3847_82652C.1.pep
IKVICCQCTRNLRENSRHNRMQQRLLLLLPQKPAEPDFXSKKTLNCKLGIRTC

SEQ ID NO: 266481 - protein, 46 aa, Glycine max
  Clone ID: PAT_MRT3847_82653C.1.pep
FWFFSISFVFSCMYFKGWSFIIFHSNYCKVVMYLNKCIDVVYYKSA

SEQ ID NO: 266482 - protein, 236 aa, Glycine max
  unsure (1)..(236): unsure at all Xaa locations
  Clone ID: PAT_MRT3847_82654C.1.pep
MRSLRMRNLLSRVKKKTIKNRNRSCISITKELPHLVEQEEEEEEVNEEGFNIKSSAPSHTHGVQPLGNLYLNTSSTNSRDTGLGNLHTLSDELVLDILGFLDSTSLGVLASVSKSFYVFTNHEPLWRNLVLENLLGGFQYKGSWKSTYVSACYPSFDNFAVALGGFKVRDFYSDYLFQSWLCANLEMKPEWLERDNVVRKRGISVEEFVLNFEEPNKPVLLEGCIDNWXALRNXDR

SEQ ID NO: 266483 - protein, 60 aa, Glycine max
  Clone ID: PAT_MRT3847_82655C.1.pep
NFTLYPRATSKPRKMIWLAMSLYSSLWALLSFFFLSEYRYRMAKWLTDTRLKEGNLGFSI

SEQ ID NO: 266484 - protein, 122 aa, Glycine max
  unsure (1)..(122): unsure at all Xaa locations
  Clone ID: PAT_MRT3847_82656C.1.pep
MVEWLMHMLLLRRFVGGLAWVTGIDALYKAFSLYGDIAESKVLSDRETGRSTGLRFVTFASXQALKDAIAGLNGRHLDGRLITWHTKLRTRASRGGGGGGGFWKWCADTTRDLGGSLCWCRR

SEQ ID NO: 266485 - protein, 93 aa, Glycine max
  Clone ID: PAT_MRT3847_82657C.1.pep
MPLKKEAMISNPELIHYACIARSETILGQHQSEKEPNMEALAAQCVAQAPPNHTLFSHTVHNRTYTFLIDPPFVFFAICHHSLLKYQTLPLLH

SEQ ID NO: 266486 - protein, 83 aa, Glycine max
  Clone ID: PAT_MRT3847_82658C.1.pep
NLGPKAQKILNRKISGDLICSPIRIVGKNFSPRVKFHKFLKASPPPLFPGGSPLCLTRGGGTNFSKGGGKSPPFYFIPGFFPP

SEQ ID NO: 266487 - protein, 343 aa, Glycine max
  Clone ID: PAT_MRT3847_82659C.1.pep
MGLEGKETPSFMRDFLDKCGGCAVIDGGFATELERHGADLNDELWSAKCLISSPHLEWEKNVHLDYLDAGANIILTASYQATIQGFEAKGFSREEGETMLRRSVEIAREAREIYYDRCTKDSSDFMRDERYRKRPILIAASVGSYGAYLADGSEYVGDYGDAVTVQTLKDFHRERVKILVEAGADLIAFETIPNKLEAQAYAELLEEEGIETPAWFSFSCKDESNVVSGDSIFECASIADSCRQVVAVGVNCTAPRFIHGLISFIKKATSKPVLVYPNSGETYIAESNQWVKSSGAAEHDFVSYIGKWRDAGASLFGGCCRTTPNTIRGIAEATYGKLKDKCI

SEQ ID NO: 266488 - protein, 90 aa, Glycine max
  unsure (1)..(90): unsure at all Xaa locations
  Clone ID: PAT_MRT3847_8265C.1.pep
VFGCPFCGAVFLRAPVCVLGSSGSAVPWVGVFSRSCCCLGVARASLVFASFCGGVGVSPSAVHSHPPGLRXRGRSVVNGRVGQSRGFRSG

SEQ ID NO: 266489 - protein, 158 aa, Glycine max
  Clone ID: PAT_MRT3847_82660C.1.pep
TRPAPSSNSDVLSRLFEIVFGILEKVGDAEQKRKKGIFGAKGGDKDSIIRSNLQYAALSALRRLPLDPGNPAFLHYAVQGISFADPVAVRHALEIVSEIATMDPYAVAMALGKHVQPGGALQDVLHLHDVLARSSLAKFWLDNNQGLGALEGENQIFR

SEQ ID NO: 266490 - protein, 103 aa, Glycine max
  unsure (1)..(103): unsure at all Xaa locations
  Clone ID: PAT_MRT3847_82661C.1.pep
DPYSQSFYITTFCRTTNPPYNFQNDEGQIIDLYIPKNCSDTNRLITANDHAAVHINIGHLDESGVYTDQITTFALCGFIRAXGDADGALDRLWQKKKVEARQQ

SEQ ID NO: 266491 - protein, 63 aa, Glycine max
  Clone ID: PAT_MRT3847_82662C.1.pep
FVDVAATVVDLELDLRLKGQGAFVRYESQSPVVLTRSHLYEHGVVRQHCASGSGLIEFLNVFK

SEQ ID NO: 266492 - protein, 88 aa, Glycine max
  Clone ID: PAT_MRT3847_82663C.1.pep
WATISCGSERTQLLVSTPFRGGPFTLFYYIRLAKRMFFDTPRTWILYEPMDRDKSLLLAMTSSFITSSFPYPSPLFSVTHQMALSSYL

SEQ ID NO: 266493 - protein, 71 aa, Glycine max
  Clone ID: PAT_MRT3847_82664C.1.pep
HRSPPQKAIVSHQPSSTLLNRRLQTQVSESQSLRHGHCSSACASTSLKGECGNYGLKEQRLLHAMIIEIKR

SEQ ID NO: 266494 - protein, 87 aa, Glycine max
  Clone ID: PAT_MRT3847_82665C.1.pep
IFLLKACLVNPEIPKSPPGDGPLKFVCISQLGGGPPLLIMLFFCPPDLLFFNGKRLLLSFSLFWPPVFTFFLAIRSRPIKQKLVFLF

SEQ ID NO: 266495 - protein, 64 aa, Glycine max
  Clone ID: PAT_MRT3847_82666C.1.pep
VYFNIKIALITNEGVFSIFSYHPNSSHICDTFHFSKTFLLSRYITNHRIPCLDMKKKCSNTCYF

SEQ ID NO: 266496 - protein, 134 aa, Glycine max
  unsure (1)..(134): unsure at all Xaa locations
  Clone ID: PAT_MRT3847_82667C.1.pep
QFFFFKNFFLKRGFSNDERALKSGIQRLINFPIHFSLSLFIERTRLTQPKPXVAHKYATYIEWPNPRNVXIPITKVLISXIKSYTXFLHAINHVTVAIPKSSPTTTMLRLYKRQPSEMHFLIKRLLMNELSDTD

SEQ ID NO: 266497 - protein, 38 aa, Glycine max
  Clone ID: PAT_MRT3847_82668C.1.pep
HPGMLLELRVEWLPDYSSNWLTNQNPFFSILSLVLSDT

SEQ ID NO: 266498 - protein, 99 aa, Glycine max
  unsure (1)..(99): unsure at all Xaa locations
  Clone ID: PAT_MRT3847_82669C.1.pep
RAKAPTEGNFRARVDLQRTHRIKGRIKMVDTGGIPENTRLSLACAMNRSPRGRASSDIXYTILFYHCELWNHACTKAMPMPLKPNPASEPWSLEFLKRT

SEQ ID NO: 266499 - protein, 41 aa, Glycine max
  Clone ID: PAT_MRT3847_8266C.1.pep
KVSYHHMIYLLLLNRYSLELSIRMLQFSLCYSCRVDRRYGD

SEQ ID NO: 266500 - protein, 89 aa, Glycine max
  unsure (1)..(89): unsure at all Xaa locations
  Clone ID: PAT_MRT3847_82670C.1.pep
MMTHRADARADAGERKRKAPEPHRHQNRXXSKGTTEGEREREETRQRRRRRRRGRNRRRKRNGAATKTPNADARDNTEGEHKRRTRKQT

SEQ ID NO: 266501 - protein, 90 aa, Glycine max
  Clone ID: PAT_MRT3847_82671C.1.pep
TVSGTCSYHGRRARMHGIVIGPIEKHVEYVEEAEQALLTVAYPWSRYVFFVKDVEAGFMDDRFQWPRAEAEDVSNRLKRGSKVVLPFSRA

SEQ ID NO: 266502 - protein, 67 aa, Glycine max
  Clone ID: PAT_MRT3847_82672C.1.pep
REREREREREREREREGTSLPPQPVPQIPIATPPLSPPIPSLSLAVQASRQCQWRYPRPEVTPPNLF

SEQ ID NO: 266503 - protein, 54 aa, Glycine max
  Clone ID: PAT_MRT3847_82673C.1.pep
MAQETFLFTSESVNEGHPDKLCDQISDALLDACLEQGPDSKVACETCTMTNMVM

SEQ ID NO: 266504 - protein, 262 aa, Glycine max
  unsure (1)..(262): unsure at all Xaa locations
  Clone ID: PAT_MRT3847_82674C.1.pep
MATTTANKDETISTIASSSSPVFISTETLCTILTHHTLMNHFQSTLPKASTILQTPIRQHHSLSPSSSLLLMPSWSSSSSLPYIGVKLVTHFPQNSSLNLPGVQGSYVLFSSTTGQTLASMDSTELTLYRTSCVSGLASKYLARHDSEVLVMVGAGSLAPHLIKAHLSAIPSLRKVIIWNRTVEKATTLANKLSQSGEFGGVRFEGCGCLDEVVGFGDIVSCATNSETPLVKGEKLKGXAHLDLVXSXFKNSMMECDDEAIR

SEQ ID NO: 266505 - protein, 122 aa, Glycine max
  Clone ID: PAT_MRT3847_82675C.1.pep
PFLMECCERTENDKKGGHLAERIADGRLILRESAQCADEDEKEFQNITKHRYFNTNNLWIRLDKLQEELKQQGGVIRLPMIKNSKTVDPKDSSSTPVFQLETAMGAAIECFDGAGAVCVPRT

SEQ ID NO: 266506 - protein, 83 aa, Glycine max
  Clone ID: PAT_MRT3847_82676C.1.pep
NFSPPQKRFKKIFLTKMKGTLKNPKIGSPQKLSPKSLPGVFFNPFFFNKNWAWENFETKPPPVGVLFQTNGFWEKKGSPPFFL

SEQ ID NO: 266507 - protein, 106 aa, Glycine max
  unsure (1)..(106): unsure at all Xaa locations
  Clone ID: PAT_MRT3847_82677C.1.pep
LVFEVSKMTXSYIKCTVFFHSIWKLADDTINXAFPHKLVQFGEIQEKVXLKFSQENFLRLSTRCARTTLLVMGPILYAMGMIVRSTIPGDLXGVKXTTINNMCALG

SEQ ID NO: 266508 - protein, 84 aa, Glycine max
  unsure (1)..(84): unsure at all Xaa locations
  Clone ID: PAT_MRT3847_82678C.1.pep
PLGLFFWLALWSHCCVSLSSFASGILVSSALFVFSVFGFCLCPSILWICPCVVFPANSFQCPPFSFXFXRCWTRVLSTQGFRAG

SEQ ID NO: 266509 - protein, 65 aa, Glycine max
  Clone ID: PAT_MRT3847_82679C.1.pep
SASFLAFPPGSGGAISMTLNCLRIVPKGCSWFPAGGDSEFSSGLISFGRAVSKTRQKWTFPLLRG

SEQ ID NO: 266510 - protein, 95 aa, Glycine max
  Clone ID: PAT_MRT3847_8267C.1.pep
HEAIATSLLSKRWKPLWHSVPAFDLDDEPFLQNDKPYSSFLTFAYVAILSRNPSHSITHFHLNSSVCRNQNDLLHFNIWLIAIVVQLDVKHLQIE

SEQ ID NO: 266511 - protein, 86 aa, Glycine max
  Clone ID: PAT_MRT3847_82680C.1.pep
FFFLILFVSHGKFTERTRICFRDALYRLARNTEEQPVMLDQNEDLNIQKAIPHTDHNETMRSQDKKPMESETNNIDRIIANLMFKS

SEQ ID NO: 266512 - protein, 40 aa, Glycine max
  Clone ID: PAT_MRT3847_82681C.1.pep
GVHCSIKALPLRLYLSPCIIAFPGLVGPPRAPLVQTQTRL

SEQ ID NO: 266513 - protein, 78 aa, Glycine max
  Clone ID: PAT_MRT3847_82682C.1.pep
MDPDVIESEAKLSADDKSSETVISRINRINSGKGASRKFPSMTTWLIGWEQEDTYAALAVFCAAVSVVVAYNCYKQLR

SEQ ID NO: 266514 - protein, 50 aa, Glycine max
  unsure (1)..(50): unsure at all Xaa locations
  Clone ID: PAT_MRT3847_82683C.1.pep
LKKFPYHFQKHLYFSFXXLTNPFSSFPFNSKFFNNNLSSHNIILYKTKQL

SEQ ID NO: 266515 - protein, 260 aa, Glycine max
  Clone ID: PAT_MRT3847_82684C.1.pep
MALLVMVKKKRGGGRKGLEEEEEDGFVPVLNLKVFSYKELQLATRGFSEKVGHGGFGTVFQGELSDASVVAVKRLERPGGGEKEFRAEVSTIGNIQHVNLVRLRGFCSENSHRLLVYEYMQNGALNVYLRKEGPCLSWDVRFRVAVGTAKGIAYLHEECRCCIIHCDIKPENILLDGDFTAKVSDFGLAKLIGRDFSRVLVTMRGTWGYVAPEWISGVAITTKADVYSYGMTLLELIGGRRNVEAPLSAGGGGGGGESGD

SEQ ID NO: 266516 - protein, 57 aa, Glycine max
  Clone ID: PAT_MRT3847_82685C.1.pep
KFFYFDFIKMVFMFFLSDFLWFFWMLRCYFFLKLIFLILFRVLWDNLRGYVFDQMSI

SEQ ID NO: 266517 - protein, 96 aa, Glycine max
  Clone ID: PAT_MRT3847_82687C.1.pep
KFNSQYACILSFGLELYNSLPQAKREISFNQFKSEQTLSPTKVSPHFYNIRKLHFLIQFAIMVPLQGLSIQLAKITFIFLSSNYQVSLLIHLASPL

SEQ ID NO: 266518 - protein, 86 aa, Glycine max
  Clone ID: PAT_MRT3847_82688C.1.pep
EAWIFSRIVESIWWQSLTPHMQLADAKITHKDSAKNYTNMSSSCDQEWGNLSLDIWKNAFREACERLCPIRAGGHECGCLSVLPKL

SEQ ID NO: 266519 - protein, 173 aa, Glycine max
  unsure (1)..(173): unsure at all Xaa locations
  Clone ID: PAT_MRT3847_82689C.1.pep
PLCRSTVAASESDLAMVFRSSSVAGSDSFRLEIGNISSRREGDITAVAGETRGRSYSVGAFEYLIDEEAEVEVEVAFGLADRRIVSGEKNDGAPVVAPADSXAGEVGRGGGSRNGNGWLKDYVDRLSNTVSFRSSGSFFTGSSRRSDVVLGGDYDVEASRFGDEIGEMFRWLS

SEQ ID NO: 266520 - protein, 52 aa, Glycine max
  Clone ID: PAT_MRT3847_8268C.1.pep
LREHNYKLQAFGFLFYFVAFLPSHLLILLLPRWLTHWLTGSVGGLIYSAVTS

SEQ ID NO: 266521 - protein, 61 aa, Glycine max
  Clone ID: PAT_MRT3847_82690C.1.pep
YEYHIAEKSTLNTCHSKTKGHCGRCRPRQIEGASLGLGRAINTTMCIRATPVWWPRRLRMA

SEQ ID NO: 266522 - protein, 82 aa, Glycine max
  Clone ID: PAT_MRT3847_82691C.1.pep
HSSQPVFPLFYQDHIQPIVVMCLLFMCPHHHIVVGINEAAASFSTSFLCCSGLLINVFAPSGMMFSLKFSFSKQEIEHCKIS

SEQ ID NO: 266523 - protein, 74 aa, Glycine max
  unsure (1)..(74): unsure at all Xaa locations
  Clone ID: PAT_MRT3847_82692C.1.pep
QQGKGPLNSCSNCKSKCSVVHELPHPIAHVRRSKVQPLLPELECNQLELIPFXGSEAEPSPIPLLSCEILCXCS

SEQ ID NO: 266524 - protein, 465 aa, Glycine max
  Clone ID: PAT_MRT3847_82693C.1.pep
MALNLPSPAQVKPLFFSSNNSTKLPGSFSLKRKDSDTTVERRVYCSAAAQSPPPAWPGTAIPEPSDFKTWDGQKPISVLGSTGSIGTQTLSIVAEFPERFKVVSLAAGSNITLLADQIKTFKPEVVGLRNESLIDELKEALADVDHKPEIIPGEQGVIEAARHPDATTVVTGIVGCAGLKPTVAAIEAGKDIALANKETMIAGAPFVLPLAHKHNIKILPADSEHSAIFQSIQGLPKGALRKILLTGSGGAFREWPAEKMKDIKLADALKHPIWSLGRKITIDSATLFNKGLEVIEAHYLFGASYDDIEIVIHPQSIIHSLVETQDSSVIAQLGIPDMRLPLLYTLSWPERIYCSEVTWPRLDLSKYGSLTFYAPDDKKFPSVNLCYAAGRAGGTMTGVLSAANEKAVEMFVEEKISYLDIFKVVELTCQEHQKELVASPSLEEIIHYDQWARQYAASLQKASSV

SEQ ID NO: 266525 - protein, 85 aa, Glycine max
  Clone ID: PAT_MRT3847_82694C.1.pep
ENIEIWGDVDLKLTKSIVHLLLYGVDHENLHVRWYTIYSSKVGHEVTDLNQKSKYSSDIKQYILHSDFTKAVKISRMKGFAFEVM

SEQ ID NO: 266526 - protein, 98 aa, Glycine max
  Clone ID: PAT_MRT3847_82695C.1.pep
KHLLIQLKDIKLADALKHPIWSLGRKITIDSATLFNKGLEVIEAHYLFGASYNNLNIIVIHPQSIIHSLVETQDSSVIAQLGIPDMRLPLLYTLSWPE

SEQ ID NO: 266527 - protein, 321 aa, Glycine max
  unsure (1)..(321): unsure at all Xaa locations
  Clone ID: PAT_MRT3847_82696C.1.pep
ETDSSSQASMSRRGSVNQGSLEFNGKDDKLDSRSHNQLARFSSMESLKQVDSRSSKKNKKLEFNSSRVSPAPNGGSQWGAMNISKSFNPVFGSSKKFFXSASVPGSRIVSRATSPISRRPSPPRSTTPTPTLGGLSSPKIVVDDAKRINDNLSQEVVKLRSQVENLTRKAQLQEVELERTTKQLKEAIAIASEETAKCKAAKEVIKSLTAQWKDMAERLPVGASRNARSPPSLASFGLNPGSNDLTNASFDRLNIQATSPESDLNGSTNQLLSNGSSTITNRSAGHIKHSQSDATSRNGSKTKDNETEWVEQDEPGVYITL

SEQ ID NO: 266528 - protein, 81 aa, Glycine max
  Clone ID: PAT_MRT3847_82697C.1.pep
VLLTSLSSRASWFLPSSSHSSCFFLECFSSSRPFFVVGCSLCPALFPPVFLAPCLPSSPPQESLFLFLFRFLRFFPRSVAL

SEQ ID NO: 266529 - protein, 55 aa, Glycine max
  Clone ID: PAT_MRT3847_82698C.1.pep
FNFSIQIAYSQRGNLHERIKGGQQEKTQLNLSKGKLLVPYNFTNAGNFICLTFVL

SEQ ID NO: 266530 - protein, 96 aa, Glycine max
  Clone ID: PAT_MRT3847_82699C.1.pep
SKFFQPNYVGSCTKIAILVEADYCPALSVIMLCQKTNRITGRKRNFTRKIMCETGGDGAKTWEVVGKFSPNQSSCRKSMLYNSDCDLSCVVCSVKA

SEQ ID NO: 266531 - protein, 52 aa, Glycine max
  unsure (1)..(52): unsure at all Xaa locations
  Clone ID: PAT_MRT3847_8269C.1.pep
VKMVFVCVPLAXSSWAAYPFMSFAVTPRRKALALSPVFLREGSVGFLTIALD

SEQ ID NO: 266532 - protein, 83 aa, Glycine max
  Clone ID: PAT_MRT3847_826C.1.pep
LCSTAFNYNKDHFFFLVLENRQSHREIKGLLKFSAFWRKRHYSHTHSPPRSIFLRRKLKKKMETMLPPNQAEEAIVTTSLNET

SEQ ID NO: 266533 - protein, 84 aa, Glycine max
  unsure (1)..(84): unsure at all Xaa locations
  Clone ID: PAT_MRT3847_82700C.1.pep
SLPFYLSLSLRNNGQIFHKTVTGKNITLXVHSLDTIDNVNATIQDKERIPSDQHRVIFAGKQLENGRTLADYNIQKESTLYLVL

SEQ ID NO: 266534 - protein, 53 aa, Glycine max
  unsure (1)..(53): unsure at all Xaa locations
  Clone ID: PAT_MRT3847_82701C.1.pep
LKIKNTQFCSTNHISTLPTIIFKKHFIFQTSIPTSXSKHNPNNTTSITXYIQS

SEQ ID NO: 266535 - protein, 50 aa, Glycine max
  Clone ID: PAT_MRT3847_82702C.1.pep
QDQGEFHYTIIKTKTNSMIMVGDPTSASDMTQLKYISGGHPSPYKLIFKG

SEQ ID NO: 266536 - protein, 96 aa, Glycine max
  Clone ID: PAT_MRT3847_82703C.1.pep
FSAQHTHSVKHTPTLFLHGDSFPNYILGQRVVVHLRGLERGLRLGRPTYTNEAGPSKLGQGPLDCDRSRALQPTFSPPRRRSSSRRISFRRPRRST

SEQ ID NO: 266537 - protein, 74 aa, Glycine max
  unsure (1)..(74): unsure at all Xaa locations
  Clone ID: PAT_MRT3847_82704C.1.pep
VLXXQRRRFKGFLPPPPTQRPKNSFTKKPGARGTLLLLGRGQLKLQPLRGFNPKPLYRSELYLTFYLTKGFTIP

SEQ ID NO: 266538 - protein, 99 aa, Glycine max
  Clone ID: PAT_MRT3847_82705C.1.pep
SPLGKNFGAFSPKKKRETYFGKFFLVKNGVRKFGNFKVFSFFPMGSPFFVFGGFLGPKNNGFFVGFKGKNGVLFKTVFLFPKNPSKWGHFLGAFKGVLF

SEQ ID NO: 266539 - protein, 50 aa, Glycine max
  Clone ID: PAT_MRT3847_82706C.1.pep
HIKLRRDSPTIITKRRKSESPLNTMSYTLPWDLSDYITLCHRSHQLWPMD

SEQ ID NO: 266540 - protein, 72 aa, Glycine max
  Clone ID: PAT_MRT3847_82707C.1.pep
PRVRILSFCLLYNFFHTLIKLYTNVVLTLHTHNTTINNLTSSKMSSTIHTKTCTVTAIAGLVEASKDHAICM

SEQ ID NO: 266541 - protein, 124 aa, Glycine max
  Clone ID: PAT_MRT3847_82708C.1.pep
LHLSDQRMILRSQVRTTSPDHRSCNYSSVHHQPLLASHAQPDVLDVHTLASNITPSLQSPRSIPHRHSVLPAICAAYISCCKIYPHYPDDAAAKGIRHPDASSLTCHVYPHYTQKYTLWQTNIP

SEQ ID NO: 266542 - protein, 73 aa, Glycine max
  Clone ID: PAT_MRT3847_82709C.1.pep
QRFTFASAFLILNLVLFCWLVARTEGAGTCDKADCKSGMLVQLYILDAVNWLRTQFCLICSHSVAVNFDFVSQ

SEQ ID NO: 266543 - protein, 63 aa, Glycine max
  Clone ID: PAT_MRT3847_8270C.1.pep
HEGISSWGLVLPLLPPSENKPAILLPPLLLIPTFENPYQEQYYLDRQPANQTTPLTINLRNSK

SEQ ID NO: 266544 - protein, 45 aa, Glycine max
  Clone ID: PAT_MRT3847_82710C.1.pep
IEVMNTLGNEIFGECQCYTTLQWLLTYTIFPPYIYIFSTYTLYGG

SEQ ID NO: 266545 - protein, 126 aa, Glycine max
  unsure (1)..(126): unsure at all Xaa locations
  Clone ID: PAT_MRT3847_82711C.1.pep
LEPNRLEERCITLAPKRTPPPIENKPLGHRCLRRENQHIGNEDLIVFRRKLDIMKRHEFVWEPYTTNVMSLLPPICLVGDVTWCAVVPLICFQVIEXHQPDRVLRQFGMQQPISLCHSQPSNIHGI

SEQ ID NO: 266546 - protein, 98 aa, Glycine max
  Clone ID: PAT_MRT3847_82712C.1.pep
MIKSILHKVILMRVLKNDFMKHAQDEEAADDQEETGWKYIHGDVFRITKHKCFFSAPLGSGTQLFTLTIFIFMLALVGAFYPYDRGALFTALAVIYAL

SEQ ID NO: 266547 - protein, 98 aa, Glycine max
  Clone ID: PAT_MRT3847_82713C.1.pep
SKAAVKYILKGGRGRQEELETCVLCLGTVLTSNSTLHVNYQLRLLLTNSHGNSFFSSRYKWPFGFVFTAKLMEYTFLNCYSMMLAVQRAKHSPTKHNR

SEQ ID NO: 266548 - protein, 184 aa, Glycine max
  unsure (1)..(184): unsure at all Xaa locations
  Clone ID: PAT_MRT3847_82714C.1.pep
GSSKENDSEDWLDIVATVAWQAANFVRPDTSKGGSMDPGDYVKVKCVASGSPSESTLVKGVVCTKNIKHKRMTSQYRKPRLLLLGGALEYQKVPNQLASFDTLLQQENDHLKMIISKIEALRPNVLLVEKSVASCAQEYLLAKEIFLVLKCXRPLLERIARCTGALGTPXVDWLSKARLXHCEL

SEQ ID NO: 266549 - protein, 63 aa, Glycine max
  Clone ID: PAT_MRT3847_82715C.1.pep
FWHKIFICFCAYVFLKGNGLTSNNEDSTNNQALRGLTSIHYKLYSPGGKLIAYPPHVHNGLEE

SEQ ID NO: 266550 - protein, 115 aa, Glycine max
  Clone ID: PAT_MRT3847_82716C.1.pep
PLSNPLKGAQGLKPNPVKNKGPQGFCQIFPPKMWAEISKQGFPSTGGGKIKILEKNPLPSVFINKRGGGFGPKNPLGGKGNRQQPQVAKVNKRVFNLTKKMGKSLLVVFSPKKKF

SEQ ID NO: 266551 - protein, 593 aa, Glycine max
  Clone ID: PAT_MRT3847_82717C.1.pep
MDALSKKNENSQKKRDGVVLSCLTTDSSSETSFCGSSSSVSAEEAKTKGSSSPAPLGWPILKATISKRSNSDEKENKHKSHLEDKKFTSIALKLSEVDMMKERFAKLLLGEDMSGSGKGVCTALAISNAITNLCATVFGQLWRLEPLPSEKKEMWQREMEWLVSVSDYIVELMPSWQTYPDGSKLEVMTCRPRADIFTNLPALRKLDNMLLGILDSFTATEFWYVDQGIVAPDADGSASFRKTIQRQEEKWWLPVPRVPPAGLGEDSRKQLNHSRECANQILKAAMAINSIALAEMEVPESYLEVLPKNGRTCLGDFVYRYITSDQFSPECLLDCLDISSEHVALEIANRVEAAIYVWRRRAHSRSSPNPNRSTTKSSWEIVKDFMVDGDKRELLADRAENILVSLKQRFPGLSQTTLDTSKIQCNKDVGKSVLESYSRVLESMAFNIVARIDDLLYVDDLTKHSERFALVPTTTVNVVSQQKKVTRPLSVSVSGTTPHKASVGTPSFSPAAVPLISPARGERTPFLHNININNNNNIKPHRRGFGVRRVLSNYLGVETKTTKICSNSTEVNCSNPSSKKTEQQHQKVKNRTK

SEQ ID NO: 266552 - protein, 151 aa, Glycine max
  unsure (1)..(151): unsure at all Xaa locations
  Clone ID: PAT_MRT3847_82718C.1.pep
SRVLPPFRLDERDTLNHYARCPHTLYSQSHECRDFTLDDLFLIQGIHGNITDLHLTYLRRYDTYXGDNMSXGQIIPYWDTENVTLEVMSKFMIKYEPSALRVKVLVSIGNNYXQLPFIIGSHSNSEAWVCEVTADLNSIMKTYNLYGIDVS

SEQ ID NO: 266553 - protein, 52 aa, Glycine max
  Clone ID: PAT_MRT3847_82719C.1.pep
YTTERHPKKSKLTTAGGTNTSNVASSATADYQTNATPLRSEYTICSNNLVNT

SEQ ID NO: 266554 - protein, 536 aa, Glycine max
  Clone ID: PAT_MRT3847_8271C.1.pep
VNYYMYHGGTNSDRPCSVFSTTRYYDEAPIDEYGVTTEPRWSLLMDVHTALLLYKRAILGGVTSVQKLNHFHEVRTFERVGTNMCAAFITNNHTMEPATINFRGTNYFLPPHSISILPDCKTVVFNTQQIVSQHNSRNYERSPAANNFHWEMFNEAIPTAKKMPINLPVPAELYSLLKDTTDYAWYTTSFELSQEDMSMKPGVLPVLRVMSLGHSMVAFVNGDIVGTAHGTHEEKSFEFQTPVLLRVGTNYISLLSSTVGLPDSGAYMEHRYAGPKSIFGSGLNRGTLDLTRNGWGHRVGLKGEGKKVFSEEGSTSVKWKPLGAVPRALSWYRTRFGTPEGTGPVAIRMSGMAKGMVWVNGNNIGRYWMSYLSPLGKPTQSEYHIPRSFLNPQDNLLVIFEEEARVPAQVEILNVNRDTICSVVGERDPANVNSWVSRRGNFHPVVKSVGAAASMACATGKRIVAVEFASFGNPSGYCGDFAMGSCNAAASKQIVERECLGQEACTLALDRAVFNNNGVDACPDLVKQLAVQVRCA

SEQ ID NO: 266555 - protein, 59 aa, Glycine max
  Clone ID: PAT_MRT3847_82720C.1.pep
TILQLPVCIDQVVVTYIPQIQHTIHKLFASPLQVESSVHNHNTVSKMLYSKVYPPFNVE

SEQ ID NO: 266556 - protein, 53 aa, Glycine max
  Clone ID: PAT_MRT3847_82721C.1.pep
LRRCNTRTVPPMKTERSYSLYTERMNVEKQTYTNHDLSIHPPRYATHSACNPL

SEQ ID NO: 266557 - protein, 67 aa, Glycine max
  Clone ID: PAT_MRT3847_82722C.1.pep
FGSSNRVVMSRNIRPAVAKNKIKNISYQAKVKMKKKEKETSEEDFLEIGNGSQTKHEFKASRVGFLV

SEQ ID NO: 266558 - protein, 152 aa, Glycine max
  Clone ID: PAT_MRT3847_82723C.1.pep
VKKRVWEEKRLKREKMEDADAYAVGMNPWEQHSGVIKLPRYDYNSPSSLLFSSLLRNSHSDFLITCTISSVNSLTSLHSHSSSSNLPFHFFNSSFHSATKEAISILHKFVAYDSSNNPKEEGTSSKKRKLCTQDTADECFDHKDTESASANS

SEQ ID NO: 266559 - protein, 66 aa, Glycine max
  Clone ID: PAT_MRT3847_82724C.1.pep
VLPWPQLIFVKKRFPVPFMLPKELCEFTNMSKLEMPVSSIFSKFIFNKVHHTPLSGFFINSNKNMG

SEQ ID NO: 266560 - protein, 208 aa, Glycine max
  unsure (1)..(208): unsure at all Xaa locations
  Clone ID: PAT_MRT3847_82725C.1.pep
MALRPLVMLNPKLFVLTHSQAMEVPSEAPSTGIAAETISKNALKRELKNKQKEEERKRKEEDKAKKAAEMQKAKDNKSAPADEDDMDPTQYLENRLKYLAVQKAEGNNPYPHKFFVTMSLDQYIKEYGGLSNGQHLEDVSVSMAGRIMHKRTSGSKLVFYDLHSGGFKVQVMADASKSDLDEAEFSKFHSNVKRGDISXGSTGFPGKS

SEQ ID NO: 266561 - protein, 138 aa, Glycine max
  Clone ID: PAT_MRT3847_82726C.1.pep
MEVPSEAPSTGIAAETISKNALKRELKNKQKEEERKRKEEDKAKKAAEMHKAKDNKSAPADEDDMDPTQYLENRLKYLAVHKAEGNNPYPHKFFVTMSLDQYIKEYGGLSYGQHLEDVSVSMAGRIMHKRTYGSKTRF

SEQ ID NO: 266562 - protein, 379 aa, Glycine max
  Clone ID: PAT_MRT3847_82727C.1.pep
MSLQGSDRRDAPSSGSAGGNGAVAAAAASLRLRLNPNKEHKPDGYEDMQLDFSPNIFSSLERYLPPSMLNVPRDEKANFMREILLKYLPLGERNRAQKHREYRERIIANYQPLHRELYSVDPATFFVPTFLRAINDNTEQSIRSIVSEPSPGIFIFDIFQTHFCELLLSEIENFEKWVNETKFRIMRPNTMNKFGAVLDDFGLETMLDKLMEGFIRPLSRVFFAEVGGSTLDSHHGFVAEYGKDRDVDLGFHVDDSQVTLNVCLGKQFSGGELFFRGIRCEKHVNTGTHSEEIFDYSHVLGRAVLHRGRHRHGARATTSGNRVNLLLWCRSSVFREMKRYQKDFSNWCGECNREKKERQRSTVAATKLDLFRRQGESTA

SEQ ID NO: 266563 - protein, 55 aa, Glycine max
  Clone ID: PAT_MRT3847_82728C.1.pep
NFVSLSNATGSEAKTQMESIRKGVVNHNLRTVGCLWLSGISGSIAYNWSRPNMKT

SEQ ID NO: 266564 - protein, 108 aa, Glycine max
  unsure (1)..(108): unsure at all Xaa locations
  Clone ID: PAT_MRT3847_82729C.1.pep
CVGPLFLRWCPLSLWCLWFCGGVLSCPLFSGFRLPLAFSPLFRGRVVCVVLGGLRLLLPFWLLFCGPPLVGWLLRGLFFLLFPACRGLCVPFYLXGVDGGLLWGSAPR

SEQ ID NO: 266565 - protein, 69 aa, Glycine max
  Clone ID: PAT_MRT3847_8272C.1.pep
RCPFFPYAYYQTKWQPKKAVEFPKANTRWMVRDSSYRGSRGALHTKTKKKTPGGGGPWKNLMRPKNAGG

SEQ ID NO: 266566 - protein, 188 aa, Glycine max
  Clone ID: PAT_MRT3847_82730C.1.pep
HASAHASATMQYSFSGFLTLQQMVDSFIILIAQQSDFNFNAENLELPLPGFYDNNFSLKNPWTQFNPARIRIAPFPTREYTDDQFQSIIKRVMGILYLLGFLYPISRLISYSVYEKEQKIKEGLYMMGLNDGIFHLSWFITYALQFAISSGILTACTMDNLFKYSDKTLVFAYCFDFGLNAIMLSFFI

SEQ ID NO: 266567 - protein, 77 aa, Glycine max
  Clone ID: PAT_MRT3847_82731C.1.pep
YIRHLGHIRSKISKFQKTSNIVKGLFLHSPILNRKQALKSDVINFFHHATISMCISVLKRRHFSICFTSIFINAQSK

SEQ ID NO: 266568 - protein, 265 aa, Glycine max
  unsure (1)..(265): unsure at all Xaa locations
  Clone ID: PAT_MRT3847_82732C.1.pep
FFSVLDASVLGCFSPTGCGLFLNLKDLHGQQLWRLKNEFVIGHSATSGGILDRAIEAEDRKHGDFLRLDHVEGYLELSAKTKTYFATAVNLWDADFYIKVDDDVHVNIATLGQTLLRHRSKPRVYIGCMKSGPVLSQKGVRYHEPXYWKFGEAGNKYFRHATGQLYAISKDLATYISNNKHYGCEKTTEGVSLGSWFIGLDVNHIDDRRLCCGTPPDCEWKAQAGNVCVASFDWTCSGICRSAERIKEVHKRCGEGEKALWNASF

SEQ ID NO: 266569 - protein, 77 aa, Glycine max
  Clone ID: PAT_MRT3847_82733C.1.pep
SIKVTLKRETKKMVSSARVYEKADTISTPKEEDLLHRSTKKIEELLKAMLKDLPYLLWISYWNRSEKEKSQWSWKKT

SEQ ID NO: 266570 - protein, 60 aa, Glycine max
  Clone ID: PAT_MRT3847_82734C.1.pep
PPQLFQRTFKKSIFNPMILKRFLKERLFIILEELFFSPSIRRVFFRKKKTPFLLPWLLRF

SEQ ID NO: 266571 - protein, 256 aa, Glycine max
  Clone ID: PAT_MRT3847_82735C.1.pep
LSSDEESEEDKELDQGHKVKLKNVSWAMTTLALKRTTGLSKELDPDASSITIDVSGKFGSLCKGVDENDTNCWTSPSGEGFMIRGKNYLKDNSKVIGGDPLLKLIAVDWLKVDKSIDRIALHHRSLVQSEAGKNLPFVFVLNLQVPAKPNYSLVLYYASDRPVNKDSLLAKFLDGNDMFRDSRFKLIPSIVEGYWMVKRAVGTKACLLGKAVTCKYFKQDNFFEIDVDIGSSSVARSVIGLVLGYVTSLVVDLAIL

SEQ ID NO: 266572 - protein, 151 aa, Glycine max
  unsure (1)..(151): unsure at all Xaa locations
  Clone ID: PAT_MRT3847_82736C.1.pep
LKSMAGFPTTKTNNDITCIVSNRGKLQCMHVWPPLGKKKAETLCYLTDLDDAQLANEVQYLLRKGWIPCWELESEHGCMYREHNMSPGYYYGLYXTMWKLTMLGCTDAYHVLNELQEANTAYPSGYIRIIGFDSVRQLLCISYIIYKRSRF

SEQ ID NO: 266573 - protein, 72 aa, Glycine max
  Clone ID: PAT_MRT3847_82737C.1.pep
KESSLRVEFEIMNQQMDELKEKLEKVEADKAELEIALMKSEGCMEESQLQLREAQEKLEELQREVENAYKSK

SEQ ID NO: 266574 - protein, 59 aa, Glycine max
  Clone ID: PAT_MRT3847_82738C.1.pep
EGALSVLIVLQALITVCRGRALNESQGTLHGHSQPSVFFCIKDRESGRLTGLKWQWTLK

SEQ ID NO: 266575 - protein, 48 aa, Glycine max
  Clone ID: PAT_MRT3847_82739C.1.pep
EKTRETWELWMNTNGNNIQTEGEESKGASQWGLEGEFPGYYKEPWEIN

SEQ ID NO: 266576 - protein, 50 aa, Glycine max
  Clone ID: PAT_MRT3847_8273C.1.pep
VSYFTWGLVDFRSESVQCSRLLVELDAFHSLLHYLILSKCLIILIPLNFT

SEQ ID NO: 266577 - protein, 111 aa, Glycine max
  Clone ID: PAT_MRT3847_82740C.1.pep
GGAPFFFWCFLKSSNSRTKYQSLTHAFYGLNTLNTSKCQTRIVLSHETKKKSRHREYYEANTQTLTGNWLKIAHEGWEDAGGLITRDAQLHTWALPWQYKSVRDVTYITRP

SEQ ID NO: 266578 - protein, 471 aa, Glycine max
  unsure (1)..(471): unsure at all Xaa locations
  Clone ID: PAT_MRT3847_82741C.1.pep
MESQSQRDRRADALGDLRVLPDEILCSILERLTPRDAARVSCVSSVMYILCNEDPLWMSLCLKGASGFLQYKGSWKKTALHNENLLDKYKEYSQGPLHFDGFNSLFLYRRLYRCHTTLDAFYADTGNVKRIKDIPLKDFYNEYDAKKPVMLTGLADTWPARHKWTTDQLLLNYGDVAFKISQRSSRKISMKLKDYVSYMKVQHDEDPLYIFDEKFGEAVPSLLKDYCVPHLFQEDFFDILDTEKRPSYRWLIIGPERSGASWHVDPALTSAWNTLLCGRKRWALYPPGKVPLGVTVHVNEEDGDVNVETPSSLQWWLDFYPLLADEDKPIECTQLPGETIYVPSGWWHCVLNLETTIAVTQNFVNSNNFEYVCLDMAPGYCHKGVCRVGLLALDEVSYENVRQNVSCNETDSSYSALSRKEKRAKTQKDVDDLYYKRAMDGVSRNYNLWKDGFSYDIXFLSMFLDRDRDHT

SEQ ID NO: 266579 - protein, 257 aa, Glycine max
  unsure (1)..(257): unsure at all Xaa locations
  Clone ID: PAT_MRT3847_82742C.1.pep
LTRDAQSPDESKTNEKLYTVCDVALCVINSKSALCNADSPKDPVLPMKFFTQPEKDFCNDKSYISEETRVLLLTGKPKPTGVLGTVNKPLSATGRKPYVRSAGTETGSNINANSELSPSAGSRSREQSSEASETGVSENEENPVRIISVTPVKNIDTVKNKEINSDQSTQGNISSDRGKKRIVTXAAGAENIQKPDEKVDESGPPAPSKPRRGRRPKSESQGNATKNDDLNKPVSKGRKRAAGSQEESGGRECQSAQ

SEQ ID NO: 266580 - protein, 128 aa, Glycine max
  unsure (1)..(128): unsure at all Xaa locations
  Clone ID: PAT_MRT3847_82743C.1.pep
GPNRVMFLGPFSGEPSCYLTGEFPIDYRWDTAGLSADAXALVRNLELEVIHSKWAMLRALGSVLHXLLYSNGVKNVESVWYTAGSRIYNHGELDYLGDLSLVHALSILVIWATQDILMGAADDYLIAG

SEQ ID NO: 266581 - protein, 51 aa, Glycine max
  Clone ID: PAT_MRT3847_82744C.1.pep
WLQVGSRSFIPFNNCTTLGDCFCRLSDPLLDIYYWNQGIILHSCISRMPPP

SEQ ID NO: 266582 - protein, 136 aa, Glycine max
  unsure (1)..(136): unsure at all Xaa locations
  Clone ID: PAT_MRT3847_82745C.1.pep
HTKNSFNGNFPMDSWXPIFXMCFYPVSQFPSXAVVVNXSSXSGXGGLPPTAXFXXAVTNRPPSIQPKGFAQPLEKGKKIEFXXKIELFPLAGMDDPFGVKNEILPPAPTXPMRTRLLEDCKSLRYLVDECPFASVG

SEQ ID NO: 266583 - protein, 58 aa, Glycine max
  unsure (1)..(58): unsure at all Xaa locations
  Clone ID: PAT_MRT3847_82746C.1.pep
EXXXXXARVRXLGNSXSSXTPSVXSXSXXTGVXFLSXSXXXQXXXKIKXSHXXXXXXK

SEQ ID NO: 266584 - protein, 142 aa, Glycine max
  Clone ID: PAT_MRT3847_82747C.1.pep
MFHLAAIVALAALALPLASSDKFRPCLEGYAQYGKYCYKAFTNPDKSLPWSDANKMCKTEGAELASVHSETEREFVNMLVLREANKMEFNCKQPGRAFFWFGLKLKWSEKKLEDASWTDGKPVDYLSPTEWGAYKRSLTMDN

SEQ ID NO: 266585 - protein, 631 aa, Glycine max
  unsure (1)..(631): unsure at all Xaa locations
  Clone ID: PAT_MRT3847_82748C.1.pep
MADESQYSANPDSTPTPPSLKRKYNDDRPTGFSDGPDPAAPPPPSYNSVPPPSSAASDFELAKQRAQEVAARLLSGAAPLDPTKRPKHDNNGSSFDSIDVKGPYSVPSISPSAVSYSYQVGGASKKIDIPNGRVGVIIGKGGETIKYLQLQSGAKIQVTRDMDADPNSATRTVELMGSPDAIATAEKLINEVLAEAETGGSGIXLLDSKIPNNKVGLVIGRARETIKNMQASTGARIQVIPLHLPPGDTSTERTLKIEGTPEQIESAKQMVNQVXSGGYSQQGYQARPPTSWAHPXSYATSWGPPAAPMQQSGYGYGKSCSKQHPPQYNMPQQPYAGYPPQSSGGYSPTNWDQSTAPQQQSAHAGYDYYSQQQQQQNPAPPSDGTAYNYSQPPSSGYNQPGQGYAQDGYGGYHAPPQSGYGQPPSYDQQQGYSSAASYGSNPAPEGHTANYGSQGDSTQAPPAQPPSQGYGTGQQPSPNAANYAPQAQPGYGVPPTSQPATYGSQPPAQSGYGSGYGPPQTQKPSGTPPVYGQSQSPNTAGGYGQSGHLQSGYPPSQPPPSGGYAQPESGGQPGYGQAPPSYSNSSYGAAGYAQPPVYSSDGNVGGTTRGAYDGAPAQPVQQAAKTSPQLI

SEQ ID NO: 266586 - protein, 155 aa, Glycine max
  Clone ID: PAT_MRT3847_82749C.1.pep
GETIKNMQASTGARIQVIPLHLPPGDTSTERTLKIEGTPEQIESAKQMVNQVISGENRQRNPSMSGGYSQQGYQARPPTSWGPPAAPMQQSGYGYVQPGAYSGPPQYNVPQQPYAGYPPQSSGGYSAANWDQSTAPQQQSAHAGYDYYSQQQQQQ

SEQ ID NO: 266587 - protein, 204 aa, Glycine max
  Clone ID: PAT_MRT3847_8274C.1.pep
FTSSAINANASLAEQLMGCSLDCDPGLSCELVTKYISPMSTCPSHYVGVILDEPSSTPYTGYINDVPRFIWNFLADRTSIPRENNSSDCQHGCNGRDEVCIKAETDGKGVCVLSTTRYVPAYSTRLKFESGVWNVLPPNSSDKMGVVDPVWTESNWNTIGMRVYIVQNAAYDRLVLFGGITLTVFAYLAIATARAFFNKAMKRD

SEQ ID NO: 266588 - protein, 48 aa, Glycine max
  Clone ID: PAT_MRT3847_82750C.1.pep
IGAPIYIECGAETQHNVKAVNEANMKVGVQPPKQKKKRRKVQKACSIL

SEQ ID NO: 266589 - protein, 87 aa, Glycine max
  Clone ID: PAT_MRT3847_82751C.1.pep
PDNIVLTLCFFVTLFTYLLSTSSQYNHICLPSELHNNDSGKYTASNPRLSYKPIMQILTHRHDYTSSALSRSTRIGDVTGSCVKFIQ

SEQ ID NO: 266590 - protein, 679 aa, Glycine max
  unsure (1)..(679): unsure at all Xaa locations
  Clone ID: PAT_MRT3847_82752C.1.pep
VYYGAGGTFALYSLLCRHAKXRTIPNQHRTDEELTTYSRSTFHEKSFAAKTKRWLEEKQSAKKAILILVLVGTCMVIGDGILTPAISVLSAVGGIKVNQARMSSGVVVLVAVVILVGFFSMQHYGTDKVSWLFAPIVLLWFLLIGGIGIFNIWKYGSSVLKAFSPLYIYRYLQREGKEGWTSLGGIMLSITGTEALFADLAHFPVSSVQIAFTLLVFPCLLLAYSGQAAYLMHNLDHSKDAFYRSIPDKIYWPVFVVATLAAIVASQATISATFSIIKQANAHGCFPRIKVVHTSKKFLGQIYIPDINWILMILCIAVTAGFKNQSQIGNAYGTAVVLVMLVTTLLMILIMILVWRCHWILVVVFTGLSLIVECTYFSSVLFKVDQGGWVPLAIAGAFLIIMSVWHYGTVKRYEFEMHSKVSMAWILGLGPSLGLVRVPGIGLVYTELASGVPHIFSHFITNLPAIHSVVVFVCVKYLPVYTVPEDERFLVKRIGPKNFHMFRCVARYGYKDLHKKDEDFEKKLFHNLFVFVKLESMMEGCSDSDDYSLYDEQTERSTQGLLNNNTNTAALNMDPTVSSVDSIVSVSSPLHINATIQSSGHVSSHTEVDEVEFLNNCRDAGVVHILGNTVVRARRDSRFHKKIAVDYIYAFLRKICRENSVIFNVPHESLLNVGQVFYV

SEQ ID NO: 266591 - protein, 174 aa, Glycine max
  unsure (1)..(174): unsure at all Xaa locations
  Clone ID: PAT_MRT3847_82753C.1.pep
SFYFLYSSNKRILRFVCMEKTTTHIVVIPSAGFSHFVPIIHFSKQLVELHPEIHVACIIPILGSLPSAAKPILQTLPQNINTIFLPPVNPNELPQGVPVVLQILLAMAHSMPSIHHTLKFITSKTPHVAMVVDXFAYEALDFAQEFNMLSYVYLPCGLRHSHTLVFSHVDEEHR

SEQ ID NO: 266592 - protein, 68 aa, Glycine max
  Clone ID: PAT_MRT3847_82754C.1.pep
HNTRGKAVIKAIYSVSDFYRPICGLLIEESAEQCHLCVQDPRGSLTLTCSTPITAFIQLTLHHPSSSF

SEQ ID NO: 266593 - protein, 112 aa, Glycine max
  unsure (1)..(112): unsure at all Xaa locations
  Clone ID: PAT_MRT3847_82755C.1.pep
DXXMNCWXRPVXXXXEHXXWXXHXXXXGXXLXXXXMXXXCXXEXXGXHNXDAFXXAXXGXIAYGPLASXQEHXAXHQXXXXGPXXPWXXXXXPWVXXXSXXIPXLRMXHAXL

SEQ ID NO: 266594 - protein, 162 aa, Glycine max
  unsure (1)..(162): unsure at all Xaa locations
  Clone ID: PAT_MRT3847_82756C.1.pep
MGVWDGIMQVTKLAQEKKTDPLLWSIQVSSALNSGGVSLPSIELAHRLVSHICFDNHLPITWKFLEKAMSLRLLPPFLALSLLSSRVLPLRRLHPSAYTLYMDLLSRHAFSLLIHFPNYPCVMSSIHHLLHFSQLYSSLDPHPGVXLVLFLFTLVSQLLEAS

SEQ ID NO: 266595 - protein, 46 aa, Glycine max
  Clone ID: PAT_MRT3847_82757C.1.pep
KKFKKRKKNLKVQRLRTFEGNVLALLTVSTIKTVALGGPFTGSQPG

SEQ ID NO: 266596 - protein, 77 aa, Glycine max
  unsure (1)..(77): unsure at all Xaa locations
  Clone ID: PAT_MRT3847_82758C.1.pep
MYTQKGPATSAAVVTLGATEMIDPTMVAEAXTCEFQSHRIKGPCLSDTNCGFVCRTERFTGGHLRGFRLRCFCTKHC

SEQ ID NO: 266597 - protein, 59 aa, Glycine max
  Clone ID: PAT_MRT3847_82759C.1.pep
GSRNLPFSDAVGTFSFGLLSFSVSLLIDIAVVTKEQGVASSLLFSKEENSQSSILHWVL

SEQ ID NO: 266598 - protein, 221 aa, Glycine max
  unsure (1)..(221): unsure at all Xaa locations
  Clone ID: PAT_MRT3847_8275C.1.pep
GFILFIHGANRFLSLLFLPLLHLPPSLLLLXGQSSSMESVPDLQNTMYASIDGYPCVRLMNLSGTIGCSNPGRDKVVAPIVRFENVDRIAEPSAVLVSLDEFPTLFTRISDDSSFASKVGGVLVEPSTDFQKKLKGFSPDQKFPQAQFALYHNTSYEWNPIGSGIMWKSYNFPVFLLTESGSTLQEFVTKNEDTKIYTSNVAEFDLVMQTVKSGTHDSSCL

SEQ ID NO: 266599 - protein, 32 aa, Glycine max
  Clone ID: PAT_MRT3847_82760C.1.pep
FKQYIQKKLIFPSNHYPTNTTNYFHITSPIEH

SEQ ID NO: 266600 - protein, 32 aa, Glycine max
  Clone ID: PAT_MRT3847_82761C.1.pep
RAIGEALCVSPSMEPWCYIGSLQQRYRADSAR

SEQ ID NO: 266601 - protein, 66 aa, Glycine max
  Clone ID: PAT_MRT3847_82762C.1.pep
GTCWNLFVCKTLHATSCSHKTLDGMAVFTLAKHKRSGGGLLVMIYKKDDSYDGEWRVHASPKARCK

SEQ ID NO: 266602 - protein, 60 aa, Glycine max
  Clone ID: PAT_MRT3847_82763C.1.pep
TKLSYLNLSACLKARQSDTQDQGLQHVNISTAQGQSVTFPDYSQPSISPSYTDERIHYHQ

SEQ ID NO: 266603 - protein, 56 aa, Glycine max
  Clone ID: PAT_MRT3847_82764C.1.pep
FPINTGLNNRFNAFLCIRSIPSQFSHCASHYRYYNLFFPPPPPKEGSTIDGWIVIQ

SEQ ID NO: 266604 - protein, 96 aa, Glycine max
  unsure (1)..(96): unsure at all Xaa locations
  Clone ID: PAT_MRT3847_82765C.1.pep
FSTNGFWSFYSSLGLQVLVYYSRFSAVPIVIPCIFIFEGFFLKKMTFFAEAGPWSVVVLKVEYSNTSGKARPLFQFNPPXXXXXGGRRMGARXPRN

SEQ ID NO: 266605 - protein, 76 aa, Glycine max
  Clone ID: PAT_MRT3847_82766C.1.pep
DFKIQNTVGSCDVKFPTRLEGLAYSHGAFLKCKCEVHNHLFFLVNFLEKWSSQIPALVISPTYGPLDVGYSIGCCT

SEQ ID NO: 266606 - protein, 92 aa, Glycine max
  Clone ID: PAT_MRT3847_82767C.1.pep
SDDGRPPLRTWYLTNFVDLRSEVRLWSRASDMLLLGFLYSLALALVKPGDVISGTYLGESDAQSAVLQSHILQVHSCVLFMQCFHCHPAMNP

SEQ ID NO: 266607 - protein, 91 aa, Glycine max
  Clone ID: PAT_MRT3847_82768C.1.pep
NITAMDYMTPNLFGNSFYQLLLNGEGLLNSDQEIYSSVFGIETREIVKNYAADPLAFFQQFSESMVKMGNITNSESFFTGEVRKNCRFVNT

SEQ ID NO: 266608 - protein, 329 aa, Glycine max
  unsure (1)..(329): unsure at all Xaa locations
  Clone ID: PAT_MRT3847_82769C.1.pep
MQTPNCEAERRIQRLTLHLNPTALVAAKQLEMATCARGKLSVDTPSLSSYMRGKHVDIQEKVFDYFNANPRLQTPVEISKDEHRDLCMKQLTGLVREAGIRPLRYVVDDPAKYFAILEAVGSVDMSLGIKMGVQYSLWGGSVLNLGTKKHKDKYFDGIDNLDYPGCFAMTELHHGSNVQGLQTVATFDIITDEFIINTPNDGAIKWWIGNAAVHGKFATVFARLKLPTYDKKGLSDMGVHAFIVPIRDMKTHQPLSGIEIHDCGHKVGLNGVDNGALRFRSVRISRDNLLNRFGDVSRDGKYTSSLPTVNSRFAVLLXELVGGREALRF

SEQ ID NO: 266609 - protein, 35 aa, Glycine max
  unsure (1)..(35): unsure at all Xaa locations
  Clone ID: PAT_MRT3847_8276C.1.pep
KIGILPKFGSESLXXXSVQQSLHTVQLNSILXTLT

SEQ ID NO: 266610 - protein, 41 aa, Glycine max
  Clone ID: PAT_MRT3847_82770C.1.pep
LLCRFIFGVYKVLKRYICFLKLVGFKFKYTPLVVYVVLSKG

SEQ ID NO: 266611 - protein, 95 aa, Glycine max
  unsure (1)..(95): unsure at all Xaa locations
  Clone ID: PAT_MRT3847_82771C.1.pep
KIAAIFFVYGIVSLIWYLVIWLCVLSVIFFFLCIFFYYFFFCLFFFFTPVPRQLHSPKECLSTHLHSIIYKFSPKQKCRKAKKELKRKSNXCCVL

SEQ ID NO: 266612 - protein, 59 aa, Glycine max
  Clone ID: PAT_MRT3847_82772C.1.pep
NSSSLPGDPLESTCRNFHCHMIIASFFLPKPFKCIMRNYSWVSALQLCHLMLIRRKRCV

SEQ ID NO: 266613 - protein, 76 aa, Glycine max
  Clone ID: PAT_MRT3847_82773C.1.pep
KLGENKDAMDGCFRLERVSDDEFNNYELVFCPQQAEDDTCGDIWISIDHDDGTSRLGVSQNIPSVAHVHKLDSVSL

SEQ ID NO: 266614 - protein, 141 aa, Glycine max
  Clone ID: PAT_MRT3847_82774C.1.pep
GGTKCGRKNGNGSQAWNQDTGAKDRQSWSQGNADKERPSWNQGSGSNQSWSSASAGANDNWNNNGSTQTAEASWKKSTTTEETTIQDSGWNKGFSSNTTSRGWGQSSAADKGQASSWKESAIDDAAGSWGKKNDRGDKGGW

SEQ ID NO: 266615 - protein, 77 aa, Glycine max
  Clone ID: PAT_MRT3847_82775C.1.pep
HKEKEALGDLFKAMAFKAGWPLLHLGGAFPEPKGVVFGALKNCGGAFPGGPFPQKMLELPGGVKTPNPWVKPLIFPK

SEQ ID NO: 266616 - protein, 57 aa, Glycine max
  Clone ID: PAT_MRT3847_82776C.1.pep
VTVPMAITAGAAGVGVGSAVNRLNDVVAMIAEVRSIANSLQTPFQISTAHEVETQRQ

SEQ ID NO: 266617 - protein, 76 aa, Glycine max
  Clone ID: PAT_MRT3847_82777C.1.pep
MASFVSFLLLLLAALILMPQGLATCYKPLTKPILYKPPMYMPPVYIPPVYKPEPPVYQPEPPVYKPAYKNPPYEEP

SEQ ID NO: 266618 - protein, 77 aa, Glycine max
  Clone ID: PAT_MRT3847_82778C.1.pep
MNIFRLAGDMTHLASVLVLLLKIHTIKSCAGRYLPFQSQHSSLALFCFVEDMSIFIVIMLTCVCQSYYCLALWGWVG

SEQ ID NO: 266619 - protein, 150 aa, Glycine max
  unsure (1)..(150): unsure at all Xaa locations
  Clone ID: PAT_MRT3847_82779C.1.pep
MDNTTQSLTISVPIFNGENYDFWRVKMETYFSSQDLWDMVEEGFTVPTDTSALNATQEKELKKNKQKNSKALFTLQQAVTDPIFPRIMGAKTAKEAWNTLQEEFQGSVRVRAVKLQSLRRXFELLRMKESETGKEYYSKVKEMLINENFG

SEQ ID NO: 266620 - protein, 669 aa, Glycine max
  Clone ID: PAT_MRT3847_8277C.1.pep
MELTVFSLFFFFFTFHLPSCFSGQSSSMESVPDLQNTMYASIDGYPCVRLMNLSGTIGCSNPGRDKVVAPILRFENVDKIAEPSAILVSLDEFPTLFTRISDDSSFASKVLGVLVEPTGDVQNKLKGFSPDQKFPQAQFALYHNTSYQWNSIGSGIMWKSYKFPVFLLTESGSKTLQEFVTKNEDKKKSYTSNVAEFDLVMQTVKSGTHDSESCLKEETCLPLGGYSVWSSLPPINISSLQQSKPILLTVASMDSASFFRDKSLGADSPISGLIALLAAVDALSHLDGLGDLSKQLVFAVFTGEAWGYLGSRRFLVELDMHSDAVHGLNQTLIETVIEIGSVGKGLSQGVKNFFAHTKGDSSATNQTVAALKRAQESLISENIKIASASASNPGIPPSSLMSFLEKNPAISGVVLEDFDSVFVNKFYHSHLDDLSNVNSSAVVAAASLIARTLYMLASETEDVQNSTLAAINVNVSLVEQLLGCLLDCDPGLSCELVKKYISPMSTCPSHYVGVILDEPSSAPYAGYINDVPRFIWNFLADRTSIPRENNISDCQHGCNGRDEVCVKAETDGKGVCVLSTTRYVPAYSTRLKFESGVWNVLPPNSSDKMGVVDPVWTESNWNTIGMRVYTVQNAAYDRLVLFGGITLTVFAYLAIATARAFFNKAMKRD

SEQ ID NO: 266621 - protein, 219 aa, Glycine max
  Clone ID: PAT_MRT3847_82780C.1.pep
MGLLLRGWSVLLVGHGFVHGGLLAAPAVLPLSSVAALSPRVLPGPAGSYNYGGKSFKASSGSSGASLNECKSVALRALKVNESTCTHMKCTFGGIWNGGGGDGQKNLFVASFFFDRAAEAGFADPNLPVAIVRPADFEDAAKQACQTKLENAKSTFPRVDEGNLPYLCMDLIYQYTLLVDGFGIYPWQEITLVKKVKYDDALVEAAWPLGSAIEAVSSA

SEQ ID NO: 266622 - protein, 53 aa, Glycine max
  Clone ID: PAT_MRT3847_82781C.1.pep
VNVLVKRRERPSLVQDLITYRTTTELLDACHVAKIGTTYTGIGLLNRGVRPQL

SEQ ID NO: 266623 - protein, 58 aa, Glycine max
  Clone ID: PAT_MRT3847_82782C.1.pep
GNLPYLCRDLIYQYTLLVDGFGIYPWQEITLVKKVKYDDALVEAAWPLGSAIEAVSSA

SEQ ID NO: 266624 - protein, 138 aa, Glycine max
  unsure (1)..(138): unsure at all Xaa locations
  Clone ID: PAT_MRT3847_82783C.1.pep
MNLLSRIVGLGSPRAAENMNSTTARGPDDDIPAPGQQFAQFGAGCFWSVELAFQRAXGVIKTEVGYSQGQLHNPSYEDVCTGTTHHSEVVRVQYDPHVCSYEKLLDGVWARHDPTTLKSQGNDVGHNTRLXIYYYTPE

SEQ ID NO: 266625 - protein, 81 aa, Glycine max
  unsure (1)..(81): unsure at all Xaa locations
  Clone ID: PAT_MRT3847_82784C.1.pep
MSAQYEGNYKEAXQNYYEAMRLKINPYDRSHILYNIALIDISICADTGLPNHTISGRCSWAILRNIWISLGAEATALDRKN

SEQ ID NO: 266626 - protein, 107 aa, Glycine max
  Clone ID: PAT_MRT3847_82785C.1.pep
SHLQLRLLLSCLTLYNRTAESTTIINVWPELRNLTWSPPYQTTLLCYTFTMTITNNHHSKHLSIAIRLYQNHIKVRAPPRTCPTCSQHLQHTPTTTADSQGHSGGHC

SEQ ID NO: 266627 - protein, 148 aa, Glycine max
  Clone ID: PAT_MRT3847_82786C.1.pep
CVLQLVLFCACGTLAGMIAGLLGLGGGFILGPLFLGLGIPPQVASATSTLVMAFSASMAVVEYYLLKRFPVPYALYFVAIATAAALVGQHLVRKAIAILGRASVIIFILTLTLSVSAVLLGGVGIAHMIQKIENKEYMGFGDLCTYRK

SEQ ID NO: 266628 - protein, 302 aa, Glycine max
  Clone ID: PAT_MRT3847_82787C.1.pep
FYCTGGDSDGRLSPFSSAGTNTKYNGNVTVLPAPTSQSPQEGGVLSTAGPTPLVTQAAGLMQSSIAVTQQPVPVFRPSGVHISHYPPNYIPYSPYFSPFYVSPPAIHQFMGNGAFPQQPQASTVYPPPPAVAPTGMKYPLPQFKPGANAANPTHLVMPSAYGVYGSSAAGYNHNSAAAAGNSTSNEDLGSSQFKESNVYIGGQQSEGSAVWVAAPGRDITSLPTSTFYNLPPQGQHVTFAPTQAGHGNFAGMYHPAQAVTAATVHPLLQQSQTLAGAVDMVGPGGNVYQQPQHSQINWPSNY

SEQ ID NO: 266629 - protein, 40 aa, Glycine max
  Clone ID: PAT_MRT3847_82788C.1.pep
ERGQSPDMVMESLFDVLGFHVLVREASQPHENSSDGGNGR

SEQ ID NO: 266630 - protein, 51 aa, Glycine max
  Clone ID: PAT_MRT3847_82789C.1.pep
LWVPMLHYPWMVFPYQVHRRQPPWVKEVAVLTFISRDIGSRYRNLEVSSSL

SEQ ID NO: 266631 - protein, 69 aa, Glycine max
  Clone ID: PAT_MRT3847_8278C.1.pep
IKARVGQGFVKKWLLLIPRGNMALFFFSGEGLAKVKGPLVNWGSRLGNGILPTGLGIPRLDPAPFRPGR

SEQ ID NO: 266632 - protein, 84 aa, Glycine max
  Clone ID: PAT_MRT3847_82790C.1.pep
NQLKFVIGIGIITNITRCLGETGKYDHTSQSVLTNIGLPNQIGGYIRTTYIWCNWTQAVREFFLHTLIVKTIRMASSQLSIDHY

SEQ ID NO: 266633 - protein, 81 aa, Glycine max
  Clone ID: PAT_MRT3847_82791C.1.pep
INLLSSLHSPLVSLRSTSANVPYISAHAPSDCSLTHCSFALILSYLTRWGVSFCILHLPPPPPPQRRRTSYSDDGKPSWNG

SEQ ID NO: 266634 - protein, 82 aa, Glycine max
  Clone ID: PAT_MRT3847_82792C.1.pep
GAACLELYKPQKKRTMYMCAVHSKLNSLFVHFCTNVSCKFTHLLVEAESAAGADSETLSISCVSEDSSHSNCKVKKITGQKV

SEQ ID NO: 266635 - protein, 66 aa, Glycine max
  Clone ID: PAT_MRT3847_82793C.1.pep
SVPILFHPCGSYFFVSEAGAVCVGSSAAMIMVIHGTLAASSPASGIDDHLPYADHVYCGSAPTSMQ

SEQ ID NO: 266636 - protein, 39 aa, Glycine max
  Clone ID: PAT_MRT3847_82794C.1.pep
ENRGYLPLLNKLNFWPSLTTHHLSIIFKLTLFFYVAKTT

SEQ ID NO: 266637 - protein, 52 aa, Glycine max
  Clone ID: PAT_MRT3847_82795C.1.pep
RAESPFKNGTRFCRHKLKICKHLVVKKNKVLSCMVRLNKIYPVHTIPSIQLD

SEQ ID NO: 266638 - protein, 82 aa, Glycine max
  unsure (1)..(82): unsure at all Xaa locations
  Clone ID: PAT_MRT3847_82796C.1.pep
MDDRSSEVKTCSSVKQRRSRFPSTFIDKDSMPKMSLLAEDKIXSSGKGRSPSPPVRRRSISTDRGSVIKSKVKSDTSDNPFL

SEQ ID NO: 266639 - protein, 95 aa, Glycine max
  Clone ID: PAT_MRT3847_82797C.1.pep
NSTITRMSNNFSILQQLICKYKMLLAVEETLFSGEGEVWTLEVSCTLSKMNPYHQCVNKSKILGKGEISDRKKIKMSESQCRIFSANTLNAALTY

SEQ ID NO: 266640 - protein, 59 aa, Glycine max
  unsure (1)..(59): unsure at all Xaa locations
  Clone ID: PAT_MRT3847_82798C.1.pep
GTDLGTTNSCVAVRVCLYALVIDQSNGARRSPSVGAFNLRGELLXGTPAXRQAVTNAPD

SEQ ID NO: 266641 - protein, 55 aa, Glycine max
  Clone ID: PAT_MRT3847_82799C.1.pep
PSNLAEIGFGASFFGLITAIADIYLLTLNRTNSHTSYSHSPTHSLHFLHTCLHPP

SEQ ID NO: 266642 - protein, 59 aa, Glycine max
  Clone ID: PAT_MRT3847_8279C.1.pep
CSHIMLVLTTFCECVFFLPLYCIKVPFTPYCLYVSVLLLFMILNSHQMSPNFLVRSCSM

SEQ ID NO: 266643 - protein, 54 aa, Glycine max
  Clone ID: PAT_MRT3847_827C.1.pep
KARDPPLVLPFPKRRESGLWLLPFSRLTFFWPLIPTFGKHRFFSLKTWVQIPFY

SEQ ID NO: 266644 - protein, 103 aa, Glycine max
  unsure (1)..(103): unsure at all Xaa locations
  Clone ID: PAT_MRT3847_82800C.1.pep
PCGLKLRIKITAVGISVVANPNFEPKITVATDNKPAMVSXFMGNGQGLNTVYSENPTTVIYSNPRLKGDRRNKSAIELXMRYRMQKKLVLTCDSWKPNADDYT

SEQ ID NO: 266645 - protein, 78 aa, Glycine max
  unsure (1)..(78): unsure at all Xaa locations
  Clone ID: PAT_MRT3847_82801C.1.pep
PPVREFYKKTLRESLEPLALPNLTTEGEVESKSFLSVPGMEPLTIEKVGTPKPKNIPWFVKRVSIXNNLDGKLFPRSP

SEQ ID NO: 266646 - protein, 85 aa, Glycine max
  Clone ID: PAT_MRT3847_82802C.1.pep
VCCCVHLNCSCSVFSSVFLQKHIFSLAHLKKFQSFIFQNIWCSTPSFMQKKVICSRENEGKKLGEREEEGKEGVNQEQLEKKKKK

SEQ ID NO: 266647 - protein, 170 aa, Glycine max
  Clone ID: PAT_MRT3847_82803C.1.pep
MGFPVGYPELLVPKMFLHALSLLAWLRSLVFALFRLLRISDLLDTDSAASDLPPPPPPREPTLSALLIREFLPVAAFRDLAAADGDPPPSGCAVCLSEFSSEEEIRCMANCKHIFHRWCVDRWVDHDQKTCPLCRTPFVPHHKLEEYNQRLWAASGVSQFYYQDDYTASL

SEQ ID NO: 266648 - protein, 179 aa, Glycine max
  Clone ID: PAT_MRT3847_82804C.1.pep
MAEIEYHAKSNTNTQPLKLFGINISKSPEDQTHEAGSNSEPFSSRKYECQYCCREFANSQALGGHQNAHKKERQLLKRAQMQAARGFVSSQIHNTIISSFSPQSQPPLSWLCTPHGGAYHSGAAFVASGRRIYVAAAGASITDGHGHRHPLPQFGGFNGGEGSGGGRERGLGLDLHLSL

SEQ ID NO: 266649 - protein, 96 aa, Glycine max
  Clone ID: PAT_MRT3847_82805C.1.pep
SAADAYFSLRSSPSKLDPPKLNFGTLRTPHLNTLKSQRLQSPHTIPLAFTTATCKRGRAISWLPLSQRRCKLMDDHRCRREIIKRRAKGFRNWNNI

SEQ ID NO: 266650 - protein, 108 aa, Glycine max
  unsure (1)..(108): unsure at all Xaa locations
  Clone ID: PAT_MRT3847_82806C.1.pep
IGRLMNDIAGFKRGKTKGDAASSVKCYMNENGVTSDVAFAKIXSLXXXEWRXXXQSRLEHRTLLPIVQRVVNXRVSMALFYDDRKDAYTFGTILTEIIKSLFVRPAPI

SEQ ID NO: 266651 - protein, 77 aa, Glycine max
  Clone ID: PAT_MRT3847_82807C.1.pep
EITAQSRDTDQIKEITDGPQETGQSERVVAYSVTHHACWLIRVRAGSPARLHQDGLTAVTRRLWAPRPRAAAPARGS

SEQ ID NO: 266652 - protein, 154 aa, Glycine max
  unsure (1)..(154): unsure at all Xaa locations
  Clone ID: PAT_MRT3847_82808C.1.pep
MGRIPCCEKDNVKRGQWTPEEDNKLSSYIAQHGTRNWRLIPKNAGLQRCGKSCRLRWTNYLRPDLKHGQFSDSEEQTIVKLHSVFGNRWSLIAAQLPGRTDNDVKNHWNTKLKKKLSGMGIDPVTHKPXSHLMAEXATTLAPPQAAHLAEAALG

SEQ ID NO: 266653 - protein, 45 aa, Glycine max
  unsure (1)..(45): unsure at all Xaa locations
  Clone ID: PAT_MRT3847_82809C.1.pep
ICHYIFFXKWSIANLKFPAICQVQSQYVEFISRSNQLKSSTKLLQ

SEQ ID NO: 266654 - protein, 49 aa, Glycine max
  unsure (1)..(49): unsure at all Xaa locations
  Clone ID: PAT_MRT3847_8280C.1.pep
PTQHRYTLIHGFAQSANRGYPSLNSLSSGWWTGKTTFVKRXSTVEXRRN

SEQ ID NO: 266655 - protein, 243 aa, Glycine max
  Clone ID: PAT_MRT3847_82810C.1.pep
MGEEVKVVVPESVLKKRKREEEWALAKKQELDAAKKKRAESRKLIYNRAKQYAKEYDHQEKELIRLKREAKLKGGFYVDPEAKLLFIIRIRGINAMDPKSRKILQLLRLRQIFNGVFLKVNKATVNMLHRVEPYVTYGYPNLKSVRELIYKRGYGKLMKQRTALTDNSIIEQALGKYGIISTEDLIHEIITVGPHFKEANNFLWPFKLKAPLGGLKKKRNHYVEGGDAGNRENYINELIRRMN

SEQ ID NO: 266656 - protein, 50 aa, Glycine max
  Clone ID: PAT_MRT3847_82811C.1.pep
GPPTKQTPNAKQFRQDSPVAFSKALILAVVMSVFVSVIYASEAPASNPTS

SEQ ID NO: 266657 - protein, 61 aa, Glycine max
  Clone ID: PAT_MRT3847_82812C.1.pep
NHKFQTKLIKAIQQRDRDNNGAQAIIRNILLDKEINARVSSQTSSILNHTYMHAGFLSDQS

SEQ ID NO: 266658 - protein, 80 aa, Glycine max
  unsure (1)..(80): unsure at all Xaa locations
  Clone ID: PAT_MRT3847_82813C.1.pep
KKXIEXTQQTDKDRWKGLAYDISDDQXDITRRXGLVDSLFQAPQDAGTXYAVMSSYRYXSMDFAVGQTWMDLHCPACMNS

SEQ ID NO: 266659 - protein, 69 aa, Glycine max
  Clone ID: PAT_MRT3847_82814C.1.pep
CVMCYIISFISNNVKGFCTSYGLFPPAFHYAVGIHVQFHFFIFFNLIPIMRGHLLSVMVSCCFFKKRTT

SEQ ID NO: 266660 - protein, 53 aa, Glycine max
  Clone ID: PAT_MRT3847_82815C.1.pep
MYVFKKNKFYYESICRGDYVWFYLINREFEKSLTKEKYLDDQKLRLRKMGYLL

SEQ ID NO: 266661 - protein, 61 aa, Glycine max
  unsure (1)..(61): unsure at all Xaa locations
  Clone ID: PAT_MRT3847_82816C.1.pep
KKMQKRGATVWIENTGRSVGSYGNGIRMKLLYIWKIIDAIHYGGLLTAXYNKTEIIGLEIA

SEQ ID NO: 266662 - protein, 315 aa, Glycine max
  Clone ID: PAT_MRT3847_82817C.1.pep
MESKLLRATTISVPSTPSCAFHRTTRKASISFNPTSDFAPKSNLSLQAHAASIESVPTKKRIDESDNLTLDHIRRSLVRQEDSIIFSLIERAQYCYNEDTYDPDAFSMDGFHGSLVEYMVGETERLHAKVGRYKSPDEHPFFPDGLPEPVLPPLQYPQVLHPIADSININEKVWSLYFRVLIPQIVKQGDDGNSGSSAVCDVICLQALSKRIHYGKYVAEAKYQASPDSYKDAIIAQDKDKLMELLTYPEVEEAIKRRVDMKTKTYGQELVVTTKEHRTEPVYKINPSLVADLYSDWIMPLTKEVQVAYLLRRLD

SEQ ID NO: 266663 - protein, 79 aa, Glycine max
  Clone ID: PAT_MRT3847_82818C.1.pep
TPQLKWNLKGLFPIPFKKGPHPPFHVKPGPLTPGACPFIWEKIYPIFFSRRPKGIGKPRRGPKGNIFFNFGRAKKKPPF

SEQ ID NO: 266664 - protein, 275 aa, Glycine max
  unsure (1)..(275): unsure at all Xaa locations
  Clone ID: PAT_MRT3847_82819C.1.pep
MGSFSRYGWREMKALGVVGGSGAPVPVVCSSVRNHRFRVSFSSSPSSGPKTVEQVGIAAPKSEYKPGVFDDLFLNLFRNKLVQEVGWDSEKPGYDGLIVVANRLMMNFNTNTDTVERASRXIGFSEFFIYLIDPFKARTSHTNTXTSPMGPSTVTGLTCRWLIGPCKLNSVDLPDGISCSSGVYVERCKYLEESKCVGICTNTCKFPTQSFFKDHMGVPLLMEPNFGDYSCQFKFGVLPPLDDTIVKEPCLEACPNASQRRTVARNIDITACPKT

SEQ ID NO: 266665 - protein, 122 aa, Glycine max
  Clone ID: PAT_MRT3847_8281C.1.pep
PSFFFFFNELTHENWEKCLLEYTQLKQHNPPPFAGHELPLLPSVLHIKILIPPTSKGHIAEGYAGGTCIIIIRTGMECRFPPNKGNSSSLASGEKSSFSGLWNWSMSSLNIRASPLGVAANL

SEQ ID NO: 266666 - protein, 164 aa, Glycine max
  Clone ID: PAT_MRT3847_82820C.1.pep
MFFRKPSPTPPLHSLSSLPSTAISFSKTKDPHNNKLRYTIFSCLFLASWLLILHRFNFTILAPSTTTTTPTCDGSKPLFYIYNLPSRFNLGLLERCQSLNIYTNMCPHVANNGLGQPLSTPDWYSTHQFIAEMIVHARLENHPCRTWDPYTAVLFYVPFYGGLY

SEQ ID NO: 266667 - protein, 128 aa, Glycine max
  Clone ID: PAT_MRT3847_82821C.1.pep
FSVVRLQEERWTLSMAIDEFGRPFIILKEQEQKTKLRGLDAQKANISAGKAALRILRTSLGPKALTKMLQSPTGNLPITNDGATILDQMAVNNQIPKLMVKLSRSQDYEIGDRPTGVILMAGALIKKA

SEQ ID NO: 266668 - protein, 105 aa, Glycine max
  Clone ID: PAT_MRT3847_82822C.1.pep
MYTCIRRKPDFWVSGKTFGGGDPISLACVLGGVRGGGWYSREKKEMPGGAGERDKLAADERQPSMDAVDGCGGRVTIGDAGTRAGLNLTQVRDAVAALAGDADGF

SEQ ID NO: 266669 - protein, 60 aa, Glycine max
  Clone ID: PAT_MRT3847_82823C.1.pep
DSLFYSFLTLFHSLSSHTLMVLANSDDGCTHCEFTETEISPARICEPTQLAHQAWNGTCQ

SEQ ID NO: 266670 - protein, 75 aa, Glycine max
  Clone ID: PAT_MRT3847_82824C.1.pep
IIQLKKNKHKHKPSYENQSKGAVGGGRERQWKTACERESFSTTGRPGRLQVWKLAAGQGGQERESDSHFFMFLLF

SEQ ID NO: 266671 - protein, 381 aa, Glycine max
  Clone ID: PAT_MRT3847_82825C.1.pep
MYRVLHRAFCTATEPATTATVTVSIKSISEDLYKEVKLKNVVEKFKKASDIDRFRKKTGIYEDTVRRLAGARRFRWIRDILEHQKQYSDISNEGFSARLISLYGKSGMTKHARKVFDEMPQRNCSRTVLSLNALLAAYLHSRKYDIVRELFRDLPTQLSIKPDLVTYNTIIKAFCEKGSFDSALSVFQEIEEKGLSPDSITFNTLLDGLYSKGRFEEGEKVWEQMGVKNVAPGVRSYCSKLVGLAEVKKMGEAVVLFREMEKLGVKPDLFCINAVIKGFVNEGNLDEAKKWFGEIAKFEYDPDRNTYSIIVPFLCEKGDFKTAIDMCKEIFNNRCRVDATLLQGVVDKLASEGMDTEAKEIVEIGKTNRYCRYRLDLPAEK

SEQ ID NO: 266672 - protein, 30 aa, Glycine max
  Clone ID: PAT_MRT3847_82826C.1.pep
FFFFFILKLFYLNLNKLTQYHINTSCKVPS

SEQ ID NO: 266673 - protein, 190 aa, Glycine max
  Clone ID: PAT_MRT3847_82827C.1.pep
PRVRHAFVSIQNQIWKNPSWNHNPSAAASGNTARPRLQKYALRSVNKSKEDKSETPNCSNPTSETKRGRSVGASSVSKSVSVLDFSGKDKSGSAKPPRRLSIPAKTPATSRPKLGGNIIPITETTTGRNAFGQGRSKTPISDISKTSTRTKLNLLTSASYWLNQIKLSESAAKHSISLGFFKLALEAGCE

SEQ ID NO: 266674 - protein, 84 aa, Glycine max
  Clone ID: PAT_MRT3847_82828C.1.pep
EKKKMEMYQIWSRRIALGAFAFVLLFLSDIVDDFFVLPEDIFKKEVGQDIGALVEFYAPWRGHCKMLVPDYEKLGCIFKKPNLV

SEQ ID NO: 266675 - protein, 55 aa, Glycine max
  Clone ID: PAT_MRT3847_82829C.1.pep
HAYGEAYDDMSRIELAQEVGIERVRGVAIPKGKKRAGATQIPHTARGRNHILQLY

SEQ ID NO: 266676 - protein, 165 aa, Glycine max
  unsure (1)..(165): unsure at all Xaa locations
  Clone ID: PAT_MRT3847_8282C.1.pep
AXVXLESVERPPFFSFFWLXXFXSLLGPXFGSXWGWVXXCVGXLWXXXXXWXXXRTSLXSXXGXGCLDASPHLPPRGGGXPLFSLGGGEGWGFXFGLSXVGLLLPXXXWPFSXVXSXXXXHRPXWXEXGXXFGXPXGFXFFFXXXXPSPGVGLPPPPGSRWGACG

SEQ ID NO: 266677 - protein, 92 aa, Glycine max
  Clone ID: PAT_MRT3847_82830C.1.pep
LGAKSLFPPTNSSLPGPPSPPSNPQNTITKKGAWGKWETHSPTSQGIKMAYVNSYFPKPQTAFKSPPPQRALFKACVCRDIQCGGLKRELGR

SEQ ID NO: 266678 - protein, 164 aa, Glycine max
  Clone ID: PAT_MRT3847_82831C.1.pep
VVQNLTGSPAHDRISTPPPIQPPKPPSSRLQRIRPPPLPQITNRPPPLLNPTTLPRPQQLPNAVTFNNNFSVFSRPPAPLSPLPPFPTVHAPAESPISAYMRDLQTLVDANAKHFSGFSPLPAPPLVQPQPQPQPQPQPQPQPQQEQQPPEQQQGVVPSQAPSS

SEQ ID NO: 266679 - protein, 49 aa, Glycine max
  Clone ID: PAT_MRT3847_82832C.1.pep
LSHFSVINRGDTQLPRAAVPVPLSTDASGTHYHHSSLAPCVLAAESVAG

SEQ ID NO: 266680 - protein, 70 aa, Glycine max
  Clone ID: PAT_MRT3847_82833C.1.pep
CYETRRFINLHCMMIDHHLDTRFSTAPTLLKKRLLYLYISSNIIDRCSSCCWLLRSCGQDRILVSLGYAS

SEQ ID NO: 266681 - protein, 101 aa, Glycine max
  Clone ID: PAT_MRT3847_82834C.1.pep
MKQVVGMVVSNKMQKSVVVAVDRLFYHKVYDRYVKRTSKFMAHDENNLCNIGDKVRLDPSRPLSKHKHWVVAEILKKAQIYVPPSTPVSVNVNSSSVAPAS

SEQ ID NO: 266682 - protein, 104 aa, Glycine max
  Clone ID: PAT_MRT3847_82835C.1.pep
DVILIYLLHSFRKHFKFLIGHKTAIPAINLKLWEWGFSIQNFKSISIYIPSSTHLTVQKHFHEQIQPEETLNLHCNHGNLFSPLREMKISRAHQLFSNKSKARK

SEQ ID NO: 266683 - protein, 134 aa, Glycine max
  Clone ID: PAT_MRT3847_82836C.1.pep
NINAPGTGNNKKTLKNNPRPPYYLPRKKVPQKKKPRGGFPYTPKFYFLSKKKANFFLVSKKKSSLPQKKQKNHPGSVKNSKTRPESEISGQQTEHWGALSGSTDRAHPGHPTKCPRERKTKRFLLIKHITQIGP

SEQ ID NO: 266684 - protein, 168 aa, Glycine max
  Clone ID: PAT_MRT3847_82837C.1.pep
FFLLVLINLQVLNRAMDFRSSCETNSLNLPQIPLIPHQLLPSGSRRDCIRLRGLPYEAQVEQILEFLGEYANNIVFRGVHMVYNAQGQPSGEAFIQMDSEQSAAQAATQRHHKYMSFGKKQRYIEVFQCSIDDMNLVLTGGVPLQRHLQTTGTILPSPYRAYPYLGGG

SEQ ID NO: 266685 - protein, 68 aa, Glycine max
  Clone ID: PAT_MRT3847_82838C.1.pep
PSCWILHPLCKIKTKMGNYKVLIFFFPILPQTKVLSSIVHNLFFCLPVTYYIALGRSTNRAIRVPKYI

SEQ ID NO: 266686 - protein, 170 aa, Glycine max
  Clone ID: PAT_MRT3847_82839C.1.pep
MLTLPPPPPPRLLATRQTKQVSPDQIVMSKQPIKQDSQESDVPNYVTTKSIRPPPPPPPILRQPPFQRTNPIIWFAAVLCLIFSLLLIFFGVITLIIFLGIKPRNPYFDIPNANLNAVYFDLPEYFNGDFTLVANITNPNKKIDVKFESFDVELFFSDRIISTQSIEPFY

SEQ ID NO: 266687 - protein, 171 aa, Glycine max
  unsure (1)..(171): unsure at all Xaa locations
  Clone ID: PAT_MRT3847_8283C.1.pep
NPIIFRGGYATKKQKGLLIVEKLDSFQFKFFXRPFFVISDPLTKLGPWISELFENPSQNHEVQNWPERLRLWLKELSVFQKSLLYNAPASNEQIGEAQVPNVDLPFWLAAQRAVARYKGILSPVGPRXKLLFWIGFIPPMPETPFEVPNDNNAPDPSLRFAPQIISLITVC

SEQ ID NO: 266688 - protein, 38 aa, Glycine max
  Clone ID: PAT_MRT3847_82840C.1.pep
ISGPSQSSTQCHVCTPLQPPSPSTIVGIICCDEMDGRR

SEQ ID NO: 266689 - protein, 57 aa, Glycine max
  Clone ID: PAT_MRT3847_82841C.1.pep
LQIQIDWTMPSKAELSGGKQCRESQLLYEECQLALNLAMTDILADFFVTHKIDRAYN

SEQ ID NO: 266690 - protein, 69 aa, Glycine max
  Clone ID: PAT_MRT3847_82842C.1.pep
RTNDECNFVNITPRCICSMCIYLYHFLLHIELQLGIPLPDLGKSPFTMKEERPHVQCTCTSLHAPFKGG

SEQ ID NO: 266691 - protein, 68 aa, Glycine max
  Clone ID: PAT_MRT3847_82843C.1.pep
YGILCFRLSNFVVYFALGVNEGLISVHIICPALQVSKVWTQPLYFIRRCDPFVRVRGREQIINGWCPS

SEQ ID NO: 266692 - protein, 137 aa, Glycine max
  Clone ID: PAT_MRT3847_82844C.1.pep
SKRPYAAIDDLPPRYADTGARQSRARLDYDYGDSASQYGDAYGDRLGRSSVGYGGGSRSSISSQDSHGMYSSRQGMSYGGGSFGSGDVGGMYSSSYGGDYISRGSDVGGSSYSSVYSGRGVGGGSSYMGGGGSGSYY

SEQ ID NO: 266693 - protein, 103 aa, Glycine max
  Clone ID: PAT_MRT3847_82845C.1.pep
QFFKNKEMTRELITSQTNLLQFIYKHWFIRCRQEKHFELLINCKRWVRINCSLSNGFFRCNTLFESYQILSNLFQSIEAILDQITKTLLKKKWLFTDETAPAI

SEQ ID NO: 266694 - protein, 270 aa, Glycine max
  unsure (1)..(270): unsure at all Xaa locations
  Clone ID: PAT_MRT3847_82846C.1.pep
TERRLEKVHVKIVPRRGPSKRSYRTSCSGNAKSFSMKRDYGRRENIPTXPPRIRVDYGSRVASERRTSYRDYPARGPGYTELPRSTSRGTAPRRSYVDDGYGYQRFERAPPPPPPPHLSYREGRPRDYDALSGSKRSYAAIDDVPPRYADTGARQSRARLDYDYGGSASQYGDAYGDRLGRSSMGYGGGSRSSISSQDSHGLYSSRQGMSYGGGSFGSGDVGGMYSSSYGGDYISRGSDVGGSSYSSMYSGRGVGGGSSYMGGGGSGSYY

SEQ ID NO: 266695 - protein, 129 aa, Glycine max
  Clone ID: PAT_MRT3847_82847C.1.pep
NSEDKTAQELFTREHEGLRRKAEDWMKRTAEFCILISTVIATAVFSAAINIPGGIDDQTKKPNYLDKTSFLVFAISDGIAFISSATSILIFLSILISRYAEYDFHKSLPFKLICGLVTLFISITCMMVA

SEQ ID NO: 266696 - protein, 115 aa, Glycine max
  Clone ID: PAT_MRT3847_82848C.1.pep
HTREQMSDDDRREFLGSRGCFVCYIYMLSPTIMAVSNKPCLMLTDVALHRLLSVLLVTLCRILLIIFLLSSNLTPICTHDIIDNALSYHHDMNLEKSRDLPQHNNLSLILERLNG

SEQ ID NO: 266697 - protein, 122 aa, Glycine max
  unsure (1)..(122): unsure at all Xaa locations
  Clone ID: PAT_MRT3847_82849C.1.pep
MDDRGSSFVAVRRIPQGETCHPNSEVVAGSAAWLGRGLSCVCVQRRDSDVSNTFDLTLAQEECLQRIQRRIDVPYDSSIIEHQDALRAXWNAAFPEEETHGLISEQWXEMGWQGXDPSTDFR

SEQ ID NO: 266698 - protein, 49 aa, Glycine max
  Clone ID: PAT_MRT3847_8284C.1.pep
SWVVTPKCGLSPASYDLSAASRVMGMMWAWLSQIVSYGLLAHEGGGVPE

SEQ ID NO: 266699 - protein, 58 aa, Glycine max
  unsure (1)..(58): unsure at all Xaa locations
  Clone ID: PAT_MRT3847_82850C.1.pep
STLVLFDPGLLRSVFCLLFCCLXCASVGSTLFRTTLVCRVEFDSVASRSVASLTVPVL

SEQ ID NO: 266700 - protein, 263 aa, Glycine max
  unsure (1)..(263): unsure at all Xaa locations
  Clone ID: PAT_MRT3847_82851C.1.pep
VSVDSSLLELEDALTALSNAAEVVVGSAAWLGGGLSCVCVQRRDSDASNTFDLTLAQEECLQRIQSRIDVPYDSSIIEHQDAXKGSIQGILWNAAFPEEELHGLISEQWKEMGWQGKDPSTDFRGGGFISLENFLFFARNFPKSFQDLLRKQEGDRSVWEYPFAVAGVNITYMLIQMLDLEAVKPRNLVGATFLKFLAENESAFDLLYCITFKLMDHQWLSMHASYMDFNAVMKETRRQLEKELLVEDIAQLEDLPSYKLLSR

SEQ ID NO: 266701 - protein, 26 aa, Glycine max
  Clone ID: PAT_MRT3847_82852C.1.pep
TYTNTDYSKSKKNHCINKKVLIVKFV

SEQ ID NO: 266702 - protein, 46 aa, Glycine max
  Clone ID: PAT_MRT3847_82853C.1.pep
YFLAGLKETKKCIKFSHLKAYLVKSGFNFGLSPHIQPRNNISELMK

SEQ ID NO: 266703 - protein, 84 aa, Glycine max
  unsure (1)..(84): unsure at all Xaa locations
  Clone ID: PAT_MRT3847_82854C.1.pep
SLTSXXQNXHGKKXRXKXGXWPXSSLNXXLEXSPXQWTQXXXHVLRXXRXMIXPXLLXAXAATXEAXXXXXKXXWXNSRXXXKH

SEQ ID NO: 266704 - protein, 52 aa, Glycine max
  Clone ID: PAT_MRT3847_82855C.1.pep
MFVMISKKFQMIDHLGRMVLAIGKNGVRALLPHNFFVHRAPVFLLECLMIVL

SEQ ID NO: 266705 - protein, 249 aa, Glycine max
  Clone ID: PAT_MRT3847_82856C.1.pep
MDNFSEDEDQQFFDHINHQSDDEGVGEPTTPPLEYHKPRYPVDLNLDHLPHYIDRHHFIQQQHNVQPPTGALKVGMAFDEKAQCIRVVKEYNIRNHFDCRIIYSDQRRLHFVCKLHENGCTWSLGACNSKRHKKWIIKSIRGHHTCLVPMLTQDHRQLDKHVIAQIIQPIVKTNPTVSIKTLIAEIKTFMNYTPSYKKTWLAKQKALEMIHGNWEESYAKLPKLFGALQSCVPGTVVAAQTESLYGGEI

SEQ ID NO: 266706 - protein, 44 aa, Glycine max
  Clone ID: PAT_MRT3847_82857C.1.pep
YLCSKFKLYLFFFFNKKKQISFLRSKSGFLKTQFLKNIFYFILF

SEQ ID NO: 266707 - protein, 749 aa, Glycine max
  unsure (1)..(749): unsure at all Xaa locations
  Clone ID: PAT_MRT3847_82858C.1.pep
MVGNEMLGSISGGQRKRVTTGEMLVGPTNALFVDEISTVLDSSTTFQIVRSLRQYVHILNGTAVISLVQPAPKTYELFDDIIFITEGQIVYQGLREYVLEPFESVGFKCRERKGVADFLQEATSRKDQEQYWAHRDEPHRFVTVTQFAEAFQSFHFGRIIREELATPFDKSKNHPAPLTTKRYGLMILAIFTMTVFLRTEMHRDSLDDGGVYAGALFFAVIVHTFNGLAEMSMKIVKLRIFYKQRDLLFYPSWAYAIPSWILKIPIAFIEATVWVFLTYYVIGFDPNVGRLLKQYLMLLLINQMASALFRVIAALGRNLVVASTCGYFALVVLFALGGFVLSITFGKPQTIIIEESEGDMPNGRAREDELTRLENSEITIEVVSSSREKKRGMVLPFEPYCITFDQIVYSVDMPQITVNNKGSVSGAFSLGVLTALMGVSGAGKTTLLDVLAGRKTGGNIEGNIKVSGYPKRQETFARISGYCEQNDIHSPHVTVYESLVYSAWLRLPAQVESNTRKNPLKNSLVGLPVNGILTEQRKRLTIAVELVANPSIIFMDEPTSGLDARAAAIVMRTVRNTVDTGRTVVCTIHQPSIDIFEAFDELFLMKHGGQEMYVVPLGPHSSQLVKYFESIEGVSKIKDCYNPATWMLEVTTSAQELTLGVDFHEIYKNSELCRRNKLLIAKLGNPIPGSXDLHFPTQYAQSLLVQCLACLWKQHWSYWRNPLYTAVRFLATIVVALMFGTMFWGLGGK

SEQ ID NO: 266708 - protein, 75 aa, Glycine max
  Clone ID: PAT_MRT3847_82859C.1.pep
PLSSVGRKIYLRLICSGSSSSHEIFLCPFVDFDGPHSRININKSSFKILSFLLQILYRINIMIWVKKKKRRLKIS

SEQ ID NO: 266709 - protein, 63 aa, Glycine max
  Clone ID: PAT_MRT3847_8285C.1.pep
RYNRGMTNNRAHRWTLYCLRAIESPRGLKDSAVRDLSMPSVAARYKKIRLVFHCPNKAADKCL

SEQ ID NO: 266710 - protein, 58 aa, Glycine max
  Clone ID: PAT_MRT3847_82860C.1.pep
PTNLNFPNHFFPKIKMKIHFVWHLSSQKKIFFKNIKFQKPRPCRSKKIVKPFLRQRRG

SEQ ID NO: 266711 - protein, 46 aa, Glycine max
  Clone ID: PAT_MRT3847_82861C.1.pep
PPPGFLGSPMGQRPLHLRGPFFPKGRFNPTLVNFGDATTPNSQFQT

SEQ ID NO: 266712 - protein, 89 aa, Glycine max
  Clone ID: PAT_MRT3847_82862C.1.pep
VIWVEVKDHRVVILPMVMMEQHRLAYEAEHLNASAIRVSTAKTEIRQPPCIRDQCWCFRGVQIIVAATIFLLFGVVAREKRERIVADAW

SEQ ID NO: 266713 - protein, 79 aa, Glycine max
  unsure (1)..(79): unsure at all Xaa locations
  Clone ID: PAT_MRT3847_82863C.1.pep
SGAYAQLAIFCRGDPLVDNGNNNFLATTVRAYAPPYGVDYPTGLPTGRLCKGYIIPDXISQSLEAEYTFSYLDPLLDGE

SEQ ID NO: 266714 - protein, 49 aa, Glycine max
  Clone ID: PAT_MRT3847_82864C.1.pep
HINKQPTSVYLSSAKELILSPLNLLSSLTTIVSKGQTSTMYIRTLVLIS

SEQ ID NO: 266715 - protein, 67 aa, Glycine max
  Clone ID: PAT_MRT3847_82865C.1.pep
LLGPFGVAKIVVYVVSPPLQPPFCGGNRDKIQQKIVKDKIKLPAFLSSEAHSLLKGVISSPQRRYFH

SEQ ID NO: 266716 - protein, 65 aa, Glycine max
  unsure (1)..(65): unsure at all Xaa locations
  Clone ID: PAT_MRT3847_82866C.1.pep
WGGLSPPPPGGPPPGPQNMDSGPPSKKCTERAVRKRWALLXLPKGGRXNPTPRRERERERNLASF

SEQ ID NO: 266717 - protein, 103 aa, Glycine max
  Clone ID: PAT_MRT3847_82867C.1.pep
SLKWPFSTFEPKPKKEAPAFSKFMNEEVSSLLTVVPSSSMHGHEWHNNSATEVSNVQSSGSGKTDDNFVLDIKPITSLFPLSNTASHDENQGCYSWDNLPGLF

SEQ ID NO: 266718 - protein, 130 aa, Glycine max
  unsure (1)..(130): unsure at all Xaa locations
  Clone ID: PAT_MRT3847_82868C.1.pep
ATNNFSLNNKIGQGGFGPVYKGELVDRRQIAVKRLSTSSGQGINEFTTEVKLIAKLQHRNLVKLLGCCFQEQEKLLIYEYMVNGSLDTFIFDQVKGKLLDWPRRFHVIFGIARGLLYLHQDSRLRXIHRD

SEQ ID NO: 266719 - protein, 73 aa, Glycine max
  Clone ID: PAT_MRT3847_82869C.1.pep
YPCLFKNQLTNLHLLHPGEKKKKKLRGALLLTVAQGNFLSPGMRTGPMLGFHQIMHGNKFGDPNNLWERGRET

SEQ ID NO: 266720 - protein, 43 aa, Glycine max
  Clone ID: PAT_MRT3847_8286C.1.pep
CLSYNSYANLPTWYDPYLLVRVSPEYKSYPGVFYFCSSVRRNN

SEQ ID NO: 266721 - protein, 66 aa, Glycine max
  Clone ID: PAT_MRT3847_82870C.1.pep
IEDLLWLENDPNATLRQKECIDGFLGSYVFIDWMKNNQIKQELMHHISLYIACGRGAHIASEVLFE

SEQ ID NO: 266722 - protein, 69 aa, Glycine max
  unsure (1)..(69): unsure at all Xaa locations
  Clone ID: PAT_MRT3847_82871C.1.pep
PXXXXXGXXKLXXTXXXLPSMTXXPFLRXVXXXLDCIXXXAPXXAVXVXMXIXXAXRXXVXACXXXIXG

SEQ ID NO: 266723 - protein, 101 aa, Glycine max
  Clone ID: PAT_MRT3847_82872C.1.pep
MRAKLLVFPLRGRNWCFSRTIDHSLLSASHDSSQSSPSTLKGLWTNINVRDKPLNAKAELFVDYIANKMNSVWIGLEKAPEGSFKNKIHGLFFGFWFVVQW

SEQ ID NO: 266724 - protein, 91 aa, Glycine max
  Clone ID: PAT_MRT3847_82873C.1.pep
MGDSQFSFFLTTLSLFGRLVQMDLALTVVGFGQTFLGIKAAKGVVIVPEKKWPFLWVDEASVQKIQFLPPILGVDFRGMGPDFQVWVRKSR

SEQ ID NO: 266725 - protein, 55 aa, Glycine max
  Clone ID: PAT_MRT3847_82874C.1.pep
HLNKLKLSTEDLQKKDTHLKITFMIILKTFIDLSTCQHYSDYYHFLIQACCNVIH

SEQ ID NO: 266726 - protein, 104 aa, Glycine max
  Clone ID: PAT_MRT3847_82875C.1.pep
MPMDSSESDADVQEHLGKDFSALADMYWPDSLGPLDLEIPSSTKYHSEDLIFSDSLSGLNRLIASSLDAFQNCSFFGFDKKEAPSTVEARESATLSDFKIGSGI

SEQ ID NO: 266727 - protein, 96 aa, Glycine max
  Clone ID: PAT_MRT3847_82876C.1.pep
ILDTLVIYIRLSSLPIHRVLLIYLEGLVYIYVLGHSQFSFNRLVIVTLWITAVFSRIVSHRSVGSYRDFIPGVLRVQLYPLMRLGFRRLSIGKDGT

SEQ ID NO: 266728 - protein, 74 aa, Glycine max
  Clone ID: PAT_MRT3847_82877C.1.pep
PPSSFFFFFGKKIYSYWGGAKNHLVPPKHTTCFPKQRQWLCYNLWFWCITKRMHSYFYPIILLYDSVHGLAFSN

SEQ ID NO: 266729 - protein, 75 aa, Glycine max
  unsure (1)..(75): unsure at all Xaa locations
  Clone ID: PAT_MRT3847_82878C.1.pep
SLNDMPXSFXMXRTIKNIAPPXPPPXRDIYILDACXXXSHSPXQPREIQXLCYLVAGTEVLPMHARRTEGIRSGL

SEQ ID NO: 266730 - protein, 49 aa, Glycine max
  Clone ID: PAT_MRT3847_82879C.1.pep
NCVKLIGHTRSLLNLDWISHIHGLEKKIPKGLKLFLHYCKKLYIILCNQ

SEQ ID NO: 266731 - protein, 66 aa, Glycine max
  unsure (1)..(66): unsure at all Xaa locations
  Clone ID: PAT_MRT3847_8287C.1.pep
LSPKKSWVPWDVQNPVXGWPQVSQGGPFPPVRGPGPXVPLFKPKAPLPFFPSFLPGKPFSKSLKTQ

SEQ ID NO: 266732 - protein, 86 aa, Glycine max
  Clone ID: PAT_MRT3847_82880C.1.pep
SFGWIHGLRFSGVDLDRFPNLKAWWERINERPAVQAGLAIPSKPGIGNDGYLQKLSEDKEFAAKEKEIADQIQKAKEQYGYKYSSP

SEQ ID NO: 266733 - protein, 77 aa, Glycine max
  Clone ID: PAT_MRT3847_82881C.1.pep
KTPDQHLSVRIKQRRLLGMNKSAEQHTPAHITNTAEHTLREIKTRRNHIEHGERSQGQEYKDDSILWAHKLGAAGKY

SEQ ID NO: 266734 - protein, 44 aa, Glycine max
  Clone ID: PAT_MRT3847_82882C.1.pep
YLANVAGYSNELAVLLLLGWIGRYTPARDDVCTPVTGPWTVRSI

SEQ ID NO: 266735 - protein, 55 aa, Glycine max
  Clone ID: PAT_MRT3847_82883C.1.pep
LGKIYDVFLVTKCVFVFRMSGQKKLSCDQFSTFFFTLQLNNFFYHYFYFLSSLFS

SEQ ID NO: 266736 - protein, 47 aa, Glycine max
  Clone ID: PAT_MRT3847_82884C.1.pep
DHFYFWNTFKNQNHSGDLRMQKFLFMTKAHNCIGLFQLLVKTFCRLK

SEQ ID NO: 266737 - protein, 87 aa, Glycine max
  Clone ID: PAT_MRT3847_82885C.1.pep
EHFQYRQIHIFKGGGWVGKTIKTKLFTNTNKNQQSNTLVVATLLAFNLLSLFQDKELFGIRNSTRKGNIRSPPFLHHSASLSVHVKQ

SEQ ID NO: 266738 - protein, 71 aa, Glycine max
  Clone ID: PAT_MRT3847_82886C.1.pep
TMPDFVLRGSDHHSDGASCNIGASCSDIMFIVILQLMCQGFPPMGVFEARYCSNQRSFGILRSSVDHLVIS

SEQ ID NO: 266739 - protein, 89 aa, Glycine max
  unsure (1)..(89): unsure at all Xaa locations
  Clone ID: PAT_MRT3847_82887C.1.pep
EALAAGADVSMIGQFGVGXLIWXXCXXKRXXXPPKHNXDXQYXWXSXQAGGXFTXXRDTPGEVLXGVLRSFXFXKEDXXXXLKDXRXKX

SEQ ID NO: 266740 - protein, 62 aa, Glycine max
  Clone ID: PAT_MRT3847_82888C.1.pep
FLIETINISYIQSGQSSDGDKFNLNRLLMISETTKGSMLYLKTLQIKKELMNITYYRNHFSL

SEQ ID NO: 266741 - protein, 123 aa, Glycine max
  Clone ID: PAT_MRT3847_82889C.1.pep
GHHFRLFPRFFSSFWGAPFGGQRFPPLFGLPPHWGGLRAALFLVLFNVPFWGRRPRIAVPPWTHIFFLGNALPFFFPPRPTDFFTNPKLFLVGLFFFLMPSFLFVLCSFFLNHVPLKFSVFPG

SEQ ID NO: 266742 - protein, 61 aa, Glycine max
  Clone ID: PAT_MRT3847_8288C.1.pep
IRRGAPLTRGGIIPSPPPLYKKEEFVFVFFLGRKLCWLTRGYFVAHYYLLWLVSAVHLLVQ

SEQ ID NO: 266743 - protein, 75 aa, Glycine max
  Clone ID: PAT_MRT3847_82890C.1.pep
LTLPLALSSAHSWEHTLRRTLRGPKRLPQGLTGVLIVRWGARAVPKGLPRGHTRNHGTNFVTTLDFFNDLKMVLM

SEQ ID NO: 266744 - protein, 82 aa, Glycine max
  Clone ID: PAT_MRT3847_82891C.1.pep
FQYESCSSYLMKIVEPIMKSYMNEIHVDSYELSVTESKLAWFTHIVAPILRTKQISGSSGESHEILDAEISACVLQLINICD

SEQ ID NO: 266745 - protein, 58 aa, Glycine max
  unsure (1)..(58): unsure at all Xaa locations
  Clone ID: PAT_MRT3847_82892C.1.pep
SHIIYILRYDPXXPHKLKLVIHSSPEAPLVFKVAXXTSVICNAIVTLXXFGIVMXVAD

SEQ ID NO: 266746 - protein, 128 aa, Glycine max
  unsure (1)..(128): unsure at all Xaa locations
  Clone ID: PAT_MRT3847_82893C.1.pep
DQEHKKKVQPXNALENYVSTVRNGVRYGTTGEKLDLTGDKKIEVAMEQAIQWLASDQLAGADAFEAQMXELRSIRIPIIDNMYQAGAGPHMGGGGAGPSECENQAPFGVIGAGLKMEEGVQMRVAFIQ

SEQ ID NO: 266747 - protein, 45 aa, Glycine max
  Clone ID: PAT_MRT3847_82894C.1.pep
VVPLFIFDSRSFPSVNQSHSRPNDIVPGMRNRDIHVRSSRNRRVA

SEQ ID NO: 266748 - protein, 87 aa, Glycine max
  Clone ID: PAT_MRT3847_82895C.1.pep
NVPRPKTTHLVPQFSSFSFSFSSSSRYHMQKGQIFRNYPPLYTSSRQEAHSTCYGNREPGLGGPYNPVLSSLTTMQAHKQAHKSAQR

SEQ ID NO: 266749 - protein, 159 aa, Glycine max
  unsure (1)..(159): unsure at all Xaa locations
  Clone ID: PAT_MRT3847_82896C.1.pep
AFSRRSHELWETYAGMPTTERGRGILISGEAKSTSLVYPKGEWGAMRNLQTPLTGSGTGDNAYPATGGAFSPTGKGGASAKPSGXVKDRGPPNDFGLKKGVRGLFGRIDELXWAPEGLKNGACGESKGKSLVRAFMGESGTNGWEFDGHSRRGLRCAYK

SEQ ID NO: 266750 - protein, 100 aa, Glycine max
  unsure (1)..(100): unsure at all Xaa locations
  Clone ID: PAT_MRT3847_82897C.1.pep
MEITIICQGENLLICVLLLLQTXGASVGITLSXNAVATGAEPLHGRSEIYHFHNVSGAGTNSWIVHFXGRRWSNNVTTCLPRLDTRLGSSDTMVTSLSFF

SEQ ID NO: 266751 - protein, 37 aa, Glycine max
  Clone ID: PAT_MRT3847_82898C.1.pep
WLLSSLLWWMCASWMFDLHCCFGPHLCVCCVWGQGFF

SEQ ID NO: 266752 - protein, 121 aa, Glycine max
  Clone ID: PAT_MRT3847_82899C.1.pep
PRARRVLSLAGLLLKLGTIGDGEKIAAKIRECAGSEVLEMRGNTLGVGATAPIAEALECQSNSKRALWSDMFTGRLKEEIPRTLKTLCDAMILRGARLTELDLSDNAIGPMAVPGIKEFLA

SEQ ID NO: 266753 - protein, 221 aa, Glycine max
  Clone ID: PAT_MRT3847_8289C.1.pep
LEPNRLEIEISNGCVEAIAMNACKEQLVSGLSKLDCDGKSEELKEDCVAWWVEDLSVLRIDYFQRVICAMGRMGVRSDSIIASLMHYAQSSLKGIGKCQFWNPSRTNSSPTSVEKDQRIIVETLVSLMPTDKGSSIPLTFLFGMLKMAIMLGATIPCRLELERRIALRLEMVLLDYLFILIFSYVLSPYFMLSPVSFFLYFYPFIVFNFIIFIFNFFHSSV

SEQ ID NO: 266754 - protein, 82 aa, Glycine max
  unsure (1)..(82): unsure at all Xaa locations
  Clone ID: PAT_MRT3847_828C.1.pep
QADPEPPNTPGEEVKGGRRTEXDKRKTGRNSQNSRGGGQEDADGRHEQNPEKGQQARSQMGGRAPTGERTGEKRTAQGKPQQ

SEQ ID NO: 266755 - protein, 74 aa, Glycine max
  Clone ID: PAT_MRT3847_82900C.1.pep
ETRFLHLQFTKTRVKVRTLKDVEVAENQISKTGKMHAILRYRGSVNCGQRLSNGGKSEMKSSENPKSQRIKMKK

SEQ ID NO: 266756 - protein, 68 aa, Glycine max
  unsure (1)..(68): unsure at all Xaa locations
  Clone ID: PAT_MRT3847_82901C.1.pep
TIKSGEWEVGNTSLPDRYEDLVXAGVLAPAKAIRCSLQMVASVPETVLSTQAFVVDKPKPQAPVDGAP

SEQ ID NO: 266757 - protein, 36 aa, Glycine max
  Clone ID: PAT_MRT3847_82902C.1.pep
NRDTYALKNKYRNLLYKTTSSANMKYIRSSCIDMGW

SEQ ID NO: 266758 - protein, 241 aa, Glycine max
  unsure (1)..(241): unsure at all Xaa locations
  Clone ID: PAT_MRT3847_82903C.1.pep
MFLMKFVKCVNGCRWAAIASYLPQRTDNDIKNYWNTHLKKKLKKMQSGGDDDDNNGDKLNSCYSQNKGQWERRLXTDIHMAKQALWEARSRDKPTQIFPETKLPSTSSHHHPTTTTTPNQTTSLYASSTENIARLLENWMKKSPNITTTTATTPVTIFFSVTTMVITTGSSSSEGTQSTITCTQEYALDSLWSFNSERSSQSEENTNLGESKPQYQEPSETQVPLMLLEIGSLMMLHLNAM

SEQ ID NO: 266759 - protein, 188 aa, Glycine max
  unsure (1)..(188): unsure at all Xaa locations
  Clone ID: PAT_MRT3847_82904C.1.pep
MALELMGFPKLDEQKAIQEAASEGLKGMEHLIRTLSHQPSHLNTELTDVTVSKFKKLISLLNRTGHARFRRAPVQYSSPPAPVHNANTSTSSXSTPSPPQNPNIPAPAQFPSPAPVAVHHAPVTLDFTKPHNALLSSNAKSVELEFSKETFSVSSNSSFMSSAITGDGSVSNGRIFLAPPXTSARKPP

SEQ ID NO: 266760 - protein, 94 aa, Glycine max
  Clone ID: PAT_MRT3847_82905C.1.pep
NSPNSLSLSTMAPTFVPKLVSAAALLFNSTMAQSPTSSPALTPTNTPVGTPPKRALSPFPVPAAVPTVVLSLRGPPTFFSFGTPNLQLLLPNIP

SEQ ID NO: 266761 - protein, 80 aa, Glycine max
  Clone ID: PAT_MRT3847_82906C.1.pep
PTRPGHQIYIITNSMAWCFNFLFCGLLKLLSCLARCGDSCYDNRRDFYSMIGCCDSMKIFYAYYLFYIVGQFLASNLKVG

SEQ ID NO: 266762 - protein, 84 aa, Glycine max
  Clone ID: PAT_MRT3847_82907C.1.pep
GTSRRPLFFFFFFFFFWKAPLHGFLRRLVLPLFRPTCRGLPGGQLHGSWALGSGLTAPPGRGGVLDDPSRLFRVAVALCVGSVP

SEQ ID NO: 266763 - protein, 83 aa, Glycine max
  unsure (1)..(83): unsure at all Xaa locations
  Clone ID: PAT_MRT3847_82908C.1.pep
DPPFFNPKPWGPKFGGGKKRGGRGAPGQNHFPPPLKNRKKKKKGNPGKKKKTPPKGFQNPGKQRGRXKKNPPKPWNQGPPNFF

SEQ ID NO: 266764 - protein, 67 aa, Glycine max
  Clone ID: PAT_MRT3847_82909C.1.pep
LACMVPTHITVRRVLYALSSGFVQLIHDCSCGVSLLCNRYWIICLHRSAPIILVKFLQLALLFADAG

SEQ ID NO: 266765 - protein, 80 aa, Glycine max
  Clone ID: PAT_MRT3847_8290C.1.pep
MLKMNTILDLEALEIEEGSPRSQGSETPSSRSSTSDSESQGSFAGTPNNNNQWRGFFKLLKTGSHMPFHTFHPLKNVPKL

SEQ ID NO: 266766 - protein, 70 aa, Glycine max
  Clone ID: PAT_MRT3847_82910C.1.pep
GAEREGGIRRKWGNGKKSGVRLRKKPTKAPRFIILSLHQLCLILPFPFLSLFSFASLLPVQLAFLHLVPN

SEQ ID NO: 266767 - protein, 63 aa, Glycine max
  Clone ID: PAT_MRT3847_82911C.1.pep
KRKGTCSSTILINNTRLSPSIKRETRHEAFASSNNHSISSSVACLGLTLGCQTSIFRGRERKA

SEQ ID NO: 266768 - protein, 100 aa, Glycine max
  unsure (1)..(100): unsure at all Xaa locations
  Clone ID: PAT_MRT3847_82912C.1.pep
KARLNTEGWPIKIWPQVGSSQGRAYRIYRLVXAAQNRPGTSSALRLSSELPNDGKWRGGAFRMKETPHRRAQAERVFGHCGLNRKQILGRWAHGSIRPGR

SEQ ID NO: 266769 - protein, 118 aa, Glycine max
  unsure (1)..(118): unsure at all Xaa locations
  Clone ID: PAT_MRT3847_82913C.1.pep
ASATLSVAKPAPSANGKGFSESSGLRSXQASLPFSRXSSEDFHSGICXQTLPVGSRGGFQKGVDRNQTXKVAKTGFGRIGGNLLGGLTGPKKPPLVSFPKKTPGGGKKTLTLLKNKST

SEQ ID NO: 266770 - protein, 355 aa, Glycine max
  Clone ID: PAT_MRT3847_82914C.1.pep
SYRIRLELTVGRPVVTNIVIPICIKNAISSQTEENALSDVEVLRLAAAVETNSVHPVGKAIVDAAQAANCHNAKVKDGTFLEEPGSGAVATIYDKKVSVGTLEWITRHGVINSIHQEVEKSNNQSFVYVGVDDTLAGLIYFEDEIREDARDVVDRLSKQNIGVYMLSGDKRNAGQVGASLVGIPKEKVLSEVKPDEKKKFINELQKDNNIVAMVGDGINDAAALASSHVGIALGGGVGAASEVSSIVLMRNQLSQIVDALELSRLTMNTIKQNLWWAFIYNIVGIPIAAGVLFPINGTVLTPSIAGALMGLSSIGVMTNSLLLRFKFSSKQKQIHSISPKTKIHVAQNQKTNHPY

SEQ ID NO: 266771 - protein, 89 aa, Glycine max
  Clone ID: PAT_MRT3847_82915C.1.pep
KKEIFPLKARGNFRPKNPKFRAFPIFSPLQGKTGLFCSHFSLSENLKGGFNQPILKINFGTFLFSGIRPAQFVNPFLVNGAFKKPGILD

SEQ ID NO: 266772 - protein, 93 aa, Glycine max
  Clone ID: PAT_MRT3847_82916C.1.pep
NLRFHNREVVDIHRSKLYLVRFGCFGNIIALFCKPTFFFSLYSISKRSLKQFHHFSFNHYLGWTKTFMMSYLYMFLDAIAMYTYVVWTFGGCY

SEQ ID NO: 266773 - protein, 51 aa, Glycine max
  unsure (1)..(51): unsure at all Xaa locations
  Clone ID: PAT_MRT3847_82917C.1.pep
GSFEFFQGKAPINKGGLFKKRVPRNWNPSLKKSHLRLQFNRHKTGXXGRLN

SEQ ID NO: 266774 - protein, 48 aa, Glycine max
  Clone ID: PAT_MRT3847_82918C.1.pep
MADLDRHIKHLMERKPLPDTGVKALCDQARAILVEEWNRHPAKSPGTI

SEQ ID NO: 266775 - protein, 391 aa, Glycine max
  Clone ID: PAT_MRT3847_82919C.1.pep
MAPMGDNVVVSNMELEKLLSMKGGKGEASYANNSQAQAIHARSMLHLLRETLDRVEVVEGREVAFVVADLGCSCGSNSINVVDVMIKHMMKRYEALGWQPPEFSAFFSDLPSNDFNTLFQLLPPLANYGVSMEECLAANNHRSYFAAGVPGSFYRRLFPARSVDVFHSAFSLHWLSQVPESVEDKRSSAYNKGRVFIHGAGESTANAYKKQFQTDLAGFLRARSVEMKREGSMFLVCLARTSVDPTDQGGAGLLFGTHFQDAWDDLVQEGLISQEKRDNFNIPVYAASLQDFKEVVEANGSFAIDKLEVFKGGSPLVVNQPDDASEVGRALANSCRTVSGVLVDAHIGDKLSEELFLRVERRATSHAKELLEQLQFFHIVASLSFAQMIRD

SEQ ID NO: 266776 - protein, 35 aa, Glycine max
  Clone ID: PAT_MRT3847_8291C.1.pep
SLPARKNNDILEARSKSNSETHFNVISLSVSFITT

SEQ ID NO: 266777 - protein, 91 aa, Glycine max
  Clone ID: PAT_MRT3847_82920C.1.pep
FFSSDTSTSFFSSVASPSFFSSCTTASFFSSVNSISFFSSVTCTSFLSSMTSASFLSCAPSISLLSSVTSTSLISSMTSASFFPSVVFSQP

SEQ ID NO: 266778 - protein, 46 aa, Glycine max
  Clone ID: PAT_MRT3847_82921C.1.pep
LIKDVCSIVVLYQKKKSVNKCMCSMFFFAQCKFRLLNLCIHRIFQV

SEQ ID NO: 266779 - protein, 58 aa, Glycine max
  Clone ID: PAT_MRT3847_82922C.1.pep
KLMAYAISLGASINQYKTPRCVKFAPVVELLNSRVVEKYFSPKCPKWVPGHKQWINQN

SEQ ID NO: 266780 - protein, 187 aa, Glycine max
  unsure (1)..(187): unsure at all Xaa locations
  Clone ID: PAT_MRT3847_82923C.1.pep
SSSTLPSQNNGLLRYKSSIHYTDILTLSRRKMASTLKDTSRVDPCSKCDITISMTILSAYFXKIGTARQRKRLALLIXIHLDMMHGTIVSLITIIPLDVDAELPVTDLALDLHQKSGEPEHLIPDCIXARSYIHSVHXEQSYSIHVHRTDNHVISTGAIAGLDYIVRLLLSALQYILNMFNSVSIIT

SEQ ID NO: 266781 - protein, 96 aa, Glycine max
  unsure (1)..(96): unsure at all Xaa locations
  Clone ID: PAT_MRT3847_82924C.1.pep
ARIDRLQEAGNFSSQITAGGFSPCLRKISAMGYVTFGLCKAATIVNISTGGKPNEGVVTXTPFVPSRYDVPSGFTFGLIFWTFPNCSLPCSLCFPP

SEQ ID NO: 266782 - protein, 122 aa, Glycine max
  unsure (1)..(122): unsure at all Xaa locations
  Clone ID: PAT_MRT3847_82925C.1.pep
DPFFGGMQXFATPMPPLDEEILSKVAQDMVEEWFDCVDEEDSFEEVSLSAALNGAEGLDFMERIPFATFEGFPHVLSRKIGQKGKRRFVSGDGEKITSFSGTSVEEAYNKLIXELEKSVPTL

SEQ ID NO: 266783 - protein, 103 aa, Glycine max
  Clone ID: PAT_MRT3847_82926C.1.pep
GSRFYKIFFCIFMISPFGWGCVRNRDIKSPGFTIEAFVTCELALWAIALMSHLCVQIGPLLTTHGSLEAPQRMMAKPVRCCILSLADDDYSICLNVSASLLRN

SEQ ID NO: 266784 - protein, 66 aa, Glycine max
  Clone ID: PAT_MRT3847_82927C.1.pep
LHGPNPWLPWAGQSPLGAECVPDFSSFHVCFTFPMRPPCIRFQCQQFVTLNCHAYGLLYSYGDWSP

SEQ ID NO: 266785 - protein, 112 aa, Glycine max
  Clone ID: PAT_MRT3847_82928C.1.pep
RSLDSVEQCQETSCNEMLSKNRVVFQCIIPVGRNMIILACARNSFSLGRLVKRQFHDCNQPSVCQLSLTCNQWKHIWKHSRNCRICPNGMTCGDCVIEMIFFPACFEQRGLH

SEQ ID NO: 266786 - protein, 123 aa, Glycine max
  Clone ID: PAT_MRT3847_82929C.1.pep
MLVKSLMMETIRLNTYNVLLIVDIFLGLMHYPTAILYRPSLIAAAAVFAARCTLGRSPFWTSTLKHYTGYSEEQLRDCAKIMVNLHAAAPGSKLRAVYKKFCNSDLSAVALLSPAKENCLEQA

SEQ ID NO: 266787 - protein, 383 aa, Glycine max
  Clone ID: PAT_MRT3847_8292C.1.pep
MGAGGRTDVPPANRKSEVDPLKRVPFEKPPFSLSQIKKVIPPHCFQRSVFRSFSYVVYDLTIAFCLYYVATHYFHLLPSPLSFLAWPIYWAVQGCILTGVWVIAHECGHHAFSDYQLLDDIVGLVLHSGLLVPYFSWKYSHRRHHSNTGSLERDEVFVPKQKSCIKWYSKYLNNPPGRVLTLAVTLTLGWPLYLALNVSGRPYDRFACHYDPYGPIYSDRERLQIYISDAGVLAVCYGLFRLAMAKGLAWVVCVYGVPLLVVNGFLVLITFLQHTHPALPHYTSSEWDWLRGALATVDRDYGILNKVFHNITDTHVAHHLFSTMPHYHAMEATKAIKPILGEYYRFDETPFVKAMWREARECIYVEPDQSTESKGVFWYNNKL

SEQ ID NO: 266788 - protein, 102 aa, Glycine max
  Clone ID: PAT_MRT3847_82930C.1.pep
RVLPITALMIGGKRIITIHLYVDPPKWKADESMGMNKDETVHWMHPTLTKIDHHSEDCNNMITLQHDGLIQRCELIPEKDSSELMTVIGHIDTYPGWHFIMG

SEQ ID NO: 266789 - protein, 176 aa, Glycine max
  Clone ID: PAT_MRT3847_82931C.1.pep
MGRSLEKPTKMEIDLSLKIDTDDEHKEEEDERVKEDEEQEMAQIQDNNKEEIPEATAGEIEDDASVIETSLQDNTKTKELSVLQMEMESMKEENKVLRKVVEQTMKDYYDLQMKFSAIQENNKRKDHEISLSLQDIATTSGERPSRILEIFNKQMQSAPSSPHPDHDDDSLSESEL

SEQ ID NO: 266790 - protein, 108 aa, Glycine max
  Clone ID: PAT_MRT3847_82932C.1.pep
SVKFILSIQSYDAPSPLYFFLISPSPSSFLQPVTATLFLTRHHKRHHSPLQKFISNNGDCDDEPPFFLLASLFPSQTTECSRNILIFNKSKSNFNVYTNSKPIIVMSL

SEQ ID NO: 266791 - protein, 100 aa, Glycine max
  Clone ID: PAT_MRT3847_82933C.1.pep
FIRPPTRPGDDRDGRESHRGNDQDEKRGETESHRLHHGDRWRGGDEDRQKINDRRGRHDSEEEDYRELARKSERDRDNNRDRDRRQRVAKGGDNVWDLSL

SEQ ID NO: 266792 - protein, 172 aa, Glycine max
  Clone ID: PAT_MRT3847_82934C.1.pep
MRQRMDRLVILPFSAGCISEASVAVGVPHPRRSKPDTNASPPTIKRSKSVEDSEILSGESMKNSLRLLDVVPKSNLSYGFNRLVKGFKNFSQLFVEKDEFEEVEIDMEIGCPTDVQHVTHIGWDGIATSAADPMKGWDALIPHELLSLSSSQSLQHHQDLPNLDAKHDDSPN

SEQ ID NO: 266793 - protein, 110 aa, Glycine max
  Clone ID: PAT_MRT3847_82935C.1.pep
WFKGTYPQKNFKFWAPSVPVVPEDHFPVFAWLSKNVKEEESLFIKAKPGVVEEIIKPRPIRLVDDLFLKCKNKWWQRGKPMKKNERPFWGCLALYGRVRDKGVPVPQWWG

SEQ ID NO: 266794 - protein, 70 aa, Glycine max
  Clone ID: PAT_MRT3847_82936C.1.pep
KQHTVNILNISANMVNLTQKTSTDKFCKCPKSRYLPGYAKNKPKRGLCTLGEIRKLQARNRNMSSCRRVI

SEQ ID NO: 266795 - protein, 754 aa, Glycine max
  Clone ID: PAT_MRT3847_82937C.1.pep
MAVDFSKAVDDGLKLSKRIYFVKDRAVSPPKPPPPMARWATAFLPSAPMVYAVISDPGIVDNPDISSYQPHVYGRCDPPALIPLQMNAIEMEADCYHETAFVTVSGTWRLHCVMGSRSCDCRIAVPVSHQGSILGVEVSVSRKSYSTQLVVMGDENGNQNSAPPQNGGFLIPNIFTLTIPQVDGGSNLSIKVRWSQKIVYSKGQFSLNVPFTFPDFVNPAGKRISKREKIQINVDAVTGVELLCKTISHPLKEVRRHAGSMGFLYDSDVLSWSKVDFSFSYAVSSSHINGGVLLESASVQDFDEREMFYMYLSPGDIQSHKVFKKDIIFIIDISGSMRGKLIEDTKNALLTALSKLNHDDSFNILAFNGETYLFSKAMDLASGDAVERATEWINTNFIAGGGTNISHPLNTAIEMLSNIQSSVPIVFLVTDGTVEDERQICAMVKNRMINGESICPRIYTFGIGSFCNHYFLRMLAMIGRGQYDAALDVDLIEPRMLTLFDKASSLILANIKMDTLDDLDDLEVYPPHIPDLSSEGPLILSGRYRGNFPKTLKVKGILADFSNFVVDMKIQNAKDIPVQKISARDQIEHLTAQAWLMENKQLEQKVAKLSLQTGFTSEYTRMMIHETDHLKKVKESSGPKEASKKSNPLFEAPVQGQRMILLPHLGIGFGNLTATAENTPPGFESKLPEVPEIFKAATNCFETLCSYCCCMCCIQCCTRINSQCATALAQLCIGLGCFGCISCCSDICCSGNEG

SEQ ID NO: 266796 - protein, 103 aa, Glycine max
  unsure (1)..(103): unsure at all Xaa locations
  Clone ID: PAT_MRT3847_82938C.1.pep
HPKETGLIIFSPIDKETERERKKCPAVGGLNNDRGQRSTPGSLTXLFETETWIVFFKGGVIFGYHIGISSGVTSMGAGVLMFFPGGVRKKNCDKRGIQYCDYD

SEQ ID NO: 266797 - protein, 599 aa, Glycine max
  unsure (1)..(599): unsure at all Xaa locations
  Clone ID: PAT_MRT3847_82939C.1.pep
NYIYNFSFVTNENESYFTYSMYNSSIISRFVMDVSGQVKQFTWLENXQQWNLFWSQPRQQCEVYAFCGAFGSCTENSMPYCNCLPGFEPKSPSDWNLVDYSGGCERKTMLQCENLNPSNGDKDGFVAIPNIALPKHEQSVGSGNAGECESICLNNCSCKAYAFDSNGCSIWFDNLLNLQQLSQDDSSGQTLYVKLAASEFHDDKSKIGMIIGVVVGVVGXIYSLSGLQVWLSLARTDVYSYGXDAFGSLCRXEYRDLQNATKNFSEKLGGGGFGSVFKGTLGDSSGVAVKKLESISQGEKQFRTEVSTIGTVQHVNLVRLRGFCSEGAKRLLVYDYMPNGSLDFHLFHNKNSKVLDWKMRYQIALGTARGLTYLHEKCRDCIIHCDVKPENILLDAEFCPKVADFGLAKLVGRDFSRVLTTMRGTRGYLAPEWISGVAITAKADVYSYGMMLFEFVSGRRNSEPSEDGKVTFFPSFAANVVVQGDSVAGLLDPSLEGNAEIEEVTRIIKVASWCIQDNEAQRPSMGQVVQILEGILEVNLPPIPRSLQVFVDNQESLVFYTESDSTQSSQVKSNVSKTSSSHAISNISSASSKSLGGEN

SEQ ID NO: 266798 - protein, 249 aa, Glycine max
  Clone ID: PAT_MRT3847_8293C.1.pep
AENRALESRHHSNTGSLERDEVFVPKQKSSIMWYSKYLNNPPGRVLTLAVTLTLGWPLYLAFNVSGRPYDRFACHYDPYGPIYSDRERLQIYISDAGVLAVCYGLFCLAMAKGLAWVVCVYGVPLLVVNGFLVLITFLQHTHPALPHYTSSEWDWLRGALATVDRDYGILNKVFHNITDTHVAHHLFSTMPHYHAMEATKAIKPILGEYYRFDGTPFVKAMWREARECIYVEPDQSTQSKGVFWYNNKL

SEQ ID NO: 266799 - protein, 96 aa, Glycine max
  Clone ID: PAT_MRT3847_82940C.1.pep
AKRKGFPRWKLGGYKFPHRFETPPPHRLFGHLIMGNGTWLKNNSPHLYHRKKSNNFYIKGVLINGGPWGKGRTKKKPPPNIASKPQVTGKGQIGGG

SEQ ID NO: 266800 - protein, 83 aa, Glycine max
  unsure (1)..(83): unsure at all Xaa locations
  Clone ID: PAT_MRT3847_82941C.1.pep
QKERIPGEEKDGGEGAGCVVGSEQVPRETAVGXAAQNQDXXRITRAGPXXXLTHDYXXXXRXGXRLCXFLXLYITVLPLWSXG

SEQ ID NO: 266801 - protein, 46 aa, Glycine max
  Clone ID: PAT_MRT3847_82942C.1.pep
PPQLDFRALPPVILFDYLTAVKCIDSSYYCLTQVIHGCSCNYIINV

SEQ ID NO: 266802 - protein, 45 aa, Glycine max
  Clone ID: PAT_MRT3847_82943C.1.pep
LLTDSMRMHLVFDMQVSGQVPCGDHVSLHVAESVVSDALSGGARA

SEQ ID NO: 266803 - protein, 132 aa, Glycine max
  unsure (1)..(132): unsure at all Xaa locations
  Clone ID: PAT_MRT3847_82944C.1.pep
PKQEICDIRVIDDARTADRMLNWLNKQLCSLFGLDDQKLQNELFSFNVSDPGPIARTIYDVKEATSTAFDIILXHKMMKPGTGASLIKIIHLLTAHHTCKKCPKGTAEFVLSLDDLCPTNVRSTNKLAYDYR

SEQ ID NO: 266804 - protein, 37 aa, Glycine max
  unsure (1)..(37): unsure at all Xaa locations
  Clone ID: PAT_MRT3847_82945C.1.pep
GPTARVRPRXXHTXGFCLRIQLHNRSCVLLYKITCLX

SEQ ID NO: 266805 - protein, 99 aa, Glycine max
  Clone ID: PAT_MRT3847_82946C.1.pep
METSGEAVAAHGGGEVIMMDANSGEEENNNHNNKGKLEEGGGEEEEGDNKINNSCGGNRWPRQETLALLKIRSDMDVVFRDSSLKGPLWEEVARYTTHI

SEQ ID NO: 266806 - protein, 244 aa, Glycine max
  Clone ID: PAT_MRT3847_82947C.1.pep
IFVTDTKLEKVLSWSDRHKIIGGIARGILYLHEHSRLKVIHRDLKPSNVLLDENMNPKISDFGLARIVEIDQQEGSTNRIIGTYGYMSPEYAMFGQFSDKSDVYSFGVMILEIISGKKNIGSYEPHRVADGLLNFVWRHWKDETPLNTLDPKLRDNYSNIEVIKCIRIGLLCVQENPDARPTMLTIVSYLSSHSIELPSPQEPTFFLYHRMDPTVAHESSSRQSTNNSIPSSINEMSISKFYPR

SEQ ID NO: 266807 - protein, 32 aa, Glycine max
  Clone ID: PAT_MRT3847_82948C.1.pep
TSHRSIFYEPLRVIKERRWFLLGMWPSFYKRK

SEQ ID NO: 266808 - protein, 46 aa, Glycine max
  Clone ID: PAT_MRT3847_82949C.1.pep
RLEVVHEWFLSGRVNRAWDSSTMTSVGVAPTIGFLRIKWARFSMCC

SEQ ID NO: 266809 - protein, 85 aa, Glycine max
  Clone ID: PAT_MRT3847_8294C.1.pep
DDKGWLLRHPPESARLVKSVLSWNHVLFREANQVADALSKHGLSLVLLIALFFFYSVPSFLSVNICADVYCLRPSLVGFNNSFLL

SEQ ID NO: 266810 - protein, 50 aa, Glycine max
  Clone ID: PAT_MRT3847_82950C.1.pep
APGGFHPSPGKVCALKKSMKRPPPKKYGLNTCSRNTKKVARGCEASIDPY

SEQ ID NO: 266811 - protein, 42 aa, Glycine max
  Clone ID: PAT_MRT3847_82951C.1.pep
PNRKISFFSRGLLFQFFSCCCNIVSIHDLITIHGLLSLERIT

SEQ ID NO: 266812 - protein, 93 aa, Glycine max
  Clone ID: PAT_MRT3847_82952C.1.pep
EILFEILNKHLIGQICLWKSILCQISLQSLGLICLNEILSMDLRLQWNFRQPEINILYLSNYWKRIEKGRVKLKFYLAIAFFTVSLQLFLSLL

SEQ ID NO: 266813 - protein, 91 aa, Glycine max
  Clone ID: PAT_MRT3847_82953C.1.pep
HLTVFSEFICLHSQRKSQRVCYVLNLIIIKSEILSHTTHYMRLGMCNTHDIIDRIIWGCPRLYNMLYNSGCITLLRHFLQSKQKYAPLTTP

SEQ ID NO: 266814 - protein, 190 aa, Glycine max
  Clone ID: PAT_MRT3847_82954C.1.pep
LLIHFSTNSLGFTPEFLGRVKLVTSIASLLGVGLYNGFLKNVPLRKIFFATTLLGSTLGMTQVFLVTGLNRKFGISDEWFAIGDSLILTVLSQASFMPVLVLAARLCPEGMEATLFATLMSVSNGGSVVGGLLGAGLTQLFGITKDRFDNLAALIILCNLSSLLPLPLLGLLPGGNPDVNEEDNSDIEMK

SEQ ID NO: 266815 - protein, 552 aa, Glycine max
  unsure (1)..(552): unsure at all Xaa locations
  Clone ID: PAT_MRT3847_82955C.1.pep
MNCVYILSLIPYLPSNFSNYYPSLPRRTPIVTHSARFRRRTRRNPPEMEISGTVPSSGSSFRLSSDDGDPLLGSRIGAGTDDGDALTTETDPEVSSSSRIAARKNKYRTSSIKLFGVELSPDNVAVAMVYFVQGVLGLARLAVNFYLKDDLHLDPAEAAVLSGFSALPWLVKPLYGFISDSVPLFGYRRRSYLVLSGLLGALSWSLMATSDDNRYRAGFCILLVSLSVACADHQRKYQSRQNSELSFMGLFCXCTFSFLFNHVPLVSSYFSGSLLDAYRIRFVFGVTSLLPLITSVVAVLVKEQPMIGTARGLNLLFSGPEFLESSKQRIIQLWGSVRQRSVFLPTLFIFLWQATPQSDSAMFYFTTNSLGFTPEFLGRVKLVTSIASLLGVGLYNGFLKNVPLRKVFFATTLLGSTLGMTQVFLVTGLNRKFGISDEWFAIGDSLILTVLSQASFMPVLVLAARLCPEGMEATLFATLMSVSNGGSVVGGLLGAGLTQLFGITKDRFDNLAALIILCNLSSLLPLPLLGLLPGGNPDMNEEDNSDIEMKCN

SEQ ID NO: 266816 - protein, 201 aa, Glycine max
  Clone ID: PAT_MRT3847_82956C.1.pep
MLSAIAFGFSANWWLRCHGRTPPPLSFPVSVSYSSSFNSNSTKFNYIHRASSEGLPNELVEDSKFVPLNEEDPIYGPPALLLLGFEADEALKIRQLLKELDGEFLKVIYCTEDMIMRSLWEAMHTTQPNVEDVKIAKSLPRICFLSGLSGEEMMMFIDSFPETGLKPAAFAALVPNSANKPLEELIDEIMGDHEMLTGEQL

SEQ ID NO: 266817 - protein, 95 aa, Glycine max
  Clone ID: PAT_MRT3847_82957C.1.pep
LCKFYNFKLCFSFGLRQGPPYNVIGQSYVLLWLRNFMFRLRFIPFTFSSCTFVSFFWLWPANLYFSIVSPTQTHLLNYVRHGSLSLSLSPVQRTF

SEQ ID NO: 266818 - protein, 52 aa, Glycine max
  Clone ID: PAT_MRT3847_82958C.1.pep
QGGVVTINTKPKFVDKQTFSFVCSSSPKEHQTISHIGETCLIRWLRFNNTQK

SEQ ID NO: 266819 - protein, 86 aa, Glycine max
  Clone ID: PAT_MRT3847_82959C.1.pep
VPCRTKDRVVAASFVSKRLVQKRTRRLKSFFPGGESMGAVFLVEETLDYIQSLRAQVEVIKRLVTAPKIMILNPSGGKKKGLPKIR

SEQ ID NO: 266820 - protein, 75 aa, Glycine max
  Clone ID: PAT_MRT3847_8295C.1.pep
NKGCLKIWKQRCGIFLIPRGGQFPHGYATVKHVMGLGFFTPPFCAVLLLPPPAHGEEKILFSHFYVLRWFFFFCN

SEQ ID NO: 266821 - protein, 90 aa, Glycine max
  unsure (1)..(90): unsure at all Xaa locations
  Clone ID: PAT_MRT3847_82960C.1.pep
MESVPSTPHRGGTYSPKTAEYLIXTFFGDTPFPLSSKFWQTLLELYLNDQWSTQRXVNTLAXLLTKNNCHTMHLAKILLHLACCLQKYMS

SEQ ID NO: 266822 - protein, 150 aa, Glycine max
  Clone ID: PAT_MRT3847_82961C.1.pep
IRFYSNSVRVVVNGKGPDKQPFPRLFTKRSINYSVFFSLCFPRTCEFAISSRVTSVLLVGSFLASILCASLPSLMGSFFSFRVVCSVVVSRVPLLVPVCGCFLCCALLSLVVCARGGVLFARAALSLPRADSLWLLPFSSAGLIGQVGSP

SEQ ID NO: 266823 - protein, 219 aa, Glycine max
  Clone ID: PAT_MRT3847_82962C.1.pep
METHAEIRVSKFKRVCVFCGSSPGKKRSYQDAAIELGNELVSRNIDLVYGGGSIGLMGLVSQAVHDGGRHVIGVIPKTLMPRELTGETVGEVKAVADMHQRKAEMAKHSDAFIALPGGYGTLEELLEVITWAQLGIHDKPVGLVNVDGYFNSLLSFIDKAVEEGFISPNARHIIVSAPTSKELVKKLEDYVPCHESVASKLSWQIEQQLTYPEEYDISR

SEQ ID NO: 266824 - protein, 58 aa, Glycine max
  Clone ID: PAT_MRT3847_82963C.1.pep
RELFDHQPSRDLRRKEQVQPLKVILEENTRKENLPQKKIPEKFNNTQFFFFLFSFPPL

SEQ ID NO: 266825 - protein, 82 aa, Glycine max
  Clone ID: PAT_MRT3847_82964C.1.pep
LKYSRPTQSIFIGSYRTLLSLCFFYGGKRGVYLYLGVVLIILNNAILRPLFFFWFGIATIYFYPFIKICIYHSITKLSSNFF

SEQ ID NO: 266826 - protein, 57 aa, Glycine max
  Clone ID: PAT_MRT3847_82965C.1.pep
FFFFFFFFFFFFFFFFFFFFFSKKKIIKMTNFVKSKLLATDLLFLVLFGPPKIKNKA

SEQ ID NO: 266827 - protein, 77 aa, Glycine max
  Clone ID: PAT_MRT3847_82966C.1.pep
SRPTYGPLQPFMSICGHRGVCAFQELFAMDVHDRTPRSAEAVALDGPATEEARKVAVQNLSDPAPRKAWELAPHAHY

SEQ ID NO: 266828 - protein, 95 aa, Glycine max
  Clone ID: PAT_MRT3847_82967C.1.pep
NKFLLSLVLLALIIFCQGFHSIEGRYLKSGETIKHQMHSGISTTNVADVSPPTPPSAAVPGRDVDNFRPTAPGHSPGVGHTVHNKFIYNASSFSA

SEQ ID NO: 266829 - protein, 55 aa, Glycine max
  Clone ID: PAT_MRT3847_82968C.1.pep
RNCIYILWSYMLSNNQKLQKTPNGRFTSKISETQSLVLSRHLILNHIFQLGPLML

SEQ ID NO: 266830 - protein, 106 aa, Glycine max
  unsure (1)..(106): unsure at all Xaa locations
  Clone ID: PAT_MRT3847_82969C.1.pep
PTHRATRGGLFTGCSAFSHSDRGKTVKSDIGGAGTHYAEDSPEKEDQEKPIKIDARLRLCRDPQYIEVQAQMATXSIKLYIEDVGTPKGRMVDPKIFQSKIALPKN

SEQ ID NO: 266831 - protein, 144 aa, Glycine max
  Clone ID: PAT_MRT3847_8296C.1.pep
MVFFNNNKKILIGGAKPLVFFASPPTEKNKIIPGGFKLKMIDLGILGPNLIFSKTFKNWGAKTLFLSMEFAKSGKQLLGSGELLFKTGIYKNPRPLEKNGGQKELAQLPSFIKLETMFYPLVQQLFGPRGGGSLNGHPQLLSPR

SEQ ID NO: 266832 - protein, 56 aa, Glycine max
  Clone ID: PAT_MRT3847_82970C.1.pep
CVTTNLSNVLCILKLNLYSFIFKELFCQTKYLLKEKLLAQHALFITVAFIGRFCSC

SEQ ID NO: 266833 - protein, 69 aa, Glycine max
  Clone ID: PAT_MRT3847_82971C.1.pep
GCHKDSNDPKMSTDYMQLFRREKPTMSEKSDDAPSKARILGNMQYFHETVNKAQMVVYVQDTLEPKELA

SEQ ID NO: 266834 - protein, 61 aa, Glycine max
  Clone ID: PAT_MRT3847_82972C.1.pep
QPLVSGGFSKETNDLHYLSSSYLSFAEVSTCLTCILLDRVPYIFLRESRMIMSFLCKWEFY

SEQ ID NO: 266835 - protein, 67 aa, Glycine max
  Clone ID: PAT_MRT3847_82973C.1.pep
AICHENIHSKMKSTHVSNFSLIFVFPLRMVGYTGFVDVCFVFLLVRVCISQYAFGLITESCVIQMMA

SEQ ID NO: 266836 - protein, 133 aa, Glycine max
  Clone ID: PAT_MRT3847_82974C.1.pep
GSSKFCNLVMNDSLFDQLSSIQSLYPAYTVCYLTNRLLAYINKKEQEKYKNPENNSCWRRPPVEEVLAKLTTNFNKVHSRQCADEAELAEHVVGLTCSLASCQFRKKLSRLSVNANGALIPKDYVDRNLIKKS

SEQ ID NO: 266837 - protein, 97 aa, Glycine max
  unsure (1)..(97): unsure at all Xaa locations
  Clone ID: PAT_MRT3847_82975C.1.pep
IERGLAHHTDRVRTEVEEQKMKQSKMLVSAIQDAMANKLKEKDEKIQRMENLKRALKERIXSMCLENQISGELPQTNEATPNYLRSNEEQVLAHVGE

SEQ ID NO: 266838 - protein, 75 aa, Glycine max
  Clone ID: PAT_MRT3847_82976C.1.pep
LLKLKYLCYMCMFTADELLLADELYSVTCVCSRQHPVCMCMRMRLRNLLLRGLLLPLLFLPDRKNALPSQPLVDP

SEQ ID NO: 266839 - protein, 68 aa, Glycine max
  Clone ID: PAT_MRT3847_82977C.1.pep
RALPLIRACMFLYHCLEQDLNWTVGWASCTTTTTPMVLDEDHHARLTPGVPEDRSCHLERTWASRHTM

SEQ ID NO: 266840 - protein, 131 aa, Glycine max
  Clone ID: PAT_MRT3847_82978C.1.pep
SFFIFFFFFFHSLFFTSSSSLYLALSRLPHLNLKEKTAFYDKTHAFREKQLTPPLFLRPYNTYQKTNGAQLNNLSAEKKHRTKQKSRVVSSNPLNKKTCWGTKTSLQKKNFLGEKDPFKKNFFKKKKPLGK

SEQ ID NO: 266841 - protein, 52 aa, Glycine max
  Clone ID: PAT_MRT3847_82979C.1.pep
VMYGYPPRHFGITTQTAISVPDLASWIQERELMQKLIKQHLLRAQDRMKNQA

SEQ ID NO: 266842 - protein, 44 aa, Glycine max
  Clone ID: PAT_MRT3847_8297C.1.pep
HDICRVDIWHGHGDYGAPPSIETVHVIVSSGFFRLKSLASSKCE

SEQ ID NO: 266843 - protein, 117 aa, Glycine max
  unsure (1)..(117): unsure at all Xaa locations
  Clone ID: PAT_MRT3847_82980C.1.pep
PTRTRKTNKVFTYIVCNGGRGQCMQVWAQIGTKKSETLCYLPDLEDAKLSKEVEYLQRTGWTSCLEFKLEHCYVHREYNRSPGYYDGRYWTMWNLSMSGYTNASXVLKDLKEATTAY

SEQ ID NO: 266844 - protein, 125 aa, Glycine max
  unsure (1)..(125): unsure at all Xaa locations
  Clone ID: PAT_MRT3847_82981C.1.pep
PAYTHLGFIQPPRLATALASLGFNNRGTLPRQLHAHCHKLLPEHLCSGLVLHCENCPHSVASRRSVAASAVNFARLVSAAGLLAIATERPLEISCFGLSELGAHICSWLVSAAGCSPTRVLPXEP

SEQ ID NO: 266845 - protein, 216 aa, Glycine max
  unsure (1)..(216): unsure at all Xaa locations
  Clone ID: PAT_MRT3847_82982C.1.pep
MSFTGTTDKCKACDKTVYVVDMLTLEGIPYHKNCFRCSHCKGYLTMNTYSSMDGVLYCKPHFEQLFKESGNFSKNFQTAKSSDKQNETNKAPNRLSSMFSGTLDKCSVCXKTVYPLEKMTLEGECYHKNCFRCAHAGCHLTHSSYAALDGVLYCRHHFQQLFMEKGNYHHVLQSANHKKNVTPEPAEPAAEGDEEPPKPEESDSEEHTEEKPQNEA

SEQ ID NO: 266846 - protein, 70 aa, Glycine max
  Clone ID: PAT_MRT3847_82983C.1.pep
SGMICIFGYVSTLICNIVLGNSFVRNLVVRRLQSFRNHGVGSSLRRFKSDGPIFSMCPYIWSSALVLSRV

SEQ ID NO: 266847 - protein, 52 aa, Glycine max
  unsure (1)..(52): unsure at all Xaa locations
  Clone ID: PAT_MRT3847_82984C.1.pep
VWEVNNLIKQLDQGHENGSQCVSIIMSKVKNIYSSKSNQKKIFXDCIQYNFI

SEQ ID NO: 266848 - protein, 50 aa, Glycine max
  Clone ID: PAT_MRT3847_82985C.1.pep
KLRKRKSNFVVNILWTFELLTTQALNEQSQKHLVNKTRWFVKVLFLHVLI

SEQ ID NO: 266849 - protein, 224 aa, Glycine max
  Clone ID: PAT_MRT3847_82986C.1.pep
CARGNLHQSFSSGEGNRNPLDDSIVEQIAGRLSMISFLDVSYCIKIGPYALEMIGKNCKLLEGLCRNMHPLDTAEKPHQDDEAYAIASTMPKLKHLEMAYHLISTSGVLQILANCPKLEFLDQRGCWGVTLDHMFLKQKFPKLKVLGPLVLDTYESDGWDDFSDVSDSSEYLAWDFVAGGMGEYYVDDSDSYDGMWDDEARLDELQFGFYEGIEDAGMYWPPSP

SEQ ID NO: 266850 - protein, 217 aa, Glycine max
  unsure (1)..(217): unsure at all Xaa locations
  Clone ID: PAT_MRT3847_82987C.1.pep
MEEACEFRSWAELIPDALGVIFTNLSLQERVTVIPRVCKSWANAVTGPYCWQEIDIKDWSNRCQPDQLDRLLEMLITRSCGTLRKLSVSGLQTESIFTFIAENACSLHTLRLPRSSMNDSIVEQIAGRLSMISFLDVSYCIKIGPYALEMIGKNCKLLEGLCRNMHPLDTAEKPHQDDEAYAIASTMPKLKHLEMAYHLISTXGVLQILANCPKLEF

SEQ ID NO: 266851 - protein, 219 aa, Glycine max
  Clone ID: PAT_MRT3847_82988C.1.pep
HAIVKHSSPFSLFFLLSLCLSLRFLVRDPSRDPLTEGEMGLTFTKLFSRLFAKKEMRILMVGLDAAGKTTILYKLKLGEIVTTIPTIGFNVETVEYKNISFTVWDVGGQDKIRPLWRHYFQNTQGLIFVVDSNDRDRVVEARDELHRMLNEDELRDAVLLVFANKQDLPNAMNAAEITDKLGLHSLRQRHWYIQSTCATSGEGLYEGLDWLSNNIANKA

SEQ ID NO: 266852 - protein, 66 aa, Glycine max
  Clone ID: PAT_MRT3847_82989C.1.pep
LSDDQPDGEPMDLTTDNTGATEGATEAHTVAGIVECIRGYTHSSTTRPITELSEDYMESYGETPAK

SEQ ID NO: 266853 - protein, 46 aa, Glycine max
  Clone ID: PAT_MRT3847_8298C.1.pep
RNTLNRLSASKHLAQNNYWNLIGLASRITKLNSKIKQNREEIALSA

SEQ ID NO: 266854 - protein, 89 aa, Glycine max
  unsure (1)..(89): unsure at all Xaa locations
  Clone ID: PAT_MRT3847_82990C.1.pep
MPIRNIARRRPEEATHPDTXKADSADFIXTFILEFAGSGSGLAYNMLTDNEADTRGGLIYYYIDHALTLYVALCVGGNMYSGHMNPSRT

SEQ ID NO: 266855 - protein, 355 aa, Glycine max
  Clone ID: PAT_MRT3847_82991C.1.pep
CSLGIVPFINAQIVFQLLAQVYPKLQDLQKREGEAGRKKVLQYTRYASVGFAIVQAIGQVLFLRPYVNDFSTEWVISSVILLTLGSVFTMYIGERITDLKLGNGTSLLIFTNIISYLPASFGRTIAQAFNDANYIGLGTIVLSFFLLVVGIVYVQEAERKIPLNYASRFTSRSTGLEKSAYLPFKVNSSGVMPIIFSTSSLALPGTLARFTGLTALKKAAVALNPGGSFYLPFNILLIAFFNYYYTFLQLDPDDVSEQLKRQGASIPLVRPGRTTATFIKTVLSRISVLGSTFLAILAAGPAVVEQITHLTAFRGFAGTSILILVGCATDTARKVQAEIISQKYKNIEFYDFDKY

SEQ ID NO: 266856 - protein, 64 aa, Glycine max
  Clone ID: PAT_MRT3847_82992C.1.pep
HVGIVASYVSRPLTEISGNAEPTKYKLCVQDLSSNLVIFRRDCDCTQNLFTFIYLFIFQVYQSV

SEQ ID NO: 266857 - protein, 69 aa, Glycine max
  Clone ID: PAT_MRT3847_82993C.1.pep
MSRRSNYDRYGPAFTHPLSRPSHAETYDEMVQCMKIVAQLDLGLTVDGRLLLSVGYVTVIGSRRASWRV

SEQ ID NO: 266858 - protein, 72 aa, Glycine max
  Clone ID: PAT_MRT3847_82994C.1.pep
HSLNVQRWFIDCFLHDVGLTVVIVRRRRCRSVSIGLEVKFPNIFTVLLFYSAGESEGCGGSEQRKLHIIVGR

SEQ ID NO: 266859 - protein, 85 aa, Glycine max
  unsure (1)..(85): unsure at all Xaa locations
  Clone ID: PAT_MRT3847_82995C.1.pep
TTSPPCKPSPGSSRSSRQRGQSCRTVSVLPPSSPGCQAARXGLVRPLGLLVGQAHQEVTRXVHPPCWHTQAGVHPCLSGGPVSVC

SEQ ID NO: 266860 - protein, 64 aa, Glycine max
  unsure (1)..(64): unsure at all Xaa locations
  Clone ID: PAT_MRT3847_82996C.1.pep
KPPSGRFHSRHNIPXVNHRTGRVETKNMGSLSKWQRRFTMENILSQLKKGRGGLQNRKLVHPPK

SEQ ID NO: 266861 - protein, 35 aa, Glycine max
  Clone ID: PAT_MRT3847_82997C.1.pep
YCTMSWVLNFSSISIWFLACSYLLDNIRLKYVLVS

SEQ ID NO: 266862 - protein, 81 aa, Glycine max
  Clone ID: PAT_MRT3847_82998C.1.pep
SAGISLGICLLFVGVFARVPVWPEAFSQWEFAVCLLSRCWSLCVLMSFFPVLSCGGRGVVNVKVVFISPLLSSLAPGCVEK

SEQ ID NO: 266863 - protein, 71 aa, Glycine max
  Clone ID: PAT_MRT3847_82999C.1.pep
IGKNESQSRKRWVFELNRTTLRFVLLYIPTFSLFFFYLSFFFHFSWCQIMLFFLDNIFVKYWLAFILLIRS

SEQ ID NO: 266864 - protein, 58 aa, Glycine max
  Clone ID: PAT_MRT3847_8299C.1.pep
SITYLHDDNIADNVESSGEKFEYQAEVSRLLDLIVHSLYSHKGAPPSELVSNARDTLD

SEQ ID NO: 266865 - protein, 73 aa, Glycine max
  unsure (1)..(73): unsure at all Xaa locations
  Clone ID: PAT_MRT3847_829C.1.pep
SLCIKGIVLFCFFHLLLLDLLXAIWVIQXRDLGVDIQHIEEAMHNILVCLEIVIFSGVXQYSYYPSPYNNRNF

SEQ ID NO: 266866 - protein, 113 aa, Glycine max
  Clone ID: PAT_MRT3847_82C.1.pep
MGESFGVDIAESLLGKLASYAYEEASRAYGVYEDLKGIKDTLSIVKGVLLDAEEKKEHKHGLREWLRQIQNVCFDAEDVLDEFECQGSQKQVVKASSSVRVKVGHFFSSSNSL

SEQ ID NO: 266867 - protein, 68 aa, Glycine max
  Clone ID: PAT_MRT3847_83000C.1.pep
LFAVPSEPSSLIASASESTSSLFSMPMPLSLSSSEASASSSSSSSLIPPTKSLLHLLGAPLKPISQFP

SEQ ID NO: 266868 - protein, 54 aa, Glycine max
  Clone ID: PAT_MRT3847_83001C.1.pep
HITRERNFYISANMLEHVDRFTVITLKCRTKIFKQQQQQKSYPTAIKYSNMKGK

SEQ ID NO: 266869 - protein, 77 aa, Glycine max
  Clone ID: PAT_MRT3847_83002C.1.pep
HKRTQDTVFHSLSHTNLLRIQLNLRMYNYDFTLFFEIKNRLEHLPWEPRFCDIRICRANESGLLRLTFPGGQVPIIT

SEQ ID NO: 266870 - protein, 87 aa, Glycine max
  unsure (1)..(87): unsure at all Xaa locations
  Clone ID: PAT_MRT3847_83003C.1.pep
XARARADXARVNFLMRPISFVYSDREKSSSSSTAGGTGPTTTPHPYSAYFFDRLIFHHPYNRAYPTDKDLLLENCAQSSLNDAPVLA

SEQ ID NO: 266871 - protein, 67 aa, Glycine max
  Clone ID: PAT_MRT3847_83004C.1.pep
PTLVSRLMTAHNQLDRTPASLKPWHSQDGGSTSARPKPPMMATPSIFSHTHTTIISERHHLLQRTTR

SEQ ID NO: 266872 - protein, 49 aa, Glycine max
  Clone ID: PAT_MRT3847_83005C.1.pep
KKRGTPTTIKNKKTTSELKIKKSLHQTKRGKTHPTLKMFKNMGTLKRIN

SEQ ID NO: 266873 - protein, 77 aa, Glycine max
  Clone ID: PAT_MRT3847_83006C.1.pep
MLLPRLVYSLPIFTLRGMINCVFVTYAYTDAFVVLLPVTFFYRGLCCRPSILGALLLCSLFRRCPFPNVGLTWLFLH

SEQ ID NO: 266874 - protein, 155 aa, Glycine max
  unsure (1)..(155): unsure at all Xaa locations
  Clone ID: PAT_MRT3847_83007C.1.pep
MDAMKVVTLKAIEATPSTFKDYGQVIEASPDGQEFGSHDAQLDLSQGTPRFYIMHIENRPLKFSSITHHASVTQCLGSIGGHVWYLGVAKSSIVDSNEIKDGTSKKIVQSPSGHSYVPPAIEDVQVFRLXGSKFLKLNRGTWHAGPXIKAAAIDF

SEQ ID NO: 266875 - protein, 147 aa, Glycine max
  Clone ID: PAT_MRT3847_83008C.1.pep
MSRRQQIKKTGFRAFVKPVGAPTVAPVAPFGTCFATKDIQSTRMGPAVPDINLVLQNEVVWSIIGANSMVYTNDVICLGFVDAGSDPSTAQVGFVVGYSQPITSITIGAHQLENNMLQFDLATSRLGFRSLFLEHANCANFNFTSSA

SEQ ID NO: 266876 - protein, 99 aa, Glycine max
  Clone ID: PAT_MRT3847_83009C.1.pep
MSFINPSPSSTSRAIAPSGFATRRPWEEFFALHSFTRPYTLGEATLRVKRNLGHFRVNYAMVVLLVVFLSLLWHPISLIVFLAVFTAWFFLYFFRDGPV

SEQ ID NO: 266877 - protein, 54 aa, Glycine max
  Clone ID: PAT_MRT3847_8300C.1.pep
NLKNDPFILNLTTILYVSQYISKNKNASLKADHTDFNQFITSATTTICLTYTPH

SEQ ID NO: 266878 - protein, 55 aa, Glycine max
  Clone ID: PAT_MRT3847_83010C.1.pep
IRKTKNSARTCSTRVDGGTSVLCQNLEECEVNCVAKPAAIASGLGYETDYTIRPA

SEQ ID NO: 266879 - protein, 79 aa, Glycine max
  unsure (1)..(79): unsure at all Xaa locations
  Clone ID: PAT_MRT3847_83011C.1.pep
XXERGXGXXXXXLXSXRXXXXXXKXXHEQRXXXTXXSXXXGXAVRXXCXXXXXXGXXXXXXXXXXXXXXXXTXSEXFXL

SEQ ID NO: 266880 - protein, 109 aa, Glycine max
  Clone ID: PAT_MRT3847_83012C.1.pep
LQKFLLAIFLINNFINCNIVIEGLKSKGDELITMQPHLNETPGRGKPLKKHKQNLKQSQQSTATTRLADSLHSILVEKKTSIKEKDINKYKLIGIWFTPIPTVRVNIAG

SEQ ID NO: 266881 - protein, 96 aa, Glycine max
  Clone ID: PAT_MRT3847_83013C.1.pep
RTTNVHVSIPIIWSLITPILNPTQMRSEFLHESQFHIFNKFPSINPPISITIICHLITPILQPLETQISIPTTNSNSTFSGTYLPLFNSMQIKLVK

SEQ ID NO: 266882 - protein, 437 aa, Glycine max
  Clone ID: PAT_MRT3847_83014C.1.pep
MQEMDYNNEASNGIKFRNLYGSIPDVVVPLMYTEYTTRKVLVMEWIEGEKLSEVKDLYLIEVGVYCSFNQLLECGFYHADPHPGNLLRTYDGKLAYLDFGMTGEFKQELRDGFIEACLHLVNRDFDALAKDFVTLGLLPPTADKEAVTKALTGVFQNAVAKGVSNISFGDLLGNLGTTMYKFKFRIPSYFSLVIRSLAVLEGIAISFNPEYKVLGSTYPWIARKVLTDNSPQLKSSLETLLYKDGVFRIDRLESLVTESLRAKTEKAIVKQTEGTDSTMVMKEILSFTLTEKGEFVREIIVQEFAKGLDALGLATMETAAARVPFSSFFYSPLMTKEDIINLRNFRRLMLLLLGARRKEESSTESKQASPDKNQILYMEELSLVLNQVESIQDILPIISVILELPPESQQQLLQLPVNLVRKLISRAAARTVRRAFL

SEQ ID NO: 266883 - protein, 131 aa, Glycine max
  Clone ID: PAT_MRT3847_83015C.1.pep
RCITFYSRQSSRIKGSRFLNWFAMFSSSKAAKVAKNTQGEQQLQTSVQKQPKRPKSASTASTAFYHSLFSPVTIHAQFTAKCPSLLCYAKGTRPLAPLAQCPRTSHLSVGLRHTLNLVLLLNSVTVGRTLG

SEQ ID NO: 266884 - protein, 47 aa, Glycine max
  Clone ID: PAT_MRT3847_83016C.1.pep
NRLQKQSLLDFMNLPNSSYFLEYRLFKGKKITLCAGHRLRESFSIPL

SEQ ID NO: 266885 - protein, 38 aa, Glycine max
  Clone ID: PAT_MRT3847_83017C.1.pep
KSGPVPAGVPAFPRVSRSTAWRRHGDSCLLCQCVTLSR

SEQ ID NO: 266886 - protein, 51 aa, Glycine max
  Clone ID: PAT_MRT3847_83018C.1.pep
TLSMSLSGLVLSSIKQLVTCSSSWGSITSSATYTSVSYIKLRFLFVNFPRA

SEQ ID NO: 266887 - protein, 73 aa, Glycine max
  Clone ID: PAT_MRT3847_83019C.1.pep
SHLSSLSTNLSLHISNGNLRVTNSIFQVDLSHIHTLKTTSGYSAYDANHHHAQKSYCSRVLFVSLYFTNLQNK

SEQ ID NO: 266888 - protein, 87 aa, Glycine max
  Clone ID: PAT_MRT3847_8301C.1.pep
VSPADTNAEDTLHTLKYANRARNIQNKAVINRDPVGAQMQRMRSQIEQLQSELLLYRGDAGGAFEELQILKQKISLLEASNEELQQE

SEQ ID NO: 266889 - protein, 71 aa, Glycine max
  Clone ID: PAT_MRT3847_83020C.1.pep
VRGPSITTNLPSKYNSHTPFFPYKRYSFHPHLPFSPYQSHTHLHYFLSSLTPFHTYQQPCSLNTKHKIFSP

SEQ ID NO: 266890 - protein, 82 aa, Glycine max
  Clone ID: PAT_MRT3847_83021C.1.pep
SGRRSFFFFLTEIFFLSPNLKPNCTLSIPKTTIYAHKQVTSDELACVDYNLETPGGGKRVFFLDETGAQTRATHTDFEAASD

SEQ ID NO: 266891 - protein, 70 aa, Glycine max
  unsure (1)..(70): unsure at all Xaa locations
  Clone ID: PAT_MRT3847_83022C.1.pep
RDHIAIKSEGSSKQTXQESLRKKSEXLLNKSNPVHKKVPARINKEKPIAESIVTVEHIDRTXKNNPILPT

SEQ ID NO: 266892 - protein, 72 aa, Glycine max
  Clone ID: PAT_MRT3847_83023C.1.pep
SPSLPLPAHSPSKAQIACYNVRALTLYSNPRHHLCHIHAFLRKLATTFAAASKHKNTFSMFHVYTLQTIFSQ

SEQ ID NO: 266893 - protein, 86 aa, Glycine max
  Clone ID: PAT_MRT3847_83024C.1.pep
PKVPLSVAKTGFLRAPKCVFPQVCVPASPIIQPKKDPIVPVKVFFYKQKKMGFFSQVIILETKGLFSQLATYCLLLQAFKKSMFLK

SEQ ID NO: 266894 - protein, 95 aa, Glycine max
  Clone ID: PAT_MRT3847_83025C.1.pep
KVGQVGLRMEAGPPGKGFSEAKAQGWRGYPLKGGIPGQGPRGGGSGRFFKKGPSPWGWSRGGFLGGLGFEPFFPFLGVSWAAFFFFVKPHFGVFP

SEQ ID NO: 266895 - protein, 38 aa, Glycine max
  Clone ID: PAT_MRT3847_83026C.1.pep
CRVENNLLQQHQHPIDEVVLAQLWWHYQILLEPNPEHT

SEQ ID NO: 266896 - protein, 112 aa, Glycine max
  Clone ID: PAT_MRT3847_83027C.1.pep
QHAFEVKGLHALGDEFTLIFWYWSEGSSRGYSQALALFCYSHAHTTLSLSLFQFIYLSYIFCGFFCDIYIYIYIYIYIYITNILSSHLCLKKLLLSMGADFYLSITNMEELI

SEQ ID NO: 266897 - protein, 67 aa, Glycine max
  Clone ID: PAT_MRT3847_83028C.1.pep
VFAFFFFPFAHLIDIYLLNNVHISSTTFVHFFFVFFIPFFYHSLYFFFFSYSLSSICRSYYKILLCI

SEQ ID NO: 266898 - protein, 112 aa, Glycine max
  Clone ID: PAT_MRT3847_83029C.1.pep
KLTANKYVRPLEFEFKNSALIILPYLQSPCLTEILYKTLSILDYNKMGKNFMLPAAFCEEGGSASTRGFKPSASLLLYKWVLLYLHNSLNWLSTGDLVFTPQGPMGFSWGTP

SEQ ID NO: 266899 - protein, 47 aa, Glycine max
  unsure (1)..(47): unsure at all Xaa locations
  Clone ID: PAT_MRT3847_8302C.1.pep
LPIXQKNTLIEFNNNRPPALFFXKKKKKRGFFEKKIFPFKFYDFLIC

SEQ ID NO: 266900 - protein, 55 aa, Glycine max
  Clone ID: PAT_MRT3847_83030C.1.pep
FFSTLESWYRHVYMHRKTVLIGSANLPQVIELEQNSARARSSIPSSQYEGSVRHR

SEQ ID NO: 266901 - protein, 54 aa, Glycine max
  unsure (1)..(54): unsure at all Xaa locations
  Clone ID: PAT_MRT3847_83031C.1.pep
VFVAPILVHSLSSLSGIKFVFFSVEFLFSCFXGDHLIDPFIRKLEVYFLFIYQF

SEQ ID NO: 266902 - protein, 124 aa, Glycine max
  unsure (1)..(124): unsure at all Xaa locations
  Clone ID: PAT_MRT3847_83032C.1.pep
PEDRPETRTPTAGYAHAAAQAKKATEETHQPGGQNHAPRGGREGHQTLXNTDRERELNHTARPPEAAAAHKKKTGANGTPQSEPKPQEPTKHQXEWDAATPANARRKEGPTGEDKLNIECNHAT

SEQ ID NO: 266903 - protein, 80 aa, Glycine max
  unsure (1)..(80): unsure at all Xaa locations
  Clone ID: PAT_MRT3847_83033C.1.pep
MATSAIQQSAFTGQTALKQLNEFVRRTGGAGKGGPTFPAPARVVLKAFGVGPSAPSAWVHISGRIXQYLCAEFPVDSTWG

SEQ ID NO: 266904 - protein, 32 aa, Glycine max
  Clone ID: PAT_MRT3847_83034C.1.pep
SRATGCFLFITTRFTSNFGRYCPGVTYRTAEV

SEQ ID NO: 266905 - protein, 67 aa, Glycine max
  unsure (1)..(67): unsure at all Xaa locations
  Clone ID: PAT_MRT3847_83035C.1.pep
VTAHCRTALLFFTGLGSETCLKLLAEAFSXKDHRNRSGCLGALHMAAAYVTPFVAKVFLDLSADPQV

SEQ ID NO: 266906 - protein, 72 aa, Glycine max
  Clone ID: PAT_MRT3847_83036C.1.pep
SHLNPLSSKKLYKSLRAHRAIPFVITLDEGYLKINGPLLFFIFHLALKTFRFSHDSQLDDIGLHTSAKFWNG

SEQ ID NO: 266907 - protein, 364 aa, Glycine max
  Clone ID: PAT_MRT3847_83037C.1.pep
MDRSAMTVGPGMDMPIMHDSDRYELVRDIGSGNFGVARLMRDKHTEELVAVKYIERGDKIDENVRREIINHRSLRHPNIVRFKEVILTPTHLAIVMEYASGGELFERICNAGRFSEDEARFFFQQLISGVSYCHAMQVCHRDLKLENTLLDGSPAPRLKICDFGYSKSSVLHSQPKSTVGTPAYIAPEVLLKKEYDGKIADVWSCGVTLYVMLVGAYPFEDPEEPKNFRKTIHRILKVQYSIPDYVHISPECRHLISRIFVADPAQRISIPEIRNHEWFLRNLPADLMVENTMNNQFEEPDQPMQSIEEIMQIISEATIPAAGTQSLNQYLTGSLDIDDDDMDEDLETDPDLDIDSSGEIVYAM

SEQ ID NO: 266908 - protein, 152 aa, Glycine max
  unsure (1)..(152): unsure at all Xaa locations
  Clone ID: PAT_MRT3847_83038C.1.pep
MDCSARRVGGRVGGRVGHDSDKYELVRDIGSGNFGVARLMRDKHTEELVAVKYIERGDKIDENVRREIINHRSLRHPNIVRFKEIILTPTHLAIVMEYASGGELFERICNARRVSEDEARLFLQQLIXGVSYCHAMQVCHRDLKLENTLVDG

SEQ ID NO: 266909 - protein, 110 aa, Glycine max
  Clone ID: PAT_MRT3847_83039C.1.pep
MVGNFYFHFPFSLSFCLFQFNSGPVLISPTWKLRTTPHLLRSTMTAKFKHKNKNKKTVNKHHRFLFHNPPPIVGATGANTDDDLDVKVFPPSSLLFRPRFVSSTEPTTTT

SEQ ID NO: 266910 - protein, 40 aa, Glycine max
  Clone ID: PAT_MRT3847_8303C.1.pep
HAPITTQVLRHAPDNFTEQDHLRQGEVWQLQIFGLCLTVH

SEQ ID NO: 266911 - protein, 111 aa, Glycine max
  unsure (1)..(111): unsure at all Xaa locations
  Clone ID: PAT_MRT3847_83040C.1.pep
TNGLRESLGEGGHGGEYKGMLTREILVAVKILKDTEGDGKDFIKEVGSRGKIHHANAXRLFFFREEGHQREHDYDFFPNGTRERCLARPDKKEASHGWEKVEQNDRGGGRG

SEQ ID NO: 266912 - protein, 34 aa, Glycine max
  Clone ID: PAT_MRT3847_83041C.1.pep
GKLDGVHLEAGIAVATTRLLREGSHLSYELDRKA

SEQ ID NO: 266913 - protein, 70 aa, Glycine max
  Clone ID: PAT_MRT3847_83042C.1.pep
SPLAVPPYVFLLFFLRSFFPSSRPISCFIPPLFALPPHSFCSRALLVPAFSAGPELRFSVGSYPVPSPPC

SEQ ID NO: 266914 - protein, 51 aa, Glycine max
  Clone ID: PAT_MRT3847_83043C.1.pep
WKGTCKRLNNSHLKVCIYYVQIQLITYKSNPDTFVDKILLKTLKPLFYVKY

SEQ ID NO: 266915 - protein, 49 aa, Glycine max
  unsure (1)..(49): unsure at all Xaa locations
  Clone ID: PAT_MRT3847_83044C.1.pep
GNPPXTLGLPPPKLPAPPLAAKTSEEIKRSMANRPRVGXVAIFEPIFQY

SEQ ID NO: 266916 - protein, 145 aa, Glycine max
  unsure (1)..(145): unsure at all Xaa locations
  Clone ID: PAT_MRT3847_83045C.1.pep
MQIFVKTLTGKTITLEVESSDTIDTVKANIQYKEGILPDHQRLIFAGKQLEDGRTLVDYNIQKESTLHLVLRLMGVMPIFVKTLTVKTITLEVESLNTIDNVKAKIQDKEGIPPDQQRLIFAGKQLEDGRTLADYXIQKESTLHL

SEQ ID NO: 266917 - protein, 41 aa, Glycine max
  Clone ID: PAT_MRT3847_83046C.1.pep
CHSPQELSRVGKLSNLKCDLYVVVAFCKIDILPPPGKSISH

SEQ ID NO: 266918 - protein, 56 aa, Glycine max
  unsure (1)..(56): unsure at all Xaa locations
  Clone ID: PAT_MRT3847_83047C.1.pep
RXVRLXXFGFELGADTFWVSLTKTSFNYTRFIVSFSPQHNKGVGACDLTFSSLEVA

SEQ ID NO: 266919 - protein, 121 aa, Glycine max
  unsure (1)..(121): unsure at all Xaa locations
  Clone ID: PAT_MRT3847_83048C.1.pep
MVLFVIEQMQIFVKTLTGKTITLEVESSDTIDNVKAKIQDKEGIPPDQQRLIFAGKQLEDGRTLADYNIQKESTLHLVLRLRGGMQIFVKTLTGKTITLEVESSDTIDNVKAKIQDKEGIX

SEQ ID NO: 266920 - protein, 228 aa, Glycine max
  Clone ID: PAT_MRT3847_83049C.1.pep
MKIKSHFSFSLMFLIGIAISHTHVSLAECDNVKDYCPTIPPQKQTIFLNGFPCENPNNTIAHDFKSMELSKPGSRDKLGSLVKIVTASKFPGLNALGLAIGRSDIEVDGLVNLHNHPRATEMIYVSQGDVVAAFLDTRNQLFQKILRAGDVFVIPKGLFHFLLNRGAQVATVFSVFNSQNPGSGPLTSIPSDTLESVQKIKRKVVSLSESELDGVSDLTSAVLDIIYS

SEQ ID NO: 266921 - protein, 726 aa, Glycine max
  unsure (1)..(726): unsure at all Xaa locations
  Clone ID: PAT_MRT3847_8304C.1.pep
MALPKVDFEVGADGVAVITMCNPPVNALAIPIIMGLKNRFDEAARRNDVKAIVLTGKGGRFSGGFDISVMQKVHRTGDSSHLPDVSVELVVNSIEDSKKPVVAAVAGLALGGGLELAMGCHARVAAPRAQLGLPELTLGIIPGFGGTQRLPRLIGLSKAVEMMLTSKPITSEEGRKLGLIDAIVSSEELLNASRLWALEIGERCKPWVRSLHRTDKIGSLSEAREVLRTARQQVKKTVPHLPQQLACVDVIEHGIVHGGYSGVLKEAEVFKQLVVSDTAKGLINVFFSQRAISKVPGVTDIAIKPXNVKKAAVDETEWQMLHCHLLTGVLDYSHVIDVDXVLEAVIENISLKQTIFGDLEKICPPHCILASNTSTIDLDVVGKTTSSQDRIAGAHFLQSCPHYATFGDYTNWKICPPHCIXSSNTSTIDHDVVGNTASSQNRIAGAHFFSPAHIMPLLEIIRTDKTSAQVILDLITVGKIIKKTPVVVGNCTGFAVNKTFFPYSQGAHLLVNLGVDVFRIDTLIRNFGFPIGPFQLQDLAGYGVAVATSKVFADAFSDRIFKSPLLDLLIKSGRNGKNNGKGYYIYEKAGKPKPDPSILPIIEESRRLCNIMPNGKPISVTDQEIVEMILFPVVNEACRVLEDGVVIRASDLDIASVLGMSFPNYRGGIVFWADLVGANHIYTSLKKWAQLYGNFYKPSRYLEERALKGIPLSAPASSTPKSMARL

SEQ ID NO: 266922 - protein, 208 aa, Glycine max
  Clone ID: PAT_MRT3847_83050C.1.pep
MQIFVKTLTGKTITLEVESSDTIDNVKAKIQDKEGIPPDQQRLIFAGKQLEDGRTLADYNIQKESTLHLVLRLRGGMQIFVKTLTGKTITLEVESSDTIDNVKAKIQDKEGIPPDQQRLIFAGKQLEDGRTLADYNIQKESTLHLVLRLRGGMQIFVKTLTGKTITLEVESSDTIDNVKGQIHDKEGYSTRPQMLIFGWKQLEDGEPL

SEQ ID NO: 266923 - protein, 60 aa, Glycine max
  Clone ID: PAT_MRT3847_83051C.1.pep
MGGGNAQKSKMAREKNLEKQRAAAKGSQLDSNKKAMSIQVKFPLFCSLCYIITPCSYQRL

SEQ ID NO: 266924 - protein, 305 aa, Glycine max; identical to SEQ ID NO: 146197
  Clone ID: PAT_MRT3847_83052C.1.pep

SEQ ID NO: 266925 - protein, 394 aa, Glycine max
  Clone ID: PAT_MRT3847_83053C.1.pep
FSFLHRSILLLLKMQIFVKTLTGKTITLEVESSDTIDNVKAKIQDKEGIPPDQQRLIFAGKQLEDGRTLADYNIQKESTLHLVLRLRGGMQIFVKTLTGKTITLEVESSDTIDNVKAKIQDKEGIPPDQQRLIFAGKQLEDGRTLADYNIQKESTLHLVLRLRGGMQIFVKTLTGKTITLEVESSDTIDNVKAKIQDKEGIPPDQQRLIFAGKQLEDGRTLADYNIQKESTLHLVLRLRGGMQIFVKTLTGKTITLEVESSDTIDNVKAKIQDKEGIPPDQQRLIFAGKQLEDGRTLADYNIQKESTLHLVLRLRGGMQIFVKTLTGKTITLEVESSDTIDNVKAKIQDKEGIPPDQQRLIFAGKQLEDGRTLADYNIQKESTLHLVLRLRGGC

SEQ ID NO: 266926 - protein, 87 aa, Glycine max
  Clone ID: PAT_MRT3847_83054C.1.pep
ENIILSFNLQTSDIMPAFPYTAPFSSMVPDACRIVRSFIKGSVDYLSYGIHVNFFGVVRKYLDMFLIDVLNVTLLEKINSDNVTVPQ

SEQ ID NO: 266927 - protein, 68 aa, Glycine max
  Clone ID: PAT_MRT3847_83055C.1.pep
WRPFLFGPRLLPPVGPTSLGPGSQSIIKGRPIIIPVCMGLVYPLSKCSDNSPNDLWGFGCLYKCPPMA

SEQ ID NO: 266928 - protein, 62 aa, Glycine max
  Clone ID: PAT_MRT3847_83056C.1.pep
RTHRKLARLIPGLTSSLLVRLPSFFFFDQPKAGLNTYRGQRGVECNLQLENTTNLCVSKAVP

SEQ ID NO: 266929 - protein, 206 aa, Glycine max
  Clone ID: PAT_MRT3847_83057C.1.pep
SSRPNGSSIASLADRSVEVNNEEIILNEICQSRSKSCVEVEKCESQSAVTFNTPQVLLKSEDGEMVATVEEDGQCKKANDPCLSTDTQGAGEKPQRSSCDVGSMEQQPTNINPRRQSTRNRPLTVKAMESLGNEFLHVQRRRKKKDILSHIDAFSPCRKARTSKTKLHRHSSDHGTAVLVKEKHLSGDHKMEIVELVECFQATKLN

SEQ ID NO: 266930 - protein, 52 aa, Glycine max
  unsure (1)..(52): unsure at all Xaa locations
  Clone ID: PAT_MRT3847_83058C.1.pep
WLEIEIGLCSLVISWCSPPYANKRKSQIGWVYTTIXIFIFHNIQSYFFYGYK

SEQ ID NO: 266931 - protein, 90 aa, Glycine max
  unsure (1)..(90): unsure at all Xaa locations
  Clone ID: PAT_MRT3847_83059C.1.pep
VLFVKISKWKSPQFKKKXXKKKGGPPXXXXXXXXFXSGRXXXGXXVXPXGXXFXXXXXXXXXXXXXXXXXXSNSKKRGXGXXXXXXXXXX

SEQ ID NO: 266932 - protein, 136 aa, Glycine max
  Clone ID: PAT_MRT3847_8305C.1.pep
KPKPDPSILPIIEESRRLCNIMPNGKPISITDQEIVEMILFPVVNEACRVLEDGVVIRASDLDIASVLGMSFPNYRGGIVFWADLVGANHIFTSLKKWAQLYGNFYKPSRYLEERALKGIPLSAPASSTPKSMARL

SEQ ID NO: 266933 - protein, 69 aa, Glycine max
  Clone ID: PAT_MRT3847_83060C.1.pep
TRPRIRKHVDKTRCSKLLGMANPAPGHSTPPCLITLNYDEPSFPRLTPISPFNCSLTSSHYFFDNFVLP

SEQ ID NO: 266934 - protein, 96 aa, Glycine max
  Clone ID: PAT_MRT3847_83061C.1.pep
GKLGCLLSYEVRVGSSIRLGQSQLLGWFLRQGIQPMSPGREDVLPAANEKCRVIIKGKGVCREWTGHHEQRLQFEDWVILWGHSHVQAKLSYVLRI

SEQ ID NO: 266935 - protein, 62 aa, Glycine max
  unsure (1)..(62): unsure at all Xaa locations
  Clone ID: PAT_MRT3847_83062C.1.pep
SFTTKILGTVMLLLSLNPSKANLYLLIXFNTTTGNSSINPPXMLNTIPLKMKHTDSEKELHE

SEQ ID NO: 266936 - protein, 87 aa, Glycine max
  Clone ID: PAT_MRT3847_83063C.1.pep
IHIKESPSSDLQSRIDAEVVKLLREAYDRVKALLRKHEKALHALANALLEYETLNAEEIRRILRPYREGRLPKDQEQEAAEEELVLV

SEQ ID NO: 266937 - protein, 86 aa, Glycine max
  Clone ID: PAT_MRT3847_83064C.1.pep
MQIFVKTLTGKTITLYVESSYTIDDSKAKIQDKECIPPDHQRLIFAGKHLEYGMTLADYNIQNESTLHLVLRLRGGIIYPSLMALA

SEQ ID NO: 266938 - protein, 119 aa, Glycine max
  Clone ID: PAT_MRT3847_83065C.1.pep
FGMKSTYPVGFLETLQQTTPVTYVCMELQSFKVFVCLVIPKVEKSHANGNGGGCPIKGNKIVVEILNIYGREGNLYEVTGAPPQKTFQLILNNIFESWTHHAQPLKEKYPKQIRGAKYQ

SEQ ID NO: 266939 - protein, 272 aa, Glycine max
  Clone ID: PAT_MRT3847_83066C.1.pep
EEVWSFNDATPLNTLQSALEEQLERLRNSMDYLQNKLRVGLEIENHLKKRVNALENKQISMDKVIENSIADLKHYHSKCRDEIMNLLGDGESSIKSIINAIDEKVWSFDLSTVPNLTPQRDAEPEESECADLHISPQAKPVSESKRNSPSALSADAGVKGDPSDVLAMALQEKVAALLLLSQQEERHLLERNVNSALQGKTEELQRNLLQVTNEKVKALMELAQLKQEHQLLLEKFGHEPKQGKGVVNTGDRQLVTRERDGTLKNLLKKSYL

SEQ ID NO: 266940 - protein, 93 aa, Glycine max
  Clone ID: PAT_MRT3847_83067C.1.pep
VQEGEGPRWIVGGKKWSANTISRKEGRGGGVLRRIMGPGDRDYGLIIYTPGGGAARMLPNMVRVSVVGGRLAPKVYVNQETTGLTRTVKRTKA

SEQ ID NO: 266941 - protein, 65 aa, Glycine max
  Clone ID: PAT_MRT3847_83068C.1.pep
SLFPSFSGETLMTWIGLEKPCFCKLFTPQRLIKLNQVKDYIILLFSYNHTHTHRKYILTRHISKF

SEQ ID NO: 266942 - protein, 50 aa, Glycine max
  Clone ID: PAT_MRT3847_83069C.1.pep
LVTFPVLKNRSFKSSQHIYYLKIKPKTIVISLKDNLQRLKEKEHHIDKLT

SEQ ID NO: 266943 - protein, 383 aa, Glycine max
  unsure (1)..(383): unsure at all Xaa locations
  Clone ID: PAT_MRT3847_8306C.1.pep
RLPRLIGLSKAVEMMLTSKPITSEEGRKFGLIDAIVSSEELLKASRLWALEIGERRKPWIRSLHRTDKIGSLSEARAVLKTARQQVKKTAPHLPQQQACVDVIEHGIVHGGYSGVLKEAEVFKQLVISDTSKGLINVFFAQRAISKVPGVTDIGLKPRNVKKAAVIGGGLMGSGIATALILGNIRVILKEINSEFLLKGIKTIEANVNGLVRRGKLTKQKADAALSLLKGVLDYSEFKDVDLVIEAVIENISLKQTIFGDLEKICPPHCILASNTSTIDLDVVGKTTSSQDRIAGAHFFXSPAHIMPLLEIIRTDKTSAQVIVDLITVGKIIKKAPVVVGNCTGFAVNKTFFPYSQGAHLLVNLGVDVFRIDRLICNFGFPIG

SEQ ID NO: 266944 - protein, 68 aa, Glycine max
  Clone ID: PAT_MRT3847_83070C.1.pep
LDITYTITDRIETLVHLAITNHQIVFSMINLATPMIYGDTRTKHLKQTYYCHVHLQCTTYIQSRDTLL

SEQ ID NO: 266945 - protein, 163 aa, Glycine max
  Clone ID: PAT_MRT3847_83071C.1.pep
TGEKQSPTDGLMGTSPLSYQDDVARQHIVPVENWAKEDALVAKPVNNDIPFVGGTSVENSDCMVQQCPTEYTNELASTISKADAVENWISQDLLKPIDGRLDNPKIGNPENFLNNDKFDYSTQHAVEKKGVVSDNNHGKSKLTTGANQINMMDMLPSSTVEYN

SEQ ID NO: 266946 - protein, 711 aa, Glycine max
  Clone ID: PAT_MRT3847_83072C.1.pep
MGDNKRKRGRKAKTPASETLDHPAPVTTTAPNSTSTAMDDVFSVGNVELIDTTASPHHRRLRARPNHSEKPHALPTGRRHARPLDNGGGDFSVPSDVVGVSPAVSTEADPAAWEARVLPALESVVKVFCVHTEPNFSLPWQRKRQYSSSSSGFVIGGRRVLTNAHSVEHYTQVKLKKRGSDTKYLATVLAIGTECDIAMLTVDDDEFWQGMSPVEFGELPTLQDAVTVVGYPIGGDTISVTSGVVSRIEILSYVHGSTELLGLQIDAAINSGNSGGPAFNDKGNCVGIAFQSLKHEDAENIGYVIPTPVIMHFIQDYEKNGGYTGFPILGVEWQKMENPDLRMATGMKPDQKGVRIRRIDPTAPESKVLKPSDVILSFDGVDIANDGTVPFRHGERIGFSYLISQKYTGDNAAIKVLRNSDILKFDIKLDSHRRLIPAHSKGKPPSYYIIAGFVFTTVSVPYLRSEYGKDYEYEAPVKLLDKLLHSMPLPPDAQLVVVSQVLVADINIGYEDFVNTQVLAFNGQPVKNLKSLATMVESCNDEYLKFDLDFEFDIKLDSHRRLIPAHSKGKPPSYYIIAGFVFTTVSVPYLRSEYGKDYEYEAPVKLLDKLLHSMPQSPDEQLVVVSQVLVADINIGYEDIVNTQVLAFNGQPVKNLKSLATMVESCNDEYLKFDLDYDQIVVLRTKTAKAATLDILSTHCIPSAMSDDLKS

SEQ ID NO: 266947 - protein, 56 aa, Glycine max
  Clone ID: PAT_MRT3847_83073C.1.pep
LNLVSFLISIFFYLKYLKFSFSTQTYCKMNLLILENQYHIYSKLEEYINIIKSFNH

SEQ ID NO: 266948 - protein, 83 aa, Glycine max
  Clone ID: PAT_MRT3847_83074C.1.pep
YASLVVSPCLQKIRKGQNRKYNDIHCWHEVHIKHHPGEYGQTQKLLPRHSPSAHACIIVSGALLHLEQLSEMERHHLTALHIS

SEQ ID NO: 266949 - protein, 47 aa, Glycine max
  Clone ID: PAT_MRT3847_83075C.1.pep
KLPINSKYMMITRSELLWSQGDSHSGMPYASKKLCHYVGHDDTIVYV

SEQ ID NO: 266950 - protein, 152 aa, Glycine max
  Clone ID: PAT_MRT3847_83076C.1.pep
MDQGELARVFQMFDRNGDGRITRKELSDSLKNLGITILEQDLSLMIEKIDVNGDGFVDMDEFGELYQTIMDEKDEEEDMKEAFNVFDQNGDGFITGEELSAVLCSLGLKHGKTIEDCKSMIKKVDVDGDGMVNYREFKQMMKAGGFAAASLS

SEQ ID NO: 266951 - protein, 108 aa, Glycine max
  unsure (1)..(108): unsure at all Xaa locations
  Clone ID: PAT_MRT3847_83077C.1.pep
ESIHTESFELFFIHASYVVISPANLLMHLXICSSNLLFLSSLHRYASPTIESSSNLSMRPLVLRDLDIYVSGIQYATECAVEFMQWKLVRTVSVSPPSVVFSQPSDAW

SEQ ID NO: 266952 - protein, 74 aa, Glycine max
  unsure (1)..(74): unsure at all Xaa locations
  Clone ID: PAT_MRT3847_83078C.1.pep
MGKPFITLSLSSLACXLLSSACFAITSSKFNEXQLNNLNAXEXDHXVESEGGLLKLEFQLSACAVSCSKPQREF

SEQ ID NO: 266953 - protein, 73 aa, Glycine max
  Clone ID: PAT_MRT3847_83079C.1.pep
GLIFGPPLLRGGGGSYRGNWPKPFTGGKDQLCFKLKKLAPAEKFAPKKGGPNFPPGPEFFFKKNRWFKKGRAL

SEQ ID NO: 266954 - protein, 72 aa, Glycine max
  Clone ID: PAT_MRT3847_8307C.1.pep
GVMGRVTVGIIDQSVWQHVINQTLFGPIRSDDRWIKLNVIQFGQARFLPVFPMLNRCPRTAQLYCIYRKTIE

SEQ ID NO: 266955 - protein, 81 aa, Glycine max
  Clone ID: PAT_MRT3847_83080C.1.pep
HEAEPMPVVGISHSARGYCINMVLETMKTYSSEDCLTEEAVVTKLRTCQYHYLFLHTSLRRNSCGLYFLILFYFFDEKIWA

SEQ ID NO: 266956 - protein, 103 aa, Glycine max
  Clone ID: PAT_MRT3847_83081C.1.pep
AGTPGGAVPAFPGCPTHSVRTFFLLRVFTIINKVPLTLVNDPVEGKSVLLMKSWSLVDIVSFTKNTCVRKNMLTVFYWWLNNITEKIFLRRQMKNCPYRLLPC

SEQ ID NO: 266957 - protein, 47 aa, Glycine max
  Clone ID: PAT_MRT3847_83082C.1.pep
EMSHHSISTYHKYSSSVTIPARNSIDQMTGEHGTACLHDHSTCVKLT

SEQ ID NO: 266958 - protein, 93 aa, Glycine max
  Clone ID: PAT_MRT3847_83083C.1.pep
HGWLHYVYGGGHAGLQPEVFAHCKGSVQVKKSDYRTSNQRRLDTRVLHSLCMIMERELSVLFNCLPWWPHVKSIATILLMIPHAGAAPYGYKI

SEQ ID NO: 266959 - protein, 72 aa, Glycine max
  Clone ID: PAT_MRT3847_83084C.1.pep
ALTFFTPGLVPGSHELQFAFGGRGSGVRGKKSFKTFPASWEGGVLPLKRGAPKWPGSPWCPHLFCIGTPPFL

SEQ ID NO: 266960 - protein, 65 aa, Glycine max
  Clone ID: PAT_MRT3847_83085C.1.pep
YPKMCDSYVGGQIQQMVLWIRLTFSLLAFDISDFGKEEPLVTKFKMVEVFKTKIMLGYEREGAPN

SEQ ID NO: 266961 - protein, 116 aa, Glycine max
  Clone ID: PAT_MRT3847_83086C.1.pep
ALLGGRLEASDADLWPLLYVLPTKETQQHGREVLRDLFAASSNSHLFSAVEEATLQPMSRLNRLLETAQDYLARSEPPDSPVLEGLLREIDANFNSETMPETLQQVRGQLSRMLTP

SEQ ID NO: 266962 - protein, 78 aa, Glycine max
  Clone ID: PAT_MRT3847_83087C.1.pep
LTSKAVNVITIIGVMHLMPQEINDPHRYILRLPRLSTCLMTSLKTQLIHLPILFKHTIHLIDQLSSIRVTHIFFTSKD

SEQ ID NO: 266963 - protein, 91 aa, Glycine max
  Clone ID: PAT_MRT3847_83088C.1.pep
FLSQPVVSTSCQRSLLLPLRPSGFRIRPRWRQMRFSEQTPVKHRKVDITVGPRSPIPDRRVGALIQDFPRLTVFFRTDVRTSQRKCRCAHR

SEQ ID NO: 266964 - protein, 448 aa, Glycine max
  Clone ID: PAT_MRT3847_83089C.1.pep
GRLIANDRLDRCVGIYVEVRSSNVRASLQALNLDYLEISVAEFNDVQSIEGYIAQWGKHLEFAVKHLFEAEYKLCNDVFERIGLDVWMGCFSKIAAQAGILAFLQFGKTVTESKKDPIKLLKLLDIFASLNKLRLDFNRLFGGAPCVEIQNLTRDLIKSVIDGAAEIFWELLVQVELQRPNPPPMDGNVPRLVSFITDYCNKLLGDDYKPILTQVLIIHRSWKRQSFQEKLLVNEILNIVKAVEQNVETWIKAYDDPILSNFFAMNNHWHLCKHLKGTKLGELLGDSWLREHEQYKDYYSTIFLRDRWGKLPGHLSREGLILFSGGRATARDLVKKRLKKFNEVFDEMYAKQTSWIMPERDLREKTCQLIVQAVVPVYRSYMQNYGPLVEQDASSTKYAKYTVQKLEEMLLCLYRPRPVRHGSLRSSTFSAKYGNGVPDLRRTASAVV

SEQ ID NO: 266965 - protein, 210 aa, Glycine max
  Clone ID: PAT_MRT3847_8308C.1.pep
EACINSVPKEVKFQPLAEKKAPGKKPTGLGAPPSGPPSTADAYERMLSTIPECANFGKLFKSSAPVELTEAETEYAVNVIKHIFDRHVVFQYNCTNTIPEQLLEDVIVTVDASDADEFSEVFSKPLRSLPYDSPGQTFVAFEKPEGVPTVGKFSNVLKFIIKEVDPTTGEAENDGVENEYQLEDLEIVAAEYVLKVGVANFKNAWEKLGP

SEQ ID NO: 266966 - protein, 84 aa, Glycine max
  Clone ID: PAT_MRT3847_83090C.1.pep
NLGETRAKPFPWEKLLSLKNSPQNPTRKHKGKTRGALRGGPPPINGVAPPAPFQGGKPGRPVVLKNPPPPGERRFAFWPPGGFF

SEQ ID NO: 266967 - protein, 162 aa, Glycine max
  unsure (1)..(162): unsure at all Xaa locations
  Clone ID: PAT_MRT3847_83091C.1.pep
PRVRAGKPAVLTRVVDSMTDNLRPTRAEATDVANAVLDGSDAILLGAETLRGLYPVETISTVGKICAEAEKVFNQDLYFKKTVKYVGEPMTXHLESIASSAGLERAAIKVKASIIICFTSSGRAARLIAKYRPTMPVLSVVIPRLKTNQLKWSFSGAFEVEF

SEQ ID NO: 266968 - protein, 134 aa, Glycine max
  Clone ID: PAT_MRT3847_83092C.1.pep
MHSGHLLLEEPIRMVSILEPSKPNFFPAMTKIVGTLGPKSRSVEVISACLKAGMSVARFDFSWGDPEYHQETLENLKNAIKTTKKLCAVMLDTVGAEMQVVNKSEKAISLQADGQVVLTPDRGQEASSQILPIN

SEQ ID NO: 266969 - protein, 52 aa, Glycine max
  Clone ID: PAT_MRT3847_83094C.1.pep
HRSRMCISLNLEIVERCVRSRISFSSFPSRMIFLSDFQLRTSLVQQVCHLAY

SEQ ID NO: 266970 - protein, 108 aa, Glycine max
  unsure (1)..(108): unsure at all Xaa locations
  Clone ID: PAT_MRT3847_83095C.1.pep
AASMISSPAVTTVNRAGAGMVAPFAGLKSMGGFPTIKTNSDVAFIASYGGRVQFKLVWPPVGNKMFYTLFFLPYLYDAQLAKEVXFLHRKGWITWLEFEWEHGFLCRE

SEQ ID NO: 266971 - protein, 53 aa, Glycine max
  Clone ID: PAT_MRT3847_83096C.1.pep
ESFDFSLIGDNWPKEFIKAMHGAIVCLIHPRFLLIFLVLSIFLIFTFSGSTIT

SEQ ID NO: 266972 - protein, 318 aa, Glycine max
  Clone ID: PAT_MRT3847_83097C.1.pep
MPNATEQFSNINSIESLHVSLRNLSQLSTRMDSVQSFVSQSIQSHTLLTHHQMNIVSNEILTAIRHVITNGVALVAASENALPLSETPTLDSPNNNDDDNVVELDAMELLAKHLHFCEVCGKGFTRDANLRMHMRAHGDEFKTPEALANKARGETRLKATRFSCPLEGCNRNKTHKKFRALKSVFCLRNHFKRSHCPKTLLCERCRKKSFAVLSDLRSHVKQCRGEATWKCSCGTTFSRKDKLLGHVALFEGHSPMLGEERDTVVAAAAEGLPEGFFDGLDEFGFGSIQNNSSQEEHLALGLPTNNLDAWEFSFSNLI

SEQ ID NO: 266973 - protein, 361 aa, Glycine max
  Clone ID: PAT_MRT3847_83098C.1.pep
MAVQPEIEHPRKAYGWAARDTSGVLSPFWFSRRKTGEKDVTFKVLYCGVCHSDLHKLKNEWSDSIYPLVPGREIVGEVTEVGSKVDKFKVGDKVAAGCLVGSCHSCQNCVNNLENYCQQVIPTYGAKYVDGTITYGGFSDFMVADEHFVVNIPSALPLDAAAPLLCAGITVYGPLRYFGLDKPGMHLGVVGLGGLGHLAVKFAKALGLKVTVISTSPKKKNEAIQHLGADFFVVSRDQDQMQAAMCTLDGIIDTVSAVHPLMPLIDLLKSHGKLVAVGAPEKPLELLLPPLILGRKSIAGSYIGGIKETQEMINFAAEHNVRPEIEVIPMDYVNTAMERLQKADVKYRFVIDIGNTLKPHY

SEQ ID NO: 266974 - protein, 158 aa, Glycine max
  unsure (1)..(158): unsure at all Xaa locations
  Clone ID: PAT_MRT3847_83099C.1.pep
KHTHFFCAERLALLDEDFDLPCGDVMDLGDYMVREERKITSRALQKTLLMVRKGLQTPNCLDETTXLYAGTLLDGTDDYISTDLGLGLYLXLGQGRDIXGWGDGIKTMKKGENAILTXPPELFYGECGCNSTITANATLQIDAYLVSWTSVKDICKDG

SEQ ID NO: 266975 - protein, 150 aa, Glycine max
  Clone ID: PAT_MRT3847_8309C.1.pep
MALPKVDFEVGTDGVAVITMCNPTVNALAIPIIMGLKNRFDEAARRNDVKAIVLTGKGGRFSGGFDISVMQKVHQTGDSSHLPDVSVELVVNSIEDSKKPVVAAVEGLALGGGLELAMVSFLSTRSHVVPLNKNCCPSVFISAWNVHLVA

SEQ ID NO: 266976 - protein, 51 aa, Glycine max
  Clone ID: PAT_MRT3847_830C.1.pep
KACCGKKSSRACQIRASTYGPGGEPKNYVNQIIWNPNGTVSSTVCSLSQLC

SEQ ID NO: 266977 - protein, 60 aa, Glycine max
  Clone ID: PAT_MRT3847_83100C.1.pep
LAFNNRTSSRTISCTHVHNPNKLHLNGACFPSKALMFTIRTQHEHPAGINATPSTSSAVV

SEQ ID NO: 266978 - protein, 35 aa, Glycine max
  unsure (1)..(35): unsure at all Xaa locations
  Clone ID: PAT_MRT3847_83101C.1.pep
SQCQFYSIXMLLHKKINHHLVFVNILCDQYGWLWL

SEQ ID NO: 266979 - protein, 141 aa, Glycine max
  Clone ID: PAT_MRT3847_83102C.1.pep
RSHHASDAEESAKIMSSSVPLSVLLIPSLKEAIADDPELVRAVINSLINMEGTKPKSCDVFVKKLLQRLASSKEDSLKDLQGLADQLFSKTKSAQETRNAEADNRKKQQNKEHNSNSNLSPLARFLLSRWQGQTSRDLNPS

SEQ ID NO: 266980 - protein, 77 aa, Glycine max
  unsure (1)..(77): unsure at all Xaa locations
  Clone ID: PAT_MRT3847_83103C.1.pep
MSRKTYDRGDWKCSGTTEGVKKSATTLNEAKVPGADDIQAGVSPPPWVLADEKQXLHPDPHVSAQNLWGSQRRRPFH

SEQ ID NO: 266981 - protein, 464 aa, Glycine max
  unsure (1)..(464): unsure at all Xaa locations
  Clone ID: PAT_MRT3847_83104C.1.pep
MADVAGLVEASGSRFSSLELIGQGSFGDVYKAFDRELNKLVAIKVIDLEESEDEIDDIHKEISVLSQCRCPYITEYYGSYLNQTKLWIIMEYMAGGSVADLIQSGPPLDEMSIACILRDLLHAVDYLHSEGKIHRDIKAANILLSENGDVKVADFGVSAQLTRTISRRKTFVGTPFWMAPEVIQNTDGYNEKADIWSLGITAIEMAKGEPPLADLHPMRVLFIIPRENPPQLDDHFSRPLKEFVSLCLKKVLCILIXNNWDNRIICLFPVEICSCQLDMIYYLVFPNXKLFRLAWSGTGEVDLSVRLLIPLLLMDSIPAERPSAKELLKDRFIRNARKSSKLSERIRERPKYQIKEDEETPRNGPSGMGEASGTVKVARDSRGEENNRPSDQGKTXKSAGWDFSIGGSQGTGTFRNVSRPPQFRDKKTEVSDNQLTQRKIPESGYQGEPSCNQIRMREWHVSKG

SEQ ID NO: 266982 - protein, 304 aa, Glycine max
  unsure (1)..(304): unsure at all Xaa locations
  Clone ID: PAT_MRT3847_83105C.1.pep
MANAWKRDKATRLLSPKLLFLLFSSTLIVFFFFAFLTSRPSNPATTLTAFNTRLSFNAISPFDCTASPQAHPVVANTVEGVRYPFLFSLSDFGTLPDKPHKNIVRMLKGKPFRKPDISVTVQEVLEKARTEGKDGFFVDVGPNVGMASFAASAMRFRVLAFEPVFENLQRICEGVYFNRVADLVTVFEAAASDRVGNITVHKLVGRLDNSAISATRAKLAFKSNEEIGFKVRTVALDEVIPKSERVHLLRIDVHGSEYHVLTRASKLLIMXGSQCPYLIYEDDECLLHASDSTARESPDALHSV

SEQ ID NO: 266983 - protein, 62 aa, Glycine max
  unsure (1)..(62): unsure at all Xaa locations
  Clone ID: PAT_MRT3847_83106C.1.pep
RHETHILTQPNLHLAPTHSTRHRNXQPPRREILEAPAVDGDLMWIQLTLSCRYLFGNTKRSL

SEQ ID NO: 266984 - protein, 474 aa, Glycine max
  Clone ID: PAT_MRT3847_83107C.1.pep
MGFRNNAIQAGSLDVGKSKGRMQKDGAEKEIGCCVKFCFIGGCIPSRSKVDNSISGTSANSVEKTSASEKSKKETNAPPGSSTTTSNAERVPSTPKFSEELKVSSCMRKFTFNGLKLATRNFRPESLLGEGGFGCVFKGWIEENGTAPVKPGTGLTVAVKTLNHDGLQGHKEWLAELDILGDLVHPNLVKLVGFCIEDDQRLLVYECMPRGSLENHLFRKGSLPLPWSIRMKIALGAAKGLAFLHEEAQRPVIYRDFKTSNILLDAEYNAKLSDFGLAKDGPEGEKTHISTRVMGTYGYAAPEYVMTGHLTSKSDVYSFGVVLLEMLTGRRSIDKNRPNGEHNLVEWARPVLGDRRMLLRIIDPRLEGHFSVKGSQKAAQLAAQCLNRDPKSRPMMSEVVQALKPLQNLKDMAISSYHFQVARVDRTMSMPKNGMQAQLASLSRKGQPVRILSSPKGPHGSPYHHYIKSPKPNG

SEQ ID NO: 266985 - protein, 66 aa, Glycine max
  Clone ID: PAT_MRT3847_83108C.1.pep
FTRRYVNGNVVHGAMRPVRPRIVNFYMCDIRLLVNIALFFFDGPISNSFLLAGNILLNHLERVVFT

SEQ ID NO: 266986 - protein, 32 aa, Glycine max
  Clone ID: PAT_MRT3847_83109C.1.pep
SFFLFCPPSDYYITGLPDLILLQLIRQFCKAQ

SEQ ID NO: 266987 - protein, 79 aa, Glycine max
  unsure (1)..(79): unsure at all Xaa locations
  Clone ID: PAT_MRT3847_8310C.1.pep
MCCCGGNCGCGSACECGNGGGGGKRYPDXSYTESTTTETLGMGGGPVKAQFXSAEMGVPXENEGCECGANCACDPCTCE

SEQ ID NO: 266988 - protein, 286 aa, Glycine max
  unsure (1)..(286): unsure at all Xaa locations
  Clone ID: PAT_MRT3847_83110C.1.pep
MPTGLPAANSLVAPDEEGWVWGQIKAEARRDAESEPALASYLYSTILSHSSLERSLSFHLGNKLCSSTLLSTLLYDLFLNAFSSDPSLRSAAVADLRAARERDPACVSYSHCLLNYKGFLACQAHRVAHLLWRQSRRPLALALHSRIADVFAVDIHPAARIGKGILFDHATGVVVGEXSGNREQCVDPAPCXLGGTGKVGGDRHPKIGDGVLIGAGATILGNIKIGEGAKVGAGSVVLIDVPPRTTAVGNPARLVGGKEKPSKHEDVPGESMDHTSFISEWSDYII

SEQ ID NO: 266989 - protein, 97 aa, Glycine max
  Clone ID: PAT_MRT3847_83111C.1.pep
RRDKKFFYRETKNALPNTGFLTVQAPKIFLGPKKKWVKRRGLCGLKPRGQYKSKTPPWKKRKKPILFCRAHEQTHVSFDKDSTPPGPPKINLMGAPK

SEQ ID NO: 266990 - protein, 278 aa, Glycine max
  Clone ID: PAT_MRT3847_83112C.1.pep
DFPSSDASIPGVENGCTTVPPDPDIHDVGNSESGIPGLDSFGRSDAVSQTFAPSLLVSTEICQEGGSQEQDTSLDQRSPLNLAPSISTDRSEELSPKAAVRDANSLVSSTATSVVPPRLVLPKMIAPVVDLEDEQKDRLQQSCKTTEGDAYKQIAVAGGTNIRFSILAYLGVEFPLELDPWKLLQKHILIDYISHEGHELTLRVLYRLFGEAEEEPDFFSSTTAASVYENFLLTVAEALRDSFPPSDKSLSKLLGESPYLPKSVLKILENMCSPGNGG

SEQ ID NO: 266991 - protein, 159 aa, Glycine max
  Clone ID: PAT_MRT3847_83113C.1.pep
GYLPENQKLLVGANNQVQLPSELQSRAPESIERQGDVVEQQTDSASGKLSKVFKDLDNVSGSANELKSEKVEADLKPTEVGNKQNSEDPHSLKTSVPNANAVENDDSVNKNLGMGEAAESNWKPSSGAMHGVQNDSNEHSVQGNEFQDGHPPKTETKLP

SEQ ID NO: 266992 - protein, 56 aa, Glycine max
  Clone ID: PAT_MRT3847_83114C.1.pep
LGTFFQSIDHAAQCKFFRLHLLGSSPIPHRLRWIHLSSDRDDRLLQSQCVNGTARG

SEQ ID NO: 266993 - protein, 32 aa, Glycine max
  Clone ID: PAT_MRT3847_83115C.1.pep
NQSILFNGPEIGPCPLMSVGTLVRLALPERFF

SEQ ID NO: 266994 - protein, 37 aa, Glycine max
  Clone ID: PAT_MRT3847_83116C.1.pep
CGEAILYLIYSAYILCNYLNLAYGFSTLLPSLMFKFK

SEQ ID NO: 266995 - protein, 103 aa, Glycine max
  unsure (1)..(103): unsure at all Xaa locations
  Clone ID: PAT_MRT3847_83117C.1.pep
MTVDEVDSSSEWSREQDKAFENALATHPEDDSDRWEKIAADVPGKTIEEIKQHYEXLLVEDINQIESXCVPLPSYNSSSEGXNSXCXDEGAGQKRQRPGHYSG

SEQ ID NO: 266996 - protein, 78 aa, Glycine max
  Clone ID: PAT_MRT3847_83118C.1.pep
NSSSVPGDPLESTCSWTHDKAVGNCFNVVYQEQSREIAFNMAPLHVIPRLNFVPLDNNGVFGTIRKSMVTVKYHIWAH

SEQ ID NO: 266997 - protein, 46 aa, Glycine max
  Clone ID: PAT_MRT3847_83119C.1.pep
SNYRVLLEEERFLPNCSKSRLMPSYIPQTLRCSIVRTTNINLADML

SEQ ID NO: 266998 - protein, 126 aa, Glycine max
  Clone ID: PAT_MRT3847_8311C.1.pep
LSPSPSPSPPVTESAHELLFHHLERVLFVVIDSVHELQDQPPVIQNSRWASLLLELLRDVINRLEASESTWPGCKHVVACAAMCKSWREMCKEIVSSPEFCGKITFPVSLKQPGHRDGPHSCFIKR

SEQ ID NO: 266999 - protein, 34 aa, Glycine max
  Clone ID: PAT_MRT3847_83120C.1.pep
EYEILHRWENLKMTYIPCVARAQTYDLIMVSKHT

SEQ ID NO: 267000 - protein, 52 aa, Glycine max
  Clone ID: PAT_MRT3847_83121C.1.pep
LAFLKHFSLLPFSRWGGGPLPQKKKSGRSSGSTLTYPCIPPHTSSISSPKFN

SEQ ID NO: 267001 - protein, 49 aa, Glycine max
  Clone ID: PAT_MRT3847_83122C.1.pep
QVSFLIRSYDVTLEFTIFPKFCSRIPKFTLLISPCSFLSLVSSVLHLIF

SEQ ID NO: 267002 - protein, 61 aa, Glycine max
  unsure (1)..(61): unsure at all Xaa locations
  Clone ID: PAT_MRT3847_83123C.1.pep
GAPTRTTAXXHHKKDFLISHSQLMARVIIKCGNHHLHLQLNLYNIYNINVHFSNILAFPTS

SEQ ID NO: 267003 - protein, 80 aa, Glycine max
  Clone ID: PAT_MRT3847_83124C.1.pep
HTVDCVISGIESNAENFENDEAEESQEDQNKKVINNDKEHCRAMIPFILRFGNRVVQFFDLGHCRAESGGFRSSPHLGYC

SEQ ID NO: 267004 - protein, 99 aa, Glycine max
  unsure (1)..(99): unsure at all Xaa locations
  Clone ID: PAT_MRT3847_83125C.1.pep
XRXRVRXLLMXLEEGYRPWXXXXAXTGAXXXEXXNXXVGAXXXCRXHXAWXEGDHXXXKXXSXXQXXAGRXRXRXSXXXDXXGLGVPDXLVPXXGAXGA

SEQ ID NO: 267005 - protein, 41 aa, Glycine max
  unsure (1)..(41): unsure at all Xaa locations
  Clone ID: PAT_MRT3847_83126C.1.pep
EXYTLGXYPSGXGQVLKXXAMPXGSXMGXXTXXXXYAXWRX

SEQ ID NO: 267006 - protein, 80 aa, Glycine max
  Clone ID: PAT_MRT3847_83127C.1.pep
KAISQEVYFRHFIKQCSCFFQKVQFGIQIDKGEWLKMFRSGIHFNEKVTSLSQETLEELIIGVASDLNQHLSMTLHDSIP

SEQ ID NO: 267007 - protein, 182 aa, Glycine max
  Clone ID: PAT_MRT3847_83128C.1.pep
LKRFSSPCGGVWEFELSNPLEVTIFQNPTLPPQMSSSAAVHLQSPINTSSDAPPPPPPHSPFLHFNADCVNPSAARTRSRPRLAKLRKQSASQQARSRSRTATGDDGSGAGFNPFRSDHQVNGNVNSSGVESGSDGFVFGAGKGDSDSARDLKGPSEGEIGEGGGGVEFVFSAKKRSDEDEL

SEQ ID NO: 267008 - protein, 39 aa, Glycine max
  Clone ID: PAT_MRT3847_83129C.1.pep
GTCEPVVAEGLCILRHAMIDTDQCKIQLSRNHTHRPHRR

SEQ ID NO: 267009 - protein, 95 aa, Glycine max
  Clone ID: PAT_MRT3847_8312C.1.pep
AFPLIPKHHFLQHTGVQVDVVRFKRWHCWWLALTWSIWKLRNSIVFSNATFNANKLLEDATFLIWTWLRGFEKDFTIHFNQWSSSISQGFCISRG

SEQ ID NO: 267010 - protein, 339 aa, Glycine max
  Clone ID: PAT_MRT3847_83130C.1.pep
MAFSAVWRLANLGRHLDLSESVNKAAPVGSIKLKVASEVSEALSLGRAVVALESTIISHGMPYPQNLETAKEVERIVRENGAVPATIAILDGTPCVGLSVEELERLAILGTRAQKTARRDIAHVVACGGNGATTVSATMLFASMVHIPVFVTGGIGGVHRHSEQTMDISSDLTELGRTPVTVVCAGVKSILDIPRTLEYLETLGVCVAAYKTNEFPAFFTESSGCKVSCRVDTPEDCASLIEASIKLKLGTGILIAVPIPQEHSTSGHIIESAIQKAIKEAREKNITGNAETPFLLARVNDLTGGASLAANIALVKNNALVGAKVAVALAQLRENCQRS

SEQ ID NO: 267011 - protein, 60 aa, Glycine max
  Clone ID: PAT_MRT3847_83131C.1.pep
VETNLYLTVILNAVAEMPAFMITAMLLDRWGRKPLTIGTLWFSGAFCFAGSLVNNVGVWK

SEQ ID NO: 267012 - protein, 136 aa, Glycine max
  Clone ID: PAT_MRT3847_83132C.1.pep
AVWRLSNLGRHLDLSESVNKAAPAGSIKLKVASEVSEALSLGRAVVALESTIISHGMPYPQNLETAKEVERIVRENGAVPATIAILDGTPCVGLSVEELERLAILGTRAQKTARRDIAHVVACGGNGATTVSATML

SEQ ID NO: 267013 - protein, 142 aa, Glycine max
  unsure (1)..(142): unsure at all Xaa locations
  Clone ID: PAT_MRT3847_83133C.1.pep
FFFFFFXFFFFFFFFFFFFFFFFFFFFFFFFNFFAIQKLPFHNPHDPNHQPANLNYSFNYCLFFASCCIIPSCTLCRFLCCLFLLRLGSKHNIIAKYYLFQTKIQVIDSAPQRQHLSKKHNLFIHLSQITLINTSYSTNNAT

SEQ ID NO: 267014 - protein, 87 aa, Glycine max
  Clone ID: PAT_MRT3847_83134C.1.pep
HLTFTYTHTIIMSHAAHPASAFQVRIRVLEAHGLAKADKTSQSDPFVYAKLKGLKTMMTHVQTSVINNNPNPVWNQELDLFPNSVKR

SEQ ID NO: 267015 - protein, 87 aa, Glycine max
  Clone ID: PAT_MRT3847_83135C.1.pep
RKGYGDSGIYMPHWTFLGKKGDQNKPGISKFWSFPSFPKRPYLPNLGGIKGLFTERQKASLLCQQAFVTFKTTGECFPPKGNSGPLT

SEQ ID NO: 267016 - protein, 70 aa, Glycine max
  Clone ID: PAT_MRT3847_83136C.1.pep
ELIFTHPAVGAKDQKLIHGGKYLLLQEGASLDSSLIVQMSIKKWSSSRSPNRPTGKGALVSSNAMLRFPE

SEQ ID NO: 267017 - protein, 199 aa, Glycine max
  unsure (1)..(199): unsure at all Xaa locations
  Clone ID: PAT_MRT3847_83137C.1.pep
MVRAPCCEKMGLKKGPWTPEEDQILMSYIQKHGHGNWRALPKLAGLLRCGKSCRLRWINYLRPDIKRGNFSSEEEEIIIKMHELLGNRWSAIAAKLPGRTDNEIKNVWHTHLKKRLLNSDIQKRVSKPRIKRSDSNSSTLTQLEPTSSACTTSLSDFSSFSEGTKNMDNMIKSEDIESVETIMPPIDESXWSKATVDYE

SEQ ID NO: 267018 - protein, 51 aa, Glycine max
  Clone ID: PAT_MRT3847_83138C.1.pep
IVQSIDIMHASVVLNQVSVESLEVHPTITILTVVHTVAAVSQCIPRIAPVI

SEQ ID NO: 267019 - protein, 154 aa, Glycine max
  Clone ID: PAT_MRT3847_83139C.1.pep
MAKPKLHLLSFLFCSILLSFFHCTFSLINPEDEPSWTDMETEDINIVRTRRDTWKKCDYSVGKWVFDQSYPLYDSNCPYLSTAVACQKNGRPDSDYEKWKWKPFGCSIPRFDALGFLSKMRRKRIMLVGDSIMRNQWESLVCLVQGVIPTDRKR

SEQ ID NO: 267020 - protein, 83 aa, Glycine max
  Clone ID: PAT_MRT3847_8313C.1.pep
RGTTTFFSLFPEFAIPAECLLNATPLDIVTFGISGKSTLSLAIGREMNYAEEDRGKNTYADSSNYRTPSNRNGQGNIFQQKKH

SEQ ID NO: 267021 - protein, 58 aa, Glycine max
  Clone ID: PAT_MRT3847_83140C.1.pep
TLLCFACPFVFCLFLLTYPPIFKFFPPKFLVTVILFISTFLKNINLNSLFYKIALIFK

SEQ ID NO: 267022 - protein, 103 aa, Glycine max
  unsure (1)..(103): unsure at all Xaa locations
  Clone ID: PAT_MRT3847_83141C.1.pep
VCKEQDTAWYCXMSVPCCMHSENLGCLRYDXGKEMEGEDEIKXGEVYCGMAQSMNTKVAIHPYTTSKVLYKSEDVGIYQRTIKVESMKTFGSEEDEEGGAKSL

SEQ ID NO: 267023 - protein, 60 aa, Glycine max
  Clone ID: PAT_MRT3847_83142C.1.pep
KSWMQEKGFGVSIRWKKSTETETAASADWRVRMEFKRRVRAAASEMDGGEVEKGCVLESE

SEQ ID NO: 267024 - protein, 168 aa, Glycine max
  unsure (1)..(168): unsure at all Xaa locations
  Clone ID: PAT_MRT3847_83143C.1.pep
RFGLXXWLPXXWTHHAVXXVEGTXXYLAPEYFMHGIVDEKTDVXAFGILLLEIVTGRRPVDSSKQNPHASAKPLMESGNIAELADPRLEGKYDGEQLYRVVLTASYCVRQTATWRPPMSEVLELLTSGQESEVGKSWRIPKFTSDELDDYSMVFGYDVPSDVSLEDYL

SEQ ID NO: 267025 - protein, 120 aa, Glycine max
  Clone ID: PAT_MRT3847_83144C.1.pep
NIPTPNFLTKKPFPKRGRKFFFFFGGGGGKRNRHFRWPLTPFLKTPGLHRLEWNNTGTPPLLGKKGGRIPIFNPQGGTTFWAQRGPLPNGLELKRHPLMAHHRVYLLSQGGLDHERLTFF

SEQ ID NO: 267026 - protein, 123 aa, Glycine max
  Clone ID: PAT_MRT3847_83145C.1.pep
HGEYVYALWGVVHPYVPIRLGSLGTGLTCVPLYVYGSIGVPLFFLVPVFVCALFLRLFSVLRCVRVSVFGGFCFLRCLSALVLVFPVPWAFQLSRRCLLRFCLSKVLLGLWAFVFPVSEALVF

SEQ ID NO: 267027 - protein, 126 aa, Glycine max
  unsure (1)..(126): unsure at all Xaa locations
  Clone ID: PAT_MRT3847_83146C.1.pep
PTVASFSPAFSLSPPLVPAFGLSXGVGLATVLVPDIVMISRLVHTXHVTAIDLNQGNLAIIAPIAIGFIVGANLLLGGVLSAAVMNFAVIFGSAVVSWIWINHWIHWVRSLIGGGIAGSVYEVVFI

SEQ ID NO: 267028 - protein, 29 aa, Glycine max
  Clone ID: PAT_MRT3847_83147C.1.pep
FINLLGWGILTNKVGDWITRIHMSTIRNL

SEQ ID NO: 267029 - protein, 36 aa, Glycine max
  Clone ID: PAT_MRT3847_83148C.1.pep
QKHQKFLHFLALSKCHEELCSKQRLALQIILEHGEK

SEQ ID NO: 267030 - protein, 39 aa, Glycine max
  Clone ID: PAT_MRT3847_83149C.1.pep
ALHLSVDAFPISDFLESVLHTYSITLNSLFTKKPFTIIT

SEQ ID NO: 267031 - protein, 118 aa, Glycine max
  Clone ID: PAT_MRT3847_8314C.1.pep
YFGHSGLAGSFTFKPIIILATVWNQVPHHTRIILKYGYIIFKKKEEKERERESIYENLLPFFSCHELTIYNINVTTDSKHLGFTVINKLLQTARCPQSNACIESSYNSLDLMWSSSHA

SEQ ID NO: 267032 - protein, 185 aa, Glycine max
  Clone ID: PAT_MRT3847_83150C.1.pep
CCTCTPFSASFLTSLPLHHRLQPSPPHFAAAVPLCSKQQTPSHTFRLLALPLLSHGNNNNNNNNNNGGSWGNPFDSSDSNSNSHHTLFLSLLCSSALCFFCHLLHAKLAKAKTLSPSTTADTSLFSEPVYEVKGGKWTKLVPDLTNDVFVSAQQGFLSELSSLKVPSQLATFVWLKCSDIFTRLM

SEQ ID NO: 267033 - protein, 140 aa, Glycine max
  Clone ID: PAT_MRT3847_83151C.1.pep
GVGHVFNVLGIAVSALVESNRLKMVHSDPSVAMSILWLFPQLVLVGIGESFHFPAQVAFYYQQLPQSLRSTSTAMISMILGISYYLSTALIDQVRRSTNWLPADINQGRLDNFYWMFVLVGGINFVYYLVCSTLYKHTKV

SEQ ID NO: 267034 - protein, 54 aa, Glycine max
  Clone ID: PAT_MRT3847_83152C.1.pep
DGAGSDGRPTPRFAAYGATKRSVVHLTKSLQAELRMQDVKNVVVHNLSVGFCIL

SEQ ID NO: 267035 - protein, 57 aa, Glycine max
  Clone ID: PAT_MRT3847_83153C.1.pep
TTELYAVVTGAGNGIGLELVIQLAYTWSQRGAHCTRCLDRYPSTARTQGLRVYLSLY

SEQ ID NO: 267036 - protein, 251 aa, Glycine max
  unsure (1)..(251): unsure at all Xaa locations
  Clone ID: PAT_MRT3847_83154C.1.pep
NTTYTYYIFSLCLHFVNLLRCKCVGGWVDGKWDGGVGGSRYRGXYRQGLRHGFGVYRFYTGDVYAGEWFSGQSHGCGVHTCEDGSRYVGEFKWGVKHGHGHYHFRNGDTYAGEYFADKMHGFGIYRFANCHRYEGAWHEGRRQGLGMYTFRNGETQSGHWQNGVLDIPSTQNTTYPVSPVGVYHSRVLNAVQEARRATEKAYDVAKVDERVNRAVAAANRAANAARVAAVKAVQNQMHHNVNSMSIPIPIV

SEQ ID NO: 267037 - protein, 117 aa, Glycine max
  Clone ID: PAT_MRT3847_83155C.1.pep
IRLELEPENLSHSVTIPVATDNVEILQKRVKQLLGCFYINVKEIRGIGLHVSRLESAEASKQGTVKYTLKSWLTSGYASIENQKYPMGHDKQNRDSTCSRACRDLPGSSVEMDNKIP

SEQ ID NO: 267038 - protein, 154 aa, Glycine max
  unsure (1)..(154): unsure at all Xaa locations
  Clone ID: PAT_MRT3847_83156C.1.pep
HGLAHYHFRNXDTYAGEYFADKMHGFGIYHLXNGHRYEEAWHEGRRQGLGMYTFRNGETQSGHWQNGVLDIPSTRNTTSPVSPVGVYYSKVLNAVQEARRAAEKAYDMAKVDEGVNRAVAASNRAANAARVAAVKAVQKQNYHVSSESFSIPVV

SEQ ID NO: 267039 - protein, 419 aa, Glycine max
  unsure (1)..(419): unsure at all Xaa locations
  Clone ID: PAT_MRT3847_83157C.1.pep
FRVWISIWYCDCFFFFWRFLVSPFFGDSYRERLRNEMVERRVTLSKEARNGLEFLKRKRLQRAKFVTATQTSVANMMSRSGNALRASASCGPRFHGNANVFSKRKVDKFDTNDLDWTDKILECPVYSPTKEEFEDPLIYLQKIAPEASKYGICKIISPLSASVPAGVVLMKEKAGFKFTTXRVQPLRLAEWDTEDKVTFFMSGRNYTFRDFEKMANKVFARRYCSAGCLPATYLEKEFWHEIGCGKMETVEYACDVDGSAFSSSPTDQLGNSKWNLKKLSRLPKSILRLLETSIPGVTEPMLYIGMLFSIFAWHVEDHYLYSINYHHCGASKTWYGIPGHAALEFERVVREHVYTNDILSSDGEDGAFDVLLGKTTLFPPNILLEHEVPVYRLLKAKEFIXNIPWAYHAGLAWFNCGEQ

SEQ ID NO: 267040 - protein, 64 aa, Glycine max
  unsure (1)..(64): unsure at all Xaa locations
  Clone ID: PAT_MRT3847_83158C.1.pep
MVSGSGICXKRXVXXARHHMLGRLTSXXAXDPLNWQXVXXXRAQRLXXRGVVXXXRXXXSXXRK

SEQ ID NO: 267041 - protein, 74 aa, Glycine max
  Clone ID: PAT_MRT3847_83159C.1.pep
RISSELTWSDLLLSSNQHYAKCLPCLHPLFYDSFHRLYELLISVLQFFNVFFFALNFFIFLFFSFLFFSLFTSF

SEQ ID NO: 267042 - protein, 116 aa, Glycine max
  Clone ID: PAT_MRT3847_8315C.1.pep
MFFSGDPFTRKRVDLGGRSSKERDRKNLLEQTRVERNRRLWLRQQNSAVLKIQKCFRGRKAVRTEQSKLREQFYKIYGKHCQNVDRNSFGPDSNFLYQFLYFFKAENIEDFLKLVR

SEQ ID NO: 267043 - protein, 67 aa, Glycine max
  unsure (1)..(67): unsure at all Xaa locations
  Clone ID: PAT_MRT3847_83160C.1.pep
SCRIRHEATLLPPPCLPPTPPSPPAPPXSATDPPTPPPLLAPAATPTSAESPPPDLSPPLHSPPRPL

SEQ ID NO: 267044 - protein, 52 aa, Glycine max
  Clone ID: PAT_MRT3847_83161C.1.pep
KGYKMFHCVSYLCCLFFSSHFFFFQRKPYLASKPNKNSSIRPRMECCDKTPQ

SEQ ID NO: 267045 - protein, 108 aa, Glycine max
  Clone ID: PAT_MRT3847_83162C.1.pep
FLQLQFNLLPQGVNSLRLRPNNALNVTTLISSRPNRPTTPFVNPATARRLTKTQLCAFREGRATPFFRDLGIPKGQRGLILFPNLIQFPRLCLATIFLGAIINTTKPL

SEQ ID NO: 267046 - protein, 52 aa, Glycine max
  Clone ID: PAT_MRT3847_83163C.1.pep
RQKLNTVIILRRFRGTTPLIYSHRLGRRVVNTYVILILLHIIYLDIISYQMA

SEQ ID NO: 267047 - protein, 68 aa, Glycine max
  Clone ID: PAT_MRT3847_83164C.1.pep
GLGIMATLSKSKLNPVLDRADSVMGLYDNNIEVPLQLTEFDRYKENPEDYLDAQKYEALLHTLDNSDC

SEQ ID NO: 267048 - protein, 82 aa, Glycine max
  Clone ID: PAT_MRT3847_83165C.1.pep
TGRQHGNIGGPYYGTNTADTGTGTRKRLPGGDRYGRNGGTDCGTTGCTGYGNGTGYGVNTEGSHNQAGIKKEHRQDDQSQGD

SEQ ID NO: 267049 - protein, 88 aa, Glycine max
  Clone ID: PAT_MRT3847_83166C.1.pep
TRVLEACCREMDAAFVDHGYVVARKTSSIGPLLLCIVERGTFKKILDYFVENGAALGQFKTPRCTNNPVLLKILSACTIKTFRSTAYI

SEQ ID NO: 267050 - protein, 86 aa, Glycine max
  unsure (1)..(86): unsure at all Xaa locations
  Clone ID: PAT_MRT3847_83167C.1.pep
GNRKKTILHHRIFFVIINSKLKFIVLYEVDGGSFXTIHYLDCSHIQLLSAIYQIQSNIQTSHKKRFFTNILTHTTYMPSSNCIHHL

SEQ ID NO: 267051 - protein, 234 aa, Glycine max
  unsure (1)..(234): unsure at all Xaa locations
  Clone ID: PAT_MRT3847_83168C.1.pep
GSRKITAYVGGGNGGGGKVRPAANGTDGDGRFDRSRHGTVFSDGGASTQAYKTGEKTESVSGQEEEEEENLWNAMVEEASRMEVSWRGKDLDSDVMKRFVSPVMASIESDDYAEYLRTELVXQTGLSQDPNNTLLLAKYAQFLYLVAHDYDRAEEFFKRAIEVEPPDAEAYNKYAPFLWKVKNDLWAAEETYLEAISADPNNSFYAANYAHFLWNTGGEDTCFPLSSPDNSQEV

SEQ ID NO: 267052 - protein, 42 aa, Glycine max
  Clone ID: PAT_MRT3847_83169C.1.pep
FAAEDSERATFFVSRKVFVIMGKAKIHISIVVIGHIDSGKST

SEQ ID NO: 267053 - protein, 66 aa, Glycine max
  unsure (1)..(66): unsure at all Xaa locations
  Clone ID: PAT_MRT3847_8316C.1.pep
MPIRNIAVGKPEDATHSDTLNEVLAEFISSFIFVFAGSGSGIAXNKLSDNGAATPAGLISASIASC

SEQ ID NO: 267054 - protein, 114 aa, Glycine max
  Clone ID: PAT_MRT3847_83170C.1.pep
GTGFLKPRPWWGGSKGLNMPPRGPRSHVYPCYFVFGDCPDPFFGGGEREFFFFFFKIFSPFFFFFFKGGPPGGGLGWVFFFRPPGGVEAPPPLEIGGFFFLGGGREFPPPGFFL

SEQ ID NO: 267055 - protein, 64 aa, Glycine max
  Clone ID: PAT_MRT3847_83171C.1.pep
MLAHGGAGGVPFAKTAVYDNRYAPLPVDKLSYNCSVCSKVFFSYQALGGHKARHRKLGGEHHST

SEQ ID NO: 267056 - protein, 85 aa, Glycine max
  Clone ID: PAT_MRT3847_83172C.1.pep
ANEEFPHNISFSRLERYVLIFKMYTQSWLTDMMEGMMEEHRPCRALCINGFNASVQSFISLPIKDFFQKAEYLHLENLEGGYENV

SEQ ID NO: 267057 - protein, 55 aa, Glycine max
  Clone ID: PAT_MRT3847_83173C.1.pep
DAVVFKIHIMPDYIFKKYTCYMHWVKKTKNKSYICYVMRLLLTIHNSKHTALLMT

SEQ ID NO: 267058 - protein, 85 aa, Glycine max
  unsure (1)..(85): unsure at all Xaa locations
  Clone ID: PAT_MRT3847_83174C.1.pep
RLLGGVVLNSGKAVSDQFRGGFRVLGGDDDPPGLRIFEKMLRPSLYEVPKCXRAKTALSLLRENKNGFDIVISDVHMPDMDGLNF

SEQ ID NO: 267059 - protein, 76 aa, Glycine max
  Clone ID: PAT_MRT3847_83175C.1.pep
RNILPALQRMKKCHLLQVSVISIPQLSRIYHRDSKVVVSKNVGAQSHENGGVLDPVLQIAAESLTSNHRLNIPVPT

SEQ ID NO: 267060 - protein, 35 aa, Glycine max
  Clone ID: PAT_MRT3847_83176C.1.pep
ITMLLQYIYTYIKTLYVNQPKLYFLPLYKTLHKSK

SEQ ID NO: 267061 - protein, 69 aa, Glycine max
  Clone ID: PAT_MRT3847_83177C.1.pep
ASQFFYKFYLQPVQFNAPSFFGGEVFEFLGGAIQTIYFPHKVASFQRNLKSTLPIFIYSIGPWKKGLLT

SEQ ID NO: 267062 - protein, 42 aa, Glycine max
  Clone ID: PAT_MRT3847_83178C.1.pep
LTWWIDSSQLEADISTLIIWLFDGAGNLEQIKCEGQNIFKDF

SEQ ID NO: 267063 - protein, 81 aa, Glycine max
  unsure (1)..(81): unsure at all Xaa locations
  Clone ID: PAT_MRT3847_83179C.1.pep
RRLKVQSDQWRKAAEAAASMISAGNNGXKFVDRNCSRENSFNSVTGKMNSPYLLDTDDESPKKKNTNMLKKIGVLWRRNHH

SEQ ID NO: 267064 - protein, 116 aa, Glycine max
  Clone ID: PAT_MRT3847_8317C.1.pep
RSQAKNNFTLRESSGDMSGAKDKRKQGEDDAVSGSQQQKKAREDEAVTDEEVEEFCAILRRINTAVKYFKSHGEDVAALEKDIMQDVKEATRMSNQNEKEEDDLSLDLNVTPQTPT

SEQ ID NO: 267065 - protein, 112 aa, Glycine max
  Clone ID: PAT_MRT3847_83180C.1.pep
TAARRRQKGKTCICHVLSSNLTAHNKRNHIDTFVLVMALKINTFLLVLLLILIPLSSGLAEGFGENMHPTHGLLYKDGIKMNSRKLLVHDFVLDYDEAGPNPRHTKKPGKGP

SEQ ID NO: 267066 - protein, 101 aa, Glycine max
  unsure (1)..(101): unsure at all Xaa locations
  Clone ID: PAT_MRT3847_83181C.1.pep
NLRCHEPGCNGGLCSIKLAHSSYNTYRDFGSQDGKAIWWCAMYFVIWCLTAYFRFFIVYAEKFLIMACLMNIFVCFAFYNFVAXCLLPQKKKKKXXXXRPL

SEQ ID NO: 267067 - protein, 42 aa, Glycine max
  Clone ID: PAT_MRT3847_83182C.1.pep
LAKNASMTLPGVTEYLNNSSCASQNRVLRHVDAAFTLIPQYM

SEQ ID NO: 267068 - protein, 545 aa, Glycine max
  Clone ID: PAT_MRT3847_83183C.1.pep
MAVVAQTPDIAGERQSGQDVRTQNVVACQAVANIVKSSLGPVGLDKMLVDDIGDVTITNDGATILKMLEVEHPAAKVLVELAELQDREVGDGTTSVVIVAAELLKRANDLVRNKIHPTSIISGYRLAMREACKYVEEKLAVKVEKLGKDSLINCAKTSMSSKLIAGDSDFFAILVVDAVQAVKMTNARGEVKYPIKGINILKAHGKSARDSFLMNGYALNTGRAAQGMPLRVAPARIACLDFNLQKTKMQLGVQVLVTDPRELEKIRQREADMTKERIEKLLKAGANVILTTKGIDDMALKYFVEAGAIAVRRVRKEDMRHVAKATGATLVSTFADMEGEETFEPSFLGYADEVVEERISDDAVVMIKGTKTTSAVTLILRGANDHMLDEMDRALHDALSIVKRTLESNTVVAGGGAVEAALSVYLEYLATTLGSREQLAIAEFAESLLIIPKVLSVNAAKDATELVAKLRAYHHSAQTKADKKHLSSMGLDLSEGKIRNNLEAGVIEPAMSKVKIIQFATEAAITILRIDDMIKLIKDESQNED

SEQ ID NO: 267069 - protein, 509 aa, Glycine max
  unsure (1)..(509): unsure at all Xaa locations
  Clone ID: PAT_MRT3847_83184C.1.pep
MENHHPSTLLSMDSSASSHEELDLEMNRQIILTRPPDINLPLSAERSPPPQPWNSEPCDILDVGLGTQGYETESFLNLPKAGRKCAKRVDSIWGAWFFFSFYFKPALNDKSKAKIVRDSNGVSGFDKSDLKLDVFMVQHDMENMYMWVFKERPENALGKMQLRSYMNGHSRQGARPFSFSADKGFARSHRXMQRKHYKALSNRQWVHGVEGVSSPDLMTLVKDGRKNWIELTGGELNFTISTDASDFSXWRNFPNTDFEHERQPPPIKNGPNAHPKKLLNGSGLNANSSXTDLALIGSGLQLSNHSNGDGLDLSPVSSKKRKDFFPHGNEEECYLAVNPPSDRIPDIEMHPTEPHWLNDFSGVIKSVYGPVTAAKTIYEDEQGYLIIISLPFVDLPSVKVSWRNTLTHGIIKVSCMSTSRKPLIKRHDRTFKLTDPSSEHCPPGEFVREIPLSTRIPEDANIEAYYDGPGSVLRSLLEILVPKHRVGPEEHEVRVCLRPHLGGNDLKLT

SEQ ID NO: 267070 - protein, 70 aa, Glycine max
  Clone ID: PAT_MRT3847_83185C.1.pep
RRETKIFKDYLLPFGISIGETRRRGTSIADDDAQRHIIDNHIFYTLSPEYFPLFLFPQIENPNFFSGVVK

SEQ ID NO: 267071 - protein, 72 aa, Glycine max
  unsure (1)..(72): unsure at all Xaa locations
  Clone ID: PAT_MRT3847_83186C.1.pep
RSIRQSTAPPGEFVREIPSFNXIPEDANIEAYYDGPGSVLEILVPKHRVGPKKHEVRVCLRPHLGGNDLKLT

SEQ ID NO: 267072 - protein, 247 aa, Glycine max
  unsure (1)..(247): unsure at all Xaa locations
  Clone ID: PAT_MRT3847_83187C.1.pep
MAVTRDFSSWRNLPNTDFELERPPHPIKYTPNSYPKKLLNGTVLNLSNHSNGDAIDLSPVNGKKRKELFLNDERLLLVCXAPSDRVPDIDMQPSEHPWLNDFSGVMKSVHGPVTAAKTIYEDEQGYLIIISLPFVDLPSVKVSWRNTLTHGIIKVSCMSTSRKPLIKRHDRTFKLTDPSSEHCPPGEFVREIPLSTRIPEDANIEAYYDGPGSVLEILVPKHRVGPEEHEVRVCLRPHLGGNDLKLT

SEQ ID NO: 267073 - protein, 45 aa, Glycine max
  Clone ID: PAT_MRT3847_83188C.1.pep
SKFHNQSVIPTESATKSKCRASLICFFFFFKVLYHIILSSTQPRA

SEQ ID NO: 267074 - protein, 105 aa, Glycine max
  Clone ID: PAT_MRT3847_83189C.1.pep
FLRVSGNAGASPLLTHSSYKVSLHSSTPISMFVHKYGDIREVRVLIYARNINDVVVEWTSAVQLAIKEKRCCVNMFIAVVILKLFDQLTVVPLVEFNSTRSGDGV

SEQ ID NO: 267075 - protein, 94 aa, Glycine max
  Clone ID: PAT_MRT3847_8318C.1.pep
KCHFPTNLFPLFPFFLLHWGVLFNSTFSFCFWLSFRAAEGFHFHSIFCDFGLGSFSLNGLIFCGFIFGTGYSNNDGFGKEFVGEVKKKIEVLIF

SEQ ID NO: 267076 - protein, 65 aa, Glycine max
  Clone ID: PAT_MRT3847_83190C.1.pep
PSPRQVQAPPGPPGSFFSNKLPRPQNPAISLPPFPPTLAPEDGDIAPSNPPVPEPGDGAPLRVPD

SEQ ID NO: 267077 - protein, 61 aa, Glycine max
  unsure (1)..(61): unsure at all Xaa locations
  Clone ID: PAT_MRT3847_83191C.1.pep
MGSKRILKVLKDLQKDPPTSCSAGHVAEDMFHWQATIMGPADSAYACXVFLVSIHFPPDYA

SEQ ID NO: 267078 - protein, 92 aa, Glycine max
  Clone ID: PAT_MRT3847_83192C.1.pep
YNEAQAAACLYIACRQEGVPRTFKEVCAVSKVSKKEIGRCFKLIQKTMETNLDHITSADFMSRFCGNLSLPYPVQVAATRIAKKSVEHDLVV

SEQ ID NO: 267079 - protein, 80 aa, Glycine max
  unsure (1)..(80): unsure at all Xaa locations
  Clone ID: PAT_MRT3847_83193C.1.pep
MDLLAIASIAAAIEGCSGAIRLACANIISQVYDPERQILESAIKWPVNVLKVAKEAVVERVCXTSSITSIIPRPNWSADK

SEQ ID NO: 267080 - protein, 94 aa, Glycine max
  Clone ID: PAT_MRT3847_83194C.1.pep
IKLVLRRLGSNIIFSNGLRDPYSIGGVLDNISDSIVAVHTVNGSHCLDLLRANQSDPGWLVEQRKKEVKIIKRWITQYYADLDALKDKPKFQSK

SEQ ID NO: 267081 - protein, 36 aa, Glycine max
  unsure (1)..(36): unsure at all Xaa locations
  Clone ID: PAT_MRT3847_83195C.1.pep
GLSECCMENVDSPGTIIGTXSLVNDEXTFSIQHYDK

SEQ ID NO: 267082 - protein, 165 aa, Glycine max
  unsure (1)..(165): unsure at all Xaa locations
  Clone ID: PAT_MRT3847_83196C.1.pep
ARVRNETLPLIFFLFLCSHLHSVLSWKKEEFRTCHQAPFCKRAQSRAPGSSSLIATEITISDGDLTAKLTPXHDSQSEETKPLILTLSVHQLGILRLKIDEDPSLSPPKKRFEVPDVVVSEFPSTKLWLPRVSSEKNGAYSSVYLFDGHSAVLRHDPFELFVRDD

SEQ ID NO: 267083 - protein, 41 aa, Glycine max
  Clone ID: PAT_MRT3847_83197C.1.pep
LIISYMLIIHFFLVWPKCANPIVRFCLGEQMRIMNNKTSNQ

SEQ ID NO: 267084 - protein, 99 aa, Glycine max
  Clone ID: PAT_MRT3847_83198C.1.pep
KGGPKTPIRLENSKDLIHRGFYFSRSTGGANKKNGFRKHIPIKGFGFLRIQENKILKQLFSLGNSCSPFQGAKNLKDHIFCHFFLQQEDQDALDKQIGL

SEQ ID NO: 267085 - protein, 369 aa, Glycine max
  Clone ID: PAT_MRT3847_83199C.1.pep
MSSLNLGTWPRPTSMLNTPSHLLPPFHTLTLTTTLPKLASGTPKLISSFPLVSAVPTKEHTVTTQEIQLQDTPLNFDFKGYMIAKAHTVNQALDAAIALRDPHKIHQAMRYSLLAGGKRVRPVLCIAACELVGGTEATAIPAACAVEMIHTMSLIHDDLPCMDNDDLRRGKPTNHKVYGEDVAVLAGDALLAFAFEHVAASTEGVSPSRVVRAIGELAKSIGTEGLVAGQVVDIDSEGVANVGLETLEFIHVHKTAALLEAAVVLGAIVGGGSDEEVEKLRKFARCIGLLFQVVDDILDVTKSSEELGKTAGKDLVADKVTYPKLLGIDKSKEFAQELLKDAKEQLSGFDPPKAAPLFALTNYIAYRQN

SEQ ID NO: 267086 - protein, 271 aa, Glycine max
  unsure (1)..(271): unsure at all Xaa locations
  Clone ID: PAT_MRT3847_8319C.1.pep
VGTVQGXSMLRPHENLHMMRLGHNPEHQRQMMVPELQMQVTQGNSQGIPALCGPSSAFSNQTTPPVQPYSGHAQQPHQLPQQQSHLSSPHLQGPSHATNSQQQAYAVRLAKERQLQQRYLQHQQQLAASNALMPHVQAKSQLPISSSPLQNSSQVQPQNSPQQVPLSPITPSSPLTPLSSQLQQQKLHHAQPGFSRNSTASGLTNQAAKQHPRHPPQRPQQQYQQPGRQHPNQRHNVQSQQQAKLLKGMARGNMMVHQNLSVDTSHLSGLS

SEQ ID NO: 267087 - protein, 67 aa, Glycine max
  Clone ID: PAT_MRT3847_831C.1.pep
LEKPLNLKHSLPHDTYRHRRLTPRRTSGPFTPLSEMTAPLRANSLTPILPTMLMFPSRIAPAPNNTL

SEQ ID NO: 267088 - protein, 87 aa, Glycine max
  Clone ID: PAT_MRT3847_83200C.1.pep
GLASSMAYSDTWAMCEGKYNSGSLKYKLQKASKRDYCRTITSVMEFESDWIKHRKSSSYTAHVIRSATSFMPWSCRIPIGDGYHEFL

SEQ ID NO: 267089 - protein, 63 aa, Glycine max
  Clone ID: PAT_MRT3847_83201C.1.pep
GGCWGWHNILRFKGEKIAPHLKVGFKDNKMGPEGALGAMSPLKTRGGVGHNFLPHGWGGPFFL

SEQ ID NO: 267090 - protein, 96 aa, Glycine max
  Clone ID: PAT_MRT3847_83202C.1.pep
ERPRGFFIFGGFPPPLSKISPPGEPLFFDPLFPPPLKIPRRATPKSKSPGVYPGIFLPPMGEIKKPFFYPGHQIPKPHFAQKKPPLSPFGFRPGNP

SEQ ID NO: 267091 - protein, 66 aa, Glycine max
  Clone ID: PAT_MRT3847_83203C.1.pep
IRATAAEICVFPKGRLNSFSHRRFEPAVIRHNQLTHTLQCSSRILCTWVLTSMKGGHESLRKRTRN

SEQ ID NO: 267092 - protein, 144 aa, Glycine max
  unsure (1)..(144): unsure at all Xaa locations
  Clone ID: PAT_MRT3847_83204C.1.pep
EFELGTRGSSRVDLQTWLERHGPFDAVVDGANVGLANGHNFSFSQLNTVVEQLRQISPSKRLPLIILHISRVHGGPAQNPKNKRLIENWKKNGVLYATPQGSNDDWYWLYAAVSCKCLLLXNDEMRDHLFQLLGXIXFPRWKEK

SEQ ID NO: 267093 - protein, 71 aa, Glycine max
  Clone ID: PAT_MRT3847_83205C.1.pep
FSYQHTASSSSPGNVIFCQSMIQQMQHACNECKGTGETINDRDRCPQCKGEKVVQEKKVLEVIVEKGMQNG

SEQ ID NO: 267094 - protein, 65 aa, Glycine max
  Clone ID: PAT_MRT3847_83206C.1.pep
IPTPSHSSKLLLQDYIHLRIQYYYSNLRLQKYYNTCQAISLPPCSLSTLTHYNYLIIFTYHLHSS

SEQ ID NO: 267095 - protein, 98 aa, Glycine max
  unsure (1)..(98): unsure at all Xaa locations
  Clone ID: PAT_MRT3847_83207C.1.pep
MVITLIFGFNIPIIGAVVYHIEXNHILDLILNSIKIVYRHYDCTTDYNNETLLGDALKDALDSILLKREYLFITTKLFYSFQRQFLEACKNSLKKHFI

SEQ ID NO: 267096 - protein, 204 aa, Glycine max
  Clone ID: PAT_MRT3847_83208C.1.pep
MSSKPSNIVATRPHQRKEKDTMMSLDHSKLKRELSNLSNEAYHVESSSIPFVWESQPGTPKVRFKENSLPPLTPPPSYFQNATKKATTKAKNKNSPKSSFLQTLFPKRATRKGGVPPQTGSQNIWSYSSNSPSSSSSSSSSSLSFSSPRPTSYSVPSSPMIHSRKGEEDEDLYEVSSSGLCFGNARSRGCYSSMFKKVLLGDFL

SEQ ID NO: 267097 - protein, 63 aa, Glycine max
  unsure (1)..(63): unsure at all Xaa locations
  Clone ID: PAT_MRT3847_83209C.1.pep
TTPFLTKTYKLEDXQAINNFISWNDDWSXIIDWCPTTCIRDQLSEAFTHNDDSSLHGQLDTYG

SEQ ID NO: 267098 - protein, 65 aa, Glycine max
  Clone ID: PAT_MRT3847_8320C.1.pep
FRGEREAQKLWTKKCCGRKKMGRILLRLKGQFFLAFPVFKRFFHKVCPQLRPNNLKPSLILGLSN

SEQ ID NO: 267099 - protein, 105 aa, Glycine max
  Clone ID: PAT_MRT3847_83210C.1.pep
CVCLLNMSAIYVRNHIRDINYMAYHCTFVIPTLSLHYKCLFATDRSIASPWPSMAFPGDTFSRSDSALRCCNTIWIWRALSPHFVARLRRRGNGHVEQSFSNWCQ

SEQ ID NO: 267100 - protein, 228 aa, Glycine max
  Clone ID: PAT_MRT3847_83211C.1.pep
MASISTCITVTPTCRLARRLLSFTSKQAIAFPSVQQNPVIGGVTKRVWDSRVLVAGPGGAVETDKLPSDVRKRTMDAVDECGGRMTIGDVASRAGLNLNQAQKALQALAADTNGFLEVSEEGDVLYVFPKDYRSRLGAKSFRIKAEPFFEKAKAAGEYFIRVSFGTALIASIVIVYTTIIALVTSSRSEEDNRGRRGGRSYDSGFTFYFNPVGLFWYWDPFFFREAKA

SEQ ID NO: 267101 - protein, 143 aa, Glycine max
  Clone ID: PAT_MRT3847_83212C.1.pep
MASMSTCITVIPTCGLPRRLLSFTPKQPISLPCVIGGVPKRVWDSRVLVARPGGAVESDKLPSDVRKRTMDAVDGCGGRVTIGDVASRAGLNLNQAQKALQALAADADGFLEVSGEGDVLYVFPKDYRSRLGAKSFRIKLTLF

SEQ ID NO: 267102 - protein, 505 aa, Glycine max
  unsure (1)..(505): unsure at all Xaa locations
  Clone ID: PAT_MRT3847_83213C.1.pep
MASMSTCITVIPTCGLPRRLLSFTPKQPISLPCVIGGVPKRVWDSRVLVARPGGAVESDKLPSDVRKRTMDAVDGCGGRVTIGDVATRAGLNLNEAHMGLQDLVAEADGFLEVTGEGEVLYVYRPGYRXVFVGSSFGMIADQFFDKAKAAGAYFXRFFIGHSLIASSLIAVTTLNSVVACSSCYWYNFDLKSWQXFDSGFTFYFNPVDLFWYWDPYYYRRRRLQADDDKMNFIESVFSFVFGDGDPNQGIEEERWKLIGLXNIGQYIASNGGVVAAEELAPYLDIDSTEGIKDDESYILPVLLRFDGQPDVDEEGNILYRFPSLQRTASQKSKRKEYVGRRWADWVGIEKFFKEKKWQFSKTGTPERAMVIGLGGLNLFGVIILGTMLKDMAVAPSSFIKFVADIFPLLQIYAGSFFAIPLVRWFFIRKKNADIEKRNKARQQCAQVLELPDTSLRQKLFSARDMAQKTVIGQDQIVYSTDKDLLEQEYEAREWDKKFRELERSD

SEQ ID NO: 267103 - protein, 58 aa, Glycine max
  Clone ID: PAT_MRT3847_83214C.1.pep
VTEQTNHFLKFPQFWQYKGKILNFLIGLTFHCFKRGVCILQYKQQKKNFPIHFQLGGP

SEQ ID NO: 267104 - protein, 64 aa, Glycine max
  Clone ID: PAT_MRT3847_83215C.1.pep
WYPSDHVAICHEIEIIILSILQRKRPCHRNLRMNTPLCTLQTYSLLEKLFPNTISYNIFQLIQI

SEQ ID NO: 267105 - protein, 119 aa, Glycine max
  unsure (1)..(119): unsure at all Xaa locations
  Clone ID: PAT_MRT3847_83216C.1.pep
SGSGKTYTMWGPPSAMFEEPSPKSHRGIVPRIFQMLFSELEREHHVSDGKQFNYQCRCSFLEIYNQQIGDVLDPTERYLEMKDDSXNALYXENVTEEYVTSYDDVTQILYKGLSSRKVG

SEQ ID NO: 267106 - protein, 98 aa, Glycine max
  Clone ID: PAT_MRT3847_83217C.1.pep
AHPRVGPGRGERRVCPLWDSFVASLGARPFSTPSNIVVSAPVRFVISAGNRWSVSLLPKRRLRVALFFRWLPPLQSFRPFFFFWRDVPSEFSLTASYY

SEQ ID NO: 267107 - protein, 79 aa, Glycine max
  unsure (1)..(79): unsure at all Xaa locations
  Clone ID: PAT_MRT3847_83218C.1.pep
SLPWANLTXFWRIGNWVXEWIVMLPSISTYDQEDIDIGXTEGVDYSAIACVKSAXVITHLNSYMAARSRDSDMSVIAEY

SEQ ID NO: 267108 - protein, 54 aa, Glycine max
  unsure (1)..(54): unsure at all Xaa locations
  Clone ID: PAT_MRT3847_83219C.1.pep
MAADIEQVFRSFVVSKFREXXQELSSGRSEGQLNGETNAPIEGNQAXDTAASAR

SEQ ID NO: 267109 - protein, 48 aa, Glycine max
  Clone ID: PAT_MRT3847_8321C.1.pep
GHQFDFSSFLNYYSSYSFLQARADHWHFSSAELAPMHFSSKLYISRPR

SEQ ID NO: 267110 - protein, 64 aa, Glycine max
  Clone ID: PAT_MRT3847_83220C.1.pep
SFLRVQPLSRLYTWIMEYKILSMSRVEYKRHTRKVVVKFWVKDPALRKAFPYFTVFHLNEKKKF

SEQ ID NO: 267111 - protein, 787 aa, Glycine max
  Clone ID: PAT_MRT3847_83221C.1.pep
MDSSIFRLIVSSCLLFTFLLEAVHGSKKCYIVYLGAHSHGPSPTSLDLEIATHSHYDLLASVLGSEEKAKEAIIYSYNKHINGLAALLEEEEAADIAKNPNVVSVFLSKKHKLHTTRSWEFLGLDRNNKDSAWQKGRFGENTIIGNIDTGVWPESESFSDNGFGSVPSKWRGGNVCQINKLPGSKRNPCNRKLIGARFFNKAFEAANGQLDPSNETARDFVGHGTHTLSTAGGNFVPGASVFAVGNGTAKGGSPRARVAAYKVCWSPTDPASCYGADVLAAIDQAIDDGVDIISLSAGGSYVVTPEGIFTDEVSIGAFHAIARNRILVASAGNDGPTPGTVLNVAPWVFTIAASTLDRDFSSNLTINNRQITGASLFVNLPPNKAFSLILATDAKLANATFRDAELCRPGTLDPEKVKRKIVRCIRDGKIKSVGEGQEALSKGAVAMLLGNQKQNGRTLLAEPHVLSTVTDSKGHAGAQPGYITAIGDEDDIPIKTGDTIRMSPARTLFGRKPAPVMASFSSRGPNKIQPSILKPDVTAPGVNILAAYSELASASNLLVDTRRGFKFNVLQGTSMSCPHVVGIAGLIKTLHPNWSPAAIKSAIMTTATTLDNTNRPIKDAFDKTLADAFAYGSGHVRPDLAIEPGLVYDLSLTDYLNFLCASGYDQQLISALNFNGTFICKGSHSVTDLNYPSITLPNLGLKPVTITRTVTNVGPPATYTANVHSPAGYTIVVVPRSLTFTKIGEKKKFQVIVQASSVTTRRKYQFGDLRWTDGKHIVRSPITVKRR

SEQ ID NO: 267112 - protein, 66 aa, Glycine max
  Clone ID: PAT_MRT3847_83222C.1.pep
YFRCRAEYMYHCSIRNNMVEINTFHIWLETTQLDVGMLCEIGLLILVVDICTRFSMTSLLKWCLSF

SEQ ID NO: 267113 - protein, 407 aa, Glycine max
  Clone ID: PAT_MRT3847_83223C.1.pep
MMMLRLVYALILGFVALNCLQVFEESNAQRIPRDEVKALQAISDKLENVNWKVTERYCIEDGGFNGKINIDNDIVRNVTCDCTFQNKSVCHVDKIFLKGQNISGVFPSEFGNLTQLKELDLTRNYLSGSLPTNFSPNSLVVLSLLGNRLSGRIPTEIGDIASLEELVLECNQLEGPLPPSFGNLSKLKRLLLSANNFTGTIPETYSKLKNLTEFRIDGSSLSGPIPSFIGNWTNLIRLDLQGTNMEGPIPPTISQLKLLTELRITDLNGGPSMTFPDLKNLTKLKRLELRNCLITGSIPGYIGEMANLATLDLSFNMLTGSVPDSIQKLDNLDYLFLTNNSLSGPIQDWILSFKNNIDLSYNNFTNSSATSCQLLDVNLASSHFSSAVTSASTFCLKRDLPCAEKPQ

SEQ ID NO: 267114 - protein, 91 aa, Glycine max
  unsure (1)..(91): unsure at all Xaa locations
  Clone ID: PAT_MRT3847_83224C.1.pep
ISGSEQTPTPPMPSLPLPTYNQKKWLTXEIIMIFHCGVNTFSDREWGTGQENRAILNPTGLNTTQWATVGADARVLLTILTAKQQDGLCLW

SEQ ID NO: 267115 - protein, 114 aa, Glycine max
  Clone ID: PAT_MRT3847_83225C.1.pep
MIHQQPPPRELFPWEHFPRLNGYYNGLRTLVSYKDYVPEQTYVKADAEAPLDTYPSTTQKAKAHKGPEPSPSARPFPFNPYPAFSSAEYLKEYHPVEECYLDEGLKTPTPDIYA

SEQ ID NO: 267116 - protein, 324 aa, Glycine max
  Clone ID: PAT_MRT3847_83226C.1.pep
MEEEKEDQKLLTYPHYWGFTPEEDYYKQQGITSTSSFFTTPQGLKLFTRSWLPNPNTPPRALIFMVHGYGNDISWTFQSTPIFLAQNSFSCFALDLQGHGHSQGLKAYVPNVHLAAHDCLSFFNSIRTQNPNLPSFLYGESMGAAISLLIHLVNSETEPKSQPFQGAVLVAPMCKISDNVRPKWPIPQILTFLSRFFPTLPIVPTPDLLYKSVKVDHKKVIADMNPLRYRGKPRLGTVVELLRVTDLLSRRLCDVSLPFIVLHGSADVVTDPNVSRELYREARSDDKTIKVYEEMMHSLLFGETDENVEIVRNDILEWLVARCK

SEQ ID NO: 267117 - protein, 58 aa, Glycine max
  Clone ID: PAT_MRT3847_83227C.1.pep
SHLRRSLLGAYYDMVCKPITVRLNTGDSGICSLSLHDGRNFLRNVYCRGENMEWLRAR

SEQ ID NO: 267118 - protein, 39 aa, Glycine max
  Clone ID: PAT_MRT3847_83228C.1.pep
GFVLGEAPIEDASQQYWCPHPDAENLSENVSSRCVVSTV

SEQ ID NO: 267119 - protein, 101 aa, Glycine max
  Clone ID: PAT_MRT3847_83229C.1.pep
AQTRGESGAGSDTAASVVDGVEEAVTAALLARGEVVNTRTAAALSGEVEGGLLAAASVGDVRTVDDLSVGSCQPRKRRTTKMIKLLIVERKPRNSFSLPSK

SEQ ID NO: 267120 - protein, 88 aa, Glycine max
  Clone ID: PAT_MRT3847_8322C.1.pep
ELLSVFRISFDSLLHSRNHIWNSRFFEWIISYTMKHECSFCHSCVQVRIVLPAVRRGLALSVVVVGAAYLIGSEFAAFGGGGSATRGS

SEQ ID NO: 267121 - protein, 52 aa, Glycine max
  Clone ID: PAT_MRT3847_83230C.1.pep
GQDLVGAFFLKAGCPGLVRFTLDTQLYPGCAVDFYGIPCICSAPAPVEVCIL

SEQ ID NO: 267122 - protein, 75 aa, Glycine max
  Clone ID: PAT_MRT3847_83231C.1.pep
GGCFFFFFFFVFSMFWSRSSLFLGKWGTPIKALRKNPGITLPSEIYKIEHKEGLSQCKSPIAPCSLLVMKTRGDV

SEQ ID NO: 267123 - protein, 113 aa, Glycine max
  unsure (1)..(113): unsure at all Xaa locations
  Clone ID: PAT_MRT3847_83232C.1.pep
MNVTEIHQMYEXSSRPYRSAAYKDTPWTSTDADAHXIYNEHVLXLLYRXKRFRHLYTRVNRTLRRRMNKVDMYCSLLQAALHGVVIMQVPNQILWDMVXEVVYQLKSGCQDRA

SEQ ID NO: 267124 - protein, 53 aa, Glycine max
  unsure (1)..(53): unsure at all Xaa locations
  Clone ID: PAT_MRT3847_83233C.1.pep
MRTQLFVYCNEYYFGGGVQQFSGGTTSYXTSLKMGDLSVTHVPKDVFEMYLQE

SEQ ID NO: 267125 - protein, 59 aa, Glycine max
  Clone ID: PAT_MRT3847_83234C.1.pep
STQLLRWSGLGHENAPATQQTYTGHSLWGLESECLQHHHGKFTVIANYGRSKRTHTVLL

SEQ ID NO: 267126 - protein, 81 aa, Glycine max
  Clone ID: PAT_MRT3847_83235C.1.pep
SCLFHEDQKQITIYMTYLRGGKATENFQILYETMPPKFQSTVGTKLAIQEQNYNTMICIPSGSKKALQLSKYSTTLLSSLV

SEQ ID NO: 267127 - protein, 80 aa, Glycine max
  Clone ID: PAT_MRT3847_83236C.1.pep
SIHLLSHEWLTLTFSFPFHFHYYNHAIASAATLSSCHRRISSAPNNPLRRNWRRALSNGANNLRHDFHLPQALLLPNGAV

SEQ ID NO: 267128 - protein, 97 aa, Glycine max
  Clone ID: PAT_MRT3847_83237C.1.pep
PMKLTINICNIINMNDTTSNMSIINLSNYAKQYYSSIFLSSLIVSSFFLSVRKVKGGGLQTVPSASAVNPAKPTIDETCLPTLQGCPHTHSLLGKFA

SEQ ID NO: 267129 - protein, 55 aa, Glycine max
  Clone ID: PAT_MRT3847_83238C.1.pep
FNRKCKCGFTGVFASKGGGKKPFSKIGVINSVQFFSPFFLNHLIWSMWVVLSVPL

SEQ ID NO: 267130 - protein, 117 aa, Glycine max
  Clone ID: PAT_MRT3847_83239C.1.pep
FFFFFFFYYMGWFFFIFFFYYFIFSFSGGTPYLLRLGGDFLKPLKLFIVGSPLFFCIKNTEGDPRGNKLFHNFLRSFGTQTKLKILGFHLSPILSFCAKPLLRKLLTLFLFSFKKGG

SEQ ID NO: 267131 - protein, 84 aa, Glycine max
  Clone ID: PAT_MRT3847_8323C.1.pep
FFFFFKRTSKLVCYSYRRRGTQITLDHSHMKKKKKKTLFYSTRQNHPRVFHYVTLFSMPKLVWHNPCLLGFGALNHKTNGRVGK

SEQ ID NO: 267132 - protein, 60 aa, Glycine max
  Clone ID: PAT_MRT3847_83240C.1.pep
SYWSRVISHGMFHKCSSRAMTSSSRFCHRSFQFIVSIHSGSHTLHGRFQHRTLHFNEIMP

SEQ ID NO: 267133 - protein, 69 aa, Glycine max
  unsure (1)..(69): unsure at all Xaa locations
  Clone ID: PAT_MRT3847_83241C.1.pep
KKRKKRKTKKPDLRQKKKEKTKKRGENKXEKKRTKYKRRKEKKTKEEHRSREKKGKEKKVGASKQKGRD

SEQ ID NO: 267134 - protein, 86 aa, Glycine max
  Clone ID: PAT_MRT3847_83242C.1.pep
VAILGGPRFNRGLLPAFIFFTQGPSRLKRGFFPPPFWFLGPPFWFPGGLKPKKGGPNFAPLRFSFGQKSLKFWPLWGNPQINFFSF

SEQ ID NO: 267135 - protein, 101 aa, Glycine max
  Clone ID: PAT_MRT3847_83243C.1.pep
GLKSFFQREETHSFVNKKVEWPSITKSSMAIYDERNIHRYRFQPLPLRRTTTKRHRSSRIVTSVVTGEGRGTKSSWGFSICFPLSFSAWIFLALAFLTFSA

SEQ ID NO: 267136 - protein, 184 aa, Glycine max
  Clone ID: PAT_MRT3847_83244C.1.pep
MASNSIDGDAVTGSGLCINDVLRDDELRSILGRVESEKDKETFGLVCKRWLRLQSTERKKLAARAGPHMLRKMADRFTRLVELDLAQSVSRSFYPGVTDSDLAVIATAFTCLKILNLHNCKGITDAGMKAIGEHLSLLQSLDVSYCRKLTDKGLSAVAKGCCDLRILHMAGCRFVTDGVLEALS

SEQ ID NO: 267137 - protein, 103 aa, Glycine max
  Clone ID: PAT_MRT3847_83245C.1.pep
MSFDYPLFSNYMANTKSSRAKARSQSAPKSRPDSYERQPSRRRASMEGRNVPKPVRMQRSSSHVGVTAQNYQYPCSIKLDRSIVSECGSTSTVLTNTNSNYFT

SEQ ID NO: 267138 - protein, 95 aa, Glycine max
  unsure (1)..(95): unsure at all Xaa locations
  Clone ID: PAT_MRT3847_83246C.1.pep
FDLCLPTHLTYVDWDNAYHPTSVAANLRQGSYVLEKDXQERRETTDTLALPTWAIFHIKMFCSLVEYCDCTIYGAIYEYKPPSYMCNDTLHRSAR

SEQ ID NO: 267139 - protein, 104 aa, Glycine max
  Clone ID: PAT_MRT3847_83247C.1.pep
AAFGTTGRIVISIVLYVELYACCIEYIILEGDNLSSLFPSAHLNLGGIELNSRTLFAVITTLADLTTVWLRDLSILSYISGKSLFLVHVVISYTLKLGPICLWT

SEQ ID NO: 267140 - protein, 73 aa, Glycine max
  Clone ID: PAT_MRT3847_83248C.1.pep
GGGSLRGVQKSQMKWLIGVIDNALYAGLLLDYLKSGITAIGGGMTKLERRWGMTIVINYLNYRGITIVGWGAV

SEQ ID NO: 267141 - protein, 121 aa, Glycine max
  unsure (1)..(121): unsure at all Xaa locations
  Clone ID: PAT_MRT3847_83249C.1.pep
MAISHSTLAFAFGMLGNVISFLVFLAPITTFYRIFKKKSTEGFQSLPYLVALFSSMLWLYYALLKKDAMLLLTINSFGCVIEXIYHISYITYATGDARNLTXKLFFAMNVGAFALILLVTH

SEQ ID NO: 267142 - protein, 89 aa, Glycine max
  Clone ID: PAT_MRT3847_8324C.1.pep
FYEILFFFWKIPLILTNWKNTPKEARPEIFTFNLLTQNWDIKRQTPSHLYRPLRGLFTTRKKSQNYINCLVTLAKDRPQRTCGSRHEGY

SEQ ID NO: 267143 - protein, 32 aa, Glycine max
  Clone ID: PAT_MRT3847_83250C.1.pep
HKRRIHGLLMQSQANFRETLCDTNFFLSMGAA

SEQ ID NO: 267144 - protein, 81 aa, Glycine max
  unsure (1)..(81): unsure at all Xaa locations
  Clone ID: PAT_MRT3847_83251C.1.pep
IKNNHYFSDRXPXQXGARALEQRARRTPPRAXAQSKPPGRHRTPTAANTERANRGHSTRGRRXTARQRSRAPTRELADPDP

SEQ ID NO: 267145 - protein, 43 aa, Glycine max
  Clone ID: PAT_MRT3847_83252C.1.pep
ATRTAHTTDVRVNASLATALTPYMDQIANYSPISLDEGSAARG

SEQ ID NO: 267146 - protein, 83 aa, Glycine max
  Clone ID: PAT_MRT3847_83253C.1.pep
LGFFFFFFFWGNQIILEMGLFGENSSKKALQFLAQVKELHRGFTFASLAHAFQELIYNYPDKHCGDLKYALDLNSTTRGPHYC

SEQ ID NO: 267147 - protein, 36 aa, Glycine max
  Clone ID: PAT_MRT3847_83254C.1.pep
MVHIFVRGSRMAFKFLPPLHGEGQALKGLDFWSMNN

SEQ ID NO: 267148 - protein, 50 aa, Glycine max
  Clone ID: PAT_MRT3847_83255C.1.pep
TQLHCYLRRNAPSIDNATSKHKLLPNGLLARLESFCLRSYADWLHFSSNC

SEQ ID NO: 267149 - protein, 86 aa, Glycine max
  Clone ID: PAT_MRT3847_83256C.1.pep
SEFPKRFQLKGSDVAFEGPPDGKLPLTLAWIKKNGGVFDLAIFFKVLSGGSTVDRLECCLKKKRVALKKLETSWFFFSKGNLIVLM

SEQ ID NO: 267150 - protein, 110 aa, Glycine max
  Clone ID: PAT_MRT3847_83257C.1.pep
NRGLGNITIHGGLQNCKQHGGPRSKELNPRGLKEHFTPPHKIKARRTKKKKTGRWGGVQFFPKMRLGEKTFPQRYKNKNLKKHPPPLCRQGDPPGAYKRGVAPISLQEGG

SEQ ID NO: 267151 - protein, 66 aa, Glycine max
  Clone ID: PAT_MRT3847_83258C.1.pep
QRLDIYSQIRIDIDNPYKQKLKTNKRRFAKTFPLSLLRFIYVEPLDLILKFVHNNLNCKPNMLIFN

SEQ ID NO: 267152 - protein, 86 aa, Glycine max
  Clone ID: PAT_MRT3847_83259C.1.pep
GSVLFFNFGPGGGRFLGWLRGSFVPPELCYFCFLGGTVFGFSSRIPLRTGGCFARDFGLVQPGSFKKNIGSLQGLDLIKRGKPPGT

SEQ ID NO: 267153 - protein, 100 aa, Glycine max
  Clone ID: PAT_MRT3847_8325C.1.pep
AEYNTTIHHFDPHNQLTVSISTITIHPTQLLRVAIYIAKWEESKVGSHGAVRKIAHENITTKIIISERSTWLTRSVQPKHFSFSFNFNQRPRAFTASLEI

SEQ ID NO: 267154 - protein, 63 aa, Glycine max
  Clone ID: PAT_MRT3847_83260C.1.pep
LKGVVDTSFYTRREIVRCFGQGCEKYLRGGEKFHFRQFSGPWLAWPHKLLRAERTNSPGRASF

SEQ ID NO: 267155 - protein, 78 aa, Glycine max
  Clone ID: PAT_MRT3847_83261C.1.pep
KGVPAKKKKDAKKIDALSYPNTKLGSANNSEHESHTQSEFNKPPRLKSLAYTQHKHYYSIFVSAIVVFNKRGMIIKSS

SEQ ID NO: 267156 - protein, 117 aa, Glycine max
  Clone ID: PAT_MRT3847_83262C.1.pep
GPGRDGKILVAVTLAGSQFARRGHRGLVYNRLDRKSFFARAGSCRRCRRGPHIGEYGRKTNPVSRRLPCGSGLKKAAPGPPLWASGRAYWLWFFRTWSQACEILVRFSFRQARMVKP

SEQ ID NO: 267157 - protein, 181 aa, Glycine max
  Clone ID: PAT_MRT3847_83263C.1.pep
VEGCHVALVNAKEYHRRHRVCDKHSKAPKAVVLGLEQRFCQQCSRFHVVSEFDDSKRSCRRRLAGHNERRRKSSHLSVTRNSRQGCALSLLSSGSSSENWLSHHADFSTRCSAALRELIAENRAALITRQQQLVYDRDWPHVVPHHDAAVEEEEEDFEDLQQQQQPPEPNYFPQQHMFPQT

SEQ ID NO: 267158 - protein, 86 aa, Glycine max
  Clone ID: PAT_MRT3847_83264C.1.pep
GTPKHRRKPPLCICGFSRPSDQTFLESLSHILLFWGMGMPRRCFHTSHITVIIMTSFFRHKGLITTIFLYYLLTHHLYSPLQWGPK

SEQ ID NO: 267159 - protein, 145 aa, Glycine max
  unsure (1)..(145): unsure at all Xaa locations
  Clone ID: PAT_MRT3847_83265C.1.pep
GANTLIRHQEKVLLKMLSNYHXHEKTYDRTLITHLSGVHRIIPSTWHKDCFVVTRPMFCTELKIHXTSDXTGSSIGRSSDNIEFVEHTTLNDSNLTYCFYLEPSEADAVLMHNEIDSKSLEAHQIMDHSLLLCVHYRGAQLLHHN

SEQ ID NO: 267160 - protein, 72 aa, Glycine max
  Clone ID: PAT_MRT3847_83266C.1.pep
FGSRQVLRNKPDFRRKPWPTISNAAKDFVKKLLVKDPRARYTAAQALCMYPTVCFLIVRRLFITISCFLSLK

SEQ ID NO: 267161 - protein, 256 aa, Glycine max
  unsure (1)..(256): unsure at all Xaa locations
  Clone ID: PAT_MRT3847_83267C.1.pep
MISIPTASLASFSQREEMVDRTKSKVLIREYNEDKDAKMVRKLERNCEGGTKKVVSIFTNMTGDPLSRIRFFPLHVMLVAELLDTRELVGVVRGIIKNMGTLSGSFLKMGCILGLRVSPTYRRKGVALRLVTAAEEWMVRNGAEYAFLATEKNNGASKNLFTIKCXYVNLSSLVIFVQPTSSLTKQISTDLKIEKVDIDLAFSLFRRTMRTKDLFPLHMGXILKEKLSFGTWVCFYKEEGWLNFVGPGLLLKIFFI

SEQ ID NO: 267162 - protein, 335 aa, Glycine max
  Clone ID: PAT_MRT3847_83268C.1.pep
MTTASFTELDDDLVRSMSIGAVFSDFGGMIHSIDFHRKDDLLVTSSGDDSVRLYDIANAKLLKTTSNKKHGTDRICFTHHPSSVICSSKYNLESTGESLRYLSMYDNRCLRYFKGHKQRVVSLCMSPINDSFMSGSLDHSVRIWDLRVNACQGILHLRGRPAVAYDQQGLVFAVAMEGGAIKLFDSRSYDKGPFDTFLVGGDTAEVCDIKFSNDGKSMLLTTTNNNIYVLDAYGGEKRCGFSLEPSPGTPIEATFTPDGKYMVAGSGSGTMQVWSIETKNEVACWTSHIGVPSCLKWAPRRAMFAAASSVLTFWIPNNDSKLETQYGGTDAEAGP

SEQ ID NO: 267163 - protein, 269 aa, Glycine max
  unsure (1)..(269): unsure at all Xaa locations
  Clone ID: PAT_MRT3847_83269C.1.pep
DRICFTHHPSSVICSSKYNLESTGESLQYLSMYDNRCLRYFKGHKQRVVSLCMSPINDSFMSGSLDHSVRIWDLRVNACQLSSRFKNGILRLRGRPAIAYDQQGLVFAVAMEGGAIKLFDSRSYDKGPFDTFLVGXGTPAEVCDIKFSNDGKSMLLTTTNNXIYVLDAYGGVKXCGFSLEPSPGTPIEATFTQDGKYLVAGSGTGPMQAWSIQMKNEVACWTSHIGVPSCLKWAPHKAMFAAASSVLTFWIPNNDSKLNNGGTDAEAGP

SEQ ID NO: 267164 - protein, 49 aa, Glycine max
  Clone ID: PAT_MRT3847_8326C.1.pep
GPRKTFIIICSMQRSSHILNKPFSFLLFKKKEKHANMHRLLIELNYPLR

SEQ ID NO: 267165 - protein, 46 aa, Glycine max
  Clone ID: PAT_MRT3847_83270C.1.pep
VFLSYVWVGISVRYFDLLYQSIAIHELVEYKLYEYINFTYSLGITC

SEQ ID NO: 267166 - protein, 104 aa, Glycine max
  Clone ID: PAT_MRT3847_83271C.1.pep
KLRHLYMLPQAQSIKCSNSCRLIFPHQFLCRMNTLRVASWITSRNNRCLQLLISHFLHVLGACNSICLEQRRQRRLLYLLLVENLSLEMTLRLNLLDLWNLLGR

SEQ ID NO: 267167 - protein, 296 aa, Glycine max
  unsure (1)..(296): unsure at all Xaa locations
  Clone ID: PAT_MRT3847_83272C.1.pep
SKPLSRPSALAAAFPQTNLETGMQSGAARASPSQPQGPPSVLQQPLQQSPSPLALLLSHQTQTSRASLHSSXQAFSQLQQQLQMMQPSSQALTFQQNAEATNKPSPWAGPGTAVAQAVASTRAAAPAADVPSSTPANSALPAINQNMALVKCNWTEHISPEGFKYYYNSVTGESRWEKPEELVLYEQKKQQQRPSVQQSQTQSQPSILPAQQVPQIQHVQPQSHLQGQVLHQQQIQHPSSLSSSFQAYGVTGPQNVQEVGYKQLQASVISAGDPGRYSQGIHSTQELMWKNKPAGV

SEQ ID NO: 267168 - protein, 103 aa, Glycine max
  unsure (1)..(103): unsure at all Xaa locations
  Clone ID: PAT_MRT3847_83273C.1.pep
KPSFDAILIATLPWFLATTLSRGKYSSTFSTPFPKHILIWASEFFIFHNXWRRVHWIFDMLHAYPFSTFKLHRAFXSRQVFTGNPNVVQQILKNKFPVYPKGL

SEQ ID NO: 267169 - protein, 104 aa, Glycine max
  unsure (1)..(104): unsure at all Xaa locations
  Clone ID: PAT_MRT3847_83274C.1.pep
QKTRIANVFFLXFMAAXNQRGYATRSYNRLHIILSFTDTKAXTSYEQTXKSWFFISILLILFIATVTLLYLIDKHFEAISVLNATQHLLFIQFFGALKELMRPM

SEQ ID NO: 267170 - protein, 121 aa, Glycine max
  unsure (1)..(121): unsure at all Xaa locations
  Clone ID: PAT_MRT3847_83275C.1.pep
TVLQQIGQTNPALLQLISQNQEAFVNMLNEPAGSAXAAPSDGSGSANEPAVPAAGRGGGGRGGNAFEDAPGVIQISAQDREAIERLKALGFPEHLVIQAYFACEKNENLAANFLLSQNMDD

SEQ ID NO: 267171 - protein, 42 aa, Glycine max
  Clone ID: PAT_MRT3847_83276C.1.pep
PPGWEPIFGGGPPQIFLPHVITEKLGPKKQSLCYVFQGIKIY

SEQ ID NO: 267172 - protein, 39 aa, Glycine max
  Clone ID: PAT_MRT3847_83277C.1.pep
MLNGFVQKKLLKNVSYVEPPKGSVKNSAKGCEVNKKGVK

SEQ ID NO: 267173 - protein, 76 aa, Glycine max
  Clone ID: PAT_MRT3847_83278C.1.pep
KEKILFLFFENCFTTRTGGILPLGGVWEYFISPSPPNALKPEGPFGHFNPVVPVSLQPILAFWPSKLGKILFKKLG

SEQ ID NO: 267174 - protein, 94 aa, Glycine max
  Clone ID: PAT_MRT3847_83279C.1.pep
RCRCRPVRAPTQHMIPEYNVFPWFINAAVTNFERQKTQNKISFLIGPNRLFPAGTNGHIYNTHCFGLNQSLNEGILSVCLISVHETSIILMVSS

SEQ ID NO: 267175 - protein, 42 aa, Glycine max
  Clone ID: PAT_MRT3847_8327C.1.pep
MQSQGLALPLEDEVGPSAGHVSTKKSYVDPYGEDPKTSDSEN

SEQ ID NO: 267176 - protein, 84 aa, Glycine max
  Clone ID: PAT_MRT3847_83280C.1.pep
EVSFFFIFFFLFFFFFFNKKGENHPSGLLTDKNLRKSALSLGALLKALGKLSPLLDKTLKHTPCIQRAPPLIKMGGHPTQPRPP

SEQ ID NO: 267177 - protein, 80 aa, Glycine max
  Clone ID: PAT_MRT3847_83281C.1.pep
TINPPCFGPRGPNPKRLKRKKKKGAFHLGPFPGGENASPGQGKKFPVTNPSLALFNWPGCGAKNPTGPPMGPPGTIPGGG

SEQ ID NO: 267178 - protein, 83 aa, Glycine max
  Clone ID: PAT_MRT3847_83282C.1.pep
AAGTGSSRFSKSASCSSCRSVRSLRLISLLAEIQAESESAGSCSTSGCQVGLKVIIIIVSTPGAVSPSPSRVRIQDIFLHAIQ

SEQ ID NO: 267179 - protein, 125 aa, Glycine max
  Clone ID: PAT_MRT3847_83283C.1.pep
SWERRSCFFFLKKLIVFKCGKILRVGKFSESKEGKTPPFMGNHELSGRLITMQFNIIGSTIAHSLIGCMGQTPRLFNKYKEFFLMTCEAFPSLLFYPTAFWTPTFTPFDRQGTTLFKAKETWDIN

SEQ ID NO: 267180 - protein, 257 aa, Glycine max
  Clone ID: PAT_MRT3847_83284C.1.pep
TSTNTNEIELPTNMGNTYSANLRIELYKWSSVEFPQEHALIYTSLTDKSNFSIFRLSVKPEKVLFRFADSLCDNHPVRLHTEVTAERNNYGSFNFRVVRIVEAGTNNQAKTPLFDEACFDYHCERKVCSFHVGRRTGMLGSWKVDHWYKVDFKTYFTFKVNIVCDKVTGLSAKFKGPFRSEFGQFDEESGSLIQCQVNGEPPKHINSIVQSMFTGNQYILFKQGKGNTLIDDDDEESKMVVINNSGTFYGNHNGCFN

SEQ ID NO: 267181 - protein, 130 aa, Glycine max
  unsure (1)..(130): unsure at all Xaa locations
  Clone ID: PAT_MRT3847_83285C.1.pep
SLDFIIFFSLALSRYIYVLSSVPHXYYWKEPGPNTLIPTGLLKLLKTIPAGAYTEYLPWRSDDTHYPTTYLCIEHLYPRQTMKGQFSXRPYAQPYDVYTWLTDIKDTCKEGYGLEEICVKINSFDGEQKC

SEQ ID NO: 267182 - protein, 95 aa, Glycine max
  Clone ID: PAT_MRT3847_83286C.1.pep
KNTKPFSQGGGVFKKNKVTFPSLGHGLAQTPGFPKMAIKGPLGKQKANSQTIFWGRANPHYFLSTKIWGGAPKKPIPTRTSFLKQPQFKWTRSWS

SEQ ID NO: 267183 - protein, 108 aa, Glycine max
  Clone ID: PAT_MRT3847_83287C.1.pep
LGIGLHGIFMCIRYYPAIIPLGFRDFSSRVIHLCLSRFQSVCLTSAILQTMAVIQFSLYRQCLIEQQKLFLLLFYQARRRLTFSHHCHGLYSSGVMRMSCSQSSTVMY

SEQ ID NO: 267184 - protein, 68 aa, Glycine max
  Clone ID: PAT_MRT3847_83288C.1.pep
ILMPQRVVTYYKAIEKQPLDKPPVYKLPLYKPQVYKTEPPFYKMKPPGYNPPSSMSPFKKTPHANYPP

SEQ ID NO: 267185 - protein, 98 aa, Glycine max
  unsure (1)..(98): unsure at all Xaa locations
  Clone ID: PAT_MRT3847_83289C.1.pep
ASDYFRWCSDIMGKYASRELKPPCSRSPQLLPSTPKWALXNSHNIYKPTFMIIILELSLSLNNKNNIPSLLLPPSTTFINXHIISLLPFSNPYSHLFS

SEQ ID NO: 267186 - protein, 185 aa, Glycine max
  Clone ID: PAT_MRT3847_8328C.1.pep
MRTHIDDSASGKNHHLPMLWFFDSSLRLCAIPLSVATMWITVTNKEDNSSYGMLKYNNLSALKYMVLVSALCACYALLAAACSLVRCFVSKAWIFFVSDQIVAYLAITSVAAVMEMYYLAYNGAKEDSWSEACSSYGSFCSKVKLALILHTITFCCFFVIAVISAFRAFSVFDPPFVNSQEVQGD

SEQ ID NO: 267187 - protein, 77 aa, Glycine max
  Clone ID: PAT_MRT3847_83290C.1.pep
ILVSLYKNYFFACTGMNFFFFFIVCPFFFFLVFFFFFFFFFEHNERTYKYQNRLNFFPFAYFLVYIWRVLDKKYIQQ

SEQ ID NO: 267188 - protein, 114 aa, Glycine max
  Clone ID: PAT_MRT3847_83291C.1.pep
RADSARGGFRERSPSLRSQVPIPFFLHTSYSIPLLKPLIFNGSSNLTIPSFHFDDNPLCKTKIKNQRKLFWIIITDNDASDEEQNNPTKTPRVKREITHKKIVIVLCRWVTPCL

SEQ ID NO: 267189 - protein, 27 aa, Glycine max
  Clone ID: PAT_MRT3847_83292C.1.pep
IRVIDPFLNFKVDYKLYSQGLLSISFA

SEQ ID NO: 267190 - protein, 87 aa, Glycine max
  Clone ID: PAT_MRT3847_83293C.1.pep
EKGMRYAMPNARVMIHQPQGGSEGNVEEVRRQVGETIYALDKVDKMFAAFTGQPLDMVQQWTERDRFMSSSEAMDFGLLDALLETRY

SEQ ID NO: 267191 - protein, 89 aa, Glycine max
  Clone ID: PAT_MRT3847_83294C.1.pep
APPPIFNWGRVLFCLGLQPWVANFIFKGFLFCPGAPLPQGVCGAFGFFFKNPFFLGPFFLKAFFFQNWNFFLGVFFFLGVIKTPNLGAP

SEQ ID NO: 267192 - protein, 75 aa, Glycine max
  unsure (1)..(75): unsure at all Xaa locations
  Clone ID: PAT_MRT3847_83295C.1.pep
SFCGQVPKKKARAWFASKENFPYFESSPKKGLNVKEAFPXIPKNPLKIGEKEXIYLAYTIDVGSSSHPRAKGCEG

SEQ ID NO: 267193 - protein, 68 aa, Glycine max
  Clone ID: PAT_MRT3847_83296C.1.pep
IDKYKMLSCLFFEASEAQSACACTADSRSCDLPLCRYPALSSNPATAYHYLCIHDKHVVNRILIFLEL

SEQ ID NO: 267194 - protein, 68 aa, Glycine max
  unsure (1)..(68): unsure at all Xaa locations
  Clone ID: PAT_MRT3847_83297C.1.pep
IWNIIDLSFSLGPFLNRRTIRTDAEKDCVWLFEQXQALGFSSGFTNVRTTDIELISGGLWLHAPIAAT

SEQ ID NO: 267195 - protein, 54 aa, Glycine max
  Clone ID: PAT_MRT3847_83298C.1.pep
ARLLISQSFKQRTFRTNHEEYTSATYLDYIIIPNLLFACDIYWDHCMLHPYFNV

SEQ ID NO: 267196 - protein, 81 aa, Glycine max
  Clone ID: PAT_MRT3847_83299C.1.pep
MDPDSKKFGGDAHYLYNVVGDIEIRKGDGMQLDQLIQDTSLSSGSNYHIQPLDLDILKEAFQLKETVPIDLPAAEKGILTV

SEQ ID NO: 267197 - protein, 102 aa, Glycine max
  Clone ID: PAT_MRT3847_8329C.1.pep
LSGLSQCSLHCAGTSTVLVHPRLAMMVPKFSFSKWRRLRRLHRRCAHRYTMIQGGSLARVNINGSSAVRRFSPWLKQLHYVRMREPQPKEKATMRERRYVAG

SEQ ID NO: 267198 - protein, 101 aa, Glycine max
  unsure (1)..(101): unsure at all Xaa locations
  Clone ID: PAT_MRT3847_832C.1.pep
PPPPPAPPPPHPPAXPPPPPPSPPPPPPPPAPPHPPPAPPPLLPPYPPPPPPPPPCPPPAHAPHQGLPALPTPIPNKASSFLGVLWTPGVNIIWFCFLVLF

SEQ ID NO: 267199 - protein, 205 aa, Glycine max
  unsure (1)..(205): unsure at all Xaa locations
  Clone ID: PAT_MRT3847_83300C.1.pep
MDPDSKKFGGGPRELTGAVDLLNHFQLLPHFEFFCKRPLPVSISDAHYLYNVVGDIEIRKGDGMQLDQLIQDTSLSSGSNYHIQPLDLDILKEAFQLKETVPIDLPAAEKGILTVAGKSKGESKDVEKKHKKHKDRDKDKDKEHKKHKHRQKDRSKDKEKEKKKDKNRHRDSSADPSKKHNEKKRKHEXDDDLNVVHKHKKSRFS

SEQ ID NO: 267200 - protein, 194 aa, Glycine max
  unsure (1)..(194): unsure at all Xaa locations
  Clone ID: PAT_MRT3847_83301C.1.pep
RSGITASTHASEQLYDEFLVGEKSVPVSILQYADDTIFFGEATMKNVKTIKSILRAIELSSGLKINYGKSSFGVLGRSEHWKLQAASYLNCRIMPLPFSYLGIPIGANPRRCGLWDPILRKTESKLSRWKQRHLSYGGRVTLIKATLTSIPIFYLFFFRIPNRVAEKLTQIQRRFLWGGCLDQKXNAWVKWDTI

SEQ ID NO: 267201 - protein, 78 aa, Glycine max
  Clone ID: PAT_MRT3847_83302C.1.pep
KLKLYCDRKIYIQLSGSRLKWLDHECTLVSIFKIPEIQMKKLSSRKEKKILNRESTVCDSKLANSNSQGRFPCQFILS

SEQ ID NO: 267202 - protein, 121 aa, Glycine max
  unsure (1)..(121): unsure at all Xaa locations
  Clone ID: PAT_MRT3847_83303C.1.pep
FFWRKDLSXGNPKAAESLVDPDEYPNLFDDWQVALTVESKATEARGAYPPASEYVNQAXNNXITLVEAFRNMQIEEGDQPLENGDSNHELTEQNGEETHNIRTVPFNDRRMIPFNGLHCTD

SEQ ID NO: 267203 - protein, 103 aa, Glycine max
  Clone ID: PAT_MRT3847_83304C.1.pep
LKVLKIPFGAHGGCFPPLFPLSPPLRVSFTQRFFQIFFLTKVLPFFFPKILTIMALVPPQKRVANVLGPLLWIRGRFKISQFPVYTKKRVGLKPPPFLFTMGF

SEQ ID NO: 267204 - protein, 96 aa, Glycine max
  Clone ID: PAT_MRT3847_83305C.1.pep
GSSLLYMLHIAFCILAAVAPPIIFKGKSLTGILAAIDVLGDNALVGIFYFIGFGLFCLESVLSIWVIQQVYMYFRGSGKAAVLKREAARGTMMAAL

SEQ ID NO: 267205 - protein, 145 aa, Glycine max
  Clone ID: PAT_MRT3847_83306C.1.pep
GRVERTRGHTKRAERELTEAVASVPKSMASRRILEPPRVVYGQIMEQERRFRGSGRRFKRFWKKPISFARWPLGRWWGFLVPPGRGRCWRRPCPFKLGSGCGVFKKPRLDGLVVDPIYLFPPFYFPKPPPGTRPPPFGRFFFLPG

SEQ ID NO: 267206 - protein, 38 aa, Glycine max
  Clone ID: PAT_MRT3847_83307C.1.pep
ASKFGSRNFDHPMVSHFAQEFKTKNTKDISGKARALRM

SEQ ID NO: 267207 - protein, 317 aa, Glycine max
  Clone ID: PAT_MRT3847_83308C.1.pep
MQVPLIDIDRINDLQVGLNSLQNPSFPIPSQITTSLAYNFCKWGAVILALVATFGSIINRVTIFIIRFRAKAPSLPSLTLNDDNFYTSSSSDDDDDDDNDDDLTYSSSEPEDEPSASSSFIRLDDYFRLRGTDNNNNNNLDDEFQTQNGTHKRCRSIGDIFSLSELANSKSVVKLWDTIGFGLGLDFDDYDGYYVGNAAVPTSSTASPSVVVSAGEGACGNLALEIWDTRLRRRKPTVVAEWGPTVGKTLRVESGGVQKVYVRDDGRYGVTVGDMRKVSTPLESVTESDADTWWDADAIVVSDESFGEQQSMLQQPT

SEQ ID NO: 267208 - protein, 92 aa, Glycine max
  unsure (1)..(92): unsure at all Xaa locations
  Clone ID: PAT_MRT3847_83309C.1.pep
KSNDGTFLVNALNTLQYPPPCCLALFPLFCQPHFKNVYLQVCTQNTTPACVCENWGGSSSRGLNTFLGPVKFESLFVSHXPPIIKILKVQPL

SEQ ID NO: 267209 - protein, 58 aa, Glycine max
  Clone ID: PAT_MRT3847_8330C.1.pep
PDMASLIHYDVIFNFLKKYTKAVPLDDQILKQLCSKQMSKSCFLFFFTIGILYQLILL

SEQ ID NO: 267210 - protein, 311 aa, Glycine max
  Clone ID: PAT_MRT3847_83310C.1.pep
MQVPLIDRINDLQVGLNSLQNPSFPSQITTSLAYNFCKWGAVILALVATFGSIINRVTIFIIHFRAKAPSLPSLNLNDDDFYTSSDDEDDFQNDEDDDLTYSSSEPEDEPSASSSFIRLEDYFRIRGTDNLDDEFQTQNGTHKRCRSIGDIFSLSELANSKSVVKLWDSIGFGLGLDFDDYDGYEVSSAKPLQAPTSSTASPAVVVSAGEGAYGNLALEIWDTRLRRRKPTVVAEWGPTVGKTLHVESGGVQKVYVRDDGRYSVTVGDMRKVSTPLGNVTESDADTWWDADAIVVSDESFGEQQSMLQQPT

SEQ ID NO: 267211 - protein, 49 aa, Glycine max
  Clone ID: PAT_MRT3847_83311C.1.pep
KRVRFSRKRFSEKQAEQWWAENRARVYEQYNVHMIDKSTIGVGSEDLAH

SEQ ID NO: 267212 - protein, 83 aa, Glycine max
  Clone ID: PAT_MRT3847_83312C.1.pep
PGDPLPVDLQIPYFYQFLLISFPIVIYLIKLYTNNKNMRSLSPNNSCRARTLTHKNYYLFAINLYVILCVCALKCCCRLFKKW

SEQ ID NO: 267213 - protein, 52 aa, Glycine max
  Clone ID: PAT_MRT3847_83313C.1.pep
LKSINSNDIINDLQLIKSDPCDSLYQEQEEEEEIKRLRPSMMFSQTTSVVCL

SEQ ID NO: 267214 - protein, 59 aa, Glycine max
  unsure (1)..(59): unsure at all Xaa locations
  Clone ID: PAT_MRT3847_83314C.1.pep
PAHKSPAVRVKVGGPVMVGQCRPLSGAGGFHVFXVPPVGWSSRAKRVFPGMCAWISRWH

SEQ ID NO: 267215 - protein, 110 aa, Glycine max
  Clone ID: PAT_MRT3847_83315C.1.pep
TNFCCDCRHWKSGCNLWLNITEFVCQNWVEHSCFSEEWWNFLTFLARQKKLRRKIRWRLIGERLGFLLAFAFWIRVGIGHAPLIGHSPTQTILIKYKILFLLWRVSPHFL

SEQ ID NO: 267216 - protein, 128 aa, Glycine max
  unsure (1)..(128): unsure at all Xaa locations
  Clone ID: PAT_MRT3847_83316C.1.pep
PHHFLNASPSLLKRSLMIQLPXYTHILKSAVFIELTPYDPDCYFISAASISXLIYLTGCLRVCAFHWIYLGLILDVTRPPHFCHCSAAVVRHILLQSHTLSIVDIDSKGGRKISSSGRMHLDQLAERI

SEQ ID NO: 267217 - protein, 72 aa, Glycine max
  Clone ID: PAT_MRT3847_83317C.1.pep
FFSLISIRSNIYHGNIDNKPYYMQANTLPTLFYTSWFELIIMDTTYSPYTLKLHQLRMDRSIQESPLVCSLS

SEQ ID NO: 267218 - protein, 97 aa, Glycine max
  Clone ID: PAT_MRT3847_83318C.1.pep
GSRVCFCCFSGNVTSLLCGSQVRLRRAGAGPPFRVGSREKVPKACPGKGLNRVTSKHPYFCRVPQKMGVIRIPCFCSFIYKDHVYGFSPLKKSFFLL

SEQ ID NO: 267219 - protein, 131 aa, Glycine max
  Clone ID: PAT_MRT3847_83319C.1.pep
GRCFSSSVSSTLWQKGIRQDISVMLDILLHQPIHEVPIIDLYLLLNFSDNFYAKVVVVTVACSKNKTTKNQTNQRKRTQTKIAKNKMKMEALSSSKTQPKTKEKSRTEEDTKMKKNEWKQRKQILDSWVDR

SEQ ID NO: 267220 - protein, 88 aa, Glycine max
  unsure (1)..(88): unsure at all Xaa locations
  Clone ID: PAT_MRT3847_8331C.1.pep
ACHNITITDGIDKTSAXLQFRKVADCDFLKRNFKQMSNVLWVALEDKVSLWSQLNYDSSQHLNMHEAYSFNLETVSPYFHMFNLVTIV

SEQ ID NO: 267221 - protein, 149 aa, Glycine max
  Clone ID: PAT_MRT3847_83320C.1.pep
ETKLGKNYEPKILHKFYIRPTFKSYPKAWKLQLTPLTKGTLTHRGGGGEAATNYRGPWNQNQKFFFLNNGGGCLGTFHQEGSPSESGAGGDGPIKGGSLSGSLQGPPPQCGGAPSHHNNQKPARPFGNNHIQGHTRQHREREFVFYTGA

SEQ ID NO: 267222 - protein, 81 aa, Glycine max
  unsure (1)..(81): unsure at all Xaa locations
  Clone ID: PAT_MRT3847_83321C.1.pep
MGIEAYVCHIQWLTKSKENNKDNLCDSACGKHYPLIVGLELPQFMKDNQYLLGXYRGNWPLKQAFFSLFRWHNETLNVWTH

SEQ ID NO: 267223 - protein, 36 aa, Glycine max
  Clone ID: PAT_MRT3847_83322C.1.pep
KDVIEFRYRFPFLHACQTEFFTRSQCLKDVGLNIAL

SEQ ID NO: 267224 - protein, 73 aa, Glycine max
  Clone ID: PAT_MRT3847_83323C.1.pep
VIEAILASYFSFNPSLILQHMASFGEQHSTQYPTPERPKHKLSQHEKKPLSAYICHDPRSYGSSKHKAEKGTT

SEQ ID NO: 267225 - protein, 74 aa, Glycine max
  Clone ID: PAT_MRT3847_83324C.1.pep
EDNSNPHTVFGLSKHWLNRSGRKDDNGEASEDRRAGIYDGFSETQTESQVVSYEEDLSGRQMLIDRVRTRSSLQ

SEQ ID NO: 267226 - protein, 198 aa, Glycine max
  Clone ID: PAT_MRT3847_83325C.1.pep
MDLVSESKNVVSNVTNPSSRYKMETVPTPTTTNHPTTAAAVSSPSSGSNNSGSTTTPSRYENQKRRDWNTFCQYLRNHRPPLSLALCSGAHVLEFLHYLDQFGKTKVHNHPCPFFGLPNPPAPCPCPLRQAWGSLDALIGRLRAAYEENGGRPGTNPFGARAVRIYLRDVRDFQAKARGVSYEKKRKRPKPKVTPTPT

SEQ ID NO: 267227 - protein, 67 aa, Glycine max
  Clone ID: PAT_MRT3847_83326C.1.pep
NIFLLYYLINNYLVLYLNFILPPVFFFYKTQLTNLPRFRKLVSSVSSINVIPSALFFPPKISFFFII

SEQ ID NO: 267228 - protein, 78 aa, Glycine max
  unsure (1)..(78): unsure at all Xaa locations
  Clone ID: PAT_MRT3847_83327C.1.pep
DLRAGFSLCARGFFLGHVNAMRXLDHCRVDSYGVRDNIXEGLWFLVQANARELVDVLYTGGAEHTWLKCNLHTEQFRQ

SEQ ID NO: 267229 - protein, 43 aa, Glycine max
  Clone ID: PAT_MRT3847_83328C.1.pep
CLVNGISWSLNKYLTFKYIYYNRNMCFQLIHVVDVSQKIMHLI

SEQ ID NO: 267230 - protein, 53 aa, Glycine max
  Clone ID: PAT_MRT3847_83329C.1.pep
SNWYAIHISMHTNKTLRIIRIIKYLMQIFNIWSIMDAAFFSYKHLPPWPVHVS

SEQ ID NO: 267231 - protein, 51 aa, Glycine max
  Clone ID: PAT_MRT3847_8332C.1.pep
FSSLLHCTQDFHALEPSMIGAPPYPMASSLQILPEWDNCSVCQMLRTVPNK

SEQ ID NO: 267232 - protein, 130 aa, Glycine max
  Clone ID: PAT_MRT3847_83330C.1.pep
VVECTLNPLLVSQFYPPRVPLPLLSRFQHDLKYPLWTQEQPNLLVESVLQQTVEFLPKPRVHSALLPHSLLHDSSPKFSHTREHRTTFYTNSLQKLKTNKRSQKQIEETLIRTTHTLHFLSTKTKKTKKR

SEQ ID NO: 267233 - protein, 164 aa, Glycine max
  unsure (1)..(164): unsure at all Xaa locations
  Clone ID: PAT_MRT3847_83331C.1.pep
MMKLAGYSLAVSFAPISSNVVKSNKRFTVGISHRNRCSYRLFSTHAQKHQLHEKPGVVARYHLPPWFSVAPMMDWTDHHYRTLARLISKHAWLYTEMLAAETIGQKQDSLHRVLANSKITHPIGPLIPKCNIENLAKATELANAYCYDEINLNXGCPSPKVAGH

SEQ ID NO: 267234 - protein, 153 aa, Glycine max
  unsure (1)..(153): unsure at all Xaa locations
  Clone ID: PAT_MRT3847_83332C.1.pep
MMKLAGYSLAVSFAPISSNVVKSNKRFTVGISHRNRCSYRLFSTHAQKHQLHEKPGVVARYHLPPWFSVAPMMDWTDHHYRTLARLISKHAWLYTEMLAAETIVHQKDNLDRFLAYSPDQHPIVLXIGGEYIENLAKATELANAYCYDEDQLK

SEQ ID NO: 267235 - protein, 57 aa, Glycine max
  Clone ID: PAT_MRT3847_83333C.1.pep
REKILICLGKRAQTFLSGFFSFSILLNSFHLTKGLGASRGFNVIIYMNRKLSKENPI

SEQ ID NO: 267236 - protein, 53 aa, Glycine max
  Clone ID: PAT_MRT3847_83334C.1.pep
YSAYAMGDKSWIIYRVNLGDIKIFVCLMITDQRKSFWKLGVRVCSEVESVRAC

SEQ ID NO: 267237 - protein, 92 aa, Glycine max
  unsure (1)..(92): unsure at all Xaa locations
  Clone ID: PAT_MRT3847_83335C.1.pep
MVSASVSGAVSQRVSCYFIFEDSLXYYGNNCQLQSLAXADYLPYGIDLGGPTGRFCNXELLLTLLPSYYDXDDHISPHATARGLDILSSVNY

SEQ ID NO: 267238 - protein, 53 aa, Glycine max
  Clone ID: PAT_MRT3847_83336C.1.pep
AKITGLNSLRVTHTTVSSCTAFKKGCQFLLLYNKPICPPWIQYTVFFRCGVEQ

SEQ ID NO: 267239 - protein, 233 aa, Glycine max
  Clone ID: PAT_MRT3847_83337C.1.pep
MQGKPEFTDHLTHKLKHHPGQIEAAAIMEHILEGTPIGVSMDNTRLALASIGKLMFAQFSELVNDYYNNGLPSNLTASRNPSLDYGFKGAEIAMASYCSELQYLANPVTSHVQSAEQHNQDVNSLGLISSRKTHEAIEILKLMSSTFLVALCQAIDLRHLEENLKNTVKNVVSQVAKRTLTTGVNGELHPSRFCEKDLLKVVDREYTFAYIDDPCSGTYPLMQKLRQVLVDYA

SEQ ID NO: 267240 - protein, 707 aa, Glycine max
  unsure (1)..(707): unsure at all Xaa locations
  Clone ID: PAT_MRT3847_83338C.1.pep
MASEANAANTNFCVNVSNNGYISANDPLNWGAAAEAMAGSHLDEVKRMLXGETLTISQVAAIAAHDQGVKVELAESSRAGVKASSDWVMESMNKGTDSYGVTTGFGATSHRRTKQGGALQKELIRFLNAGIFGNGTESNCTLPHTATRAAMLVRINTLLQGYSGIRFEILEAITKLLNNNITPCLPLRGTITASGDLVPLSYIAGLLTGRPNSKAVGPSGEILNAKEAFELANIGAEFFELQPKEGLALVNGTAVGSGLASIVLFEANIIAVLSEVISAIFAEVMQGKPEFTDHLTHKLKHHPGQIEAAAIMEHILEGSSYVKAAKKLHEIDPLQKPKQDRYALRTSPQWLGPLIEVIRFSTKSIEREINSVNDNPLIDVSRNKALHGGNFQGTPIGVSMDNTRLALASIGKLMFAQFSELVNDYYNNGLPSNLTASRNPSLDYGFKGAEIAMASYCSELQYLANPVTSHVQSAEQHNQDVNSLGLISSRKTHEAIEILKLMSSTFLVALCQAIDLRHLEENLKNTVKNVVSQVAKRTLTTGVNGELHPSRFCEKDLLKVVDREYTFAYIDDPCSGTYPLMQKLRQVLVDYALANGENEKNTNTSIFQKIATFEEELKTLLPKEVEGARVAYENDQCAIPNKIKECRSYPLYKFVREELGTALLTGERVISPGEECDKVFTALCQGKIIDPLLECLGEWNGAPLPIC

SEQ ID NO: 267241 - protein, 73 aa, Glycine max
  Clone ID: PAT_MRT3847_83339C.1.pep
KHRSYQRGKKVGIPSNKNQAIKTHLKRRKGKKVLKTGIGGKATTFSPLPQSWGRPHFHQRGERDTNPLLHQHH

SEQ ID NO: 267242 - protein, 87 aa, Glycine max
  Clone ID: PAT_MRT3847_8333C.1.pep
KKKKKKKKKKKKKKKKKKKKKKKKKRKKKKKKKGGPPKRTKANTPGQAKKKLFKRAPKIKKTARKKTTGKREKPGGNQTKAPGRKTP

SEQ ID NO: 267243 - protein, 226 aa, Glycine max
  Clone ID: PAT_MRT3847_83340C.1.pep
MVTTVASYNVTPYQPTPNDPLWLSDSDQLGALGHVATIYIYKAKPNSDTIERLRNSLRKLLVYYYPVAGRLSLTKSGRMEVNCNAKGVTLIEAETTKTFGDYGDFSASKSTDELIPKVDDTQPTEEIPLLLLQITRFHGGEGLSIGVLFSHPLTDATGLIHFMNRWAKLTRGEELNPDEMPFLDRTLLLLPNASVPSVKLPELKPAPTPGKEQKKKSAALLKLTSS

SEQ ID NO: 267244 - protein, 742 aa, Glycine max
  Clone ID: PAT_MRT3847_83341C.1.pep
MPNYNIILLIPSFLNLAPSPSTHHNMASEANAANTNFCVNVSNNGYISANDPLNWGAAAEAMAGSHLDEVKRMLEEYRRPVVKLGGETLTISQVAAIAAHDQGVKVELAESSRAGVKASSDWVMESMNKGTDSYGVTTGFGATSHRRTKQGGALQKELIRFLNAGIFGNGTESNCTLPHTATRAAMLVRINTLLQGYSGIRFEILEAITKLLNNNITPCLPLRGTITASGDLVPLSYIAGLLTGRPNSKAVGPSGEILNAKEAFELANIGAEFFELQPKEGLALVNGTAVGSGLASIVLFEANIIAVLSEVISAIFAEVMQGKPEFTDHLTHKLKHHPGQIEAAAIMEHILEGSSYVKAAKKLHEIDPLQKPKQDRYALRTSPQWLGPLIEVIRFSTKSIEREINSVNDNPLIDVSRNKALHGGNFQGTPIGVSMDNTRLALASIGKLMFAQFSELVNDYYNNGLPSNLTASRNPSLDYGFKGAEIAMASYCSELQYLANPVTSHVQSAEQHNQDVNSLGLISSRKTHEAIEILKLMSSTFLVALCQAIDLRHLEENLKNTVKNVVSQVAKRTLTTGVNGELHPSRFCEKDLLKVVDREYTFAYIDDPCSGTYPLMQKLRQVLVDYALANGENEKNTNTSIFQKIATFEEELKTLLPKEVEGARVAYENDQCAIPNKIKECRSYPLYKFVREELGTALLTGERVISPGEECDKVFTALCQGKIIDPLLECLGEWNGAPLPIC

SEQ ID NO: 267245 - protein, 68 aa, Glycine max
  Clone ID: PAT_MRT3847_83342C.1.pep
ASVSVLCFFSFNIFAISIMMLYILSPIIMPLFSFLFLFFHIPQERSSLTRKKTANNGVEVDEVDITLC

SEQ ID NO: 267246 - protein, 184 aa, Glycine max
  Clone ID: PAT_MRT3847_83343C.1.pep
MGKMHKNRKQAGGHGTPREETDMQEQEMDIRKIMKDVENFSYSHMSWKERKKIENRNVVSLGGKPQKNQRLPLSVARLMMKKQKEREQKMLQERLILGQFGGKLGGSSKRSAGKHKPGNRGLKSSEGHFRNGILNVKHLLNSTASRDRETGTNMSNTWKGKGGKKKNGNKGAGGKKHRSAHPCE

SEQ ID NO: 267247 - protein, 177 aa, Glycine max
  Clone ID: PAT_MRT3847_83344C.1.pep
MGKMCKNKKQAGGHGPPREQTDTQGREMDIRKIMKDVENFSYSHMSWKERKKIENRNVVSLGGKPQKNQRLPLSVARLMMKKQKEREQKMLQERLILGQFGGKLGGSSKRSAGKHKPGNRGLKSSEGHFRNGILNVKHLLNSAASRDRETGTNMSNAWKGKGGKKKNSNKGGGKKHR

SEQ ID NO: 267248 - protein, 70 aa, Glycine max
  Clone ID: PAT_MRT3847_83346C.1.pep
CSPPEAQPRPFIAVDGLHTSPLPLNTGLLITSLNLNGFTPLDMSRPWTTATGLHYPITYTEAWNLCLHQQ

SEQ ID NO: 267249 - protein, 170 aa, Glycine max
  unsure (1)..(170): unsure at all Xaa locations
  Clone ID: PAT_MRT3847_83347C.1.pep
PDSIEATVSDGIQLTPPGLDSVLSVKRQQYAMHCNPIQEEIKXESSGETELCVKATNDGRIHAVVSWWVLQLDREGTIYYSTAPRWISSPTITSPVGWCDHWKQCVWFVPSSGISIFKGEEIHLHATHTETSISYNLDTQVPTSEIVNHRCMTGDLQLVLPPERVAIYGD

SEQ ID NO: 267250 - protein, 98 aa, Glycine max
  Clone ID: PAT_MRT3847_83348C.1.pep
TVGARCRSTLTCICSSEVSLRNLSAIECLSDDVVRRREMPDTVSHTKMATRDTRIPCTMLFIGGSSNANTLSKDMILQPLTKQPQILMHSNHNPSSLP

SEQ ID NO: 267251 - protein, 71 aa, Glycine max
  Clone ID: PAT_MRT3847_83349C.1.pep
ASIRTSADASGESSVPLRDTHRLCAYAVKKLGHLKDIVSAGCLLCSGFLDCAFQLLALLWCDRARFTGRRF

SEQ ID NO: 267252 - protein, 63 aa, Glycine max
  Clone ID: PAT_MRT3847_8334C.1.pep
PPQIVWGSHHGQIKLVISLCIIVINALPSEPESFLQNSSLVNFKRVPSTYGVWPGKNLSNSNA

SEQ ID NO: 267253 - protein, 82 aa, Glycine max
  Clone ID: PAT_MRT3847_83350C.1.pep
GKRKMKRGWLRKLDSIACFVHNHGFDETKCKDCDSVDRSGIQRVRVHSYRKRFKELSSLYTEQEFKAHKGVILTMKFSLDGK

SEQ ID NO: 267254 - protein, 76 aa, Glycine max
  Clone ID: PAT_MRT3847_83351C.1.pep
MVGCFEHYFFSNKSKEGCWFLVGGCRVMYGVKKKMFVNGVFPRIIFFLLWASCIFLVSWKNHKSSFGRWFIFIWLE

SEQ ID NO: 267255 - protein, 148 aa, Glycine max
  Clone ID: PAT_MRT3847_83352C.1.pep
GSSYVAKRTLKTNSAYTRHKQPTKKYTNQGDSLREYSEHESAEKAPCWPQAPPLNSEGTNERWRQIRPFQNPLATHLCLMKILRTPTACVAISSPYILQIFPNLLQKLYHALNLATIESILLLQNCLQGSAVHPWPCPWHHHTHKCQL

SEQ ID NO: 267256 - protein, 77 aa, Glycine max
  Clone ID: PAT_MRT3847_83353C.1.pep
WLRNSQTATPRIHLPFGSRALRYRSQACPSRKIAELEIQVLLARLMQKYKVILAPETGDSKTVVQIVLVPNKKEGLK

SEQ ID NO: 267257 - protein, 75 aa, Glycine max
  Clone ID: PAT_MRT3847_83354C.1.pep
CSEWIGLPLSTTTTTTTTMQTVLVPAEVVVGIDLEVVDMQMQRCLRTAIANAKEKDLLLAACDPELSSHDSRLTA

SEQ ID NO: 267258 - protein, 74 aa, Glycine max
  unsure (1)..(74): unsure at all Xaa locations
  Clone ID: PAT_MRT3847_83355C.1.pep
IEFTLRKHTSLGPIHAIDYLANLYTKERFTACEEEXHTHLSEEIITTVPLLILANNTDIPYACSKNNFFNHRAL

SEQ ID NO: 267259 - protein, 50 aa, Glycine max
  Clone ID: PAT_MRT3847_83356C.1.pep
SYSSFKLLSLYLLRLLNRIVPLIVSMKLKHDMPDEHFHGYGRSFCILLYK

SEQ ID NO: 267260 - protein, 277 aa, Glycine max
  Clone ID: PAT_MRT3847_83357C.1.pep
MKNINYGRLISFGKDIAELHSSKLERLDFRGALKGRNLANTSNCDVWTEYHDMGVEGIKAVTDYKAYTADSILDLLHFVAPKMMKRGDAHFSYGIAGNLDDQKYKHYKYWSNPLETRLPNAPDMEIYSMYGVGIPTERAYVYKLTPQSECHIPFQIDTSADGGNEYTCLRDGVYSSDGDETVPVLSAGFMCAKGWRGKTRFNPSGIRTFIREYDHAPPANLLEGRGTQSGAHVDILGNFALLEDIIRVAAGASGEDLGGDRVHSDIFKWSEKINLKL

SEQ ID NO: 267261 - protein, 59 aa, Glycine max
  Clone ID: PAT_MRT3847_83358C.1.pep
RKKWKLIIIMFSFNQAVDNTLWLFILLLDNSCHLLHHACLLLSIFGLIEWFSPKKKKKK

SEQ ID NO: 267262 - protein, 48 aa, Glycine max
  Clone ID: PAT_MRT3847_83359C.1.pep
IMFGVKFSFLINILCLLSISMSIYTLTFIKIVICVSSHQFMKGRNPFT

SEQ ID NO: 267263 - protein, 47 aa, Glycine max
  Clone ID: PAT_MRT3847_8335C.1.pep
DHRNIEISHCCKTTQYDLKTPNDLAKLPYKAQNILKIKRDAMHERTS

SEQ ID NO: 267264 - protein, 77 aa, Glycine max
  Clone ID: PAT_MRT3847_83360C.1.pep
EDAANNFARGHYTIGKEIVELCLDRIRKLAENCTSLQGILVFDESGDGTGFGLGCLLLERLSVDYGKKSKIGFTVNP

SEQ ID NO: 267265 - protein, 88 aa, Glycine max
  Clone ID: PAT_MRT3847_83361C.1.pep
LKNLHIGRVWQSEGERETARERERQRVKGPAIAAHGGTGIDPNLTLERQEEAKQLSTHCHNIANYALNSKVNGVDDFELVARDLKTEP

SEQ ID NO: 267266 - protein, 58 aa, Glycine max
  Clone ID: PAT_MRT3847_83362C.1.pep
HIADNSNARVHDDVSHNPNKHTMMKKNMKKSVCHQKLDVCAQCKVKPEECTKRDQHHL

SEQ ID NO: 267267 - protein, 61 aa, Glycine max
  Clone ID: PAT_MRT3847_83363C.1.pep
QPWPSPHRVKSVLKYSAVCPGSSLFSLLNAWKLAKRTSSDISLTFQFHARIITVAHYLESH

SEQ ID NO: 267268 - protein, 62 aa, Glycine max
  Clone ID: PAT_MRT3847_83364C.1.pep
NFFFLPNYINFLSLLSQLPLHIATASFLLLSFTNQFNFIYTHQPLIIRLSSSYFKKLLSPQF

SEQ ID NO: 267269 - protein, 191 aa, Glycine max
  Clone ID: PAT_MRT3847_83365C.1.pep
WSKDSPWETCGLATDFEWKMIAEPVMSLYTEATDGSFIEHKESAMVWHHQEADPYFGSCQAKELLDHLESVLANEPVVVIRGQHIVEVKPQGVSKGKVVEDLISIMRSKGKSPDFLLCIGDDRSDEDMFESIARSASNPALPTIPKVFACTVGQKPSMAEYYLDDTSEVMKLLEGLATASAPSASIASQEL

SEQ ID NO: 267270 - protein, 409 aa, Glycine max
  unsure (1)..(409): unsure at all Xaa locations
  Clone ID: PAT_MRT3847_83366C.1.pep
VAYTVCRQGSVALDKALGVEGEDKKAPKQSVIIVSEFIGCSPSLSGAIRVNPWNIDDVAEAMNSAVTMSEAEKHLRHEKHYKYISSHDVAYWARSFDQDLDRACREHYSKRYWGVGLGLGFRIVALDPTFRKLSVDHIASAYRDTHSRLILLDYDGTMMPQATINKTPSKEVITVLNYLCSDPENMVFIVSGWDKDCLSKWFSPCEKLDLSSVHGYFTRKXAEYYLDDTSEVMKLLEGLATASAPSAXHSFSGIVRNIIETDTEKQSCTEXYFHSWILKGLYLEIYRLADSYSSELVIRGHYIVEVKPXGVSKGKVVEDLISIMRSKGKSPDFLLCIGDDRSDEDMFESIARSASNPALPTIPKVFACTVGQKPSMAEYYLDDTSEVMKLLEGLATASAPSASIASQEL

SEQ ID NO: 267271 - protein, 105 aa, Glycine max
  Clone ID: PAT_MRT3847_83367C.1.pep
KNPPRKGGGAKKKKGGAVKDWPWTQTLKPPIFAPTPPPLIAPVLFPFALGDKTTRAKGFCPTTGKNLQGWGVIWGGPQPLSAKKSSPQKKAFGLCSLVKPPLHCP

SEQ ID NO: 267272 - protein, 69 aa, Glycine max
  Clone ID: PAT_MRT3847_83368C.1.pep
DRHSINCYKKYNSFPILNQSSAVFGPGRGLRNIIEPLYEARTHHLTLLASFHQSAEQGGGTRHRRAGAI

SEQ ID NO: 267273 - protein, 312 aa, Glycine max
  Clone ID: PAT_MRT3847_83369C.1.pep
MMARLAPPFSIFRQSHYWRPLLSSHNAKRTLTAATNFSITSLARTPKSRDEGTTTIVKLSSKARRKAFYESPEGVLLRKLNECSKDGNVAQALCHYDEARKLGVLLNLNHYNKVLYLWCIGSAAGFPNLGLKRGFEVFQQMLNDRVQPNEATFTNAARLAAANEDPDMAFELLKQMKNVAIAPKLRSYEPALFGFCKRGDAEKAYLVDADMVESGIVAEEPELSALLEVSVNAKKEDKVYDILHRLRSTLRQVSESTLGIVEDWFNSEYAAKIGKEKWDVKKVREGIAQGGGGWHGQGWLGSGRWKVANTHV

SEQ ID NO: 267274 - protein, 56 aa, Glycine max
  Clone ID: PAT_MRT3847_8336C.1.pep
RLREDDRRAAQCMRLLKRSKVGRYLQPNPTPKATALPLGKASKSQQLILFSHPLFC

SEQ ID NO: 267275 - protein, 94 aa, Glycine max
  Clone ID: PAT_MRT3847_83370C.1.pep
RLDVRESGARGLSKAVLSASKKRGRWGPEVEERLHRLGWRQRLSPSLVGNVIDPFLKSHHSLALGFFNWASQQPGFSHTPFTFHSLLKPISHTN

SEQ ID NO: 267276 - protein, 76 aa, Glycine max
  Clone ID: PAT_MRT3847_83371C.1.pep
ALHRNALYRLKFILKSLLNLNLRSKQSPTSLLAPPIQTKEAQARMLEMKDKSTWLNQKSPSYRMIPENNISKHKGH

SEQ ID NO: 267277 - protein, 39 aa, Glycine max
  Clone ID: PAT_MRT3847_83372C.1.pep
LIGAGMEKLGLDFVILVKVLVKFFGWSVGCNHGFMYSCW

SEQ ID NO: 267278 - protein, 75 aa, Glycine max
  unsure (1)..(75): unsure at all Xaa locations
  Clone ID: PAT_MRT3847_83373C.1.pep
MPHTPPSXSXXVLSKTITNHFNFTYKIPSSFHLIINVIKDSISKSFNPNLIILLFFYISTFYIPHYKLYSLHIYT

SEQ ID NO: 267279 - protein, 175 aa, Glycine max
  Clone ID: PAT_MRT3847_83374C.1.pep
MSSPNSARQPHAPLLLPRPDAAARLPVLALLLGRRGHSVMVRETAARELEERRADWTYSKPVVALDMTWNMAFVVVSAVMLACTVKENPNTPIRWWICGYALQCLLHVALVWLEYRRRNDAPGDEDSAANLDYDDVNDSDEDDVGTSGSSSSTGFTKRCASLNTMISLLWWMVGF

SEQ ID NO: 267280 - protein, 345 aa, Glycine max
  Clone ID: PAT_MRT3847_83375C.1.pep
MSSPNSARQPHAPLLLPRPDAAARLPVLALLLGRRGHSVMVRETAARELEERRADWTYSKPVVALDMTWNMAFVVVSAVMLACTVKENPNTPIRWWICGYALQCLLHVGLVWLECRGRNDAPRDEESAASLQYDDVNDSDEDDVGTSGSSSSSGFTKRCASLNTMISLLWWMVGFYWVVSGGDILLQDAPRLYWLSVVFLAFDVFFAIFCVVLACLIGIALCCCLPCIIAILYAVAGQEGASESDLSILPKYRFQLLSNEETPGEGGGGSMIPMETSNGYSVNERTLSPEDAECCICISSYEDGAELHVIPCNHHFHYTCIVKWLKMNATCPLCKYNILKGNEQV

SEQ ID NO: 267281 - protein, 55 aa, Glycine max
  Clone ID: PAT_MRT3847_83376C.1.pep
ETLYQERTANWSFITLESCWCTTRTRIYYANETDVSWRQRARIYLNIDRYMSSIC

SEQ ID NO: 267282 - protein, 47 aa, Glycine max
  unsure (1)..(47): unsure at all Xaa locations
  Clone ID: PAT_MRT3847_83377C.1.pep
TRPPTRPPTRPVLVHSGGVHGGHYYAFIRPTLFXQCNKFYYERVTKE

SEQ ID NO: 267283 - protein, 39 aa, Glycine max
  unsure (1)..(39): unsure at all Xaa locations
  Clone ID: PAT_MRT3847_83378C.1.pep
PXHXCFLGCXRAMHSSILXCXSSTXXHSVXIDXLYQIDL

SEQ ID NO: 267284 - protein, 76 aa, Glycine max
  Clone ID: PAT_MRT3847_83379C.1.pep
TGVVFPPRGILFLGGFEGSTCQIIPPPPLIWRGGGGIFPLFFFLVKGKALFPPVFFMFLGERFAKFFFPPFFPWCG

SEQ ID NO: 267285 - protein, 71 aa, Glycine max
  Clone ID: PAT_MRT3847_8337C.1.pep
QNKKLYTKTVYITALTEAGFHLSPCQIQHSLVSASSLPAYMQIMYGSNFDTMHYTLLMSRIQLSRLYIEIS

SEQ ID NO: 267286 - protein, 103 aa, Glycine max
  Clone ID: PAT_MRT3847_83380C.1.pep
TGLCLTLSFAQHMTYLKALCCSSKFFFLIGLCILYLIMLLVVSLFISSCTDNIRSASYMLLSLSSGFHLPHLLDRFERLLFKLEVLDHKARERAGLITPTLGS

SEQ ID NO: 267287 - protein, 60 aa, Glycine max
  Clone ID: PAT_MRT3847_83381C.1.pep
AGTFFVFGIVSCCAVAFVHYCVPETRGKTLEEIEVLFKDEDDLQESEVEMGDVERLMQKS

SEQ ID NO: 267288 - protein, 35 aa, Glycine max
  Clone ID: PAT_MRT3847_83382C.1.pep
LDLKLLLSGIETKPCPTRHCFDAALSRFTPTLHVY

SEQ ID NO: 267289 - protein, 62 aa, Glycine max
  Clone ID: PAT_MRT3847_83383C.1.pep
SVDGNPYGLIDLNTLSRMWTMGKYLGLSLELWNIKVRPCMEVRQYLSNEIEFSFDNAEESWI

SEQ ID NO: 267290 - protein, 82 aa, Glycine max
  Clone ID: PAT_MRT3847_83384C.1.pep
ATPHIDRVVFKALTLNHWGLGYAHLHTPIVTPQMYFFFYCGVEMRFSHVLEDHIFFLRSDQIILFTLKLKTEPNEITPFFKK

SEQ ID NO: 267291 - protein, 72 aa, Glycine max
  Clone ID: PAT_MRT3847_83385C.1.pep
RHGSLLKTNFAWKLIHGTTPGQTSFRHRHALRRARETQPTSAPRKLPGEGLNHLRKVTDQEAPASKAHSMTY

SEQ ID NO: 267292 - protein, 77 aa, Glycine max
  Clone ID: PAT_MRT3847_83386C.1.pep
NLTGVPWTEEEHRTFLVGLEKLGKGDWRGISRNYVTSRTPTQVASHAQKYFIRLATMNKKKRRSSLFDMVYIYIDPS

SEQ ID NO: 267293 - protein, 156 aa, Glycine max
  Clone ID: PAT_MRT3847_83387C.1.pep
VSLRGRPSSEFTLVTADVEEKSVIIGERNRVAIEALRAAMDKGHNKIAILYGGGHMPDLGRRLREDFDLVPSNVQWITAWSITKKDLNTDSFPFLKTIAKASGWPLNRYQTLALLIFSSVLALDLWFWELFFGTAVNWVSELGSELLRYVDNSPMI

SEQ ID NO: 267294 - protein, 51 aa, Glycine max
  unsure (1)..(51): unsure at all Xaa locations
  Clone ID: PAT_MRT3847_83388C.1.pep
VCVACAFLFLSFWCGLVVCWCVGYWXLVIKKSSPPLVFSTKHKXFVXCSLF

SEQ ID NO: 267295 - protein, 68 aa, Glycine max
  Clone ID: PAT_MRT3847_83389C.1.pep
FIYPFAFSLPIFCGSVCLFMIALLGNYRSCFPCDYTLDFSKFAFDAMLYVWILDEFCCLVFQLFKFGS

SEQ ID NO: 267296 - protein, 269 aa, Glycine max
  Clone ID: PAT_MRT3847_8338C.1.pep
MAVTGSHLLDDSPPAFSSVISLRYALPEILANGASHSVNLKFQTLGHFVNVCGSLSDDVGSRLHFVCLDKRKYVGTREAMRANSETKGSLNDGEDIVFGNEVFEMWKMGKDRLALPLLIDLCEKAGVDLPPCFMRLPMELKLLILERLPGVDLAKVACTCSELRYLSTSNELWKKKYEEEFGKEGDRKGWLFKDLFALSWETKKRCRAVPFRRQGISRNIIFSPNHFRMPPVWGGEYGVQPVFGVPFPRYQLWRNIIPSRTLTLGDFNI

SEQ ID NO: 267297 - protein, 60 aa, Glycine max
  Clone ID: PAT_MRT3847_83390C.1.pep
YLQTYEIFTEAVLEILYLQYVLNAVRPLTLICTTNWAVNSILQLTVTGSQKLNTCALMKI

SEQ ID NO: 267298 - protein, 140 aa, Glycine max
  unsure (1)..(140): unsure at all Xaa locations
  Clone ID: PAT_MRT3847_83391C.1.pep
WRSHPSNQFNKDQGGPSNKPIQQGPNIFQRTXKLEETLTQFMKVIMSNHKSTESALENLEVQVGQLAKQITDKSSNSFMVNTEKNPKEECKDVMTRSKRFVEAEDEDNVVSKKKFAEKKGTDEKKNDVRGESNQEKEKQI

SEQ ID NO: 267299 - protein, 83 aa, Glycine max
  Clone ID: PAT_MRT3847_83392C.1.pep
YFLCKCLFLVFVFYIYIYIYIYIYIYIYIYIYILFYIIFNFFVFYYKNVYKVSSYIGMYYKNGYITIHKQSDYAINFITKGIK

SEQ ID NO: 267300 - protein, 33 aa, Glycine max
  Clone ID: PAT_MRT3847_83393C.1.pep
YFLSTHQLGSLHKAFNQSEYFSYDTIMSNYICC

SEQ ID NO: 267301 - protein, 76 aa, Glycine max
  Clone ID: PAT_MRT3847_83394C.1.pep
FHVATTRGPGDEQGWILLTSACILDLKEPYDRMAQPQADPVAQDQQPQALLQTQVLNLESDICIFPCLSCKIKFYG

SEQ ID NO: 267302 - protein, 53 aa, Glycine max
  Clone ID: PAT_MRT3847_83395C.1.pep
LTYYHYSGLPFKTEYTLSLIWLSALIMQNVSEEKQPCQILKMFTRCQKLLKRH

SEQ ID NO: 267303 - protein, 111 aa, Glycine max
  unsure (1)..(111): unsure at all Xaa locations
  Clone ID: PAT_MRT3847_83396C.1.pep
PLSYAGADVSMLAYSLISEASYENIAKKWIPYLRHYAHGVQMILGGPKLDPRKHNRFFMGHPGAGPTTLAQGQXLSNLVGAPAYSECSFTPQQYVRSVLHAAIEVVLLPPK

SEQ ID NO: 267304 - protein, 56 aa, Glycine max
  Clone ID: PAT_MRT3847_83397C.1.pep
FWGKTVFPSDSKRGKKTWGLKREWPPTNNIKVGAMCPPLAMFNTENFIFFQYPPPF

SEQ ID NO: 267305 - protein, 83 aa, Glycine max
  Clone ID: PAT_MRT3847_83398C.1.pep
TNRPYSTSKIDTFLYLLILFFLIIIFHIPQPIMRFFFLVFLFSQASLMKFPTLGGFFLQEFTYPLAHLASPSSSKGRRLEPYM

SEQ ID NO: 267306 - protein, 123 aa, Glycine max
  Clone ID: PAT_MRT3847_83399C.1.pep
KKQFSIRCKANNRKRAGRFKAARPTTPQEEQDIRAYKREHFFFTTSKLLTLTVSKITSGSPTGPHLMPLTQTKALNSTLKELGTLTGKDTRAQDNDMKPRTYLPAFLKDNTPGILTPPKTLTG

SEQ ID NO: 267307 - protein, 131 aa, Glycine max
  Clone ID: PAT_MRT3847_8339C.1.pep
RLLILGGFSGVLFGQKLGFVLFRSCEFCPPETSWGRKSMRRNLEKREIEKGGFSRICLLCPGKQRRGVKRFLFDDRGFQENIIFSPNHFGMPPVWGGEYGVQPVFGVPFPRYQPRRNIIPPCTLTLGDFNI

SEQ ID NO: 267308 - protein, 178 aa, Glycine max
  Clone ID: PAT_MRT3847_833C.1.pep
SDFGLAKVGPSGDKTHVSTRDEGTYGYCAPDYAMTGQLTFKSDIYSFGVVLLELITGRKAIDHTKPAKEQNLIAWARPLFRDRRKFSRMVDPLLEGQYPVRGLYQALAIAAMCVQEQPNMRPVIVDVVTALNYLASQKYDPQLHPAQTSRRSPPSQMMKRDDDDHRHILSIEHETDRS

SEQ ID NO: 267309 - protein, 99 aa, Glycine max
  unsure (1)..(99): unsure at all Xaa locations
  Clone ID: PAT_MRT3847_83400C.1.pep
EDCRASEMLXDVEARVMENEVLIEIHCEKEDGVELKILDHFENLQXXVTASSVLPFGNSTLGITIIAQMGDAYKMKVNDLVPKLRQVLLNRMNVNTDPY

SEQ ID NO: 267310 - protein, 94 aa, Glycine max
  Clone ID: PAT_MRT3847_83401C.1.pep
HVLYLYGCEKTTEGLNKVIQEQNNMLAKKIKEKEKVAAQQAQWEHPNHGVNASFLLPQPLLNMGGNYREEASEVGRNELDLTLEPLYSCHLGCF

SEQ ID NO: 267311 - protein, 99 aa, Glycine max
  Clone ID: PAT_MRT3847_83402C.1.pep
GRVRCVRYRDSHARQLPRHGQGADLVKIMIRRSPDTGLSIYVPKKDIEESIVASEYETLWGGWIKVANGWVLDLPEMASDTRFTITIDAKKRDESGDDP

SEQ ID NO: 267312 - protein, 72 aa, Glycine max
  Clone ID: PAT_MRT3847_83403C.1.pep
KEKVAAQQAQWEHPNHGVNASFLLPQPLLNMGYYNYVTSSLYGNYREEASEVGRNELDLTLEPLYSCHLGCF

SEQ ID NO: 267313 - protein, 448 aa, Glycine max
  Clone ID: PAT_MRT3847_83404C.1.pep
MEPPTSYISTDELRKHNTRHDAWISIHGKIYDVSSWLHRHPGGPLPLLTLAGTDATDAFLAFHPPNTASLLLPAFSTSHRLSDHTVSAASSDYRKLFSDLSALNLFNRKGHTTSILLSLILTLFPLSVCGVLFSDSTFVHVLSAALIGFLWIQSGWIGHDSGHYNVMLSRRLNRAIQILSGNILAGISIGWWKWNHNAHHIACNSLDYDPDLQHLPFFVVSSRFFNSLTSRFYDRKLNFDSFARFLVSYQHWTFYPVMCFARVNLFAQSFFLLLSKRKVENRWSELLGLLAFWVWYPLLVSFLPNWWERVLFVFVSFSVTGIQHVQFCLNHFSSEVYLGPPSGGDWFEKQTKGTLGVDCSPWMDWFHGGLQFQVEHHLFPRLPRCHLRKIAPLVKDLCKKHNLPYNCVSFWKANVLTIQTLRNAALQARDGSNPVPKNLVWEAVNTHG

SEQ ID NO: 267314 - protein, 186 aa, Glycine max
  Clone ID: PAT_MRT3847_83405C.1.pep
INLFAQSFFLLLSKRKVENRWSELLGLLAFWVWYPLLVSFLPNWWERVLFVFVSFSVTGIQHVQFCLNHFSSEVYLGPPSGGDWFEKQTKGTLGVDCSPWMDWFHGGLQFQVEHHLFPRLPRCHLRKIAPLVKDLCKKHNLPYNCVSFWKANVLTIQTLRNAALQARDGSKPVPKNLVWEAVNTHG

SEQ ID NO: 267315 - protein, 62 aa, Glycine max
  Clone ID: PAT_MRT3847_83407C.1.pep
TKSGKQNYSQRLWPAQRVIFFPLKNRSQRSRKHIDRFLEFKSQLLLLPVLRNGNLCSRFIKI

SEQ ID NO: 267316 - protein, 56 aa, Glycine max
  Clone ID: PAT_MRT3847_83408C.1.pep
SVVGLSSFFFFFFFFFFFFFFFFFFFFWVEKQPFFFKTRFFKPGNIIITNQKPKFI

SEQ ID NO: 267317 - protein, 121 aa, Glycine max
  Clone ID: PAT_MRT3847_83409C.1.pep
IDSFTFPGDLGADDDLGSSTSSCRFERSQSFQHDHRFQGGYDLSGGHYDSLRDYIQPMSSVPGVNGQVDGLIRNQWQVAGSDVLYLGMRNTENGSYAYYPDYSNMACGVNGYTVFRPSSGP

SEQ ID NO: 267318 - protein, 345 aa, Glycine max
  unsure (1)..(345): unsure at all Xaa locations
  Clone ID: PAT_MRT3847_8340C.1.pep
MWESIVLTVVATAGNNIGKILQKKGTVILPPLSFKLKVIRAYALNKTWVIGFLMDIFGALLMLRALALAPVSVIQPVSGCGLAILSVFSHFYLKEVMNVVDWVGITLAGFGTIGXVGAGGEEQEAAALSIFHIPWLAFVVFILFIMLNGWLRICKRNRREQEMMEYDVVEEIIYGLESGILFGMASVISKMGFLFLEQGFPKLLVPICIIISVCSSGTGFYYQTRGLKHGRAIVVSTCAAVASILTGVLAGMLALGERLPSAPKARFLLLLGWLLIIVGVILLVGSTKLVRFFRFSSHHFKRSSVDKNYGPRRSGTSRVREPSPTAVIQAATLNHLLSSSSKEKA

SEQ ID NO: 267319 - protein, 83 aa, Glycine max
  Clone ID: PAT_MRT3847_83410C.1.pep
HASGLAENSRTEPRRGNGPKPGSDMKMNAIRSGIVVLGALAFGYLSIEIGFKPYLEKAQNQNALYQSDPSQEESSSAFSERPS

SEQ ID NO: 267320 - protein, 62 aa, Glycine max
  Clone ID: PAT_MRT3847_83411C.1.pep
FGGRSPKMKQLPQKKSCKRRRFSPSKGRGGPPMVWGVKNLGRGLGFPTNSGGKSSKAPPVSP

SEQ ID NO: 267321 - protein, 55 aa, Glycine max
  Clone ID: PAT_MRT3847_83412C.1.pep
EPKQNAGRTTPSHAETAPINTGTTQKPQTTRGDEHTGDGTKETRGQETPDRRETR

SEQ ID NO: 267322 - protein, 138 aa, Glycine max
  unsure (1)..(138): unsure at all Xaa locations
  Clone ID: PAT_MRT3847_83413C.1.pep
MTYXYIKCAGSFFIALGNLADDTINCEAFPHKLVQLGEIQENVVMKFSQEEFLTACTTQVRAATTLLADGCPYQDAMVHDSAVSTVPGDFVIGVELTTINNMCAYGLNPGISGSCLLGPFLXSIIQQTVRNQTGTGRT

SEQ ID NO: 267323 - protein, 142 aa, Glycine max
  unsure (1)..(142): unsure at all Xaa locations
  Clone ID: PAT_MRT3847_83414C.1.pep
CLSNCLCSGLIKILPFVQCVSNGLHPAWAAIGYQVDSDGITPTSNVHTXRPLDKGIVEAMEESTLSLPXSLIEEGLEVAIDSKNNTLNIXCDVVIVGSGCGGGVAASILASSGLKXVLALEKGSYFTPLPDSSQEGPETEFQ

SEQ ID NO: 267324 - protein, 36 aa, Glycine max
  Clone ID: PAT_MRT3847_83415C.1.pep
CRFIIIVRSRNLYNRLCHQSRTESWSNPTSISPMLS

SEQ ID NO: 267325 - protein, 60 aa, Glycine max
  Clone ID: PAT_MRT3847_83416C.1.pep
KFVLRSFDPHHYLSSPALFNTDSSRHSITWANNNSSMVLERRILFPTSVSTYNKGEINSF

SEQ ID NO: 267326 - protein, 76 aa, Glycine max
  unsure (1)..(76): unsure at all Xaa locations
  Clone ID: PAT_MRT3847_83417C.1.pep
WSQLHYERSNNTEMYYVYLGTLKTEFRELYRHNAKEARQSLRKALSSIVWTXTADVGSITQIVKLYHAQMVLNAHD

SEQ ID NO: 267327 - protein, 103 aa, Glycine max
  Clone ID: PAT_MRT3847_83418C.1.pep
HVYLIPSNQDSPPTGLQPPTMFRLITNLGIAPLTVLLVATYFSFFCAGMLEVIRPIPIIQNKVSAVNLKPSHRVAIWSRFFQRAAVAIIGAALTNTVVSFYTA

SEQ ID NO: 267328 - protein, 80 aa, Glycine max
  Clone ID: PAT_MRT3847_83419C.1.pep
GNAANNRKSFLTPSLGITVLDATILHFSHNIDEIWYAIRHVLSSAILMRLPKASILRYKLQIYELMHVNCKANSTQEKDI

SEQ ID NO: 267329 - protein, 66 aa, Glycine max
  Clone ID: PAT_MRT3847_8341C.1.pep
DDIKNVSLKGHSENVFFLVGHLYRTTIIMSHKSQPMFYRVIGNFYILPYFIQAANRSIRLFSLYSS

SEQ ID NO: 267330 - protein, 46 aa, Glycine max
  unsure (1)..(46): unsure at all Xaa locations
  Clone ID: PAT_MRT3847_83420C.1.pep
WDCPGPAEFWFFESSSYTVSYRETXRNLEAALEARAGISESVSQQR

SEQ ID NO: 267331 - protein, 45 aa, Glycine max
  Clone ID: PAT_MRT3847_83421C.1.pep
FLVARYFVESCFLGKKKKKKKKKKKKKKKKKKKKKKKKKKKKKKK

SEQ ID NO: 267332 - protein, 89 aa, Glycine max
  unsure (1)..(89): unsure at all Xaa locations
  Clone ID: PAT_MRT3847_83422C.1.pep
SFKKHLSGYYNVIYSYIVTPASRIYDCXIRMGSNVRSTRLPLLASTASGHAQVHRGINADSSPXADRMDPKEIHDHIPQAPSPAAALIR

SEQ ID NO: 267333 - protein, 77 aa, Glycine max
  Clone ID: PAT_MRT3847_83423C.1.pep
AEDIQPLVCYNGTGMEKAGFAGDDAPRAVVPSLAGLPPHTEEMVGLGQKDSCVGDEAQSKRGILTLKTPIEHGFDSN

SEQ ID NO: 267334 - protein, 156 aa, Glycine max
  unsure (1)..(156): unsure at all Xaa locations
  Clone ID: PAT_MRT3847_83424C.1.pep
VHEYVTPYSSGSKLKSFIAGHNITITDGIDKTRATWQLRKXADRDFLKRNYKQMYNVSWAASEDKARLWPQLHYVSGNNNQMQEAYLVNLENELQELYMHSPYEDSQLRRKALSRIEWMQKADVPTISQIEEFHSMQRMMNAPDSNDNIDLLLSID

SEQ ID NO: 267335 - protein, 149 aa, Glycine max
  Clone ID: PAT_MRT3847_83425C.1.pep
MLQTLSMLRPCTTLSSSCASSRRLALFHLVSTGGIALPQAQLFGAEKLAQPEKNLFDWVKNDNRRFLHVVYRVGDLEKTININVCEIRFGDVVCNLMTLLGCWFYTECLGMKLLRKRDIPVDRYSNAFLGYGPEESNFTVELTYSEFQT

SEQ ID NO: 267336 - protein, 40 aa, Glycine max
  Clone ID: PAT_MRT3847_83426C.1.pep
GRNCLFFFVAFKIVSPPKLKILTNQIFWMANIKKGSLFDI

SEQ ID NO: 267337 - protein, 84 aa, Glycine max
  Clone ID: PAT_MRT3847_83427C.1.pep
SSNSTERTCDKVRNTYCSDVCPCNKILGVGSSRVFFSSPSSACFFTDSQCIAHRSSSDLAKSKASINRSLAIKLSPPAFPLATA

SEQ ID NO: 267338 - protein, 78 aa, Glycine max
  Clone ID: PAT_MRT3847_83428C.1.pep
PFLFDHAYYGNLQKKLGLLASDQTLALDPRTKPIVEDLAKDKQKFFKAFVGAMDKLSLVKVVRGKRHGEKRRDCSMHM

SEQ ID NO: 267339 - protein, 472 aa, Glycine max
  Clone ID: PAT_MRT3847_83429C.1.pep
LRKVVFDFRFFWFFWFFWSCRWWFWSVAEMNDSTVKNLAITEKKVQQHKPGGCVGIFFQLIDWKRKLSKKKLFSKKLLPPARAKKFKGDEKMPNSKLHLIANENSGGFPGAKKVGNHGLDVEQKSEMRVPSLVARLMGLESIPAAQRDKSKKAVCADGKKESSADHGELDRQGVDLEMGVVKHDSRPQKLQKTGVYERRAVTRFGAEALQIKSVLSRARKYNHHHPKLASSLKSPRVPSGKSASRSARLIGAATKILEPGLQSRSRAKNSLTYPASLYPHKTGIVSNGVEDGSAIMQNQSCFETSSCKQLMGQTSCKNCGNLLDVLDCKLEVGRQSLVPPPIVSDVITATSMVSLEKKGKSFPPHGHERDVVLPRSQEKLISLVTEGKGKNNAQQSWSEPTARRMPMPHDGPAKWNSSCQPSRALEDDASSFALKHKPQPQEQMLSSERTSSGSTTSDMQVKRVLSSMSAVN

SEQ ID NO: 267340 - protein, 189 aa, Glycine max
  Clone ID: PAT_MRT3847_8342C.1.pep
MAPNALFLFSFLAMLLLLLRSTAAGHNYRDALRKSILFFEGQRSGKLPADQRLRWRHDSALHDGATAGVDLSGGYYDAGDNIKFGFPMAFTTTMLSWSVIDFEKSMGAELGNALKAVRWGTDYLLKATAKIGSGVVFVQVGDPYSDHNCWERPEDMDTLRTVFKIDGSHPGSDVAGETTPTLGLKFRHC

SEQ ID NO: 267341 - protein, 71 aa, Glycine max
  Clone ID: PAT_MRT3847_83430C.1.pep
MHVGAVQPVERALVIDDLIVTGGTFGAVINLLQRFRGVLFVDCACVIELPELKGRERLRDIVFLVLINGGA

SEQ ID NO: 267342 - protein, 129 aa, Glycine max
  Clone ID: PAT_MRT3847_83431C.1.pep
MDSSSNFDDNSDVGYQPSPSSVDQNDHSITETVGYSPLLSGESFAYCRSNSEVSNFSEPIDDNSFASDQPSPSLWTTMKHGASQASLSRLGMKQHRNSLDEKSDDLDLLETGWFALTASEFFLGLNMFK

SEQ ID NO: 267343 - protein, 81 aa, Glycine max
  Clone ID: PAT_MRT3847_83432C.1.pep
MDSSSNFDDNSDVGYQPSPSSVDQNDHSITETVGYSPLLSGESFAYCRSNSEVSNFSEPIDDNSFASDQPLPSLWTTMKHG

SEQ ID NO: 267344 - protein, 43 aa, Glycine max
  Clone ID: PAT_MRT3847_83433C.1.pep
SSPMRSPVTSGSMSILCDKCYRSVFVTLGNPKASSLWPEVPID

SEQ ID NO: 267345 - protein, 131 aa, Glycine max
  unsure (1)..(131): unsure at all Xaa locations
  Clone ID: PAT_MRT3847_83434C.1.pep
WTGLANRLLSKGTDILCRDHARFDGLITKQAMSKMAETINSLCGGDEKLMRERTHMLLASCSRMAFCXKDVRRVECENPSGFSLTVIRNSILNEMLIRYSYEKLLRQAKAASMFLQSLKDSSLLCVDGDDN

SEQ ID NO: 267346 - protein, 65 aa, Glycine max
  unsure (1)..(65): unsure at all Xaa locations
  Clone ID: PAT_MRT3847_83435C.1.pep
MLYHVVPKSKLCAVHCANIKFFSEFDLAALAFDVDYXEHFILPALSSVDFESHNVSFGRNFSIQD

SEQ ID NO: 267347 - protein, 75 aa, Glycine max
  unsure (1)..(75): unsure at all Xaa locations
  Clone ID: PAT_MRT3847_83436C.1.pep
AXSTSPATXXFPSSXXFSXXXXLRFSAXVXLXFCXXPSXWXFXXXXPLCXFXXSWXXXPXXXLXPXSVLXXACXX

SEQ ID NO: 267348 - protein, 245 aa, Glycine max
  unsure (1)..(245): unsure at all Xaa locations
  Clone ID: PAT_MRT3847_83437C.1.pep
CLVEYATFRQYMRELPKNAPQKLNFRKMRQGLIALGRHCVGSRFETDLYESATSELMANHSCLSGRNIYGVDSFSLTSVSGTTATLLQERASERWIQWLGLESDYHCSSSSTRNAGDVVAGQXHHQKFLRVTRKRPREPKSTNDPLASANFTDRIAAWNNIVECTFRTNNAKLGYLIVDEFHDLETEFYRQSQFGGXTNLDFDAFEKAISLSDTAPEAVADAALQRIGLTRLTKKSMDINELNRS

SEQ ID NO: 267349 - protein, 184 aa, Glycine max
  Clone ID: PAT_MRT3847_83438C.1.pep
ATRELTFPVDERGTMKSVVECFYETYGFVIQHTQWPCLQVGNTQRPNYLPMEVCKIVEGQRYSKRLNERQITALLKVTCQRPVERERDIMQTVHHNAYHEDPYAKEFGIKISEKLAQVEARILPAPWLKYHDTGREKDCLPQVGQWNMMNKKMVNGGTVNNWFCINFSRNVQDSVARGFCYELA

SEQ ID NO: 267350 - protein, 101 aa, Glycine max
  unsure (1)..(101): unsure at all Xaa locations
  Clone ID: PAT_MRT3847_83439C.1.pep
PGTXXEEXXNKXXXEXEKRXXTGXGXEGPKXEKXXXRKXXDKXKTRXXXXXXXEGXXGXXQKGXXXXRGXXKKRDKXXXQGGXNPXXXERTXXAXRXRXKG

SEQ ID NO: 267351 - protein, 94 aa, Glycine max
  Clone ID: PAT_MRT3847_8343C.1.pep
KIITFSDATCIIHELPIFFNIVYEDGIARCRMLAYHGNKLQGAVENDLFLISYANVVAVFFEIRFDFRYRVIGQGCTLSSGNYHRGKSADSIKI

SEQ ID NO: 267352 - protein, 78 aa, Glycine max
  unsure (1)..(78): unsure at all Xaa locations
  Clone ID: PAT_MRT3847_83440C.1.pep
ATAMHVXSIDIIFDSFASPDCNIVGAMLMVDTYHTNPENAVRSIFDAPFRGGRPIRAVTFPNTFVXTEPRLTSRFQLL

SEQ ID NO: 267353 - protein, 144 aa, Glycine max
  unsure (1)..(144): unsure at all Xaa locations
  Clone ID: PAT_MRT3847_83441C.1.pep
LTSSCIPSHICDLVLDSEGNLLDNGGTYYILSDITAFDGIRAAPTGNERCHLTVVXSHNELDKGIVTIISSPYXIRYIAKGHPLSLKFYSXAVMMLCAGISTGVACGEDLPNGLAVNIGENKDAMDGWFIFERGSDDGFNNYIL

SEQ ID NO: 267354 - protein, 70 aa, Glycine max
  Clone ID: PAT_MRT3847_83442C.1.pep
MSLKNNMVVLKVCLLLLFLVGVRAARMELSFFRSDQSAGEEQEYAKPCGDLCMSRRSMPPQCGCEDIRLN

SEQ ID NO: 267355 - protein, 80 aa, Glycine max
  Clone ID: PAT_MRT3847_83443C.1.pep
WKAVASTRFTRERDLESNWEVDLAKKLEEYLLKICSGEIIGEEEGHSHVNFPEAALLLQGSIQVYSREVEYLYTLVLRAV

SEQ ID NO: 267356 - protein, 76 aa, Glycine max
  Clone ID: PAT_MRT3847_83444C.1.pep
MKNFKILETKIFVSIIQGYFEGLSLEYETCFYHVPFSTRALYRGGSLTMFSVRGIIINLKKHSRLFLFICRQKLLL

SEQ ID NO: 267357 - protein, 53 aa, Glycine max
  Clone ID: PAT_MRT3847_83445C.1.pep
GAFLHKLSIVFGKNLQPFYHLTTFSLILTNLSLICIKVLFSDLIRTMLSHLGS

SEQ ID NO: 267358 - protein, 264 aa, Glycine max
  unsure (1)..(264): unsure at all Xaa locations
  Clone ID: PAT_MRT3847_83446C.1.pep
TSNPTRDNLGGVISSPEGKRSMMKLAQRMVTDFCASISTSSGHRWTTLSGLNEIVVRVTVHKSSDPGQPNGVVLSAATTIWLPTPPHTVFNFFKDENKRPQWDVLSNGNAVQEVANIANGLHPGNCISVLRAFNNSQNMLILQESCIDSYGXFVVYCPVDLPSINTAVSGEDPSYIPLLPNGFTILPDGQPDQEGEXGASTSSNTDNRNIVRSGGSLVTIAFQILVSSLPSAKLNMESVTTVNNLIGSTVQQIKSSLSCPTLPS

SEQ ID NO: 267359 - protein, 63 aa, Glycine max
  unsure (1)..(63): unsure at all Xaa locations
  Clone ID: PAT_MRT3847_83447C.1.pep
DXXLASEHIPXXFIXSRCFILXVNXXXXLMDXHHXXFLXSXTHFXXXXEXDLXTXRFHLVANN

SEQ ID NO: 267360 - protein, 84 aa, Glycine max
  Clone ID: PAT_MRT3847_83448C.1.pep
YSRDPCTHLRYLHILVQALLHSSHMYHEAKHAFANHGVKFSSVEVDLPAMMAQKDKAVSNLTKGIEGLFKKNKVNYVKGYGQIC

SEQ ID NO: 267361 - protein, 64 aa, Glycine max
  unsure (1)..(64): unsure at all Xaa locations
  Clone ID: PAT_MRT3847_83449C.1.pep
YVDMEEVEDGRPSKRKXIYSEHKPMSEITSGLHRGIYHQGKLRVNRYNPFEAYVGSESIGDEII

SEQ ID NO: 267362 - protein, 33 aa, Glycine max
  Clone ID: PAT_MRT3847_8344C.1.pep
LIVMFWILGYPDHSFKQAFLPERNICIREISIG

SEQ ID NO: 267363 - protein, 83 aa, Glycine max
  Clone ID: PAT_MRT3847_83450C.1.pep
VAQFPVHLDLHSAYKSNSFLVPETQLYRKNFRLSLNFLSFSLILCSLELQQFYNLYVNLSYSCCRSLTLFYVKLCLLLFFLLI

SEQ ID NO: 267364 - protein, 70 aa, Glycine max
  Clone ID: PAT_MRT3847_83451C.1.pep
VCHSACQSYNLACGASLDCSDQTLFSSDGEGEGQCTGSGEMKLSWFNRLRSSFSLRNSSLKGISVKYRQL

SEQ ID NO: 267365 - protein, 69 aa, Glycine max
  Clone ID: PAT_MRT3847_83452C.1.pep
GRAPSFPFEIPLFFEGFFGPGGGGSSPGRVFPPRKGPPFNINGVRRKFLFQGLGSPVFNSCAGPNGLDP

SEQ ID NO: 267366 - protein, 39 aa, Glycine max
  Clone ID: PAT_MRT3847_83453C.1.pep
KIKILLVHPHSILGGFHTLLKRIASDLTLNGYTAFTFHM

SEQ ID NO: 267367 - protein, 205 aa, Glycine max
  Clone ID: PAT_MRT3847_83454C.1.pep
VSWADAWGEDKLLETIVTSGGVRLQPTRDAIQVFLTEAAKLDALALSHALELKLQSPIWQVRMKAVCVLEAILRKKDDDHFSPVESYFTENKDVVLRCSESPQASLRERAMKVLGLLGGGQPNSSTVNSEKTVKTENATVAELPDLIDTGDSNDYHGTDDTLKGTSDQNIANLTSSTPLVDDLFGDFSASIGASQELKNDDSFAD

SEQ ID NO: 267368 - protein, 196 aa, Glycine max
  Clone ID: PAT_MRT3847_83455C.1.pep
MAGGGAAPQPKQDEHQPHPVKDQLPNVSFCITSPPPWPEAILLGFQHYLVMLGTTVLIPSSLVPQMGGGNEEKAKVIQTLLFVAGINTFFQTFFGTRLPAVIGGSYTFVPTTISIILAGRYSDVVNPQEKFERIMRGTQGALIVASTLQIVLGFSGLWRNVVRFLSPLSAVPLVALSRFGLYELGFPVLAKCVENG

SEQ ID NO: 267369 - protein, 526 aa, Glycine max
  unsure (1)..(526): unsure at all Xaa locations
  Clone ID: PAT_MRT3847_83456C.1.pep
GRIKQGLNSLTQGHSLMKNDPGSYKSPNLRRSLTNETEHGDRYELVAYRNETQGSFGASKSQSTGPWNQDSRVTKVETSNGESSASYVESKTSEDKLLETIVTSGGVRLQPTRDAIQVFLTEAAKLDALALSHALELKLQSPIWQVRMKAVCVLEAILRKKDDDHFSPVESYFTANKDVVLRCFXFPQASLRERAKNNDILEDYGGGQTTGSNVNSPMPAKTENAIEAALPDLKDTGDXNDYHGTDDTLKGTSDQNIANLTSSTPLVDDLFGDFSASMGASQELKNDDPFADVSFHTNENKEHADDLFSGMTVGSNKQGDHESHRQGNITEPQLFDIFASNSEQGNHKEPVSDLMAGLSMDENTSSTKQKGTSPFMQSESLFSGLNNHIPDNTSGGMLSSQPMGFNVNPMFPTGPMPYNIQPGFMLNQPYSSQPLNYSAMGTLLAQQQFLATMANFQHLSNVNMQDDGVAQMAGPNGRSPLPDIFQPNFQTQTPSSMINTSRKEETKAFDFISDHMTSGRDSRRMI

SEQ ID NO: 267370 - protein, 44 aa, Glycine max
  Clone ID: PAT_MRT3847_83457C.1.pep
ARCFRFNRDHKVKKKAKDLGFQITRISPEMYTYKKRASELAYNT

SEQ ID NO: 267371 - protein, 101 aa, Glycine max
  unsure (1)..(101): unsure at all Xaa locations
  Clone ID: PAT_MRT3847_83458C.1.pep
PPCDRRRNTLAGHFLSHMASHDSIYALPTFAYDLDYNHLNRTPDDPILGVTVAYDKDPSPFNLNLXSDAYRTDERKPTVVNVQRPVEQQLINDVSMHREYI

SEQ ID NO: 267372 - protein, 58 aa, Glycine max
  Clone ID: PAT_MRT3847_83459C.1.pep
RNTTLLCKAALNRGPSKLELSSGTVIVKIHIWPNYYSCLPVNTETWGNWAEPGITCSY

SEQ ID NO: 267373 - protein, 92 aa, Glycine max
  Clone ID: PAT_MRT3847_8345C.1.pep
MGFRLPGIRRALFAANQASSKVVEMPKGYLAAYVGEKMRRFVIPVSYLNQPSFQELLNQAEEEFEYDHPMGGLTIPCSEYVFQRITSRLSGQ

SEQ ID NO: 267374 - protein, 70 aa, Glycine max
  Clone ID: PAT_MRT3847_83460C.1.pep
NSARDLGLIKPPLDGEEGLGFSQLLDLSRVPKVYVECSSLFQESREKIPYLEVAPLLSPDVASFCAHPVI

SEQ ID NO: 267375 - protein, 56 aa, Glycine max
  Clone ID: PAT_MRT3847_83461C.1.pep
LASSSLHLCENTILRATHIQFGLFKARMRYNIYNINTLPHSFRFYTTLHLTPPLST

SEQ ID NO: 267376 - protein, 105 aa, Glycine max
  Clone ID: PAT_MRT3847_83462C.1.pep
MGALFPKFWPQIGAFPFLRWAKIKKLGPKGGFFLGKWAHLSTFFLTPNLNPPPFLGTKPKPVFLKNPPPPPPPPPPPPPPPPPPPPPPPPPPPPKQAALHTCSTA

SEQ ID NO: 267377 - protein, 79 aa, Glycine max
  Clone ID: PAT_MRT3847_83463C.1.pep
VQLFLMHYMPFLFLQLSRFFSWQTRIHIAYSAFRASSSFSPKEFLPIGGPTFRLHFSQYLLTVFLVRITANLISFSETF

SEQ ID NO: 267378 - protein, 89 aa, Glycine max
  unsure (1)..(89): unsure at all Xaa locations
  Clone ID: PAT_MRT3847_83464C.1.pep
LYVXXIXASXXXXYXAQXYXQRQRAXTMXVLXIYQSRKHNLXXXXMAKQYKVKTYVSNHYLSCIXQVFXKSGFPNMNTMXNXXXXXXGG

SEQ ID NO: 267379 - protein, 51 aa, Glycine max
  Clone ID: PAT_MRT3847_83465C.1.pep
NNGPPNTLVMFDNPKFCSHTKLHVVNCSAGHRPTNLIRMYRARNSYVTVIA

SEQ ID NO: 267380 - protein, 500 aa, Glycine max
  unsure (1)..(500): unsure at all Xaa locations
  Clone ID: PAT_MRT3847_83466C.1.pep
MFNGMMDPDLMRIAQEQMSRMSPAELARIQQQMMSNPELMRMASESMKNMSSEDFKLAAEQLKHTRPEEMAEIGEKMANASPEEVAAMRSRVDAQIKYQLSAAEMLKKQGNDLHNQGRYNDALKKYILAKENIKEVPSFQSRKLLLACSLTDSCYWKTSNXEITEDVPSGSSSLEQTVVQPKKSGDSSKSYSTANNGNPKTNADSLDALKKDPEAVRSFQNFISNTDPDMLASLNAGQFKDVSPDMIKTTSDMVSKMSPEELQRMLDMASSFQGDNPFFRGGSPDSSFNPGSMPPNVTPDMFKAASDMISKMPADELKRMFEMASSLKGKESTPLAAAVDENERNVSRSNLPSSSTNGTTAFGESSSHNVFSNMRNASQSNFPSSSTDLQEQMRNQMKDPAMRKMFSSMVKNMSPEMMANMGEQFGVKLSPGEAAKAHQAMSSLSPESLDKMMLWADRIQRGVESARKTKNWLLGKPGMIFAIFMLILAVILHRLGFIGG

SEQ ID NO: 267381 - protein, 55 aa, Glycine max
  Clone ID: PAT_MRT3847_83467C.1.pep
SFFFFFFFFFFLFFFLPGPKMPGIIKIRGEVSFNKKGGVHNIPKVFILTIQTHPE

SEQ ID NO: 267382 - protein, 256 aa, Glycine max
  Clone ID: PAT_MRT3847_83468C.1.pep
NSGSRKKYMLAKENIKEVPSFQSRKLLLACSLNLMSCYLKTSQYNECIKEGSEVLAYDAKNLKALYRRGQAYKELGLLKDAVSDLSMALEVSPDDDTITELLRDTKEKLAMEGGEHAPRRIVTEEITEVEDVPSGSSLKQSVVQLKKSGDSSKSYSTANNGIPKTKTDSLDALKKDPEAVRSFQNFISNTDPATLASLNAGQFKDVSPDMIKTTSDMVSKMSPEELQRMLDMASSFQGDNPIFRGDPLILLSTLDQ

SEQ ID NO: 267383 - protein, 101 aa, Glycine max
  unsure (1)..(101): unsure at all Xaa locations
  Clone ID: PAT_MRT3847_83469C.1.pep
FKGNLVEWISELPTNPKPHDPIYESLFKKDVDSELFQFLKVACNCFSPTPKERPPIFXVYQLLKAIGGRSNFPPEDDILVPPDIGNTDNMQELFLAQKGSY

SEQ ID NO: 267384 - protein, 34 aa, Glycine max
  Clone ID: PAT_MRT3847_8346C.1.pep
KVSSNGRAIKRNLIKCQKVYYGIGFKFFGGFTKL

SEQ ID NO: 267385 - protein, 58 aa, Glycine max
  Clone ID: PAT_MRT3847_83470C.1.pep
RLIREIHFGLLATVHPRTSIVTSGRYLSIAERSEAILEPPLMGRESQQDTFPMAADGF

SEQ ID NO: 267386 - protein, 64 aa, Glycine max
  Clone ID: PAT_MRT3847_83471C.1.pep
CGCDRDHPLSSSRSCPGLHCRCLFQLHGTIIVFFAPHPAPVSVLTLNNETGCVGARVGRPRSSG

SEQ ID NO: 267387 - protein, 68 aa, Glycine max
  Clone ID: PAT_MRT3847_83472C.1.pep
PTTRPPNLLTWVHKLFFHYKNRAACHFLADEDGDIIILCVALIDMCGSQSVDFSFTEYVMSICTMKSF

SEQ ID NO: 267388 - protein, 121 aa, Glycine max
  unsure (1)..(121): unsure at all Xaa locations
  Clone ID: PAT_MRT3847_83473C.1.pep
EDVKTKIQMRLXGAFKRERAMAYSVAHKQCRSTPSSNSRTNASFSSLKSHEMNKANGGWSWLERWMAAKPWESRLMEQSQSQAEALNKTQLQRSLGNPWGALIPTHARQSQEKQRDNKGFC

SEQ ID NO: 267389 - protein, 52 aa, Glycine max
  Clone ID: PAT_MRT3847_83474C.1.pep
FSDLTQVNPNPAFSRQHRTFSFFSPQQDLSRRRRQGLNNLPKTNDFPSYTWD

SEQ ID NO: 267390 - protein, 79 aa, Glycine max
  Clone ID: PAT_MRT3847_83475C.1.pep
EAYIVSRCIVTNSKSLHLQRKYNGPQTASSIKCPQQILCPPMLLMNRDHHLLLMPGVICTNMTKIMPVHPLCIIVVSGV

SEQ ID NO: 267391 - protein, 36 aa, Glycine max
  Clone ID: PAT_MRT3847_83476C.1.pep
SQGLCFLFGMFNDRFKKLYIFFEGSRLYSLILCIEY

SEQ ID NO: 267392 - protein, 68 aa, Glycine max
  Clone ID: PAT_MRT3847_83477C.1.pep
IDFSIHSRDLKLLIPRGRKGPWKFIYRIWGGSRVQCCILNQENTYFCGKLGNINYTIQKNLPDHPNQR

SEQ ID NO: 267393 - protein, 72 aa, Glycine max
  unsure (1)..(72): unsure at all Xaa locations
  Clone ID: PAT_MRT3847_83478C.1.pep
THAXGPSXLXXRKLSSLQSAPPRCGGPLLLGSTHSYATSTASRTTQDSWNEYLPNTNLNGHEHKAHIRFPHH

SEQ ID NO: 267394 - protein, 72 aa, Glycine max
  Clone ID: PAT_MRT3847_83479C.1.pep
CEAKVTHFKCYPLLSNCYSVHIILDLHFLLLALVQFAILDLTLFISYSVEYLIIFLLLLYVNFFKIWFQPLC

SEQ ID NO: 267395 - protein, 84 aa, Glycine max
  Clone ID: PAT_MRT3847_8347C.1.pep
SFIRPFVPGRFLHTKNVGRIATKWTRYTKPMRERFLPFNPGRYPLLYTPLGRPKSSSRLISCYHLAYLVLLYPVVSHEPVHARK

SEQ ID NO: 267396 - protein, 56 aa, Glycine max
  Clone ID: PAT_MRT3847_83480C.1.pep
SVSKKCLWLHYLYNLFVRQRGVWDKIINMIERKKIILESIIKYTKYISKKKMDSLA

SEQ ID NO: 267397 - protein, 33 aa, Glycine max
  Clone ID: PAT_MRT3847_83481C.1.pep
LVGIQYRSNTSGYQEISPPCVLGVLVRVTDAFT

SEQ ID NO: 267398 - protein, 73 aa, Glycine max
  Clone ID: PAT_MRT3847_83482C.1.pep
EFELFTRGSSRVDLQFLSFLATKNRTIILSYIAKANYVEFIKISSLSLSVEDYEIFHFNKIPTIQFSLSTEKL

SEQ ID NO: 267399 - protein, 233 aa, Glycine max
  Clone ID: PAT_MRT3847_83483C.1.pep
MMFMYSIVFCENLIYLSNNFCNHCAGNYRGSSDLKANHAIRQYVDIVSEKQKYDKLVKLLEDIMDGSRILIFMDTKKGCDQITRQLRMDGWPALSIHGDKSQAERDWVLSEFKSGKSPIMTATDVAARGLGAKAFALFNYFFAYVYLNPFYYLITVFPGSLEDYVHRIVRIGRAGAKGTAYTYFTAANARFAKELIAILEEAGQKVSPELAAMGSGAPPPLDGSLLLSSFWMD

SEQ ID NO: 267400 - protein, 183 aa, Glycine max
  Clone ID: PAT_MRT3847_83484C.1.pep
ILVYLMLLTRKVVSPSTLLPVVTFGSPFVLCGGQKLLNELGLDESYIQCVIMHRDIVPRIFSCSFPNHVITVLKRLNGSFVSHPCLVKNKLLYSPLGKIFILQPDEKTSPPHPLLPLGSGFYAVDSSRCGYSPNVLRAFFNQPHPIETLSNPKAYGSDGTVLRDHDCNNYLKAVNGVFGQHSK

SEQ ID NO: 267401 - protein, 46 aa, Glycine max
  Clone ID: PAT_MRT3847_83485C.1.pep
ILSKASSLCILVRFYTRQPLDLASCAAYAFCLFTQDVSHWHCHCEK

SEQ ID NO: 267402 - protein, 79 aa, Glycine max
  Clone ID: PAT_MRT3847_83486C.1.pep
MIEPAVKGSSNVRETRHGAPERRQVFVSQKAAIWNGPILATDKVIDECYWSDKDYCTTTHNWDCFSTTEALEQALDFAT

SEQ ID NO: 267403 - protein, 45 aa, Glycine max
  Clone ID: PAT_MRT3847_83487C.1.pep
PCGSTMPFVTISSIYNIDSLQEVASPQAAPYHIRSVLFASLVMPV

SEQ ID NO: 267404 - protein, 37 aa, Glycine max
  unsure (1)..(37): unsure at all Xaa locations
  Clone ID: PAT_MRT3847_83488C.1.pep
NTRRPDQCXIAMKKNQLKGDKSATWHNKRAINEKVKS

SEQ ID NO: 267405 - protein, 63 aa, Glycine max
  Clone ID: PAT_MRT3847_83489C.1.pep
IRVRQKILGSGGIHIHPSHKSISIYRFKSPRYVAFPPNPRVTIKANIEGPVVTLDLQPCSCFG

SEQ ID NO: 267406 - protein, 67 aa, Glycine max
  Clone ID: PAT_MRT3847_8348C.1.pep
GRMCGVYEFVIIAFALSPYATPSGGGLSTSAFLWRSWQYQFPLYYNRTPRLWLFTHTEFVKIHSSSK

SEQ ID NO: 267407 - protein, 150 aa, Glycine max
  Clone ID: PAT_MRT3847_83490C.1.pep
GRPQFAPYNAAPTAQQYGCNQPYPPPPVVYNHPRQQSNSYERNDYQHARSNHYERNHHQGSGGSSRHGYQSSGNNHNARFNNSHGSYGSHHHEVSHHNQNFQPSRAHQNWTPPNNPSGHRDYGHHSSNQYSLLDRRGNRNPMPPPGYSRK

SEQ ID NO: 267408 - protein, 84 aa, Glycine max
  Clone ID: PAT_MRT3847_83491C.1.pep
FGSRRLREATEGTYKVKFAFTRFFQMLIQLPRKRINNGENMIVFAIHTGVYGENMVIMVLLHCSRCYCIVLISHYCQYCIVHTS

SEQ ID NO: 267409 - protein, 90 aa, Glycine max
  unsure (1)..(90): unsure at all Xaa locations
  Clone ID: PAT_MRT3847_83492C.1.pep
ISNWALLHVAYEPIGAIGPRXVSTPAHAHEGHADLRKWAHDNVSAVAXDXRMIYRGCCDGRNLQXLARQADVDETLVGGASLKAESVGII

SEQ ID NO: 267410 - protein, 65 aa, Glycine max
  Clone ID: PAT_MRT3847_83493C.1.pep
LGFVVKAAIWSKKELILVLRKEWMEFLLVFKAVWLWVKNAWPLKKRFTTSFQPRKSYLLNLVVKQ

SEQ ID NO: 267411 - protein, 123 aa, Glycine max
  Clone ID: PAT_MRT3847_83494C.1.pep
FGSSSLEGNLASDTFAISGSGQPGIIFGSMDSGFSSNANEDSKTTGLMGMNRGSLSFVTQMGFPKFSYCISGKDASGVLLFGDATFKWLGPLKYTPLVKMNTPLPYFDRVAYTARIMGIRVRS

SEQ ID NO: 267412 - protein, 238 aa, Glycine max
  unsure (1)..(238): unsure at all Xaa locations
  Clone ID: PAT_MRT3847_83495C.1.pep
PRVRLLDGCDFEHWLVVMEKPEGDPTRDDIIDSYIKTLAKVIGSEEEARMKIYSVSTRHYFAFGALVSEELSIKLKELPGVRWVLPDSYLNVKEKDYGGEPFINGQAVPYDPKYHEEWVRNNARANERNRRNDRPRNADRSRNFERRRENVVNRDMQGRPPMPNPGPNMGGPPPNNAGYAPPNAGGGYPPNTGGGYGPGGGVPXXNYAGNMGGPPPNQDMGGFQPNAGWSNNAPSRDV

SEQ ID NO: 267413 - protein, 363 aa, Glycine max
  Clone ID: PAT_MRT3847_83496C.1.pep
MATQILSRIFPKTLTLAPFLFRSLTTAPSRPSLPALSFLRRISVAANPSLRRVLLPNAPSLRALSTRATTSSLNDPNPNWSNRPPKETILLDGCDFEHWLVVMEKPEGDPTRDDIIDSYIKTLAKVIGSEEEARMKIYSVSTRHYFAFGALVSEELSIKLKELPGVRWVLPDSYLNVKEKDYGGEPFINGQAVPYDPKYHEEWVRNNARANERNRRNDRPRNADRSRNFERRRENVVNRDMQGRPPMPNPGPNMGGPPPSNAGGYPPNNAGGYPPNNAGGYPPNNAGYAPPNAGGGYPPNTGGGYGPGGGVPQNNYAGNMGGPPPNQNMGGFQPNAGWSNNAPSRDVPSRDMGGPPGGNPYSA

SEQ ID NO: 267414 - protein, 106 aa, Glycine max
  unsure (1)..(106): unsure at all Xaa locations
  Clone ID: PAT_MRT3847_83497C.1.pep
LPRSQTTRPWHLGQVLAEYAGEFYPTVKFMRVVCPQYTRFCITRQXREYPSIQIFHSPTQAASQGXVADPNITKCYVKVLPFKSMLVLTGCREFFXRHGIRASDPK

SEQ ID NO: 267415 - protein, 238 aa, Glycine max
  unsure (1)..(238): unsure at all Xaa locations
  Clone ID: PAT_MRT3847_83498C.1.pep
MATQILSRIFPKTLTLAPFLFRSLTTAPSRPSLPALSFLRRISVAANPSLRRVLLPNAPSLRALSTRATTSSLNDPNPNWSNRPPKETILLDGCDFEHWLVVMEKPEGDPTRDDIIDSYIKTLAKVIGSEEEARMKIYSVSTRHYFAFGALVSEELSIKLKGICGFQPXGYCLCSVLVFFFLNSSFWFFGIAELPGVRWVLPDSYLNVKEKDYGGEPFINGQAVPYDPKYHEEWVRNN

SEQ ID NO: 267416 - protein, 77 aa, Glycine max
  Clone ID: PAT_MRT3847_83499C.1.pep
TAHHSCLLTTPIHPFQIPISFSNHSFFLQSPIYLSLFISFYLLNTFICLNLSKSNPPIHQYHHQNRYSTLSYYKPSI

SEQ ID NO: 267417 - protein, 58 aa, Glycine max
  Clone ID: PAT_MRT3847_8349C.1.pep
RIVFFLPSSRDIQVDPFGHEWYKGRHVVSIKGRLRQTGAKSSFVVFFVRVKWGNFGLN

SEQ ID NO: 267418 - protein, 37 aa, Glycine max
  Clone ID: PAT_MRT3847_834C.1.pep
SHQTLKWYIACIIPPTLIPCLKTRCSAISLLDLYQYY

SEQ ID NO: 267419 - protein, 401 aa, Glycine max
  unsure (1)..(401): unsure at all Xaa locations
  Clone ID: PAT_MRT3847_83500C.1.pep
MATQILSRIFPKTLAPFLSRSLSTAPSPPSLSALSFLRRISVAGNPSLHRALLPNSTSLRALSTRATTCSLNDPTPNWSNRPPKETILLDGCDFEHWLVVMEKPEGDPPRXHIIDSYIKTLAKVIGSEEEARMKIYSVSTRHYFAFGALVSEELSYKIKELPGVRWVLPDSYLNVKEKDYGGEPFINGQAAPYDPKYHEEWVRNNARANERNRRNDRPRNADRSRNFERRRENVVNRDMQGRPPSPNPGPNVGGPPPSNAAGYPPSNAAGYPPSNAGYAPPSNTGGYPPSNAGYAPPSNAGGYPPSNAGYAPPSNAGYAPPNTAGYSSPNAAGGYPPNAGGGYGPGGGVPQNNYAGNMGGPPSNQNMGGFQHNSGWSNNAPSRDVPSRDMGGPPGGNPYSG

SEQ ID NO: 267420 - protein, 56 aa, Glycine max
  Clone ID: PAT_MRT3847_83501C.1.pep
ISVSMIQVFKIDFKFKYIFPDQIYIKNLNLIFKSEFPLILKKTTYFYKLFLKNLKN

SEQ ID NO: 267421 - protein, 66 aa, Glycine max
  Clone ID: PAT_MRT3847_83502C.1.pep
MAPPLFKNFLKTFNPLILTFPIPGGGQMIIKGIGLLKLGRNRVFWGAHFLFLPFPFWGAHWDYFRG

SEQ ID NO: 267422 - protein, 76 aa, Glycine max
  Clone ID: PAT_MRT3847_83503C.1.pep
YLPIPSLLGLHQLLNGNESIEVVQKISPTLAIMAKLLDGWRINSCSPFMDCRHCKATYVRPSTKRSKYFIGSTNIK

SEQ ID NO: 267423 - protein, 37 aa, Glycine max
  Clone ID: PAT_MRT3847_83504C.1.pep
HSQCCREYDFSSCSQCYTTEFYDGHTLALAPSLGLSA

SEQ ID NO: 267424 - protein, 135 aa, Glycine max
  unsure (1)..(135): unsure at all Xaa locations
  Clone ID: PAT_MRT3847_83505C.1.pep
MTIALILSXPGRGNSENNDVENGDDNFITNKRKNANTLHKFEGGTLIVCPMALLSQWKDELETHSKEGSISIFVHYGGARTTDPWMISGHDVVLTTYGVLQAAYKNDGENSIYNKVKWYRVVLDEAHNIKAHRNQ

SEQ ID NO: 267425 - protein, 126 aa, Glycine max
  unsure (1)..(126): unsure at all Xaa locations
  Clone ID: PAT_MRT3847_83506C.1.pep
SFKLPVFVETFSNEFVSQAWDYYSDPSIEINSFVIGTXVNGIITDFPKTANRYRRNLCLKHVNEAPYMSPIEPGKLFKQISNLYLPPLPPPLPILTDSNVTEAPLPGVSGRVPTPGVGVAPAPITA

SEQ ID NO: 267426 - protein, 144 aa, Glycine max
  Clone ID: PAT_MRT3847_83507C.1.pep
RIEVSRSVRPPRLTSQNRLAQASRLVQEATLEDSCLEQVRILRLDTWPLDQVGHALSTSVALSAQENSNLVNQLMKYIKRKETFEYFSMKEDINKQRNKNREENKEASVQGKSVSRALANPFLFHYLAFHFTFYSCKSLMTMRD

SEQ ID NO: 267427 - protein, 63 aa, Glycine max
  Clone ID: PAT_MRT3847_83508C.1.pep
SGFRLCPLLTRAFVKETLCNSRARTSPNQNVPPSLCLSRGGIALKSPSGPPCPRKRGRPRGST

SEQ ID NO: 267428 - protein, 180 aa, Glycine max
  unsure (1)..(180): unsure at all Xaa locations
  Clone ID: PAT_MRT3847_83509C.1.pep
LEAIKKDLEYLVLGSTQLEKNDKLLMDFHKRFHLIYFLHQIHSDAEDEIVFPAMEARGKLKNISHAYTFDHKHEVDHFNKISHILDKMSGLHLSVSTIDPNVKEKGILRYHHLCRKLQEMCKSMHKSLSDHXNREEIEIWPIIRKFFSNHEQGRIIGCMLGRIRAEILQDMIPWLMASLT

SEQ ID NO: 267429 - protein, 74 aa, Glycine max
  unsure (1)..(74): unsure at all Xaa locations
  Clone ID: PAT_MRT3847_8350C.1.pep
RMHAYVSSEFGSSTXCEKTTEGEGVEREKKKNRXXQXLQXXXKXXMXXXHRLRXFGXMPKIPFLLXXSLLLFSX

SEQ ID NO: 267430 - protein, 100 aa, Glycine max
  Clone ID: PAT_MRT3847_83510C.1.pep
QNLVGLIYLPLCVIRSLDSIAIWRGKWLLFLVKRLRDEPNVSGVEPYCVYWDEPSPDAALTLTNHARMVVRLMTPLALKNPCGAFLNYADQDMEVSSHWC

SEQ ID NO: 267431 - protein, 62 aa, Glycine max
  Clone ID: PAT_MRT3847_83511C.1.pep
LLNTSPPSTNNKQITNYYGERPHTTKGNNIPIPEQCYLTKGSPPNKNNPSGVIITPFKKIHL

SEQ ID NO: 267432 - protein, 222 aa, Glycine max
  Clone ID: PAT_MRT3847_83512C.1.pep
MCNTLKFNPFKNRLLIMFMLVLSLPFNVQSQAKDSEEQNLAELPQTVHPSKGIVIAVLSTMFAITLLLLLYVKFCRTIPHELLRQNSNLQNFQGLTRSRSRVSGIDKQVVETLPFFKFSSLKGSKEGLECTVCLSKFEDTETLRLLPKCKHAFHMNCIDKWFESHSTCPLCRRRVEAGDIKNLNFSLSSRFLRVPSNLTEDPNLEIFVHREPSHGGSASIQR

SEQ ID NO: 267433 - protein, 66 aa, Glycine max
  unsure (1)..(66): unsure at all Xaa locations
  Clone ID: PAT_MRT3847_83513C.1.pep
ILVVKTGDWITLMQNSPISDLLRVAAWKKGCLMVKNEMCXMYQSKRGLGSDLGQVFLTNTNTAVHM

SEQ ID NO: 267434 - protein, 48 aa, Glycine max
  Clone ID: PAT_MRT3847_83514C.1.pep
MSAQLRVSMVACRGEPSVQSQGGSRGGQRLCANGGLACLRAVVAVFKR

SEQ ID NO: 267435 - protein, 157 aa, Glycine max
  Clone ID: PAT_MRT3847_83515C.1.pep
RLREDDRRGGKERRGRGVSCSFSSFHCFFSFPDIKPNTSYASLSFLPRASCGCGIIVSSYVRSKPLSCVCSSPFRQENQMHRGKFSLTPKNEVKDLTGSSLTSYKHSSLLDPIDVSSSSDDENDLPNDDVSNQLVLYDPVANGNNAIELAPDPLQCE

SEQ ID NO: 267436 - protein, 40 aa, Glycine max
  Clone ID: PAT_MRT3847_83516C.1.pep
PSRLTRSTHTSLQKTTHVDPSRIYSLNRDSLRFNHYDALP

SEQ ID NO: 267437 - protein, 60 aa, Glycine max
  Clone ID: PAT_MRT3847_83517C.1.pep
PRVGPSVIDMYTRYLSGDRLHCVLDVVIGLSFTLTLFTIASRNGAQDDGDGYSGIFLSVV

SEQ ID NO: 267438 - protein, 73 aa, Glycine max
  Clone ID: PAT_MRT3847_83518C.1.pep
TRPGNKERSHTAGWPAATIPSLPITTNLPPPPPTANLAGNPIPPPAIPQPIPNQNHLPPLAPNPKLTRTLTLA

SEQ ID NO: 267439 - protein, 47 aa, Glycine max
  Clone ID: PAT_MRT3847_83519C.1.pep
SVRAPTHKSFLIIHFTIIRLISLTVKSYIFKFQSYIQIINFITLLHT

SEQ ID NO: 267440 - protein, 117 aa, Glycine max
  Clone ID: PAT_MRT3847_8351C.1.pep
APEYSMSGQITQKSDVYSFGVVLLELLTGRKPVVHTMPKGHQSLVTWATPRLSEDKVKQCVDPKLNNEYPPKAIAKLAAVAALCVQYEADFRPNMTIVVKALQPLLNSKPASVDPDT

SEQ ID NO: 267441 - protein, 122 aa, Glycine max
  unsure (1)..(122): unsure at all Xaa locations
  Clone ID: PAT_MRT3847_83520C.1.pep
KKLIKFGRKNGRIVTVFFLFSKGATRGPNEVMQNXDVLKEITKAHGVSKALVSLKLXRGQGVNFEPDSCFKNRVTHHVHIGDWCVXPQDPHIISQISQSRLNIEPTKPEMDDLWDGQRLGFK

SEQ ID NO: 267442 - protein, 93 aa, Glycine max
  Clone ID: PAT_MRT3847_83521C.1.pep
SPLPLTPSALPPYSLLTRPLTLPQPTSSPHFSTHTHSYTLHTSSTLSRTSHCSGSPHAHAQFYINLGVGPSTVVDHEHLDLAHMSDHSSTLNR

SEQ ID NO: 267443 - protein, 95 aa, Glycine max
  unsure (1)..(95): unsure at all Xaa locations
  Clone ID: PAT_MRT3847_83522C.1.pep
CASPPIHITELHLSDSWNQLQLILHLNLLLQLLILKNNTQPKCLDNLAMHMIRNCRHPPGEYHPRTDLCNSHRPSXLEHNRTPRPKMLACQLLLA

SEQ ID NO: 267444 - protein, 62 aa, Glycine max
  Clone ID: PAT_MRT3847_83523C.1.pep
ESQWSLSYIIGTNEAQHTNKIIYVMHSVPQSEMFFFLSSLNKFRLNYYFFLINYIAIGSSYR

SEQ ID NO: 267445 - protein, 40 aa, Glycine max
  Clone ID: PAT_MRT3847_83524C.1.pep
PLNVITISLFHLYKLVNFIYFKYFMQYIILFCTKAFKQNF

SEQ ID NO: 267446 - protein, 154 aa, Glycine max
  Clone ID: PAT_MRT3847_83525C.1.pep
LHSPSSVTFSNLKELFIFNCQRLKYLFTSSAAKKLSQLEEIIVYYCKSIKEIVAKEEDETALGDVILPQLHRISLADLSSLECFYSGNQTLQLPSLIKVHIDKCPKMEIFSQGSIGPNSCREIVTRVDPNNRSVVFDDELNSSVKKVFLHQNHI

SEQ ID NO: 267447 - protein, 94 aa, Glycine max
  Clone ID: PAT_MRT3847_83526C.1.pep
TQQQLERMNQREILSKRHLEEASKRCKKKRERNRKLKKMASLPYILECLRVSKSFEPEKGRHGMEREKKTNDQRLTKKWEEKIIGIKTERDDAR

SEQ ID NO: 267448 - protein, 66 aa, Glycine max
  Clone ID: PAT_MRT3847_83527C.1.pep
VRDTWKRLQNAAKKKRERSRELKKMASLPYILECLRVSKSFEPEIARHGMEREKKTIDQRLTKKWK

SEQ ID NO: 267449 - protein, 140 aa, Glycine max
  unsure (1)..(140): unsure at all Xaa locations
  Clone ID: PAT_MRT3847_8352C.1.pep
NTSCISRVSDANLVNDSRQRNEERIIMHVERDSCSHVPEKLSECFIENSSSSLTKEREPVVSGKKYIAVKDGLIESTSKISLKVCPKSEADTDVCDANNEDPKCAVQDGQCEKAEELVKSPGKQEPQSEDESDEXRCCGH

SEQ ID NO: 267450 - protein, 52 aa, Glycine max
  unsure (1)..(52): unsure at all Xaa locations
  Clone ID: PAT_MRT3847_83530C.1.pep
AHEXGFSTXXVTRSQLPVLHHLILVSLPEXVDALRLNIIHAKALHENADFRS

SEQ ID NO: 267451 - protein, 59 aa, Glycine max
  Clone ID: PAT_MRT3847_83531C.1.pep
IVQYVRHIVITSLSMWSSMPTKARQRHSGPRMVSNKPPYNPHHTLTRSVCVCITLNCLF

SEQ ID NO: 267452 - protein, 162 aa, Glycine max
  Clone ID: PAT_MRT3847_83532C.1.pep
RLVPLRFWGTMIACILAAIQAAIIGAFLDSSKASWRLEWDLQLITIVYSGALATAASFCFLSWAIKIKGPSYPPMFNPLALIFVALSEASVPAHPIAVGTLVGMVLIIMGLYFFLWGKNNDTQRLPQPNGLTSMPDTSIVAPSSSPTDTSVLLQIDKTCNKN

SEQ ID NO: 267453 - protein, 387 aa, Glycine max
  unsure (1)..(387): unsure at all Xaa locations
  Clone ID: PAT_MRT3847_83533C.1.pep
MEEEKSRLLLMPSPLQGHITPFLHLGDILYSKGFSITILHTIFKSPDPSSYPHFTLSETEASKLDRCRAPHRPHQHXIKGSSKGTLQSIVLRTGGASSFLVFASFPLLREKGYLPVQEPLVYLPPLKVKDLPKFQSQDPEECKASSGVIWNTFKELESSVYVSFGSIAAISKTEFLEIAWGLANSKQLFLWLTDVYVSFGSIAAISEAEFLEIAWGLANSKQPFLWVIRPGLIHGSEWFEPLPSGFLENLGGRGYIVKWAPQEQVLSHPAVGAFWTHNGWNSTLESICEGVPMICMPCFADQKVNAKYASSVWRVGVQLQNKLDRGEVEKTIKTLMVGDEGNEIRENALNLKEKVNVSLKQGGSSYCFLDRLVSDILSLKSATSRVH

SEQ ID NO: 267454 - protein, 184 aa, Glycine max
  unsure (1)..(184): unsure at all Xaa locations
  Clone ID: PAT_MRT3847_83534C.1.pep
MLSALTPSDPFSPFSPFSAGFTPWDDNDDSHALFSPKPVSASSSASDYKSEPNPTEHVCASSSVMMDERKRRRMISNRESARRSRMRKQRHLENLRNQLNKCRVENRELGNRLQFFLHHLNRLRTENEWLRSERTLLRQXVAIXTXXLIFQPIQTTFSLLHDHMHQQQHTLMTNPVYIYIYIIY

SEQ ID NO: 267455 - protein, 66 aa, Glycine max
  Clone ID: PAT_MRT3847_83535C.1.pep
HFIQVQLYLRVKESRFFLCKVYRYIFRPTSVVMFLALFFFSLFLVYNVPTKDKIYDVMHIIQTYLH

SEQ ID NO: 267456 - protein, 131 aa, Glycine max
  Clone ID: PAT_MRT3847_83536C.1.pep
RTIDRKQEVPHDGAMCDLLWSDPEDIVDNWGLSPRGAGYLFGGSVVTSFNHSNNIDYICRAHQLVMEGYKWMFNNQIVTVWSAPNYCYRCGNVAAILELDGNLNKQFRVFEAAPQESRGTPAKKPAPDYFL

SEQ ID NO: 267457 - protein, 115 aa, Glycine max
  unsure (1)..(115): unsure at all Xaa locations
  Clone ID: PAT_MRT3847_83537C.1.pep
INYEASPHTLLHLGEIQEKVVLKFSQDEFLTALPTHARAATTLXADGCSYXYALAHDSSVSTIPGDFAICVTLATINTMCASGLNHHIPSSHLXAPFPNXISQHTVSNQTATHRT

SEQ ID NO: 267458 - protein, 187 aa, Glycine max
  unsure (1)..(187): unsure at all Xaa locations
  Clone ID: PAT_MRT3847_83538C.1.pep
MGAGVSTTDTEKDDGGTFSLSSETRLDDIPENCISSMFMNLDPPEICXLARVNRAFHXSFLKSDFVWESKXLPQSYKFLANKVLGEENIASMTKKEIYAKLXQPNRFDGGTKEVWLDKCSGQVCLFMSSKSLKITGIDDRRYWNYIPTEESRFQSGILTKGMNRYFNSMFLLTWHLKLSLFCLILFL

SEQ ID NO: 267459 - protein, 81 aa, Glycine max
  Clone ID: PAT_MRT3847_83539C.1.pep
KKPEQQTLRTGNGLLTRHGRVKKKQEGICPLTPGEQGFNNGTFFFEKTMTHGEHAFGKGTFYFGNMPTYGGQTPLGGPFFF

SEQ ID NO: 267460 - protein, 47 aa, Glycine max
  Clone ID: PAT_MRT3847_8353C.1.pep
LACTPSLTPDSARAFSFRPFQIKTWFNFSSSQKNGPPEVQGWEALPG

SEQ ID NO: 267461 - protein, 90 aa, Glycine max
  Clone ID: PAT_MRT3847_83540C.1.pep
QARGGFFFFRQRGPLPFRGILFLPRALIFLPPVPICSPLFLWDVRLGFLEANPLFSFFYGGVILPRSVLSLRSSPFSPIGFCGSKAPLRI

SEQ ID NO: 267462 - protein, 135 aa, Glycine max
  unsure (1)..(135): unsure at all Xaa locations
  Clone ID: PAT_MRT3847_83541C.1.pep
TIPFMRNLDRMIELLMECKXPLTEANMKALCDQATAILVEERNVQXLKCPITIXCDIHGQFYNLIXLFWIGRNATDTNYLFMVHYCRSXGYYSMETVTLWVGLIARYRDINTILMRNHESRQNTQVYXGFYYECL

SEQ ID NO: 267463 - protein, 55 aa, Glycine max
  Clone ID: PAT_MRT3847_83542C.1.pep
TISSPLRSFFLFIIKTRIILVYKPMLIPLFIFSSNTSATTLSLSLSLSLSLQFSR

SEQ ID NO: 267464 - protein, 72 aa, Glycine max
  unsure (1)..(72): unsure at all Xaa locations
  Clone ID: PAT_MRT3847_83543C.1.pep
ATTTXSXXSAMXNLSSXVHHQLLXATTSSSYSYXXTPFLXRXELQXXAXLIGITXXCNYHSSXSXXFXXERX

SEQ ID NO: 267465 - protein, 170 aa, Glycine max
  Clone ID: PAT_MRT3847_83544C.1.pep
MEDAAASANAAEDRENKFLTMAIEEAYKAVESGHGRPFGAVIVRNDEILSSCHNMVVRNADPTAHAEITAIREACRKLNQVELADSEIYASCEPCPMCLSAIHFSKIKKLVYGAKAEAAVAIGFESIIADALKDTGFYEKLNLEVKKAEGSVAVMAEQVFEKTKDKFIIP

SEQ ID NO: 267466 - protein, 58 aa, Glycine max
  Clone ID: PAT_MRT3847_83545C.1.pep
DAQMHPSTLALFFTTHLESPMNLQILIKTKSSLISIKQMNFIVNHPPIEHLPYLHAPS

SEQ ID NO: 267467 - protein, 213 aa, Glycine max
  Clone ID: PAT_MRT3847_83546C.1.pep
MEPESGTSTSRNPSQLSWVNLSRNLLLAYQSFGVVYGDLSTSPLYVFTSTFKGKLQNHHDEETIFGTFSLIFWTLTLIPLLKYVFILLSADDNGEGGTFALYSLLCRHAKFNLLPNQQAADEELSSYKYGPSSQAIASSPLKRFLEKHKRLRTALLVVVLFGACMVIGDGVLTPAFSVLASVSGLKVTEKKLTDGELVLLACVILVGLFALHI

SEQ ID NO: 267468 - protein, 34 aa, Glycine max
  Clone ID: PAT_MRT3847_83547C.1.pep
HNHHVVMLSQGHFSHSDQTNAHAKHVNHHGFVVS

SEQ ID NO: 267469 - protein, 66 aa, Glycine max
  Clone ID: PAT_MRT3847_83548C.1.pep
TFTHVWAQLECLKQHLRGKKHNLQTYTKDVLMEETKLIPRGRENIIHVLLVLRCSITLPDAPHVYS

SEQ ID NO: 267470 - protein, 102 aa, Glycine max
  Clone ID: PAT_MRT3847_83549C.1.pep
FNLIIGGVAHILRRFSPFAVFLLFPLDGLGSSNIAQVYVRTGGVMISLALGNMVLDFFVRAHAIKLVRWGLTCPLSSSNINLFVVFSGGGIIKGGKLTAALR

SEQ ID NO: 267471 - protein, 150 aa, Glycine max
  Clone ID: PAT_MRT3847_8354C.1.pep
ILFPKPWKEFRLWYDENKAKGNKPFLEGMVTTGWYKKMGERIWTPWFIKFIQSRGYFNIYTNLLHERALSVSHRDAGVNYGKTAGPDSKLLEEKSLDFNILEVQPLRSLRWYDFCFREVHSGKGATNLEELGSLVYSLQKQDSVFLVNLF

SEQ ID NO: 267472 - protein, 94 aa, Glycine max
  Clone ID: PAT_MRT3847_83550C.1.pep
KGTLIKLSSPYLFGNILGSLDTLLARIQKPLYLPHPMSYKNRIPVPSVPAVLAWPLNSSFKTFIATPHPWGTPPTLLNHSCSPNHFGGRHPLDL

SEQ ID NO: 267473 - protein, 197 aa, Glycine max
  Clone ID: PAT_MRT3847_83551C.1.pep
MASAMVNRGGSRIIKSVSAALGTRFYAKVATGTDIVSAAPNVSLQKARTWDEGLASKFSTTPLKDIFKDKKVVIFGLPGAYTGVCSNKHVPPYKENIDKFKAKGIDSVICVAINDPYTMNAWAEKLQAKDAIEFYGDFDGSFHKSLELVTDLSGALLGTRSERWSAYVVDGKVKALNVEEAPSDVKVSGADTILGQI

SEQ ID NO: 267474 - protein, 82 aa, Glycine max
  Clone ID: PAT_MRT3847_83552C.1.pep
SSETMMTSSSLFFSSAPLFLNPHPPRSFLPFRPLIALFNPSLLLRPPSKYSNNPFLTRADDDDGDGGGPDHYEMDEDEMEEL

SEQ ID NO: 267475 - protein, 71 aa, Glycine max
  Clone ID: PAT_MRT3847_83553C.1.pep
LCPWTAVMVVVRVVHWCAMWGKLAMYDPRLGDRYIALLKLPTGCVSHDHEESALGEGSDALLRSGQNNNLG

SEQ ID NO: 267476 - protein, 63 aa, Glycine max
  Clone ID: PAT_MRT3847_83554C.1.pep
PVPLPCLLRVQGRGKTIEIERKTIVLLIYLSVIHFVITKVILCIFIHITLMVINIIMKAELCT

SEQ ID NO: 267477 - protein, 73 aa, Glycine max
  Clone ID: PAT_MRT3847_83555C.1.pep
PAQVTGQLSTQPTLSIPCINTCHHQRSQLFPIGYSTLHLPQSNPPTSTQTTTLDATNETGPCSQFPSRTVRSG

SEQ ID NO: 267478 - protein, 58 aa, Glycine max
  Clone ID: PAT_MRT3847_83556C.1.pep
PSSSSSSSNAVPMAKFGKKSLLSYGSSCNDFKGDCEGVGGASSPSSKLCFSIPRATCS

SEQ ID NO: 267479 - protein, 131 aa, Glycine max
  unsure (1)..(131): unsure at all Xaa locations
  Clone ID: PAT_MRT3847_83557C.1.pep
GIDYLKYDHXENNNISPIDRHRPMIEAMAHTGRPIFFSLCEWGSEHPAAXAIIVGNVCRTTGDIHDKRDSVISRADLNDIWTAYAGPVGWIDPDIAGFGTGCLTTEEYRAHFSIWSLSTVISLQRKLSTCC

SEQ ID NO: 267480 - protein, 64 aa, Glycine max
  Clone ID: PAT_MRT3847_83558C.1.pep
TTTSKRFLFLACTYIYACEKLYKNAIRQRRYACFEGGKVVRVIVNKERNKAYEIKCIYAFLIIY

SEQ ID NO: 267481 - protein, 83 aa, Glycine max
  Clone ID: PAT_MRT3847_83559C.1.pep
RPPTGGFGQWFLGRFGRLGNRFFGPKPGWNNNTCGVTPENNGTGTGTRGELAPEVVFLPFTNGFNPIQNATGSRFLFFWASNL

SEQ ID NO: 267482 - protein, 65 aa, Glycine max
  Clone ID: PAT_MRT3847_8355C.1.pep
MASSSDVCPTEDALKAFLEYLVDPVLPAKPSTPDNPPSPSQQHLVAKQVLSVVLLYNYYHRKQYP

SEQ ID NO: 267483 - protein, 112 aa, Glycine max
  Clone ID: PAT_MRT3847_83560C.1.pep
MNSSSPAHSSLSTTAVVGGGGGGGGSSNATVSIDDFHLPCDPISSQERKDEAMLVLKSDLMAALNKEVKSLVEDNWKFEGPRSRIHLVSHRGGGHLYRPTEISKNWNLTPPK

SEQ ID NO: 267484 - protein, 112 aa, Glycine max; identical to SEQ ID NO: 267483
  Clone ID: PAT_MRT3847_83561C.1.pep

SEQ ID NO: 267485 - protein, 60 aa, Glycine max
  Clone ID: PAT_MRT3847_83562C.1.pep
SKTNPAWVKKVPAWLLGSQTFLGRGWVFYPKQGGWFGYLLGSTPFVCFFLVAPPEEKKFI

SEQ ID NO: 267486 - protein, 128 aa, Glycine max
  Clone ID: PAT_MRT3847_83563C.1.pep
MDPIILSDEEDPSTPFPLRPKKRRTEPDPNPNPNRTVFVIDDDPTPHKSMTPSITPETPMSALFDSDIAIVKCTIPSDPNARVSPKKFSGFPQMISLESVNESQYYRMGTRENIESRDSTSITHSMRV

SEQ ID NO: 267487 - protein, 53 aa, Glycine max
  Clone ID: PAT_MRT3847_83564C.1.pep
LDWGREWLVMCVDKAHGLIMACLREDCIADLSLCHIDLIRCLCLYPISLCSLS

SEQ ID NO: 267488 - protein, 34 aa, Glycine max
  Clone ID: PAT_MRT3847_83565C.1.pep
VIIDIPCALSLQEVLAVKRAYHNRYKRSFEDDVP

SEQ ID NO: 267489 - protein, 40 aa, Glycine max
  Clone ID: PAT_MRT3847_83566C.1.pep
SVINLKIRDVDVDNSICDSFQSWCVYVVSYDCYKKRKRIY

SEQ ID NO: 267490 - protein, 151 aa, Glycine max
  Clone ID: PAT_MRT3847_83567C.1.pep
GSRSIVNSCASTYRSDAMTSDGMLSLDRNCDSNKGSVRGDSLESAKTSVSRPSDSSGLSDDSNWSNITGSANKPHIGDDPRWKAMLAIRVRDGISGMSHFRLLKRLGCGDIGSVYLSELSGTRCYFAMKVMDKASLASRKKLTRVHTDREI

SEQ ID NO: 267491 - protein, 66 aa, Glycine max
  unsure (1)..(66): unsure at all Xaa locations
  Clone ID: PAT_MRT3847_83568C.1.pep
LICLNHKFLGLLYMKQVFNHIEVLGRLSFFIGFSHLKXCEQMGVAAVVHLYVLPAEPYRKGKRCVR

SEQ ID NO: 267492 - protein, 73 aa, Glycine max
  unsure (1)..(73): unsure at all Xaa locations
  Clone ID: PAT_MRT3847_83569C.1.pep
VEAFFSSSASLIXTVFWKNVESPKIAFVFLAGAFEKGTFFFGPPAPLKGLLGKPFSQKFLFFSSFCDQYIFFP

SEQ ID NO: 267493 - protein, 114 aa, Glycine max
  Clone ID: PAT_MRT3847_8356C.1.pep
PTRPPTRPAYPNSTKLPKGEYNLQLYLRHDNVQVLEKMKQLVLFIERSLEEKVVRHILKDFMYPLYLLLETQSHLSSLDCKFFQRISQPNSISLAIRLLDVQWFFIVQTFYICG

SEQ ID NO: 267494 - protein, 46 aa, Glycine max
  Clone ID: PAT_MRT3847_83570C.1.pep
KRCGNFQIGRAYSTRVSCLIACVELNSRTIEIEHEFQIMQMYSAVF

SEQ ID NO: 267495 - protein, 79 aa, Glycine max
  Clone ID: PAT_MRT3847_83571C.1.pep
REVHSILDQVRSVSFVVFSLCYHRRASSTFWKTRHLHLCTLMLRYYRYVILQQLTHSRNAFLPLSVKIRCSMKLTEISR

SEQ ID NO: 267496 - protein, 82 aa, Glycine max
  Clone ID: PAT_MRT3847_83572C.1.pep
SPSANKPLGYATGPLSHRWGKQLVSFFSRACSDYSYCPQSQPSDVMCQNLRMHTTRGLLFILPCNIELGLVNSLVFLPCWAF

SEQ ID NO: 267497 - protein, 90 aa, Glycine max
  Clone ID: PAT_MRT3847_83573C.1.pep
TFKSLIDCTIVLISTKASSSSYISVYQNSLIMLNIPIHPTVIIISSIYEGGYIIISHMIRGYRSLTPFVFCTRNIEVLFMYRTCIPFNFN

SEQ ID NO: 267498 - protein, 52 aa, Glycine max
  Clone ID: PAT_MRT3847_83574C.1.pep
AAVCGRLNKLSPCDLHRAWILLRCSEEEVFSLMNSLRHSGLRCDPLVRGSSS

SEQ ID NO: 267499 - protein, 112 aa, Glycine max
  Clone ID: PAT_MRT3847_83575C.1.pep
PHRALRPPSSFSGLRSEFSLRISILPPNPSLLSVNGKVADGKCCLMFKRPQSPSGPTARNKSLGYLFWLSVSNWRVKVQSSKSLACHNLKSIAISNMRSRRMMIAASDDGKS

SEQ ID NO: 267500 - protein, 76 aa, Glycine max
  Clone ID: PAT_MRT3847_83576C.1.pep
KKSFLIKRLGRHLFKVGRVSKFCLIWKLKKNGASSPWLLMFHKPAKRRKKLFFWEVSQRNHTLSREQLIVGPVEMK

SEQ ID NO: 267501 - protein, 90 aa, Glycine max
  Clone ID: PAT_MRT3847_83577C.1.pep
PFLDYFSSKHTDLFNPPHSNALKFAFRNMAGKNKFIFIQTDIFYIFMDSPITSANTVTLLANIMATIIPIKEMKSKLRNFPIEGITATYT

SEQ ID NO: 267502 - protein, 90 aa, Glycine max
  Clone ID: PAT_MRT3847_83578C.1.pep
PFLDYFSSKHTDLFNPPHSNALKFAFRNMALKHKRIFIQTDIFYIFMDSPITSANTVTLLANIMATIIPIKEMKSKLRNFPIEGISATYT

SEQ ID NO: 267503 - protein, 95 aa, Glycine max
  Clone ID: PAT_MRT3847_83579C.1.pep
IPILQTSIVCLTVIPSRITSVRRGNHREISKKPYRSVVPSRIDTTNAEKCCSERKARLVCVLNSDGVRMLLIVLIVRPLRLLVCDDGSQSRAGSL

SEQ ID NO: 267504 - protein, 475 aa, Glycine max
  Clone ID: PAT_MRT3847_8357C.1.pep
MGNENRELHVLFFPFPANGHIIPSIDLARVFASRGIKTTVVTTPLNVPLISRTIGKANIKIKTIKFPSHEETGLPEGCENSDSALSSDLIMTFLKATVLLRDPLENLMQQEHPDCVIADMFYPWATDSAAKFGIPRVVFHGMGFFPTCVSACVRTYKPQDNVSSWSEPFAVPELPGEITITKMQLPQTPKHDEVFTKLLDEVNASELKSHGVIANSFYELEPVYADFYRKELGRRAWHLGPVCLSNRDAEEKACRGREAAIDEHECLKWLDSKEPNSVVYLCFGSMTAFSDAQLKEIALGLEASGQNFIWVVKKGLNEKLEWLPEGFEERILGQGKGLIIRGWAPQVMILDHESVGGFVTHCGWNSVLEGVCAGVPMVTWPMYAEQFYNAKFLTDIVKIGVSVGVQTWIGMMGRDPVKKEPVEKAVRRIMVGEEAEEMRNRAKELARMAKRAVEEGGSSYNDFNSLIEDLRSRAC

SEQ ID NO: 267505 - protein, 166 aa, Glycine max
  unsure (1)..(166): unsure at all Xaa locations
  Clone ID: PAT_MRT3847_83580C.1.pep
RYFVGDLGLVVAKMTALYMKCTLSFFIALGNLAVDTINFEAFPHMLVLLGEIQEXSCIDIXQEELLTAWATQVRTTTTMMADGXPYLYAMVLDSQVPTIPVDYVMGVKMTTINNVRAYGLNPGMLGSRLLGTIPQSMIEHTVWNQMATVRTPLNFDSSKLSFSQFS

SEQ ID NO: 267506 - protein, 94 aa, Glycine max
  unsure (1)..(94): unsure at all Xaa locations
  Clone ID: PAT_MRT3847_83581C.1.pep
XGEXXAXREPXRXXSRXXXGXFXXXPXXXFSXXXFYKGKPIWRIEQXQSIXXNXNXIMDSKXXKLYKLQWMTRTMYHSCFLPIDANANAIYGXP

SEQ ID NO: 267507 - protein, 66 aa, Glycine max
  Clone ID: PAT_MRT3847_83582C.1.pep
HYQGSSPYVSILSDTNMEGRHILGIHLTLNGQYVSQAGINIQALTQGLHMHQLTTSMLTDASYLLL

SEQ ID NO: 267508 - protein, 178 aa, Glycine max
  unsure (1)..(178): unsure at all Xaa locations
  Clone ID: PAT_MRT3847_83583C.1.pep
PRVRKVQLLLALQCHRVTLQKVRSLWKIFKWGAHKKEAFNFKHPSQSHEIMXASLLLQVGLFEEAEDLLFTVESNEIFYDLVKGYVATRDWEKGAFIYDVMKGREKVPXARDCYDFLIDLLVKVKRTGLASRVAFDLVDLGVPLTGDEVRALEKVMVLLXIDGKIQEARNMVKKGVGS

SEQ ID NO: 267509 - protein, 122 aa, Glycine max
  unsure (1)..(122): unsure at all Xaa locations
  Clone ID: PAT_MRT3847_83584C.1.pep
RSRWAKPWLNFIDLHELKPAGDAPSWTFGDLHVEIEGDHPXWPSGPTHDPEAQDARHDAIKTIQQRCNSLVPYEAHEVADCXLRRVLELAKYIHDSHLKRXQKEDMLQVDVHPTHRGGIHLD

SEQ ID NO: 267510 - protein, 121 aa, Glycine max
  unsure (1)..(121): unsure at all Xaa locations
  Clone ID: PAT_MRT3847_83585C.1.pep
LISSLTISSLLPSKTHTHTHNNTLKLTATAKDHVGERDAQHHIENKRNILRQVYXGLRHSLLMDMITMLLIWAHLRPTKPTFTLQDVNLYLFNTTEANLITSKFQVTLITHNPNDRICDYY

SEQ ID NO: 267511 - protein, 103 aa, Glycine max
  Clone ID: PAT_MRT3847_83586C.1.pep
TAICFPMKDRSHFTVHKKKNEKKMKKQKKKKLAKKKKFKQMAVKKKKAQNRTTLTKKGAPFLGNQVSPPGRGKKKLFFWGPQIKFPGPLFKTLGPGKPLGSPT

SEQ ID NO: 267512 - protein, 312 aa, Glycine max
  Clone ID: PAT_MRT3847_83587C.1.pep
MTILIEQPALELQVEGNNVHAEETNELVLDGGFPLPKDGYMAPEINSFGHSFREYDAESERQKGVEEFYRLQHINQTYDFVKRMREEYGKLDKAEMGIWECCELLNELVDESDPDLDEPQIQHLLQSAETIRKDYPNEDWLHLTALIHDLGKILALPSFGELPQWAVVGDTFPLGCAFDESNVHHKYFKDNPDYKCPAYSTKNGIYTEGCGLDNIVMSWGHDDYMYMVAKANGTTLPSAGLFIIRYHSFYPLHKEGAYTHFMNEEDVENLKWLKIFNKYDLYSKSKVLVDVEKVKPYYVSLIEKYFPAKVRW

SEQ ID NO: 267513 - protein, 91 aa, Glycine max
  Clone ID: PAT_MRT3847_83588C.1.pep
VGEYCGIYFGFWLQFGLHEMASLVRKLRPSSEPTVTVETEDSLSSYEYSLAVVYNGPPLSYSIPEIPAFKIDQIPIATIASLYHDDVSVPV

SEQ ID NO: 267514 - protein, 50 aa, Glycine max
  Clone ID: PAT_MRT3847_83589C.1.pep
PIYSNNKQRLLTNITMSINHTLTELSHVFDPYPAEEDITSSDSLRSLCSP

SEQ ID NO: 267515 - protein, 64 aa, Glycine max
  Clone ID: PAT_MRT3847_8358C.1.pep
FTGKLCFYQYCPDHIVGSNVCFLICQRTHKSAPTKSCQKIHYDKLDSNMGQHRELSSLFWLLVS

SEQ ID NO: 267516 - protein, 50 aa, Glycine max
  Clone ID: PAT_MRT3847_83590C.1.pep
KRVGIIDIFGKHIISNDVIKKLSNGCYERSRSKTSVIILSPHCVKKSLGL

SEQ ID NO: 267517 - protein, 39 aa, Glycine max
  Clone ID: PAT_MRT3847_83591C.1.pep
GIIMCVLLYMWRSAVSPSSGALDVSVKFVLPAARAFSGP

SEQ ID NO: 267518 - protein, 37 aa, Glycine max
  Clone ID: PAT_MRT3847_83592C.1.pep
SQQTPPPWTRFSGHLRLGHLYSHSLCIESSSVLLVKC

SEQ ID NO: 267519 - protein, 379 aa, Glycine max
  unsure (1)..(379): unsure at all Xaa locations
  Clone ID: PAT_MRT3847_83593C.1.pep
MLQGNSILITLLQMLLLIRNGNGQNECNKELSCGPGEPLIRFPFQLVKGIKDECANPGFCLYCTQKNETMVVLSTIEFRVYSINYEFNFFMLRDPENCLPNKFLQIDNFFLQHNQLELGFPGHEGTNNLSFFNCSSVGYTYLRRFVYGPYCLDFSQQDMISCPIYVSSSYDSVLDLDLTSCTRMFDLISPAEADDLQWNSLNMRWSIPNCTKCEAKGKRCKWKNNSNTEGDIECFGYKRKRIHVPQSFIFATTGSILLGLVAIVVFKIALYFRQKEDDQARVAKFLEDYRAEKPARFTYADLKRITGGFKEKLGEGAHGAVFRGKLSNEILVAXVKILNNTEGEGKEFINEVGIMGKIHHXTVGRLLGFCAEGXHRALV

SEQ ID NO: 267520 - protein, 125 aa, Glycine max
  unsure (1)..(125): unsure at all Xaa locations
  Clone ID: PAT_MRT3847_83594C.1.pep
MGNSFGCSASGERLVSAARDGDLVEAKMLLECNPCLAKYSTFGGLNSPLHFAASKGHNEIVALLLENGADVNSRNYWGQTALMQACRYGHWXKVVQTLLLFRCXVGKADYLSGGTXFYFAAINGA

SEQ ID NO: 267521 - protein, 50 aa, Glycine max
  unsure (1)..(50): unsure at all Xaa locations
  Clone ID: PAT_MRT3847_83595C.1.pep
LPFLPRTQXAAPENRKQTQXPPDRKKXXKXXHHTADEPERERKTHTARAT

SEQ ID NO: 267522 - protein, 102 aa, Glycine max
  unsure (1)..(102): unsure at all Xaa locations
  Clone ID: PAT_MRT3847_83596C.1.pep
MGVPFLTSFCLFGLSSLLCSAFLMGTVKIGINGFGLIGRLVARMALLIDDVDLVAVSYSFIITDYSVIHVSVHIVHGHWHHHDVTVFVEKSLLFGDXPVTIF

SEQ ID NO: 267523 - protein, 41 aa, Glycine max
  Clone ID: PAT_MRT3847_83597C.1.pep
GIHSSTPKHFRELMHVGGLGNDELKSHVQKYLLYTQRVPVA

SEQ ID NO: 267524 - protein, 35 aa, Glycine max
  Clone ID: PAT_MRT3847_83598C.1.pep
ARAQQTRNAGTSQTSVIQSNLTLLILSILLRLVAN

SEQ ID NO: 267525 - protein, 96 aa, Glycine max
  unsure (1)..(96): unsure at all Xaa locations
  Clone ID: PAT_MRT3847_83599C.1.pep
AWSLVILKRTGFXCDNTSAAGWTDAAMHDVQVTIDGGMNYEECVPRTYREVNPQIYCWXNRRMGKLTIRQGTATCVEXRPIYIGGGGGAKNALIMN

SEQ ID NO: 267526 - protein, 207 aa, Glycine max
  Clone ID: PAT_MRT3847_8359C.1.pep
MVQVESNSSMSRVVLEPHAQFDLTAHSRASSIRSLSISHSKRHRTTLLYVGTHSGTLFSLSAEDSNDSDDAVLRKLSFLRSVSVSDAAVESISVIEEFRKLLLLSDGTLFLVDSELSNRATKLSFPKGVSLVTRRRLRNNGGESEGFGSGLGSGSGSGSGLGLFQKLRMNSMKEGEVQSETGGGCVFAIVVGNRLILAELVLGNRNG

SEQ ID NO: 267527 - protein, 83 aa, Glycine max
  Clone ID: PAT_MRT3847_835C.1.pep
IQKKQGNLLVTDLDSTNGTFINDKRLRPGVVATISPGSCITFGDTHLAMFRVSKVEDVKPADTVGETEIELDTDNKSDDTETS

SEQ ID NO: 267528 - protein, 121 aa, Glycine max
  unsure (1)..(121): unsure at all Xaa locations
  Clone ID: PAT_MRT3847_83600C.1.pep
TNINSAFAASLRANCPRAGSTALAPLDTTTPNAFDNAYYTNLLSQKGLLHSDQELFNSGSTDSTVRSFXVQHVGLQQRLRHGHGQDGQPQPSDRNPGANQAQLLEAQLVNYYAQCNALWQA

SEQ ID NO: 267529 - protein, 46 aa, Glycine max
  Clone ID: PAT_MRT3847_83601C.1.pep
NILLHFKKFPKVKFKSWKRDIGTLLSPLAQSHNISGHPRQAIRCVV

SEQ ID NO: 267530 - protein, 55 aa, Glycine max
  Clone ID: PAT_MRT3847_83602C.1.pep
KIFQRSEPVYKQNLKYEASMHAYFLSHVYILKQRNSTTDNCEVVHFLIRKNMLLD

SEQ ID NO: 267531 - protein, 44 aa, Glycine max
  Clone ID: PAT_MRT3847_83603C.1.pep
EFGSSEILINRDQRVPHFKPGSFSNSYLISRISQFLHTSVCTIC

SEQ ID NO: 267532 - protein, 60 aa, Glycine max
  Clone ID: PAT_MRT3847_83604C.1.pep
PLQKQLAYTSKSMDLLGLAMTHAPFFEENDKAFAILGASDIETSDSLHLRSRDVDLSCKS

SEQ ID NO: 267533 - protein, 77 aa, Glycine max
  Clone ID: PAT_MRT3847_83605C.1.pep
EKPPQKDAIEHIGDHEQVPNEGPWPGVIKRVDRGKDRQKEQGFVGDVHSKASGKVCSLEPFENNITNNENETTGPSN

SEQ ID NO: 267534 - protein, 257 aa, Glycine max
  Clone ID: PAT_MRT3847_83606C.1.pep
FGSRFNSLLSEVCAFLFNSSLFLRHPRREPKIKNKKINTINKGEKTNMSFTGTLDKCTACDKTVYVVDLLTLEGIPYHKNCFKCSHCKGCLTMCTYSSMDGILYCKTHFEQLFKESGNFSKNFAKSSEKQNELNRTPSKLSSMFSGTQDKCSVCTKTVYPLEKMTLEGECFHKTCFRCAHAGCPLTHSNYAALDGVLYCRVHFAQLFMEKGNYNHVLQAAAHRRTGSSTPPLLEEPSQEPAPPASHEDQTEEETPLE

SEQ ID NO: 267535 - protein, 56 aa, Glycine max
  Clone ID: PAT_MRT3847_83607C.1.pep
RKEKLYVLLPFVFFFQGTTMLVNYSISYICYLNNQKKIVNNNAGNVRSCNCDCHRF

SEQ ID NO: 267536 - protein, 105 aa, Glycine max
  Clone ID: PAT_MRT3847_83608C.1.pep
HKPARHIRQLTCTRRSFSLGARPQNPCYYPTIDPFNFDLIIVSTALSESVIAAGDSCECKTILHLDPNSLYGSHCSSLSLHELTCYLCIPHSLPFAANTTTDCDD

SEQ ID NO: 267537 - protein, 41 aa, Glycine max
  Clone ID: PAT_MRT3847_83609C.1.pep
MGAGDYSKILKVKHDATDEEVNKAYKKLAMKWHPDKNLEDP

SEQ ID NO: 267538 - protein, 93 aa, Glycine max
  Clone ID: PAT_MRT3847_8360C.1.pep
VAFDEALEAVLADNNDARLEVSILARSPDPELTEAFINTEVYARVSVAVLFYNLADLARIVGSPNDDANCIAAQESGKSFLLELLDSVVNAKD

SEQ ID NO: 267539 - protein, 209 aa, Glycine max
  unsure (1)..(209): unsure at all Xaa locations
  Clone ID: PAT_MRT3847_83610C.1.pep
MGTACGYGGGIVDALNANFYGNGTQTLVLAHGYGTDQTVWRYLIPFLACYFKVLVFDLPFAPNVRPSSLYDPKKYSTFNGYAQDLVCLLDELNLNKTIYVGHSMSAMIGCLAATKKPQLFEHLVLLAGSPMYLNKEGYEGGFTRSELDKIFESIKQNFSGWAHSFAPYAISAXDPAAVAEFECSLLRMKPEVALSVAKTVFLSDLRCVL

SEQ ID NO: 267540 - protein, 155 aa, Glycine max
  Clone ID: PAT_MRT3847_83611C.1.pep
MPLGSIQAPKLSSQPFITDVPRQSHSADSSVQNIEQQLSSQLPSQTESNPSTVTGITLPDMPTSPQDEDFPECDWSEHYCPDGDKYYYNCITCESRWDKPEEYALYEKESQKQQEREDNCCSLSQLSLSSSQLVGQKQQETDHDHKQSETIPVVG

SEQ ID NO: 267541 - protein, 329 aa, Glycine max
  Clone ID: PAT_MRT3847_83612C.1.pep
MKTGSMIFSLLHVPRFRIQSLANCWGETFHGFSTTCGNNSNVRLLGSRIYGLQGGQRKKWTRPITTNIEGKGSTKSKSIKHEILSETILANATVNVNKTQLDKSQEIQYCDIQQEIAENKDLSSYTVIVFDIETTGFSRENERIIEIALRDLQGGENSTFQTLVNPQCKVPNSHIHGITTHMVNQPGVPRMEDLIPILLQYVRSREKPGGDVIFVAHNARCFDVPFIINELRRYSVEIPPNWLFLDTLPLARELMKSGGTTLSSTSLAALRDLYGIKVDGSAHRAMVDVNTLSLILSRLTSDLKLTLSDLVDKSFTESDIINSKKKKKN

SEQ ID NO: 267542 - protein, 47 aa, Glycine max
  Clone ID: PAT_MRT3847_83613C.1.pep
RLREDNRRGELLFFKERTTVYFFLLSNLDWRPTNLSESAFCKPVSSK

SEQ ID NO: 267543 - protein, 64 aa, Glycine max
  Clone ID: PAT_MRT3847_83614C.1.pep
MASFGSLKSTIFEKEERKQQYQSHIRGLNAYDRHKKFIDDYGNVSLTKSLNHLLFTTSFLKNKI

SEQ ID NO: 267544 - protein, 93 aa, Glycine max
  unsure (1)..(93): unsure at all Xaa locations
  Clone ID: PAT_MRT3847_83615C.1.pep
KPPNTNWKRKGTTEEGKKNTTTMNKTKLPAEYIVXFITTPPYLILPVHKIYQCPKIHVLSQNSQIRKSITYTTEVNTXMLVNQRNPWLIITHS

SEQ ID NO: 267545 - protein, 37 aa, Glycine max
  Clone ID: PAT_MRT3847_83616C.1.pep
DMQISPKATFATQILAPFFVVSKEFLLHVHLNTIRRT

SEQ ID NO: 267546 - protein, 79 aa, Glycine max
  Clone ID: PAT_MRT3847_83617C.1.pep
FLSNPVKWHHQIWLSSSFLGSNLDNLNYPRLLAFQIHAWKKQIETIMQRNKKTQGAGAQYSLRESEYYSNHINEDDQNK

SEQ ID NO: 267547 - protein, 157 aa, Glycine max
  Clone ID: PAT_MRT3847_83618C.1.pep
KIESIRNGKSWDEIDSNSNQDYDLVKSYVSKIQDLEGELRGLKNLNAKSRHVDWVDSDDSGFRSKNVLFACANEYSSDCDAKSVDITDDMEDHAKEIEHSSLQEKLDRELKELDKKLEQKEAEMKMFNNSDTSVLKHHYEKKVLELEQEKKFLQKEI

SEQ ID NO: 267548 - protein, 107 aa, Glycine max
  Clone ID: PAT_MRT3847_83619C.1.pep
FVVLDTSHKTQPIKLCLTTKSDQDIEAFLKIHGAVAQKRYNKFSEIKKITNSFKVKLGQGGFGAVYKGQLPNGCPEAVKLLNSSKINGEEFINEVARINRASDRRIV

SEQ ID NO: 267549 - protein, 240 aa, Glycine max
  unsure (1)..(240): unsure at all Xaa locations
  Clone ID: PAT_MRT3847_8361C.1.pep
HASAARQPAALHIDALYKLKAEFVDLQVQLPEIDMLQNLLSQVESCSAQCHDMLEGHMNLKNVGLLLKEWGSFAVDVPELKLLRQYHSDAVSWVSHFNDILGRVQMQENQHNAVDGLKSIFEEGLSLKIQVDELPLVEVELKKANCREKAVKAHDLKMPLEFIQQLLKESTVLHIEGEKQFVNLTGVLAVAIPXEERAREMLSHEAPISDXEDMIRASENIFVILPSLNDIKDALSEANS

SEQ ID NO: 267550 - protein, 437 aa, Glycine max
  Clone ID: PAT_MRT3847_83620C.1.pep
MAVLFATHVLLLILSTATTLHFSASKAARLNMTCSEKERNALLSFKHGLADPSNRLSSWSDKSDCCTWPGVHCNNTGKVMEINLDTPAGSPYRELSGEISPSLLGLKYLNRLDLSSNYFVLTPTPSFLGSLESLRYLDLSLSGFMGLIPHQLGNLSNLQHLNLGYNYALQIDNLNWISRLSSLEYLDLSGSDLHKQGNWLQVLSALPSLSELHLESCQIDNLGPPKGKINFTHLQVLDLSINNLNQQIPSWLFNLSTALVQLDLHSNLLQGEIPQIISSLQNIKNLDLQNNQLSGPLPDSLGQLKHLEVLNLSNNTFTCPIPSPFANLSSLRTLNLAHNRLNGTIPKSFEFLRNLQVLNLGTNSLTGDMPVTLGTLSNLVMLDLSSNLLEGSIKESNFVKLLKLKELRLSWTNLFLSVNSGWVPPFQLEYVLLSSFG

SEQ ID NO: 267551 - protein, 166 aa, Glycine max
  Clone ID: PAT_MRT3847_83621C.1.pep
MSAVEAKKGKVILAYSGGLDTSCILLWLIEQGYEVVAYMADVGQEEDFEAARTKAMKCGASGFFLADLKREFVEELIFPAVQCNAIYENVYLLGTSLARPVIARGMMEVALQEGCDFVSHGCTGKGNDQVRFELAYYGLFPSIKVIAPWRLPEFYERFAGRTALLE

SEQ ID NO: 267552 - protein, 51 aa, Glycine max
  Clone ID: PAT_MRT3847_83622C.1.pep
LTNEHRGNFYAEPTIKLLYSQPMGSAPISSLILDPVAIHHLNELADLMSHI

SEQ ID NO: 267553 - protein, 282 aa, Glycine max
  Clone ID: PAT_MRT3847_83623C.1.pep
MNAIAAEQVLEPWHKLDDKVVLVTGASSGLGRDFCIDLAKAGCCVVAAARRLDRLTSLCHEINHRWPSNVGIHRAVAVELDVAADGPAIDRAVQKAWDAFGRVDSLINNAGVRGSVKSPLKLSEEEWDHVFKTNLTGCWLVSKYVCKRMCDIQLKGSIINISSVSGLNRGQLPGAAAYASSKAGVNMLTKVMAMELGMHKIRVNSISPGIFKSEITENLLQKDWLNDVVRKIMPLRRLGTSDPALTSLARYLIHDSSEYVTGNNFIVDYGGTLPGVPIYSSL

SEQ ID NO: 267554 - protein, 108 aa, Glycine max
  unsure (1)..(108): unsure at all Xaa locations
  Clone ID: PAT_MRT3847_83624C.1.pep
GFTQLINNFFHTPPKINSTIFFALFLFCAFTTSYLPSSIADFLLYNXRNPLQNRGTYYILSDITAFGRIIPSPHANXPSPPTVSQSHNALHKRIPTILSSPLSSLSLF

SEQ ID NO: 267555 - protein, 81 aa, Glycine max
  unsure (1)..(81): unsure at all Xaa locations
  Clone ID: PAT_MRT3847_83625C.1.pep
VYQGEWHGTXFPLKKLLYQNIYFELLEKFKSEIHIIKKLRHPNVDLLMTTITLPPNLSSAYEFIPKNRSHRLIYPPNNLLH

SEQ ID NO: 267556 - protein, 72 aa, Glycine max
  Clone ID: PAT_MRT3847_83626C.1.pep
VSNSGSYMLVALTIALGEVFYGRVPAYILLFSMVLPDEDTWDAIENTLRASEYYQVASFTLSEISRPGGHSL

SEQ ID NO: 267557 - protein, 60 aa, Glycine max
  Clone ID: PAT_MRT3847_83627C.1.pep
LRSRPLLFFFFYHMSQDTLYNQNKCRYTQPKYTQLIALFMSRQISNKKENASCTIFFMYL

SEQ ID NO: 267558 - protein, 43 aa, Glycine max
  Clone ID: PAT_MRT3847_83628C.1.pep
YIIYLVKKFVFNYYCVIFLLINNNYIPQTRLIFHIINLKKINF

SEQ ID NO: 267559 - protein, 67 aa, Glycine max
  Clone ID: PAT_MRT3847_83629C.1.pep
IKRMNIKLNEKSIFTNENFSLRFSYSEPQTPKPSITIPNFTGAPAFIELITPENNNKPELSGERGWL

SEQ ID NO: 267560 - protein, 65 aa, Glycine max
  Clone ID: PAT_MRT3847_8362C.1.pep
MLSRIYVLISLIRKSNQCQHVFVTARDDIYNNKITSGGDKLVKSAAMALLISPKTIIHCSSHCVG

SEQ ID NO: 267561 - protein, 85 aa, Glycine max
  Clone ID: PAT_MRT3847_83630C.1.pep
FLIVIMRPLEKSRHYWCAQHIAPNNVVLSSYVHTESLVSSCCAMTESVSMDNSFSSRFRADSKKPASAPSAGAVCASDDPALAIA

SEQ ID NO: 267562 - protein, 37 aa, Glycine max
  unsure (1)..(37): unsure at all Xaa locations
  Clone ID: PAT_MRT3847_83631C.1.pep
TYSLKAPLRGPRXXXVLLPVQLNSRLPWSXSGXPFLS

SEQ ID NO: 267563 - protein, 50 aa, Glycine max
  Clone ID: PAT_MRT3847_83632C.1.pep
ALDTKHGFRQKGGAFYRRIFALAWNETMTIREKSIQARQAWRLRWPSLVT

SEQ ID NO: 267564 - protein, 74 aa, Glycine max
  unsure (1)..(74): unsure at all Xaa locations
  Clone ID: PAT_MRT3847_83633C.1.pep
DTSKMAEMINRVCFGDEKVLLKTTHLLLAXCSRMATCEKDVWRVECGIPTGFPLTAFCNSTFIEMLIRFRSPTL

SEQ ID NO: 267565 - protein, 122 aa, Glycine max
  unsure (1)..(122): unsure at all Xaa locations
  Clone ID: PAT_MRT3847_83634C.1.pep
LDESNSLGVAGRSGRRLTGHWGISVXKIGLIASSIGHAFGTERGFCARSARVIYHPRFGXSGMGFLGFLPQYVGGAVITVIDVLEENPILIKMLKKIIVFLRKGLSKIPGITVASTPESPIV

SEQ ID NO: 267566 - protein, 49 aa, Glycine max
  Clone ID: PAT_MRT3847_83635C.1.pep
PIVTPSCFLDGFGLFLPAFLRPILDSFQATKQPPQLGLNNEVTGMAGTK

SEQ ID NO: 267567 - protein, 92 aa, Glycine max
  Clone ID: PAT_MRT3847_83636C.1.pep
VNIPKSHTSKILKYFPKEPPSIKKMQSSQKVLLVQVVCRTLIHKTSKFMLSLNDKINKQIMVQNLNDYILQKKRILQLEILRGETKAIVISD

SEQ ID NO: 267568 - protein, 99 aa, Glycine max
  Clone ID: PAT_MRT3847_83637C.1.pep
MPLSLFFVKKKKKKKKKKKKKKKKKKKKKKKKKKKKKKKKKKKKKKKKKKKKKGGAFLRNQVYLPGDGKEKIFLRGNQNQITGGGFKKVGRGKTWGLPN

SEQ ID NO: 267569 - protein, 172 aa, Glycine max
  Clone ID: PAT_MRT3847_83638C.1.pep
HENNQRIEPSKSTMDPDVIEIPPPIHHPPRFREQNKKTADYTYSLPGVENFGSVSGIASSNNFPSVSNNMINIDGHGSDLSYDDDDYIDILSEDYMDVDEYALLQKHFDNVDIPPGIEAPFTWLPPDYVVGSKKTENSTLYPWHHMQSNANKSPMTPSSQPSLSLEPTNSKI

SEQ ID NO: 267570 - protein, 705 aa, Glycine max
  Clone ID: PAT_MRT3847_83639C.1.pep
MDPDVIEIPPPIHHPPRFREQNKVILHDVIDIDDDSEDVVIIGEKVNNSNKGKTIDAIHDDHQVVKTADYTYSLPAVENFGSVSGIASSNNFPSVSNNLINIDGHGSDLSYDDDDYFDILSEDYMDVDEYALLQKHFDNVDIPTGIEAPFTWLPPDYVVGSKKTGNNTLYPWHHMQSNANKSPMTPSSQPSLSLEPTNSKIQASLGSAINIPIKMGNVDHSSGAELSSQFFSEPAPSKMKSATSKLRGCTSNASLGVESSKSQWFSRPFHSKKKPASTYHGFNYHPEATKLPHAGELPYWGQFKTAKKEAGSSISSHSTFIGHHGSLDPPGIESGKTWWKISHNTKPFSTHLNNIPNHIYYPFDPLVAHPEHVFDNNWVNDSARDGFDGKTVDGPIVTISDEAKEEILRKLQSFKQFDTVEDTSDHHFFRSNSSMHQPPKNWAKKIQEEWRILEKDLPASIFVRVYESRMDLLRAVIIGAEGTPYHDGLFFFDVFFPSAYPNVPPKVHYHSGGLRLNPNLYACGKVCLSLLNTWSGSKNEKWVPGMSTILQVLVSIQGLILNTKPYFNEPGYAHMSGSANGEKMSFQYNEDTFILSLRTMMYMIRKPPKNFEDLVKGHFCNRASDILVACKAYMEGAQVGCLVKGGVQDVDEGDRSCSQQFKDSLSGYMNMLVKEFAKVGAKDIDKLLPPATTPVAIKPSGVSIA

SEQ ID NO: 267571 - protein, 117 aa, Glycine max
  unsure (1)..(117): unsure at all Xaa locations
  Clone ID: PAT_MRT3847_8363C.1.pep
VCXRCCAAGLXLFPPFFRXLXSLVRPVLLLGFVLAXLALCSFWSRSCXVLGLGXGXXXLRXLVPSLRLCVALWCAPXXXLSGLCLXGGFFLCXAVAVXPVWPCXALPFLSXAFXRVG

SEQ ID NO: 267572 - protein, 53 aa, Glycine max
  Clone ID: PAT_MRT3847_83640C.1.pep
KAKISFTFFFKKLFLIFIIHFFLLINRGGLYTETWVQETHIQQKFWPAGLFFF

SEQ ID NO: 267573 - protein, 56 aa, Glycine max
  Clone ID: PAT_MRT3847_83641C.1.pep
IQLNNNALSPSDLCVGTNKKKPPYFNLPLFTNVLGPVLKPQRLFEQFFAPLPTPPL

SEQ ID NO: 267574 - protein, 82 aa, Glycine max
  Clone ID: PAT_MRT3847_83642C.1.pep
LQFSPGSQSSRKHAILKCCTEFYFRPLTGLYHPLAWFLLTEVCSHLTLIFAGSFNRRSVLFGNHSHLLCGCISKNISNGFWS

SEQ ID NO: 267575 - protein, 41 aa, Glycine max
  Clone ID: PAT_MRT3847_83643C.1.pep
KKTPLYSNLKSSQDDAIIPDYMRNWLQAPPSVVMRYISLDD

SEQ ID NO: 267576 - protein, 54 aa, Glycine max
  unsure (1)..(54): unsure at all Xaa locations
  Clone ID: PAT_MRT3847_83644C.1.pep
RKVFILTLFITEVFQQLKFPIXKPGDLKXRIQSLNHREYLERVKNNPQIYNYLA

SEQ ID NO: 267577 - protein, 72 aa, Glycine max
  unsure (1)..(72): unsure at all Xaa locations
  Clone ID: PAT_MRT3847_83645C.1.pep
RNKYNKHSNQHTVGKTLVGKIAYKSTNKRNSGPTGTRTDGRTHWMPHXWTASSMPTRLPTDRRTYSRAYGGS

SEQ ID NO: 267578 - protein, 104 aa, Glycine max
  unsure (1)..(104): unsure at all Xaa locations
  Clone ID: PAT_MRT3847_83646C.1.pep
NTTFISLIHSNTTQHKVSQTHTXXLXSXXTSLGLXXPTHFLILLXLXPXXSXHPXHTXXTHRERESSGLLDRIXXXLPWIXIXCIDXXWDLSXKKKKKTXSLIM

SEQ ID NO: 267579 - protein, 48 aa, Glycine max
  Clone ID: PAT_MRT3847_83647C.1.pep
PVSIPRETFSLIHASWRRAIFSTEPHLRELLEDHRNLTRTKRRGHETL

SEQ ID NO: 267580 - protein, 158 aa, Glycine max
  Clone ID: PAT_MRT3847_83648C.1.pep
WLQSLIDGDNMLEWPNCARLIRVSSIDDPALATLCEPVERANSNHSFTAGLAHSVGLRKQPLRVHSMVKYAAIARGDAEIFMKFAKCGYKEKIWDHAAGVVIVEEAGGVVTDAGGRPLDFSKGMYLEGLDRGIIACSGVALHEKLIDAVYASWDSSNL

SEQ ID NO: 267581 - protein, 69 aa, Glycine max
  unsure (1)..(69): unsure at all Xaa locations
  Clone ID: PAT_MRT3847_83649C.1.pep
QYYSYNSHEHVIFLRRMTHNRNRVDAHRNKLYSTVRMLRXESLLLHEPCSYVRXVVKVVGYNIVLVMVH

SEQ ID NO: 267582 - protein, 52 aa, Glycine max
  Clone ID: PAT_MRT3847_8364C.1.pep
LGKYIYTQNSLLKILDMVRHKGCGHMLHHFPKKGKSNMKLRSVLLLSFQGPL

SEQ ID NO: 267583 - protein, 53 aa, Glycine max
  Clone ID: PAT_MRT3847_83650C.1.pep
QIKIGLTQLCPICLSNAKDMAFGCGHQTCCECGQDLQSCPMCRSPINARIRLY

SEQ ID NO: 267584 - protein, 54 aa, Glycine max
  Clone ID: PAT_MRT3847_83651C.1.pep
KPSFLVYLSLSILFKPNAASYSLHSMVCQPANRGYPSSNSYRRRWWHRKDNLCE

SEQ ID NO: 267585 - protein, 61 aa, Glycine max
  unsure (1)..(61): unsure at all Xaa locations
  Clone ID: PAT_MRT3847_83652C.1.pep
XXXXIFFFXIFFFFFFFLQKSPKKGGPQFLGPFHFPIKNGTKTLQIEFTIFFFQKNRENCG

SEQ ID NO: 267586 - protein, 95 aa, Glycine max
  unsure (1)..(95): unsure at all Xaa locations
  Clone ID: PAT_MRT3847_83653C.1.pep
VPLGXPSNXXECXRXAELXXIXXXXGNXXIXEXIPNVEXXXASKXFAXCGHXRNLESRDIXXXXXAEIXXXXXXXXXXXRXXXSSRIPSLRTRAC

SEQ ID NO: 267587 - protein, 76 aa, Glycine max
  unsure (1)..(76): unsure at all Xaa locations
  Clone ID: PAT_MRT3847_83654C.1.pep
ANFTSQVXIIMNHPGXQIGNGDAPVLGCXHTSHIGVKVSEILTKIDRRSGKELEKEPKFLKDGDACMGKMIPTKPM

SEQ ID NO: 267588 - protein, 58 aa, Glycine max
  Clone ID: PAT_MRT3847_83655C.1.pep
IRGAHNVVIDCKLLQGVLLGFSFRAFVITLQGYGKDKSVLDGKRGGQKGALCPQLCIV

SEQ ID NO: 267589 - protein, 47 aa, Glycine max
  Clone ID: PAT_MRT3847_83656C.1.pep
PRVRFRDNYLEVYLLLSWFYGASKGRLTSLSPVPCLRKLTKLFITTF

SEQ ID NO: 267590 - protein, 48 aa, Glycine max
  Clone ID: PAT_MRT3847_83657C.1.pep
GKPMNFRFSGLKQNPNFAKPGEKQTSLMALRLTKGITPAKKIRPIFFP

SEQ ID NO: 267591 - protein, 172 aa, Glycine max
  Clone ID: PAT_MRT3847_83658C.1.pep
MANSLEVSALNRIKLHLLGELSPLPLTTSSQSSSICSQSSCSDSSATLDQIFSEFLYFPTSSSENHFSALEFEAKPEIIYLETPNPQLEFTSLTTQDSKKPQSSRKPSLQISLPKKTEWIQFGDPEVTETVSQSNPNAEEKKHYRGVRQRPWGKFAAEIRDPNKRGSRVWLG

SEQ ID NO: 267592 - protein, 73 aa, Glycine max
  Clone ID: PAT_MRT3847_83659C.1.pep
PTRSRTHWRSNRKSAVLSRGGRGPVLVAKQPQKHSSTFTINPFIIKSENKGRFFYPWFTSEPSWTYPVPGMPF

SEQ ID NO: 267593 - protein, 50 aa, Glycine max
  Clone ID: PAT_MRT3847_8365C.1.pep
SHIQGLIFTESYACVPLTLLFISRFSYFFANVVDFLLSFSLCFLRCFTWL

SEQ ID NO: 267594 - protein, 74 aa, Glycine max
  Clone ID: PAT_MRT3847_83660C.1.pep
NPSLTTIKQERNGTSNTFQGLQRQYKLPFEKELKRKNSIMTPSLIKMKKTIDNLLVFTNKTNKIFHTSSHQKQV

SEQ ID NO: 267595 - protein, 461 aa, Glycine max
  Clone ID: PAT_MRT3847_83661C.1.pep
MNYRFWTCHPEMRFASGAMMLEYGKAVQESVYEQLRVVREGQLRIIFTQDLKILSWEFCARCHEELLPRRLVAPQVNQLVQVAKKCQSTIAESGSDGVSQQDIQTNSNMLLTAGGQLAKILEMQSLNELGFSKRYVRCLQISEVVNSMKDLIDICADHKIGAIESLKNFPRLATASKVQMQKMQEMEQLANVQGLPTDRNTLNKLMALNPGLNNHINNPHNMVNRGALSGSAQAALALNNYQNLLMRQNSMNSSPGSLQREGSSFNNSNQSPSSALQGAGPALIPGPMQNSSVSGFPSPRLPPQQQQHHLQQPSLSANALLQQNHSQGSQGNQALQQQMIHQLLQEMSNNNGGVQPQSLGGPSANMAKNALGFGGHYPSLSGGSANVTGNNGPMSRNNSFKTTANSDSSAAGGNNGLNQRTSEMPQNLHLQDVVQDIGNEFTDNPFLNSDLDDNMGFGWKA

SEQ ID NO: 267596 - protein, 102 aa, Glycine max
  Clone ID: PAT_MRT3847_83662C.1.pep
HTKHGSKKPSFTHASLLGRSCTHVGIRQQGPLLKIFFKHKLHEIIAVYALRYFLLLLLLLLFFFFYWPYLAISYHYPQLWQQFQCWFAPTSCLWIELSPFQA

SEQ ID NO: 267597 - protein, 122 aa, Glycine max
  Clone ID: PAT_MRT3847_83663C.1.pep
MAFLYILMQYFPAESLKNYPRLATASKHQMQKMQEMEQLGNVQCLPTDQNTLNKLMALNPGLNNHINNSHNMVNRGALSGSAQAALALNNYQNLLMRQNSTNSSPGSLQREGSSFNNSNQSP

SEQ ID NO: 267598 - protein, 161 aa, Glycine max
  Clone ID: PAT_MRT3847_83664C.1.pep
DTQTLMKIWKLMRRYKVEGTRVTFNTLVDGFAKHGHYKEARDVISKFANVGLHPTVMTYNMLMNAYARGGQHSKLPELLEEMAAHNLKPDSVTYSTMIYAFLRVRDFSQAFFYHQEMVKSGQVIDFNSYQKLRAILDAKAAIKNRKDRRSLIGVVRNKMGV

SEQ ID NO: 267599 - protein, 70 aa, Glycine max
  unsure (1)..(70): unsure at all Xaa locations
  Clone ID: PAT_MRT3847_83665C.1.pep
NQLHAAAAIVIFTTPPLRSIRLVKRAKXNTAALAGLXGRGKTXIFYQLRDGTTPQGTVTPMEPNEGTLIL

SEQ ID NO: 267600 - protein, 113 aa, Glycine max
  Clone ID: PAT_MRT3847_83666C.1.pep
VSAGVLLLVSAVFSLPGLLLGWPLLLSCACPLPLFSALSWALLSRLFILFSCLSGLVVPSSACSLSVFFRVSLRVCLGVRVCFQQVAASGVGGGLFALVSLRPVFVACFCSEF

SEQ ID NO: 267601 - protein, 93 aa, Glycine max
  unsure (1)..(93): unsure at all Xaa locations
  Clone ID: PAT_MRT3847_83667C.1.pep
TRQRGRPGEREQGAGAGTNQRRDXDGTVGPARGTGSPPPAPARAEGGRARATPRGTANQERRAEAQKEKREGSRARQALREAEPQPGKSAHAG

SEQ ID NO: 267602 - protein, 93 aa, Glycine max
  Clone ID: PAT_MRT3847_83668C.1.pep
LPVMGILPWQVLEGPSGMDTCFYSEYPYDWPRFCLNSTRVKWAGIWNLNSKAAGWFSPSKLFHGPHSIKVPVIPCFPGVPKHHRLKKTMCNWQ

SEQ ID NO: 267603 - protein, 49 aa, Glycine max
  Clone ID: PAT_MRT3847_83669C.1.pep
TFLFTGCIRSLLTISFLGSAHAMLVSFRELDALHVNHRRRCRLIRYSTN

SEQ ID NO: 267604 - protein, 69 aa, Glycine max
  Clone ID: PAT_MRT3847_8366C.1.pep
KTGDYVHPMTTLQKGTPLKKNPSLLPKVENSLLPQLSFKQRHNYRKGTLLPESYFTLEKDIYFTLECRT

SEQ ID NO: 267605 - protein, 54 aa, Glycine max
  Clone ID: PAT_MRT3847_83670C.1.pep
KSTEIEIIAIISQASNTLCTTRRSRDFTYSQQDHYTALEAFQCTLMQKLVQKPL

SEQ ID NO: 267606 - protein, 175 aa, Glycine max
  Clone ID: PAT_MRT3847_83671C.1.pep
MSQRGLIYSFVAKGTVVLAEHTQYTGNFSTIAVQCLQKLPSNSSKYTYSCDGHTFNFLLDNGFVFLVVADESIGRSVPFVFLERVKDDFMKRYGASIKNDGAHPLADDEDDDSIWVPTSDRLWIPTTVGLWISTTIRIWVPTSGSETKEEQIWNGIGSRIAWWCLGWNVDRRHGI

SEQ ID NO: 267607 - protein, 94 aa, Glycine max
  Clone ID: PAT_MRT3847_83672C.1.pep
VGPPSNEGTRFSPIFWKRNYQNCLVIFVFHMWIALCITIIDTVMGFLSNGYCLLYFYWRITRDWSARARRASKGFLKLRTTGSVVGSRKSLNAA

SEQ ID NO: 267608 - protein, 78 aa, Glycine max
  Clone ID: PAT_MRT3847_83673C.1.pep
GFWEVSNLVAPFSGKFGPSSGAIWIVLQIFFVRLVWGFALRWWVFGFTTCSFVIRGCDVFVLLGMLFYRFVCFGHYPP

SEQ ID NO: 267609 - protein, 168 aa, Glycine max
  unsure (1)..(168): unsure at all Xaa locations
  Clone ID: PAT_MRT3847_83674C.1.pep
MSQRGLIVRFVAKGTVVLAEHTQYTGNFSTIAVQCLQKLPSNSSKYTYSCDGHTFNFLLDNGFVFLVVADESIGRSVPFVFLERVKDDFMKRYGASIKNDGAHPLADDEDDDDLFEDRFSIAYNLDREFGPALKEHMQYCLNHPRKNEXLSKLKAQINEVKGIMMDNI

SEQ ID NO: 267610 - protein, 54 aa, Glycine max
  Clone ID: PAT_MRT3847_83675C.1.pep
GQDGPDQAPGICSGHLALYPECLILCWAFPLRFRTIFFEVGCEHCTMAGFTTVP

SEQ ID NO: 267611 - protein, 365 aa, Glycine max
  unsure (1)..(365): unsure at all Xaa locations
  Clone ID: PAT_MRT3847_83676C.1.pep
MVLALRMTVPIHLPMMRTMTICLRTDLHCRLEPISIKISQVSVPNKTHQSLSPSVIIYSFSSIQNPQKLFLSAMTMEYRTLELNIISAKDIKNVNLFSKMDVYAAVSLSGDPLHPQGATTHVHKDAGSNPTWNYPVKFSVNESLAKENRLSLEIKLISDRTLGDTVIGTVHVPLRELLDNPGDDSSFRQVSYQVMKQSRKSKGSLNFSYKFGEHVPAPAAKTPKAAKAGQEPVMAYPPAGAGSSSMPYGTPHPPPPQQYAATGEYGYPPQQVHGGYPXPQAAYGSPQAGYGYPQHQSGYVYPQQSGYGYPPQAQKPKKNKFGMGLGAGLLGGALGGMLIGDMVSDAAEYDAGYDAXFDDAGGFDF

SEQ ID NO: 267612 - protein, 125 aa, Glycine max
  Clone ID: PAT_MRT3847_83677C.1.pep
RRKKSSSKGEVQEQCRKNVETSTHIADQDVTKPCDVALCNTSDDCSHGQWGNIVLKHLYQSLGDGNGGIEGCIREALIHYPKHNHTTTVMETFKIDKDGQECSLQFEPLSHRTEKEANGHADVRC

SEQ ID NO: 267613 - protein, 57 aa, Glycine max
  Clone ID: PAT_MRT3847_83678C.1.pep
ICGELVPESVVKNRFKPIVSFFIVFFFIYQSILSQIKAQCLLLSYKGSYMKFTYKLV

SEQ ID NO: 267614 - protein, 129 aa, Glycine max
  Clone ID: PAT_MRT3847_83679C.1.pep
LFRLYFSCPCTFWPYHRSGSLRIVKECYIPFRRLSRAVFIFIMLIPFSEGAWIHFEIWHKTWGIVNRGSIGLCTPGLFVPTTMLVQGHEHMFIYLLNCTAVTLDTPVYGYSPYRACYGIIFMLGPVMTA

SEQ ID NO: 267615 - protein, 53 aa, Glycine max
  Clone ID: PAT_MRT3847_8367C.1.pep
SVITSVLSHACVIKADKSKYVQHRALRLKHSSILRYLYGYSSQQLIMTGRTRG

SEQ ID NO: 267616 - protein, 53 aa, Glycine max
  unsure (1)..(53): unsure at all Xaa locations
  Clone ID: PAT_MRT3847_83680C.1.pep
RGYHHLTKLKXANASXGRLKPGNLQLSYKNLPTPRGKQAQLKRKGPVLYLGDW

SEQ ID NO: 267617 - protein, 88 aa, Glycine max
  Clone ID: PAT_MRT3847_83681C.1.pep
THMLVSKIKPCMCKYELIQTVKLRMAHSISYSMLDGIYYSDNRSHSKANTCNESRLLVGMHLLDRRSTQALPVTLMIHDSSSDRTAFV

SEQ ID NO: 267618 - protein, 72 aa, Glycine max
  Clone ID: PAT_MRT3847_83682C.1.pep
CCKSNFSLTSTFTPIKLGLGAPIVKRYYTWLVHYALMVYCCVSKLVAQSAGDNAFSNVAGVVSTAGLTRLSQ

SEQ ID NO: 267619 - protein, 76 aa, Glycine max
  unsure (1)..(76): unsure at all Xaa locations
  Clone ID: PAT_MRT3847_83683C.1.pep
MIYLLQWRIIGSNLAEAPVACKEKVQDLXGKMLPLEGEDDQGPPXAVGFRQPRWPQITMKIEGCKPLASSKGLEAV

SEQ ID NO: 267620 - protein, 96 aa, Glycine max
  unsure (1)..(96): unsure at all Xaa locations
  Clone ID: PAT_MRT3847_83684C.1.pep
SASPSMAAPSLSSFLNSLSXPCLSFSFCTGSRHFFLLPPPSHQPSKPLFLTLKSKPSYYIYTSFFDKNGQVVVLVGKAKEVIAAVHNSAFNACSNI

SEQ ID NO: 267621 - protein, 88 aa, Glycine max
  Clone ID: PAT_MRT3847_83685C.1.pep
YVSMYCTLLPMAQPFPPVSPLSPPPILSSFIAYRLTTAPVCLLYLLRLRYSIVIIMPPFLPLLVYPPAPPPPQRRRTSYSDDGKPSWN

SEQ ID NO: 267622 - protein, 47 aa, Glycine max
  unsure (1)..(47): unsure at all Xaa locations
  Clone ID: PAT_MRT3847_83686C.1.pep
LVHRISEDTDVARELCLVRKNSPSPVCVCGFIPLLSYSTTRTYAWXP

SEQ ID NO: 267623 - protein, 85 aa, Glycine max
  Clone ID: PAT_MRT3847_83687C.1.pep
KRKGGLVLISTNGDTYILDRIPYRFLCNYLRLRVSETKQITLLLLTVPPFLVSEPFSNSCGREKNRLLTGELNICSGLFQGWNHC

SEQ ID NO: 267624 - protein, 57 aa, Glycine max
  Clone ID: PAT_MRT3847_83688C.1.pep
SGLWDELCILYVWSVRFTTILILRCSHTTIYLLHEDNYFQIPTFLTITTEHIKAYRN

SEQ ID NO: 267625 - protein, 165 aa, Glycine max
  Clone ID: PAT_MRT3847_83689C.1.pep
MASLPLGHHHHHHKPAAAAIHPSQPPQSQPQPEVPRRSSDVETDKDMSATVIEGNDAVTGHIISTTIGGKNGEPKETISYMAERVVGTGSFGVVFQAKCLETGEAVAIKKVLQDRRYKNRELPLMRLMDHLDGISLKHCLKLIPEHVRRQTGLGFLYSAETQTQM

SEQ ID NO: 267626 - protein, 84 aa, Glycine max
  Clone ID: PAT_MRT3847_8368C.1.pep
GSDLLILLLLLVLLKMKYLSYHPRPKARRRTPIQSAIEKPQKPWRKGGNRTLRTQGDGKEQKEWKHTRMAETPRPLRTRVKESL

SEQ ID NO: 267627 - protein, 55 aa, Glycine max
  Clone ID: PAT_MRT3847_83690C.1.pep
MKYYTESPTFKLYRATNTCIHLHKGEEKLHIMLGLPVIHRPQTALLLIHIDHYVG

SEQ ID NO: 267628 - protein, 524 aa, Glycine max
  unsure (1)..(524): unsure at all Xaa locations
  Clone ID: PAT_MRT3847_83691C.1.pep
KSSLVFSSQGLGLYLVKAILKCNVNGNVSPTRPKGKRREKRRRRVFLTSHGLLALGAPPPPPQTGGGVRSPEDRKGRGERNKEEKCFSHQQDSIDLQRRVFPHSIASSPSVHPHHHQPAAATIHPSQPPQCQPQPEVPRRSSDMETDKDMSATVIEGNDAXVTGHIISTTIGGKNGEPKQTISYMAERVVGTGSFGVVFQAKCLETXEAVAIKKVLQDRRYKNRELQLMRLMDHPNLTYMKHFLISSSSKDXLFLNLLMRYVPESINRIINHYTTINQRMPLIYVKLYTYQIFRGLAYIHTALRVCHRDVKPQNLLVHPLTHQVKLCDFGSAKVLVKGESNISYICSRYYRAPELIFGATEYTPSIDIWSAGCVLAELLLGQPLFPGENQVDQLVEIIKVLGTPTREEIRCMNPNYTDFRFPQIKAHPWHKVFHKRMPPEAIDLASRLLQYSPSLRCTALEACAHPFFDELREPNARLPNGHPLPPLFNFKQELAGASPELINRLIPEHIRRQMGLSFPHSAGS

SEQ ID NO: 267629 - protein, 141 aa, Glycine max
  Clone ID: PAT_MRT3847_83692C.1.pep
QSLKNFLPLVQERGAKIPAPIWEVEVVAPAAAPPPPCLSLVLQRVFDCESRCSAPKVLLSDTSYLVLLTCTLWHHKFLQSFWQHLLPCSLLLTPRKARTKTCLLEKHYAEAVMVNPDDLSHAVFSRMLQHIPGQHILAHEC

SEQ ID NO: 267630 - protein, 437 aa, Glycine max
  Clone ID: PAT_MRT3847_83693C.1.pep
MADAHGTDKNIEVWKIKKLIKALEAARGNGTSMISLIMPPRDQISRVTKMLGDEFGTASNIKSRVNRQSVLGAITSAQQRLKLYNKVPPNGLVLYTGTIVTDDGKEKKVTIDFEPFRPINASLYLCDNKFHTEALNELLESDDKFGFIVMDGNGTLFGTLSGNTREVLHKFSVDLPKKHGRGGQSALRFARLRMEKRHNYVRKTAEHATQFYINAATSQPNVSGLILAGSADFKTELSQSDMFDPRLQAKILNVVDVSYGGENGFNQAIELSAEILSNVKFIQEKRLIGKYFEEISQDTGKYVFGVDDTLKALEMGAVETLIVWENLDMNRYVLKNSATGEVVIKHFNKEQDANQSNFRDPESNADFEVQEKLSLLEWFANEYKRFGCTLEFVTNKSQEGSQFCRGFGGIGGILRYQLDMRSFDDFSDDGGVYDDSE

SEQ ID NO: 267631 - protein, 46 aa, Glycine max
  Clone ID: PAT_MRT3847_83694C.1.pep
GLQFYSPGLEMEVKGPNQIFLGHQSGFLGGLTNNPGHLFQFHPFSG

SEQ ID NO: 267632 - protein, 59 aa, Glycine max
  Clone ID: PAT_MRT3847_83695C.1.pep
YKIPLLMGHLRTIQNAPMGLDYDHDIKISECVKEMFVMCLRKDQTKRSSVENVIAHSFF

SEQ ID NO: 267633 - protein, 67 aa, Glycine max
  unsure (1)..(67): unsure at all Xaa locations
  Clone ID: PAT_MRT3847_83696C.1.pep
DIEVFSFTYHDPAIALGWVRETVDSIKYLQIRHVLSHAVILRMIVTSALIIWKAFMSVTGXSESPVV

SEQ ID NO: 267634 - protein, 74 aa, Glycine max
  Clone ID: PAT_MRT3847_83697C.1.pep
RSGSLWQFQKGPIFLNPPKGTLIDTPKAPPGCDPLLVHGGMNTDWDYLRGSIAAMHSVENHTFCPVNWFFHFIA

SEQ ID NO: 267635 - protein, 93 aa, Glycine max
  unsure (1)..(93): unsure at all Xaa locations
  Clone ID: PAT_MRT3847_83698C.1.pep
MEDITEGVNNINIXSDSYKKNRIQVSNTKKPLFFYVNLAKRYMQQHDEVELSALGMGIEIPLVFFPLLFLEFRLLVLLISNADSFFSFIQVLF

SEQ ID NO: 267636 - protein, 40 aa, Glycine max
  Clone ID: PAT_MRT3847_83699C.1.pep
LEDKLKINNCTRETGKYTRNCSPIQSNSKLKPHENNSFNN

SEQ ID NO: 267637 - protein, 273 aa, Glycine max
  unsure (1)..(273): unsure at all Xaa locations
  Clone ID: PAT_MRT3847_8369C.1.pep
MALSFNNRRIPLALRIFLLFSLFFSLSPTFAQDSLVQNAKEDSGGSVDLGRRAKIALNDIENDSILSLGLDSTGPGLFDAFFASFSMILVSEIGDETFIIAALMAMRHPKSIVLSGALSALIIMTVLSTGLARFFXNLISMKHMYIAWRSSDSKSSQKKEMEEVEEKLDGGQGKTSVRRFFSRFCTPIFLESFILTFLAEWGDRSQIATIALATHKNAIGVAVGATIGHTICTSLAVVGGSMLASKISQRSVATVGGLLFIGFSISSYFYPPL

SEQ ID NO: 267638 - protein, 56 aa, Glycine max
  Clone ID: PAT_MRT3847_836C.1.pep
VAFETGVDFRMGCNIYDQHWPIRWFTAYFLLKSVQYLIVCVTCMLFTCWIVSARSP

SEQ ID NO: 267639 - protein, 75 aa, Glycine max
  Clone ID: PAT_MRT3847_83700C.1.pep
DIYNFEVNNTELFIILGCDGLWGVFGPSDAVDFVQKLLNEGLPVATVSRRLVREAVRERPCKDNCSAIIIVFKHN

SEQ ID NO: 267640 - protein, 80 aa, Glycine max
  Clone ID: PAT_MRT3847_83701C.1.pep
MEDITEGVNNINISDSYKKNRIQVSNTKKPLFFYVNLAKRYMQQHDEVELSALGMGIEIPLAFFPLLFLEFRLLVLLVAY

SEQ ID NO: 267641 - protein, 63 aa, Glycine max
  Clone ID: PAT_MRT3847_83702C.1.pep
GIPNFVTVSTRLSSLSFAPLQSQFLGRSLSPLHVSLKCVYVVFATYRKNVLHGSVSVPVKYEK

SEQ ID NO: 267642 - protein, 58 aa, Glycine max
  Clone ID: PAT_MRT3847_83703C.1.pep
NARQESHVDKEWVKPGGPCTFAEIDLDSTYSNILAFGLPGNTVRYLVRFHLFGILAIR

SEQ ID NO: 267643 - protein, 78 aa, Glycine max
  unsure (1)..(78): unsure at all Xaa locations
  Clone ID: PAT_MRT3847_83704C.1.pep
LPLTSSAQDEEKLVVEPSHTKTSLPQLPAKDINNKISLVXTLAALGLFLSTRLDFGVSLKDLSAIAMPYEEALSNGKP

SEQ ID NO: 267644 - protein, 67 aa, Glycine max
  Clone ID: PAT_MRT3847_83705C.1.pep
SRKQKQLSLDPQESSNCLLLVGVRSLKGKKITLWAGHRLRESFAFPLLVYLLNTLLLEIGLHDRLKL

SEQ ID NO: 267645 - protein, 111 aa, Glycine max
  Clone ID: PAT_MRT3847_83706C.1.pep
RWLYVWLCRSSAIAMKEIDMSEPRSSFSKDELENDCDFYVASSSRLGGNFNAQNLIPEDVRDNSSLLSEESSSRTAERGVSTAHSPSTILTGENRRKHRNAFASPRKHRNV

SEQ ID NO: 267646 - protein, 64 aa, Glycine max
  unsure (1)..(64): unsure at all Xaa locations
  Clone ID: PAT_MRT3847_83707C.1.pep
SGHFKVTVRKQRATVRTPWNXDSTTQSFWQLSIDLLGGGIPVDKTXDWITLIQNSSIRNLERAA

SEQ ID NO: 267647 - protein, 147 aa, Glycine max
  Clone ID: PAT_MRT3847_83708C.1.pep
MAELHYQPQHQYPHRYPNDPHQQTRSSTHQVVKAATAVTAGGSLLILASLILAATVIALTIVTPLFVIFSPVLVPAVITVALLSLGFLASSGFGVAAITVLAWIYRYVTGKQPPGADQLDSARHKIMDKAREIKDYGQQQISGVQAS

SEQ ID NO: 267648 - protein, 109 aa, Glycine max
  unsure (1)..(109): unsure at all Xaa locations
  Clone ID: PAT_MRT3847_83709C.1.pep
AFSFFGGGAXQXPPPPLIIIPLPGGXPXPSIRPDGPPLLPRPAPPPSPPSPRPPPPPAPRPPPXPLPTPAPPRPPPPPXPRPPPPPPPFLPPPPLPCSSPERPRPPPPP

SEQ ID NO: 267649 - protein, 360 aa, Glycine max
  unsure (1)..(360): unsure at all Xaa locations
  Clone ID: PAT_MRT3847_8370C.1.pep
DGSFHKRLNKAGIYMVEDFLKLVVRDPQRLRNILGSGMSNKMWDILVEHAKTCVLSGKLYVYYPEDARNVGVVFNNIYELSGLIANDQYYSADSLSANQKVYVDTLVKKAYDNWMHIIEFXELNKKXLVVSSFGSQSFLTFRVGVRIYNLTRGKNKKSGLTLXVPTQLKVDSGVTVGGYHDGTASRFFLQPHPNLNSSIQFDDDAFPLQNQLMSASHHAQLPRNENGQTIGPPQSSTHGFEPVSISNPTYRGVEEYFPEEEIRIRSNEMLENEDMQHLLRIFNMGGQSHPTLNAQDDGYPSSSTYISAXPMGYNFDDEPNRSSGKAVVGWLKLKAALRWGIFIREQAAERRAQLVELDDP

SEQ ID NO: 267650 - protein, 150 aa, Glycine max
  Clone ID: PAT_MRT3847_83710C.1.pep
AAESESSPLRNRRWTAHVPRVPAGNKTLWSSPAASEPYRRRTRATAADPNSCLFPSLRRHRHEPKLMMIQLNSVLMLMFYVLCFSFSLSLSLSECKIKKVELSGVSYLPHKTSPEFFFGSQRKKKGKEGDNFFLLHTLSVIYKTKQLNNN

SEQ ID NO: 267651 - protein, 150 aa, Glycine max
  unsure (1)..(150): unsure at all Xaa locations
  Clone ID: PAT_MRT3847_83711C.1.pep
KRFSWGSTGADIIVESTGVFTDKDKADAHLKGGAKNDIISDTSKDAPMLXVGANEHEYKPKLDIIYNASCTTNCTAAIAKVINDRFGIXEGMMTTDNSITVTQKTDDGPSTKDWIGGRAASFNIIPSSTGAVKADGKDLPAMNGKLTGMA

SEQ ID NO: 267652 - protein, 35 aa, Glycine max
  unsure (1)..(35): unsure at all Xaa locations
  Clone ID: PAT_MRT3847_83712C.1.pep
XFCPSIXKXLTPPRSGXVILPKQAFDEANFPSLTH

SEQ ID NO: 267653 - protein, 239 aa, Glycine max
  unsure (1)..(239): unsure at all Xaa locations
  Clone ID: PAT_MRT3847_83713C.1.pep
KCLIPRYEILKSVLCEDREVVRALRNSPFGFKYCDFLTTLVPNIWFYEESGVAHDSINYLIDECXALASGDHSKFVEAVNTAKEIGFNPLKRTFVVGVEVLAIKSKAVWESRFEVYERCGWNREIALGAVRKFPSIVKLSEEVFIKKMSFLVKDMGWSSEDIAEYPQVVTYNLEKRIIPRFSVIKMLKSKGLLKKNLHFSSIICITEEKFLEKFVVNFQKDLPFLPDVYKGVINPPNVL

SEQ ID NO: 267654 - protein, 115 aa, Glycine max
  Clone ID: PAT_MRT3847_83714C.1.pep
VLKNEKCKCHTNQGPPMCVSIGLILGIIRSSGLIRLTNPSTKVVLLPLIDTLRAVSSLLAVTGMRNMLGLFCKMGCASSHMSRSAFPFTFLFKPLRSSGVISLTPPFQSKGRSRS

SEQ ID NO: 267655 - protein, 101 aa, Glycine max
  Clone ID: PAT_MRT3847_83715C.1.pep
WGLGPGYTNESCDLIVSHQNCLKNGRPDREFLYWRWAPRDCDLPQLDPERFLYMMWSKAWALVGDSISLNNVQSLLCILAKILFFWFQCQMLEGWVIYFEQ

SEQ ID NO: 267656 - protein, 66 aa, Glycine max
  Clone ID: PAT_MRT3847_83716C.1.pep
RSSTTMEMRCQMITHSITSGAYGNAWLLHSLWARWRRLRHHNSCSMPTSRVQITNHPNLNLSWDCF

SEQ ID NO: 267657 - protein, 51 aa, Glycine max
  Clone ID: PAT_MRT3847_83717C.1.pep
YIYSYFSILKNSITILINYYAIMNFFVKITNIPTHYSQRYRTQPYPTSRLL

SEQ ID NO: 267658 - protein, 349 aa, Glycine max
  unsure (1)..(349): unsure at all Xaa locations
  Clone ID: PAT_MRT3847_83718C.1.pep
RHKQEIVRLLKEEGEVVAMTGDGVNDAPALKLADIGIAMGIAGTEVAKEASDMVLADDNFSSIVAAVGEGRSIYNNMKAFIRYMISSNIGEVASIFLTAAYSFPXHSTPVQLLWVNLATDGPPATALGFNPPDKDIMKKPPRHSDDSLINLWILFRYLVIGIYVGLATVGIFIIWYTHGSFFGIDLSGDGHSLVTYTQLANWGQCSSWQNFTASPFTAGAKTITFDNPCDYFSTGKVKAMTLSLSVLVAIEMFNSLNALSEDGSLLTMPPWVNPWLLLAMSVSFGLHFLILYVPFLAQVFGIVPLSFNEWLLVLVVALPVILIDEILKFVGRCTSSRASSARKSKQKSE

SEQ ID NO: 267659 - protein, 53 aa, Glycine max
  Clone ID: PAT_MRT3847_83719C.1.pep
LFWYLFRLIYFRSKNRLCVINVYLILDNTTCPVAIKVPVKTTCLVTKSQIVPI

SEQ ID NO: 267660 - protein, 201 aa, Glycine max
  Clone ID: PAT_MRT3847_8371C.1.pep
TTLAQDSLGQNPPPNSRRIWWEIVRRAKSPSTGIENDSILSLGLDSTGPGLFDAFFASFSMILVSEIGDETFIIAALMAMRHPKSIVLSGALSALIIMTVLSTGLGRIVPNLISRKHTNSAATVLYAFFGLRLLYIAWRSSDSKSSQKKEMEEVEEKLDGGQGKTSVRRFFSRFCTPIFLESFILTFLAEWGDRSQIATIA

SEQ ID NO: 267661 - protein, 106 aa, Glycine max
  Clone ID: PAT_MRT3847_83720C.1.pep
RVMIWLSALGGAGPISSTGSAIATVTVAGKQFKLYKGPNGQMTVFSFVAVSPINSFNGDLNAFLVYLRSSQGLPASQILQSVGAGTEPFSGSNAVLTTTAFTLSEK

SEQ ID NO: 267662 - protein, 67 aa, Glycine max
  Clone ID: PAT_MRT3847_83721C.1.pep
IVTNNSHFISAFFNRINFKSLNIIRSVITLISTINFILKYVLRTLKLISYTINQAYSKLHPHEKLQY

SEQ ID NO: 267663 - protein, 103 aa, Glycine max
  unsure (1)..(103): unsure at all Xaa locations
  Clone ID: PAT_MRT3847_83722C.1.pep
LRRCHRRDGHRRRHSVVPRCWTDGTPSNHFASFKXKFAKTYAXKEEHXXRFGVFKSNLRRARLYAKLDPXAVHGVTKFSDXXPAEFRRQFLXXKPLXFXAHAQ

SEQ ID NO: 267664 - protein, 65 aa, Glycine max
  Clone ID: PAT_MRT3847_83723C.1.pep
PTLLYLFQQDPELQAWWKELVQVGHGDLKDKPWGQLRLINLLFVTMEQEWLKLDLLEMMPHVLCF

SEQ ID NO: 267665 - protein, 171 aa, Glycine max
  Clone ID: PAT_MRT3847_83724C.1.pep
LLLATINHVFDIIIPSYFDCCIYVMMSGLDLERLVLAAGPLGIMQACLDVVLPYVRQREQFGRPIGEFQFIQGKIADMYTSLQSSRSYVYSVARDCDNGKVDPKDCAGAILCAAERATQVALQAIQCLGGNGYVNEYPTGRLLRDAKLYEIGAGTSEIRRMIIGRELFKEQ

SEQ ID NO: 267666 - protein, 81 aa, Glycine max
  Clone ID: PAT_MRT3847_83725C.1.pep
VHNLARFISVMQFHPLSWRTSHSYVMVDRFEDITPPEKVHANNKCDRKVTLYGYLRGCNLKMGNKVHIAGVGDYHVAGITA

SEQ ID NO: 267667 - protein, 57 aa, Glycine max
  Clone ID: PAT_MRT3847_83726C.1.pep
SVPLFRCILSYGSSYALIIWATTIPATMSAENYKFRPPTGYCEAQTFQLRSCAIAFT

SEQ ID NO: 267668 - protein, 92 aa, Glycine max
  Clone ID: PAT_MRT3847_83727C.1.pep
MHDMEHNSSEHNALIPKTLRIDDPREAAKSSISMWSKLGIKNDDKASSGGLFKAFPSSKGNDINHQMVEASSPVLQANPAALSRSLTFREQT

SEQ ID NO: 267669 - protein, 108 aa, Glycine max
  Clone ID: PAT_MRT3847_83728C.1.pep
MATMTGVSLSCPRVFFNASGSPQNAHAQYCILSSRFYDLTGLQNGILKRGREIFLTGCYLRTPTGGSGHSRLLPTEYLVILLDEVMVKDFLILNLSTVKFNWANKRSE

SEQ ID NO: 267670 - protein, 41 aa, Glycine max
  Clone ID: PAT_MRT3847_83729C.1.pep
YIQVGILQLYHLIVGNMEPALNSITPLWVLTLIPPKNKEYI

SEQ ID NO: 267671 - protein, 59 aa, Glycine max
  Clone ID: PAT_MRT3847_8372C.1.pep
EMGIAPHRNNYVNAIKVANQSPQFEARRKKILSMKKMVETNITGPQNRTNVKIGTHGDI

SEQ ID NO: 267672 - protein, 103 aa, Glycine max
  unsure (1)..(103): unsure at all Xaa locations
  Clone ID: PAT_MRT3847_83730C.1.pep
RMLACXQLGXRLXLCLXXXAFPXXXVRSXXVLXNXFVSLXXXXXHXRXRFXGXLXFXVPFVPXXFLINCVXCHRLSVXAXVXVPGHAXSWGVGCPDLWPXPSC

SEQ ID NO: 267673 - protein, 69 aa, Glycine max
  Clone ID: PAT_MRT3847_83731C.1.pep
IIRQGTCFLAAFSISFINHTWYASAPPKCACCFVMSDIYFYTKNGTTLIKDTIINAILYYFWFKIYFNN

SEQ ID NO: 267674 - protein, 279 aa, Glycine max
  unsure (1)..(279): unsure at all Xaa locations
  Clone ID: PAT_MRT3847_83732C.1.pep
MSNSNPLPLKRQGEQSSDDGASAIKPSRLKIAIPSEDSDKKNANRRLKDVEICVPIVYGTIAFYLGRKASESQSHKWTVYVRGASNEDLGVVVKRVVFQLHPSFNNPTRVVESPPFELSECGWGEFEIAITLYFHPDVCEKQLDLYHHLKLYPEDESGPQSMKKPEVVESYNVNVLPEPSXVFAHVSLNHPAVNVPRLPAGLNKQSPVPIDTVNDKEIGDTXDHPLTQWFMNFSEADELLKLAAARQQVQAHIVKLRRQLSLVEGLPQLSKPPSGYECT

SEQ ID NO: 267675 - protein, 107 aa, Glycine max
  Clone ID: PAT_MRT3847_83733C.1.pep
EIVFLEPSEVFFARVQNHPAVNVPRLPAGLNLPSPVPSDTVNDKERGDTKDHLLTQWFLNFSEADELLKLAAARQQVQAHIVKLRRQLSLVEGLPQLFKPPSGYECT

SEQ ID NO: 267676 - protein, 64 aa, Glycine max
  Clone ID: PAT_MRT3847_83734C.1.pep
FSRAIIKQLWRALIGGCDLKSALAHPLRFSHGKQRYDNGLLHTINVTLIPRHPQSRSVIGQLHA

SEQ ID NO: 267677 - protein, 120 aa, Glycine max
  unsure (1)..(120): unsure at all Xaa locations
  Clone ID: PAT_MRT3847_83735C.1.pep
SNRNGVAWLSHPYPICRPWSTIVSALTGGKSTTVSKSSDPXLAVNDKGAATXAWKPAGTENAMIDRVKPXRPTRAGIRIMEHCRKALHNEHPEDKAEFPAGKSAEATCKTMYDAEEAPYV

SEQ ID NO: 267678 - protein, 78 aa, Glycine max
  Clone ID: PAT_MRT3847_83736C.1.pep
LSPPDFQYGMFGSTLLSQKSIHFYALIMRELPGTLTFTHFSWAFFGFKAKRFGAYTKISASGRVKGPNETTGYFNPTK

SEQ ID NO: 267679 - protein, 50 aa, Glycine max
  Clone ID: PAT_MRT3847_83737C.1.pep
LRAEIRQMLASRGPYLLDVSVPRQEHVLPMIPSNGSFKDVIPHGDGITRY

SEQ ID NO: 267680 - protein, 44 aa, Glycine max
  Clone ID: PAT_MRT3847_83738C.1.pep
HAYLLHIRTYSSYILTNSKCKHPFILFHRNLQFFLIKHSPHSIL

SEQ ID NO: 267681 - protein, 89 aa, Glycine max
  Clone ID: PAT_MRT3847_83739C.1.pep
ERELRSKRFLPKKRFPKLVEPKKEFIHCDGKVAEKGENSKVGFEWGWVRGVNVGKMEGLGLLLPMCLTQYDQTGPPLLCLLAPEEGTRR

SEQ ID NO: 267682 - protein, 48 aa, Glycine max
  Clone ID: PAT_MRT3847_8373C.1.pep
QSSFIFLEPKEAQFFENQGFRKLLRESNIINVMERNRNLLKWSFKEGS

SEQ ID NO: 267683 - protein, 57 aa, Glycine max
  Clone ID: PAT_MRT3847_83740C.1.pep
SGLYIAKDDIKQSQLHITLYTTYTKALTLNEDSLDAMSIPADKLDSTSECSTTGTCQ

SEQ ID NO: 267684 - protein, 48 aa, Glycine max
  Clone ID: PAT_MRT3847_83741C.1.pep
MIILTTISIVGTMRDMGLLSNFLTEGNFRASVDLQRTHRIRGMIKMVA

SEQ ID NO: 267685 - protein, 426 aa, Glycine max
  Clone ID: PAT_MRT3847_83742C.1.pep
MTEKLSNNPSLNVPLLSEWNHHDEEKAIASHPSTKNTVSFFRTCLNGLNAISGVGILSVPYALASGGWLSLVLLFAIAAAAFYTGTLIKRCMDKNSNIKTYPDIGELAFGKIGRLIISVSMYTELYLVSIGFLILEGDNLNNLCPIEEVQIAGFVIGGKQLFVILVALIILPTVWLDNLSMLSYVSASGVFASAVIILSISWTGTFDGVGFHQKGTLVNWRGIPTAVSLYAFCYCAHPVFPTLYNSMTNKHQFSNVLLVCFLLTTVGYASMAIIGYLMFGADVESQVTLNLPLNKVSSKLAIYTTLVNPISKFALMATPITNALKDLLPRAYKNRATNILVSTVLVISATIVALSVPFFGDLMSLVGAFLSVTASILLPCLCYLKISGTYNEFGCETIAIVTIIVAAIAMGISGTYTSVMEIVHHL

SEQ ID NO: 267686 - protein, 44 aa, Glycine max
  unsure (1)..(44): unsure at all Xaa locations
  Clone ID: PAT_MRT3847_83743C.1.pep
PERVIXSPTFLGNWLAMMFVRSIFTPRLSAPSCSCQDEIRCDSF

SEQ ID NO: 267687 - protein, 179 aa, Glycine max
  unsure (1)..(179): unsure at all Xaa locations
  Clone ID: PAT_MRT3847_83744C.1.pep
NSARVELLGGKAGVSCGSYHYGSAFGVRFGHADKVETISETLVSKGFNYSGKDFIYSGXDKMHARGSGPRVMLTRQPTEGRARNGGLRVGEMERDCLIAYGASMLIYERLMLSSDPFEVQVCTACGLLGYYNHKLKTGICSSCKNGDNISTMKLPYACKLMIQELQSMNIVPRLKLADA

SEQ ID NO: 267688 - protein, 90 aa, Glycine max
  Clone ID: PAT_MRT3847_83745C.1.pep
LSIGFEIKPCWILLSEAMLLGLYGSVGGSLGISLLFMFFLFCCCFSSSLRLVVVLLVCLCLYAGSSCLKQFASCGPCVELIGIKKNPPFK

SEQ ID NO: 267689 - protein, 315 aa, Glycine max
  Clone ID: PAT_MRT3847_83746C.1.pep
DPRVLEHTRTKKTVSSANFHYGAYRANAQSFKGNGGEVVDRVVLCSDKDNNMCIKFLIRHTRRPELGDKFSSIHGQKGVWGTIVPQEDFPFSEKGICPDLIMNPHGFPSRMTVGKMIELLGGKAGVSCGRFHYGSAFGERSGHADKVETISETLVSKGFNYSGKDFIYSGITGCPLQAYIFMGPIYYQKLKHMVLDKMHARGSGPRVMLTRQPTEGRARNGGLRVGEMERDCLIAYGASMLIYERLMLSSDPFEVQVCTACGLLGYYNHKLKTGICSSCKNGDNISTMKLPYACKLMIQELQSMNIVPRLKLADA

SEQ ID NO: 267690 - protein, 59 aa, Glycine max
  unsure (1)..(59): unsure at all Xaa locations
  Clone ID: PAT_MRT3847_83747C.1.pep
QGRXSHLTVLLMISGQASVHQWCVHEMIVPRIRRNPTRSEFNSQGSSEGGQVILERNML

SEQ ID NO: 267691 - protein, 291 aa, Glycine max
  unsure (1)..(291): unsure at all Xaa locations
  Clone ID: PAT_MRT3847_83748C.1.pep
MAMSYQIRNSGVFFFLCVLLFGVSALGRPATFLQDFHVTWSDSHIKQLDQGRAIQLRLDQSSGCGFASKVKYMFGRVSMKIKLVPGDSAGTVTAFYLNSDTNYVRDELDFEFLGNRTGQPYTVQTNIYAHGKGDREQRVNLWFDPAADFHTYSILWNHHHIVFYVDDFPIRVYKNNEARGIPYPKMQAMGVYSTLWEADYWAKKGXIEKIDWSKAPFYAYYKDFDIEGCAMPGPANCASNPSNWWEGAAYQALNSIEARRYRWVRVNHVIYDYCKDKSRFPVTPPECLAGI

SEQ ID NO: 267692 - protein, 84 aa, Glycine max
  Clone ID: PAT_MRT3847_83749C.1.pep
WRNRWSKAPFYAYYKDFNIEGCAVPGPANCASNPSNWWEGAAYQALNSIEARRYRWVRLNHVIYDYCKDKSRFPVTPPECLAGI

SEQ ID NO: 267693 - protein, 88 aa, Glycine max
  unsure (1)..(88): unsure at all Xaa locations
  Clone ID: PAT_MRT3847_8374C.1.pep
RFCCIGAXYEGGTPLANLAAEMPXIEVAVTDISKSRSAALNSDQLPIYHPGPDDVMKQXTSHEPFLRTDXSKHVYEATVMLVSVDTPT

SEQ ID NO: 267694 - protein, 88 aa, Glycine max
  Clone ID: PAT_MRT3847_83750C.1.pep
TAGVKSFGGVHFFRSEFVPEEARRFLAKRKKGFSVNITRIPLKGPPLYIKKNILCEKSLGKKKRGPSPGFWQQKVLSCMIRKEIPPCS

SEQ ID NO: 267695 - protein, 71 aa, Glycine max
  Clone ID: PAT_MRT3847_83751C.1.pep
ILCNGANLVQLFFLIYRQPKNGSLLDKSNGYTLENGSIFARVVFMYHLHPSNDATQAKNILPFHVWVSFSL

SEQ ID NO: 267696 - protein, 138 aa, Glycine max
  unsure (1)..(138): unsure at all Xaa locations
  Clone ID: PAT_MRT3847_83752C.1.pep
EAAAALGWGVRVSRFINPGPPGGAQGRDRSPQNQPKTTRKRGQKQEPRGHETRKEPGPKPQQPKKPGKSKNPKGGPQALGAASRMTTRTTPRGTTGRGARXPPTPPPAEAPGKPPGRGRGPPPAPGPGLRAPEPPGPP

SEQ ID NO: 267697 - protein, 107 aa, Glycine max
  Clone ID: PAT_MRT3847_83753C.1.pep
WIRLNQFIYNSNRFSLQKLSPQYCTFFKRVRDPSPAYAWLKCERHQDMNCYETLKAAGIIGRKGSNFSADERYVRLSLIKSQDDFEILTNKLRSLVAKEWESNPASI

SEQ ID NO: 267698 - protein, 208 aa, Glycine max
  Clone ID: PAT_MRT3847_83754C.1.pep
PLIILVENEADCYWCFDRAMRRMRENFRSSASSMGVQSQLATLSQIMKTVDPKLHHHLEDLDGGEYLFAFRMLMVLFRREFSFADTLYLWELMWAMEYNPYIFTKYEDPDRAKTKGPSPATNNKHLKQYGKFERKNVKTGHTEENSALSVFLVASVLEIKNRRILNEAKGVDDVVKILGDITSNLDAKKALNEALKIQKKYLSKAKKG

SEQ ID NO: 267699 - protein, 75 aa, Glycine max
  Clone ID: PAT_MRT3847_83755C.1.pep
MLSIRFTRGLRELAYLAGASHLAQDEVGNASQARRLYRDISGLVHTIYYGNGVLAFTRHLYMPEFTLCKDHCIRL

SEQ ID NO: 267700 - protein, 62 aa, Glycine max
  Clone ID: PAT_MRT3847_83756C.1.pep
IVAKAGDTVEVRDGKLLVNGAAEERQFVVEPLAYEMDPMVVPEGYVFVMGDNRNNSFDSHNW

SEQ ID NO: 267701 - protein, 208 aa, Glycine max
  Clone ID: PAT_MRT3847_83757C.1.pep
MPSAAKIHQVLEINLISAQGMKPPSSPRRRLQTYAVTWIDPATKLRTRVDKLGGHNPTWNDKFLFGVTKDFLAGDTSSVCVAIYAVGTFRHHLVGTVRFLISNMFSPDADDATPCFSAFQIRRPSGRFHGVMNIGAMVMDGSGFPALEKISALGYRDLMGEKIHQRRRRNRRKRKCCRVNLGRIFARRKGKGSLGRRRLRRRRERRRR

SEQ ID NO: 267702 - protein, 191 aa, Glycine max
  Clone ID: PAT_MRT3847_83758C.1.pep
MTELSSREVEYIRRHHSKAAEDNQCASALVKHIRAPLPLVWSLVRRFDEPQKYKPFVSRCVVRGNLEIGSLREVDVKSGLPATTSTERLEILDDNHHILSVRIIGGDHRLRNYSSIMSLHPEIVDGRPGTLVIESFVVDIPEGNTKDETCYFVEALIKCNLKSLADVSEGLTLQDHTEPIDRKYELLITRG

SEQ ID NO: 267703 - protein, 362 aa, Glycine max
  unsure (1)..(362): unsure at all Xaa locations
  Clone ID: PAT_MRT3847_83759C.1.pep
MAIRVTFSFSGYVAQSLASSAGVRVANSRCVQECWIRTRLSGATQKTDLDSSAGGVRNFAGPKPNCWAQSTYSTLTGEFLGDXCKSPIILGLISIMKSTAGVSGSSAAAAGIFGISPFKTTSIVPFLPGSKWLPCNESVPDPTTSWEVDKGGTRRVVSDTESNFAKTSWLSRLMNVCSEDAKAAFTAVTVSLLFKSSLAEPRSIPSSSMYPTLEVGDRVLTEKVSFFFRKPDVSDIVIFKAPPCLEEFGFSSSDVFIKRIVAKAGDTVEVRDGKLLVNGAAEERQFVVEPLAYEMDPMVVPEGYVFVMGDNRNNSFDSHNWGPLPVENIVGRSMFRYWPPSKVSDTDTLSKLPPGNKPVAIS

SEQ ID NO: 267704 - protein, 118 aa, Glycine max
  unsure (1)..(118): unsure at all Xaa locations
  Clone ID: PAT_MRT3847_8375C.1.pep
VIQDAESPKKENLKARPRQSQSATVTRSRIELRQYFIVFEMEEVIGPRLYGCSNCRNHVALHDDVISKAFXGKSGRAFLFSHAMNVTVGPKEDRELMTGLHTVADVYCSDCHEVLGWK

SEQ ID NO: 267705 - protein, 195 aa, Glycine max
  Clone ID: PAT_MRT3847_83760C.1.pep
MGFLELLEVASMPVIQVLLISALGALMATQFFDNILSPDIRKALNKIVFVIFTPSLVFSSFAKSVSLDDMISWWFMPVNVGLTFLIGGIIGWILVKLLKPNLKVEGLIIAACSSGNMGNLPIVIIPAICDEKGGPFGARDICRNNALSYASFSMALGGIFIWTYTYQTVKSRSLKFKALEAAEIVKVPNKNLMLL

SEQ ID NO: 267706 - protein, 69 aa, Glycine max
  Clone ID: PAT_MRT3847_83761C.1.pep
RVRTAARRRQIGSLFESITKRRFLMDVLVLYVTEEQRKLLHHEEADGGIVKTRGAQQMLNGSPYYANGF

SEQ ID NO: 267707 - protein, 88 aa, Glycine max
  Clone ID: PAT_MRT3847_83762C.1.pep
ATSMISSLTATTANRTVAGVAAPFTGLMSMVGFSAGIPSVTLPPLLATCGRVQCMQVWTPVCKKKSETISYLLDLDDAHLAKEVEYLV

SEQ ID NO: 267708 - protein, 145 aa, Glycine max
  Clone ID: PAT_MRT3847_83763C.1.pep
MELVSPRINSENHNLPQSNWHFPGSREMSELGARKPDGYDNLSQDPHQGGIVPHSHSGAHGPSIPPPQQIQSSPFVRPVYVPPNGPWDRRGINNHLPVSQFKTGVMPNNFHGNAVVSPFIPASVTPLAQIQGTPMHPYNQHVPPS

SEQ ID NO: 267709 - protein, 86 aa, Glycine max
  unsure (1)..(86): unsure at all Xaa locations
  Clone ID: PAT_MRT3847_83764C.1.pep
LANVTQASHRDTRALARQARMLALCRIEWLQAADMPTIARIEELHXMQQAMNANDSYDNIHLLLTIHMLRNNTTSKHGLSPHDSLS

SEQ ID NO: 267710 - protein, 120 aa, Glycine max
  Clone ID: PAT_MRT3847_83765C.1.pep
LEKKLTRPYLFSIPLSVDLRTTPETRGCACHETSIRMGLRHPRARGFVHCSRRPPLLLVAPLLCKQRSWSLDSLRNKVRLSRNGNWQNSHANTLHQMRTWLIYGPPTSKYALDFLLLRRC

SEQ ID NO: 267711 - protein, 132 aa, Glycine max
  Clone ID: PAT_MRT3847_83766C.1.pep
MDVRNIAVVVEDVDAARTALQWALDNIIRYGDIITLLHVYPLSRSKSKSKARLLRLRGFQLALSFQDICNNFSNTKVEIVVTEENKEGMKIVAAVREIGASMLVVGLHDQSFLYSLAMVHSNIANYFNCRIL

SEQ ID NO: 267712 - protein, 84 aa, Glycine max
  Clone ID: PAT_MRT3847_83767C.1.pep
ACSLSLSLILTHKGIDKKTSFSFQRSSSSKSERGHFLLLFFSSFQFERFSKARELIIRNEATTNSQHFPISTYARSAPSNSKLT

SEQ ID NO: 267713 - protein, 92 aa, Glycine max
  Clone ID: PAT_MRT3847_83768C.1.pep
LPFFFFSFPQIKYKVGFMFSTVFHLFAYAFIRATNIGFCPPSKKAYMPNGIKPNGMPTLETQSHFFWKPLPTMRPSLTNIVRGRFQMAGRCR

SEQ ID NO: 267714 - protein, 97 aa, Glycine max
  unsure (1)..(97): unsure at all Xaa locations
  Clone ID: PAT_MRT3847_83769C.1.pep
ARNSARGAXLASNAMAIXVLLXGDDGXLAXVPNNXSXASGEKIXXKNNAGFPHNXVFDEDEIXXGVDAGKISMSDEDLLNAPGETYSVTLDAXGTYS

SEQ ID NO: 267715 - protein, 116 aa, Glycine max
  unsure (1)..(116): unsure at all Xaa locations
  Clone ID: PAT_MRT3847_8376C.1.pep
SLYIRGLPYLKHXILGPKAKYLILRSEGLYQNLSKEKAVVKVELFITLQPQGGAAQLLLEKVLFRATNIAGVNFHELLEIPQGNRGCSHDHVSIIVISFQARIWRFCVLISILTLI

SEQ ID NO: 267716 - protein, 179 aa, Glycine max
  unsure (1)..(179): unsure at all Xaa locations
  Clone ID: PAT_MRT3847_83770C.1.pep
HHCRSCRKCVXDMDHHCPFIGNCVGAANHRSFIAFLISAVLSTIYVSIMSAYAGLRTWPPLKYSLGHINGVSSSELAWRIMNEIVVAFLRSALLLSSRGLILAYLFIASVSLQIGLSILLWQQLSYIYQGKTYLSHLSSQTDNEEEKKDCQNLVTFFGLQYSVTRFLPTFRVTRKRHIK

SEQ ID NO: 267717 - protein, 300 aa, Glycine max
  Clone ID: PAT_MRT3847_83771C.1.pep
MQARHSFPPAYAMSQQGQIPINPMLPPQNPMATMPMPMHMPLPMPLQIPFSAQDTAPSSGKRRRDDEAPGTAAAPDQSAAKRAKGQDVIFRIVVPSRHIGKVIGKEGHRIQKIREDTKATIKIADAIARHEERVIIISSKDNDEKVTDAEKALEQIAHLILKEDDSSLDASKVTAGHVAANTIRLLIAGSQAGGLIGTSGQNIEKLRDSSGASITVLAPNQLPLCASAHESDRVVQLSGDVPAVMKALEEIGCQLRENPPRQVISISPTYNYAAIRPSQPYLDPTSGQPILQLIMLHSRC

SEQ ID NO: 267718 - protein, 226 aa, Glycine max
  Clone ID: PAT_MRT3847_83772C.1.pep
MDQHRGEVLDPVHDRNLSHSVEGVAIARASISGEVGEVDEDLGSDKELKDDVKGQDKHDQENISDKLPGVDQGTSYNSNNLVNQEVIETVVVIESVQTEYANEDNTKLEAKVDESGLSLVSMKAPKGVSETDKNSCVIDIKCSSRKKIYKSSEGERICRICHLTSGQSSDATTVGTSDSATSADLIQLGCACKGKPGIAHVHCALAWFKLKGNMYLFLPNISLIIN

SEQ ID NO: 267719 - protein, 55 aa, Glycine max
  Clone ID: PAT_MRT3847_83773C.1.pep
NGAIINYSASLGNMLSNHWNRFAILCLIKLVDHIYGWIYLFFTTVYTGFFSLNMY

SEQ ID NO: 267720 - protein, 163 aa, Glycine max
  unsure (1)..(163): unsure at all Xaa locations
  Clone ID: PAT_MRT3847_83774C.1.pep
PGIIXGNPXKLIXXXLTGLCVISKSQLTSLTXAACSXXDAWTXXPQKTLFGKQHXFCIHAEEERKPATLSMTCSDPNSKWEMISDSNMHLSSKLSDGSNLCLDVDDNNIIVTNACKCLSKDKTCDPGSQWFKLIDSGRRSISTTSTLSMLNSPDLLWKSLSSI

SEQ ID NO: 267721 - protein, 57 aa, Glycine max
  Clone ID: PAT_MRT3847_83775C.1.pep
LLVIYQAENHRTRLYHQIIVSFEGQIIAKQILAKTYQKTLKKKKITLFSNIGTNATF

SEQ ID NO: 267722 - protein, 54 aa, Glycine max
  Clone ID: PAT_MRT3847_83776C.1.pep
VKLPSSKNNQPRDTLSRGYSSHGGEELTVTDSGREAPVSRLVASSWTAWADAWT

SEQ ID NO: 267723 - protein, 83 aa, Glycine max
  Clone ID: PAT_MRT3847_83777C.1.pep
HKLFGREENFFTLYGGHQPHDRTALIVYPGIKSLRQWIAYKLIRSQSTYAEWVCTLPLQEIAANFRICVSLEGSTCCWGCLRR

SEQ ID NO: 267724 - protein, 142 aa, Glycine max
  Clone ID: PAT_MRT3847_83778C.1.pep
GSQLSRRAHQFEEEESILYVSDSLGFAATDPSLRDPSLEDNDFSETAKFINQILMEDNVEQMPFYDSLNLQVTEKSFYNALTGNIPLSPNQHPLVLSPQAETTPTTSNSSNNSNHNFLDENSRELNPSPDFCSVLAFQFNPH

SEQ ID NO: 267725 - protein, 128 aa, Glycine max
  unsure (1)..(128): unsure at all Xaa locations
  Clone ID: PAT_MRT3847_83779C.1.pep
RYVLVGVPLFXLVQILFXVIANPLIXXLXXLFDXXSXLITXXQXFXXICRFRYRXNLVYXXFCSGRRNPRNPFQXXPXSRFPVXXVWLXVPTXXFPXVLSVFXDSISLSFXFFFYQSFEGNYGFVDPD

SEQ ID NO: 267726 - protein, 232 aa, Glycine max
  Clone ID: PAT_MRT3847_8377C.1.pep
MATPPVVRFPIFTAVRAVGVAVTVLLLTWAVHFRGGLALVSDNKDLIFNVHPVLMVIGLVLINGEGMLAYKTLSGTKNFKKSVHLALQFAALILSLIGVWAAWKFHIDKGIDNFYSLHSWLGLACLFLFTIQWGAGFATFWYPGGSRNSRAALLPWHVFFGIYIYCLAIATTATGILEKATFLQVNNIISRYSNEALLVNSLGILIVILGGFVILGIVTPVYGKADVIRGNE

SEQ ID NO: 267727 - protein, 74 aa, Glycine max
  unsure (1)..(74): unsure at all Xaa locations
  Clone ID: PAT_MRT3847_83780C.1.pep
TFDTYYIIGNAGDTXTFFKDLGLVNLIQQMAADMFKDIYRVCRTMIIANTXRSLILPLIYLLGSVILPKRDIPD

SEQ ID NO: 267728 - protein, 45 aa, Glycine max
  Clone ID: PAT_MRT3847_83781C.1.pep
TQSLQKGDQEMLLTVSIDTHSDRTDHSSVIMVSDHYIYRDRSSRS

SEQ ID NO: 267729 - protein, 133 aa, Glycine max
  Clone ID: PAT_MRT3847_83782C.1.pep
RLRNGNREALTALRKRARTTKSSVPSPFESIMKGVAGSSSRPLVQEVCTTCGKHDSSEQTWMMFPGTDLFARIPFHAAHTILETDQTQLDFESKRLQSIVKEKSYIISEAGVLADKISPGVLKSLVSLNDKPK

SEQ ID NO: 267730 - protein, 56 aa, Glycine max
  Clone ID: PAT_MRT3847_83783C.1.pep
GKILKMRCCLIISLVHTLLLKVIKEVLAYDLKWSHVTSIEHHMLVDSFKVHVDGTW

SEQ ID NO: 267731 - protein, 238 aa, Glycine max
  Clone ID: PAT_MRT3847_83784C.1.pep
MISVQGDLHRHHHHYHHTSRQQFTADRVEPFSVKQEPASLTLLPLRGHDSSEVDEDVHLSLAHQMYKRLEYKQALEHSNTVYERNPLRTDNLLLLGAVYYQLHDFDMCVAKNEEALRIEPHFAECYGNMANAWKEKGNIDLAIRYYLIAIELRPNFADAWSNLASAYMRKGRLTEAAQCCRQALAINPLMVDAHSNLGNLMKAQGLVQEFDTDMKLLSSSQGSDDGCSCCNFHLQDCK

SEQ ID NO: 267732 - protein, 281 aa, Glycine max
  unsure (1)..(281): unsure at all Xaa locations
  Clone ID: PAT_MRT3847_83785C.1.pep
MAASKLTSCVAVTSAAVVSMSAFSDRAYADSYFRLPFFSSKSSSEPSPPNQTSDSNSEPPPPDEPNKSGFDPESLERGAKALREINSSPYSKQLFDLMRKQEETRLAELDAEKVHYELIQSQGDIERQRKMAEEQRNLIQDQAQRQAQVLRYEDEXGNAELQTDHEAQRQHNVELVKMQEQSSFRKEQARQATEEQIQSQQRQTERERAEIERETIRVKAMAEAEGRAHEAKLTEDHNRRMLIERKQGERDKWLAAINTTFSHIEGGLRALLTDRDKLLMT

SEQ ID NO: 267733 - protein, 264 aa, Glycine max
  Clone ID: PAT_MRT3847_83786C.1.pep
YSNQREGGYERLRIGYVSSDFGNHPLSHLMGSVFGMHNRKNVEVFCYALSANDGTEWRQRIQSEAEHFVDVSAMSSDAIAKMINEDKIHILVNLNGYTKGARNEIFAMQPAPIQVSYMGFPGTTGATYIDYLVTDEFVSPLGYANIYSEKIVHLPHCYFVNDYKQKNQDVLDPNCPHKRSDYGLPEDKFIFACFNQLYKMDPEIFNTWCNILKRVPNSALWLLRFPAAGEMRLRAYAAAQGVQPDQIIFTDVATKNEHIRRSSL

SEQ ID NO: 267734 - protein, 149 aa, Glycine max
  Clone ID: PAT_MRT3847_83787C.1.pep
KLSIGILPKNSLLEKYNLLEYSKIVQALRRGDLRLLRCALQDHEDRFLRSGVYLVLEKLELQVYQRLVKKIYIIQKQKDPGRAHQVKLEVIVKALKWLEIDMDVDEVECIVAILIYKNLMKGYFAHKSKVVVLSKQDPFPKLNGKPVNS

SEQ ID NO: 267735 - protein, 988 aa, Glycine max
  Clone ID: PAT_MRT3847_83788C.1.pep
MISVQGDLHRHHHHYHHQPQLPGSADTSRQQFTADRVEPFSVKQEPASLTLLPLRGHDSSEVDEDVHLSLAHQMYKTGNYKQALEHSNTVYERNPLRTDNLLLLGAVYYQLHDFDMCVAKNEEALRIEPHFAECYGNMANAWKEKGNIDLAIRYYLIAIELRPNFADAWSNLASAYMRKGRLTEAAQCCRQALAINPLMVDAHSNLGNLMKAQGLVQEAYSCYLEALRIQPTFAIAWSNLAGLFMESGDFNRALQYYKEAVKLKPSFPDAYLNLGNVYKALGMPQEAIACYQHALQTRPNYGMAYGNLASIYYEQGQLDMAILHYKQAVACDPRFLEAYNNLGNALKDVGRVEEAIQCYNQCLTLQPNHPQALTNLGNIYMEWNMVAAAAQYYKATLNVTTGLSAPYNNLAIIYKQQGNYVDAISCYNEVLRIDPLAADGLVNRGNTYKEIGRVSDAIQDYIRAIAVRPTMAEAHANLASAYKDSGHVEAAVKSYKQALILRPDFPEATCNLLHTYQCVCCWEDRDKMFKEVEAIIRRQINMSVIPSVQPFHAIAYPLDPMLALEISRKYAAHCSVIASRFSLPPFNHPAPIPIKREGGYERLRVGYVSSDFGNHPLSHLMGSVFGMHNRKNVEVFCYALSVNDGTEWRQRIQSEAEHFVDVSAMSSDAIAKMINEDKIHILVNLNGYTKGARNEIFAMQPAPIQVSYMGFPGTTGATYIDYLVTDEFVSPLRYANIYSEKIVHLPHCYFVNDYKQKNQDVLDPNCPHKRSDYGLPEDKFIFACFNQLYKMDPEIFNTWCNILKRVPNSALWLLRFPAAGEMRLRAYAAAQGVQPDQIIFTDVAMKNEHIRRSSLADLFLDSPLCNAHTTGTDILWAGLPMVTLPLEKMATRVAGSLCLATGLGEEMIVSSMEEYEDRAVSLALNRPKLQALTNKLKAVRMTCPLFDTARWVRNLERSYFKMWNLHCSGQRPQHFKVTENDLECPYDR

SEQ ID NO: 267736 - protein, 38 aa, Glycine max
  Clone ID: PAT_MRT3847_83789C.1.pep
SHATICIAGHDCCFKSGYESYDSYNTNNYGINSIKGES

SEQ ID NO: 267737 - protein, 160 aa, Glycine max
  Clone ID: PAT_MRT3847_8378C.1.pep
EDTELVRGHIPIESSTYGDPTKLDSINLRDLHPRSWFSVAWYPIYRIPDGNFCASFLTYHSLGHLVRRRTSDLSTVGSCIVSPTVGLQSYNAQGECWFQLKHSAPAAEMVNLEPSLLLKERLRTLEETASLMARAVVNKGNLTCTNRHPDYEFFLSRRRY

SEQ ID NO: 267738 - protein, 49 aa, Glycine max
  Clone ID: PAT_MRT3847_83790C.1.pep
LLSRCELFGALSQADGGRGHGVIVLMLCSGSPFRVPMGESFLALYEYEL

SEQ ID NO: 267739 - protein, 121 aa, Glycine max
  unsure (1)..(121): unsure at all Xaa locations
  Clone ID: PAT_MRT3847_83791C.1.pep
TLPHPRRKRRGFGSGFAPYFAPPLNDAWATSLLAYLSWGGNFFIRCRGLENPGFLFKISVLLGWPPPQGTTLFFSVKHGYMSVRHIALKTDLVHCGPNYVFGLSSRGPXLXYVXLNKTPTP

SEQ ID NO: 267740 - protein, 60 aa, Glycine max
  Clone ID: PAT_MRT3847_83792C.1.pep
LGEVSSHARRALGHCELARAATHDVVTIHVPTHSIENFNFNLNLDLLHLDLMAEAALLQD

SEQ ID NO: 267741 - protein, 33 aa, Glycine max
  Clone ID: PAT_MRT3847_83793C.1.pep
VLSLRFRLLFCLVFWKVRIFTQGIGLVCFSESL

SEQ ID NO: 267742 - protein, 88 aa, Glycine max
  Clone ID: PAT_MRT3847_83794C.1.pep
MHAYVSSEFGSSFLTRLLIHMGLLKSEDKIKAIPSLHGPLMVLNHVVQQDYFPKTLAPLLLAFVTKPNGALESCSFARHSLLQTLYSI

SEQ ID NO: 267743 - protein, 86 aa, Glycine max
  Clone ID: PAT_MRT3847_83795C.1.pep
MSDMGRQSLGDKAGAALKPDSQKTYLEQATDAVKGKADSAASTGQPDSQKSWTQSAGDAISGNQNENSGSILDSAKNALGMNDKKA

SEQ ID NO: 267744 - protein, 95 aa, Glycine max
  Clone ID: PAT_MRT3847_83796C.1.pep
QVSLSKFPPKGNPRPKKALSQGLPNSCGVRIGSQFSKLPFKKLKLNLRILNEILTLIELEKCFFLHQGSSPLSSPKKSMPPGGSLGGAKRSTPHT

SEQ ID NO: 267745 - protein, 103 aa, Glycine max
  unsure (1)..(103): unsure at all Xaa locations
  Clone ID: PAT_MRT3847_83797C.1.pep
KPTKAGLEEPQEQIHKIRITLSSNNVYNLKTVSTDLVHDAKDKLLMINGPVMMPTKVLNITTTKSPXSKSTNTXNKFKLRXHNIIINLYNSPNLVNHITSITM

SEQ ID NO: 267746 - protein, 55 aa, Glycine max
  Clone ID: PAT_MRT3847_83798C.1.pep
PYLFSPPKFITSKSYHQINLLLTFLRPFLSLLIFLLHLLIIMLHSHYSFNTIIVT

SEQ ID NO: 267747 - protein, 84 aa, Glycine max
  Clone ID: PAT_MRT3847_83799C.1.pep
QWGLCLWKPRVEALLLLQLYKLTMVYKALQGKTPGSNRSTPLEAHARVRELGLPFKIDPLSPVTGGGLGPRDLSQFRFAITWNV

SEQ ID NO: 267748 - protein, 57 aa, Glycine max
  Clone ID: PAT_MRT3847_8379C.1.pep
SGFAFFIGALHLAPIKWQNRNSILFPLLCSRHFASRAFRFSLFGIFSYSVILNLRRF

SEQ ID NO: 267749 - protein, 74 aa, Glycine max
  unsure (1)..(74): unsure at all Xaa locations
  Clone ID: PAT_MRT3847_837C.1.pep
KSKDCLIQXKHPEXDNXSRVSSSWSLGRGQSRRXAMVSPPALSGKSNNRXCFXTVPPVINXLEPNSELTYVCXX

SEQ ID NO: 267750 - protein, 40 aa, Glycine max
  Clone ID: PAT_MRT3847_83800C.1.pep
LVYQTGLSQDPSNTLLLVNYAQFLYLVVHDFDRFVNIKHP

SEQ ID NO: 267751 - protein, 64 aa, Glycine max
  Clone ID: PAT_MRT3847_83801C.1.pep
WIAQTNKQARVEFLVTNTTTWGLRSLFPKQDREHHWWVRQCNRKLKCIVPINSRRNTKQKGKDD

SEQ ID NO: 267752 - protein, 44 aa, Glycine max
  unsure (1)..(44): unsure at all Xaa locations
  Clone ID: PAT_MRT3847_83802C.1.pep
LYVSYAPKPTMYMPCYWDVLLCDPIPKIFYYGTCTGIVGGXQRH

SEQ ID NO: 267753 - protein, 108 aa, Glycine max
  Clone ID: PAT_MRT3847_83803C.1.pep
IDRIEVMEQNKIKMTGVVIMIMIRVSFALGDYNHPFDQIGPNHVSDKLRCVDLCKIECAPLLIPPGGGLLYIYCVKKCVAGCGLSRSIDARHIAANRAGSCVQRCQNK

SEQ ID NO: 267754 - protein, 44 aa, Glycine max
  Clone ID: PAT_MRT3847_83804C.1.pep
LEDVVSNQGLCMNCGEPTTLYSDQVISVNATGLSVTHSKPVVMG

SEQ ID NO: 267755 - protein, 409 aa, Glycine max
  unsure (1)..(409): unsure at all Xaa locations
  Clone ID: PAT_MRT3847_83805C.1.pep
ETNTFHLXWGELTITLDDMACLLHLPITGALHRFEPLGVDEAVLLLMELLEVSREEARAKIVRAHRAYVRLSWLREVYQSRCQARCWIVAVRAYLFHLVDCTLFANKSATHVHVVHLXVFETYVXSGGYGWGVAALVHMYDQLKEALQTPTRHMGGYLTLLQCWIYEYFPSVHQGVIDDGYAKMTPRASRWLTMKAHMKGIKGTPYRARLDALTITNFSWLPYNEHRAVRGFELISCYQGRLRWGHVVVYVIPERVVQQFGYIQTIPPPPVTGSLLYEDIDDRWMHFGNHLAPAGEICVVPGQVSADYMERFFQISHPFITPTQEGDEPRHPLAPDVDAYVEPHIPEVPVAVDLPRHSVVACEGCEEITERLERVFNLRMVTAGTELHEIIEDCLRIARGDASDGSLRA

SEQ ID NO: 267756 - protein, 129 aa, Glycine max
  Clone ID: PAT_MRT3847_83806C.1.pep
DNVISMHDIIQEMAWEIVRQESIEDPGNRSRLIDPNDVYEVLKYNKGTEAIRSIRANLPAIQNLQLSPHVFNKMSKLQFVYFRKKFDVFPLLPRGLQSFPAELRYLSWSHYPLISLPKNFSAENLVIFD

SEQ ID NO: 267757 - protein, 70 aa, Glycine max
  Clone ID: PAT_MRT3847_83807C.1.pep
HLLYYFLSVLPLYVACMDIYLLYMEHLFLCTWSIYTFGDNCLFYLRLFSLLHRLILFDIPHYVLHTVYAH

SEQ ID NO: 267758 - protein, 160 aa, Glycine max
  Clone ID: PAT_MRT3847_83808C.1.pep
VDCSLLLQKFRSDWTEAMKFYEEAYHTLREIVGVTTRLPAVQRLVEIKSISEQLHFKISTMLLHSGKVTEAVTWFRQHMNAYKRLVGAPDGIFLHWEWMSRQLLVFGELLETSSKITQGVSPIVLGNPSKPLSEWEYYSAYYYQASTFYSYYTLYVEKGK

SEQ ID NO: 267759 - protein, 183 aa, Glycine max
  Clone ID: PAT_MRT3847_83809C.1.pep
SDDDDFEAPSIQYHSEIPRILFFGLLGVRDFILAHLRLPFILVYFCLGYIIYRNQLLNVYMAKYQTGGEFWPTVHNYTIFSLVLMHIIVIGIFGLKKLPIASALNLPLPILTLLFNEYCQKRFFPIFKAYPAECLIKKDRQDQNEPNMLEFYDKLVKAYNDPALMPIKYSGGSHKPLLPCADV

SEQ ID NO: 267760 - protein, 85 aa, Glycine max
  Clone ID: PAT_MRT3847_8380C.1.pep
VNHFPSAMHTFPDNLCQLVSIILAFSWPLGHKVYLASSPGSNIILVPSRAGWLVISHFLWACRYTEKNLALRVPVAERAADYTRP

SEQ ID NO: 267761 - protein, 72 aa, Glycine max
  Clone ID: PAT_MRT3847_83810C.1.pep
KFSQNESLTATPNLCDFYSSYYEMIAAHTGTHEVQDQAPSTYPSEDVIGVNQTTIINISAYETNKWKIRFQL

SEQ ID NO: 267762 - protein, 51 aa, Glycine max
  Clone ID: PAT_MRT3847_83811C.1.pep
HLNIPHAAIDTARYLEYFSLVYDNIKQIHWTCMIVPFYTIHSKRSVWINSD

SEQ ID NO: 267763 - protein, 170 aa, Glycine max
  unsure (1)..(170): unsure at all Xaa locations
  Clone ID: PAT_MRT3847_83812C.1.pep
NLSGSISPSLTLSNSLERLNLSHNVLSGSIPTSFVNMNSIKFLDLSENSFSGPMPESFFESCSSLHHISLARNMFDGPVPGSLSRCSSLNSINLSNNHFSGNVDFSGIWSLNRLTTLDLSNNALSGSLPNGISSVHNFXEILLQGNQFSCPLSTDXGFCLHLNMLDFSDN

SEQ ID NO: 267764 - protein, 41 aa, Glycine max
  Clone ID: PAT_MRT3847_83813C.1.pep
NILIKITPYGVSLLAVVNRGRLFGGTKRKPFPFWKFGRNEN

SEQ ID NO: 267765 - protein, 47 aa, Glycine max
  Clone ID: PAT_MRT3847_83814C.1.pep
FALILRPAILPNEPMSYELLPLLLRSLMFENRDLYGFIGLDSTARVG

SEQ ID NO: 267766 - protein, 278 aa, Glycine max
  unsure (1)..(278): unsure at all Xaa locations
  Clone ID: PAT_MRT3847_83815C.1.pep
MKSARVKEAILLVFMFSLLSIACSDLASDRAGLLLLRSAVGGRTLLWNSTQTSPCSWTGVGCASGRVIMLRLPAMGLSGSLPSGLGNLTELQTLSLRFNALTGRIPEDFANLKSLRNLYLQGNFFSGEVSDSVFALQNLVRLNLGNNNFSGEISPKFNSLTRLATLYLERNNFTGSIPDLDAPPLDQFNVSFNSLTGSIPNRFSRLDRTAFLGNSQLCGRPLQXCPGTEEKKKSKLSXGGAIAGIGIGSVVGVLLILLLLVFWCRKGTRKMRMKLCHL

SEQ ID NO: 267767 - protein, 136 aa, Glycine max
  unsure (1)..(136): unsure at all Xaa locations
  Clone ID: PAT_MRT3847_83816C.1.pep
MAENNNNHHLETATRRLASVTNHLTSGGNNSFRRVHGEVPSHDVVWRIVASDHDNSGKDFTDIVYEKAVGEGIAXISINRPERRNAFRPHTVKELMRAFTDARDDSSIGVVILTGKGTEXFCRGGDQALRTNDGYS

SEQ ID NO: 267768 - protein, 117 aa, Glycine max
  Clone ID: PAT_MRT3847_83817C.1.pep
AINHIKEAIMEGLIPYLIHAIKKQKPHHHNYRSYSHSESSNRSYHMLLASESFTGSSHRRTRSDFQPPTSEFLEQRYGVDGFLVSPRAQVTTAAPPATVNVNAAQRSNNITNMRNRK

SEQ ID NO: 267769 - protein, 220 aa, Glycine max
  Clone ID: PAT_MRT3847_83818C.1.pep
KIYETLINIPGRITGVRKDGQIRHFFHRPSKAYTTGTRKRRKVHTDKEGSETRWHKTGKTRPVFVGGAVKGFKKILVLYTNYGRQQKPEKTNWVMHQYHLGTSEEEKDGELVVSKIFYQTQPRQCGNNSIIKQDLYDEERLMSNQISVHNDDDNNIIPRSNNASALMDYYNPSFINYDQLGGRSNRESSAQLIPNLAMQGDSSSFIRLAMDATKAMLDRK

SEQ ID NO: 267770 - protein, 253 aa, Glycine max
  unsure (1)..(253): unsure at all Xaa locations
  Clone ID: PAT_MRT3847_83819C.1.pep
DTASGFSSGHACPQSPSHRALAVXKDSKSKMATLKDQLIVNLLKEEQAPQNKITVVGVGAVGMGCAISXLMKDLADELALXDVMEDKLKGEMMDLQHXSLFLKTPKIXXSKDYCVTANSKLXIXTXGARQXEGESRLNLVQRNVNIFKFIISNICQVQVHTGKLGGSSSDPGDILTXTWLWKNSGFXPKTEVLGSGLQSGISGGFRYLMGEKVXGLXALSCHGXWVLGEHGGQGALWGGGGNGGRGFPLEVFY

SEQ ID NO: 267771 - protein, 89 aa, Glycine max
  Clone ID: PAT_MRT3847_8381C.1.pep
IHMARGNFHPHFFFCSCWEKGDNFNWAGAIPFLWGWEPPKVIFFQPLCFLGGSKSPHKVNEGKNGRRERNFGTLGKKKGIGFKKAPECP

SEQ ID NO: 267772 - protein, 73 aa, Glycine max
  unsure (1)..(73): unsure at all Xaa locations
  Clone ID: PAT_MRT3847_83820C.1.pep
DSLPHFKHTWAHEHDPVGSLLXVAKVIIPTVLIEPSGKVKTFTKEVIDAETSINEKPLDPVSLFPTSHAECTA

SEQ ID NO: 267773 - protein, 69 aa, Glycine max
  Clone ID: PAT_MRT3847_83821C.1.pep
PTKATNRVFSHCHRVNGVLITYPKHNTPAKFLPRYNYATPTNAHVDRPKECPSLNSWLHLYLALSFTYI

SEQ ID NO: 267774 - protein, 78 aa, Glycine max
  Clone ID: PAT_MRT3847_83822C.1.pep
LVFDYDVDEEEEDGLIEIKLPNNYFLEFLPESIFKQQGLTELWAEINEMNEDENLIEIDISKGSPKHQDLRLEKELVC

SEQ ID NO: 267775 - protein, 82 aa, Glycine max
  Clone ID: PAT_MRT3847_83823C.1.pep
NERVLLSISMSAPPTLEAKSGIIDLPQILNVHHGIQGTPHGNGSTDPARFTQGPGREPVRMTPLITVSHAKEDDRPQIQRHL

SEQ ID NO: 267776 - protein, 56 aa, Glycine max
  Clone ID: PAT_MRT3847_83824C.1.pep
STFGADANANANKSYEVSQPPSDAISSIRFSPKDNVFVTTSWDNQVRCWEITRNGT

SEQ ID NO: 267777 - protein, 76 aa, Glycine max
  Clone ID: PAT_MRT3847_83825C.1.pep
LGPRAADSDQLPCVGGIGVCGQLADQTCCAAAVVVPTTHRVDVNEVLTLSYHLSSFSLFFFLFRAFFLLFYPSLHP

SEQ ID NO: 267778 - protein, 34 aa, Glycine max
  Clone ID: PAT_MRT3847_83826C.1.pep
AHRPTVRAMESGGFHGYRKLPNTTAGKPDSITLK

SEQ ID NO: 267779 - protein, 59 aa, Glycine max
  Clone ID: PAT_MRT3847_83827C.1.pep
SFDFFAPPFESTPVRLRTKKSPLPIIRVSHKQVLSPGELEPLTNLVVGHMRCLFKYFFP

SEQ ID NO: 267780 - protein, 58 aa, Glycine max
  Clone ID: PAT_MRT3847_83828C.1.pep
KKVLSDMDSRVVLLMITTPYCFIFKYDYTSCFYLHNLYLYLSSVFFFSFILNLSFFSF

SEQ ID NO: 267781 - protein, 49 aa, Glycine max
  Clone ID: PAT_MRT3847_83829C.1.pep
MATTVMTTLPQFSAAPVKNLVAVQPMSRKGKGALGARCDYIGSSTNLVA

SEQ ID NO: 267782 - protein, 116 aa, Glycine max
  Clone ID: PAT_MRT3847_8382C.1.pep
FSSFLHAYKILTSPNSIEQKGIKSKKVSDSVVDSPMDSTCAILSGRNLAKVCEGIGRNRRSGFWGESTRRSVNTRLLSVQSWKTSRTSRNLRNSKPGSGIAHAGLTSDINEDSMAF

SEQ ID NO: 267783 - protein, 86 aa, Glycine max
  unsure (1)..(86): unsure at all Xaa locations
  Clone ID: PAT_MRT3847_83830C.1.pep
MVYVKAQKSKAYFKRYRVKFKRRREGKTDYRARIRLXNQDKNRYNTPKYRFVGXLATRXLLHXXYLXSIGRRLSLATXYSHECHDM

SEQ ID NO: 267784 - protein, 44 aa, Glycine max
  Clone ID: PAT_MRT3847_83831C.1.pep
LITIGSMRIEPTCTFLCVETLSMIAEGPTHVYLRLVSMTADPDS

SEQ ID NO: 267785 - protein, 126 aa, Glycine max
  unsure (1)..(126): unsure at all Xaa locations
  Clone ID: PAT_MRT3847_83832C.1.pep
PTRPLTRTVIIYSCTVFEEVATAESLRCPLLVQSHDVNVIHPVLSEVAVMCGWLGVNCICVLLSHXWYRPTILHFTPDMXLLGSRRTMGARLTGMQVGDLVSYAGHPLDSYAEELILTPTKGFPVP

SEQ ID NO: 267786 - protein, 56 aa, Glycine max
  Clone ID: PAT_MRT3847_83833C.1.pep
YEWLHKSQHKTHFSICLVKQSQYLHFYTEHIRMFTTGYLVPATTKENTTNYKQRSC

SEQ ID NO: 267787 - protein, 135 aa, Glycine max
  Clone ID: PAT_MRT3847_83834C.1.pep
LFVGPGFFFPPPGVFFSPGAFFSAPHKFGGPPIFLGPLSPPGFLFPQRGILPTTGGPFFLDGRFFFWAPLFFSPPRCFTPPRCFPRGGGPLLFWARVCFPHKNQASNKISLNSKKQKKKKKKKKKKNKKQKKENT

SEQ ID NO: 267788 - protein, 80 aa, Glycine max
  Clone ID: PAT_MRT3847_83835C.1.pep
ISRALPSFSPNSHFVFLFAPFLLSSLPNYFIPSWPPLFIQRLVFHWLLHPPFSLLINPVLCPLTLLTLNSLTFYNAFSPS

SEQ ID NO: 267789 - protein, 58 aa, Glycine max
  Clone ID: PAT_MRT3847_83836C.1.pep
IPGTEIFSRVRLHCSSAPRLSKQRRPGRCAIKTTNKPSLWDHTQHFRHGNLLPLRTVL

SEQ ID NO: 267790 - protein, 90 aa, Glycine max
  unsure (1)..(90): unsure at all Xaa locations
  Clone ID: PAT_MRT3847_83837C.1.pep
GSREMEEWKFDTLCDLYDTLTITQAVIFCNTKRKVDWLTEKMREANFTVSSMHGDMPQTERESIMKEFRXGDSRVLMSTDVWARGLDVPQ

SEQ ID NO: 267791 - protein, 76 aa, Glycine max
  Clone ID: PAT_MRT3847_83838C.1.pep
VVSMDFKYLLVGMCVWAWFGSITFATSNDGRLMRIGLKRRTLDLQCLKAARIKEAGHHRDLGGVNRNCCDEDIVYL

SEQ ID NO: 267792 - protein, 175 aa, Glycine max
  unsure (1)..(175): unsure at all Xaa locations
  Clone ID: PAT_MRT3847_83839C.1.pep
KMPTEMPKGMKVKKEENDNSTSEVAWQMWHLNGTRCPKGTVPIRXRSTVHDVMRAKSLYDFGKNGTSXFIPLSRRHDAPDILSGNGHEHAIAYTGSSQEMYGAKATINVWDPSIQVINEFSLSQLWILSDLLGLSYKXKXSNXEVVRXLXFXXTTRPRLFTYWTSDSYRATGCYN

SEQ ID NO: 267793 - protein, 47 aa, Glycine max
  Clone ID: PAT_MRT3847_8383C.1.pep
MLLILFCCIIKKKKKKKKKKKKKKKKKKKKKKKKGGKKKKKKRGGRF

SEQ ID NO: 267794 - protein, 216 aa, Glycine max
  Clone ID: PAT_MRT3847_83840C.1.pep
MGVPELMFRVSFMAVLIKLASATNYIVGGPSGGWDTNSNLQSWASSQIFSVGDSLVFQYPPNHDVVEVTKADYDSCQPTNPIQSYNDGATTIPLTLPGKRYFICGTIGHCSQGMKVEIDTLASATNSVTPAASPEDSTTSPAESPEVIISSSPSPLFQTHLESPTFSPVIPSTEFPASTSPLAQHSSDFSASSTSKGNLQAYVAVVLSFLIMLMSF

SEQ ID NO: 267795 - protein, 361 aa, Glycine max
  Clone ID: PAT_MRT3847_83841C.1.pep
MELISGLPEDVARDCLIRVPYDQFPAVASVCKGWSAEIHSPDFHRRRRTTKQAQKILVTVQSKIDSDKTRTGLLAKSTTNPVYRLSVFEPKTGSWCELPLGPELAFGLPMFCQIAGVGFDLVVMGGWDPDSWKASNSVFIYNFLSAKWRRGADMPGGPRTFFACASDQNRTVYVAGGHDEEKNALRSALAYDVAMDVWVPLPDMSRERDECKAVFRRGGALCVVGGYCTEMQGRFERSAEVFDVAKWKWGPVEEEFLDAAACPRTCVDGADGAEGRMFMCRGGDVVALHGDTWRNVAKVPGEIRNVACVGVWEGLMLVIGSSGFGEPHMGFVLDLKNRAWTKLASPEDYTGHVQSGCLLQI

SEQ ID NO: 267796 - protein, 164 aa, Glycine max
  Clone ID: PAT_MRT3847_83842C.1.pep
MELISGLPEDVARDCLIRIPYEQFPAVASVCKGWNTEIHSPDFHRRRRTTKQAQEILVTVQSNIDSEKTRTGLLAKSTTNPVYRLSVFEPKTGSWSELPLGPELAFGLPMFCRIAGVGFDLVVMGGWDPDSWKASNSVFIYNFLSAKWRRGADMPGGPRTFFAC

SEQ ID NO: 267797 - protein, 67 aa, Glycine max
  Clone ID: PAT_MRT3847_83843C.1.pep
PLQKDNRGVRLQTKRQKGRVFIITTKSCCIIIHSTPHSRCTLGPPRGSTLLSFCIPPKSPSNSSRNL

SEQ ID NO: 267798 - protein, 50 aa, Glycine max
  unsure (1)..(50): unsure at all Xaa locations
  Clone ID: PAT_MRT3847_83844C.1.pep
SFDRFPLPNTVQNQNLILVAGGIRLSPFLAIFSDILHVLSDPESPLXPNS

SEQ ID NO: 267799 - protein, 168 aa, Glycine max
  Clone ID: PAT_MRT3847_83845C.1.pep
QQPQPFVFVPYTPHTFLINQWRPPQTTPHRQRSPSPYHGPTRRPCTSSAPTRRSGVPLSGAHSATTSGRRPPSVPPPAPAPPSPPPRGPPPPPAAPSAPQPVGGGRRRRRRTPRPPPAPPRRGPPPAPPPSSAAPSPSPPSPLSTPLKKKTKTTTTPLTIETTMMATG

SEQ ID NO: 267800 - protein, 75 aa, Glycine max
  unsure (1)..(75): unsure at all Xaa locations
  Clone ID: PAT_MRT3847_83846C.1.pep
FVVIKVKTEKSFFSSKTCLIVCLQRRNIDISSTVVIILRDYHTPRSADSFIPINLVSQSSSELLQCPKLFFMXGS

SEQ ID NO: 267801 - protein, 66 aa, Glycine max
  unsure (1)..(66): unsure at all Xaa locations
  Clone ID: PAT_MRT3847_83847C.1.pep
PLPFEEQKLQFRVGMLGLKNQSFQWPRFCKKKVRELEKFTLENXKLSFXNERFAFELKRKEMGPGF

SEQ ID NO: 267802 - protein, 94 aa, Glycine max
  Clone ID: PAT_MRT3847_83848C.1.pep
KKKEMEKKELIEKDKEKEEYLCFYSKPLFNCDDTFLKEIEKVLPKDNYKVLCSNPLFTSDDSILKGSNEEFPKEEGKAPSEVLNLQIVKNKINF

SEQ ID NO: 267803 - protein, 36 aa, Glycine max
  Clone ID: PAT_MRT3847_83849C.1.pep
LIKLLCKKKLNFVKGLKKVHVFPSRDEKVILKVRDS

SEQ ID NO: 267804 - protein, 67 aa, Glycine max
  Clone ID: PAT_MRT3847_8384C.1.pep
IFLNHKTGFKGGMGGQLHLFPILWGQGIADRVSNGAKRLSQKLKGKPFSLGNPIRVNWSNPKKFCGG

SEQ ID NO: 267805 - protein, 161 aa, Glycine max
  unsure (1)..(161): unsure at all Xaa locations
  Clone ID: PAT_MRT3847_83850C.1.pep
MILIYYLSEHPAIVGFRWSHAQSWGATWSFLFTSIASYLFLSILLHLSLSLLFRRRQIPLGPFPAVHSLXRDTRWFWPRSKTPLQWLLCFPLGTRPSGRVFFWSYVYYLSHFLHMFRTLLTIVRHRRLSFFHLLSHSISAFASFLWLEFSQSFQVMSINIY

SEQ ID NO: 267806 - protein, 42 aa, Glycine max
  Clone ID: PAT_MRT3847_83851C.1.pep
GRGGLKCLALKKPVAYNWGGKRTSKKSGKKSEKSSGLGTCRK

SEQ ID NO: 267807 - protein, 291 aa, Glycine max
  Clone ID: PAT_MRT3847_83852C.1.pep
MMLKAAPRAVIYYLSEHPAIVGFRWSHAQSWGATWSFLFSSIASYLFLSVFLYFSLSLLFRRRQIPLGPLPAVHSLSMSLISATIFAGILLSAAAEISDTRWFWRRSKTPLQWLLCFPLGTRPSGRVFFWSYVYYLSRFLHMLRTLLRILRHRRLSFFHLLSNSISALASFLWLEFSQSFQVLAILFATLVYAAVYGYRFWTAIGLRGACFPFVLSCQIVLLACNVACHVAVFFLHFFLKGGCNGIGAWVFNSILNLALLMLSLNFYVRMHVHKRRRKVRDVTVTVATALS

SEQ ID NO: 267808 - protein, 95 aa, Glycine max
  unsure (1)..(95): unsure at all Xaa locations
  Clone ID: PAT_MRT3847_83853C.1.pep
SSLVVVGSLHLTSQNGYKVWEDPSFIKWRKRDPHVTLHCHESLEGSLKYXYQRNKVDFLASQSAVWNDDAVQGSLDCAAFWVKDLPFVKSLSGYW

SEQ ID NO: 267809 - protein, 282 aa, Glycine max
  unsure (1)..(282): unsure at all Xaa locations
  Clone ID: PAT_MRT3847_83854C.1.pep
MILIYYLSEHPAIVGFRWSHAQSWGATWSFLFTSIASYLFLSILLHLSLSLLFRRRQIPLGPFPAVHSLSMSLVSATIFAGILLSSAAEIRDTRWFWPRSKTPLQWLLCFPLGTRPSGRVFFWSYVYYLSHFLHMFRTLLTIVRHRRLSFFHLLSHSISAFASFLWLEFSQSFQVLAILFXTLVYAVVYGYRFWTAIGLRGACFPXVLSCQIALLACNIACHVAVFFLHFFLKGGCNGIGAXLFNSGRVGALLMLFLNFYVRMHVVHKRRKVRDVVVAPALS

SEQ ID NO: 267810 - protein, 199 aa, Glycine max
  Clone ID: PAT_MRT3847_83855C.1.pep
MQKTMDFSIRFLFLMLQFLIVLGCATKPGVRLDIQDKHVIMDNGIVQVNLSNPEGIVTGIQYNGIDNLLEVLNDESNRGYWDIVWDEGGKKRTKKGAKGKGRFDRMEATNFTVIVESEEQVELSFSRTWNDSLEGKLPPLNIDKRFIMLSGSSGFYTYAIYEHLKEWPAFDLDNTRIAFMPRKDKFHYMVVAYNRPRFM

SEQ ID NO: 267811 - protein, 76 aa, Glycine max
  Clone ID: PAT_MRT3847_83856C.1.pep
PLMTNQISEKEKIMPPPTRRIRLPSCFHLKPWLINSTDESPDPIFCNHPTCLKPMLGLNACGSYQLELPTWTILTS

SEQ ID NO: 267812 - protein, 79 aa, Glycine max
  unsure (1)..(79): unsure at all Xaa locations
  Clone ID: PAT_MRT3847_83857C.1.pep
VTDDVYAQITLVPESNLDDPMNPDPCTAVPPSAPVHSFIKXLTASDTSTHGGFSVLRQHAMECLPALDMSQPGPSLELV

SEQ ID NO: 267813 - protein, 84 aa, Glycine max
  unsure (1)..(84): unsure at all Xaa locations
  Clone ID: PAT_MRT3847_83858C.1.pep
MSLVTSFFVGLRRSAMDPFSIDVWDPSKDCASSTSLAAEDXSLVSTRADTWETRHALMLKAETPPVTKSGSRILXIQDDRILQI

SEQ ID NO: 267814 - protein, 38 aa, Glycine max
  Clone ID: PAT_MRT3847_83859C.1.pep
CEQQGSNRRGYLYVVLWHTHPSIVFIQTHGHVGGHFRL

SEQ ID NO: 267815 - protein, 62 aa, Glycine max
  Clone ID: PAT_MRT3847_8385C.1.pep
TRPNGSAMENGVVYFMPTAIGNFVKGALQWGHHRLQWCAYMVENLPSTIFCHPPLITLFKCL

SEQ ID NO: 267816 - protein, 56 aa, Glycine max
  Clone ID: PAT_MRT3847_83860C.1.pep
FIFGNCISVLLCESFPNEAFYFWDFVVIGILSWQLQAWYGNKCTAVLYLSFCFKHR

SEQ ID NO: 267817 - protein, 94 aa, Glycine max
  Clone ID: PAT_MRT3847_83861C.1.pep
LPGIHRGLFVRPKTRKPPREVLLLKKKSPPPTKRPLFSSLANSGGQINESRFPRTFFKGPLILCFTREIPSRAVLFFFCVPAVDYGYNFSVSHC

SEQ ID NO: 267818 - protein, 38 aa, Glycine max
  Clone ID: PAT_MRT3847_83862C.1.pep
LRIKSLKKYENYSLYNNYILNIKSLSKYRLLEGISTLN

SEQ ID NO: 267819 - protein, 66 aa, Glycine max
  unsure (1)..(66): unsure at all Xaa locations
  Clone ID: PAT_MRT3847_83863C.1.pep
IDPNLGKPTDFDHLPRDEAFIDLNLSKILVYXIKLSAQDMSPLMTYTNVCHGLNLDFDFYSIVRIL

SEQ ID NO: 267820 - protein, 108 aa, Glycine max
  Clone ID: PAT_MRT3847_83864C.1.pep
FWAPPVFLMGAVRGFRFVGGPPGGVLAPISPGGGFAPWGLVDAPRGFFGLRGRGPQTGGWALFSWFGFFVPALVPGRGPLGTPFVPLGGPVPTKAGGFPPPFVPGRGA

SEQ ID NO: 267821 - protein, 93 aa, Glycine max
  unsure (1)..(93): unsure at all Xaa locations
  Clone ID: PAT_MRT3847_83865C.1.pep
VLNRWPGKQAVPHGTRRREQRMPVSIRGGAGAYNAVLMNMPEAXFLLGRDTDGELDFEVHYKTICYTQCSVIFDIASEKNADGTINSEAFTHK

SEQ ID NO: 267822 - protein, 43 aa, Glycine max
  Clone ID: PAT_MRT3847_83866C.1.pep
QSSMSLGKDMFCSAVSKQKVGDAINDPPVCEMRLRIIKLIKVH

SEQ ID NO: 267823 - protein, 61 aa, Glycine max
  Clone ID: PAT_MRT3847_83867C.1.pep
LYLLVIFSLNLLGTHYLGGAFKKRFWLGSKIHSGSKEPLDFLSKLKKKPLWGGFLKNPEPN

SEQ ID NO: 267824 - protein, 81 aa, Glycine max
  Clone ID: PAT_MRT3847_83868C.1.pep
SYKSKYAHFVALSNPYPIATLAQHCMNQIFRFHGARVEIISDRDPLSVSSFWKEFFDLSVFLISSNPFYSVFPTSLLPFYF

SEQ ID NO: 267825 - protein, 60 aa, Glycine max
  Clone ID: PAT_MRT3847_83869C.1.pep
NTRGPHKKKRCPHITLVLIPTLQTKLPNHSLTLHIRWAHSNLKAKDNIGPLRDTCTTQKS

SEQ ID NO: 267826 - protein, 54 aa, Glycine max
  unsure (1)..(54): unsure at all Xaa locations
  Clone ID: PAT_MRT3847_8386C.1.pep
XFXRXXFCXXXXPGXXXGXXXXXXXVVCCXXXSSXRGXFVXSXXXXXSVRXRVG

SEQ ID NO: 267827 - protein, 76 aa, Glycine max
  unsure (1)..(76): unsure at all Xaa locations
  Clone ID: PAT_MRT3847_83870C.1.pep
MSCCGGNCGCGSACKCGNRCRSCKMYPHMCYTESHTTRDLXMSVTTFSAHLECAEMCVPAENDGCKCGANCTCNPC

SEQ ID NO: 267828 - protein, 67 aa, Glycine max
  Clone ID: PAT_MRT3847_83871C.1.pep
GRLGGRVLFFMWPPSDWLLKSLGYISLTYPRIWNGAYDVGIKCALTYYLFKITQMILSGGGPPPSMD

SEQ ID NO: 267829 - protein, 199 aa, Glycine max
  Clone ID: PAT_MRT3847_83872C.1.pep
MVLDSILTSPRLKSPSFRRQFKKDELGSWSTLFQRHRFLLSALVLLTLLCTVYLYFAVTLGASGTCSGLTGAQKASCHMGLITSRDLFKGEGEGFRGLKKVDIEAMVLDSILTSPRLKSPSFRRQFTKDELGSWSTLFQRHRFLLSALVLLTLLCTVYLYFAVTLGASGTCSGLTGAQKASCHMELVKDSVAKGKLKIL

SEQ ID NO: 267830 - protein, 84 aa, Glycine max
  unsure (1)..(84): unsure at all Xaa locations
  Clone ID: PAT_MRT3847_83873C.1.pep
IPNYTVDVVDTGALRLLVAVRAHMGDSVRSHIRYYQAGSSEMFVATPPAQSETTPFDTRWPXPPSXCADHWYTENNREAYSLFD

SEQ ID NO: 267831 - protein, 66 aa, Glycine max
  Clone ID: PAT_MRT3847_83874C.1.pep
YESLQSLLLRLTSASLQGLGSFTEKRTFCSGSTSTVLKLETSVRAWILINVKVSSTEVVIRPHVLC

SEQ ID NO: 267832 - protein, 184 aa, Glycine max
  Clone ID: PAT_MRT3847_83875C.1.pep
MDHQPPPCPAAASATDNPRGGTRHPMYRGVRKRRWGKWVSEIREPRKKNRIWLGSFPVPEMAARAYDVAAYCLKGRKAQLNFPDDVDSLPLPSSRTARDIQTAAAQAARMMKASGNDEKSGIASDDGDSGCDDFWGEIELPELMDGECCWGCPAGASSWTSSGDLAEWPEEELSPQQPSFMACL

SEQ ID NO: 267833 - protein, 90 aa, Glycine max
  Clone ID: PAT_MRT3847_83876C.1.pep
LAQAGFLVFRGGNFLFGPFKGLFCTQRPGVYCSLWVRSLSGFSMCSICPPRIVVSPSHLGGHLWQCKQNGRARWSPVTKGKRPALAPQRH

SEQ ID NO: 267834 - protein, 88 aa, Glycine max
  unsure (1)..(88): unsure at all Xaa locations
  Clone ID: PAT_MRT3847_83877C.1.pep
CVTTLTEGVWGTIPSEGTKCVCQEIXTRVXXLTEYYVXXEEVPGHQLQTISAKGRSPYGDNLHQSENVTHGQVAFTTTEVLETTMRGE

SEQ ID NO: 267835 - protein, 72 aa, Glycine max
  Clone ID: PAT_MRT3847_83878C.1.pep
MVFVTSNKSRIGSAQLTTPLQLTRSNSIHHVNVVSPLQHAHLPNGSDFPLGIHSTLLSIHYLAIFFSSDCHT

SEQ ID NO: 267836 - protein, 52 aa, Glycine max
  Clone ID: PAT_MRT3847_83879C.1.pep
TLLQPHYTLLNLPHTLTTPLTHLLLTSLIILPTNFNNSTPSFPQYSPIHYTH

SEQ ID NO: 267837 - protein, 101 aa, Glycine max
  Clone ID: PAT_MRT3847_8387C.1.pep
PRVRSHTATQKKRTLSLFLSLSSELNLAVNGGLQCSQRHHHQLHQARLRQRPRVLHPSPHRRSGLLDPSLLRKHFSSFRRSGYLNLVPVPSFRFLNTIACF

SEQ ID NO: 267838 - protein, 67 aa, Glycine max
  Clone ID: PAT_MRT3847_83880C.1.pep
KNNPPHYTPGGLPIALGDFPAGLFWGPKLGNKGGETPPPLAPPTWTPLMGPLKWGFKNLLEKPLLTS

SEQ ID NO: 267839 - protein, 162 aa, Glycine max
  Clone ID: PAT_MRT3847_83881C.1.pep
LLVKSFNSPIFVPVLEAPQKLNFVVDLLKDNYEKNLKPKDDSDGFKQISVSSPDQIVSNSDVTGIKHVDDEKAEKIAVDKEDISSILKIGSVTIAPKQVEAKHSVSNGNKEQGDALTEGSMQVKVNGFALPSGFLKVGSIPLDAMALQPGKGVLSVKSESHR

SEQ ID NO: 267840 - protein, 122 aa, Glycine max
  Clone ID: PAT_MRT3847_83882C.1.pep
MSGFGSNIKAIRAASDQGVKRFVYISTADFGVVNYLLQGCNIGKRAAETELLTRFPFGGVILRPGLIYETPIAAVPLEMVLRVAKQSNHIPLVGPPLTPPDAVAKVAVTAATATDPVFPLRE

SEQ ID NO: 267841 - protein, 46 aa, Glycine max
  Clone ID: PAT_MRT3847_83883C.1.pep
VGNTIFFKQPGGLGKAGETNKGSGQTIPLTLYIVETCTNDPTNYSR

SEQ ID NO: 267842 - protein, 164 aa, Glycine max
  Clone ID: PAT_MRT3847_83884C.1.pep
VLMANDTGSGRVVTEKGLATRSSRETLGKNALASGSATNATPNRKSERLEKRTPPSLSARITVRFGQKTPSPLRRSERTKNASPSPSSDPSASKSKSSGSKSNCSGKQLAFEASADEDDDDEKCGAEASSSSGPIHLTAGEYRALFVKPKIDCNEKTNGMDRSN

SEQ ID NO: 267843 - protein, 366 aa, Glycine max
  unsure (1)..(366): unsure at all Xaa locations
  Clone ID: PAT_MRT3847_83885C.1.pep
MSDLGSDLPAAAAALSAEDRAGLVNALKDKLQLLAGQHVDILETLPPKVRQRVEILRDLQSQHDEVEAKFLEERSKLEAKYQKLYEPLYTKRYEIVNGVVEVEGVTNVAVPEEANKAAEDKGVPEFWLTAMKTNETLVEEITELEEGSLKYLKDIKRYINDXSLGHHSRFLGXKLDYFKNSELTKTYHMIEDDDPILEKAIGTEIEWHPGKCLTQKILKKKPSKGSKNAKPITKTEKCESFFNFFNPPQVPEDDDDIDDDAVEELENLMEHDYDIGSTIRDKIIPHAVSWFTGEAAQSDFEDIDEDDYEDEEGDDDDDEDEDEDEDEEDEEEKKGKSKSKSKLQSGGRAIPGKDQPMERPPECKQQ

SEQ ID NO: 267844 - protein, 96 aa, Glycine max
  Clone ID: PAT_MRT3847_83886C.1.pep
YVRSDSLEKRSCNTFLSPPPIYPAFCLFYTGKGRFFGGAHACLYPCAAERCSVFFLCSSLRPEVLPKSIRKKYPCYHFTTATAKVWERGRLALVLL

SEQ ID NO: 267845 - protein, 85 aa, Glycine max
  Clone ID: PAT_MRT3847_83887C.1.pep
CHSSRVYDLRLWASMSDPTVHLSLLNCRLRAFVGVGELFHEPRKNFRSVSCFEHVDYLCIVDLLLSISPVLTAFTVTSAIACLLL

SEQ ID NO: 267846 - protein, 63 aa, Glycine max
  Clone ID: PAT_MRT3847_83888C.1.pep
FVLLGCELVMHHASCIHPFQWTPGQTLPPMFCRRHFNSHKKHVITKYLITNVKTRTNFRLSST

SEQ ID NO: 267847 - protein, 106 aa, Glycine max
  Clone ID: PAT_MRT3847_83889C.1.pep
KIAGFPHESWSIVQLHVRVLYTELAPVLTLEPCVVQIITVHNLLCYPFALFVVRGLVQASAQRNKWILSRGPPKPEPVRKRASRLRYHPRRRFDSSPSSRGAGVNF

SEQ ID NO: 267848 - protein, 134 aa, Glycine max
  Clone ID: PAT_MRT3847_8388C.1.pep
DPSGVPGQTPTEGANILGVYIPGGVSVAMFAYVAHRQESMFPQPDKFIPKRWLGEKGKALQPCFLAFSAGARGCIGRNISYLEQTVVLASVLRRYDFALSSPNWELQRLETMNWILGQMPVKIWRRKRKSAQQE

SEQ ID NO: 267849 - protein, 129 aa, Glycine max
  Clone ID: PAT_MRT3847_83890C.1.pep
GSSSSRSSRIGSRKEHVVFFHPDLGIGGAERLVIDAAVGLQNRGHKVTIFTSHCDPQHCFDEARDGTLDVRVRGNTIVPSTIFGRFAILCAILRQVHLILQISLFTEELPKLAPSSFFVDQLSAGIPLL

SEQ ID NO: 267850 - protein, 85 aa, Glycine max
  unsure (1)..(85): unsure at all Xaa locations
  Clone ID: PAT_MRT3847_83891C.1.pep
MKAPNALFGAKRRKFHGVFNALRAMVVFFFFYNREDIIHNPILRQSSYFPNHGLPXNAIPRDGTSAIHPPMVEISANTSGVAGDH

SEQ ID NO: 267851 - protein, 95 aa, Glycine max
  Clone ID: PAT_MRT3847_83892C.1.pep
TSGPAGPPMPGPAPQRAGARRSPRPQWPGAAPPARPTGMSPRPASCSGTHPVAVLPASAPCLSLSAHPTRPSSPAPSRSTKAAALGSPSRRTLRA

SEQ ID NO: 267852 - protein, 93 aa, Glycine max
  Clone ID: PAT_MRT3847_83893C.1.pep
PNILIPNRPLQLHTLVRLFKRLRPNITALTPHSQPVYTTLPTSCTIPGLQPFGSRTITLLRGLYHLRALVLALSTLPCYFTLLWALYNPYSNL

SEQ ID NO: 267853 - protein, 56 aa, Glycine max
  unsure (1)..(56): unsure at all Xaa locations
  Clone ID: PAT_MRT3847_83894C.1.pep
EXTTTQXHHHXQLLLLWQXDSSPXXXETLGXXKGLXXYXXSSIXLXSRRQFXLXLG

SEQ ID NO: 267854 - protein, 42 aa, Glycine max
  Clone ID: PAT_MRT3847_83895C.1.pep
GFLPQVVLCLKPTTAQRYDFGYYVALGEVGGRKVGVLRTVAF

SEQ ID NO: 267855 - protein, 256 aa, Glycine max
  unsure (1)..(256): unsure at all Xaa locations
  Clone ID: PAT_MRT3847_83896C.1.pep
MSNSCRSDNHTPLNAEQLSTRRRRELHRKEKGVLQSSQSQSIQSVQMQILEQHKMSFLEAHAEDKKHIQGLEKELLNCSQEIDYLQDQLSASNTEVNYLEEHIRSLELKLEGMEDLQEEVFRLREELKRSNSKHFFLIQELDTKEIELEKSALSIEKLEESFSSITLESQFEVESMKLDMMALEQSLFEAKKIQDETLDENNRMSRSIEELQVALQDAQKIIISLNEENRKLXEKLDIANXNSRVSSQRMNTGWKT

SEQ ID NO: 267856 - protein, 206 aa, Glycine max
  unsure (1)..(206): unsure at all Xaa locations
  Clone ID: PAT_MRT3847_83897C.1.pep
TVHVALPTVPVGAGSRRNNXSKRSSRSKSPASSEKQQTLSGSTSAIVPSGGTTHEQIGHQLPQPQNLPFLASLQNLNRYAVGNMGLGLREIHGQNENMGFQIGNSSAGGGMXSGACISRFLSLMVLNQLQLGSYPFQNEGINETPSGFGGDITTNSRVSQMPSVKMEESGALNLSRSTLNNVSENNQYYSWTDMSGLASFSATHLL

SEQ ID NO: 267857 - protein, 106 aa, Glycine max
  Clone ID: PAT_MRT3847_83898C.1.pep
LEDGRTLADYNIQKESTLHLVLRLRGGAKKRKKKTYTKPKKIKHKHKKVKLGILQFYKVDDSGKVQRLRKECPNAECGAGTFMANHFDRHYCGKCGLTYVYQKADA

SEQ ID NO: 267858 - protein, 60 aa, Glycine max
  unsure (1)..(60): unsure at all Xaa locations
  Clone ID: PAT_MRT3847_83899C.1.pep
LTFTSIHFGATALVLGDKVFFNXVITLLLKNHINAYTTKCQSIMTIKEGXAKSIWYEITY

SEQ ID NO: 267859 - protein, 63 aa, Glycine max
  unsure (1)..(63): unsure at all Xaa locations
  Clone ID: PAT_MRT3847_8389C.1.pep
TGSVIHTVRPLADEAAGASFPLPRLLGLSSLQDRIPGRRVRGAFQGEAATXXXPGMCWQLSRA

SEQ ID NO: 267860 - protein, 115 aa, Glycine max
  unsure (1)..(115): unsure at all Xaa locations
  Clone ID: PAT_MRT3847_838C.1.pep
CFLSSXXARGGGGSQKKTLGGLGCIXTWGGAHSTCPLCRTPGKPGTGSSDTEPGSVSVSGAGGGCSSSSLPPPIGCPRKPLGINIIVEISEVERGSDSVTGDQGFRWSLKRFCNV

SEQ ID NO: 267861 - protein, 65 aa, Glycine max
  unsure (1)..(65): unsure at all Xaa locations
  Clone ID: PAT_MRT3847_83900C.1.pep
VXGXAPFXXXQXIXXXGEFXGEXXXGSXVTPSIAXVNFPKTGRWVKISAACTKTSERTHMSFDNV

SEQ ID NO: 267862 - protein, 676 aa, Glycine max
  Clone ID: PAT_MRT3847_83901C.1.pep
FTPDGRWVVSGGFDNVVKVWDLTAGKLLHDFKFHEGHIRSIDFHPLEFLLATGSADRTVKFWDLETFELIGSARPEATGVRSIAFHPDGRALFTGHEDGLKVYSWEPVICHDTIDMGWTTLGDLCIHDGKLLGCSFYRNSVGVWVADISLIEPYGAGLDPKKNEGTEQKLGLQGSKLEKVEVNVGPTSGFRSMSPDESKEIKNIYIDSSGGKPVTLQRSGSLSSTKVDLPEEFKEICNLGTMKQSPATGARVKSNEQAIRKSFIAPNIVPRDTPDGKVSAKSEKETISFSKTKPGMLLRPAHVRRASTGRFDVDRFSEDVNSRTFCDTAIKSGITKEPSFQLNLGFQNEVKESCEDKHPIKNVTDKFDKTLSPSRFSEQTKRDESSPCKEEISPVKYVNGVAVVRGRTRSLVERFERREKIQIDEDQTNVFLPTINETREKVHNEDQIKASPTPLEPNRLEERIPFNEDRNNLPPLPKTISETDKSPNTVKVEPQIYKEDSNSANEEKIIEGLMQTHDATLSNLRSRLTKLQVVRHFWERNDIKGATNALRKLPDHSVQADVISVLVEKMEIFTLDLFSCLLPVLTGLLDSKIERHVKLSLDMLLKLVAVFGPTIRATVSAPPSVGVDLHQEERRECCNKCFMELQKIQMTLPILIRKGGILARSALELNLVLQQS

SEQ ID NO: 267863 - protein, 77 aa, Glycine max
  Clone ID: PAT_MRT3847_83902C.1.pep
DSNKSLISTFTVSPAGEHACTMPNATEHVNHQSVRTDCCATNMLMNAQNNLAKQINFEAMNASKNDTAQDHTLKVLE

SEQ ID NO: 267864 - protein, 57 aa, Glycine max
  unsure (1)..(57): unsure at all Xaa locations
  Clone ID: PAT_MRT3847_83903C.1.pep
MGKLVTGAXXPAVLYFSGXNTQIIVYAAGKYRIFGETIDIVVGXNCWYRFARALKII

SEQ ID NO: 267865 - protein, 319 aa, Glycine max
  Clone ID: PAT_MRT3847_83904C.1.pep
LEPNRLDLVSMSTPPLSVSLSQCTRLFGASGFTRLCKGLSLVLISLHILLHLFPSAITCLALIPARTIPFAWNLITAGYVEQSVYGVVVSTIGLLFIGKLLEPVWGPREFLKFIFIVNFLTSLCIFITAIALYCITGQESYLYMPFSGFHGVIFGFLVGIKQIVPDQELPFLKIKVKWLPSIALLCSIATSFWSLEATSYLPTVIYGTYMSWIYLRYWQRKPETKLKGDPSEDFAFSTFFPEFLRPVIDPIASIFHRMLCGRLDASNDAQGYTVRGEPLPGSDPIEASRRRERGARALEERLATAPSAGELETDATEIV

SEQ ID NO: 267866 - protein, 139 aa, Glycine max
  Clone ID: PAT_MRT3847_83905C.1.pep
RSSEFGSREPRVGSDELPVKVEKDEGESFPAGSKIRKHHHREEGGVEENRSSKQAAIFSEPTLRSSMIDIILLHSLGDGKKHFMARREALQTKNEKIVVSNGKSKASNGGKGRSKKQNGKKEVVDLRTLLVLCAQAVAA

SEQ ID NO: 267867 - protein, 97 aa, Glycine max
  unsure (1)..(97): unsure at all Xaa locations
  Clone ID: PAT_MRT3847_83906C.1.pep
GSFTRLRRVLDRPLIQTNPYQDVIAXCDIINTDHIHVEHSSMDRLETIEQDLFEHVLLXLIKRPXLISYYTLFGPQNMVLLYAPPATGITMLDKAIA

SEQ ID NO: 267868 - protein, 43 aa, Glycine max
  Clone ID: PAT_MRT3847_83907C.1.pep
TLITLGVTFRTLQVHSMILANLIKLDHISVYFIDSLHFKPKHN

SEQ ID NO: 267869 - protein, 63 aa, Glycine max
  Clone ID: PAT_MRT3847_83908C.1.pep
PMRAIRPFPTCPQVTAAPPMGPTATPLQIGEPYQPPVHLSFFISRPSFFSFFFFFFFFFFFFL

SEQ ID NO: 267870 - protein, 41 aa, Glycine max
  unsure (1)..(41): unsure at all Xaa locations
  Clone ID: PAT_MRT3847_83909C.1.pep
WDRFHPTYAVNAILTDNIWNGWHTXMCYPMSLEDMVNRMPK

SEQ ID NO: 267871 - protein, 342 aa, Glycine max
  Clone ID: PAT_MRT3847_8390C.1.pep
MAPFAFATLPSSHICRLPKPTNLKFRVRCSTAASSPSSVSTRSKAAGFDLKTYWANLMVQINQKLDEAIPVQFPPQIYEAMRYSVLAKGAKRAPPVMCISACELFGGSRLAAFPTACALEMVHAASLIHDDLPCMDDSPSRRGQPSNHTIYGVDMAILAGDALFPLGFRHIVSQTPSDLVPESHLLRVIAEIARSVGSTGMAAGQFLDLEGGPNAVGFIQEKKFGEMGESSAVCGGFLAGAEDDEIERLRRYGRAVGVLYAVVDDIIEERLKVEGDGDRKNKGKSYAEVYGVEKAIEKAEELRAKAKEELDGFEKHGERVFPLYSFVDYAFDRSFSVDDASG

SEQ ID NO: 267872 - protein, 117 aa, Glycine max
  Clone ID: PAT_MRT3847_83910C.1.pep
SLPPRGVVFIKPPAAGGLPPCSLCSVRRVSFVDGPLSFAPLVCGVSVVWVLCGGIFCSWSLFSLGSVLALFFPRCSGLRLGVFGCLSPPPFRGGGAPPGSSDYFSCPPWVSPKNNVF

SEQ ID NO: 267873 - protein, 234 aa, Glycine max
  Clone ID: PAT_MRT3847_83911C.1.pep
MSIKRHEGLDFEYPPRDPGMPHYQMHDWDNTGGRFSDASTNNSHGEARLHNLIPEDGKRDPHDTVHNDHPDMEANEKNQSPIRWKQKPLVDQQQNKSISDLAMNYENRKTLDEHIIEFLEPEIPINYPLGKVYTNSYSSTSNHRNERETERYFKKRVIIHFLSKERTTSQEQHGKLIILPDSIEELLHTAGEKFGDTKPTKVISTENAEIDDISVIRDGDHLFFLCSDSENLSS

SEQ ID NO: 267874 - protein, 84 aa, Glycine max
  Clone ID: PAT_MRT3847_83912C.1.pep
DQWGAQDPLLCVSRHTEHPSGFAYALCDFTLTISIRALISSSRALISPLLRPYQSRRFFDVKGYARELSMVGNTVPYLECKGCA

SEQ ID NO: 267875 - protein, 70 aa, Glycine max
  Clone ID: PAT_MRT3847_83913C.1.pep
MLTHCHQLCKPVSIMILVNLALAFVNLLLKKVLNEGMDYMSIITYRQAISFIFMAPIACIYERKHKQIKM

SEQ ID NO: 267876 - protein, 79 aa, Glycine max
  Clone ID: PAT_MRT3847_83914C.1.pep
ESYITISISLFRTDNNHEIIVIVTIGIRGNGIDHNIEHPLPGGCTNHLGTNHMTNHGKKRERPYPTTKSIPVPFHHRGR

SEQ ID NO: 267877 - protein, 92 aa, Glycine max
  unsure (1)..(92): unsure at all Xaa locations
  Clone ID: PAT_MRT3847_83915C.1.pep
SLXDVIQYRNPKDNVVIKDGRITXDGIICTCCDKVLTLSEFKFHAGFTVNRPCLNIFMESGEPFTLCLLQAWSAEYKARXSQNQAVHADDND

SEQ ID NO: 267878 - protein, 107 aa, Glycine max
  Clone ID: PAT_MRT3847_83916C.1.pep
IGFPPLGFFLKERPKVFGFSSKNVPKKPREKGMPIKGPKTSFLEKKLKKKTPIVPPFEELCMGALSVKPDFMGVKKRGTGILLAGKKKNQTFEKFPKEHQKLGSFFF

SEQ ID NO: 267879 - protein, 210 aa, Glycine max
  Clone ID: PAT_MRT3847_83917C.1.pep
VRPRVRIRVLCNANISEHFNPKKDASFPEINLVNGETRGLIGGYPPCNRTILAFFAGQMHGRIRPVLFQHWEGKDKDVLVYEKLPDGVPYHETMKKSKYCICPSGFEVASPRIVEAIYAQCVPVIISQQYVLPFSDVLNWDSFSVQILVSDVPKLKEILLGISEDKYMRLQEGVKQVQRHFVVNNPPKRYDVFHMIIHSIWLRRLNVRVK

SEQ ID NO: 267880 - protein, 115 aa, Glycine max
  Clone ID: PAT_MRT3847_83918C.1.pep
WKQQRKNLRILLEKIHSSRLELIEFTIQIWIGDHLVFNRIRPRPALIQGPEKKSLIYVPYQVVGLQLGSSVACYCCRKFGTSTCLSSHVETETKGKLKLCLICVIDLHLSNCPLG

SEQ ID NO: 267881 - protein, 105 aa, Glycine max
  Clone ID: PAT_MRT3847_83919C.1.pep
LRYTENPLLLIHTPLSFSLSDNEFKLLNNRVYIFVHICVAFLGFYIFIYFLGNIYYHIYIYIYIYIYIYIIIYILLSSMVFQTMKEKNTDCGYTTICFTFHFSSS

SEQ ID NO: 267882 - protein, 77 aa, Glycine max
  unsure (1)..(77): unsure at all Xaa locations
  Clone ID: PAT_MRT3847_8391C.1.pep
GPGGGGGGGXGGGVGXGVKNFVWYRGNKKVFRLDLIGQHLPASTPHGYNAFIFQEANTEGSXTLTTPTFSPXKIALQ

SEQ ID NO: 267883 - protein, 53 aa, Glycine max
  Clone ID: PAT_MRT3847_83920C.1.pep
LESDSSPVRLPYHNYYKHTVCTIHTRTFSTDTVRTLQHTLLTTLNVNCKILIY

SEQ ID NO: 267884 - protein, 49 aa, Glycine max
  Clone ID: PAT_MRT3847_83921C.1.pep
ERNMREVLIKFYIRKGLGKLKRCGIVSLSVNSWGVDFMKREGIRGGGMS

SEQ ID NO: 267885 - protein, 44 aa, Glycine max
  Clone ID: PAT_MRT3847_83922C.1.pep
GAGSEASHIMCCSGVKAHAFSLFDDHSSRQNSILFSCLQFGECL

SEQ ID NO: 267886 - protein, 194 aa, Glycine max
  Clone ID: PAT_MRT3847_83923C.1.pep
LQPTSENTSFSSIQSLNLSYNRFTNSIQLSGFKNLKILDLSHNNLVTLPSGFQNLSNLQHIDLSSCNLQSNVKPISALHSLHYLDLSNNTFTGNFPYDFPPLTTLKFLNISFNNFTSAISVNKFSRFFGKSAFVHAGSNFTYTNDSNKNTKQEAIIEQKQKKRKSKTLIGAASSAASAIVLILLGIWAVRIVIQ

SEQ ID NO: 267887 - protein, 73 aa, Glycine max
  Clone ID: PAT_MRT3847_83924C.1.pep
FHTRAQMQSEWVKHNHQVLFLPALALFFFFLVTHSFLPSFRFPHSFNGTYNTLSAPILHSSLLLRHPPSLLPQ

SEQ ID NO: 267888 - protein, 154 aa, Glycine max
  Clone ID: PAT_MRT3847_83925C.1.pep
FEQKGCKRESEMERREKGVWGGDKRGGGLMVEKLREGTLVGKKGGPSTPPPTWRLEQNGGDKVQEFLNFSTSTLSARKLCANLWEVLPHQQQQQQQTPLVKMNKLGTTHRRRNRRRRSQHPRDTGSEVTTTTTNWLILPDTLLILISQHHQLVA

SEQ ID NO: 267889 - protein, 109 aa, Glycine max
  Clone ID: PAT_MRT3847_83926C.1.pep
TKWVQERESVCEMDRREKSLEGGDKRGCGLMVEKLREGVSVGKKGGPSTPPPTWRLEQNGGDKVQEFLNFSTSTLSARKLCANLWEVLPHHQQQQQHTPLVKMNKLGTT

SEQ ID NO: 267890 - protein, 135 aa, Glycine max
  unsure (1)..(135): unsure at all Xaa locations
  Clone ID: PAT_MRT3847_83927C.1.pep
MRDIGLARLYNMADSFFFQRLLQDKPYISETLLAMIIISLVWWTFHPFIWQNRKIYSVLILCTVLSLLLASQVLRIXITFYYTQLPAPNYHXHQGSKLATLPHTDTDLEVLLIYYPRGVVYGYSDLILSSHMIFT

SEQ ID NO: 267891 - protein, 50 aa, Glycine max
  Clone ID: PAT_MRT3847_83928C.1.pep
GARLRLFIFMQCLYVDDDALHYLERGLVLIHQICLCSIGLILIFCYIYSF

SEQ ID NO: 267892 - protein, 62 aa, Glycine max
  unsure (1)..(62): unsure at all Xaa locations
  Clone ID: PAT_MRT3847_83929C.1.pep
VKILRXKYLFSFYSYKNFTFKSLYFNTSHFSPTHNFLVPTHIIFNLFSSYNEHQKRLKIECL

SEQ ID NO: 267893 - protein, 73 aa, Glycine max
  Clone ID: PAT_MRT3847_8392C.1.pep
LFLGCKFRQNRRYYHLKLWYKGGDPFVGCTWKEGKKLEEEEEEEKEEEEVVVVVVAAVEQQLKQPQMKGALQH

SEQ ID NO: 267894 - protein, 44 aa, Glycine max
  Clone ID: PAT_MRT3847_83930C.1.pep
GSGFGQVPGTWHVRCTILPQEDKIPAVITRFKAFHEAFMAEYRD

SEQ ID NO: 267895 - protein, 180 aa, Glycine max
  Clone ID: PAT_MRT3847_83931C.1.pep
MATCPANSFNFNTTLCACTPGHVLQHVRNTCVLYEGNSTILTDTGVDYYALSFPETLFAFDRIKKFTQSQAVFLEATLVMLEVTLVMLLSWLLFCVFLRCTKLGDGRNVWFKIRWWISRLDICFATRHWLDDQKVVTKRKTELGGAFSMASWILFIGLFAVLLYQIISKRSIEVHNVRAT

SEQ ID NO: 267896 - protein, 332 aa, Glycine max
  Clone ID: PAT_MRT3847_83933C.1.pep
PRVRPRVRPRVRTAARRRQKGTAGRRRQKGTAARRRQKGTAARRRQKGTAARRPQKGNGVSTSGDSLRSIPTPFLTKTFQLVDDHTIDHVISWNDSGSSFIVWNTTVFDKDLLSKYFRHNNFSSFVRQLNTYGFRKVVPDRWEFSNEYFRRGEKRLLCEIQRRKILSASPPPAGATATVAVPSPLPLSAIPTAKPIVSPSNSAEEQVLSSNSSPARAPVELLDENERLRKENILLTKELVKMRSLCNNIFNLMSNYANAQADGSSAAAAKRCSGEDAVEEMNPKLFGVAIGKKRAREEEGHGAKYDTALRRGENKKTPWLNQCHRANQRVCN

SEQ ID NO: 267897 - protein, 78 aa, Glycine max
  unsure (1)..(78): unsure at all Xaa locations
  Clone ID: PAT_MRT3847_83934C.1.pep
TVSLSXXPEXXXLLMXSXVDXHVXKXLHVXXLLCICGVTAAKSLTETVHSVPPVKXGAGMATSRIWCQFWMXPXXXQX

SEQ ID NO: 267898 - protein, 52 aa, Glycine max
  Clone ID: PAT_MRT3847_83935C.1.pep
FILSREIILTLLGYLRLIKIIVDPQNHLSTHIMSLHSQVTILLHQHLIPFSF

SEQ ID NO: 267899 - protein, 118 aa, Glycine max
  Clone ID: PAT_MRT3847_83936C.1.pep
HHSYMYTRVQAIVPFCLAMLSDWGLERMYDGHQLFLYFVHRQSVRVLIKFRSSFIVLVHHHVVFRSSIMIPIPFFIWHSFGILCFPIIVTYRLVYILIPQHNSASHSLRLMCPFSLEP

SEQ ID NO: 267900 - protein, 128 aa, Glycine max
  Clone ID: PAT_MRT3847_83937C.1.pep
MSKRKFGFEGFGINRQSTYSFERPQAPQRLYIPPSARHGHDHYEDTDIDNIDYDDNNSNNNNNKDDDDDYGSNNNNGGGNDEDEIDPLDAFMEGIHEEMRAAPPAKPKEKAEDPVRDDEDDDPMESFL

SEQ ID NO: 267901 - protein, 773 aa, Glycine max
  unsure (1)..(773): unsure at all Xaa locations
  Clone ID: PAT_MRT3847_83938C.1.pep
MSKRKFGFEGFGINRQSTYSFERPQAPQRLYIPPSARRXDNIDYDDNNSNNNNNKDDDDDYGSNNNNGGGNDDDEIDPLDAFMEGIHEEMRAAPPPKXKEKAEDRYRDDEDDDPMESFLMAKKDLGLTLASDALHAGYDSDEEVYAAAKAVDAGMIEYDSDDNPIVIDKKKIEPIPALDHSSIDYEPFTKDFYEETPSISGMSEQDVSEYRKSLAIRVSGFDVPKPIKAFEDCGFSSQIRNAIKKQGYEKPTTIQCQALPVVLSGRDIIGIAKTGSGKTASFVLPMIVHIMDQPELQKEEGPIGVICAPTRELAHQIFLEAKKFAKAYGVRVSAVYGGMSKLEQFKELKAGCEIVVATPGRLIDMLKMKALTMMRATYLVLDEADRMFDLGFEPQVRSIVGQIRPDRQTLLFSATMPRKVEKLAREILSDPIRVTVGEVGMANEDITQVVHVIPSDSEKLPWLLEKLPEMIDQGDTLVFASKKATVDEIESQLAQRGFKVAALHGDKDQASRMDILQKFKSGLYHVLIATDVAARGLDIKSIKSVVNFDIAKDMDMHVHRIGRTGRAGDKDGVAYTLITLKEARFAGELVNSLVAAGQNVSXELMDLAMKDGRFRSKRDARKGGGKKGKGRGGGGGGGRGVRGVDFGLGIGYNPESNNAPSTTAPSRSAAVNSLRTGMMSQFKSNFVAASSNSQNQGFGNNTSMTANKRTALPGFVSGGSIGGDINTYQSTASPNPATSAVISTSQGYGVNPGQKSTNSSKPKERRRPSGWDR

SEQ ID NO: 267902 - protein, 50 aa, Glycine max
  Clone ID: PAT_MRT3847_83939C.1.pep
VRAARAARAARGGSVGDEVTRINIVTTSTSMFVMFHFRFKVAAFYYLFLE

SEQ ID NO: 267903 - protein, 199 aa, Glycine max
  unsure (1)..(199): unsure at all Xaa locations
  Clone ID: PAT_MRT3847_8393C.1.pep
NRQSFSQLSGDAXTLAVKESSGRSTGKGRGKGEAKLATRGIGVDASPRTGASSIQETYKYFCTRFVRLNGILFTRTSLETFAEVLAVVSSGLRELLSSGQDEELNFGTDTPENALVIVRIVCILVFTVYNVNKESEGQTYAEIVQRAVLLQNAFTAAFELMGYIIERCAQLXYPSSSYLLPGILFLLVAFIQIMRRQQA

SEQ ID NO: 267904 - protein, 70 aa, Glycine max
  Clone ID: PAT_MRT3847_83940C.1.pep
FMRSGASTESHFPPYELPSHQECRKVLGHSLAQAAVAFAAVMTLPQISLTMDHEHTGAWVEPGRSGPVPA

SEQ ID NO: 267905 - protein, 177 aa, Glycine max
  Clone ID: PAT_MRT3847_83941C.1.pep
MSSSRKKLVLNTVSVSLGCGSCRRPRLLRHIFHPKQRPKKPAGQVHGLHWDDTTTSSTTTNASTAATFSPCYAEASAQFSDFAETAKAFGRGVAVEKDSDDPYLDFRHSMLQMILENEIYSKEDLRELLNCFLQLNSPDHHGVIVRAFTEIWNGVFSVRRRSGSSTGFHLNRKSRDF

SEQ ID NO: 267906 - protein, 69 aa, Glycine max
  Clone ID: PAT_MRT3847_83942C.1.pep
KPSLKKTKKIKRSPEDKSPHGSLNSDNQIQKGVQPTYNFWSIYPKKQKAPFKTHLFLVLAEQVYPRSFR

SEQ ID NO: 267907 - protein, 106 aa, Glycine max
  unsure (1)..(106): unsure at all Xaa locations
  Clone ID: PAT_MRT3847_83943C.1.pep
MFASLILSGDNRCTDTTIYNCTDLDILVAHYTIASEFRKFLPHYIRWHPYTSLIYILPCFLTAEIKYNQNQSKIQIYGLFHDTIYEFLTKHEKNLALXDQQKMEVI

SEQ ID NO: 267908 - protein, 64 aa, Glycine max
  Clone ID: PAT_MRT3847_83944C.1.pep
TGGHVPETNCCFMGDFVDPGYNSLALFTILLLLNVRYPANFPLLPGNHQRRLLTPAYGFSDDCQ

SEQ ID NO: 267909 - protein, 48 aa, Glycine max
  Clone ID: PAT_MRT3847_83945C.1.pep
TQIFPSKNWEHYILPEFYCRKSFLSNKLLKNILQKLHVKNFLQVTLYQ

SEQ ID NO: 267910 - protein, 56 aa, Glycine max
  Clone ID: PAT_MRT3847_83946C.1.pep
MTKSLTSHWRRFIHPMSWRCKWIELQMKQLQSQARKYEKELAAYNHSKQLDLAHFT

SEQ ID NO: 267911 - protein, 83 aa, Glycine max
  Clone ID: PAT_MRT3847_83947C.1.pep
NFKGPKQGNVALPAALRKHLGKGRLAAVAAPAPPSVFLKRGDDSLLQQHDWIQGAIFPCKNSFNAFSECETFQLPRSVSDIFP

SEQ ID NO: 267912 - protein, 152 aa, Glycine max
  unsure (1)..(152): unsure at all Xaa locations
  Clone ID: PAT_MRT3847_83948C.1.pep
MTYHVDYNEANVSSNTSTLVQMDSDGCSTLTCHKCGKKLKNLDAVEAHHISEHSVTELEEDSSRQIIETICGSGTSSINNSENMVGQIDCILKVLNVPKTLACXEEYRAKVKDNAEKLQKKHPRCVADGNELLRFHGTTMSCSLGTNSSSPV

SEQ ID NO: 267913 - protein, 48 aa, Glycine max
  Clone ID: PAT_MRT3847_83949C.1.pep
WLGTPISFMRSNEHRSHETERKWDTSGLQGLPLKFVQADQSARNWWRK

SEQ ID NO: 267914 - protein, 68 aa, Glycine max
  unsure (1)..(68): unsure at all Xaa locations
  Clone ID: PAT_MRT3847_8394C.1.pep
MKMSLKNSMVVLKVCLKLLLLELVTGARMXLSCFKSDHSSNYDDDDYSXPCRDRSMCTRSMPXKCSCE

SEQ ID NO: 267915 - protein, 90 aa, Glycine max
  unsure (1)..(90): unsure at all Xaa locations
  Clone ID: PAT_MRT3847_83950C.1.pep
FNQEYPPYIDVSNLPEIKLMHSSKSIKYVMDTXSCMHYNCGFTRDXIKFLMTYVNLSIVIDRGTLKQYVNPVVIPFHVPPSDRCTVPHLL

SEQ ID NO: 267916 - protein, 97 aa, Glycine max
  unsure (1)..(97): unsure at all Xaa locations
  Clone ID: PAT_MRT3847_83951C.1.pep
SKYLGRCCGSVLKGELFEDGLEVIEERVVQLGLLQYILYLHLHXQRIQIQHVQNPRFWGPCRACLTSRRAMNFAHHGLGVRICVLLGVGARTSAADL

SEQ ID NO: 267917 - protein, 97 aa, Glycine max
  Clone ID: PAT_MRT3847_83952C.1.pep
IKFRSIWGTVKHIICYTSFWDKSFCVSPLNKGFHDSYEGASIYLGALFQGVFLLSLRKRPFQKIPAKGASLEMLVSFRGVFKAFLFVSLLRNMGGGG

SEQ ID NO: 267918 - protein, 130 aa, Glycine max
  Clone ID: PAT_MRT3847_83953C.1.pep
FLKISPGSSMAHGEPLRLLIQPPILPYLTNPSLPRQNISHATHDLYKSGHPFIALTLKIIPQTLHEQSPTATVIHTLRFPLQKNRTALPLSPPETPYPTPSHANEPTAPHQPHPKYPPSLPTQTLTDNHF

SEQ ID NO: 267919 - protein, 80 aa, Glycine max
  Clone ID: PAT_MRT3847_83954C.1.pep
ICHQNFSSLYPYISEKFSKRRTNDLEICKIDGKMGLERGNEQKLGDKLKWFLQFFFTLNQVLDHISGYGKQKNSLAKVKE

SEQ ID NO: 267920 - protein, 55 aa, Glycine max
  unsure (1)..(55): unsure at all Xaa locations
  Clone ID: PAT_MRT3847_83955C.1.pep
XGXRLFRXLXFSHEDXXDLMXXXHSYXCXXWRLNPTXLPXDXSCXXSQASFVSKL

SEQ ID NO: 267921 - protein, 58 aa, Glycine max
  Clone ID: PAT_MRT3847_83956C.1.pep
THHQRSWRVSRERPSALLYTAVSHNLNIAFVESKTTTRHFTFMYPPLLSLSTYCCCWC

SEQ ID NO: 267922 - protein, 445 aa, Glycine max
  unsure (1)..(445): unsure at all Xaa locations
  Clone ID: PAT_MRT3847_83957C.1.pep
MAATASNNDVAAAADGPVMSLINKRLRALRKKLNRILAMEEAVTQGKPLNKEQEEVLRSKPSVLALIDELEKLRQPLATALSEELQNNGTSSQNSRETETETENETLAESSGSVEPNTNSTTNDVVVEDLLNLLYFGSLFDVKSDFASTMLTRTHERGCCLTYDYVTDDATDLLGEKDLDSISALRGLLVSRPADSSFSHKNALQRCLEHARLWLTKSEQPIEPDTDVTYAALREKLNKIMSSEYFTTTPEMKAPVEVAAAAAGGNYVSFHVPVHGSVVPVEVEQPVFQSQEKDEGTANSRTXSEEDPSDPEGELLKDEVEAENAGEVVSAQHEQTNQQADVEYNERDVEAKDQQSYPRRGYQNHRGGRGGGGRRGYSNGRGGRSGGRGGYQNGRNQYYDQPGNYYPRNNYYNNRGRGGRGGGYYNNHGAGGQVNHVAGDVGVQS

SEQ ID NO: 267923 - protein, 43 aa, Glycine max
  Clone ID: PAT_MRT3847_83958C.1.pep
KCAKRDQLSVEIILKEEIDAAIPGRTKKTRVPKKPTLCSLKQP

SEQ ID NO: 267924 - protein, 266 aa, Glycine max
  Clone ID: PAT_MRT3847_83959C.1.pep
MAIPLVILLICKLLSLFSQICYATTDTITKGQPLPDDGNTLLSKDGTFELGFFNPGSSNNRYVGIWYKNIVVKTVVWIANRDNPIRNNSSKLVISQDGNLVLLSQNESLIWTTNASSSEVSSSSPIVQLLDTGNLVIKDGNDKESVFLWQSFDYPCDTLLPGMKFGWDLRTGLNRRLTSWKSWDDPSSGDFTWGVEIGSNPDIVMWKGNVEYFRTVPYTGNMFSGVYGPRNNPLYDYKFVNNKDEVYYQYTLKNSSVITMIVMNQT

SEQ ID NO: 267925 - protein, 657 aa, Glycine max
  unsure (1)..(657): unsure at all Xaa locations
  Clone ID: PAT_MRT3847_8395C.1.pep
QPKMSRALVSKKRLSQLRERETSNSVELKSVTVDVGHTPRENQSTGKMVLPFEPLSIAFKDVQYFVDIPPEMKKHGSDEKRLQLLCDITGAFRPGILTALMGVSGAGKTTLMDVLSGRKTGGIIEGDIRIGGYPKVQKTFERVSGYCEQNDIHSPYITVEESVTYSAWLRLPTEIDSVTKGKFVEEVLETIELDGIKDCLVGIPRQSGLSTEQRKRLTIAVELVSNPSIIFMDEPTSGLDARAAAVVMRAVKNVVATGRTTVCTIHQPSIDIFETFDELILMKSGGRIIYSGMLGHHSSRLIEYFQNIPGVPKIKDNYNPATWMLEATSASVEAELKIDFAQIYKESHLCRDTLELVRELSEPLPGSKDLHFSTRFPQNSLGQFMACLWKQHLSYWRSPEYNLTRFIFMIVCAIIFGAVFWXKGKKINNQQDLFNVLGSMYIAVIFLGLNYCSTILPYVATERAVLYREKFAGMYSSTAYSFAQVVIEIPYILVQSILYVAITYPMIGLPLAVSEVVWYFYTTFCTFLYFVYLGMMVMSMSSNLDIASVLSTAVYTIFNLFSGFLMPGPKIPKWWVWCYWICPTAWSLNGLLTSQYGDIEKEVLVFGERKSVGSFLRDYYGFRHDRLSLVAVVLIVYPIVYASLFAYFIKKMNYQKR

SEQ ID NO: 267926 - protein, 60 aa, Glycine max
  Clone ID: PAT_MRT3847_83960C.1.pep
DVELPPFCLGLSLRSRRGFSSCAAGRIGIRLNLVFFNGSCPSRTIKVIPCCYTVGGQSGS

SEQ ID NO: 267927 - protein, 79 aa, Glycine max
  Clone ID: PAT_MRT3847_83961C.1.pep
MSTEYLYLIEEILAVLYDGGPGPVSFGDAAVAVWPKTLPTDGDCRGCVHGEDHLHVKLPARLISDIIMDRHDVKWIDTG

SEQ ID NO: 267928 - protein, 234 aa, Glycine max
  Clone ID: PAT_MRT3847_83962C.1.pep
MMGTETVWNSQSNWNTVWGSIRDCITFQSDDDDDSESTPTPFLLHSPSPDSPPCEIKITFAEKHELRQIYVRSTARVYEIYYAPNSRTNNDYLSTVRCGFAVRDDQVLRFPSIQNLSDDNINKSEDDWVEVKVPDSPSQTKPYPNSAKTSVSQDLYEATAEINDANPCISVTRRLLSLQSKGRVYVDEIYVFADPVESADSESHIENSSSSSLMAMFLPSCNYLRHRAQQSKCS

SEQ ID NO: 267929 - protein, 113 aa, Glycine max
  Clone ID: PAT_MRT3847_83963C.1.pep
GYSIFPFLLTLHFPDLVSRIGESTTPCTEPLHNRTRSIPTSTWSLARTTTTTFESPPPSKISPTIAMTSNMAMAPLPTTTSTTPTSPPPVSPKPNRFNCPIRFAANTSSSSSS

SEQ ID NO: 267930 - protein, 126 aa, Glycine max
  unsure (1)..(126): unsure at all Xaa locations
  Clone ID: PAT_MRT3847_83964C.1.pep
CRSQSSGITKYRAVGINSFFAKEAFFEHPGVIGFKTKRHIKVERFFFTPMEGHVLPDSSSIMVRVNSIVEVNTLVPLNIQSPVRGLVRLVNKKKXIDLQIFSGEIYFPVEMEKRFSLSSLLMPPSP

SEQ ID NO: 267931 - protein, 47 aa, Glycine max
  Clone ID: PAT_MRT3847_83965C.1.pep
EYRIGSSHHFPLGKFQVLRTLPWFRQLTLNPLWFTLSGVCLNLRCTL

SEQ ID NO: 267932 - protein, 88 aa, Glycine max
  unsure (1)..(88): unsure at all Xaa locations
  Clone ID: PAT_MRT3847_83966C.1.pep
LIVVKIAMPVNATANKSDGASXLQVFLTYSSIPEHCDACKWTKSEPHSWELIFTIEFVXSNYGFEMLGSEWSKXTLWHLRFLIDNSKQ

SEQ ID NO: 267933 - protein, 612 aa, Glycine max
  unsure (1)..(612): unsure at all Xaa locations
  Clone ID: PAT_MRT3847_83967C.1.pep
MLLRSHCCYLGIIAGLAVFLATTSFADAQSCNGILVSYAYTGGLRLPPNVSDSAKQPYRFESTVTVLNNGLDELKSWKVFVGFDHDELLVSASNAVLADGTTLPAAVGNGTVFAGFPMTDLKTAVETAGDLTQMQAQIELVGTVFGVAPPSVPMPKSINLANDGFLCRKSTAQGKNASSVCCTRDPKFKTNITTDEEFLPRQSGDLTIMYDVIRTYDSNYWAEVTVANHNPLGRLDNWRLSWDWMNDEFIYSMKGAYPSVVDASDCLFGKQGTFYRDLDFALVLNCERRPTIIDLPPTKFNDSDLGKIPFCCRNGTILPPSMDPSMSASRFQMQVFKMPPALNRSQLSPPQNWKISGTLNPDYECGPPVRVSPTENPDPSGLPSNKTVMASWQVVCNITTAKRTSSKCCVSFSSYYNDSVIPCKTCACGCPKNTERTCSTSAPAMWLPPEALLVPFVNRTAKAVAWASLKHLRVPNPLPCSDNCGVSINWHLYTDYTKGWSARVTLFNWGDTNFADWFAAVQMDKAASGFEKMYSFNATLLDGVNNTIIMQGLPGLNYXINVARGDGFPTKVFFNGEECSLPSVYPSSSGFRNGFSLATSLLLTLLMILLMR

SEQ ID NO: 267934 - protein, 158 aa, Glycine max
  Clone ID: PAT_MRT3847_83968C.1.pep
MPQHPNQTDYTKGWSARVTLFNWGDTNFADWFAAVQMDKAASGFEKMYSFNATLLDGVNNTIIMQGLPGLNYLVAEADGADPLRDPRVPGKQQSVISFTKKTTPGINVARGDGFPTKVFFNGEECSLPSVYPSSSGFRNGFSLATSLLLTLLMILLMR

SEQ ID NO: 267935 - protein, 63 aa, Glycine max
  Clone ID: PAT_MRT3847_83969C.1.pep
SVISFTKKTTPGINVAHGDGFPTKVFFNGEECSLPSVYPSSSGFRDGFSLATPLLLTLLMILL

SEQ ID NO: 267936 - protein, 193 aa, Glycine max
  Clone ID: PAT_MRT3847_8396C.1.pep
MNRIGNGGGGGGGLSNVEMEYIRRHHRHEPGENQCGSALVKHIRAPVPQVWSLVRRFDQPQKYKPFISRCVVRGNLEIGSLREVDVKSGLPATTSTERLELLDDNEHILSIRIIGGDHRLRNYSSIMSLHPEIIDGRPGTLVIESFVVDVPEGNTKDETCYFVEALIKCNLKSLADVSEGLAVQDCTEPIDRI

SEQ ID NO: 267937 - protein, 85 aa, Glycine max
  Clone ID: PAT_MRT3847_83970C.1.pep
STNIILISGILEKRLYNKKTIKINRFFQTLILHCIANIDQYYIVHIVNLQLFMKLSPRIEILKLIRHKLLAFEPHMALGHVHFHH

SEQ ID NO: 267938 - protein, 79 aa, Glycine max
  Clone ID: PAT_MRT3847_83971C.1.pep
RFLHDRAGEGDGELQSILSRSVQDLLAVTEQIYAITDRTKLVDAIKCLKAAMLNAVPIVRASDVDQDDHKQHINASLAH

SEQ ID NO: 267939 - protein, 53 aa, Glycine max
  unsure (1)..(53): unsure at all Xaa locations
  Clone ID: PAT_MRT3847_83972C.1.pep
CFPSXXSXLXPPPVXXWLFLSAXPPFSAAXXGRLLXCGRXPFPXALPFLAXPL

SEQ ID NO: 267940 - protein, 64 aa, Glycine max
  Clone ID: PAT_MRT3847_83973C.1.pep
CTLSRHRLSPCAKLVFVCVEVSSFLLCNVRIFPCSCKDQALWRFLFLYQPDVGHKVKNSPLFCG

SEQ ID NO: 267941 - protein, 180 aa, Glycine max
  Clone ID: PAT_MRT3847_83974C.1.pep
MTVEKRIVLVGIRIDGYSRQLLNWALAKVAEPGDCVIAVHVVKSSDYVSKNKTLIDGYLEVYEGLCGVKKVGLTGQIFTGSSIKNILVREAKKHAALALVVGGRAATAKYCAKRLQPTTNVLAIQDSRIVFRSCTNKQLPGGLILDPRPSLTIIKENLRDRAIHSLICDFIVEIEELTRK

SEQ ID NO: 267942 - protein, 63 aa, Glycine max
  Clone ID: PAT_MRT3847_83975C.1.pep
MPFIDVGAHVYIYSHTIWSHIFFKVFFVQIWVYLRFSMSKDNKVGFVPLPNSFFLEGPSPLPM

SEQ ID NO: 267943 - protein, 173 aa, Glycine max
  unsure (1)..(173): unsure at all Xaa locations
  Clone ID: PAT_MRT3847_83976C.1.pep
HEVEARQAPLNHHTSPRSRYPFLFFYLSFKSKXXXXFLXTXXSGNXGHPDKXXDQXXDAXXDAXXXQDPDXKVACETCTKTHLXMGFXENTTKGNVDYQKKVRXTCXNIGFXXXECGLDARQMARAXXXIXXXXPXXXSXGXXGXXSKKTCXKXXXXDQXXIFGXPXXEXXPF

SEQ ID NO: 267944 - protein, 99 aa, Glycine max
  unsure (1)..(99): unsure at all Xaa locations
  Clone ID: PAT_MRT3847_83977C.1.pep
AREFGSXSNRCXXXXXSXGPLLXSCXXXLXYXXPWXMXHGMXXEIXESLQXXXSKXXPXWXTFXVXRXXXXXXXMEWLSVFXGDCXXSRPSXXLXXXGX

SEQ ID NO: 267945 - protein, 82 aa, Glycine max
  unsure (1)..(82): unsure at all Xaa locations
  Clone ID: PAT_MRT3847_83978C.1.pep
SFVRRSPFGFLWSVVSSLLVVSAPXWXAGFLXGWVPARSFXAXXRLLGCSGGCRLSLPXPVSVVAWDGKAGRVGRPGGSGPV

SEQ ID NO: 267946 - protein, 44 aa, Glycine max
  Clone ID: PAT_MRT3847_83979C.1.pep
FDLSFAHASAHACGLPDLKTGNKSDRDLSAGVGQSLPTTWSTIS

SEQ ID NO: 267947 - protein, 145 aa, Glycine max
  unsure (1)..(145): unsure at all Xaa locations
  Clone ID: PAT_MRT3847_8397C.1.pep
GAQIKALNQVAGKLKWGLAQFAELEAFAQFASDPDKAPQNQLARGPRLRELLKQSQSAPLTVEEQIKPIXTGTNGYFDSLEIGQVRKFLVELRAYLNPNKPQFKEIIFFTKTFPGEAEVLLKEAFQEQMELFLPQGQVEKNYFIL

SEQ ID NO: 267948 - protein, 43 aa, Glycine max
  Clone ID: PAT_MRT3847_83980C.1.pep
FLLGLTKMLTGGLTYTTHLNTNDLLESLPPPNNNLILGTKICR

SEQ ID NO: 267949 - protein, 120 aa, Glycine max
  Clone ID: PAT_MRT3847_83981C.1.pep
WSTCDVAAEFCGNGVACFGLLLGPVLWTTTNVAALMTHARRTAEMRPMRIFFFILKPLLVPPPFGDHVEILERHYRTVRLGLVFFFFGEIVCLRHCRNSALDLRDNGYGERENRTERCLV

SEQ ID NO: 267950 - protein, 64 aa, Glycine max
  Clone ID: PAT_MRT3847_83982C.1.pep
MEIFYLLCSIVSTSLTSLLLSLVLPFHTLLQRWNSSRAASSFSDDEAEPISLYEGTVWHQRRNP

SEQ ID NO: 267951 - protein, 40 aa, Glycine max
  Clone ID: PAT_MRT3847_83983C.1.pep
YHSPSILHFTKSYYLQLKFHLYTTISDYYHLYNHLKSLHL

SEQ ID NO: 267952 - protein, 54 aa, Glycine max
  Clone ID: PAT_MRT3847_83984C.1.pep
KCTKTTLFKINSRGSHLNLGVKFFTSEPRYNPKDLNSKKSIYRPLKSLTGETWP

SEQ ID NO: 267953 - protein, 29 aa, Glycine max
  Clone ID: PAT_MRT3847_83985C.1.pep
PSLHVWGVQPTIIRSTASGASSIDKAALT

SEQ ID NO: 267954 - protein, 62 aa, Glycine max
  Clone ID: PAT_MRT3847_83986C.1.pep
TALAPAIGAVLAVIQGDPLGIKNEGPFVFAQVKHKFGVKKIGIFFLQAWEPPPGNKGHYHFF

SEQ ID NO: 267955 - protein, 40 aa, Glycine max
  Clone ID: PAT_MRT3847_83987C.1.pep
LLGVLIEGLALLVNLVVLERQPAQIFLKYNAICYIFCLVF

SEQ ID NO: 267956 - protein, 71 aa, Glycine max
  Clone ID: PAT_MRT3847_83988C.1.pep
MGGGMEANKNKFIEDWGTARENLEFNFRWTRRNLALVGIFGIAIPVLVYKGIVREFHMQDEDNGRPYRKFM

SEQ ID NO: 267957 - protein, 45 aa, Glycine max
  unsure (1)..(45): unsure at all Xaa locations
  Clone ID: PAT_MRT3847_83989C.1.pep
XATXXAEAKGQSXDVXGGXSDXITXLEXTYXSPNPXCXRSRAWPX

SEQ ID NO: 267958 - protein, 42 aa, Glycine max
  Clone ID: PAT_MRT3847_8398C.1.pep
FFRSITLPYKLRKHIFTFILLKHEHPIHDIKSLYRHLYLSKK

SEQ ID NO: 267959 - protein, 164 aa, Glycine max
  Clone ID: PAT_MRT3847_83990C.1.pep
MINAGSAHDIIPDSATFGGTYRAFSKKSFYGLRKRIEEVIKGQAEVHRCSGEVEFCGNEHPTIPPTTNDVRIYQLARQVSSKIVGEDNIELAPLFTGSEDFAFYLEKVPGSFVLVGTRNEKSGSIHPAHSPYFFIDEDVLPIGAALHAAFALSYHSYSTNSYPL

SEQ ID NO: 267960 - protein, 142 aa, Glycine max
  Clone ID: PAT_MRT3847_83991C.1.pep
MAFRAARNVGLRLGGGRRSIATASAKKHDDWATLKAELAPVYMVCGMVAMAVAIGSHTAFQQLARSPTVHINKKRRESMPEVSDPDRTFNSATKFIDGSFLRKLSHIQDNNPTLHDPSHPNPFTTPRTAHTLKTVGVHPSSR

SEQ ID NO: 267961 - protein, 726 aa, Glycine max
  unsure (1)..(726): unsure at all Xaa locations
  Clone ID: PAT_MRT3847_83992C.1.pep
MADALSVIPAAVLRNLADKLYEKRKNAALEVEGIVKQLAGAGDHDRITAVITLLTTEFTYSPQANHRKGGLISLAAATVGLTTEAAQHLEQIVPPVLNSFADQDSRVRYYACEALYNIAKVVRGDFIIFFNQIFDALCKLSADSDANVQSAAHLLDQLVKNIVTESDQFRIEEFIPLLRDRMNVLNPYVHQFLVGWITVLDSVPDIDMLGFLPDFLDGLFNMLSDSSHEIRQQADTALSEFLKEIKNSPWYSXKSVDYGRMTQILVQRAGSPDEFTRLTAITWINEFVKLGGDQLVPYYADILGAILPCIADKEEKIRVVARETNEELRALKADPAEAFDVGAILSIARRQLSSELEATRIEALHWISTLLNNYRTEVLQFLNDIFDTLLKALSDPSDEVVLVVLDVHACIAKDSQHFRQLVVFLVHNFRVDNSLLEKRGPLIIRRLCVLLNAERVYRELSTILEGESDLDFASIMVQALNLILLTSLELSEIRDLLKQSLVNPAGKDLYVSLYASWCHSPMAIISLCLLAQTYRHASAVIQSLVEEDINVKFLIQLDKLIRLLETPIFAYLRLQLLEPGRYTWLFKALYGLLMLLPQQSAAFKILKTRLKAVPSYSFNGEQLKKTSSGNPYQFLHHMSGGSQISEDGDIAMDGGNSHNGINFAARLQQFQQMQHQHRVHLKTQAQSRKNSSPLSKEAQRQEEPKRPQSSEVNVIPSRSSKRAQGS

SEQ ID NO: 267962 - protein, 60 aa, Glycine max
  unsure (1)..(60): unsure at all Xaa locations
  Clone ID: PAT_MRT3847_83993C.1.pep
XTQINIEHLIRSSSQIIHEWISKPSFVLLTILTKEKSQSQKKSHLFPRRAWIELNNGGIF

SEQ ID NO: 267963 - protein, 139 aa, Glycine max
  unsure (1)..(139): unsure at all Xaa locations
  Clone ID: PAT_MRT3847_83994C.1.pep
LEPGKYTWLFKPLYGLLMLLPQQSAAFKILKTRXKAVPSYSFNGEQLKKTSSGNPYQFLHHMSGGSQISEDGDIAMDGGNSHNGINFAARLQQFQQMQHQHRVHLKTQEAQRQEVLKRPQLSEVNVVATSRSSKRALGS

SEQ ID NO: 267964 - protein, 739 aa, Glycine max
  Clone ID: PAT_MRT3847_83995C.1.pep
MADALSLIPAAVLRNLADKLYEKRKNAALDIEGIVKQLAAAGDHDKITAVINLLTTEFTYSPQANHRKGGLIGLAAATVGLTSEAAQHLEQIVPPVLNSFSDQDSKVRYYACEALYNIAKVVRGDFIIFFNQIFDALCKLSADSDANVQSAAHLLDRLVKDIVTESDQFSIEEFIPLLRERMNVLNPYVHQFLVGWITVLDSVPDIDMLGFLPDFLDGLFNMLSDSSHEIRQQADSALSEFLQEIKNSPSVDYGRMAEILVQRAGSPDEFTRLTAITWINEFVKLGGDLLVPYYADILGAVLPCISDKEEKIRVVARETNEELRAIKADPAEAFDVGAILSIARRQLSSELEATRIEALHWISTLLNNYRSEVLEFLNDIFDTLLKALSDPSDEVVLLVLDVHACIAKDPQHFRQLVVFLVHNFRVDNSLLEKRGALIIRRLCVLLNAERVYRELSTILEAESDLDFASIMVQALNLILLTSSELSEIRDLLKQSLVNPAGKDLYVSLYASWCHSPMAIISLCFLAQTYQHASAVIQSLEEEDINVKFLVQLDKLIRLMETPIFAYLRLQLLEPGRYIWLFKALYGLLMLLPQQSAAFKILKTRLKAVPLYSFNGEQLKRMPSGDSYQFRNVPDGFRTIEDGDVAKDGGSSRNGINFAARLQQFQQMQHQHRVLTKTQAKLRNMSTSLSKVADLFILHVDFHYMQEPQREEEPRKPQSIEVNVPPSRSSSKRGPGQLQL

SEQ ID NO: 267965 - protein, 28 aa, Glycine max
  unsure (1)..(28): unsure at all Xaa locations
  Clone ID: PAT_MRT3847_83996C.1.pep
YYTDRPSRTRQTGFLEGXLAALCCCCLI

SEQ ID NO: 267966 - protein, 74 aa, Glycine max
  Clone ID: PAT_MRT3847_83997C.1.pep
WSSFFFFLMIPTSNQLLILGLGKMAFITINVIIVHGITYISFILISLLAIPTDGTNTRRRLTTILVTTFRDLAP

SEQ ID NO: 267967 - protein, 95 aa, Glycine max
  Clone ID: PAT_MRT3847_83998C.1.pep
TPRSHTLISELPVHIGIAEPNQWILHKLKILTLAHYYMFPATVTLFMRVFLWEDALSKIMYPMSSLHTKPNRHIHLLLTKNHIPTFFSPHMTLWT

SEQ ID NO: 267968 - protein, 357 aa, Glycine max
  Clone ID: PAT_MRT3847_83999C.1.pep
MSSQTAPTEAPEPYTPLLRSRTDAGRGPAPTLALLLGRAGRRGPSMLVRETAARELEERRADWGYSKPVVALDMSWNMAFVVVSAAMLACTTSEHPTTPIRVWIVGYALQCLVHVLLVWLEYRRRSRRDSRSGSQRARDVESDAGSGDDDDYSDDGDGSSGNTSRSRFAKRCESLNTGVSFLWWIVGFYWVVSGGDILLQDAPRLYWLAVVFLAFDVFFAIFCVVLACLIGIALCCCLPCIIAILYAVAGQEGASEADLSMLPKYKFRILSDVDKPSGGAGSMVPIETSSAYLENERTLLLEDAECCICLCSYEDGAELHALPCNHHFHSSCIVKWLKMNATCPLCKYNILKGNEQV

SEQ ID NO: 267969 - protein, 81 aa, Glycine max
  unsure (1)..(81): unsure at all Xaa locations
  Clone ID: PAT_MRT3847_8399C.1.pep
LASXQRDXGXXRRCPHVLGXXFSXXGLRXNXIXCSXKHXVPTXXRXLXLXDNXLXAHGEDFQGFHGEYGRSYPQRXSXXAV

SEQ ID NO: 267970 - protein, 83 aa, Glycine max
  Clone ID: PAT_MRT3847_839C.1.pep
FSFFFFFFYNSSIQFVKNKKKHDKLLVFPCQDYQRGDKWMGLILHIEDWKKKNEVVLLVFVTCRVLVKDPVYFLKNVSHQSSL

SEQ ID NO: 267971 - protein, 61 aa, Glycine max
  Clone ID: PAT_MRT3847_83C.1.pep
TPKPLGGGFLGPVLGSIFGNSLYFWVQSLMEFRLLSGGFLRTPRGGCLFLGPYFCTSFQSC

SEQ ID NO: 267972 - protein, 76 aa, Glycine max
  Clone ID: PAT_MRT3847_84000C.1.pep
RKRLFSTYLWELLMHSTMGTRMATPWHIFVSQKDHGFQKVHERGNCGPILNHTTSTCEQTSCGNNPRELIRTTHQG

SEQ ID NO: 267973 - protein, 50 aa, Glycine max
  Clone ID: PAT_MRT3847_84001C.1.pep
TGSSIFSWGREFFLLDNNLIYFIFQVKVKIKSKHVGGAFSKKNKCRRFKR

SEQ ID NO: 267974 - protein, 287 aa, Glycine max
  unsure (1)..(287): unsure at all Xaa locations
  Clone ID: PAT_MRT3847_84002C.1.pep
MSNSTTLISAVASLAASAMLIRSITNDFIPLEILDFFYSKIYYLSRQFSSQLTIIIEEFQGVSRNQVYEAAEVYLGTKATLSALRVKASKSEDDKKLAFSVDRDEDISDDYEGVQVKWKLSCEILEPYGSRHSNDRNANFKSEVRSYELSFHKKHKEKIFNSYLPYVLERAKDIKQENMEVKLHTIEYDCYWNGNSVKFSHPMTFKTLAIDAELKREVVSDLDKFVKGKEFYKRTGKAWKRGYLLYGPPXTGKSSLIAAMANYLNYDIYDLDLTIVTNNNDLKNLLL

SEQ ID NO: 267975 - protein, 49 aa, Glycine max
  unsure (1)..(49): unsure at all Xaa locations
  Clone ID: PAT_MRT3847_84003C.1.pep
PTRSVETLDSVXINTMKYYQSGMTHEAPCRESQLKRLHNLLVVKDEQII

SEQ ID NO: 267976 - protein, 140 aa, Glycine max
  unsure (1)..(140): unsure at all Xaa locations
  Clone ID: PAT_MRT3847_84004C.1.pep
MRSLRHNGQSIKGTMEALQKNVMDMTTHTXVHGIVRSSLNCSRCALYSACXLSXTILIQLINATKVIGGNAKVLKDTHQXGKITLRNHXANEESYXANTIADRKLPMTRTCYIKIWTLDVLYIKSVMLDDILNHVTIHFI

SEQ ID NO: 267977 - protein, 103 aa, Glycine max
  Clone ID: PAT_MRT3847_84005C.1.pep
HASDFLQDLLRRYLHYERLSSPLVRYISGYSLRPLCERTLGTVACTCSGFIVLSMNRSNVMSTLQMTSRAPLLEGRLRKGIGHYGSTCSTALLIPAKSSCCLC

SEQ ID NO: 267978 - protein, 61 aa, Glycine max
  Clone ID: PAT_MRT3847_84006C.1.pep
WEFQAKYADVQLQCVATSRNRFCPCPFGTHHNALFLGAPGSYVNLERRNVGDDLPDLPRLK

SEQ ID NO: 267979 - protein, 71 aa, Glycine max
  Clone ID: PAT_MRT3847_84007C.1.pep
ILDESDGSCSSVDSLQSVVCSSGIASISTSHYQLPLSLQTPLDIKAETPRTGEYIFLYSPHTKKTNKLEIA

SEQ ID NO: 267980 - protein, 64 aa, Glycine max
  unsure (1)..(64): unsure at all Xaa locations
  Clone ID: PAT_MRT3847_84008C.1.pep
VVWPCARLPLSXXXXLCPCFXXAXXRLXLGTAGTXAGPGQAFLXGSXCSXVGGXFRASXRVXAK

SEQ ID NO: 267981 - protein, 137 aa, Glycine max
  Clone ID: PAT_MRT3847_84009C.1.pep
FFLFLLVLELLPGPLVRLFHVLLFWVGASRNQQQVQNFGHPFLLVIHEGETLTEVKSTIQKKLQVPNEEFSKWKFAFLSFGRPEYLQDSDIVSARFQRRDIYGAWEQYLGLEHTDNASKRSNAANQNRHEKAVKIYD

SEQ ID NO: 267982 - protein, 85 aa, Glycine max
  Clone ID: PAT_MRT3847_8400C.1.pep
IYNPAKIPVFSRESLKQNADVDTEELPATPLLLARALIYISVFHSREDLIKALLVISKVGDLAGIKYFPAEPTNQQQGGKSAKFD

SEQ ID NO: 267983 - protein, 117 aa, Glycine max
  Clone ID: PAT_MRT3847_84010C.1.pep
MLRRLAGVAQRTLSCSSSPHAPPLAASGYTPRREYGLVPMVIEHTSRGERAYDIFSRLLKERIVCIHGPITDDTASLVVAQLLFLESENPAKPVHLYINSPGGVVTAGLAIYDTMQY

SEQ ID NO: 267984 - protein, 183 aa, Glycine max
  unsure (1)..(183): unsure at all Xaa locations
  Clone ID: PAT_MRT3847_84012C.1.pep
AKTTSLLLFTLLLFRTRVLIPVKKSNEDLKDVTHKGNFDGEISGKKEGRIEMGLYGKAVPKTAKNFRXLCTGKKGTDTSVKTLHYECRSFHRIIPSFMLQGRDPPQGHGMRGESIYGDKLADDNFKLKHTGPRLLXLANASPSTNGSRCFITTVTTNCVDGRRCDVGKSLSGMHGGYEIEAEG

SEQ ID NO: 267985 - protein, 36 aa, Glycine max
  Clone ID: PAT_MRT3847_84013C.1.pep
HGPPALLYLVPFPLGALMPLGRKRGNFRVLWPSGDP

SEQ ID NO: 267986 - protein, 108 aa, Glycine max
  unsure (1)..(108): unsure at all Xaa locations
  Clone ID: PAT_MRT3847_84014C.1.pep
MAIVESVGKIPLQDPPEEEFCAADLTWTKFGNAEHHDEVALIPYDRVDAFIIGECTNVECPTRFHIERRRKRTIGSLKEYKDDEYLXEYRLYWXSFGPENYGEGERVY

SEQ ID NO: 267987 - protein, 187 aa, Glycine max
  Clone ID: PAT_MRT3847_84015C.1.pep
LRNVVEKTITMGKLEYSVNAVRTALRKLESGCSIQDVKAFCDPDDLKQLFKWKIVDKLHWYVQNSDTIVDFCCGANDFSILMKKKLEENGKKCSYRNYDLLPTKNDFSFERRDWMTVQPTELPTGSQLIMGLNPPFGHKAALANKFVDKALEFKPKLVILIVPPETERLDKKQSPYDLIWEDENFLS

SEQ ID NO: 267988 - protein, 67 aa, Glycine max
  Clone ID: PAT_MRT3847_84016C.1.pep
HREDRSQTLSGITHTIEETLHVGCHKTEEDYNGEQHHGGEYKGEHHGEHTTVYTCEHHVGEHKPDHH

SEQ ID NO: 267989 - protein, 193 aa, Glycine max
  unsure (1)..(193): unsure at all Xaa locations
  Clone ID: PAT_MRT3847_84017C.1.pep
RLPLKPANCIESEGGFFELLNLYIMPFPCARVAFFCFTFNRNAFRRLSYTNGPPEFYLPPGNGIFGMIFPGXPTPFQEPQESQQPGPSPXRPKTRPQKVPSLQKGDLIAMPSWCCIGGMYNNEDPSLLLPVSYFDTNXLENTLHPMPXKFFLAGNQXQEFLKYQQQQQGRFPKARKGKQQEKKKRKKATLFEW

SEQ ID NO: 267990 - protein, 61 aa, Glycine max
  Clone ID: PAT_MRT3847_84018C.1.pep
VHKGAAQVMIWVIIALLIGFYCLYHIRFMLFCQSAVYVSHPIHNNSAPASISSTLFGGNLS

SEQ ID NO: 267991 - protein, 50 aa, Glycine max
  Clone ID: PAT_MRT3847_84019C.1.pep
AAGVGQGQRIYLKLHQLIYRHHLGRVALGLERSAAGCSALKQFKLLLMIR

SEQ ID NO: 267992 - protein, 43 aa, Glycine max
  Clone ID: PAT_MRT3847_8401C.1.pep
NPNILGGFKCTSGHNNNFLKTLNLPYTLKLSCHTHLSQINLFT

SEQ ID NO: 267993 - protein, 66 aa, Glycine max
  Clone ID: PAT_MRT3847_84020C.1.pep
CSALINKAFYAAKSSWISIIQEPLLNSLLDRYVAATRAAIGVPTSSPISDSIQWRAQRERVSRCNI

SEQ ID NO: 267994 - protein, 35 aa, Glycine max
  Clone ID: PAT_MRT3847_84021C.1.pep
FCVEFLLDFHFLRKSAMPFIMQCCLISPYNKILFS

SEQ ID NO: 267995 - protein, 141 aa, Glycine max
  unsure (1)..(141): unsure at all Xaa locations
  Clone ID: PAT_MRT3847_84022C.1.pep
LEDDAYESPLIVINLDDIERLXKYVRIGHQVSNVISQTLLVLLKRLGTKGKXLVDHVTARELNCSKSIVWCDTLSDTYHSPTLITTVAYTELEQAIVNTDEDLESASHAXHDVPITKLSMLTETASHGEHSISADSIYHGL

SEQ ID NO: 267996 - protein, 167 aa, Glycine max
  unsure (1)..(167): unsure at all Xaa locations
  Clone ID: PAT_MRT3847_84023C.1.pep
EDRMSPTLHKDLLDRHVNYIACGEDYSSAICLHMWLSPAXEHDQKLCWQTGISRFTRRRHNCTXNRGLVHCHPRNPRKAGTDAPTPNPGLPYAVXDDMYGKVSRVADAGIRRRKNTMPRMSAENNDTVQKPXIRLTRTGTPDSMXLIKQLDSIAHAHGKKAATSDEV

SEQ ID NO: 267997 - protein, 446 aa, Glycine max
  Clone ID: PAT_MRT3847_84024C.1.pep
MHLYNAWLPPPVASQTSGERDSFARLIAAVNSSFRSDDPDSVYSTLKFISVLDLFIKAKSDLALEDVRNLIHKGLEIFHVSRNKLYAQVRWGNFLVRLLNKYRKKISLTTEWRPLYDTLVSTHFTRSTGPEGWRIRQRHFETITSLVQSCRRFFPSGSAFEIWSEFKFLLQNPWHNSSFEGSGFARLFLPTNLDNQAFFTQDWITECIELWESIPNCQFWNNQWADVIARVVKNYHNVDWECFLPLLFARYLNMFEVPVANGSGSYPFSLDVPRNTRFLFSNKTSTPAKAIAKSIVYLLKRGSSSQKHFEKLINILEQYYHPSNGGRWTYALERFLFHLVFQFQKRLQNEQLGINNSRPTEQHLGELERVFFVNSVLKLIDRGQYSKNEHLSETVAAATSILSYVEPSLVLPFVASRFRMALETMTATHQLKIAVMSVAFVGRSLC

SEQ ID NO: 267998 - protein, 104 aa, Glycine max
  unsure (1)..(104): unsure at all Xaa locations
  Clone ID: PAT_MRT3847_84025C.1.pep
LTRFYFTASPSVSRNSLRETWTFVTLCEAKQTLGACGKGLSEYSNLRSSSCLLPFSRKEXKDFHWAVAFHTYADETIGRYRIVVTNARLKVAINGYGLGGRNFL

SEQ ID NO: 267999 - protein, 145 aa, Glycine max
  Clone ID: PAT_MRT3847_84026C.1.pep
MVENNLFEDIFRVEKLNPDDKKLFDKVTRIEARSEKFDMFMHLDINSEVYPLKVGQKFALVLVSSLNPDGTPDTGYYTQISRQSLANNFEYVMYGKLYRITEGSGREKAEMNISFGGLLMMLKGDTSHCNKFELDQRLYLLIRKV

SEQ ID NO: 268000 - protein, 90 aa, Glycine max
  Clone ID: PAT_MRT3847_84027C.1.pep
SHQVPTLVDHSFHEQPQVSTHPAPILQIQCCHTTHVSPIATFLRWHSPLQLLLVTSLQRHLPVYRLFVKILPQTDKTKAVSLIGSSSSRI

SEQ ID NO: 268001 - protein, 490 aa, Glycine max
  Clone ID: PAT_MRT3847_84028C.1.pep
NFEMRETAPLAASQNMYHNNPKGKTLVPLSMGVPGELAGLHAAWLKHGRLPWKTLFQPAIELAGKGFVVTPTLGEYMAADANKILDDPGLRKLYAPNGTLLKAGDVCRNVELGSTLEVVAEQGPQAFYNGTIGENLVKDVRDAGGILTMEDLHNYKLEVTDATTVNVMGYTIYGMPPPSSGTLALSLVLNILGSYGGSNAARGNLGLHRLIEALKHMWAVRMNLGDPNFVNIDDTISKMLSPSFAKDIQHMILDNTTFPPEYYMNRWSQLSDHGTSHMCIVDADRNAVSLTTTVNYHFGAGFRSTSTGILVNNEMDDFSTPTDISPDKLPPAPANFIEPNKRPLSSMTPLIVTKDDQLVGVLGGSGGMNIIAAVVQVFLNHFILGMKPLDAVVSPRIYHKLIPNVVRYENLTAHNGDHIELSKESRLFLEERGHQLRGSEALAVTQLIVQTLKTPMNFNRKVGENTKSLTKHGTLTAVSDPRKGGCPAAV

SEQ ID NO: 268002 - protein, 108 aa, Glycine max
  unsure (1)..(108): unsure at all Xaa locations
  Clone ID: PAT_MRT3847_84029C.1.pep
VEYFGXQRTXEAXLAXXDKATDRTXXSTXGETNRXXGKEGNXXXTPGPPXXXEEXTKXAXGKKAXPXXRPXXPXPXRPKXXNXEGXXXXGXEREKEXDRTXXEPRTNA

SEQ ID NO: 268003 - protein, 75 aa, Glycine max
  Clone ID: PAT_MRT3847_8402C.1.pep
ILTQGSGSSPPEYGHLQPRDDSEYERGTATEAHESLKVVSSYRLSCPCTQSFSKAQKCPQRSSKRSHLSPSSLSS

SEQ ID NO: 268004 - protein, 100 aa, Glycine max
  unsure (1)..(100): unsure at all Xaa locations
  Clone ID: PAT_MRT3847_84030C.1.pep
GSLLNIRHGIVTAPLSFALDEFPHMHAIVDDGFHHPPNGDLALEYLXKSQGIQRTRHLAVQHANTSAAPIDSLPHIHYEYVRHSTRALIDLTHRVITRPK

SEQ ID NO: 268005 - protein, 32 aa, Glycine max
  Clone ID: PAT_MRT3847_84031C.1.pep
GRVKAETTKLIVTREETVSVTLTSVALTRMMH

SEQ ID NO: 268006 - protein, 71 aa, Glycine max
  Clone ID: PAT_MRT3847_84032C.1.pep
PRVRFYVCRLIAKYRPIMPVISVVIPQLKTNQLRWTFTGAFEARQSLIVRGLFPMLADPRHPVRIVQHGLI

SEQ ID NO: 268007 - protein, 106 aa, Glycine max
  Clone ID: PAT_MRT3847_84033C.1.pep
EKKAEAEAEAKPHFFMAKIIGKSRRRRTTTTQQLCHRMVHHVNVHCNLFHRVSFLGRFIWDRMLLCSLGRPSYLRLPLRDPTTQATVHGGASMHGYPLTTTTRLPL

SEQ ID NO: 268008 - protein, 103 aa, Glycine max
  Clone ID: PAT_MRT3847_84034C.1.pep
INFMEAYLFNTTPRRMRGFPNRKPPNNDHLQKVASENKTPDTPTISKTSSYNTIQNITLPCHIKSVNYTMCMHPAIQCIPKSQQPNKLIHNFNIFKRLHHAIR

SEQ ID NO: 268009 - protein, 94 aa, Glycine max
  Clone ID: PAT_MRT3847_84035C.1.pep
GEKRLGNQVFKNLGLNKKTSLPHKTPPWIWTEKNLITNSSPRRNHNPLKKKGRETLGVNETNPGLPWGPKETSKSRLDKAGFKKSLDRPFKITG

SEQ ID NO: 268010 - protein, 154 aa, Glycine max
  unsure (1)..(154): unsure at all Xaa locations
  Clone ID: PAT_MRT3847_84036C.1.pep
LEIRDEVVLVRGSKTDLEAETEHEAAVAVASLSVSVATIVPFVQPKNIPSTTLQPTKLKVPTQAXSVTHLSLSTTTAPPSKTSFKSTVASNALHAPMYLGPQRPGDPSNAAGLRRAVDVWLRNDLRLLDNECLSDASNDSVCVLPVYCFDPCDY

SEQ ID NO: 268011 - protein, 78 aa, Glycine max
  Clone ID: PAT_MRT3847_84037C.1.pep
SLTLQPTKCKLTVIYVKQKCALCRFRYGRLTSLNSIFAVELAEKFYGRIRIFMNFLFGNNSITMNNKCCSPYPFNIAL

SEQ ID NO: 268012 - protein, 32 aa, Glycine max
  Clone ID: PAT_MRT3847_84038C.1.pep
MSLAVLFMTDKMIPEASRYVQKLNLFGYDINK

SEQ ID NO: 268013 - protein, 85 aa, Glycine max
  unsure (1)..(85): unsure at all Xaa locations
  Clone ID: PAT_MRT3847_84039C.1.pep
ARARSRYGVDSAGNKVEGDTERMETVKKNIDSRGFAAKAVVVRIMTXRTELAHTCLLNETITLLSSQFKPDVAMIKKKIESLIER

SEQ ID NO: 268014 - protein, 255 aa, Glycine max
  Clone ID: PAT_MRT3847_8403C.1.pep
MKLVPLVARSFLRRAACLMAIHLRRALLAPPRVRPLDDSVDEYGCEKTTEGGHQIIVRYAECMGLPLFRRRIQGSSRHQELGYKETQGDEVEDLCILLREVKRQIPSVSAVSSGAIASDYQRLRVESVCSRLGLVSLAYLWKQDQSLLLQEMITNGIVAVTVKVAAMGLDPAKHLGKELAFLNAYLHKLKELYGINVCGEGGEYETLTLDCPLFSNARIVLDEYQVVMHSSDSIAPVGILSSLAFLLENRQMFSI

SEQ ID NO: 268015 - protein, 71 aa, Glycine max
  Clone ID: PAT_MRT3847_84040C.1.pep
VDMIRCSSFSGHQPTTEQNRSLTSSTNLITHAFLPSSLALKPRSRLVMPCQKLRRPLHSFPSMDSSTTNST

SEQ ID NO: 268016 - protein, 288 aa, Glycine max
  Clone ID: PAT_MRT3847_84041C.1.pep
QRASTMSLTGTVNDATATNSPCCCSEASGSGSCCGCSSNNSSTHICFKCDFNCDPLLTLENEDSKWISDSNPYGCSSAKPSSPLSTNGIHCDRSKDNIISVEHLLEIEDMQEFNVDEPLFWPFEAKLNWNYSEESWSPFCISPRKRVVFGSRSMTSRIKESKHKAPGIECSVTSEPSRITMSSKGSAEIVNSELNDEKVVLKTREDGTKLIFVANLNEDHEPNYALQLARGDFSLDQEPEIPIETLVGLKEFDGHEGLDSEFNGDVFMLEDSLLITHASECVVSKKDE

SEQ ID NO: 268017 - protein, 81 aa, Glycine max
  Clone ID: PAT_MRT3847_84042C.1.pep
RISGPTTPVRTGKLFNLIQLNPAIYGVGKGGKPEFNLLNVGLTRPPFPTTVTLIRYWNFFPPFFFPLNHANSRHLTTPFPP

SEQ ID NO: 268018 - protein, 59 aa, Glycine max
  Clone ID: PAT_MRT3847_84043C.1.pep
LLKENKILNSCSCSYENKLYQQESCNASKFGRRSAKDSHNYIVRVQSQWKSHVYCEHIC

SEQ ID NO: 268019 - protein, 74 aa, Glycine max
  Clone ID: PAT_MRT3847_84044C.1.pep
FKKGQLNTGKHKGEEKGDGIGRKNPGGKVGTHYFGGERGHVYKEGGMGFFFSPYGGEEGELGSMGGELTTLGWG

SEQ ID NO: 268020 - protein, 97 aa, Glycine max
  unsure (1)..(97): unsure at all Xaa locations
  Clone ID: PAT_MRT3847_84045C.1.pep
YLPRVRPRVRDARLLRRKAFSRIDWLQKADVPTIAQIEEFHSMQRMMNAPDSNDNSELLSSIDXLCLQGACXVFPNKIVYDDRLVLAYTQEFLDGNL

SEQ ID NO: 268021 - protein, 63 aa, Glycine max
  Clone ID: PAT_MRT3847_84046C.1.pep
LFSVDDDQIDYESSTNSTNKIKSVTAENSLNTDRENAGDKYCEILRNFPQKIQIAGKLSSVLS

SEQ ID NO: 268022 - protein, 145 aa, Glycine max
  unsure (1)..(145): unsure at all Xaa locations
  Clone ID: PAT_MRT3847_84047C.1.pep
MGSHMSKRIPETSSSIGLSTELHYKTELSSYEAACKLDSDLQFFDTTLQARANQVINTLAVGVEVRALSFDSLKQITECLLEMNQEVVKVILDCKKDIWKSQELFELVEEYFENSLKTLDFCTVLEKCLKRARDSQLLIHVAXQQ

SEQ ID NO: 268023 - protein, 97 aa, Glycine max
  Clone ID: PAT_MRT3847_84048C.1.pep
AKNAFEMAVLEEFLLTKRPFWKKLFKFEATFSEVYFVYSGKGFLKIIIMLTESSFRKQQLQSRVVFFKVYFVSSRNDILESTILAYGRTILEAKIAI

SEQ ID NO: 268024 - protein, 77 aa, Glycine max
  unsure (1)..(77): unsure at all Xaa locations
  Clone ID: PAT_MRT3847_84049C.1.pep
MRGPLGARIGRYPSSDGVTQMGGIIRHNRKCRDIIXLVIFIAFWIAMIVNSRLGFNQXNPLRLTYGLDYKGNVCGDK

SEQ ID NO: 268025 - protein, 54 aa, Glycine max
  Clone ID: PAT_MRT3847_8404C.1.pep
ICLTYSLCCVSFELNSHQKKYKHRFNLNNKGYLHVHLMGMCKYVHIGHYVHHHL

SEQ ID NO: 268026 - protein, 62 aa, Glycine max
  Clone ID: PAT_MRT3847_84050C.1.pep
PLLFLTTYNTGNAKRPVTGLNGFCESIGHGFNTHKESIVRTYIDRIYPFTGNVIIREHILAG

SEQ ID NO: 268027 - protein, 150 aa, Glycine max
  Clone ID: PAT_MRT3847_84051C.1.pep
LGEKNITLTSWREGASMIRHRLRQKKVLLILDDVDKHKQLRAMVGRSGWFGAGSRVIITTRDKHLLKYHGVERTYEVEVLNHNTALQLLTWNAFKREKIDPSYEDVESALEHYKRSPGNEIILEILKVSFDALGEEQKNALKRKIRNFEL

SEQ ID NO: 268028 - protein, 822 aa, Glycine max
  unsure (1)..(822): unsure at all Xaa locations
  Clone ID: PAT_MRT3847_84052C.1.pep
LGEKNITLTSCREGASMIRHRLRQKKVLLILDDVDKHKQLRAMVGRSGWFGAGSRVIITTPXRDKHLLKCHEVERTYEVKVLNHNAALQLLTWNXAFKREKIDPSYEDVLNRVVTYASGLPLALEIIGSNMFGKSVAGWESAVEHYKRIPNDEILEILKVSFDALGEEQKNVFLDIACCLKGYEWTEVDHILRNLYGNCMKHHIGVLVEKSLIKVSCCDTVEMHDLIQDMGREIERQKSPEEPGKRKRLWLPKDIIQVLKDNTGTRKIEIICLDFXLSDKEETVEWKGNAFMKMKNLKILIIRNCKFSKGPNYFPEGLRVLEWHRYPSNCLPSNFDPINLVICKLPDSSITSFEFHGSSKKLGHLTVLNFDRCEFLTKIPDVSDLPNLKELSFNWCESLVAVDDSIGFLNKLKTLSAYGCRKLTSFPPLNLTSLETLNLGGCSSLEYFPEILGEMKNITELALHDLHIKELPFSFQNLIGLLFLWLDSCGIVQLRCSLATMPKLSEFYITDSCNRWQWVESEEGEEKVVGSILSFEATDCNLCDDFFFIGSKRFAHVGYLNLPGNNFTILPEFFKELQFLTTLVVHDCKHLQEIRGLPPNLKHFDARNCASLTSSSKSMLLNQELHEAGGIEFVFPGTSIPEWFDQQSSGHSISFWFRNKFPAKLLCLHIAPSTGSFIRYPEVFINGKFQEFESHETDDTESMLGLDHTHIFDLQAYAFKNNNQFEEVAWEKEWNHVEVTYQSVLDDEEEESEEGVLDDEEEESEEGVLDDEEEEREEGVLELESSVIKAIGIHIVREEGSMEEDIRFDDPYLSSSASDYKP

SEQ ID NO: 268029 - protein, 268 aa, Glycine max
  Clone ID: PAT_MRT3847_84053C.1.pep
MCIAVFSSPAQTKYPLILLHNRDEFYSRPTEPLAWWEGETILGGKDALGGGTWLGSTRDGRIAFLTNFREVEMLSNPKTRGDLPLRFLQGNKSPEEFAEQVVKEADEYNGFNLVLADICTSSMVYVFNRPNQDHLSLAQVVVTPGIHVLTNAALDAPWPKAERLRHNFKEFIDQYGESDFPIKEMVEKLMTNTVKDEECMLPGIHPPEREQPLSSIFVEAGLSSSGHYGTRSSSALFVKSNKEVTFYEKYLEKKQWKDKMVTYKISER

SEQ ID NO: 268030 - protein, 50 aa, Glycine max
  Clone ID: PAT_MRT3847_84054C.1.pep
TPYLIQSYTHSYSYFKPLYQNHLSHHLTIHLQLLPIYIINHYINFPYIFL

SEQ ID NO: 268031 - protein, 63 aa, Glycine max
  Clone ID: PAT_MRT3847_84055C.1.pep
MPGKIYLYTKFCSGWEEGTLPISIFKENALRTVLLWKLDNVEKNDKCQITMISTWSSSTHGGS

SEQ ID NO: 268032 - protein, 44 aa, Glycine max
  Clone ID: PAT_MRT3847_84056C.1.pep
GIMSNKVLHTLNFCIILAASNTLLMKGPFVTKVGSYVVLPYLSN

SEQ ID NO: 268033 - protein, 102 aa, Glycine max
  unsure (1)..(102): unsure at all Xaa locations
  Clone ID: PAT_MRT3847_84057C.1.pep
EXXXXXIXXXLAXTDXXPSHXSXISIXFHXFLSXFXVHXLHXCXYXXHSSPSISXXXXSLXXXLHCXFLIXXXXSLXXXXXXPXXAXXXLPXXLPXXLXXLP

SEQ ID NO: 268034 - protein, 43 aa, Glycine max
  Clone ID: PAT_MRT3847_84058C.1.pep
RPKKIIIFLLRTKKNITEIFIHIGSFTLYTTKLGIPHAPPELF

SEQ ID NO: 268035 - protein, 51 aa, Glycine max
  unsure (1)..(51): unsure at all Xaa locations
  Clone ID: PAT_MRT3847_84059C.1.pep
KTLGRWRKCLLSLIISGYNRLTEKTIFTCRDLDIXLVVYYTIASQFREFQQ

SEQ ID NO: 268036 - protein, 79 aa, Glycine max
  Clone ID: PAT_MRT3847_8405C.1.pep
RLFFKPTTLCLRTVGVKTNSTKSTSTSINPSLKIPQQQNDPPLQNFAVPGKARSKRKRLSAPRTNKDPLSIWSHHLNPQ

SEQ ID NO: 268037 - protein, 87 aa, Glycine max
  unsure (1)..(87): unsure at all Xaa locations
  Clone ID: PAT_MRT3847_84060C.1.pep
SQPHYWEXILRFEAYGPYNGIEMMKLDWANTPYWIXNKLIDNPKQSTVFDILLGISQDFEIAGNTLMPAFSVPQATARSSENAESSA

SEQ ID NO: 268038 - protein, 94 aa, Glycine max
  unsure (1)..(94): unsure at all Xaa locations
  Clone ID: PAT_MRT3847_84061C.1.pep
DPHLMXLLVPEMITSNFXITTKLPYNLSSLFFXXXFPLXYSLLVFTXHPLSPFGQSSDIFPXPNXRFXALFLDXGWXRFLXFXIHXXSGXLSXS

SEQ ID NO: 268039 - protein, 68 aa, Glycine max
  Clone ID: PAT_MRT3847_84062C.1.pep
TVLIFVLKEKKTQCFFFHIPPFHCKTLEPFGISPFPYPISFFFFFCLKHIQANKGCHLELQSFKNHEF

SEQ ID NO: 268040 - protein, 36 aa, Glycine max
  Clone ID: PAT_MRT3847_84063C.1.pep
FAAVTPTPQRCINHTTGTYMFFDKDSRSKCSSGTLP

SEQ ID NO: 268041 - protein, 90 aa, Glycine max
  Clone ID: PAT_MRT3847_84064C.1.pep
SGPQCSGVCAEVRSLVVFFNAIRSADWAALTTRVVFLIFCFLEVWIIVCTRDRVQSKHFVRLCKPAGSTAANRSLAVCLRSCQSSDNVIL

SEQ ID NO: 268042 - protein, 429 aa, Glycine max
  Clone ID: PAT_MRT3847_84066C.1.pep
MLQPYEISIGLKEHSNPVTPKAYTPKSPSGPLPPDSDSSGFLRERKRLQCEGFFSQFRHDIEIPNGENARNCVANMILKFHDDPMVNGFEIVIFLRLLGVSELKNKTVLLLISKPQLLNPIDIFLLVQQTCDHPLNERLRESYKIVWIPLPFSDTWTEAEESSFNFLSDSLAWNAVQKPRLLSSAVVKYTREQWNYKDEPIMVALDSKGKVTNYNALDMIKIWGPQAYPFSASKVEELWQDQNLTMQLLLDGINPFLAYWVEQGKNICLYGSENLVWIQQFNDKITEVKRAGENVKQIMARSGEKSFSDPLSFTNVQYFWLRLESMRRSKLRLGKTPSSDHVLAELSALLDMDAREEEWTVIGCGGSSSTDIFRLQGMQVMEFVRKCSEWRENITNLGFFGALRNFLDLHLLKGVAITHALFPLEKMKG

SEQ ID NO: 268043 - protein, 71 aa, Glycine max
  unsure (1)..(71): unsure at all Xaa locations
  Clone ID: PAT_MRT3847_84067C.1.pep
TQQHQTPQRLLQTTIKKQYLSLTDPSLPLHLQLPYPLPRLHLPPXPALPVTNPLLVKLLRLLRKSGSTLLH

SEQ ID NO: 268044 - protein, 119 aa, Glycine max
  unsure (1)..(119): unsure at all Xaa locations
  Clone ID: PAT_MRT3847_84068C.1.pep
SVPSATLYXQSIRTSTPKTHHTRGLSVPVSMNINGSLQSRNNNNNNNRKNGREIGERQKQYLGKLSEVVDVYESYRYDSLLLKEDLNNTNWLRSVDDKCDQGPIFDNGFEYLPEPFGLF

SEQ ID NO: 268045 - protein, 45 aa, Glycine max
  Clone ID: PAT_MRT3847_84069C.1.pep
QGYKINLNLDSYLSFTFSIQSKKLRQIAMKFLYRKFTPLLSSSRV

SEQ ID NO: 268046 - protein, 27 aa, Glycine max
  Clone ID: PAT_MRT3847_8406C.1.pep
YVSDESFNDVHIEKDSGFRDNPVVVGS

SEQ ID NO: 268047 - protein, 84 aa, Glycine max
  Clone ID: PAT_MRT3847_84070C.1.pep
PKKLMVLVPPSQTKIFSSHQVKNPFLTNKLNFFIFPTGKTWGGQPFWPTSIIFFTSAPQGIKSCFVFPKIKGLKWVFVCFNLKL

SEQ ID NO: 268048 - protein, 77 aa, Glycine max
  Clone ID: PAT_MRT3847_84071C.1.pep
RPQFILEEEELGLFIHIINFLSSSSFSFSLFTLDQTMDRPTLSSLFSFLLTLHLSLSGNVYSRILFSYQQHTLVSLI

SEQ ID NO: 268049 - protein, 126 aa, Glycine max
  unsure (1)..(126): unsure at all Xaa locations
  Clone ID: PAT_MRT3847_84072C.1.pep
HASAPRVRKKKKKKKKRKKGEKKKKKKKXRPPKKRPKNTNKNKGRPHKRNKANKREQARPKLYNGGTEKKPTGRNLTSVGRKKPWRNPTKSARGPNPLSPAAEKQKKPQPNPPPKSGPTGRGKGTP

SEQ ID NO: 268050 - protein, 53 aa, Glycine max
  Clone ID: PAT_MRT3847_84073C.1.pep
TNICCFVSTKKKKLIINHHKANPNIAIECLEMWWIMFWCGKISWWNTMIFLIS

SEQ ID NO: 268051 - protein, 66 aa, Glycine max
  unsure (1)..(66): unsure at all Xaa locations
  Clone ID: PAT_MRT3847_84074C.1.pep
QSSFSXLLVLPRFXFTPSETEKNLPLHHFHQGFRFEHLSSPRNCXLTSFPCPPSPFYSXFHAXFSH

SEQ ID NO: 268052 - protein, 374 aa, Glycine max
  Clone ID: PAT_MRT3847_84075C.1.pep
MEDPAPPSEASNRPPRKRGRPPKHLPKEHDADADRTTVQADRESSPDDFDEAPAKSKRNRASEGTSSVAHKVSDQTLIEVVKGNGKFIPQAVKFWVECYEKDPKPAMVDLLTMLFEACGAKYCDKSDLVDETDVDEVVIALVNCAKRGEVEDYQNSKKKEIKNFKENLESFWDNLVRECQHGPLFDQVLFDKCMDYIIALSCSPPRVYRQVASLMGLSLVTSYITIANMLRAQRETTQRQLEAEKKKRTEGPRVDSLKKRSSDTHDRIQLLEEMMRKIFTGLFVHRYRDIDQNIRMSCIESLGAWILSYPSLFLQDLYLKYLGWTLNDKNAGVRKASISALQNLYEVDDNVPTLGLFTERFSSRMIELADDIDV

SEQ ID NO: 268053 - protein, 115 aa, Glycine max
  unsure (1)..(115): unsure at all Xaa locations
  Clone ID: PAT_MRT3847_84076C.1.pep
GLDYKHEGLLRQRVMQIRLQHWNHAATFTGYHQSSVEPTHDQIDYEHTGSLARQRPYAMNTNVXFSQCKGNRXQQMHLWINPTKDLRTYCVQWNTASMIFSADGSPIREIKNLGT

SEQ ID NO: 268054 - protein, 116 aa, Glycine max
  Clone ID: PAT_MRT3847_84077C.1.pep
RYEEENTGRYNLNAEETDKMKNQLKNQKDYYSLIFFSSSSSRNMTPLSRSHDHCNQDDSPLFSTRNVEYCPQHTQHPPRVRFHLEPQQPYPQTILFPYNQTYSYSSAIAARTRNRS

SEQ ID NO: 268055 - protein, 49 aa, Glycine max
  Clone ID: PAT_MRT3847_84078C.1.pep
FLEKDMCNYYMYMLESQCHRIIIGTSKDNSNIYDNVSNDYINSICIENS

SEQ ID NO: 268056 - protein, 70 aa, Glycine max
  Clone ID: PAT_MRT3847_84079C.1.pep
TINQAEIFERVTGIDLGGNLKLPEEALVAKCLGRKICDQCGGNFNIGFIIVKGENGPSGMVMASLLSSAH

SEQ ID NO: 268057 - protein, 56 aa, Glycine max
  Clone ID: PAT_MRT3847_8407C.1.pep
ACCIAYHSAKILLLSKSTIPELPIGIHLNLYSPEQGADPVDRYTDSICMMAESSLC

SEQ ID NO: 268058 - protein, 89 aa, Glycine max
  Clone ID: PAT_MRT3847_84080C.1.pep
DRLRKEIGVKHITRLMNPKNYQLYLICKIKYLSVKNHQLYSIARRYIMSTICRRLNINENDNFSNYSTNKHISLHPFCIHWTPYIMLKY

SEQ ID NO: 268059 - protein, 71 aa, Glycine max
  Clone ID: PAT_MRT3847_84081C.1.pep
IALIETLGLILFIIQTNTSLHLSKVLYPFLSLSTTPSIYSIYLSPEPHLHLFFYSLSLPFLISSLHTLHLP

SEQ ID NO: 268060 - protein, 136 aa, Glycine max
  Clone ID: PAT_MRT3847_84082C.1.pep
MPRQPPPSPPSQPGVLDPALWLVCAGTTVEIPTLHSRVYYFPQGHFDQASSAPRNLSPLLLSKPAVLCRVESVQFLADPLTDEVFAKLILHPVADCFASGPSAGAPAAASASAQTGENNVVSFSKGLTASDANNVG

SEQ ID NO: 268061 - protein, 75 aa, Glycine max
  unsure (1)..(75): unsure at all Xaa locations
  Clone ID: PAT_MRT3847_84083C.1.pep
WRRSAHINIISSSINCGSPGSSVEHLQNFSMLAELSRGXIGHESGXVSYGMTSGNDLSMHSWTGSTLGPNDIVYE

SEQ ID NO: 268062 - protein, 92 aa, Glycine max
  Clone ID: PAT_MRT3847_84084C.1.pep
QECSSKNLKLQHLLESMELKECGNVNLLYREVSGFKELNEDEMKRGLALIEESKRKELKGKWRKLRLAEMELVANRSLLIGEQIKLIFEALQ

SEQ ID NO: 268063 - protein, 103 aa, Glycine max
  unsure (1)..(103): unsure at all Xaa locations
  Clone ID: PAT_MRT3847_84085C.1.pep
EAWQCHGWVIYSLPLNTFYGARTSXVKCPRCRLADETHNILCLWTIPEECVLSSKEYIHGEQYISHFLTVNHQAYFYAIDLXLHSNDTFLFSINRTILFYISY

SEQ ID NO: 268064 - protein, 104 aa, Glycine max
  unsure (1)..(104): unsure at all Xaa locations
  Clone ID: PAT_MRT3847_84086C.1.pep
RRLREICSYSLDDEWVYKVQAPDLTETFKTYYKLVQLDFKNIIVSGXTLDLHVDAEANSMNAGYYTWXRFIIKDPDDICTQNACSYKTAXRDKLITHGFNIADI

SEQ ID NO: 268065 - protein, 477 aa, Glycine max
  unsure (1)..(477): unsure at all Xaa locations
  Clone ID: PAT_MRT3847_84087C.1.pep
MSWFTRTIANSLKLDDDDNGGDLKSPPKKPDSEPVQPDSASTPNPTTRGVKEDFSELTKSFSRQLWGVASFLAPPPDPQSEKPVADSNPNPTDDDEEEDIIAXGIRNDFAEISGKFKSGISKISGNKTVSEFTKIAYEFPSAWIRRVIRPGSEXAALPTTVASYLKSVALHPETWLDFPLPDDEDSDDFDLSDAQQEHALAVEHLAPSLAALRMELCPGYMSDGNFWKIYFVLVHPRLSKTDAAILSTPQIMEARAMLTLALDKRSKEKKESDLSAGGNVPSKEEEQHLFVPSTVQLESAPLQTSAAEAAPSVVVSNVEMEKHATQSIVPEVIDKSVVKEATVNPSAEQSSSGSTNRFLDESYEDDADDWLKEEDTSEMVGPSGTPVHTGNDEDVSFSDLEEDDGDVHESYKKTRSGSDSSTKDSRDWVQLGRSSPNSDKDLNCVEGKHVGSEHSSARNSMTKDSNDWLNVDDIDVI

SEQ ID NO: 268066 - protein, 45 aa, Glycine max
  Clone ID: PAT_MRT3847_84088C.1.pep
RELPPFFFLFFWKKFDWISLNLPTRIRYSLHTDHPFQKGFSTWLK

SEQ ID NO: 268067 - protein, 301 aa, Glycine max
  Clone ID: PAT_MRT3847_84089C.1.pep
MSWFARTIANSLRLDDDDDDHNGSDLKSPPKKPDSVSTPSPTARGVKEDFSELTKSFSRQLWGVASFLAPPPDPLSENPVADPNPIPTDEEEEDVIAGIRNDFAEISGKFKNGIFKISGNKTVSEFTKIASSFLQLGSEEEHDLDGVLGVTEDVVAFARSVALHPETWLDFPLPDDEDSDDFDLSDAQQEHALAVEHLAPSLAALRMELCPGYMSDGNFWKIYFVLVHPRLSKTDAAILSTPQIMEARAMLTQALDKRSKEKKESDLSAGGNIPSKRRNSISLCQAMLNLNQYLSRHLLLK

SEQ ID NO: 268068 - protein, 52 aa, Glycine max
  Clone ID: PAT_MRT3847_8408C.1.pep
LNSLSNSFALLRAYSPLTYTLIHYALLHLSHPCSHSIHCSCSNNLCTKKHCI

SEQ ID NO: 268069 - protein, 122 aa, Glycine max
  Clone ID: PAT_MRT3847_84090C.1.pep
FVLFSFSAGGVLCWFGCVSACWVGGSVGVLSVPFFLHSVCCALGLALVPGLRGPAVPGLCPSGLHIVYGCSFCSSFLVSWSCCLWAFIPLCLRVWSPFSPPCCGIWYMTLTPRWFCLLWRGS

SEQ ID NO: 268070 - protein, 89 aa, Glycine max
  Clone ID: PAT_MRT3847_84091C.1.pep
QICCILVQVNLPSYCKISPFTDYSVRPKNQNGIVSNGEASNGKKPFTTIDDVLIGLVKWLCDQVCDTGNCFFLTGSTAKSNSQTCQQST

SEQ ID NO: 268071 - protein, 155 aa, Glycine max
  Clone ID: PAT_MRT3847_84092C.1.pep
HARVLGIGLEQKHKWSGQLLSEFMKKPYESYTGSGGPPLLDSSVQTDFIDAYNTENIDKEEIMALNIDREETAILVAARNGIIEMVNELISKIPSAIHETNSKKKNVLLIAVENRQTLIVEELKNRFGEKKTKVVLHNLILGVDDQENTMLHLAA

SEQ ID NO: 268072 - protein, 108 aa, Glycine max
  Clone ID: PAT_MRT3847_84093C.1.pep
YCILCDAGLGSSSLCLHSLSSTPGRFLGGLAYLRGLFFSLTTLFLGFLVCRMGRPFRVLLSFLGLLTHISHLLQIKGSLTHSLYNRKFFLWYRKPSTFFCRARERTRG

SEQ ID NO: 268073 - protein, 39 aa, Glycine max
  unsure (1)..(39): unsure at all Xaa locations
  Clone ID: PAT_MRT3847_84094C.1.pep
XCFVWNALLGSLIRVEQWPMGFPSSQXVKFXSLQFXAKG

SEQ ID NO: 268074 - protein, 128 aa, Glycine max
  unsure (1)..(128): unsure at all Xaa locations
  Clone ID: PAT_MRT3847_84095C.1.pep
XLRPXXXXXXRCXXXRRXPXSXXXSAXXMXXHTLXXLSXXAARXSXXVXXDXXXXXXXPXXXAAXXXXXXGYXXXVXXXXXTXXXXPXXXRXXRXXXXERXXXALXAXAXXXQXVTXXNSXXXXAXSX

SEQ ID NO: 268075 - protein, 104 aa, Glycine max
  Clone ID: PAT_MRT3847_84096C.1.pep
ILPEDDIDDGSRKLLAQLAEKDPKISAFELQTILRRVLANRQDFKSDGFSIEPCKIMVDMLNSAGSGMLGLKEFYILWTKIQKYQKIYREIDVDRSGTMNSMKC

SEQ ID NO: 268076 - protein, 297 aa, Glycine max
  Clone ID: PAT_MRT3847_84097C.1.pep
PRVRKEFDEFKENRNSDSNSVQHAKENGDCASHSVVNSGDSSLSKSRRQHRKRKASAIDSTKVSKEAEPLVSSSKISDDLQDEEENLEENAARMLSSRFDPSCTGFSMKGSNGLSFFQSSSQSIVNHSLKSPLGSESTSADTAGRVLRPRKQYKNKGDSRKRRHFYKILLGDVDAYWVLNRRIKIFWPLDQSWYYGLVDNYDEGSKLYHIKYDDRDVEWVNLHTERFKLLLLRSEVPGNAKGERALTKRRSSDHQKGSKSSKERQRTTEDDRCGESSMDSEPIISWLARSSYRLKTS

SEQ ID NO: 268077 - protein, 241 aa, Glycine max
  unsure (1)..(241): unsure at all Xaa locations
  Clone ID: PAT_MRT3847_84098C.1.pep
MLNPNGENSVARVLARVESTELQGLNKPLLQSLVKGDHPEIAFLLRQLLIVFSSLLRLNLLKDDGFLPSSFVPTFIEISQVLLLEFTEMVVVPQYSALLLLDGACNYLRELAGYFPFTDPTSSRXVYTKLIQIHMRAIGKTISLQGKRATLTFHERQSSTKSLHKGSVEAYSFTELHCFSLDEFKIGLRNSFKAYIXRPSELHLLSTIQAIERSLVGIQEGCTAIYDVILFFFTRTFIFFG

SEQ ID NO: 268078 - protein, 51 aa, Glycine max
  Clone ID: PAT_MRT3847_84099C.1.pep
ISVDLMHHGHGCHFTCYYTLFHYIGVIMFDTYGNTYIITGVYNTKNIYLYK

SEQ ID NO: 268079 - protein, 104 aa, Glycine max
  Clone ID: PAT_MRT3847_8409C.1.pep
MKEESPRMFVQLNTAYKTLSNPRLREEYDSELGLGSTEMSTVSSDHHERWGSVSVSSEHERWESRFQEQMIELKTRSRRRMGQKGQGGSSGSSRMRTQNMRDRN

SEQ ID NO: 268080 - protein, 367 aa, Glycine max
  Clone ID: PAT_MRT3847_840C.1.pep
MSCGCFGASTLKRKRNPSRTPNEIDGFPLDNVKNFSDKDLRLATDNYNPSKKLGRGGFGTVYQGTLKNGQQVAVKTLSAGSKQGVREFLTEIKTISNVKHPNLVELVGCCVQEPNRILVYEYVENNSLDRALLGPRSSNIRLDWRKRSAICMGTARGLAFLHEEHVPHIVHRDIKASNILLDRDFNPKIGDFGLAKLFPDDITHISTRIAGTTGYLAPEYAMGGQLTMKADVYSFGVLILEIISGKSSARTNWGGSNKFLLEWAWQLYEEGKLLELVDPDMVEFPEKEVIRYMKVAFFCTQAAASRRPMMSQVVDMLSKNMRLNEKQLTAPGLFQDSGASSQKKSSFESTGYQFSSNPSSITQLAPR

SEQ ID NO: 268081 - protein, 82 aa, Glycine max
  Clone ID: PAT_MRT3847_84100C.1.pep
LVFTVLVSLSSDGITCLFRPLHFPVSMANAPFGISLRIGRELIFNPPICMFTMLRQKGIAMWDPQKTPCCFQKVGFTQQFEC

SEQ ID NO: 268082 - protein, 130 aa, Glycine max
  unsure (1)..(130): unsure at all Xaa locations
  Clone ID: PAT_MRT3847_84101C.1.pep
KVQEFVVSYKLVYREENMKLVVFFVAAVVWVAWRCRGAGYQRLGLRSGTGYGERSSEVECAGFRXAVEAHNIRALKTIPEECVEATRDYRNGEQFRSDSKRVNQQAFVYASEREVHQRDIFIFGIDNSVL

SEQ ID NO: 268083 - protein, 39 aa, Glycine max
  Clone ID: PAT_MRT3847_84102C.1.pep
GDTFTFSSASAGHCTHMKPSTLQFRVGLASVDSRVEHRD

SEQ ID NO: 268084 - protein, 42 aa, Glycine max
  Clone ID: PAT_MRT3847_84103C.1.pep
PGEYQGDACTPNPFTEKSQQTDVSHDHNVVQTHLYHLLAPSP

SEQ ID NO: 268085 - protein, 58 aa, Glycine max
  Clone ID: PAT_MRT3847_84104C.1.pep
SHRHKGKHRYLTKSFEAYLFLCACHTGCCFLFLVAVITQLKFPPLTYIAVQFPHHAIE

SEQ ID NO: 268086 - protein, 75 aa, Glycine max
  Clone ID: PAT_MRT3847_84105C.1.pep
KGGKGEVGGYKGKKRIGSNLEFEGKSQRKEPSHDTTHQRNENSRYAFFFSLSNFLFSIILGARVVCLYSVPKRSA

SEQ ID NO: 268087 - protein, 69 aa, Glycine max
  Clone ID: PAT_MRT3847_84106C.1.pep
SFFFFFFIFFFFFFSTKTCKFFIFWRGTLISVEQQVAGQDTSRSPQGDARNKKLEPTPKRSLPPSDFTA

SEQ ID NO: 268088 - protein, 56 aa, Glycine max
  Clone ID: PAT_MRT3847_84107C.1.pep
VRFLKGKKITLCAGHRLRESISFPLLVYLLNTLLCDIGLPVRFKLLLCLSHSYGKF

SEQ ID NO: 268089 - protein, 140 aa, Glycine max
  unsure (1)..(140): unsure at all Xaa locations
  Clone ID: PAT_MRT3847_84108C.1.pep
MGEVMNVPPESLDKSPSSSAPPPPPPTPPHYPPRRRDRRDDRDFDRPPNRRGDYYDRNASSPSSPRDRDPLPPRDRDRDRDSDLKRRRSPSPPHRERRHSPPRRLPPPYKRSRRGSPRGGYGPDDSRHGYDYYGXYERGM

SEQ ID NO: 268090 - protein, 152 aa, Glycine max
  Clone ID: PAT_MRT3847_84109C.1.pep
NQNNWVTEVMKVAVAYAQITYEEEGLWDIDVNIFLSEEANVTANYTPRTACGDLVIKLGEWLNAATVEGLLTYTRQLYMENSSWKTKEAALYLLNQLLSDFQDVEKQIGSDSANGYVDFIKHALQEEEVFLRARGFLVAGSLTRTSGDALMP

SEQ ID NO: 268091 - protein, 139 aa, Glycine max
  Clone ID: PAT_MRT3847_8410C.1.pep
PQCHYSTKSAYNLLQGETAEENLDGAFADLWKLRISTKTSIFAWRLIRDRLPTKSNLRRRHVEVSDLMCPFCRNKEEDAVHLFFNCTKTLPLWWESLSWVNTSGAFPLNPRQHFLQYGNGMNGGIICNRWKCWWVTLTW

SEQ ID NO: 268092 - protein, 183 aa, Glycine max
  unsure (1)..(183): unsure at all Xaa locations
  Clone ID: PAT_MRT3847_84110C.1.pep
PPGGPRAPPPPGSRRTGAPPRGHPEPPPGGWPPPRFFWGGPQRPGPLAGPAPRGPIRGGFPSPXPKKAFGIGGGGDPKKPAPPIWGGVXKKGVRPPQKPTPLGSPEEPDSLFXEKEPGGPPPNPRWYRGRGYFPPPPLLKGVGLMPTLKSGPEGGGLPFPSFPPLFPLGKVCPNPNLSPPPFF

SEQ ID NO: 268093 - protein, 59 aa, Glycine max
  Clone ID: PAT_MRT3847_84111C.1.pep
CNKLGLVMLPVQFSIMPNMNNLAVPNTNVRNAHFATSVAVTQHTANRRQVTGPWTVRSR

SEQ ID NO: 268094 - protein, 188 aa, Glycine max
  Clone ID: PAT_MRT3847_84112C.1.pep
AVKMQSYMESLDLWDAVEEDYEIYPLPKYPTTAQIKNHKQRKMKKAKARSCLFTGVSQMIFIRIMTLKSSKAIWDYLKEEYAGDDRIRSMQVLNLRREFELQRMKESETIKEYSNKLLGIANKIKLLGSDFADSRIVEKILVTVPERYEASIALLSSSRSRSKITLAEVLHALQAQEQRRLMRQDRAG

SEQ ID NO: 268095 - protein, 87 aa, Glycine max
  Clone ID: PAT_MRT3847_84113C.1.pep
GGPQASATRFRQRFRPPFRKWSLKDFWGAAESLILTFRFWRSALDNVVGGKLKLKGKALVVVGGVKNRKRRTRGIRDQLLQVAKNKV

SEQ ID NO: 268096 - protein, 84 aa, Glycine max
  Clone ID: PAT_MRT3847_84114C.1.pep
KQTNSKRETTQPPPVRVTVHSYETSDVSKGSAGASNNTDEGEIYTNNVIPPFNNLYSFVLTFARNCLAGKHTSSRIYKTKGSSH

SEQ ID NO: 268097 - protein, 89 aa, Glycine max
  unsure (1)..(89): unsure at all Xaa locations
  Clone ID: PAT_MRT3847_84115C.1.pep
VLFLRXCQIDGTMRDMHRDSTGSTNNNTNKIPSALRLSSPQQSLRRLGLCSQIATXEHSSPIVFPEKRGKVKASRKTSVPTTIRXDDQD

SEQ ID NO: 268098 - protein, 43 aa, Glycine max
  Clone ID: PAT_MRT3847_84116C.1.pep
QGVVFFSYPSRTRFCSRFFGASSCQVAVAFGSRCRLRHRARGV

SEQ ID NO: 268099 - protein, 159 aa, Glycine max
  Clone ID: PAT_MRT3847_84117C.1.pep
PAPTSFQTRELRVSVLAPLVVLFMKLGGKGDVGNDDNVESAGSVLGSCVGVTAGVVLVLARAAALPWVSSNGDGRLGGSASRRSARVVASTAKGSNHNTTENQNLRVATRLLLELSLLVLLEAAGGGGEESAGDTRGHFDDVLCVLLKNGFLRRGFLRR

SEQ ID NO: 268100 - protein, 109 aa, Glycine max
  Clone ID: PAT_MRT3847_84118C.1.pep
SPGQWQPSPYRNGDRKQTNQATEKPGAQQGEAAKPTQKRMTPHTAPLSSDQTPSPSLSTTQGAPMAVASEDPLHGLTHKGCICFYEISNKDIIVGRNKTKEKVVTENPK

SEQ ID NO: 268101 - protein, 149 aa, Glycine max
  unsure (1)..(149): unsure at all Xaa locations
  Clone ID: PAT_MRT3847_84119C.1.pep
LVLSTVTDPLDDFKKAVVSIIEEYFSNGDVDLAASDLRELGSNKYYPYFIKRLVSMAMDRHDKEKEMASVLLSALYADVISPAQIRDGFFMLIESADDLAADILDAVDILALFLARACVDDIISPAFLARAKKALPESSXGVQVIQTAE

SEQ ID NO: 268102 - protein, 73 aa, Glycine max
  Clone ID: PAT_MRT3847_8411C.1.pep
GWQTFIKFVWFVPFKMGPVPIQFFPQRPVGAQKLAGVSFFRPQLLVDFVWLAGKGYCFLTIHHLEFELNPLVN

SEQ ID NO: 268103 - protein, 341 aa, Glycine max
  unsure (1)..(341): unsure at all Xaa locations
  Clone ID: PAT_MRT3847_84120C.1.pep
MISSSMALSSPVSLFQLCMLLFSFFFSTSFSAKLNPTIDSLSLSFPLTSLPLSTAKPLNRNPNLRTLSSSSSYNIKSSFKYSMALVVTLPIGTPPQHQQMVLDTGSQLSWIQCHXKPPPTASFDPSLSSSFYILPCTHPLCKPRVPDFTLPTTCDQNRLCHYSYFYADGTYAEGNLVREKLTFSPSQTTPPLILGCATESSDARGILGMNLGRLSFPSQAKVTKFSYCVPTRQAANDNNLPTGSFYLGNNPNSARFRYVSMLTFPQSQRMPNLDPLAYTVPMQGIRIGXRKLNIPPSVFRPNAGGSGQTMVDSGSEFTFLVDAAYDGVREEVIRVVGPXVK

SEQ ID NO: 268104 - protein, 56 aa, Glycine max
  Clone ID: PAT_MRT3847_84121C.1.pep
NIPSLLRPLGLILRESRLSTKMAHHDFNSLNNFSVLNTNGEVSIIILYIRDNYTKR

SEQ ID NO: 268105 - protein, 133 aa, Glycine max
  unsure (1)..(133): unsure at all Xaa locations
  Clone ID: PAT_MRT3847_84122C.1.pep
LLSSTTNGDFVQGKDLAMGKVNVACAAGGLTISYTSTSLVESGLEKKQRVIGGDFGRDVYVAXTINNPQKKDWLEGNFSFDIKSRFKWEKVSFTKAXVRGKTPQNDTNGAGAHILEDISVKGDHEKPPKIVAP

SEQ ID NO: 268106 - protein, 57 aa, Glycine max
  Clone ID: PAT_MRT3847_84123C.1.pep
KFSHMFVRDWLEFMFFAFNSISKAGVAFVEFCLRIDFFTNRCNEKQLWWICYLGSYW

SEQ ID NO: 268107 - protein, 68 aa, Glycine max
  unsure (1)..(68): unsure at all Xaa locations
  Clone ID: PAT_MRT3847_84124C.1.pep
VSVAGKGDGPAILIDLGTTKSXRCVTTLSMLNYTLXDQASRTKPYYLRIMDSKQLIDDLPRNHDHINR

SEQ ID NO: 268108 - protein, 362 aa, Glycine max
  unsure (1)..(362): unsure at all Xaa locations
  Clone ID: PAT_MRT3847_84125C.1.pep
MWRRSFSSSTAATTATLKGKKWDALIIGGGHNGLTAAAYLARGGLSVAVLERRHVIGGAAVTEELVPGFKFSRCSYLQSLLRPSVIKELELGKHGLKLLKRNPSSFTPCLDGRYLLLGPDKDLNHSEISKFSLADAQAYPRYESQLESFCKFMDLVLDSPPPESVHHKSSINEKLKNKIQNSVFWASCLRQVSSLGQKDMVNFMDLLLSPASKVLNNWFETDVLKATLATDAVIGSTDXASVHTPGSGYVLLHHVMGETDGERGIWSYIXVEGGMGSISKAIGNAAIEAGAHVVTNAEVSRLLIENSSTVCGVALADGTEVHSSIVLSNATPYKTFMELVSNDVLPDDFVRAIKHTDYSSVS

SEQ ID NO: 268109 - protein, 88 aa, Glycine max
  unsure (1)..(88): unsure at all Xaa locations
  Clone ID: PAT_MRT3847_84126C.1.pep
LYYGCDTVTKPPGFEXSSQSHPNLGSAEVRXITSSELSSVHPXSYAGFVETNRFPRVLQGQEICPLXSLTGKVDMNLGAWGCPNLSCT

SEQ ID NO: 268110 - protein, 78 aa, Glycine max
  Clone ID: PAT_MRT3847_84127C.1.pep
LFCETEITGCRSLGPETKGFVTGYQESITVGLLICGRSLKGKKITLCAGHRLHESFTFTVLGEVLNTLLCDIGLRDRC

SEQ ID NO: 268111 - protein, 52 aa, Glycine max
  Clone ID: PAT_MRT3847_84128C.1.pep
ETFLPFWWDLKRILQKRFFFYKPKKPSLKFYPLLWTKGVFFLYYFGCPSPQK

SEQ ID NO: 268112 - protein, 53 aa, Glycine max
  Clone ID: PAT_MRT3847_84129C.1.pep
PPPRVVEPFPEYPPPGRFAVRALRQPGAGGAPKTVEKKDPPGARVPKAAPKKK

SEQ ID NO: 268113 - protein, 83 aa, Glycine max
  Clone ID: PAT_MRT3847_8412C.1.pep
RAASQLSLRYYKVRVMPSQARGRKLEIRFKGLWCSPRPPSIRKGVVNMVMLRVVGNKRRSGGSIHRSAMRTADESSGRQETTW

SEQ ID NO: 268114 - protein, 223 aa, Glycine max
  Clone ID: PAT_MRT3847_84130C.1.pep
MEEDYPPGFRFFPTEEELVGFYLHNKLEGQRNAIAIAIDRVIPVIDINGVEPWNLPTLAGELCRGDTEQWFFFSPGQERETRGGRPSRTTACGYWKATGSPCYVYSSHNKVIGVKKSMVFYKGKAPMGTKTKWKMNEYRAIHVPSQSTPATLHLTCEFSLCRVYVISGSFRAFDRRPLEKEGAESRVHRIENILGGARAHQTCPHSQMLEAGESSSTKWDVNN

SEQ ID NO: 268115 - protein, 291 aa, Glycine max
  Clone ID: PAT_MRT3847_84131C.1.pep
MANKYHVRSISLPSRSHPSTIRVEEELSKIKTWEGTFTSTSGSIHTGISLIEDLYICLDDLLNMASTQKVISHHRGEKCVQEVLDGSVRILDICGITRDTMLQIKENVQALHSSLRRRKGDSCVEASVAEYKLFTKKMKKDAIKLITSLKQMDGKFGVSTLLDLDHHFAAVIRVLREVILMNLSLFQFFLSFFTVSSSNSKTSKWLLVTKLMHRGIKPCEDKSENINEFQCVEASLSTLLNEGTINDEKMQVVHERLEALENAIESVENGLESVFRRLIKTRASLLNIISQ

SEQ ID NO: 268116 - protein, 41 aa, Glycine max
  unsure (1)..(41): unsure at all Xaa locations
  Clone ID: PAT_MRT3847_84132C.1.pep
IGXVATXXTEHXGHVXQGXXNGRAXXXXSTTXRAQRKAXTQ

SEQ ID NO: 268117 - protein, 68 aa, Glycine max
  Clone ID: PAT_MRT3847_84133C.1.pep
PARGKPTIAQMEEGHFKQRMGFAPDSNDNMDLLLSIDLLGIQGAGKAIQNKTGAGKKYAWMKTHNHCT

SEQ ID NO: 268118 - protein, 88 aa, Glycine max
  unsure (1)..(88): unsure at all Xaa locations
  Clone ID: PAT_MRT3847_84134C.1.pep
MNACADLSPGVYEMRLKVRGPVMMPSMVLHITARKAACVALTMTCDGYDLREPHRGIDLLQFPXANEHITSIASEPVVNDDSDHCTML

SEQ ID NO: 268119 - protein, 56 aa, Glycine max
  unsure (1)..(56): unsure at all Xaa locations
  Clone ID: PAT_MRT3847_84135C.1.pep
RLRKQNTKMECNRHTRIFLDFLGKIAWXRKAMGVWGCNDCEKAKTGGAYTLSSGSA

SEQ ID NO: 268120 - protein, 36 aa, Glycine max
  Clone ID: PAT_MRT3847_84136C.1.pep
RKHLHALISNNLSNLIRTWPYIYPTFNCCHSLYDFI

SEQ ID NO: 268121 - protein, 114 aa, Glycine max
  Clone ID: PAT_MRT3847_84137C.1.pep
EFCSIVYWHRKVDDSDAIRDIFWTHPDAIKLLGAFNTVLVIDSTYKTTRYQLPLLEIVGVTSTELTFSAAFAFVESERAENFTCALKKLRGLIAKDDEHAPSDCDCWRHCSDEC

SEQ ID NO: 268122 - protein, 65 aa, Glycine max
  unsure (1)..(65): unsure at all Xaa locations
  Clone ID: PAT_MRT3847_84138C.1.pep
LEHYVDCTFRGTCILFGYAAGAVXVQSINTQNIGYFDYXHHTNYTCQMHFNASIKENXSNNALDS

SEQ ID NO: 268123 - protein, 70 aa, Glycine max
  Clone ID: PAT_MRT3847_84139C.1.pep
MLGENIGPIMKHSGISIIIAGDRLGSNCNVVLSTSTFIEREVQSSQLIIHQKKSFTVPNEDRYTRVCAIE

SEQ ID NO: 268124 - protein, 37 aa, Glycine max
  Clone ID: PAT_MRT3847_8413C.1.pep
SPDSTSNVLSRTPLNRLVLSLGKHHHTIINKIFNTPP

SEQ ID NO: 268125 - protein, 201 aa, Glycine max
  unsure (1)..(201): unsure at all Xaa locations
  Clone ID: PAT_MRT3847_84140C.1.pep
MGVATGASQMAYSSHYPTAPMVASGTPAVAVPSPTQAPAAFSSSAHQLAYQQAQHFHHQQQQHQQQQLQMFWSNQMQEIEQTIDFKNHSLPLARIKKIMKADEDVRMISAEAPVIFAKACEMFILELTLRSWIHTEENKRRTLQKNDIAAAISRNDVFDFLVDIIPRDELKEEGLGITKATIPLVNSXADMPYYYVPXQHP

SEQ ID NO: 268126 - protein, 185 aa, Glycine max
  Clone ID: PAT_MRT3847_84141C.1.pep
MGWALPQVLAKWPILLTTRLLPWCSGTPAVAVPSPTQAPAAFSSSAHQLAYQQAQHFHHQQQQHQQQQLQMFWSNQMQEIEQTIDFKNHSLPLARIKKIMKADEDVRMISAEAPVIFAKACEMFILELTLRSWIHTEENKRRTLQKNDIAAAISRNDVFDFLVDIIPRDELKEEGLGITKATIAL

SEQ ID NO: 268127 - protein, 215 aa, Glycine max
  unsure (1)..(215): unsure at all Xaa locations
  Clone ID: PAT_MRT3847_84142C.1.pep
MLATGTPDVTYPSAHQAQDDQQRYPQQQVQMFXSNQMQQNEQTNDHKNHSLPLAQIQKIVQADEDIRMISAEAPVIFAKACEMFILELTLRSWIHTEENKRRTLQKNDIAAAISRNDVFDFLVDIIPRDELKEEGLGITKATIPLVNSPADMPYYYVPPQHPVVGPPGMIMGKPVGAEQATLYSTQQPRPPMAFMPWPHTQPQQQQPPQHQQTDS

SEQ ID NO: 268128 - protein, 398 aa, Glycine max
  Clone ID: PAT_MRT3847_84143C.1.pep
MGGRWRTLSSFYNRITTSFSYSSKPHFPSFNRSISLAAAATSEIPDPDQFGFVDPELDPCVKIPVKAYFLSTSINLKGIQADNHRNVVPPSSRSSSNYVALRFCDFNLDSNGHGFHMKASNCRYMVVYQYGSAVLFNIEDHEVESYLELVKRHASGLLQDMRKDDYAIKEKPLQVEDMQGGPDYIVLKSLDTDGIRIIGSVLGQSIALDYFVSQVDGLVEEFAGVNRGMEKTGTFTMDKKKLLQLVGKANSNLADVILKVGLFERSEIAWRDAKYAQIYEYLRDEYEVAQRLRHLVGKANSVVPDVLLLLGLLQSSESALRDAKFAQIYEYLREEYEVAQRFGNLDFKLKFVEHNIHFLQEVLQNRKSDFLEWCIIGLLTIENVLSLYEILGASNTVS

SEQ ID NO: 268129 - protein, 271 aa, Glycine max
  Clone ID: PAT_MRT3847_84144C.1.pep
MDKSEQTQQQQQQQQHVMGVAAGASQMAYSSHYPTASMVASGTPAVTAPSPTQAPAAFSSSAHQLAYQQAQHFHHQQQQHQQQQLQMFWSNQMQEIEQTIDFKNHSLPLARIKKIMKADEDVRMISAEAPVIFAKACEMFILELTLRSWIHTEENKRRTLQKNDIAAAISRNDVFDFLVDIIPRDELKEEGLGITKATIPLVGSPADMPYYYVPPQHPVVGPPGMIMGKPIGAEQATLYSTQQPRPPVAFMPWPHTQPLQQQPPQHQQTDS

SEQ ID NO: 268130 - protein, 117 aa, Glycine max
  Clone ID: PAT_MRT3847_84145C.1.pep
MKASNCRYMVVYQYGSAVLFNIEDHEVESYLELVKRHASGLLQDMRKDDYAIKEKPLQVEDMQGGPDYIVLKSLDTDGIRIIGSVLGQSIALDYFVSQVNMCQMSSSFQYFVSHLLT

SEQ ID NO: 268131 - protein, 86 aa, Glycine max
  Clone ID: PAT_MRT3847_84146C.1.pep
SDIGAYYQSIGVRILWHDMTISNENSTSEDSYPSRLFWQNCTLILYLNNSTLPQFLSQLNAQNKGLIEFTNMNLDITCLKYKYQCY

SEQ ID NO: 268132 - protein, 43 aa, Glycine max
  Clone ID: PAT_MRT3847_84147C.1.pep
TVAFTLFRHTSCRELTSQIRSTQTSIGLRSLTIFDVHRFSILH

SEQ ID NO: 268133 - protein, 75 aa, Glycine max
  Clone ID: PAT_MRT3847_84148C.1.pep
WRLVSPCVYSECYRCGLVKRQPYFDMVTFIYPVRIGSPLIAKKRAFPPRSKVNLGGVFSQKYGALLMPTPCHVPN

SEQ ID NO: 268134 - protein, 208 aa, Glycine max
  Clone ID: PAT_MRT3847_84149C.1.pep
FGSRVKPDGAVWGALLGACKIHKNAEIAELAFQHVVELEPTNIGYYVLLSNIYTDANNLEGVSRVRVMMRERKLRKDPGYSYVEYKGKMNLFYSGDLSHPQTKQIYRMLDELESLVKEVHPPNEKCQGRSEELLIGTGVHSEKLAIAFALLNTKSGTEITVMKNLRVCVDCHLFIKLVSKIVNRQFIVRDATRFHHFRDGICSCKDYW

SEQ ID NO: 268135 - protein, 103 aa, Glycine max
  Clone ID: PAT_MRT3847_8414C.1.pep
TSSVMGPKAETKPADRQGKVSPAVPESVAAKIELPDASSKLSAEEVWRVAGLRRKKIACSQLLIPQPLKERQAKVSRKRYTLTIIRIQCPDGVVLQGVFSSMW

SEQ ID NO: 268136 - protein, 66 aa, Glycine max
  unsure (1)..(66): unsure at all Xaa locations
  Clone ID: PAT_MRT3847_84150C.1.pep
KRXTGESXPNGPTAXAXKEAARGQARHAAKAHDNGAAPTAEPETPPDGEQGRDRTAEGAKKDFFFF

SEQ ID NO: 268137 - protein, 102 aa, Glycine max
  unsure (1)..(102): unsure at all Xaa locations
  Clone ID: PAT_MRT3847_84151C.1.pep
DXKXAXXCAXIVXXXXSDXXAXXSXXTXXXXDXIXXXXVXXAXGLNIVXSXXHXXXXFXXXXXXXSQXXGAXCXXXXXXXKXRGVVXXXIDXRLXYXIVXXV

SEQ ID NO: 268138 - protein, 66 aa, Glycine max
  unsure (1)..(66): unsure at all Xaa locations
  Clone ID: PAT_MRT3847_84152C.1.pep
VSENAQTGCAGCQMYPDFCYTESTSTXNWCMVAVPAKGKXEAAEMYTPSQNYACSCEPNCSCKPCT

SEQ ID NO: 268139 - protein, 127 aa, Glycine max
  unsure (1)..(127): unsure at all Xaa locations
  Clone ID: PAT_MRT3847_84153C.1.pep
LEHALAVVLLAPSLAALGMDLCPGFMSDGDFWXIYLVLVLPCLCITDAAILSTPQIMEASATFTLAFDKRREEKKDLEEGMLPQKRRNSISLCQALLNLNQHLCRHLLMKLPHVRLVVMSGWRNMPL

SEQ ID NO: 268140 - protein, 67 aa, Glycine max
  unsure (1)..(67): unsure at all Xaa locations
  Clone ID: PAT_MRT3847_84154C.1.pep
QSFKEEELEVICEVIKXXLQSDPKXRPTMKDITPRLREVLHISPEQAVPRLSPLWWAELEILSMEAT

SEQ ID NO: 268141 - protein, 325 aa, Glycine max
  unsure (1)..(325): unsure at all Xaa locations
  Clone ID: PAT_MRT3847_84155C.1.pep
TNSTTHFITKLSLFHFFKLSLYIYIKLFLLCHGGAVFLHVINAEKEGGGSISSSSRESRPGLGDIPARCDCCLIMTLDPPYICRXARANRASHRASSANFVWESKLPQNYKFLLNKVLGEQNLGSMTKKEIYAKLCQPNFFDGGTKEVWLDRSSGQVCMFISSKSFKITGIDDRRYWNYIPTEESRFKSVAYLQQMWWVEVIGELEFEFPKGNYSVFFKLQLGKPSKRLGRRVCNLDQVHGWDIKPVRFQLSTSDGQRSLSQCYLRGSGEWANYHVGDFAIDKPNGPTNINFSLAQIDCTHTKGGLCIDGVVICPKEFTQGLKQF

SEQ ID NO: 268142 - protein, 54 aa, Glycine max
  Clone ID: PAT_MRT3847_84156C.1.pep
LFFMFEHIELLQPSNGSCFSVMISNLYYFSTHVVPVSSTKEDTTSSFLPGSDLT

SEQ ID NO: 268143 - protein, 138 aa, Glycine max
  Clone ID: PAT_MRT3847_84157C.1.pep
GGIGRPEVGKRAWRKDDDEPKTHCCTGLPLAYNLAGRQKFYIGGRCMIKRWDTLSWQDGIHPYYTLWTGSAYGVLSRGTDIVCSDCAGIDGKIAKHVLNMMAQTILQGCDWDGQLMTERTHLLLRCDQGWQVGRKTFE

SEQ ID NO: 268144 - protein, 70 aa, Glycine max
  Clone ID: PAT_MRT3847_84158C.1.pep
TLSFTSLIALTNQVTNNEMNNNNNDSSTSPNLLLHHHHLLLLRTFLTPRLFLPLHVGVQGDPVATNRSRA

SEQ ID NO: 268145 - protein, 95 aa, Glycine max
  Clone ID: PAT_MRT3847_84159C.1.pep
RVILCVHKDQNQHQNVTFKEPAGITASLHEHWLLQFWISMDQQEQKYHMHLLFLLPSSYHHQCHCNPIPSKWKELAYHPYHKLFPFPYQIYVLRI

SEQ ID NO: 268146 - protein, 293 aa, Glycine max
  Clone ID: PAT_MRT3847_8415C.1.pep
FGSSEVVAVTGDGTNDAPALHESDIGLAMGISGTEVAKENADVIIMDDNFTTIVNVARWGRAIYINIQKFVQFQLTVNIVALIINFVSACITGSAPLTAVQLLWVNLIMDTLGALALATEPPNDGLMLRPPVGRTTNFITKPMWRNIFGQSLYQLIVLAVLTFDGKRLLRINGPDATIVLNTLIFNSFVFCQVFNEINSREIEKINIFKGMFESWIFFTVIFSTVVFQVLIVEFLGTFASTVPLSWQFWVLSVVIGAFSMPISAILKCIPVERGDATTHHDGYEALPSGPELA

SEQ ID NO: 268147 - protein, 94 aa, Glycine max
  Clone ID: PAT_MRT3847_84160C.1.pep
FKLFKIHFINYAFVRDDKQLFTAELYRILPESEKLKLIYIIIDLVWFGFFLSEKNISQISDQFVLLELAILVNKILVSTDYGLRLCLGVKGKKD

SEQ ID NO: 268148 - protein, 91 aa, Glycine max
  Clone ID: PAT_MRT3847_84161C.1.pep
ERERERERERETERERERERERERKTKREAAAKKAAEDAANLEKGDEHQASSQHATVTERAAASTSEADNKTSDFMDDDSALLQQALAMLM

SEQ ID NO: 268149 - protein, 83 aa, Glycine max
  Clone ID: PAT_MRT3847_84162C.1.pep
VLRTPLNTYINGHHKLPGLWWVLLFLLNFTLVKAKINKIFLDPPHYRVKWTTLGISSEQATGELWHPRIGSTFLAVDYNPINA

SEQ ID NO: 268150 - protein, 58 aa, Glycine max
  Clone ID: PAT_MRT3847_84163C.1.pep
FISFKDSEVNKLLGCIKPQSPMFPDQSQILGKPDKKVVGTPPGEKYHPSPLNWFFFFY

SEQ ID NO: 268151 - protein, 127 aa, Glycine max
  unsure (1)..(127): unsure at all Xaa locations
  Clone ID: PAT_MRT3847_84164C.1.pep
TTEPSCSRICFTSRGKCHAELIANAENIVPSGKGIIAADETTGTXDTCLANISVKNXEWGRRSLRELLITAPGVLQXLSAVILYEETLYQSTAGGKPXENDLKEVGALSVITVDKGTNYLAGTNGET

SEQ ID NO: 268152 - protein, 366 aa, Glycine max
  Clone ID: PAT_MRT3847_84165C.1.pep
MEHADKGKESSNSINEVEVTNSPIICGLPDDISLMCLARIPRKYHSVMKCVSKRWRNLICSEEWFCYRRKHKLDETWIYTWMNALCRDKSNEIFCYVLDPTVLRRYWKLLDGLPPYISNRKGMGFEALGNKLFLLGGCSGFLDSTDEAYSYDASSNCWVEAASLSNARCYFACEVLDEKLYAIGGLVSNSSDNSWDTFDPLTKCWTFHIDPNIASDIEDSVVLDGKIYTRCARHTDVASHAFAVVYEPSSGTWQYADADMVSGWTGPAVVVYGTLYVLDQSLGTRLMMWHKERREWIPVGKLSPLLTRPPCQLVAVGKSIFIVGKTLSTVVVDVGDLGNEGQVMMGSSIPGLLSDFNVISCKCLSI

SEQ ID NO: 268153 - protein, 107 aa, Glycine max
  unsure (1)..(107): unsure at all Xaa locations
  Clone ID: PAT_MRT3847_84166C.1.pep
XXXYXXSEXXELRXXSXXXLXXNPWXXXHXKXXDSNXRHSXLXXKLXLXCRVLRLXXGXXSAAXGLFVXSASXXXSTXXPXCXSRXSSGXXGLXXXKXXXKFDVLXT

SEQ ID NO: 268154 - protein, 298 aa, Glycine max
  unsure (1)..(298): unsure at all Xaa locations
  Clone ID: PAT_MRT3847_84167C.1.pep
MGDVAKDLAAGTVGGAAQLICGHPFDTIKVKLQSQPAPLPGQLPKYSGAFDXVKQTIAAEGARGLYKGMGAPLATVAAFNAVLFTVRGQMETLVXRSNPGAPLTVDQQVVCGAGAGVAVSILACPTELIKCRLQAQSALAGSETATVAVKYGGPMDVARHVLKSEGGMRGLFKGLVPTMGREIPGNAIMFGVYEALKQKFAGGTDTSGLSRGSLIVAGGLAGASFWFLVYPTDVIKSVIQVDDHRNPKFSGSFDAFRKIRATEGFKGLYKGFGPAMARSVPANAACFLAYEMTRSALG

SEQ ID NO: 268155 - protein, 46 aa, Glycine max
  Clone ID: PAT_MRT3847_84168C.1.pep
SRAESARVRLREDDRTGPTTDLPVKNLTGGGTLLPYRQRQLGLKPE

SEQ ID NO: 268156 - protein, 71 aa, Glycine max
  Clone ID: PAT_MRT3847_84169C.1.pep
KDVIYFIKVVCEGRIRVFHICFPLPAVSQKVSTSPRGLVRGAVTFLSYSKKLCGIGWCFPYHKKPTKNNFN

SEQ ID NO: 268157 - protein, 103 aa, Glycine max
  unsure (1)..(103): unsure at all Xaa locations
  Clone ID: PAT_MRT3847_8416C.1.pep
NFIIQNFLSLKIPSFSEYLSMKKDPLLKITAHFYNFLKNTQIYRLSLFTNPQXNFFKXFLPLLYNFYITKTHIKVHTELQHKINNTYHIIYKHFIQILNSLVI

SEQ ID NO: 268158 - protein, 70 aa, Glycine max
  Clone ID: PAT_MRT3847_84170C.1.pep
LVRGNTENKVPSSSVRRKEKGGTKINLRSHNQHHPKSHLIALVIHKSGILVLIFGPRFMGSSSGNPNQQQ

SEQ ID NO: 268159 - protein, 66 aa, Glycine max
  Clone ID: PAT_MRT3847_84171C.1.pep
CYQEISLARVDPSFEKKNWERTSVFFKTFELCSKNGCPHLTAFKGLFSLRTCEETLSPYCFVFFKF

SEQ ID NO: 268160 - protein, 105 aa, Glycine max
  unsure (1)..(105): unsure at all Xaa locations
  Clone ID: PAT_MRT3847_84172C.1.pep
DXKSTAXXXPRTPXHSTVXXXXXXIAXVXXXXXXXLXXXXHXXXXXDXSXRHXQXXXXXHXQXXXXXVSXXXXXXXHSVXXTXXARXXXXXXXXTXXXXVAXVXX

SEQ ID NO: 268161 - protein, 91 aa, Glycine max
  Clone ID: PAT_MRT3847_84173C.1.pep
TPVFIWTAQFKSGRPLHMISAGCMNTQFYRKPYIFNTIETMLTPHFSLQHSWFSNNNTTRSLRLFLSSLHLLQSRHSLHFLCTFNKSRTSY

SEQ ID NO: 268162 - protein, 48 aa, Glycine max
  Clone ID: PAT_MRT3847_84174C.1.pep
KETCDKITMKIVSIRTLTLQYCWFYLFFCLRECWSSLLRMMGLTVEEI

SEQ ID NO: 268163 - protein, 86 aa, Glycine max
  unsure (1)..(86): unsure at all Xaa locations
  Clone ID: PAT_MRT3847_84175C.1.pep
VQNLKGGNFNSKEHGWWVVEIAERTASLIARXQGVGFTHGVLNTDNMSILGLTIDYGPFGFLGAFDPKFTPNSTDLPGRRYCFANQ

SEQ ID NO: 268164 - protein, 158 aa, Glycine max
  unsure (1)..(158): unsure at all Xaa locations
  Clone ID: PAT_MRT3847_84176C.1.pep
DVEKLNKMASSVTTGGMGAIRRKKRAVRRSTTTYDKRVQITLKRIGVNAIPGIEELNISNDEMGIQFLNPXVQSFIAANTWVVSGSPHTKNLRDILSNIIHQLWPDNLXNLKKLAVLFXMHVLEAGNGASLSQDDYDYSVPDLVTWDTLDTHADDTNT

SEQ ID NO: 268165 - protein, 218 aa, Glycine max
  unsure (1)..(218): unsure at all Xaa locations
  Clone ID: PAT_MRT3847_84177C.1.pep
MPSSHLLLEEPIRMVSILEPSKPSFFSAMTKIVGTLGPKSRSVETISGCLKAGMSVARFDFSWHDPEYHQETLENLKAAIKSTKKLCAVMLDTVGAEMQVVNKSERAISLEANGLVVLTPDQGQEASSEILPINFDGLAKAVKKGDTIFIGQYLFTGSETTSVWLEVSEVKGQDVVCIIKNTATLAGSLFTLHASQXHIDLPTLTEKDKEVISTWGVK

SEQ ID NO: 268166 - protein, 198 aa, Glycine max
  Clone ID: PAT_MRT3847_84178C.1.pep
MPSSHLLLEEPIRMVSILEPSKPSFFSAMTKIVGTLGPKSRSVETISGCLKAGMSVARFDFSWHDPEYHQETLENLKAAIKSTKKLCAVMLDTVGAEMQVVNKSEKAISLEANGQVVLTPDQGQEASSEILPINFDGLAKAVKKGDTIFIGQYLFTGSETTSVWLEVSEVKGQDVVCIIKNTATLAGSLFTLHASQIH

SEQ ID NO: 268167 - protein, 60 aa, Glycine max
  Clone ID: PAT_MRT3847_84179C.1.pep
LFLSSTFSLRASFIVQKILNTLIFNLLRCVRDGVLLKVTKAKNELSVLFWINHKFFPLVY

SEQ ID NO: 268168 - protein, 51 aa, Glycine max
  Clone ID: PAT_MRT3847_8417C.1.pep
ILKIGSAGISSLGGPSEKRTEWVPQFVSGYGRMPLVFSSVKAVYNPQIWVW

SEQ ID NO: 268169 - protein, 190 aa, Glycine max
  Clone ID: PAT_MRT3847_84180C.1.pep
DAWGAAGAAAGVVVLLIVFVFVMLRRRRRHVGTGTSVEGSLMAFSYRDLQNATKNFSDKLGGGGFGSVFKGTLADSSIIAVKKLESISQGEKQFRTEVSTIGTVQHVNLVRLRGFCSEGTKKLLVYDYMPNGSLESKMFYEDSSKVLDWKVRYQIALGTARGLNYLHEKCRDCIIHCDVKPGNILLDADF

SEQ ID NO: 268170 - protein, 73 aa, Glycine max
  Clone ID: PAT_MRT3847_84181C.1.pep
WQLQSWEHEHIKRRICLVIYWSQIIVPVLINSNAPDGCSLCNYTTCFDFTPFLTSSVKKHSNTFLYFNIPSTI

SEQ ID NO: 268171 - protein, 260 aa, Glycine max
  Clone ID: PAT_MRT3847_84182C.1.pep
VMEQLVSRLDVAMFNAILRESAEEMPMDPISDPISDSKVLPIPAGKSGFGAGAQLKNAIGDWSRWLSDLFSIDDSDSREVINENNEPKCEPSFKPFQFLNALSDLMMLPLDMLADGSMRKEVCPKFGISLMKRVVYNFVPDEFSPGPIPDAVFEALDEDIEDDEGAITSFPCSAGSTFYEPPPASSVVGMLQEVGTKTSLRSGSFVLKKLYTSDDELDELDSPLSALGMDDSSLLSKELVKGGRKVVRYELLREAWKTSE

SEQ ID NO: 268172 - protein, 155 aa, Glycine max
  unsure (1)..(155): unsure at all Xaa locations
  Clone ID: PAT_MRT3847_84183C.1.pep
EQGGPMPPQSSFPSLVSPRTQFNNMNILGNMSNVTSILNQSFPNGVPNPGLSGPGNSQRGAIDTGAEKDPVSSVGNGMNFNXLRSTFVQSSIVNAASSGQGQGQQFSNPSSNQLLQDQQHSQQLEPQNFQHGQQSMQQFSAPLNTQQPPQPQQHF

SEQ ID NO: 268173 - protein, 63 aa, Glycine max
  Clone ID: PAT_MRT3847_84184C.1.pep
ATIHARQCITTSFSKSCWAVEQVHNSICVLRDQVHTFCNHTGKSRKIFGRSRSLISLNPVYPA

SEQ ID NO: 268174 - protein, 45 aa, Glycine max
  Clone ID: PAT_MRT3847_84185C.1.pep
GTITSESLKEIMFNFLKIFFLNDDCVFLKVSPSIIYFFNDSPPLL

SEQ ID NO: 268175 - protein, 87 aa, Glycine max
  unsure (1)..(87): unsure at all Xaa locations
  Clone ID: PAT_MRT3847_84186C.1.pep
ACSLVNSAIEYSSVEMSARAESSAVMDVXYDFLVPCPAKADLSTPRDGLPSRRVSLVLRTFSYRLRRPVILRPAGPLLLTSHDHAST

SEQ ID NO: 268176 - protein, 95 aa, Glycine max
  unsure (1)..(95): unsure at all Xaa locations
  Clone ID: PAT_MRT3847_84187C.1.pep
IWXLLVCSGGAAVGPGYGHTRQGQNMCAGRATHQSTSKWGRTLDSRRQQNIAAINKSPLAPRDGVGDTLRVGNSQHRLYEIRIESLCWLSQFIRE

SEQ ID NO: 268177 - protein, 184 aa, Glycine max
  Clone ID: PAT_MRT3847_84188C.1.pep
HGCEKTQKGRPGWVILSQAHQKQKSKRSHLATVNTPTQTHSKRTLAVSAVFATVPSPSMESLFGSINVRDLLSAQDLSDPNSPLSAPDLRLLIQRLESQSFQIRSQVQSYLVSHHEDFARLFSLCNDTVSQTREVSDDVSAILGLLSDHPIDAEVREIVSETKSKKEELKMKKELLGLVGTRVA

SEQ ID NO: 268178 - protein, 404 aa, Glycine max
  unsure (1)..(404): unsure at all Xaa locations
  Clone ID: PAT_MRT3847_84189C.1.pep
MGKMIWRGRDVLSMALHVPGLKIPILMLGDFLISVETKARQAKERSHTLLDEIRITIGHGFKHLLGFESXIPGLTKVEMERELEILLKSLDWKGKXGLIRSAFDAETNSNFHQDSADDRKKEGSLRFYKPKFRYIFCDMDGTLLNSKSQISSTTANALREASSRGVKIVIATGKARPAVIDIFKMVDLAGKDGIVSEFSPGVFLQGLLVYGRQGQEIFRSNLDQNVCREACLYSLENKVPLIAFCEGRCLTLFRDPLVDSLHTIYHEPKAEVMPSVEHLLASADIQKMIFLDTDRRVADTLRPYWSDATNGRASVVQAVPDMLEIVPVGTSKGNGVKVLLDHFEVTAKEIMAIGDGENDVEMLELASLGIALSNGSEKTKSVANVIGLSNDEDGAADAIYRYAF

SEQ ID NO: 268179 - protein, 47 aa, Glycine max
  Clone ID: PAT_MRT3847_8418C.1.pep
TRPTRSNYILFPTFDEVPLYRVDVPISNYTLILGSSQLVLLHYSLMN

SEQ ID NO: 268180 - protein, 211 aa, Glycine max
  Clone ID: PAT_MRT3847_84190C.1.pep
MVAVVSQENVAALVSRTGRELQRYRKGRRQVVGCIPYRFKIGEKTSLDVVSDELEVLVISSQKGKGMLFPKGGWELDESKKEAALRETMEEAGVRGIVGGKLGKWSFKSKTHDTFYEGYMFPLLVQEQLEFWPEQNVRQRIWMSVTEAREVCQHWWMKEALDRLVNRLSGQKQLGHYRDNKRVLGSMNCKGDAKSASVNSVASLEGRAQLF

SEQ ID NO: 268181 - protein, 48 aa, Glycine max
  Clone ID: PAT_MRT3847_84191C.1.pep
AFFWKLAKGNICTLHVLLKLWFFSRGLISMVMLVHVHVLNNVRIALLR

SEQ ID NO: 268182 - protein, 61 aa, Glycine max
  Clone ID: PAT_MRT3847_84192C.1.pep
KEGTTLLMSIVRLMYKTVRVYNVHRLIFRMRRNISMRSSKKKLWDPPALSALITLGYVYKA

SEQ ID NO: 268183 - protein, 43 aa, Glycine max
  Clone ID: PAT_MRT3847_84193C.1.pep
EIRLYFRYPKVIGVILFNWGFSPYFLKSKVKPQNWVFPLCSGP

SEQ ID NO: 268184 - protein, 112 aa, Glycine max
  Clone ID: PAT_MRT3847_84194C.1.pep
MAMFDSIFNKGFKAAKCKTLLKLTIPRIKLLRNRREIQLKNMRREIAKLLETGQEATARIRVEHIIREENMMAAQEIIELFCELIAVRLPIIESQRECPLDLKEAISSVCFA

SEQ ID NO: 268185 - protein, 176 aa, Glycine max
  unsure (1)..(176): unsure at all Xaa locations
  Clone ID: PAT_MRT3847_84195C.1.pep
MAMFDSIFNKGFKAAKCKTLLKLTIPRIKLLRNRREIQLKNMRREIAKLLETGQEATARIRVEHIIREENMMAAQEIIELFCELIXAVRLPIIESQRECPLDLKEAISSVCFAAPRCADLPELLQVQMLFAAKYGKEFLSAATELKPDCGVNRQLIELLSIRAPSPEKKLNLLKEI

SEQ ID NO: 268186 - protein, 39 aa, Glycine max
  Clone ID: PAT_MRT3847_84196C.1.pep
CHTGSSVGIKFLPCTTVLQKKNYVHELRLLHVFCICYVN

SEQ ID NO: 268187 - protein, 43 aa, Glycine max
  Clone ID: PAT_MRT3847_84197C.1.pep
CHLAEKMCNIRPSRESEDTPLDARDNTIGSGLVLAPTRVCGYA

SEQ ID NO: 268188 - protein, 290 aa, Glycine max
  unsure (1)..(290): unsure at all Xaa locations
  Clone ID: PAT_MRT3847_84198C.1.pep
RLREDDRRGGGNSEGRGGSYRGSQGREDGGYGQVPAPTAQSYGGVGGNYPSTYSSYSDGNASYGTEAVPPPASYTGGPNSYPPSYGGSVGGYGGDNQGDGRSGGRSGPPAGYDSSYGAGNRGGFGGSSAETPATVKQCDENCDDTCDNSRIYISNLPPDVTTEELRELFGGIGQVGRIKQKRGYKDQWPWNIKIYTDESGNNKGDACLAYEDPSAAHSAGSFYNNYDLRGYKINVAMAEKICSKSFXPAYNHGGNRGGYGGDRRRDNYRDGGSSGPDRRDNYGGNRSHPY

SEQ ID NO: 268189 - protein, 85 aa, Glycine max
  Clone ID: PAT_MRT3847_84199C.1.pep
MLRVALNRLALPRVSAGSVVFEQRTVSGAVRYASSSSMVRFTRDHEWVKLDSANSNIGIVGVSDYAQKALGDVVYVDLPSVGRKL

SEQ ID NO: 268190 - protein, 337 aa, Glycine max
  Clone ID: PAT_MRT3847_8419C.1.pep
MDNDTNTTPTTTSEPQIAHDFPGLIRVFTDGRVQRFTGTDVVPPSTTPHITSKDITLLHPHSATLSARLFLPTPQTTSRRNNNLPLLIYFHGGAFCASSPFTANYHNYVATIVAEAKVVAVSVDYRLAPEHPIPAAYEDSWAALQWVASHRNKNGQEPWLNEHADFGRVFLAGDSAGANIVHNLTMLLGDPDWDIGMDILGVCLVHPYFWGSVPVGSEEAVDPERKAVVDRLWRFVSPEMADKDDPRVNPVAEGAPSLGWLGCRRVLVCVAEKDVLRDRGWLYYNALSRSGWMGVVEVEETLGEGHAFHLYDLASHKAQCLIKRLALFFNRDQPPSI

SEQ ID NO: 268191 - protein, 163 aa, Glycine max
  unsure (1)..(163): unsure at all Xaa locations
  Clone ID: PAT_MRT3847_841C.1.pep
ISTRIAGXXGYLAREYAMGGQLTMKADVYSFGVLILEIISGKSSARTNWGGSNKFLLEWAWNLYEEGKLLELVDPDMVEFPEEEVIRYMKVAFFCTQAAASRRPMMSQVVDMLSKNMRLNEKQLTAPGLFQDSGASSQKKSSFESPSYQFSSNSSSITQLSPR

SEQ ID NO: 268192 - protein, 71 aa, Glycine max
  Clone ID: PAT_MRT3847_84200C.1.pep
YNTRNFCVWSGVSTVFFFFLLILVFVHFQLEILTTQGLDYFEISSFSTFMIMGFLFFLLQFLRGFKRYRIV

SEQ ID NO: 268193 - protein, 68 aa, Glycine max
  unsure (1)..(68): unsure at all Xaa locations
  Clone ID: PAT_MRT3847_84201C.1.pep
ADSFAVLIVDAAAGLXNXPSSAXWLIRVRVCGGVSEKTEDKFSRKVTKPTRPPTRPPTRPPTRPPTRP

SEQ ID NO: 268194 - protein, 53 aa, Glycine max
  unsure (1)..(53): unsure at all Xaa locations
  Clone ID: PAT_MRT3847_84202C.1.pep
RGYSLILEPSAWSFNYMYSLYLWYLIIYIYIYIXDLCRAKKKRGLSLCGCAIL

SEQ ID NO: 268195 - protein, 48 aa, Glycine max
  unsure (1)..(48): unsure at all Xaa locations
  Clone ID: PAT_MRT3847_84203C.1.pep
MEDPSFFDRMISHLRATCKYYTGYPKDLGPSRVXHFTSEREFVKLLHE

SEQ ID NO: 268196 - protein, 166 aa, Glycine max
  Clone ID: PAT_MRT3847_84204C.1.pep
MLEKVYLYHLERISSSNTYTKTFIGIDGAGKRLADEVLQVVKKGHYSTRSAYDLIGEGERDRSQEECFVKLWRLKVPARFLVFGWKLLRDRLPTRKNLQRRQIPLPDSLCPLCRTHQEDASHLFFHCSKVQPIWWETMSWLQLKGAFPLNPKQHFLHHLGLQPAGV

SEQ ID NO: 268197 - protein, 82 aa, Glycine max
  unsure (1)..(82): unsure at all Xaa locations
  Clone ID: PAT_MRT3847_84205C.1.pep
RFSWVLHECLIHECKIICLAEVLNNYLLFVVSSSNTYTKTFIGIDGAGKRLPDEVSPETCKFMYLKLARPILVLIAXESSQI

SEQ ID NO: 268198 - protein, 80 aa, Glycine max
  unsure (1)..(80): unsure at all Xaa locations
  Clone ID: PAT_MRT3847_84206C.1.pep
PLSFSLLSPRSNPNSLPYSAFGHPSWKGGRSRPDFKKPMPNLLGIKKAPAPRTRNPPXKGKASKDPNKPKRPPSAFFGFM

SEQ ID NO: 268199 - protein, 46 aa, Glycine max
  Clone ID: PAT_MRT3847_84207C.1.pep
YPGDVIFVSINVCAVIQLQVCVVIQYKSLQVPVLVKKTTMVVALYG

SEQ ID NO: 268200 - protein, 98 aa, Glycine max
  Clone ID: PAT_MRT3847_84208C.1.pep
DRSVRTIVLVVCSTVTVVMFVALSLVGVWVMTSSTGAPVRDGYEAHDTTIHVLEQAVENEAVSAVSCSSTLLFEDDPCHLPEDATKGDSIATFEDNLN

SEQ ID NO: 268201 - protein, 93 aa, Glycine max
  unsure (1)..(93): unsure at all Xaa locations
  Clone ID: PAT_MRT3847_84209C.1.pep
EYIRENQPGSKNLAXPAEHHLPKPAEYVGTKQKSRAKNQEVGQDIQSKAQNSREAPAKNAKNSREPPAKNSRDAKVEAKNVKKTTVPPTPPPA

SEQ ID NO: 268202 - protein, 57 aa, Glycine max
  Clone ID: PAT_MRT3847_8420C.1.pep
GTFHSFHPVVTILSYLPKVPLVPPGAPVVYALSKQRAILINIIRACAALAPKNHMIL

SEQ ID NO: 268203 - protein, 59 aa, Glycine max
  Clone ID: PAT_MRT3847_84210C.1.pep
TKSTLFAKRMLRIHSLSRPLTALFLTLVLHNPNRVREARGAQKNIQGFTALERRLPDQA

SEQ ID NO: 268204 - protein, 157 aa, Glycine max
  unsure (1)..(157): unsure at all Xaa locations
  Clone ID: PAT_MRT3847_84211C.1.pep
SLVSMTAARGXTFGYIAPEVFSKNFGNVSYKSDIYSYGMLLLEMVGGRKNVAMSSAQDFHVLYPDWIHNLIDGDVHIHVEDECDIKIAKKLAIVGLWCIQWQPVNRPSIKSVIQMLETGGESQLNVPPNPFQSTTSTITGGHTRVTRRPLELEVIQE

SEQ ID NO: 268205 - protein, 129 aa, Glycine max
  Clone ID: PAT_MRT3847_84212C.1.pep
RNTGGTHVIVTTRLCKVMSYDTIQLLPLPLSDAMILMIGRKMKDYPADEIDILEKFNEKLGRLSFGLWMIGSLLSELAIGPSSLFEAINQVSLIEDSNSCYMSIAEGQWCKSNPFLMKTLLFCLETLEK

SEQ ID NO: 268206 - protein, 160 aa, Glycine max
  Clone ID: PAT_MRT3847_84213C.1.pep
GVEESDNEASKTVLSKWFMVLQQENQTNNRREETEERGDGNEEESVSVPPPNALLLMRCRSAPAKSWVREREGGDHDDDDEEQQGKEEKENAEREKEKEKGEKKGQSLKSLMEEDKRKKENVVVMRYDSDFYDISSDIAKETWIVGGIRDLMSRSRSSKR

SEQ ID NO: 268207 - protein, 58 aa, Glycine max
  unsure (1)..(58): unsure at all Xaa locations
  Clone ID: PAT_MRT3847_84214C.1.pep
APXXXLXXXPKXXELLGXXLMPPSHSGLMXHXTXCHQDGMRXHGTLLPCSLIXSQGWG

SEQ ID NO: 268208 - protein, 65 aa, Glycine max
  Clone ID: PAT_MRT3847_84215C.1.pep
GEQTVDDPTFFDRFKKLRGLPLIYLKQKSFKRMVPFDLPQEGAPLPPYWGTLKKGVVYGPRGKIP

SEQ ID NO: 268209 - protein, 72 aa, Glycine max
  unsure (1)..(72): unsure at all Xaa locations
  Clone ID: PAT_MRT3847_84216C.1.pep
YLIKFCPLFRFRVLFLVFAIISSYLLQENCFPNLGAIRASLACSTTLELFIFLRLVFSLINHIVRTRGSXPG

SEQ ID NO: 268210 - protein, 76 aa, Glycine max
  unsure (1)..(76): unsure at all Xaa locations
  Clone ID: PAT_MRT3847_84217C.1.pep
AFGISKETMQNVCNKFVVKDEDLILLAYPKXQTKGDPKWIQSVTIWDRSPWIETDVGYDILIKKKGPRLMTSHLPM

SEQ ID NO: 268211 - protein, 269 aa, Glycine max
  unsure (1)..(269): unsure at all Xaa locations
  Clone ID: PAT_MRT3847_84218C.1.pep
RDLPDSSQKDNDLGASRKVLNFPHFSTPRNNVSSAPGSTQFREKTTANLSQSEAREYSVITVGSSHCGSSHIPQEKDVSRVSSSAVWATNNNNSLSAEPEAVRDCVQRPICPRSDKGKSEMIEPTVTSSSGGSGSTGIGRTCSLSTRDHGQKRKGTEEEASEEQSEATELKSADGNKASQRTGSSKRNRAAEVHNQSERRRRDRINEKMRTLQQLIPNSDKTDEASMLEEXIEYLKSLQFQLQVMVXGVCMTPVMFPGIQHYMSQMGMG

SEQ ID NO: 268212 - protein, 80 aa, Glycine max
  Clone ID: PAT_MRT3847_84219C.1.pep
KEAHSTSETHPPKKTVKKQKLKKILRGPLHNWRKGYKSPPPRKLRMPLKKLDTPPPKKGGFAKKKTEKTASWTMLATIFL

SEQ ID NO: 268213 - protein, 224 aa, Glycine max
  Clone ID: PAT_MRT3847_8421C.1.pep
HNKHKYQQQRNLHRYFKFKAKFKSPRVRGRVGGRVRRSVRHWINASCVSTSVSTFHASSVCSHTSFFSFCCFGANSTTTPCLILKNNELQQPTMLHCLNTSCSDITVLERQREATIKCQNHQPPYLTDFNAVFPSSSSSSSSSSSSSHSQGLLMMCSDSSLGQVLTHSVKPDPGVWPEFGFLPAISRTFSRDGDLVSPKENMASGKENAKKRKPQNSKVESCGD

SEQ ID NO: 268214 - protein, 62 aa, Glycine max
  Clone ID: PAT_MRT3847_84220C.1.pep
FSLPVVPVISSKLAQCHNIVSLLPGLHGPVPFLHETDYAKVDESEAEEHAKLSYYCHRVRRT

SEQ ID NO: 268215 - protein, 126 aa, Glycine max
  Clone ID: PAT_MRT3847_84221C.1.pep
WSHPRLNNTWARARLTRYLFVPNPPPINKSLASIKLQSKSDAIILPFLPFFQLLSIQGSISMPWKRQANPYIMSCRISSREEDIVKSSIDMRFFSSVKWVGVVDHDVGAFIVGLSFCSGLWDLLKG

SEQ ID NO: 268216 - protein, 60 aa, Glycine max
  Clone ID: PAT_MRT3847_84222C.1.pep
GWVFFFFFFFFFCGEGPPPNFCKHKLNKPWAGGFQFFPIPPFLPIYFKTQLNEAFFLKLK

SEQ ID NO: 268217 - protein, 90 aa, Glycine max
  Clone ID: PAT_MRT3847_84223C.1.pep
KMKALVSSVAPFWVAWNSLPSKWSLFRWTPGFGARPPKVNGPSGGLAGKAPTFLGLRTIPEKGVKAPRDSFLGNHFLADPKPVTQQVTFN

SEQ ID NO: 268218 - protein, 58 aa, Glycine max
  Clone ID: PAT_MRT3847_84224C.1.pep
ATSVGGYSMLLTMVANAYTTITKVLHQYTKEKMVFSWGGTLGAPVGLPRLKYWGGAAK

SEQ ID NO: 268219 - protein, 293 aa, Glycine max
  Clone ID: PAT_MRT3847_84225C.1.pep
VLHNTGDSHLSAFTVDDEMNTNHAPNGTSPTFLSNWSPPRYLWRGLSVLILAGQVIVKTLKGKIHWRNTLQQLERVGPKSVGVCLLTSAFVGMAFTIQFVREFTRLGLNRSVGGVLALAFSRELSPVVTAIVVAGRIGSAFAAELGTMQVSEQTDTLRVLGSDPVDYLVTPRVLATCIALPLLTLLCFTLGMASSALLADGVYGVSINIILDSAQRALRSWDIISAMIKSQVFGAIISIVSCAWGVTTLGGAKGVGESTTSAVVISLVGVFIADFALSYVFFQGAGDQLKNCI

SEQ ID NO: 268220 - protein, 41 aa, Glycine max
  Clone ID: PAT_MRT3847_84226C.1.pep
PGRPGPKPRVWEPTSRWKLSAAVLMCVSLPKLVLSPKLIRA

SEQ ID NO: 268221 - protein, 83 aa, Glycine max
  unsure (1)..(83): unsure at all Xaa locations
  Clone ID: PAT_MRT3847_84227C.1.pep
KPXKKPPANKPPEXKPPANKPPXNKPKPPXDKPKPPXXKPPEKKPPDKKPPEGKDXPXEDNTQSQSKQRKTQERRGTAWKRRA

SEQ ID NO: 268222 - protein, 101 aa, Glycine max
  unsure (1)..(101): unsure at all Xaa locations
  Clone ID: PAT_MRT3847_84228C.1.pep
HYKPVNPVLVPTYANHYYSNHGDCTKNMGXVIHKHXTFTRHHLVYQTLHLIPLPNYTTSFTIHITFNNHLAFTTHPTFGKSSQYSTYVSKSFDTPIFHLNC

SEQ ID NO: 268223 - protein, 222 aa, Glycine max
  Clone ID: PAT_MRT3847_84229C.1.pep
GSRQNMFFVPAENRANFWYAMDYGMFRFCIADTEHDWREGSEQYKFIEHCLATVDRQKQPWLIFAAHRVLGYSSDFWYGVEGSFEEPMGRESLQRLWQKYKVDIAFYGHVHNYERTCPIYQNQCVNDERSHYSGVVNGTIHVVAGGAGSHLSNFSQVTPKWSLYRDYDFGFVKLTAFSHSSLLFEYKKSSDGKVYDSFTISRDYKDVLACVHDSCEATTSAT

SEQ ID NO: 268224 - protein, 40 aa, Glycine max
  Clone ID: PAT_MRT3847_8422C.1.pep
RTGVSKLSTQSRRVESCRVDWCFLRFRRLERFHWIIEETQ

SEQ ID NO: 268225 - protein, 76 aa, Glycine max
  Clone ID: PAT_MRT3847_84230C.1.pep
VLSFHLFILWQFVHCIVWAKDLLFAKLFGDKNQDNDLNVRSSDAASSSKNVEDVFERRKDEDIDQYGTLLSSSRSR

SEQ ID NO: 268226 - protein, 97 aa, Glycine max
  Clone ID: PAT_MRT3847_84231C.1.pep
LRSHSYRVMVQVFLSQSICLLTNISNCKFTFLFFLCLTYTLAKLMKENISSSQSCIQFKTKSYTNFHKKIRVFHCNIIKVKSNYSICFKMSKPTTHT

SEQ ID NO: 268227 - protein, 627 aa, Glycine max
  Clone ID: PAT_MRT3847_84232C.1.pep
MKKPTTDAISMGKRSLEGGEDDQPERKRPALASVIVEALKVDSLQKLCSSLEPILRRVVSEEVERALAKLGPARLSGRSPPKMIEGPDGRSLQLKFRSRLSLPLFTGGKVEGEQGAPIHVVLIDANSGSIVTSGPESCVKLDVVVLEGDFNNEDDEDWTQEDFESHVVKEREGKRPLLTGDLQVTLKEGVGTLGELTFTDNSSWIRSRKFRLGLKVASGFCESLRIREAKTVAFTVKDHRGELYKKHYPPALTDEVWRLEKIGKDGSFHKKLNNAGIVTVEEFLRLVVKDQQKLRNILGSGMSNKMWEALLDHAKTCVLSGKLYVYYPEDARNVGIIFNNIYELRGLISGDQFYSADSLTDSQKVYVDSLVKKAYENWDQVVDYDGKSLVNAKISSENELQVESIDYGSGLDHQLQLPALPVSVPSEQQINSGMPVGGYNDNNIVTRYPTQSLIPNSSSRNQFDSSLYVSNDQLISNAHQTQSTSNDHGTVGLALGPPQSSTSGFHAGSSSAINPFDDWSHNRDKGADEFFSEEEIRFRSHEMLENEDMQQLLRLFSMGGHGSMSAEDGFSFPSFMPSPSIPNYDEDRSRPGRAVVGWLKIKAAMRWGFFIRKIAAEKRAQIEELDE

SEQ ID NO: 268228 - protein, 123 aa, Glycine max
  Clone ID: PAT_MRT3847_84233C.1.pep
YNAFSGYNDNNIVTRYPTQSLIPNSSSRNQFDSSLYVSNDQLISNAHQTQSTSNDHGTVGLALGPPQSSTSGFHAGSSSAINPFDDWSHNGQGADEFFERNASILLMIGPTTGTRGLMNSFRK

SEQ ID NO: 268229 - protein, 66 aa, Glycine max
  Clone ID: PAT_MRT3847_84234C.1.pep
MKKPTTDAISMGKRSLEGGEDDQPERKRPALASVIVEALKVDSLQKLCSWLEPILRRVVNEEMERA

SEQ ID NO: 268230 - protein, 101 aa, Glycine max
  Clone ID: PAT_MRT3847_84235C.1.pep
YQPMFSDLKYHHCPRGKNPTITNQKLPILVGSYLFRIKHLDSSKTFLRNMLLYTYSVEAIQTPTSLIFELQFLHSKNISCTTNPPIAPSRKYNTAVRGFHY

SEQ ID NO: 268231 - protein, 157 aa, Glycine max
  Clone ID: PAT_MRT3847_84236C.1.pep
SQFSYAFFTNESTYENWDQVVDYDGKSLVNAKESSDFFFHVESIDYGSGLDHQLQLPVLPVSVPSEQQINSGIPVGGYNDNNIVTRYPTQSLIPNSSSRNQFDSSLYVSNDQLISNAHQTQSTSNDHGTVGLALGPPQSSTSGFHAGSSSAIKPFDD

SEQ ID NO: 268232 - protein, 148 aa, Glycine max
  Clone ID: PAT_MRT3847_84237C.1.pep
MTIWNYVVTAHKPTNVTHSCVGNFTSPQDLNLIIAKCTRIEIHLLSPQGLQPMLDVPIYGRIATLELFRPHGEAQDYLFIATERYKFCVLQWDSETGELVTRAMGDVSDRIGRSTDNGQIGIIDPDCRLIGTHLYDGLFKGYSFDNKG

SEQ ID NO: 268233 - protein, 98 aa, Glycine max
  Clone ID: PAT_MRT3847_84238C.1.pep
LRVGGRVGLKGALGFCESIRIREAKTVAFIVKDHRGELYKKHYPPALTDEVWRLEKIGKDGSFHKKLNSAGIVTVEDFLRLLVKDQQRRGNVSLVFAS

SEQ ID NO: 268234 - protein, 45 aa, Glycine max
  unsure (1)..(45): unsure at all Xaa locations
  Clone ID: PAT_MRT3847_84239C.1.pep
LFHDSLVHLTXRCQIXMNCVIRQRKLDPDFMQIGKTHIHQTILIN

SEQ ID NO: 268235 - protein, 53 aa, Glycine max
  unsure (1)..(53): unsure at all Xaa locations
  Clone ID: PAT_MRT3847_8423C.1.pep
XNXXVXXXKSHYXVEIFSNFPXSXXWNGKRLMTFGLVXLAXXNALLTFRMILF

SEQ ID NO: 268236 - protein, 95 aa, Glycine max
  Clone ID: PAT_MRT3847_84240C.1.pep
MNKPTSDAINMGKRSLEGGEDDQPERKRPALASVIVEALKVDSLQKLCSSLEPILRRVVSEEVPRALAKLGPARLSGRSPSKMIEGPDGRSLQLK

SEQ ID NO: 268237 - protein, 88 aa, Glycine max
  Clone ID: PAT_MRT3847_84241C.1.pep
IIFFGFFEIKIYTGFIIMEWLGGPQNQLTFGVYHFLPKDAFFLKKNIIHNPKGFLENSTLFNGCQFYLFLDKILPFIFWQQGRNPPPP

SEQ ID NO: 268238 - protein, 115 aa, Glycine max
  unsure (1)..(115): unsure at all Xaa locations
  Clone ID: PAT_MRT3847_84242C.1.pep
FREKIESLIKNDPPPALDFTALNICVDCLKGTQITHPKKXAXRRTPPLEIAHTDICAHSDVSSLGKERHFLPITDDYSRHGYVHSLPEISYAMDPLEIYHNKVKSQLHINVKIIR

SEQ ID NO: 268239 - protein, 96 aa, Glycine max
  Clone ID: PAT_MRT3847_84243C.1.pep
INKYRANNRLSTLGINSYVKSAASFWPHFRFSPSPLKTLSFSRSSPNQSQKNNDLETVHRWIVVKFEYHVRNQIPNILTVVNFKIISELRGKPFAL

SEQ ID NO: 268240 - protein, 78 aa, Glycine max
  Clone ID: PAT_MRT3847_84244C.1.pep
MKMYVLVERVGTIWAAWQCHAYDMLAFRMNTGCRASTPEVTCARRRLAVVAHNLFGSHTINEECTVTTHVFIRGKQYK

SEQ ID NO: 268241 - protein, 59 aa, Glycine max
  Clone ID: PAT_MRT3847_84245C.1.pep
GPRILSCGITPTTGDLSLKNTHRRIFNYLIWLDTLSSLTQKCLIKKNKTFIFIYSLLTR

SEQ ID NO: 268242 - protein, 78 aa, Glycine max
  unsure (1)..(78): unsure at all Xaa locations
  Clone ID: PAT_MRT3847_84246C.1.pep
TSENFVNATVEQRYPXGRFFDPLSLAGTIHDGVYLPDTEKLXRLKLAEIQHAKIAMLAMLIFYFEAGQGKTPLGALGL

SEQ ID NO: 268243 - protein, 202 aa, Glycine max
  Clone ID: PAT_MRT3847_84247C.1.pep
QNAALVLKEMHVEALVKCVGVFEALINMIKEPVGSGSTKACLSTIFLVSNTSVRGVTCQRFVELGLVDAVLEVLVDAERGVCEKALGVLDCVCDCKQGVQMAKANALTLPLVIKKLLRVSELSSSFAVSVLWKLFCDKNEEGVLIEALQMGVFHKLLVLLQVGCGEGTKEKATELLKLLNGCRSKAECVDSSLDFKHLKKPF

SEQ ID NO: 268244 - protein, 57 aa, Glycine max
  Clone ID: PAT_MRT3847_84248C.1.pep
FLVIDTIALYSHGAHTHEDEKLLGIVGIQFESPVQTCFNEKGVDYIHLHHNYSSQSD

SEQ ID NO: 268245 - protein, 34 aa, Glycine max
  Clone ID: PAT_MRT3847_84249C.1.pep
LSWQFQILFNFELLYLELVKFTPWPKNAKIVKTT

SEQ ID NO: 268246 - protein, 66 aa, Glycine max
  Clone ID: PAT_MRT3847_8424C.1.pep
PPYLQLKNCGTRRLSTLGREVKNLPLKSRFNPLNKNKKTGLNHRPLVPLFCFSPKATIPLCQPFIY

SEQ ID NO: 268247 - protein, 80 aa, Glycine max
  Clone ID: PAT_MRT3847_84250C.1.pep
CSLGRKKPSMHKCYMGHEHKDAAHSKSCSMQHFHRSVIWSQKVGCGSHPQNHTTLIWQVEVMQLLHLSDCGYLKINRSCS

SEQ ID NO: 268248 - protein, 104 aa, Glycine max
  unsure (1)..(104): unsure at all Xaa locations
  Clone ID: PAT_MRT3847_84251C.1.pep
MAGRGAPTKANEPQSHSPKDHAPNINYCITSSLPWTEAILLDSXHFVCMLATTVXIPTAIAAQMASGNTDKATVITPPLCAASINTSSQTMSGTLLPAVIGGSY

SEQ ID NO: 268249 - protein, 73 aa, Glycine max
  unsure (1)..(73): unsure at all Xaa locations
  Clone ID: PAT_MRT3847_84252C.1.pep
VEIDLLPQTPPTRAPSNSWXPSGLMYXRVDYGHQEAALIXGRDPRPYEVLTTRFIGDEYGDGKRLEVIRDCWE

SEQ ID NO: 268250 - protein, 35 aa, Glycine max
  Clone ID: PAT_MRT3847_84253C.1.pep
FTIEYATYLRDVRSEWKLYKTHRTEHDKNVNRKII

SEQ ID NO: 268251 - protein, 45 aa, Glycine max
  Clone ID: PAT_MRT3847_84254C.1.pep
RSAAAPFFLFLAIQNALALIQLRIFEVYHGSLQPMGSWSQSYSID

SEQ ID NO: 268252 - protein, 178 aa, Glycine max
  Clone ID: PAT_MRT3847_84255C.1.pep
VNRGKLERINEPPVLPIQQAKKRRRKDVPKNPGEHIDSHVSNKHVKVGKTAAGKTASLPVKNTISSSHNLGVPGEHYEDMTFQNQLDVSGISLKRKTADTRPMLDPPVCSKVSTNAPAAAEDAEKQKTRVLQSKNTSDKYKDASGLLDTSRQKYHEKSASAKSKSQPGKISISVDNLE

SEQ ID NO: 268253 - protein, 35 aa, Glycine max
  Clone ID: PAT_MRT3847_84256C.1.pep
QVTCRISISSASLNMTHSGISHPHVNKNNSSLNEV

SEQ ID NO: 268254 - protein, 104 aa, Glycine max
  Clone ID: PAT_MRT3847_84257C.1.pep
CTAFHDNEETFLKKYLYEIARRHPYFYAPELLFFAKRYKAAFTECCQAADKAACLLPKLDELRDEGKASSAKQRLKCASLQKFGERAFKAWAVARLSQRFPKAE

SEQ ID NO: 268255 - protein, 74 aa, Glycine max
  Clone ID: PAT_MRT3847_84258C.1.pep
DHPRITTGHPAKWRGLKRDRLQIKLKDDPCLPKTGFMTSLAQQAIRRTKLVICMALTNPVDPSLLNPSIIHAKS

SEQ ID NO: 268256 - protein, 39 aa, Glycine max
  Clone ID: PAT_MRT3847_84259C.1.pep
PRFIPKYALFLPLVLMYTYAGKLSGTRKCRLWLMSNISF

SEQ ID NO: 268257 - protein, 46 aa, Glycine max
  Clone ID: PAT_MRT3847_8425C.1.pep
TRTTSRAPFQPFYLWCNQSSIRSVDTHWKKMNQGMTASSQFTPDAG

SEQ ID NO: 268258 - protein, 144 aa, Glycine max
  unsure (1)..(144): unsure at all Xaa locations
  Clone ID: PAT_MRT3847_84260C.1.pep
QDDMRAVMRYLHETIWKGVPXVTXQVYTGLKNIAINERGRYSASVMQCCTWMERYRDGHSMTTPEXSRDGCKLAXMMAANMYFYYNEDHMWELXMRRCNDELRVPAHDLHRSSXRGAKHAIELWKQIPTSEPYRVILGDVRYKL

SEQ ID NO: 268259 - protein, 43 aa, Glycine max
  Clone ID: PAT_MRT3847_84261C.1.pep
FLAFNFLAGEQRGILEQVDDLTFAQVNRENKYDSFNDFWFNIG

SEQ ID NO: 268260 - protein, 65 aa, Glycine max
  Clone ID: PAT_MRT3847_84262C.1.pep
IILLSHLFPYSSPPSPSSHKSTLNSKFSKPYYTINIPILFPLKPPSSPLLFQPFLLPYTFPTFFL

SEQ ID NO: 268261 - protein, 226 aa, Glycine max
  Clone ID: PAT_MRT3847_84263C.1.pep
MGSDSNLGGSPSASSPSAKRTRDPEEEVYLDNLRSHKRYLSEIMASSLNGLTVGDSLPDNLMDSPARSESMFSFRDDMSFLQYSPMSEDSDDLRFCETPVHSCSSQLDSLPSSPVSPHRYQRPQNASSSAPSSSSNASHVSTFTCPQPRQRGSDSEGRFPSSPSDICHSADLRRAALLRSVQMRTQPPGPASLDLPFVSNQESAPNIDPEERSCSYMKSLVDEREY

SEQ ID NO: 268262 - protein, 65 aa, Glycine max
  unsure (1)..(65): unsure at all Xaa locations
  Clone ID: PAT_MRT3847_84264C.1.pep
GRRLSLRRGKPIHQVNSTTESSKTPAILADGTYATPSAALETAMXPPTLVQGSLSLIGNLKSLIF

SEQ ID NO: 268263 - protein, 51 aa, Glycine max
  Clone ID: PAT_MRT3847_84265C.1.pep
VIGDDQKSSGMCLSDRVVGRGHQCSSLCANWCSMHQRKSCPIRGSIHPVVL

SEQ ID NO: 268264 - protein, 98 aa, Glycine max
  Clone ID: PAT_MRT3847_84266C.1.pep
LLALIISAQQRFKDAETIVDFALDDSGGMDQLELLRLKAVLQISQQQPKEAIETYRILLALIQAKKELLLQDKNIDQEQAFRHEVCSTFQGRTLTSLV

SEQ ID NO: 268265 - protein, 79 aa, Glycine max
  unsure (1)..(79): unsure at all Xaa locations
  Clone ID: PAT_MRT3847_84267C.1.pep
MADQLTDDQIAEFKEAFSLFDKDXXGCITTKEXGTVMRXRANPLLXQXXRISITEVXXXXNGTIVXQIPHPPSEPAPGG

SEQ ID NO: 268266 - protein, 42 aa, Glycine max
  Clone ID: PAT_MRT3847_84268C.1.pep
HFSQLALSCPLNLGRITISMLSKIMRFERMHGGSGLSDRTRG

SEQ ID NO: 268267 - protein, 51 aa, Glycine max
  Clone ID: PAT_MRT3847_84269C.1.pep
AAISDGGSARISVVSHDGKWRPVDSGEACDALSSALARRGTRQSHLRSMTL

SEQ ID NO: 268268 - protein, 49 aa, Glycine max
  Clone ID: PAT_MRT3847_8426C.1.pep
LQLTNLIIFISFDELHICFIHIGPKEIYTTYMNTQKQHKIPKIKEICDK

SEQ ID NO: 268269 - protein, 123 aa, Glycine max
  unsure (1)..(123): unsure at all Xaa locations
  Clone ID: PAT_MRT3847_84270C.1.pep
EPRGRSFFFSFHPINGASDSTPSTPPSGISNSCLIETQDPSQQPLIQGIGRKRHFIGVRQRPWXLWAAEFRDPKKAAXVWLGSFDTAXAAAAASXAAAXKFIGSXANLNFPEHVLVPPPPFPS

SEQ ID NO: 268270 - protein, 53 aa, Glycine max
  Clone ID: PAT_MRT3847_84271C.1.pep
GRIVPRHIQLAVWSDQEFSQLIGSFTISHGGVLANIHQNLLPKKVACQGETQI

SEQ ID NO: 268271 - protein, 37 aa, Glycine max
  Clone ID: PAT_MRT3847_84272C.1.pep
YNPRFFKKSPIHTFVNIKNYPTISNKPHNLLKNQNPR

SEQ ID NO: 268272 - protein, 47 aa, Glycine max
  Clone ID: PAT_MRT3847_84273C.1.pep
CCKPPTACGYYYVNPILWTNPVIPMADSYCYLWSNDLNHLCYHSDAC

SEQ ID NO: 268273 - protein, 47 aa, Glycine max
  unsure (1)..(47): unsure at all Xaa locations
  Clone ID: PAT_MRT3847_84274C.1.pep
RSFLILMCINRFRDLHMXCCSNLSFSLACSNPNTYIYLASFIFMECI

SEQ ID NO: 268274 - protein, 36 aa, Glycine max
  Clone ID: PAT_MRT3847_84275C.1.pep
TTEITSIHYYNMASSTSISSFLTSSPSGPFNIPSSP

SEQ ID NO: 268275 - protein, 70 aa, Glycine max
  Clone ID: PAT_MRT3847_84276C.1.pep
MKEQLNKLFVFFIKKKKKKKKKKKKKKKKKKKKKKKKKKKKKKKKKIKKKKKKKKKKKKKKGGPFLGNQI

SEQ ID NO: 268276 - protein, 97 aa, Glycine max
  Clone ID: PAT_MRT3847_84277C.1.pep
MAPKLSEEERAAKLKQMQLAAQLHEEQRWKRIKKAEESDAKEAIQNDNAGGKNFLDTAQKSVYGAAEGGSASIAESVRRRTYYSQGRSGGESNAFRR

SEQ ID NO: 268277 - protein, 77 aa, Glycine max
  Clone ID: PAT_MRT3847_84278C.1.pep
TWTQSIHHRYCNKPHIHIFINKHKTHLPKRKRKLVNTHHKVVFVGGQHHFNFHYMAQYTYSILKKKGSAKNLGLNSQ

SEQ ID NO: 268278 - protein, 81 aa, Glycine max
  Clone ID: PAT_MRT3847_84279C.1.pep
PRVRKKKKKKKKKKKKKKKKKKKKKKKKKKKKKKKKKKKKKKKKKKKKGGPLLKNQILKPRAGKEKIFFLGPPKLNPWAGF

SEQ ID NO: 268279 - protein, 150 aa, Glycine max
  unsure (1)..(150): unsure at all Xaa locations
  Clone ID: PAT_MRT3847_8427C.1.pep
ENGVAPDRSLAPAGSSSLRQLSAMNKLMLMALGVIAERTSRXEMAVLREIAQAMDTDNSGAFTADELKASLRRYGSTLREIYKRDLMEAADVDIRGTIHCREWTAXTVHLNELERVEHIIARFQYFDKDGSGYITGDELXHARAEHNMTD

SEQ ID NO: 268280 - protein, 45 aa, Glycine max
  unsure (1)..(45): unsure at all Xaa locations
  Clone ID: PAT_MRT3847_84280C.1.pep
VLYFHQHGEGDSHDHXWILHSYSFVHKLYXIVTIMEITISVDPNK

SEQ ID NO: 268281 - protein, 65 aa, Glycine max
  Clone ID: PAT_MRT3847_84281C.1.pep
KVEPIKNKFTGLANHPWVRPFPFCVSRVVTEMLFFERLCISPQTFARAFPCILKVALVFVVELAP

SEQ ID NO: 268282 - protein, 89 aa, Glycine max
  Clone ID: PAT_MRT3847_84282C.1.pep
SVTMKLACKQHQIWLQELKCFRILFKVPAIMLQKTPQNQVIGIVPKLENMLSESCVRKIGTVTTVGTGYFTTSPTTAIRIEDTAIEERE

SEQ ID NO: 268283 - protein, 47 aa, Glycine max
  Clone ID: PAT_MRT3847_84283C.1.pep
MDEPTSCDALHKQAPKLEAQFDEHINPYRKMASTHVSTKAASPQSDL

SEQ ID NO: 268284 - protein, 325 aa, Glycine max
  unsure (1)..(325): unsure at all Xaa locations
  Clone ID: PAT_MRT3847_84284C.1.pep
ARDLLQHYNFAYMGAKLTKRIRLGMLENILTFETAWFDEEQNSSGALCSRLSNEASMVKSLVADRLSLLVQTTSAVTIAMIIGLAVAWKLALVMIAVQPLTILCFYTRKVLLSTLSTKFVKAQNRSTQIAVEAVYNHRIVTSFGSITKVLWLFDEAQEAPRKEARKKSWLAGIGMGSAQCLTFMSWALDFWYGGTLVENREISAGDVFKTFFVLVSTGKVIADAGSMTSDLAKSSTAVASVFEILDRKSLIPKAGHNTNGIKLEKMSGKIELKNVDFAYPSRAGTPILRKFCLEVKPGXNVGLVGKSGCGKSTVIALIXRMMLRV

SEQ ID NO: 268285 - protein, 137 aa, Glycine max
  Clone ID: PAT_MRT3847_84285C.1.pep
GHKGNQALQQQQMIQHLRQEMSNHNGGLQSQSLGGHNANGNISKNTMGFGGHTPSLSGGSANVPGNNRPISRNNSFKTASNSDSSAAGGNNGFNQRTSDMQQNLHLQDVAQDIGNEFLDNPFFNSDLDDNMGFSWKA

SEQ ID NO: 268286 - protein, 156 aa, Glycine max
  unsure (1)..(156): unsure at all Xaa locations
  Clone ID: PAT_MRT3847_84286C.1.pep
PFLTFSPHHANAFFQHNPLSKTLRVYYGTQASVSKLPEYEMPSVTWGVIQGRKEXLVSRVIIFDYLKCLGIIPDQLHDLELPSTVDVMRERVEFLQKLGLTVDDIYNYPXLMLGSSVRKNMIPVLGYLEKIGIARPKLGGFVKNYPQVLHASVIVE

SEQ ID NO: 268287 - protein, 108 aa, Glycine max
  Clone ID: PAT_MRT3847_84287C.1.pep
KTKKGANIIIKKKKERGGTKNRKAPPPINKTPPQQPPPVNKPHSLKKPPTPTGGGNQFPNKPNPKKKKKNPHKIPNPKTRDPKTAKNPQNPKKGGPNPPYSTGGKTHY

SEQ ID NO: 268288 - protein, 40 aa, Glycine max
  Clone ID: PAT_MRT3847_84288C.1.pep
QTTASIYSQSTSHQKIKSHTSSHLPTASGLSYITIIHIHY

SEQ ID NO: 268289 - protein, 49 aa, Glycine max
  Clone ID: PAT_MRT3847_84289C.1.pep
ASSMMQKRACGKSMGLLMTLKDGTWRDACDGLGISLLLTSIPGFQYTVL

SEQ ID NO: 268290 - protein, 66 aa, Glycine max
  Clone ID: PAT_MRT3847_8428C.1.pep
MARAGGITNAVNVGIAVQADGENREFISHITVNGRCLLDFLVQFGTHAFPFPTLQNDPSRCRYIYP

SEQ ID NO: 268291 - protein, 129 aa, Glycine max
  unsure (1)..(129): unsure at all Xaa locations
  Clone ID: PAT_MRT3847_84290C.1.pep
ILSVVKVSFYFRAGMVSIILDLKRGGNARFLXKTTSYGPFGKNGPAFTWEVVKPLKGGTGPSLPNRGSTTLVKGILLLYWVLIIMMEKFSLCVRSIILNHVMFFMYFFMEIPHFLCVPVCVLSVHIYLI

SEQ ID NO: 268292 - protein, 124 aa, Glycine max
  unsure (1)..(124): unsure at all Xaa locations
  Clone ID: PAT_MRT3847_84291C.1.pep
MTLPPSLSEPPSLSDSFSPLNPALAMDSLQATYKDEEDEEDEPQPQPPPTTADSPXPLPPPPAHPPTPQPNPRTTPDRSPSPPKISPRTRPPPTAPRNPPNPAAKKATPPTRTHRRRSRSSSPL

SEQ ID NO: 268293 - protein, 50 aa, Glycine max
  Clone ID: PAT_MRT3847_84292C.1.pep
GSYRLFLHRYLHKHLVRACFIVQTVLPKDTVLLLLFKASINKETQGLGSS

SEQ ID NO: 268294 - protein, 57 aa, Glycine max
  Clone ID: PAT_MRT3847_84293C.1.pep
SLLLSASALSIIARPLSCRHRSLPSGSARIVSQHSQRRRSLSPSDEIAHHLFLVPRA

SEQ ID NO: 268295 - protein, 123 aa, Glycine max
  unsure (1)..(123): unsure at all Xaa locations
  Clone ID: PAT_MRT3847_84294C.1.pep
RLVTYIPLDILXFAIRYVLSGKAWDNLLENKTAFTTKKDYGKEEREAQWATAQRTLHGLQPPETTNLFNDKNSYRELSEIAEQAKRRAEVARLRELHTLKGHVESVVKLKGLDIDTIQQHYTV

SEQ ID NO: 268296 - protein, 404 aa, Glycine max
  Clone ID: PAT_MRT3847_84295C.1.pep
MATIIASSSSTVLFSASSSYLLPFSHPSTSRLSFSSSLSSSSSSLSISPSFLSYTSSNSTHFATHAAFSISASAAEKKKVLIVNTNSGGHAIIGFYFAKELLGAGHSVTILTVGDEGSDKMKKPPFNRFSEIVSAGGRTVWGNPAQVGSVVGGEVFDVVLDNNGKDLGTVRPVIDWAKSSGVKQFLFISSAGIYKPTDEPPHVEGDVVKADAGHVEVEKYIEETYGSWAVFRPQYMIGSGNNKDCEEWFFDRIVRDRPVPIPGSGLQLSNIAHVRDLSSMLTLAVENPEAANQTIFNCVSDRAVTLDGIAKLCAQAAGRPVNIVHYDPKAVGVDAKKAFPFRTYHFYAEPRAAKAKLGWQSTTNLPEDLKERFEEYVKIGRDKKSIQFELDDKILEALKVPVSV

SEQ ID NO: 268297 - protein, 171 aa, Glycine max
  Clone ID: PAT_MRT3847_84296C.1.pep
MGEEKTHINIGKIGPADYGKYTTTGHEIYKLGRIDKHAIERNKKEAADMNKMALKYAWVLDKLTADRDRGMTIAIASCGAETTNHYRTDFDANRNTDSIKNMSTGTFHADSAGLIIDSTTGGGQTGVHNDGQTPEHALLAITLGDKQMICCCNNMDATTQKYSKARYDYME

SEQ ID NO: 268298 - protein, 158 aa, Glycine max
  Clone ID: PAT_MRT3847_84297C.1.pep
ISLLMKTMLICGFLWRLARDIHGMGWGWAGVIWLYSLVTYIPLDILKFAIRYVLSGKAWDNLLENKTAFTTKKDYGKEEREAQWATAQRTLHGLQPPETTNLFNDKNSYRELSEIAEQAKRRAEVARLRELHTLKGHVESVVKLKGLDIDTIQQHYTV

SEQ ID NO: 268299 - protein, 76 aa, Glycine max
  Clone ID: PAT_MRT3847_84298C.1.pep
EGCGMNGDLGQKVSVTADPTTKYSNPIYDVQPSVDTAQHSAPDHSPYKYTNSVLHVFCGKKKETKNTSNTLANLNE

SEQ ID NO: 268300 - protein, 109 aa, Glycine max
  unsure (1)..(109): unsure at all Xaa locations
  Clone ID: PAT_MRT3847_84299C.1.pep
RQSAMCALVLVALVAVEAMPMAEAAWTCNPTHATPXLPAINSGPAPSSARCQKAEEQXPCFCGYLRNPSLKPSVLSPNALRAVRSCGIAYATREAPIIYIYEKCEQYIS

SEQ ID NO: 268301 - protein, 100 aa, Glycine max
  unsure (1)..(100): unsure at all Xaa locations
  Clone ID: PAT_MRT3847_8429C.1.pep
MGALVILLIGISRDCVMKMKVLVFFVATILVAWHCHTFDMYHMRMNTDYGARSTYVNCASWRLVVEVHYIFGSETIPGECLGPAQVYMHGXQYTSDCKTV

SEQ ID NO: 268302 - protein, 72 aa, Glycine max
  Clone ID: PAT_MRT3847_842C.1.pep
FMVCWSVESVSLPFRPPGSLKRVSCVLDLFFAHAPLSCQEWAGVVPLVIGVPKSAGLSGRQEAQFGTPRILC

SEQ ID NO: 268303 - protein, 138 aa, Glycine max
  unsure (1)..(138): unsure at all Xaa locations
  Clone ID: PAT_MRT3847_84300C.1.pep
MKKIPLPQVPYXKALARFWSKPLKNKFLPPXWNACCSDENGRXKAVKNALEALKILQKALKDKKFFGGESIGLVDIAANFIGYWVAILQEIAGLELLTIEKFPKLYKWSQEFINHPVIKEGLPPRDELFAFFQASAKK

SEQ ID NO: 268304 - protein, 64 aa, Glycine max
  Clone ID: PAT_MRT3847_84301C.1.pep
GASMYTKNSSPQIFRTLNIDPENSTPLSRLSKTTPCPLRTHNGAIYGKKRLPFLPPKQRRPAAR

SEQ ID NO: 268305 - protein, 58 aa, Glycine max
  Clone ID: PAT_MRT3847_84302C.1.pep
ASTQQARSLELPPPPSVNKFAFPCEELRRSASSLSHLWHRVSHWAETLGPNPVKDKKE

SEQ ID NO: 268306 - protein, 97 aa, Glycine max
  Clone ID: PAT_MRT3847_84303C.1.pep
HKIKFPPPGSKSRSYSGYPSIQFNINPFPIKLLRTNFLGFIIFPGNQTGPLDGHRQRAFRVLFAAFHHHPGNSHPMGDQYSVSGSGRFRSNPRSVSK

SEQ ID NO: 268307 - protein, 91 aa, Glycine max
  Clone ID: PAT_MRT3847_84304C.1.pep
AITNGALHVSPKRWNCSASSCCFRFRECRCRWKRIVRSCSTSEFVISNDENYSNKQVVSLTPRLYDYVLKNVREPVILRQLRQETASMRGR

SEQ ID NO: 268308 - protein, 40 aa, Glycine max
  Clone ID: PAT_MRT3847_84305C.1.pep
TCTIHWIYWAGPLIGGGITGLVCEVVFISHTHEQLPTTDF

SEQ ID NO: 268309 - protein, 103 aa, Glycine max
  unsure (1)..(103): unsure at all Xaa locations
  Clone ID: PAT_MRT3847_84306C.1.pep
RSHPPEVLALQDLYRTFNYPPMLKGWNGSDPCGESWTGVACSGPSVIQLXAQRLNLTGYLGSMLYNLPNLKQLDVNSNNIVGEIPFGLTPNVVHMNLNHMQIT

SEQ ID NO: 268310 - protein, 74 aa, Glycine max
  Clone ID: PAT_MRT3847_84307C.1.pep
YPNKSDDHIRPRVLMINFFSEKRNSEKSKRSAFPDNSVILFVERQRCNLDKQEHQSLILSKFIIEGSHPGAVAR

SEQ ID NO: 268311 - protein, 61 aa, Glycine max
  Clone ID: PAT_MRT3847_84308C.1.pep
TIFCSSKSDRIWLYIRYDLPTTSYSINTKYLNRILNRNEDIPFFFPFQNLTPGHYFRIQLC

SEQ ID NO: 268312 - protein, 98 aa, Glycine max
  unsure (1)..(98): unsure at all Xaa locations
  Clone ID: PAT_MRT3847_84309C.1.pep
RNFMLLLPSDLLQEDPRSIWWEASTVVAGPPSIEIPAGSVLRSALSGGLSCALXCALLHPVDTIKTRVQALTMSFPEIISKLPDIGRRCLYKFSIPSI

SEQ ID NO: 268313 - protein, 259 aa, Glycine max
  unsure (1)..(259): unsure at all Xaa locations
  Clone ID: PAT_MRT3847_8430C.1.pep
MECCIISRLKTQPIWFALLFIVGLLTILKLAFVVLRWVYVNFLRPPKNLKKYGSWAVVTGPTDGIGKSFAFGLARKGLNLVPVGRNPDKLKDVSDSIAARFGKTEVKTVVVDFFGDLDEGVKKISEAIQGLEVGVLVNNVGVSYPYARFFHEVDEGLLNNLIKLNVVGTTKVTQAVLPGMLKRKKGAIVNMGSGAAIVIPSDPLYAVYAATKAYIDQFSRCLYVEYXRSXGIDVSVSGFHYMWATXMGIIRKSSFFVHH

SEQ ID NO: 268314 - protein, 95 aa, Glycine max
  unsure (1)..(95): unsure at all Xaa locations
  Clone ID: PAT_MRT3847_84310C.1.pep
LPPMFLVFKKKRWPXXFKGEAKGNLWFCPPPNFCRVQHKLGLLKMGFFFLPFSPCLGGKRIINLGYVFQPLKTPFKSLAFWVSGGKGFFSKGKSG

SEQ ID NO: 268315 - protein, 106 aa, Glycine max
  Clone ID: PAT_MRT3847_84311C.1.pep
RVAHLDQDLYQASRGHIYLLLLIGRGLSVHGPPNQSYESRRSPRIDSAYHMGCNSSSHRWCSASDGAQMEAPIDLYAIHPTARTSVVFPGRVGRNRQCSSGPCRRT

SEQ ID NO: 268316 - protein, 116 aa, Glycine max
  Clone ID: PAT_MRT3847_84312C.1.pep
LVTPTTPPSTTPTTRRLSPTSRLRLPLSSTSSRRPRPRPAMSPPWLEAPLAPLPPALALLLPLPTLLPPLPSPTGTPARTTLSLPTSLLLRSPLATPARPTPSLLTSLLATLARPT

SEQ ID NO: 268317 - protein, 199 aa, Glycine max
  Clone ID: PAT_MRT3847_84313C.1.pep
MGEKGCVSLEGKKVILVPYMEAHVPKYHEWMKDPSLLQATGSEPLTLQQEYTMQLSWSQDPNKETFIVLDKDLVVGDFSHGEPHPEAMVGDVNIFMNDLDDPHVAEIEIMIAEPKSRRKGLAKESVLMMMTFAIEKLGINIFRVKIGESNGASLDLFQKLGFVQTSYSSIFKEVTLELQITQPKKEAMLGLIGTVIKHT

SEQ ID NO: 268318 - protein, 90 aa, Glycine max
  Clone ID: PAT_MRT3847_84314C.1.pep
GHLGVANNTAQERGDAWFNWYCNQTYLNLAISHFELFSGNRMILSVFIPCFYDVRLKAGLIIQNSDIIHLTIIISSKCNNLKLKVIDLYL

SEQ ID NO: 268319 - protein, 276 aa, Glycine max
  unsure (1)..(276): unsure at all Xaa locations
  Clone ID: PAT_MRT3847_84315C.1.pep
MKIQCDVCNKHEASVFCTADEAALCDGCDHRVHHANKLASKHQRFSLLRPSHKQHPLCDICQERRAFTFCQQDRAILCKECDVSIHSANEHTLKHDRFLLTGVKLAASAMLRSSQTTSDSNSTPSLLNXFTSNYSTSSSPPPPPXNNNNNKVAVEGTGSTSASSISEYLIETLPGWQVEDFLDSYFVPFGFCKNDEVLPRLDADVEGHMGSFSTENMGIWVPQAPPPLVCSSQMDRVIVQSETNIKGSSISRLKDDTFTVPQISPPSNSKRARFLW

SEQ ID NO: 268320 - protein, 278 aa, Glycine max
  Clone ID: PAT_MRT3847_84316C.1.pep
MKIQCDVCNKHEASVFCTADEAALCDGCDHRVHHANKLASKHQRFSLLRPSPKQHPLCDICQERRAFTFCQQDRAILCKECDVSIHSANEHTLKHDRFLLTGVKLSASAMLRSSETTSDSNSNPSLLNFSHQTTLLPPSSTTTTTTSNNNNNKVAVEGTGSTSASSISEYLIETLPGWQVEDFLDSYSVPFGFCKNDEVLPRFDGEMEGHLSSFSTENMGIWVPQAPPTLMCSSQMDRVIVHGETNIKGSSRSRLKDDNFTVPQISPPSNSKRARFLW

SEQ ID NO: 268321 - protein, 77 aa, Glycine max
  Clone ID: PAT_MRT3847_84317C.1.pep
ATDTKHNVNACDPLTRCKAIHDFQIFILAIPQTHYVRPQKKCSHKVKSSSAYACIYEALFYGRCGHICDLYDLLRFI

SEQ ID NO: 268322 - protein, 56 aa, Glycine max
  unsure (1)..(56): unsure at all Xaa locations
  Clone ID: PAT_MRT3847_84318C.1.pep
SSFPFLDSICTDLRSVPNSCRSFYSLSYVNVEKKMIFKKTPALGFLGENNRXEKRP

SEQ ID NO: 268323 - protein, 186 aa, Glycine max
  Clone ID: PAT_MRT3847_84319C.1.pep
LRTHQVLLWLTNQIKGNIICSFIRTRDIAGYIRGCKFLPKLNNEIVNKRNSTYRQRFASLQNLILIMFEQDTIVIPKETAWFGYYPNGALHPVVPVQQTELYIDDWIGLRALDEAGKVKFVNVSGDHLDISRSDMKTYIVPYLTDEASIVPRPKLKHSSGWISSIWSSLSEMFGLNEDLEVLSNDI

SEQ ID NO: 268324 - protein, 320 aa, Glycine max
  Clone ID: PAT_MRT3847_8431C.1.pep
MECCIIARLKTQPLWFALLFVVGLLTILKLAFVVFRWVYVNFLRPPKNLKKYGSWAVVTGPTDGIGKSFAFELARKGLNLVLVGRNPDKLKDVSDSIAAKFRRTEVKTVVVDFSGDLDEGVKKISEAIEGLEVGVLVNNVGVSYPYARFFHEVDEGLLNNLIKVNVVGTTKVTQAVLPGMLRRKKGAIVNIGSGAAIVIPSDPLYAVYAATKAYIDQFSRCLYVEYKKSGIDVQCQIPLYVATKMASIRKSSFFVPSTDGYAKAGVKWIGYEPRCTPYWPHTLLWAVAFSLPEFVVDAWRLWFCLGIRKRGQRKESMKKE

SEQ ID NO: 268325 - protein, 125 aa, Glycine max
  Clone ID: PAT_MRT3847_84320C.1.pep
LPSRVSYLIYWSVPSYIPHQTLASQLLDHPRNMDNLGTSPTDTEKSIEVNDALFCEHGLEVCKTCEFDGREDNDAMMGLDPKPRGPLEMPAYYKNTKDGQIMCKAHANSNCKSCFGWKKMIVKLQ

SEQ ID NO: 268326 - protein, 41 aa, Glycine max
  Clone ID: PAT_MRT3847_84321C.1.pep
TCYAKYDYSKITPCDMIMYITLTNSDRDDSGFLKIYKNQNQ

SEQ ID NO: 268327 - protein, 269 aa, Glycine max
  Clone ID: PAT_MRT3847_84322C.1.pep
MLTSASSSSSIFSFTPKTLTIPPQQPRFTVRAHSKPPILPNLKTLAGAAVFAAVALQFPSTARASPPPPLETDHRLNVEESLSPLSDLLETNAEALAALKSLLQQKLELGEDDEALAVITPLLAARRYDHEVHAPEPRSFEALVENALLMDRCGEGEAAKRRLDEALFVAELDKKAKEARDVKLIMAQITFLQKNVDEALGIYNQLTKEDPRDFRPYFCRGMIYSLLDRNEEAKEQFAKYRELSPKKFEVDGYLRTPLSRMKLFSTDES

SEQ ID NO: 268328 - protein, 71 aa, Glycine max
  Clone ID: PAT_MRT3847_84323C.1.pep
RYIRSTCLGFEKYALALLLVINHYDYFGGLLISLTHLFCITVSKTTPLTSFCQLVNTLLLVLILYLCNFGH

SEQ ID NO: 268329 - protein, 54 aa, Glycine max
  unsure (1)..(54): unsure at all Xaa locations
  Clone ID: PAT_MRT3847_84324C.1.pep
QGQSLMLRNEKKLIIIYVESRGNSCMLGNINFPPDXTHNEMKSNEKIIHVQNEE

SEQ ID NO: 268330 - protein, 61 aa, Glycine max
  Clone ID: PAT_MRT3847_84325C.1.pep
SIRIWLNPFLFWSDPQDTLLHLYEHRTCSKLQVCQPSQVAAHGVSERQRRCILGLIPSMLS

SEQ ID NO: 268331 - protein, 63 aa, Glycine max
  Clone ID: PAT_MRT3847_84326C.1.pep
TKSLVGGTNNYALISNSFIISVPVQELDLLFYSTQLILLILLIFQLDPTLCIFNFHHFNCEKS

SEQ ID NO: 268332 - protein, 133 aa, Glycine max
  unsure (1)..(133): unsure at all Xaa locations
  Clone ID: PAT_MRT3847_84327C.1.pep
RICDRXQCRPHKVSMKRQAWDGGELSIDQSGGATMSXKCTPSMIMRDNDAKMLVETGRIFIANEHLFKNQTERERXQIAASIKRYWRVQDPDKPQMRDNREQWNDSNPTRKEIPQSAWDPFXWDSERNYCPNK

SEQ ID NO: 268333 - protein, 64 aa, Glycine max
  Clone ID: PAT_MRT3847_84328C.1.pep
KQSMKKKMKRKQALRHLHLLQPPIFLMQARICSFQIHKPLLWFGPKFQCKYIIIYMYVVVIFRF

SEQ ID NO: 268334 - protein, 89 aa, Glycine max
  Clone ID: PAT_MRT3847_84329C.1.pep
GSRYHSLHIINCPKQYATGEQSEDIRLCLRRLNEHRLGQYLRFQRHMDSVHRCPNRPLKASHKMPLVRIDTRYSGHRSTNLEMETAHGP

SEQ ID NO: 268335 - protein, 46 aa, Glycine max
  Clone ID: PAT_MRT3847_8432C.1.pep
RPDFTMMGEAGPPSCVYLLQAPKGEKGCFSFRCKMGQGQLTFGLGG

SEQ ID NO: 268336 - protein, 66 aa, Glycine max
  unsure (1)..(66): unsure at all Xaa locations
  Clone ID: PAT_MRT3847_84330C.1.pep
NXXXSXVXXXGLFXVXSXXXXXXXXTXLAQDXXHXXXXXXXLXXXXPXPXGNFSSRIPSLRTRACD

SEQ ID NO: 268337 - protein, 202 aa, Glycine max
  Clone ID: PAT_MRT3847_84331C.1.pep
LLNANCDLKVCDFGLARSAASTEDNQGFMTEYVATRWYRAPEIMLTFKEYTKAIDVWSVGCILAEMLSGKPLFPGKDYHHQLTLILDVLGTPTMEDYYGIKSRRAREYIRSLPFKKKVNWKMMFPKTTDLALDLLEKLLAFNPQKRITVEEALKHPYLEPYHDPEDEPTADPIPEEFFDFDKNKDDLSKDQLKQLIFDEIMR

SEQ ID NO: 268338 - protein, 329 aa, Glycine max
  Clone ID: PAT_MRT3847_84332C.1.pep
LHCTLHNKDSSCKKPPHFAFFPVHSTVTSTLYWGLIEMGSCCGESADNMQVIGADKDHIWSKKVEADEGLNLNTVGCLRGRLLAERQASRVAKMEAESMGNKFVELEKLLREEIKLRDKAERRLKLLKKKVGSFNCMPSKTGQLEHSDSSEKCENSCGSSSISSLSKHSEANEIKHDAKIPALPENVDHSDNVSEASTLIQTHNSPSSTKDCDSQNTDNFSTNSEQGCSSPQILRQNPNLSSGNLKNDESRLSTLSSRSSVTENESHRADFYDNSLALVPVTVTATSQATNNPKPINVSVLEALDALRHARERLQSSMRSRQMIHVGPI

SEQ ID NO: 268339 - protein, 54 aa, Glycine max
  Clone ID: PAT_MRT3847_84333C.1.pep
LGWITSFKACPKVERSLRDQVHHFFTRLGTLAVCGVKNFFHRLRGLSHAMHHYC

SEQ ID NO: 268340 - protein, 91 aa, Glycine max
  unsure (1)..(91): unsure at all Xaa locations
  Clone ID: PAT_MRT3847_84334C.1.pep
PLTHSITNTHYNSTYQLVKSTYTRSASRLHXQTHHNSEVPLPISSGSDYTLSLNLRSHTSQFITLYMDTCSDLLWDPCXPYXCILCEGKFN

SEQ ID NO: 268341 - protein, 65 aa, Glycine max
  Clone ID: PAT_MRT3847_84335C.1.pep
IFYFIGNLKHKLARLFFLYIIISFLSFVSVLQEGGKVFCWGWNKYGQVLISHYPYTNTFLFHVLN

SEQ ID NO: 268342 - protein, 207 aa, Glycine max
  unsure (1)..(207): unsure at all Xaa locations
  Clone ID: PAT_MRT3847_84336C.1.pep
MFSRSKSHTLSHLKARSISSLKVVWRKDPELDRAIELDKRYKQCARVVKEVLNEPGQVIPLRYLEKRRERMRLKLKAETFLNQNPGLFDVYYDRIKPKTEPVRFLRPTDRLRRFLHQERRVFLDNEPFIVSKLCKLLMMSKNXVVSADKLLHVRREFGFPXDFLVDLVPRYPEYFRXTGXSXGRGXSFLKLVNWNPXFAKSCIEGRA

SEQ ID NO: 268343 - protein, 67 aa, Glycine max
  Clone ID: PAT_MRT3847_84337C.1.pep
GCLARCIILMWPDSYYGRNFQSSTSVPLLDQADLNSDFLEIEDENGNMITIICKFTGSVPSLRSWNL

SEQ ID NO: 268344 - protein, 260 aa, Glycine max
  Clone ID: PAT_MRT3847_84338C.1.pep
MEESLVKKHEEDRVVRWGVYSEEMRRICEIAGPMVAVVSSQYLLQVVSTMIVGHLGELYLSSADLAISLSGVTGFSLHMGMASGLETICGQAYGAQQYQRIGMQTYTAIFSLILVSIPVSILWINMESILVFIGQDPLISHEAGKFTIWLVPALFAYAILQPLVRYFQVQSLLLPMFASSCVTLIIHVPLCWEMLFFLCYTYDTLAYVQNTSIWSLGSCPGVCGSSFAARALPRAPISMELFKGMWEFFRFAIPSAVMVW

SEQ ID NO: 268345 - protein, 154 aa, Glycine max
  unsure (1)..(154): unsure at all Xaa locations
  Clone ID: PAT_MRT3847_84339C.1.pep
MFPQQPTVEDLTSTAMEHKIAEQPALANGKTNGHTNGATGHINGNGTSTLPALDASKLTITRADPNARAVPDEXXXCAANETICTDHMITVSWNAATGWATPELKPYGPLSLMPTASVLHYATECFEGLKAYRGHDGGLRLFRRTSTPAHVMSR

SEQ ID NO: 268346 - protein, 58 aa, Glycine max
  Clone ID: PAT_MRT3847_8433C.1.pep
KGEFKGGNNTIRSGGSAHTIEDYTIRYTLRTHMLLTNHNGHSNSSHGIYLVDFEIYLF

SEQ ID NO: 268347 - protein, 511 aa, Glycine max
  Clone ID: PAT_MRT3847_84340C.1.pep
MVASLSTLVLLLCVISTVAWYSCLYFLKLNNNTQKKTLPPGPPGLPIFGNLLSLDPDLHTYFAGLAQIHGPILKLRLGSKLSIVITSPAMAREVLKENDTVFANRDVPAAGRSATYGGSDIAWTPYGPEWRMLRKVCVLKMLSNATLDTVYDLRRNEMRKTVSYLYGRVGSAVNIGEQVFLTVMNVITNMMWGGVVEGAERESMGAEFRELVAEITQLLGKPNVSDFFPGLARFDLQGVEKQMHALVARFDGMFERMIDRRKKVEGQDGESREMKDFLQFLLKLKDEAGDSKTPLTIIHVKALLMDMVTGGTDTSSNTIEFAMAEMMHNPEIMKRVQEELEVVVGKDNMVEESHIHKLSYLQAVMKETLRLHPVLPLLIPHCPSETTNVGGYRIPKGSQVFLNVWAIHRDPSIWENPLKFDPTRFLDAKWDFSGNDFNYFPFGSGRRICAGIAMAERTVLYFLATLLHLFDWTIPQGEKLDVSEKFGIVLKKKIPLVAIPTPRLSNPDLYN

SEQ ID NO: 268348 - protein, 78 aa, Glycine max
  Clone ID: PAT_MRT3847_84341C.1.pep
NLLFCSNYNHKTSTAVQCILGSFNISVLKLLFSSIRSTVSSDALGFGFGITTSEYPIIELSDEVVVEVFLLHEPSHLA

SEQ ID NO: 268349 - protein, 87 aa, Glycine max
  Clone ID: PAT_MRT3847_84342C.1.pep
WKKMVKIMEKMVPTNQVMKLCLWGLVMNQLRSMRKEMIRVLTRVKPNKHVDDIIQLFFRKIRKSDQCSLTIVSGEIFLPDHKNGEPF

SEQ ID NO: 268350 - protein, 267 aa, Glycine max
  Clone ID: PAT_MRT3847_84343C.1.pep
PRVRPRVRPRVRGIGGVSGWWCDSLTPLKVIVESLRIMAWNKVMFASIMVLTTLPLSTLLISQSIYTHPLTSQIQHLEALARFTSTRFESRHVWQESRHEALSLLRIKALFSLPSYLLSLAAALAAVHSTLLSLHTTPSLHSAAAAFRLHSARLLATTIFVYAILFAFSPLPRFLAFLSPSPATRLLLLASASALEVYLMAVMSVALVVSVAEERFGWDAIRVGSALMEGSRVRGWVLSGLFVLGSSLIGSKLEHLMDGQDSIAVKD

SEQ ID NO: 268351 - protein, 44 aa, Glycine max
  Clone ID: PAT_MRT3847_84344C.1.pep
YILDRHSHFLSSSLSMRTVLVLYNLRVLQIIIVYTQLYRIRKST

SEQ ID NO: 268352 - protein, 159 aa, Glycine max
  Clone ID: PAT_MRT3847_84345C.1.pep
MLPQNGIVKEESNMCEDKPSGYPMNLLKQAKGRPSAGTLIVCPTSVLRQWAEELRSKVNGQATLSVLVYHGSNRTKDPYEVAKHDVVLTTYSIVSMEVPKQPPADKDDEEKEIFEDHATPSRKRKSPSNSSKSGKKKLDGTNLETVARPLAKVSWVRVV

SEQ ID NO: 268353 - protein, 219 aa, Glycine max
  Clone ID: PAT_MRT3847_84346C.1.pep
PSVDQGDILKWLDSKKANSVVYVCFGSIANFSETQLREIARGLEDSGQQFIWVVRRSDKDDKGWLPEGFETRTTSEGRGVIIWGWAPQVLILDHQAVGAFVTHCGWNSTLEAVSAGVPMLTWPVSAEQFYNEKFVTDILQIGVPVGVKKWNRIVGDNITSNALQKALHRIMIGEEAEPMRNRAHKLAQMATTALQHNGSSYCHFTHLIQHLRSIASLQN

SEQ ID NO: 268354 - protein, 42 aa, Glycine max
  Clone ID: PAT_MRT3847_84347C.1.pep
HASAHLLTVFLSLTGSAALCQVARNANYYTQRHALHAKTRCS

SEQ ID NO: 268355 - protein, 22 aa, Glycine max
  Clone ID: PAT_MRT3847_84348C.1.pep
FVSTFLNLYIKLLNYDASYSNL

SEQ ID NO: 268356 - protein, 93 aa, Glycine max
  unsure (1)..(93): unsure at all Xaa locations
  Clone ID: PAT_MRT3847_84349C.1.pep
XXXXXXAXHMXLXKDXTVVITXKQIXXHXXSRSTLTXXXXGAHMXAIWLXKXXIXXXMXPNXPXXXXXXEXXXVTXKXXTXRXXXEXXXXXTX

SEQ ID NO: 268357 - protein, 150 aa, Glycine max
  Clone ID: PAT_MRT3847_8434C.1.pep
MASSIQQQRSTATSSGSEGGGDPQMIDERKRKRMLSNRESARRSRMRKQKQLEDLTDEVSRLQGANKKLAENIKAKEEACVETETANSILRAQTMELADRLRFFNSILEIAEEVEGLSVEIPEIPDPLLKPWQIPHPIQPIMAPANMFLR

SEQ ID NO: 268358 - protein, 626 aa, Glycine max
  Clone ID: PAT_MRT3847_84350C.1.pep
MLEQLLIFTRGGLILWTCNHLSNALRGSPIDTLIRSCLLEERSGAASFNYDAPGAAYSLKWTFHNDLGLVFVAVYQRVLHLLYVDDLLAAVKREFSRLYHPQKTAYRDFDEIFQQLQIEAESRSENFKKPNPVPALAPNRKQNGTWQGQGLGQNAGSEKKSDGDGKKGRKLENDNFSVANSNSNANVNHSGGKSSVNNNIGKENESSNVGAFDVNRLQKLKGKKGNGNGKKKDALVVAAAKGEPKKVDKPNRVWDQPAPQTKLDFTDHVDGDGDRSADFLAKEQGESMMDKEEILSSDSEVEDDDDDTGKDNMPVAKKKGWFSSMFQSIAGKANLEKSDLEPALKALKDRLMTKNVAEEIAEKLCESVAASLEGKKLASFTRISSTVHTAMEEALVRILTPRRSIDILRDVHAAKEQRKPYVVVFVGVNGVGKSTNLAKVAYWLLQHNVSVMMAACDTFRSGAVEQLRTHARRLQIPIFEKGYEKDPAIVAKEAIQEAARNGSDVVLVDTAGRMQDNEPLMRALSKLVYLNNPDLILFVGEALVGNDAVDQLSKFNQKLADLSTSPTPRLIDGILLTKFDTIDDKVGAALSMVYVSGAPVMFVGCGQSYTDLKKLNVKSIAKTLLK

SEQ ID NO: 268359 - protein, 43 aa, Glycine max
  Clone ID: PAT_MRT3847_84351C.1.pep
CFQREKVWNANVGVPEIGGIHVFRYELCMHGAKLVCPSRRTRF

SEQ ID NO: 268360 - protein, 45 aa, Glycine max
  Clone ID: PAT_MRT3847_84352C.1.pep
VFLFLPLPVRRATYYMGQAPSFVKYARNPLFKMRWSTCHFESWVT

SEQ ID NO: 268361 - protein, 221 aa, Glycine max
  Clone ID: PAT_MRT3847_84353C.1.pep
VLRKPYVVVFVGVNGVGKSTNLAKVAYWLLQHNVSVMMAACDTFRSGAVEQLRTHARRLQHIPIFEKGYEKDPAIVAKEAIQEAARNGSDVVLVDTAGRMQDNEPLMRALSKLVYLNNPDLILFVGEALVGNDAVDQLAKFNQAHTRYFSDLSTSPTPRLIDGILLTKFDTIDDKVCFVVAGAALSMVYVSGAPVMFVGCGQSYTDLKKLNAKSIAKTLLK

SEQ ID NO: 268362 - protein, 131 aa, Glycine max
  Clone ID: PAT_MRT3847_84354C.1.pep
MLEQSLIFTRGGLILWTCNHLSNALRGSPIDTLIRSCLLEERSGAVSFNYDAPGAEYSLKWTFHNDLGLVFVAVYQRVLHLLYVDDLLAGVKREFSRLYHPQKTAYRDFDEISQQLQIEAESRSENFKKPN

SEQ ID NO: 268363 - protein, 184 aa, Glycine max
  Clone ID: PAT_MRT3847_84355C.1.pep
RVRKLGIRLERLERLEKKVDKPNRVWDQPAPQTKLDFTDHVDGDGDRSADFLAKEQGESMMDKEEILSSDSEVEDDDDDTGKDNMPVAKKKGWFSSMFQSIAGKANLEKSDLEPALKALKDRLMTKNVAEEIAEKLCESVAASLEGKKLASFTRISSTVHTAMEEALVRILTPRRSIDILRDVH

SEQ ID NO: 268364 - protein, 70 aa, Glycine max
  unsure (1)..(70): unsure at all Xaa locations
  Clone ID: PAT_MRT3847_84356C.1.pep
GGSSCECGNGWGGCKRNPDXGYTEXTTTETXAMGAERVKVKLEGAEMGVXVENKGCKXGPNCSCNPCNGK

SEQ ID NO: 268365 - protein, 94 aa, Glycine max
  Clone ID: PAT_MRT3847_84357C.1.pep
MTPNRGPLSPPNDLRPSHVISLPLHNAPHTRPTNQHTNHIPMMARCNTRKHIPRPPHTTCPKRPSIRDNPIYYLRSFFLRRFFLSLLPLQPSPY

SEQ ID NO: 268366 - protein, 464 aa, Glycine max
  unsure (1)..(464): unsure at all Xaa locations
  Clone ID: PAT_MRT3847_84358C.1.pep
MEDNAFLLLFYVGRRNWKLLMSPLLLVLLLLSPLASPFSEEGQALMAMKASFGNMADTLLDWDDAHNDDFCSWRGVFCDNVSLTVVSLNLSSLNLGGEISPAIGDLGNLQSIDLQGSKLTGQIPDEIGNCAALVHLDLSDNQLYGDIPFSLSKLKQLEFLNLKSNQLTGPIPSTLTQIPNLKTLDPARNRLTGASARILYWNEVLQYLGLRGNMLSGTLSRDICQLTGLWYFDVRGNNLTGTIPDNIVNCTSFEIRDISYNQITGEIPFNIGFLQVATLSLQGNRLTGKIPEVIGLMQALAILDLSENELVGSIPPILGNLTFTGKLYLHGNMLTGPIPPELGNMSKLSYLQLNDNGLVGNIPNEFGKLEHLFELNLANNHLDGTIPHNISSCTALNQFNVHGNQLXSGSIPLSFRSLESLTCLNLSSNNFKGIIPVELGHIINLDTLDLSSNNFSGHVPASVG

SEQ ID NO: 268367 - protein, 174 aa, Glycine max
  unsure (1)..(174): unsure at all Xaa locations
  Clone ID: PAT_MRT3847_84359C.1.pep
MAQSLELLLIQFLMPDNDARRQAEDQIKRLAKDPQVVPALVQHMRTVKTPNVRQLAAVLLXGEWPDLLPFLFQCSQSSQDDHREVALILFSSLTETIGNAFRPYFANLQALLLKCLQDETSNRVRSAALKAXGSFLEXTHDEDEVIKFREVIPSILNVSRQCLASXEEDVHTCF

SEQ ID NO: 268368 - protein, 57 aa, Glycine max
  unsure (1)..(57): unsure at all Xaa locations
  Clone ID: PAT_MRT3847_8435C.1.pep
VGXLLLFLLXFLRLVXRXGSVVXPCCVLXRRRFRXSFSGLGVAAXALCVSCVVPVAP

SEQ ID NO: 268369 - protein, 247 aa, Glycine max
  unsure (1)..(247): unsure at all Xaa locations
  Clone ID: PAT_MRT3847_84360C.1.pep
MAQSLELLLIQFLMPDNDARRQAEDQIKRLAKDPQVVPALVQHMRTAKTPNVRQLAAVLLRKKITGHWAKLSPQLKQLVKQSLIETITMEHSPPVRKASANVVSIVAKYAVPSGEWPDLLPFLFQCSQSSQDDHREVALILFSSLTETIGNAFRPYFANLQALLLKCLQDETSNRVRVAALKAVGSFLEFTHDEDEVIXSFREFIPSILNVSXGSALPQEKKDVAILAFEIFDELIESXVPLLRFSE

SEQ ID NO: 268370 - protein, 103 aa, Glycine max
  Clone ID: PAT_MRT3847_84361C.1.pep
KWQHLNFFCQNPFFYKCYINPICWGFWFLKLCKGFCCAYNYMCITSRVLLLFLYTTYLSCIFKKKVKLLCRFIFGVFKVLKRLSLLKSELVFNLRNTSFCAVG

SEQ ID NO: 268371 - protein, 119 aa, Glycine max
  Clone ID: PAT_MRT3847_84362C.1.pep
KTEYRNLDRLLSPDPAEIRSLKIYGRVRYIDGDYLQINCRRLTMKLSLAECLLRYENLGIARSTMQTGYHWDHLVAAEATLTRVHAAQQNDDVPPINAVPATLEAELQIGHEESAILQD

SEQ ID NO: 268372 - protein, 124 aa, Glycine max
  Clone ID: PAT_MRT3847_84363C.1.pep
RAPRVSPFCFRVVFFLEFVTVNHFHPGPVFGLVFARLYFASILENLVPLPAGVGISRLNPGFPEGLGDPLGGFRFLSPAENLKTFPKFWVWVFFFIERTLDLGWRGPFQLGNLGKGAFFFFFSK

SEQ ID NO: 268373 - protein, 49 aa, Glycine max
  Clone ID: PAT_MRT3847_84364C.1.pep
KIKVVNLIFNMDGDEMTMVIWNSVIDKLIVTLLELDMKYYDIRLAYCDE

SEQ ID NO: 268374 - protein, 53 aa, Glycine max
  unsure (1)..(53): unsure at all Xaa locations
  Clone ID: PAT_MRT3847_84365C.1.pep
XTXSVEXSEFGSHXXXTNXNCXHRTTXXXLMTXXXEQXRPSXQATQASIAXXL

SEQ ID NO: 268375 - protein, 268 aa, Glycine max
  Clone ID: PAT_MRT3847_84366C.1.pep
NTLVPAKIVGTTNYITLHRRGAKHMGMTWNVTCTYSQFLAQKTPSCCVSLSSFYNDTLVPCLTCACGCQSNSSQSGTCVDPDTPHLASVVAGSGKNNFSPLVQCTHHMCPVRIHWHVKLNYKEYWRVKVTITNYNYRMNYSEWNMVVQHPNFDNLTQLFSFNYKSLTPYGSINDTAMLWGVKFYNDFLNQAGPNGNVQSELLFRKDKATFTFDKGWAFPRRVYFNGDNCVMPPPDSYPWLPNAGARQEVSLFSLVIASLVALVFYAHA

SEQ ID NO: 268376 - protein, 111 aa, Glycine max
  Clone ID: PAT_MRT3847_84367C.1.pep
APRVSCPVRFLFAVCFWRPVVWCVFSRPAGWSRAGCGLLPCGCAGACFLLSPSAPAGSSRPVLFSVSGLAALLVWFLACAWVGGAPCSAPLALCSRGVLWRRVGRSGFRPV

SEQ ID NO: 268377 - protein, 93 aa, Glycine max
  Clone ID: PAT_MRT3847_84368C.1.pep
PRHSKGGFYFKHPIQNHRQHRTAQKDPPRILFGGGATTDRNLQGEGDKGKNQVQKGRAIKHSPKLKFPDNPMQIAKIYARAKISKITDSRHAS

SEQ ID NO: 268378 - protein, 63 aa, Glycine max
  Clone ID: PAT_MRT3847_84369C.1.pep
HGRLHRRLVHPDELQAIAAGANTLHDNHEDTTDTHRAHMRKVIYDMALTSTENAHMLVLHDHH

SEQ ID NO: 268379 - protein, 117 aa, Glycine max
  unsure (1)..(117): unsure at all Xaa locations
  Clone ID: PAT_MRT3847_8436C.1.pep
GRLVATMTAHLMDITRSVATASGCSFLGELYRTWSDQCKATQMIXRDILMLMDRSYIPSTQKTRIXTGLNLWKENVXYSMQIMTXRLLNTLLELVHSERTREAIARRMMRNMTQMPM

SEQ ID NO: 268380 - protein, 266 aa, Glycine max
  Clone ID: PAT_MRT3847_84370C.1.pep
ARNSARGSKKDGRSGIMAADEAATAEAAAVMRMEMERELEEKVKRAEVAKSGSLVFCAGEAQVYTLDQLMKGSAELLGRGCLGTTYKAVLDSRLMVTVKRLDAGKMASHATKEVFERHMESVGGLRHPNLVPLRAYFQAKHERLIIYDFQPNGSLFSLIHGSRSSRARPLHWTSCLKIAEDVAQGLAFIHQAWRLVHGNLKSSNVLLGPDFEACITDYCLSVLTHPSIFDEDGDSAAYRAPETRNPNHHPTHKCDVYAYGILCLSF

SEQ ID NO: 268381 - protein, 709 aa, Glycine max
  Clone ID: PAT_MRT3847_84371C.1.pep
MSNPKSESVVSEPSASEPSIPISYPIKTLEDLESRSYFESFHYPFNKASSSVNNSSSSSLPNRRRLLVCHDMAGGYLDDKWIQGGTNPDAYAIWHWHLIDVFVYFSHSLVTLPPPSWTNAAHRHGVKVLGTFITEWDEGKAVCDTLLSTKETAHMYAERLAELAADLGFDGWLINMEVNLDLGQISNLKEFVEHLSLRMHSSVPGSLVIWYDSVTLDGKLNWQDQLNEHNKPFFDICDGIFVNYTWKEDYPRLSAAVASDRKFDVYMGIDVFGRNTYGGGQWNVNVALDVIRKNDVSAAIFAPGWVYETKQPPNFETAQNSWWGLVEKSWGILQKLPGVLPFYTNFDQGRGYHISVDGDNVSDATWCNISCQGFQEASYSGGGNITFKGSLEEQTYYESKIFQGEFLLTNLPIHFIYSVKSDGNSSLGLKLEFTSGDQRASVLLTSRAVNRFSSKFSKVIMTREHKGLSSGWVINEGVVAMNGYTLTEIHAACYRSNGNDETVASPSDYFALLGHITIKTSDYKSDFPVSSSWLVDGSYIKWTSDPLGSKTLDLKISWKLKNGQNFLFLKYNVYLVKLSKQADGNPGTTLEDVKEYLGVAQVNCFYVSDLEVPSDTSSLKFIIQACGVDGTFQELDESPYYQLEGMNPKELASRAANLQQEEEDTELPCCLFLVSYHFPPSSKTPCPQGVGRSNYSFQKQYRGPKEHGG

SEQ ID NO: 268382 - protein, 58 aa, Glycine max
  Clone ID: PAT_MRT3847_84372C.1.pep
AHNSTTQLLVGLGGGDKGGSVRIKGPGSLMLWPVLLLGGMGDISPPEDNFPYWAMWGP

SEQ ID NO: 268383 - protein, 693 aa, Glycine max
  Clone ID: PAT_MRT3847_84373C.1.pep
MSNPKSESVVSEPSASEPSIPISYPIKTLEDLESRSYFESFHYPFNKASSSVNNSSSSSLPNRRRLLVCHDMAGGYLDDKWIQGGTNPDAYAIWHWHLIDVFVYFSHSLVTLPPPSWTNAAHRHGVKVLGTFITEWDEGKAVCDTLLSTKETAHMYAERLAELAADLGFDGWLINMEVNLDLGQISNLKEFVEHLSLRMHSSVPGSLVIWYDSVTLDGKLNWQDQLNEHNKPFFDICDGIFVNYTWKEDYPRLSAAVASDRKFDVYMGIDVFGRNTYGGGQWNDMCYFAFLGNYLNVVYVLSLFSWMSQVNVALDVIRKNDVSAAIFAPGWVYETKQPPNFETAQNSWWGLVEKSWGILQKLPGVLPFYTNFDQGRGYHISVDGDNVSDATWCNISCQGFQPLLESSDPTNSIQVSVDLKEASYSGGGNITFKGSLEEQTYYESKIFQGEFLLTNLPIHFIYSVKSDGNSSLGLKLEFTSGDQRASVLLTSRAVNRFSSKFSKVIMTREHKGLSSGWVINEGVVAMNGYTLTEIHAACYRSNGNDETVASPSDYFALLGHITIKTSDYKSDFPVSSSWLVDGSYIKWTSDPLGSKTLDLKISWKLKNGQNFLFLKYNVYLVKLSKQADGNPGTTLEDVKEYLGVAQVNCFYVSDLEVPSDTSSLKFIIQACGVDGTFQELDESPYYQLEVEDP

SEQ ID NO: 268384 - protein, 414 aa, Glycine max
  Clone ID: PAT_MRT3847_84374C.1.pep
MASRNLDEALARLDDAMHSMNRHLNPFFTRHAPVPFPPTSKSPPVPHQATFAPATPWFAPSPFEDPVGALFKLTQTGSVLTYLLEFEALASRIIGLPGTFLLPCFISGLQPEIRRTVQAHQPTTVDQAAGLAKLLEQQTSSRPRTPPLVAPPSAPLVPPHIATLPPLLPSPPRPPQAPTISCLTPEELASRHEHGLCLTGEEKLHGGRREVSRVLPFIVVNEEPTDPLGPNIKHPDPQLPTPGSTGLDPKPIPDPDPKPTPDPRPKPTHDPAAHPTPKPDPAQIGLKSLSGDFTPGILRLAGLLSGIRVVLLVVGRSPHTFFQPPLSISLSLPCWTAPTLFRVMFLPHGYFVELQVRRNEPWDPGIAFGSCSLNAQHLEDKVFLMRAGNDRIPEIGNKEAGTEKAMVTISKPEV

SEQ ID NO: 268385 - protein, 52 aa, Glycine max
  unsure (1)..(52): unsure at all Xaa locations
  Clone ID: PAT_MRT3847_84375C.1.pep
VRXQSLAGDSVPVLCVKNGNSFVGGAVXVPPPFFGILHSQXEYDPARRLERP

SEQ ID NO: 268386 - protein, 259 aa, Glycine max
  Clone ID: PAT_MRT3847_84376C.1.pep
MDLGVSDEMLGTFVPIVVYWIYSGIYVDLGLFAENYRLHSKQEEDEKNLVSKGAVVKGVLLQQLVQAVVATLLFALTGSDGQNTTSQNTSLLVLARQFVTAMLIMDAWQYFMHRYMHHNKFLYKHIHSLHHRLIVPYSYGALYNHPIEGLLNDTVGGALSFLLSGMSPRASIFFFSFATIKTVDDHCGLLLPGNLFHIFFKNNSAYHDVHHQLYGNKYNFSQPFFVMWDKILGTYMPYTLEEREGGGFETRPCKDYKDD

SEQ ID NO: 268387 - protein, 73 aa, Glycine max
  Clone ID: PAT_MRT3847_84377C.1.pep
RADSARARAVKRSKPRFYALYPIFLLLNFPLFKVENHIFIDLHLLGCFFFFLTFFFFFQFSLWNRKTLRGLRR

SEQ ID NO: 268388 - protein, 214 aa, Glycine max
  unsure (1)..(214): unsure at all Xaa locations
  Clone ID: PAT_MRT3847_84378C.1.pep
MNDGCFPRVDYNKRDDIVEFSGCTSFCQSCNIQISETGGTSTSQLTCPQCSNNYKGISSSQSVPLVLSASDDRLGPTANGNQLFGMEDHHFVSRACANFTYVNNISSSCVDGVGSAVMEEPHDILKGTSKLVPVNNFGCGSDAKQTCNPTAEKTNVHTEKEGSGSLCYEPPRFPSLDIPFFSCDLVQSGSDMQQXEFSPLGIRQFKMSSMNWLT

SEQ ID NO: 268389 - protein, 96 aa, Glycine max
  Clone ID: PAT_MRT3847_84379C.1.pep
CRGVGSSSTAEQVIEGIDASNLTAIITGRASVIWLETARVLAILKAHVIIAARNMESAKEAKQLILEEDESSRVDIMKRDLCSLKSFRTFVDNFIT

SEQ ID NO: 268390 - protein, 75 aa, Glycine max
  Clone ID: PAT_MRT3847_8437C.1.pep
RTSSSFLALFLIMLHFEVSFFAFSLQVEDVSHLAGLLASGVKVQEGVEIMEMAEPMAVVVTLMAGENMVIGMAIG

SEQ ID NO: 268391 - protein, 41 aa, Glycine max
  Clone ID: PAT_MRT3847_84380C.1.pep
TRFTRRPPGYDTQLAVRQYTGGSKAETPMPVTRKNLRKGLV

SEQ ID NO: 268392 - protein, 140 aa, Glycine max
  unsure (1)..(140): unsure at all Xaa locations
  Clone ID: PAT_MRT3847_84381C.1.pep
SFNSMVSTTYQDQRTTXSIQVVESERRLTDDCLLLGKFDLSGIAAPSMGAPQIEMTCEVDAFGILYVNAQDKGTGQSYXISITIKYGRTRQIKIVRMVRKAXETADEYDNVTERIHARTSLETYVYIMKNEINDTDTLAD

SEQ ID NO: 268393 - protein, 41 aa, Glycine max
  unsure (1)..(41): unsure at all Xaa locations
  Clone ID: PAT_MRT3847_84382C.1.pep
MAKEKGQINIVGVGPGDPEEATTINEMNKTVVXKEAPAHAI

SEQ ID NO: 268394 - protein, 108 aa, Glycine max
  Clone ID: PAT_MRT3847_84383C.1.pep
CIVRLLFVSGIGREGGFQMWLTAAMKMRFQRRLKLLGTQRGMEVVRWFVVIWRFPFAKDFKRVRVWLDLKKKKIDLDLNLDLFLESNIMNLDLFLESYVFFFLSISQI

SEQ ID NO: 268395 - protein, 77 aa, Glycine max
  Clone ID: PAT_MRT3847_84384C.1.pep
GGGKQYLLRAEFRLPSITDEEATPERKAPIRVKFEIPYFTVSGIQVRYLKVIEKSGYQALPWVRYITMAGEYELRLI

SEQ ID NO: 268396 - protein, 74 aa, Glycine max
  Clone ID: PAT_MRT3847_84385C.1.pep
ADLSPPLAGTRAWGRGPPSGWSYPPWRPCPCSWWDNYICNLKLKLNKGWHDSHHLKKHPPTTKLRKGVFKLNYK

SEQ ID NO: 268397 - protein, 56 aa, Glycine max
  unsure (1)..(56): unsure at all Xaa locations
  Clone ID: PAT_MRT3847_84386C.1.pep
QCFTXQRRNFISRLGSLVKPLALRESPSPLKKCRPGSKYQLDKNSFQFESSQVTYM

SEQ ID NO: 268398 - protein, 282 aa, Glycine max
  Clone ID: PAT_MRT3847_84387C.1.pep
LPSHTSPNSQTKLCLFFSVRHSLFRRSGGRIAGDSPLCFSLHPSIQPSRLRFTDSLFENASDRLLGFSFSQISVSERTLYLFFLRLINFLVMAIRVTFSFSGYVAQSLASSAGVRVANSRCVQECWIRTRLFGGATQKTDLDSSAGGGVRNFRQAQLLGPVHLLEPRRGISRRRLQQEPNHLGPDFDHEVTVGCVWVICGICKTVNKYLKICRSYMAEGQLFPIYNLSVEIIYLLIQNPMILFKMYIRLQFEDVGKRSTHCDYKKGLKMKRENESFSQSKQI

SEQ ID NO: 268399 - protein, 249 aa, Glycine max
  Clone ID: PAT_MRT3847_84388C.1.pep
LVESVNILYGQIIRSDVVGALKMRTYLSGMPECKLGLNDRVLLEAQGRTTKGKSIDLEDIKFHQCVRLARFENDRTISFIPPDGSFDLMTYRLSTQVKPLVWVEAQVEKHSKSRIEIMVKARSQFKERSTATNVEIELPVPADATNPNVRTSMGSASYAPEKDALIWKIRSFPGGKEYMLRAEFHLPSITDEEATPERKAPIRVKFEIPYFTVSGIQVRYLKIIEKSGYQALPWVRYITMAGEYELRLI

SEQ ID NO: 268400 - protein, 383 aa, Glycine max
  Clone ID: PAT_MRT3847_84389C.1.pep
YYGTSKDLVALDLLRKLLRSREDQHHVPGLLMASKICCENSTLAEEGVSFAWQVLQNLDGRCNQLENHANFFLGVSLSAHSKLAVSDSDRFKRQSEALQALETAGRTGNPFVLYHLSLEYAEQRKLDAAFYYAKCFLKLEGGSNVKGWLLLARILSALKQFLDAESIINTALDQTGKWDQGDLLRTKAKLQIAQGQLRNAIETYTQLLAVLQIQSKGFGSGKKLYKVSVDPVCCCNNLCWLFLPHVYISLLQWHDAEVCLSKSKAIKPLSASRCHAIGIMYEAKGHYKEALKAFGDALDIDPGHVPSIISTAVVLKRCSNKSNPAVKSFLMDALRHDRFNASAWYNLGLLHKAEGTASSLVEAAECFQAAHFLEESAPVEPFR

SEQ ID NO: 268401 - protein, 219 aa, Glycine max
  Clone ID: PAT_MRT3847_8438C.1.pep
MHPYNRLPSSGHSTPSPPPSPLRSPRLRHAGRSKAGRFSPSRGSGRTAAQRLSWMFLSVLLRRQGVFLFAPLIYISGMLLYMGTASFDVVPVIKHRPAPGSVYRSPQLFAKLRLDMDSDNSSADAISTIWKYPYRGGEWKPCVNRSSEDLPESNGYIYVEANGGLNQQRTSVCNAVAVAGYLNATLVIPNFHYHSIWKDPSKFRDIYDEGVFVNTLKND

SEQ ID NO: 268402 - protein, 157 aa, Glycine max
  unsure (1)..(157): unsure at all Xaa locations
  Clone ID: PAT_MRT3847_84390C.1.pep
SLFQVKPLVWVEAQVEKHSKSRIEIMVKARSQFKERSTATNVEIELPVPADATNPNVRTSMGSASYAPEKDALIXKIRSFPGGKEYMLRAEFHLPSIVDEEATPERKAPIRVKFEIPYFTVSGIQVRYLKIIEKSGYQALPWVRYITMAGEYELRLI

SEQ ID NO: 268403 - protein, 57 aa, Glycine max
  Clone ID: PAT_MRT3847_84391C.1.pep
LRHKCINGHAINHRKKWQDTLCILTQKTHTTTYDQSITYYMATNSRGSQHLIITEKP

SEQ ID NO: 268404 - protein, 582 aa, Glycine max
  unsure (1)..(582): unsure at all Xaa locations
  Clone ID: PAT_MRT3847_84392C.1.pep
TTTEEKDILNGITGSVNPGEVLALMGPSGSGKTTLLNLLGGRLSHPISGGSITYNDXPYSKFLKSRIGFVTQDDVLFPLLTVKVTLTYAARLXLPKAYTNEQKEKRALSVIYELGLESVDDTMICGTFVRGVSGGERNFVXIGNEIIMNPSLFFLDLRHSGMNSNSASXSNWCFVSIKNFXMIMPTTIHQPSSRLFHKFDKLILLGKGSLLYFGKASEAMTYFQSIGCSPLISMNPAEFLLDLANGNINDVSLPSELEDKVQMGNAEAETQNGKPSPAVVHEYLVEAYETRVAETEKKRLMVPIPLDEALKSKVYSHKRQWGASWDEQFSILFWRGIKERRHDYFSWLRITQVLSTAVILGLLWWQSDAKTPKGLQDQAGLLFFIAVFWGFFPVFTAIFTFPQERAMLTKERTTDMYRLSAYFVARTTSDLLLDLVLPVFFLLVVYFMANLRLGSGRFFFSILTVFLCIIAAQGLGLAIGATLMDLKRATTLASVTVMTFMLAGGFFVQRVPIFFSWIRYMSFNYHTYKLLLKVQYEHISPVINGIRIDSGATEVAALIAMVFGYRFLAYLSLRRMKLQSGA

SEQ ID NO: 268405 - protein, 76 aa, Glycine max
  Clone ID: PAT_MRT3847_84393C.1.pep
PRLRFGLRRLERFVARDVGEKSTEPYYLKEGEWIDSSTAPYIYKSSFPSLISLLFFQSFFFYFVTFLPLSIIQHNN

SEQ ID NO: 268406 - protein, 47 aa, Glycine max
  Clone ID: PAT_MRT3847_84394C.1.pep
WSFAPARLHYQSERVSVRSIHIVQRIYQSQLGTIEHKVLFICKVQEQ

SEQ ID NO: 268407 - protein, 37 aa, Glycine max
  Clone ID: PAT_MRT3847_84395C.1.pep
AKLYESGARIAKWRAGLKNGPNEPFELSIHENGYCLG

SEQ ID NO: 268408 - protein, 108 aa, Glycine max
  Clone ID: PAT_MRT3847_84396C.1.pep
PGLEIHYGQSKVLACTVRPGSRVVAQSNSFVRAKHMLPLIIPSTPNALAAKRGIKIKGPGQILSDRYQRCRIDPRNIQSSPCVMRGRRDLNVRRCRSLVTLVVTQPTT

SEQ ID NO: 268409 - protein, 37 aa, Glycine max
  Clone ID: PAT_MRT3847_84397C.1.pep
IAITRSQHQETQTFALSISRNVTVSLTNIVFIDAVPS

SEQ ID NO: 268410 - protein, 102 aa, Glycine max
  Clone ID: PAT_MRT3847_84398C.1.pep
DPNKRYRRDEYGKEERERVMSRTNVQNEAPFSKHNKPNDPIQLPSSLSYFQGETLHRSAVINCRPRGMVACREKSIPMDPCGTRFLSYAYQLFITIISFLPF

SEQ ID NO: 268411 - protein, 84 aa, Glycine max
  Clone ID: PAT_MRT3847_84399C.1.pep
HRSIIVATLVDTQRRGTTESSSTPGSEFQSADDDPTRHDPTYTVAATRLSVAMIAEVEIHELDAQDEASYATVRRERMVSLHSY

SEQ ID NO: 268412 - protein, 46 aa, Glycine max
  Clone ID: PAT_MRT3847_8439C.1.pep
DHAKRVKEIDMLPTPTPIQSLLGSQRFCEDKGKSLNFFVYIINIFH

SEQ ID NO: 268413 - protein, 184 aa, Glycine max
  Clone ID: PAT_MRT3847_843C.1.pep
SMNPRLGDFGLAKLMDHDKSPVSTLTAGTMGYLAPEYLQCGMANEKTDVFSYGVVVLEVACGRRPIEREGQKMVNLVDWVWGLHSQGTIIEAADKRLNGDFREGEMKRLLLLGLSCANPDSAQRPSMRRVLQILNNNQGVALVVPKEKPTLTFSSGLPLSLDEIVFDAEEELDSGQVVCEIKID

SEQ ID NO: 268414 - protein, 245 aa, Glycine max
  Clone ID: PAT_MRT3847_84400C.1.pep
ANVYKFNSSDFKNALFLHKVIILRSCLFGPPTICSSLQLLPCNSLVWSNFRIQTIHNAVEDSNDNVNTDNISSHLTGGVLNLDGHSGKILKVSLHPCTCKVQFAASLDSNGLLLFWSLSNISNCILGCPTLVPTMELCGKLATQDSCSLYTSLKWAPSILGDKLVFFMGHTRGIDCFIVNICQSEEENIECHYLCTIPFSGHGPYEDGPFDIFTIPLNSTCDKTFRNNKLMLLAIWMGRFQALSW

SEQ ID NO: 268415 - protein, 80 aa, Glycine max
  unsure (1)..(80): unsure at all Xaa locations
  Clone ID: PAT_MRT3847_84401C.1.pep
RFSNGPFPVPPLWLPRLGSIPLSGRRVFXPPAFFSPXPCVXNQKELPLSPPCXXXAPHKCWVRALLXALGPFXPWGALVC

SEQ ID NO: 268416 - protein, 56 aa, Glycine max
  Clone ID: PAT_MRT3847_84402C.1.pep
SFPVSMKYFKVRVQIYRKFITATVRKIFKFVFVFVTLYRSIIMVGYLNRIFVFYVL

SEQ ID NO: 268417 - protein, 89 aa, Glycine max
  unsure (1)..(89): unsure at all Xaa locations
  Clone ID: PAT_MRT3847_84403C.1.pep
EPCLEPGGHTIECISSIEWQAEKPLVIEEVXEVAPPYDXEIRLKIXLYTSLCHTDCYFLRMRKGQTHIANLSFPGHEPCEIGDERKAMV

SEQ ID NO: 268418 - protein, 63 aa, Glycine max
  Clone ID: PAT_MRT3847_84404C.1.pep
KIIGSAVGFQTVACTPLEQGRILSVAGNSILGSTKEVGKSSGGSQLVFCVSVDVSNKTVKGAY

SEQ ID NO: 268419 - protein, 57 aa, Glycine max
  Clone ID: PAT_MRT3847_84405C.1.pep
LMILTSLLFSQINNILNQVGYSQPNTTLSTINRLIIYQIPKESRRPFKPLLSIPPNR

SEQ ID NO: 268420 - protein, 127 aa, Glycine max
  Clone ID: PAT_MRT3847_84406C.1.pep
TTTQQQRFKEAPKFYNSPTCATLRHHPNPNHTCPDNAVHVAMTLDVSYLRGSMAAILSVLQHTSCPENVIFHFVTAASKSFSAAKLNQTLTTSFPYLNFQIYPFDDDAVSRLIFTSIRSALDCPLNY

SEQ ID NO: 268421 - protein, 179 aa, Glycine max
  Clone ID: PAT_MRT3847_84407C.1.pep
MPILCKPVYIVVTSFYVYVLQFSDCLAYEEEHHSSSHKSTNNKVYKVNLQKTSDIAVHGLLLWASTGFLMPLGILIIRGSIKAEPGSRRSIVLFYLHVGFQMLSVLLATVGAAMSLKKFENSFDNSHQKLGLALYGAILVHGLIGFFRPHMGKKERSYWYLLHWILRTIIFLVGIINIY

SEQ ID NO: 268422 - protein, 121 aa, Glycine max
  Clone ID: PAT_MRT3847_84408C.1.pep
TFTPQVWRPCSPPFFFWFPAPSVFLRKPYQSPPSLLFFGTFLKMSAPPPPPFVGGTPGPPPPGGSPPFRGGFFPPGRGRPSSSFFFFGLNIGTRILSSSPLASQTKKKKEKKTIKKKPYPH

SEQ ID NO: 268423 - protein, 81 aa, Glycine max
  unsure (1)..(81): unsure at all Xaa locations
  Clone ID: PAT_MRT3847_84409C.1.pep
LAHXVQXXTYLLXSQFNGVLSHCEGXXXPXXSSPGXXFXPAIRLTXGLSXTNAMXXYXXRDDEXXTTSIVXPXGLXLKXXA

SEQ ID NO: 268424 - protein, 40 aa, Glycine max
  Clone ID: PAT_MRT3847_8440C.1.pep
LLDKSLCNSHNIVKIKPPPKKVALPVDLKKRAFLGGHCYF

SEQ ID NO: 268425 - protein, 54 aa, Glycine max
  Clone ID: PAT_MRT3847_84410C.1.pep
SCNCSKGRTISMFIYPKAKGGEALIDLPALPHNNRHFVYLDSTFIPFLKNYLSL

SEQ ID NO: 268426 - protein, 60 aa, Glycine max
  Clone ID: PAT_MRT3847_84411C.1.pep
LATPQAEPKAVTTAITIAIMHIYTHIAYTNPSNIQSDINNDLNNHFDNREDKRNNLWITF

SEQ ID NO: 268427 - protein, 109 aa, Glycine max
  unsure (1)..(109): unsure at all Xaa locations
  Clone ID: PAT_MRT3847_84412C.1.pep
SSGSTPLLSPPIYXKNCPSLCFGSPRFLYLIPSLCGFIPAHLASKSTSLLCIVAPFEISVVLFPDNIRSNLPFRDTIELWEEEEDDGHNKAESFVVSWGFAVGVLCRLV

SEQ ID NO: 268428 - protein, 768 aa, Glycine max
  unsure (1)..(768): unsure at all Xaa locations
  Clone ID: PAT_MRT3847_84413C.1.pep
IRLEDALGLWLTSIICEIWFAFSWILDQFPKWFPIDRETYLDRLSIRYEREGEPNMLAPVDVFVSTVDPMKEPPLVTANTVLSILAMDYPVDKISCYISDDGASMCTFEALSETAEFARKWVPFCKKFSIEPRAPEMYFSXEVDYLKDKVQPTFVKDRRAMKREYEEFKVRINSLVAKAQKVPQGGWIMQDGTPWPGNNTKDHPGMIQVFLGSSGGLDTEGNQLPRLVYVSREKRPGFQHHKKAGAMNALVRVSAVLTNAPFMLNLDCDHYVNNSKAAREAMCFLMDPQTGKKVCYVQFPQRFDGIDTHDRYANRNTVFFDINMKGLDGIQGPVYVGTGCVFRRQALYGYNPPKGPKRPKMVSCDCCPCFGSRKKYKEXENDANGEAASLKGMDDDKEVLMSQMNFEKKFGQSSIFVTSTLMEEGGVPPSSSPAALLKEAIHVISCGYEDKTEWGLELGWIYGSITEDILTGFKMHCRGWRSIYCMPKRAAFKGTAPINLSDRLNQVLRWALGSIEIFFSRHCPLWYGYKEGKLKWLERFAYANTTVYPFTSIPLVAYCVLPAVCLLTDKFIMPPISTFAGLYFVALFSSIIATGILELKWSGVSIEEWWRNEQFWVIGGVSAHLFAVIQGLLKVLAGIDTNFTVTSKATDDEEFGELYTFKWTTLLIPPTTILIINIVGVVAGISDAINNGYQSWGPLFGKLFFSFWVIVHLYPFLKGLMGRQNRTPTIVVIWSVLLASIFSLLWVRIDPFVLKTKGPDTKLCGINC

SEQ ID NO: 268429 - protein, 47 aa, Glycine max
  Clone ID: PAT_MRT3847_84414C.1.pep
SLILITVSVKSIFYFEFAYSVSQFFQDTLFFEIGVAASSPLVPLSLC

SEQ ID NO: 268430 - protein, 127 aa, Glycine max
  Clone ID: PAT_MRT3847_84415C.1.pep
NFTVTSKATDDEEFGELYTFKWTTLLIPPTTILIINIVGVVAGISDAINNGYQSWGPLFGKLFFSFWVIVHLYPFLKGLMGRQNRTPTIVVIWSVLLASIFSLLWVRIDPFVLKTKGPDTKLCGINC

SEQ ID NO: 268431 - protein, 186 aa, Glycine max
  Clone ID: PAT_MRT3847_84416C.1.pep
FGSRKLLILSLDGFECSPQLESLFYRLQSEANGHENVVNNGFSSESNGHGATGRCQRVFRDILASEKFSSLCKVLLENFRGMKPETVFDFSLINSRMKGQAYEQSPTLFLSDFQQVWRKLQNTGNQIVAMARSLSNMSKASFCEQVGISAQSSFEDEKQVIPNPLIPLPLFYATCSRDYYFFIVIS

SEQ ID NO: 268432 - protein, 110 aa, Glycine max
  Clone ID: PAT_MRT3847_84417C.1.pep
VLLFLFFNYCVSHLWRGFLCDAGGSSMFFLFHDSVSFSFPSAADGVKSFLPPKFFSFHCITSSIYFSLSLSHPTVTISIGCLFSAQEGFLPKSSFFYRNGRFEVKRFHIC

SEQ ID NO: 268433 - protein, 700 aa, Glycine max
  Clone ID: PAT_MRT3847_84418C.1.pep
METEGGNGVAEGEVWTLKNGVINSGVAIADGSAAAEDGEVSGSKNEVNGVAFADGNGVTEHGEVWGSKNEAVNNEVAIVDGNGVAYGGEVHGSKNGAVNNEVVIADGNGVTEGQEDHCLKNETVNNVVANADEGNSGAVECFQTYKRRKHAKSSSEFKVQENSRKHMGAASQLLAVRKPFDLAVGNTSKDHSHDHWGNVVLKHLYHSLGNDNGGMKWCIREALMSCPKISCAPTMKETLKIVKDGQECSPQLESLFYRLQSEANGHENVVHNGFSSESNGRDTTEGCQRVFRDILASEKFSSLCKVLLENFQGTKPETVFDFSLINSRMKGQAYEQSPTLFLSDVQQVWRKLQSTGNQIVAMARSLSNMSKASFCEQVGISAQSSFEDEKEVLCNQESISHMKPEQTVECVAFRLGTCWHCGDKADGTDCLVCDSCEEMYHLSCIEPAVKEIPYKSWFCANCTANGIGCRHKNCVVCERLNALKTLDDIVGEENIPTNEETLNELEENSNCTYDGIQISTDRRNSSDCKICKMAVDGEKVKICGHSFCPSKYYHVSCLSSKQLKSYGHCWYCPSCICQVCLTDKDDNKIVLCDACDHAYHVYCMKPPQNSIPKGKWFCIKCEAGIQAIRQARKAYESNKGKVGQNDSKPNEDIDKKWNKKRGRELDNVGGMMDMLITAANTLNSEEDLNAMLIDSKKALT

SEQ ID NO: 268434 - protein, 125 aa, Glycine max
  Clone ID: PAT_MRT3847_84419C.1.pep
VFFDLPQSRGCLSSPISTWTPLTSTTGPARPRCLTYDQTPTDQGQAPSCIRSLPSLENSRSCYDDGHTVFPITGMRRICLRGCALLYLQSLRLATIRTDDHSMLLCEEVVQLQFDTRYEAYSSGV

SEQ ID NO: 268435 - protein, 251 aa, Glycine max
  unsure (1)..(251): unsure at all Xaa locations
  Clone ID: PAT_MRT3847_8441C.1.pep
MESVKPSAVTPRKKLARNFAKVLHVKALIGIASVDGLKNVISDANLKDEGNIGKSKATLNWSESFNEDDDEDLQEREANEALLAKLFASISTVKAAYAELQYAQSPFDPDGIEAADQLLVSELKNLSELKQCYLKKQFDPSPKTAILEAESKELQGVIKTYEIMGKKLESQVRLKDSEIIFLREKLEEANRQNKAIEKRLNQSGQLSGLDNLHIXXLSPSHFITVLRHTVRSIRNFVRLIVDEMRYAGWGR

SEQ ID NO: 268436 - protein, 51 aa, Glycine max
  unsure (1)..(51): unsure at all Xaa locations
  Clone ID: PAT_MRT3847_84420C.1.pep
RHKTINFHNXKKVLSQNLPEGIRMEGXTXXETLDXXYLXLXFTXGGGXXQI

SEQ ID NO: 268437 - protein, 50 aa, Glycine max
  Clone ID: PAT_MRT3847_84421C.1.pep
ELEPEELKPLSPSSISLNPQESTCPDSGPMVSQEECDAIPESCKSNSRAV

SEQ ID NO: 268438 - protein, 213 aa, Glycine max
  Clone ID: PAT_MRT3847_84422C.1.pep
KNHGKEEHRARDLFYALWVPDLFMERVQSNGQWSLFCPSEAPGLTDCWGEKFEELYLQYEREGKAMKVVQAQSLWFEILKSQIETGTPYMLFKDTCNRKSNQQNLGTIKSSNLCTEIIEYSSPTETAVCNLASIALPRYVREKGVPMESHPSKLVGSTGSGNRYFDFDKLAEITALVTTNLNKVIDVNYYPVENAKRSNLRHRPIGIGVQGLV

SEQ ID NO: 268439 - protein, 51 aa, Glycine max
  Clone ID: PAT_MRT3847_84423C.1.pep
QSKSSYHFYYKQHYNLTISHDHFTYNIPISFQYHIIQFISPKSNPYTTTNF

SEQ ID NO: 268440 - protein, 49 aa, Glycine max
  Clone ID: PAT_MRT3847_84424C.1.pep
FSFFFFFVQSKLECPIPRTLLLFILKGNNFIHRTAIFEFMFPVHSQSTM

SEQ ID NO: 268441 - protein, 112 aa, Glycine max
  Clone ID: PAT_MRT3847_84425C.1.pep
TSKLRSRIFFLATRSKGLNPFPVKILFHAPPTLDHAPVSPSIMVLTGGKGLKPPAKKKVPADFYNFLTFPTPLFAEAENLAGGPFRSNGRAFLRKHALFPPASGLFPHLLRG

SEQ ID NO: 268442 - protein, 80 aa, Glycine max
  Clone ID: PAT_MRT3847_84426C.1.pep
NRIVSEGMIPREDMTYAIVRGHDPATFPRQECSNPFYIKKYLMTLRAIYPYAGTCGTFLSHSTCLWREHPVICSRCAQHR

SEQ ID NO: 268443 - protein, 107 aa, Glycine max
  Clone ID: PAT_MRT3847_84427C.1.pep
ILFCFFRKNRVKKTVRVPAISSKVADIPPDEYSWRKYGQKPIKGSPYPRGYYKCSTVRGCPARKHVERASDDPTMLIVTYEGEHRHSIQTAMQENISGGVGLVFEST

SEQ ID NO: 268444 - protein, 100 aa, Glycine max
  unsure (1)..(100): unsure at all Xaa locations
  Clone ID: PAT_MRT3847_84428C.1.pep
LLESVIAATTSAVGKTILHLDPNSFYGSHFASLFFHDLTSYLTSXTPSPPPHPLTLTTSLSSTSSITPLHRRGNRNKTIDLLMKSSAAQYLEFKGIDESF

SEQ ID NO: 268445 - protein, 240 aa, Glycine max
  unsure (1)..(240): unsure at all Xaa locations
  Clone ID: PAT_MRT3847_84429C.1.pep
AWTHLKSIKVALSGAENLILASDPDREGEAIAWHIIEMLQQQGALHDNISLARVVFHEITEKSIKGSLQTPREIDINLVQAYLARRALDYLIGFSISPLLWRKLPGCQSAGRVQSAALSLICDREMEIDEFKPKEYWIVEVQLKKKELRSNKNLTFPAHLTHFDSKKLNQFSITSDTEARDIQSTINSADFHVVSLKXSKSRRNPPTPYITSTLQQDAANSCXFHGKHTMKLAQKLLRGS

SEQ ID NO: 268446 - protein, 82 aa, Glycine max
  Clone ID: PAT_MRT3847_8442C.1.pep
WSRSNCQDLSLGKRMPLSPNETSSNPLPTDEQQRTNGHAVAPAVAGRAPHKPSAAPSRMISSCRVHWHCYLFLLLLLVSALY

SEQ ID NO: 268447 - protein, 42 aa, Glycine max
  Clone ID: PAT_MRT3847_84430C.1.pep
NIKLHIRRKKKALSSPMIYIQHNTISDRVSDWLLIEHIVSTC

SEQ ID NO: 268448 - protein, 164 aa, Glycine max
  Clone ID: PAT_MRT3847_84431C.1.pep
MPCLLLLVFLIQSWAVKAQQVYDRNIFILAGQSNMAGRGGVLNNTGTGIATWDGVVPPQSRPNPSVLKLDAHLTWVEAREPLDADIDSRKTNGVGPGMAFANSVLEKHPDFGLIGLVPCAIGGSNISEWERGKELYFQMIKRAKASLRDGGTIRALLWYQEKPD

SEQ ID NO: 268449 - protein, 164 aa, Glycine max
  Clone ID: PAT_MRT3847_84432C.1.pep
MPSIPLSPLFATLSLWSIICIWLVPSLLELKPSLLHLLVHGVCEIHITYMVDYRSALWFCIYLMWELQMNLHITSLQNGSVLVFDMRQTAGPMKSLVGLTSNPVHTVHALAQTSSLSSGVKTILSASAVGLCQWNIDSEERWTWNISLHLRRPLMVPETDNQGG

SEQ ID NO: 268450 - protein, 84 aa, Glycine max
  Clone ID: PAT_MRT3847_84433C.1.pep
YIFFMQEEKRCPPKKKKNGPQSRGGLPPKPQTKGGKGKHPPPNEKLLLRKGGVRNCRGAEPPLQITNHLFLIKKTRAGGLVNCY

SEQ ID NO: 268451 - protein, 62 aa, Glycine max
  Clone ID: PAT_MRT3847_84434C.1.pep
KKHACVAEQSSQISYLGGVGGLLQPPNSCPSTLYLNLNLFLLHLRGIVNTFTEGSGSGPVSN

SEQ ID NO: 268452 - protein, 73 aa, Glycine max
  Clone ID: PAT_MRT3847_84435C.1.pep
TIAAQEVNNFFVTKQWSLFILNLNQHGRVREVNIKGKGEVSKVNKEWQVRKNNTWEFMEMSGCIVEAMQIGSR

SEQ ID NO: 268453 - protein, 227 aa, Glycine max
  Clone ID: PAT_MRT3847_84436C.1.pep
MAPIEPQSQTCQTADVAIVGGGASALAILLHLIEKGQEGNLFSKIVVFEKSALAGPGLAYSSSCQGTILNMHTDTMGLYQAKPKHFTQWRSTLTGGDFPSREEYGQYLQATWSQAIQQARQIGLGIDVINEEVHDIERLDDGRFELKVESGNRLVTQSAVLALGNFTATINSQLIGLRGFYPSPWPLSKLKMIPSDAPVLIVGSRLSAIDATTFLNENGHRGTITLM

SEQ ID NO: 268454 - protein, 116 aa, Glycine max
  unsure (1)..(116): unsure at all Xaa locations
  Clone ID: PAT_MRT3847_84437C.1.pep
LISPHQXRRRRGRSKRNPTRTTPXHKSRTKTRPEEEEEGAAQHTHTPRQKTRTPPRPSHAAKPEGKNTKRPQRNRQRKTARRRAQKQHADQRTTEKXGNQKAKEPARQRTKRRQEA

SEQ ID NO: 268455 - protein, 45 aa, Glycine max
  Clone ID: PAT_MRT3847_84438C.1.pep
SAWFLNLQRYIEMRWKRFPEFSLIITAVGLFITKYMIYYISSSKN

SEQ ID NO: 268456 - protein, 83 aa, Glycine max
  unsure (1)..(83): unsure at all Xaa locations
  Clone ID: PAT_MRT3847_84439C.1.pep
MATAFKMATTVMXVTDECTNSFMGMKRKMVHRYIVCNIDQKTGLGTVDKVDGPGESYGDLPCLLLNDDWIKAAVDFELVTADN

SEQ ID NO: 268457 - protein, 69 aa, Glycine max
  Clone ID: PAT_MRT3847_8443C.1.pep
DRVGFGWSEEPALRTLGSMTARGARRASMTEKVVRSCLGLIMFGGYHVGVARKKKEKKKKNNGRKGFFS

SEQ ID NO: 268458 - protein, 77 aa, Glycine max
  unsure (1)..(77): unsure at all Xaa locations
  Clone ID: PAT_MRT3847_84440C.1.pep
YLPPGHSSDCGCLYXLTTGCCIHTSELTSVWSMNDQHTYLRMSXNXCMHKGRGCLCSRYPPXYIYHGWRVDSDSESL

SEQ ID NO: 268459 - protein, 70 aa, Glycine max
  Clone ID: PAT_MRT3847_84441C.1.pep
PLALVYAQKAFVELKVREPKKEQWAMFSRFGFFDQPIVPGKGPLETPPDPLDTPVKKNAWAYATNLVPGK

SEQ ID NO: 268460 - protein, 37 aa, Glycine max
  Clone ID: PAT_MRT3847_84442C.1.pep
QHCWHHSIFIFVTVLPPMSTAVGQNAVALSIRDSSRR

SEQ ID NO: 268461 - protein, 102 aa, Glycine max
  unsure (1)..(102): unsure at all Xaa locations
  Clone ID: PAT_MRT3847_84443C.1.pep
TSTNSVIRVKVLVFFGATILKAXQCHTNDMFPLRTNTDYLTLTTXVKNTSCMLAVEAQNIFVFDTIPQQXTXSSKEYIHTEHYTSHYKPFNPQTYFYSTDLE

SEQ ID NO: 268462 - protein, 120 aa, Glycine max
  Clone ID: PAT_MRT3847_84444C.1.pep
HGPAFLYPPGQHQASVTATTNQAGAVNSPNSTSSYNKFHSSVGGSPGTSSTLPVVAPGISFSYPNFSANGSSPYMTIVHNNGYSFPFSTSLGATTAIRGPSPPQATHVLSGPFYSSQMFH

SEQ ID NO: 268463 - protein, 78 aa, Glycine max
  Clone ID: PAT_MRT3847_84445C.1.pep
PASAPTRFPLSAVSTMNPKRAVAVDAVSLRIHPCRKPTTQQPRPNVVSRRVRLRGSRFSRNPQRDAVAIAFSPKPATL

SEQ ID NO: 268464 - protein, 353 aa, Glycine max
  Clone ID: PAT_MRT3847_84446C.1.pep
QALQEERKKVAPETAEAIDQFLVKLRACAKGESAFTFILDDPAGNSFIENPFAPSSDPSLTIKFYERTPEQQSSLGYLVGSTHIEGTHDQAPERGEVTADQVRREPHGSIGATAGHRAIAQSNSSEIAEALFRYTAPEEVMTFPTSCGACAARCETRMFVTNIPYFQEVIVMASTCDSCGYRNSELKPGGRIPEKGKKITLNVKNVNDLSRDVIKSDTASVKVPELDLELASGTLGGIVTTVEGLITKISESLERVHGFTFGDSLDEQRKNKWIDFKARLNKLLSLEEAWTLILDDALANSFVAPATDDLKEDNQLSFEEYERSWEQNEELGLNDIDTSSADAAYESTNTTKT

SEQ ID NO: 268465 - protein, 57 aa, Glycine max
  unsure (1)..(57): unsure at all Xaa locations
  Clone ID: PAT_MRT3847_84447C.1.pep
MTIWNYVVTAHKPTNVTHSCVGNFTSPRDLYLIIAKCTRIXIHLLSPQGLQVILHTF

SEQ ID NO: 268466 - protein, 386 aa, Glycine max
  Clone ID: PAT_MRT3847_84448C.1.pep
LLWQDFEIPPEAQRGSLSTVEGILMRAADELQTLQEERKKVAPETAEAIDQFLVKLRACATGESAFTFILDDPAGNSFIENPFAPSSDPSLTIKFYERTPEQQASLGYLVDSTHIEGIHDETPEGGEAVTADQVRREPHGSIGATAGHRAIAQSNSSEIAEALFRYTAPEEVMTFPSSCGACAASCETRMFVTNIPYFQEVIVMASTCDSCGYRNSELKPGGRIPEKGKRITLNVKNVNDLSRDVIKSDTASVKVPELDLELASGTLGGIVTTVEGLITKISESLERVHGFTLRDSIDEQRKGKWIDFKARLNKLLSLEEAWTLILDDALANSFVAPATDDLKEDNQLSFEEYERSWEQNEELGLNDIDTSSADVAYESTNTTKTE

SEQ ID NO: 268467 - protein, 425 aa, Glycine max
  Clone ID: PAT_MRT3847_84449C.1.pep
MFHWLFGIARNFGFVRGYQQGYIYQQKFSLVNIKLKWVKDRTLDAVVTGQRDLKAAGILVSIIYSSSECCLPIYHLSRHRGQLGLPSDLKLSTFIRRYPNIFNESSFLDSGGSPVPCFSLSPEALELHHEEVNILQQNQLELRDRLCKLLMLTSDRILPLQTIDQLKWDLGLPYDYQHSFVPNHPESFLYVRLPDDRIGLKLLFWDDKLAISELQKNTSLQQKAEDIKNGSLAFPISFTRGFGLKRKCMEWLKDWQKLPYTSPYINASHLDPRTDVSEKRIVGVFHELLHLTLHKQTERKNVSNLRRPLALPQKFTKVFERHPGIFYISKRSDTQTVVLREAYNGQEPVQNHALVQIREEFASLLKKGLLDRSKGVYKKSRHTNLVEGFRKEVCIAKKTNQLSSQDESDSMFSEYDSDGPPQNPC

SEQ ID NO: 268468 - protein, 119 aa, Glycine max
  unsure (1)..(119): unsure at all Xaa locations
  Clone ID: PAT_MRT3847_8444C.1.pep
FHCNGWTFTWGVAARGGTNVCLRNISAYNIYKNISLHHVTHMCCAPIVFNIILEAKPSERIEIKSSVEILTGGAPPPPSLIDKIESLGFHVMHAYGSTEATGPALVLSXAQQWNQLPKV

SEQ ID NO: 268469 - protein, 51 aa, Glycine max
  Clone ID: PAT_MRT3847_84450C.1.pep
KEMVVFLVMGGFEPTNFPFKIHWKKRAKGGLNQTGIKKKKSRLKEIKKIGK

SEQ ID NO: 268470 - protein, 60 aa, Glycine max
  Clone ID: PAT_MRT3847_84451C.1.pep
EIKVIPIVHFTATHTLTKEKKSWCHTRCCLQDFKIMRWSFYLSLPNETAKATGMDHRGNL

SEQ ID NO: 268471 - protein, 65 aa, Glycine max
  unsure (1)..(65): unsure at all Xaa locations
  Clone ID: PAT_MRT3847_84452C.1.pep
MKLKVLVFLVARISVAWQCHVXDMFPRGLTTGHGPRTPEVNGPSLRLLQAPCTTVAFLTLHYHSL

SEQ ID NO: 268472 - protein, 184 aa, Glycine max
  unsure (1)..(184): unsure at all Xaa locations
  Clone ID: PAT_MRT3847_84453C.1.pep
TRPINQRTTDGVEKMLYRLAEPVIFSSLQVANSNVRQNALHLLLDMFPLEDPDATKEEKDTLLDKQFFLLERLLTDDCLEVRIIAVEGSCRILHLXWEVIPSPIITKVMTKIFDDMSHDGCNEVRLSTLNGIIYLLGNPCSTXILKVLLPRLQHLMLDKVLAIRVAAVGSLTTLNDVQIFQFNK

SEQ ID NO: 268473 - protein, 119 aa, Glycine max
  unsure (1)..(119): unsure at all Xaa locations
  Clone ID: PAT_MRT3847_84454C.1.pep
LIIPNESGPLEAAKDGNHKQIVGSQDAGSKGRLGQAXAIPNAEPDAQAQRAEAHFDYHPXRPIAQEGAAHIGESKPGANDPLPTKTKSAETPKEWHQDPPWEKIPKDLTTTERETGRHR

SEQ ID NO: 268474 - protein, 101 aa, Glycine max
  unsure (1)..(101): unsure at all Xaa locations
  Clone ID: PAT_MRT3847_84455C.1.pep
GQKKGKKRWGKKQIRQRAKGPTPEQGGPGGPKTQKNPALNGNFPPPRGGKTQRGKPGPPGEGEKNPGGPGPKXGPKKRGKGDPPKTTQKRPRYFLLFNPRF

SEQ ID NO: 268475 - protein, 78 aa, Glycine max
  unsure (1)..(78): unsure at all Xaa locations
  Clone ID: PAT_MRT3847_84456C.1.pep
EELYSMQRMMSAHESTDNICFXLLSIDIVXLRGAGIALPSKMVLDDKLVWANTQEFFDGNFPXDARLPMKENLLYGQD

SEQ ID NO: 268476 - protein, 89 aa, Glycine max
  Clone ID: PAT_MRT3847_84457C.1.pep
RISHISFSLLFDYLSFKFLFGSNIETRRGLVIIIDNCSEVMSISRSQVGCLLLILLSISVLNHQVLGARYVKEEVEHLLNKSAVWRKSF

SEQ ID NO: 268477 - protein, 113 aa, Glycine max
  unsure (1)..(113): unsure at all Xaa locations
  Clone ID: PAT_MRT3847_84458C.1.pep
MNVESTHEAFKFLENDLLTQQFFEGXCFGLVVSAAVFIAFWIAAFQEIAGVQXFPSSSFPTSVMXPEPFTPPLVQWDLPRKGPHLTFFQARYESLFGSEENHLRICVERLVTC

SEQ ID NO: 268478 - protein, 67 aa, Glycine max
  Clone ID: PAT_MRT3847_84459C.1.pep
KEAMESERERFDLSRPLHLTYALWDHAYHRMSVAASLVQGGYILKRDRQEKREGKNALAPPWWTFFH

SEQ ID NO: 268479 - protein, 84 aa, Glycine max
  Clone ID: PAT_MRT3847_8445C.1.pep
KNEFNLVGPIQAPQSIPNGARLVFNGARRAPKSEGPAPAPFPFGVKKKSAHKEGLFFTVQARHCTVLWALAIAIQQHSSPGYEN

SEQ ID NO: 268480 - protein, 36 aa, Glycine max
  Clone ID: PAT_MRT3847_84460C.1.pep
ITPTIQTLPYNNHHHINSKNLNSKNLKTLSLHQKQC

SEQ ID NO: 268481 - protein, 194 aa, Glycine max
  unsure (1)..(194): unsure at all Xaa locations
  Clone ID: PAT_MRT3847_84461C.1.pep
MPFATKLPPAPEPPAILKPAGNRVTVSQEPKQKKKENSVKTSPQRPPQILNTVVQSNVSLDSTCSSDSNSSTKKVKPATATVASRRNVKRNGFKPVRVVPDAVDVATVLPPLKRCEWITPNSDPLYTAFHDEEWGVPVDDDRKLFELLVFLQALAEHRWPAILNQRDIFRKLXXNSEPSPVAQFTEKKLLTLKI

SEQ ID NO: 268482 - protein, 350 aa, Glycine max
  Clone ID: PAT_MRT3847_84462C.1.pep
MSALNLNAWPRPRSRSRSRSPTFHAVNKLPFFTVTKRRAFSLSAVLTVETEEKPPIFDFKNYMLSKASAVNKALDDSVSLREPKKIHEAMRYSLLAGGKRVRPVLCVAACELVGGHEATAMPAACALEMIHTMSLIHDDLPCMDNDDLRRGKPTNHTVFGEDVAVLAGDALLAFAFEHIAASTRGASAPRILRAIGELARSIGSEGLVAGQVVDINSEGLADVGLERLEFIHVHKTAALLEGAVVLGAILGGGTDDEVEKLRKFARYIGLLFQVVDDILDVTKSSQELGKTAGKDLVADKVTYPKLLGIEKSKEFAAKLNKDAQDQLAGFDPVKAAPLIALANYIAYRQN

SEQ ID NO: 268483 - protein, 153 aa, Glycine max
  Clone ID: PAT_MRT3847_84463C.1.pep
VSWTAMISGYVQNKRFMDALNLFLLMFNSGTCPNHFTFSSVLDACAGCSSLLTGMQVHLCVIKSGIPEDVISLTSLVDMYAKCGDMDAAFRVFESIPNKNLVSWNSIIGGCARNGIATRALEEFDRMKKAGVTPDEVTFVNVLSACVHAGLVE

SEQ ID NO: 268484 - protein, 85 aa, Glycine max
  unsure (1)..(85): unsure at all Xaa locations
  Clone ID: PAT_MRT3847_84464C.1.pep
LYFNYRPAGPIMEFDGLNASXTAVNDPVVSLKTGLSYWMAHVRPAINPGSGSTIIAINGTLECDCAYTTTVQARRNYYTQCCSQL

SEQ ID NO: 268485 - protein, 130 aa, Glycine max
  Clone ID: PAT_MRT3847_84465C.1.pep
FQCEPVGAFDNLENLPCLKSITWPMENRGSSPADRGAIITLKLHDYSKFPSGETKIKFQLPRGPLEGMLRSLPYIRGQLNVVEIFSGPATKKQNRWVFFPKLMLWLVILSPKSPPFSHWRLKLIFVPPIF

SEQ ID NO: 268486 - protein, 56 aa, Glycine max
  Clone ID: PAT_MRT3847_84466C.1.pep
WFFFFFFFFFFFFKKANRSAGCYQKYRCRGNYLPFEIGDFCHNVGVMGGCSLKGGA

SEQ ID NO: 268487 - protein, 92 aa, Glycine max
  unsure (1)..(92): unsure at all Xaa locations
  Clone ID: PAT_MRT3847_84467C.1.pep
DVSNVVHGDEFXSNDPVDGSISSHQGILFLFEDVFFLGFXLFVTGSEGASIXLYIVPFEKDPXVIGRLLNEALAPLVAVVFVLFWMEEFTGR

SEQ ID NO: 268488 - protein, 35 aa, Glycine max
  Clone ID: PAT_MRT3847_84468C.1.pep
TTALPFLDVSYVAAHNYSNVSCTLCLLKLRQLYFP

SEQ ID NO: 268489 - protein, 43 aa, Glycine max
  Clone ID: PAT_MRT3847_84469C.1.pep
LSSINYFFSFILPAIFFSPQLFFPFPLLTVCPTSQKPKIKYPP

SEQ ID NO: 268490 - protein, 77 aa, Glycine max
  Clone ID: PAT_MRT3847_8446C.1.pep
VLLRSFVISDEPPVPCVSHSCLTPTPSCWCSLRYCVACWMLSDSLASGLPMNQLAVFETSPGIVVTVVRALWVVARA

SEQ ID NO: 268491 - protein, 59 aa, Glycine max
  Clone ID: PAT_MRT3847_84470C.1.pep
FPPPVPFDKFFIFSLKKKGLSYIYIYIYFYIYIYIYRCSIPKINFKKKKKKKTKRKRKK

SEQ ID NO: 268492 - protein, 127 aa, Glycine max
  Clone ID: PAT_MRT3847_84471C.1.pep
MTALVRSGVMKLTLQFQTPSPSLSLFSSSLSITKTPSPPSFFSFRHPLSHSSNASKTPTTNPLPSSSFESQLFIPPGIEPDEVDDSTVLSGSNIAVGPYAGDSRIKDVQFVKSSARARDCPKDDLPE

SEQ ID NO: 268493 - protein, 314 aa, Glycine max
  Clone ID: PAT_MRT3847_84472C.1.pep
MNSDTTSYWCYSCTRFVHIQEQNDVVCPRCHGGFVEKVTAPQSSRQGFRRRRRNAGNHSAFNPVIVLRGPGEDEESSFELYYDGFDGEGLRPLPSTMSEFLLGSGFDRLLEQVSQIEINGLGRAENPPASKAAIESMPTVEITESHVASETICAVCKEAFELGALAREMPCKHLYHSDCILPWLSMRNSCPVCRHELPSEQTAPETRVAGQIEEEAVGLTIWRLPGGGFAVGRFAGESHLPVVYTEMESDGNSNEGSRRISLAVGSGRVRESRGGGFGRIFRNLFGRIGALTRSRSLSTSLFNRRSSRAWVLGN

SEQ ID NO: 268494 - protein, 44 aa, Glycine max
  Clone ID: PAT_MRT3847_84473C.1.pep
MATSNFSIVLSVALTFFLGPLNKGKSNGTVSFNLKKFKPIQTNL

SEQ ID NO: 268495 - protein, 157 aa, Glycine max
  unsure (1)..(157): unsure at all Xaa locations
  Clone ID: PAT_MRT3847_84474C.1.pep
MEKVAPPPILMHRKRDLSYDIVSAGPNESWRWEWDSVRFAGKPPPPPPLSPNNDVVFEAESVVPPLQLKLGGTTRVNNNNININVSNKRVRSGSPGTASYPMCQVDNCREDLSKAKDYHRRXKVCEAHSXASKALLANQMQRFCXQCSRFHPLSSSM

SEQ ID NO: 268496 - protein, 75 aa, Glycine max
  Clone ID: PAT_MRT3847_84475C.1.pep
RASSSAPTRSVVPRLSQVNFTKACYKISLVVREKLFQPIGTRCGVPYLVKKNPHFRAPKKVSPGLVTKITPFPIH

SEQ ID NO: 268497 - protein, 88 aa, Glycine max
  Clone ID: PAT_MRT3847_84476C.1.pep
QLGVFPNQGPFPPPVNSGSLRNGFFKTPGLPGAPMGGFGIITHNGPPVLVNTPEKGSPLFPPKAPPTLEIPEGLLNKAEAKSPPFGAN

SEQ ID NO: 268498 - protein, 35 aa, Glycine max
  unsure (1)..(35): unsure at all Xaa locations
  Clone ID: PAT_MRT3847_84477C.1.pep
KXELTKLRFLIQTLVLSQSQVIIITQSPPHAIFLS

SEQ ID NO: 268499 - protein, 92 aa, Glycine max
  Clone ID: PAT_MRT3847_84478C.1.pep
FWPPKVFKGITKPQGPNLGGLYKKGRRGGFYGTGVLGSGGNMGGLHFLGSTLGLGVKEFWIFGPPFPGGGGGETLIFWGGFLENKVRGFWAF

SEQ ID NO: 268500 - protein, 192 aa, Glycine max
  Clone ID: PAT_MRT3847_84479C.1.pep
MRLRLREDDRRGHHKLYTNLHLIVLICLSLSLSVMGAFAFDEENSSTVAPATLYKALTKDADTIIPKIIGAIQTIEIVEGNGGPGTVKKITASEGDQTSFVLQKVDAIDEANLVYDYSIVGGTGLHESLEKVTFQTKVVPGTDGNGSIAKATLTFHTKDDAPLSDAVRDETKARGAGIFKAIEGYVLANPAQ

SEQ ID NO: 268501 - protein, 36 aa, Glycine max
  Clone ID: PAT_MRT3847_8447C.1.pep
GSARLKSQSGHSLAHHVIAPWTSNQHSMHLPLSHNS

SEQ ID NO: 268502 - protein, 473 aa, Glycine max
  Clone ID: PAT_MRT3847_84480C.1.pep
MEEKLKYPCLSSLLTLFLCISATSTNPHNSQTQTLLLHTLPDPPTLSWPESATVEPDPEPTTSLSLHHIDALSFNKTPSQLFHLRLERDAARVKTLTHLAAATNKTRPANPGSGFSSSVVSGLSQGSGEYFTRLGVGTPPKYLYMVLDTGSDVVWLQCKPCTKCYSQTDQIFDPSKSKSFAGIPCYSPLCRRLDSPGCSLKNNLCQYQVSYGDGSFTFGDFSTETLTFRRAAVPRVAIGCGHDNEGLFVGAAGLLGLGRGGLSFPTQTGTRFNNKFSYCLTDRTANAKPSSIVFGDSAVSRTSPDTPGSKNWLKTTSLYVELLGISVGGAPVRGISASFFRLDSTGNGGVIIDSGTSVTRLTRPAYVPLYVAFRVGASHLKRAPEFSLFDTCYDLSGLSEVKVPTVVLHFRGADVSLPAANYLVPVDNSGSFCFAFAGTMSGLSIIGNIQQQGFRVVFDLAGSRVGFAPRGCA

SEQ ID NO: 268503 - protein, 155 aa, Glycine max
  unsure (1)..(155): unsure at all Xaa locations
  Clone ID: PAT_MRT3847_84481C.1.pep
MGVFAYDEENSSTVAPVTLYKALTKDADTIIPKIIGAIQSIEIVEGNGGPGTVKKITANEVGYMLIARRDAIDEANLVYDYSIVGGTGLHESLEKVTFQTKVAPGPDGNGSIAKATLTFHTKGVAPLSDAVRDETKARGAGIFKAIXGYVXANPA

SEQ ID NO: 268504 - protein, 88 aa, Glycine max
  unsure (1)..(88): unsure at all Xaa locations
  Clone ID: PAT_MRT3847_84482C.1.pep
RXGRLPMAXFXEAVGXHXXWEEAGGQAFGAEKXVDXGRGXGERKLXXXXXXXXXXXXXXXXXXXSVKDCCCSXCHGGVVCLDQKEKKE

SEQ ID NO: 268505 - protein, 74 aa, Glycine max
  unsure (1)..(74): unsure at all Xaa locations
  Clone ID: PAT_MRT3847_84483C.1.pep
XRECSFHSTRTFISHNQVINLCISSLFLCCGMRTSRVQCVLGHCLALFYSTFNQMMRLLSMATPFPEHCQQYLT

SEQ ID NO: 268506 - protein, 55 aa, Glycine max
  Clone ID: PAT_MRT3847_84484C.1.pep
NTSCVCGVPARLKFLCYIVDLRCYCIECTLLVMGYVHLLVCLTTLDVIVRCYEVV

SEQ ID NO: 268507 - protein, 61 aa, Glycine max
  Clone ID: PAT_MRT3847_84485C.1.pep
GLKNVARGKGLVDYLFQASQETATHCARMSSLEYLTTGLKQSELHVNMGGLYIVPAFMDKL

SEQ ID NO: 268508 - protein, 77 aa, Glycine max
  Clone ID: PAT_MRT3847_84486C.1.pep
FSQTLQPASSALGTWLSDALPPQGDIDIISKSYRPSGGLTPLGPPLHGAVGADSVYKTISHSTNKDFCFINQPCATL

SEQ ID NO: 268509 - protein, 107 aa, Glycine max
  unsure (1)..(107): unsure at all Xaa locations
  Clone ID: PAT_MRT3847_84487C.1.pep
MKAEMKDGAPQVVMNHNGNHGKFSHLLASQDRDYLLSPTGAQVKVSDLEGKVVGLLFAANWYPPCRGFTQVLAGIYEELKSRVPQFEIVYVSSDXGLDAFNSFYGSM

SEQ ID NO: 268510 - protein, 39 aa, Glycine max
  Clone ID: PAT_MRT3847_84488C.1.pep
FEVVIRQTIDSYRRLCWLVRILSSCPSMSCPLIHQASII

SEQ ID NO: 268511 - protein, 77 aa, Glycine max
  Clone ID: PAT_MRT3847_84489C.1.pep
VLYARHNEIVVIHLWSLPAASDKCFHQWSAQYPVSIERGATDRNKHRVGHHGAREKTRWSQAGARAGSNVTKTGGDG

SEQ ID NO: 268512 - protein, 316 aa, Glycine max
  unsure (1)..(316): unsure at all Xaa locations
  Clone ID: PAT_MRT3847_8448C.1.pep
MGKGMRMVQRFSCISPCLSHVSGVIETSQPLSDQMATVIDGKAVAQTIRSEIADEVRQLSQKYGKVPGLAVVIVGNRKDSQSYVGMKRKACAELGIKSFDVDLPEQVSQAEKQILGFRWLSAIPDEHGLLXKLALPKHINEEKVLXNIGKLAMXGRDPLFHHCNPKAVYRTIPMNLVQXKGYIEAVEVGRSNIVGLTXSWLLLKANATVTITLSLTSQDKSITPEADIVLAAAKQQMMIKRYWIQXGAAVIDVGTNAVDDPTKKSGYRLVGDVDFEEASKVAGWITPVPGGVGPMTVTMLLKNTVEGAKRYIEQNN

SEQ ID NO: 268513 - protein, 78 aa, Glycine max
  Clone ID: PAT_MRT3847_84490C.1.pep
LSLLFLIHVPFVTMINENAIISAAAVGAADQQHHALSSSSVACLSPVLSNDGELKLRHVQPAVALCLAPVCGHATYGN

SEQ ID NO: 268514 - protein, 72 aa, Glycine max
  unsure (1)..(72): unsure at all Xaa locations
  Clone ID: PAT_MRT3847_84491C.1.pep
MASTKVNNRGSPGSKRFRNDASRKDGDWXCPNCGNLNFSFRTVCNQGHCGAPRPSLTITPPAPIISPYRNSH

SEQ ID NO: 268515 - protein, 87 aa, Glycine max
  unsure (1)..(87): unsure at all Xaa locations
  Clone ID: PAT_MRT3847_84492C.1.pep
LLFSXGGGPLVPLLWGGVVLPVGVVGAVVFCAPVCVVSVLXALVGVCGSSSLSFGSRACRVVCGFLCLAFFCRFSCFFALSFFLLWV

SEQ ID NO: 268516 - protein, 122 aa, Glycine max
  Clone ID: PAT_MRT3847_84493C.1.pep
MAYAAMKPTKAGLEEPQEQIHKIRITLSSKNVKNLEKVCADLVRGAKDKRLRVKGPVRMPTKVLNITTRKSPCGEGTNTWDRFELRVHKRIIDLYSSPDVVKQITSITIEPGVEVEVTIADA

SEQ ID NO: 268517 - protein, 59 aa, Glycine max
  Clone ID: PAT_MRT3847_84494C.1.pep
DRHELVVHGQSNNHAKILPYFPPHPPLHTLIKPLGLILTSTHLAQIPPPNRRVKKNGSI

SEQ ID NO: 268518 - protein, 54 aa, Glycine max
  Clone ID: PAT_MRT3847_84495C.1.pep
KISVKTFEVKTESRNQRIDLCSPSVTGIRKNSPENRKTMKEGIGAEFSPVKKRK

SEQ ID NO: 268519 - protein, 63 aa, Glycine max
  Clone ID: PAT_MRT3847_84496C.1.pep
VSSSIKLEFNSYVCKYSEASEDEWHEPCKFWPTSYHPRTYNIDGITGFSEDDSQSVMKFMQSA

SEQ ID NO: 268520 - protein, 55 aa, Glycine max
  Clone ID: PAT_MRT3847_84497C.1.pep
HAFAFEFIDYFFVILKDKKVIAKFKNGPGGAPLNFQPYLRGVPPFTFFIGLTNWN

SEQ ID NO: 268521 - protein, 56 aa, Glycine max
  Clone ID: PAT_MRT3847_84498C.1.pep
KMGLSIKPKMGDALLFWSMKPNATLDALTLHSACPVIKGNKWSCTKWMHPTEFKMV

SEQ ID NO: 268522 - protein, 61 aa, Glycine max
  Clone ID: PAT_MRT3847_84499C.1.pep
HIVSNITALSCDSSGTSHHYELLTVIWCYIVIPMMFIKSAAMAPAPSLTWTCFILCVWCFS

SEQ ID NO: 268523 - protein, 65 aa, Glycine max
  Clone ID: PAT_MRT3847_8449C.1.pep
CIQVTTGGSENSISQPEITMFLKLIFYQENKLAITILIILLNSIWINLYDKRVYLFGNQTFLISV

SEQ ID NO: 268524 - protein, 357 aa, Glycine max
  Clone ID: PAT_MRT3847_844C.1.pep
MFHALSQCLSSSTASLSQARQAHALILRLNLFSDTQLTTSLLSFYANALSLSTPQLSLTLSSHLPHPTLFSFSSLIHAFARSHHFPHVLTTFSHLHPLRLIPDAFLLPSAIKSCASLRALDPGQQLHAFAAASGFLTDSIVASSLTHMYLKCDRILDARKLFDRMPDRDVVVWSAMIAGYSRLGLVEEAKELFGEMRSGGVEPNLVSWNGMLAGFGNNGFYDEAVGMFRMMLVQGFWPDGSTVSCVLPAVGCLEDVVVGAQVHGYVIKQGLGSDKFVVSAMLDMYGKCGCVKEMSRVFDEVEEMEIGSLNAFLTGLSRNGMVDTALEVFNKFKDQKMELNVVTWTSIIASCSQRKKG

SEQ ID NO: 268525 - protein, 125 aa, Glycine max
  Clone ID: PAT_MRT3847_84500C.1.pep
MADSSSNLKSDAIMEQMKQHLATDAGKQVTNKIGLVYQFHIAPKKLGFDEVVYTVDLKKGEVTKGSYEGGKPDASFSFKDEDFVKVALGKMNPQIAFMRGAMKIKGSLSAAQKFTPDIFPKPSKL

SEQ ID NO: 268526 - protein, 110 aa, Glycine max
  unsure (1)..(110): unsure at all Xaa locations
  Clone ID: PAT_MRT3847_84501C.1.pep
FPRRADSYGYTFKWYISVFYARSVTSNFVGYCPAADSVSEPYIVXHHLILAHGASANCSLNRYEAHHKGQIVFTIATFLVEPKSNIDANRNASTLALDCIVGLIAYPITF

SEQ ID NO: 268527 - protein, 63 aa, Glycine max
  Clone ID: PAT_MRT3847_84502C.1.pep
NTTISRFLTGYTRSTCPPQFEKPLFTERGTWVILNEDKFCYFPPENHGHTATMDWSTLGVNRV

SEQ ID NO: 268528 - protein, 75 aa, Glycine max
  Clone ID: PAT_MRT3847_84503C.1.pep
KVFLGQGKFKISFDSNPLVSFAPSLEKFHALTKNLFLINWTKMFPGAISRKRGEQKFPKGNVKQFVQRKPAKFKK

SEQ ID NO: 268529 - protein, 85 aa, Glycine max
  Clone ID: PAT_MRT3847_84504C.1.pep
FFFFFFFFFVFWVFFFFFFFKKKEGGSYNFPLRKGFLSFPRPTFPKNFGFFQRGAQNQILKRNEILTQVFPFYLSPGESFFFFLE

SEQ ID NO: 268530 - protein, 44 aa, Glycine max
  Clone ID: PAT_MRT3847_84505C.1.pep
MFIFFFKENKLFLIFNTFDSLTININIKTSLYYYLIINRDWISV

SEQ ID NO: 268531 - protein, 73 aa, Glycine max
  unsure (1)..(73): unsure at all Xaa locations
  Clone ID: PAT_MRT3847_84506C.1.pep
RLHLHSCLSSGIKSYDGAYRHPHMYLXPSFGNYSYAELLHPSEPTCRDTMDLSATRTSDSPVCNAATSHNGRY

SEQ ID NO: 268532 - protein, 252 aa, Glycine max
  Clone ID: PAT_MRT3847_84507C.1.pep
QFLIACSSTVIAGSVASYYWAHGEASPEIPFLSVFSSMKRLLRYSLGSVALGSLTVSFVESIRFLLESIRRKLKGSSHVPDSWIGKAAHQSSQCFRRSIEWTIKSVNRNAYIMIAITGKSFFRASAIATELIMNNILRIGRVNVIGDVILFLGKLCVSLSSAAFAFLMLDAHKYRSAHNKISSPLLPVVVCWALGYIVATLFFAVVEMSIDTIILSFCQDSEEHGTAQYAPPLLIETLGDQNEMQRLTQGPQ

SEQ ID NO: 268533 - protein, 115 aa, Glycine max
  Clone ID: PAT_MRT3847_84508C.1.pep
SAPPAHFIGKFFFSGQLVKKLGPLTKSVGKQNPLGNLIFFKKTPLPPPFQKENNPKRKKFPPFFPPQKPTWPLLFSPPLLTPPTFARGNYRPRPSWKFIAHFFFAPQSPAGFFSP

SEQ ID NO: 268534 - protein, 53 aa, Glycine max
  unsure (1)..(53): unsure at all Xaa locations
  Clone ID: PAT_MRT3847_84509C.1.pep
VRXHXNLVEIKVKNQTDQGVFRYANSFNLKLLSFFAWTCISHFWSLMHLFAFN

SEQ ID NO: 268535 - protein, 294 aa, Glycine max
  Clone ID: PAT_MRT3847_8450C.1.pep
MATVIDGKAVAQTIRSEIADEVRQLSQKYGKVPGLAVVIVGNRKDSQSYVGMKRKACAELGIKSFDVDLPEQVSQAELIKQVHQLNANPDVHGILVQLPLPKHINEEEVLTEISLEKDVDGFHPLNIGKLAMKGRDPLFLPCTPKACIELLQRSGVSIKGKKAVVVGRSNIVGLPASLLLLKADATVTIIHSHTSQPESIIREADIVIAAAGQPMMIKGSWIKPGAAVIDVGTNAVDDPTKKSGYRLVGDVDFGEASKVAGWITPVPGGVGPMTVTMLLKNTLDGAKRYIEQNN

SEQ ID NO: 268536 - protein, 94 aa, Glycine max
  unsure (1)..(94): unsure at all Xaa locations
  Clone ID: PAT_MRT3847_84510C.1.pep
XFILHSKLFLFGDXHXXXXDHTXHVXSHRTXFSEXXPSKXKSTTWXXDXXQIVXXLSXKXTXTXFMSXDVIFXXIGKGRDWIXSLXHXNXFLIL

SEQ ID NO: 268537 - protein, 67 aa, Glycine max
  Clone ID: PAT_MRT3847_84511C.1.pep
LSKKNKSHSSTLYFNLNISSFFIPIHFHIFKSKPPYPNKIILKIYYTFPTQSINPLILKYNIITFPI

SEQ ID NO: 268538 - protein, 58 aa, Glycine max
  unsure (1)..(58): unsure at all Xaa locations
  Clone ID: PAT_MRT3847_84512C.1.pep
LXXRXENEKDXDEXDXVGXWRLKVENVIREXLNKVKFKLFGKDCXKYENXVEVEINVY

SEQ ID NO: 268539 - protein, 53 aa, Glycine max
  Clone ID: PAT_MRT3847_84513C.1.pep
TNRREASSLFRFVQLIQESIRSDCDAGCQQRWWPFPPMPRACNSNEPLSFWWN

SEQ ID NO: 268540 - protein, 113 aa, Glycine max
  Clone ID: PAT_MRT3847_84514C.1.pep
MQTNLSSEDVPQISKKKKSKKNGIRSEDLEDFLERTIKGSGISLSSPRLVIPATIYGLWILFHQYFTNDIFDFQLVPAMFGMFVYKAAVLVQAYRDNERLRLVFPENEEGSSY

SEQ ID NO: 268541 - protein, 45 aa, Glycine max
  Clone ID: PAT_MRT3847_84515C.1.pep
SFLAYFLIGKHHQEYNLAPCLKGYLGFLTFLSALFGISGASGRTT

SEQ ID NO: 268542 - protein, 91 aa, Glycine max
  Clone ID: PAT_MRT3847_84516C.1.pep
SQLISVDQPGVILRRITTKRRTILLLDKLTRTHSYYCIHCRHYHESWILYNPDLFMYKPCECWNPLQRCRSHNIALSQNDTNAIMEECQIQ

SEQ ID NO: 268543 - protein, 117 aa, Glycine max
  Clone ID: PAT_MRT3847_84517C.1.pep
MMALECSSFHFLNGVYMVLFFCLGIVLVNSVNEEGLSLLRFKASLLDPNNNLYNWDSSDLTPCNWTGVYCTGSVVTSVKLYQLNLSGTLAPAICNLPKLLELNLSKNFISGPIPDGF

SEQ ID NO: 268544 - protein, 88 aa, Glycine max
  Clone ID: PAT_MRT3847_84518C.1.pep
VALLFHPRAIFGWIHATASCTCLFPLHSISCFPFNSIILIDISQSGLQSVGIFFVASILKALNRREKKSGPISSKVLVNRSCFMIIDR

SEQ ID NO: 268545 - protein, 43 aa, Glycine max
  Clone ID: PAT_MRT3847_84519C.1.pep
LRRRKKKHSKLIPSSPTNPNFNTHKSIFSTAHVHYQIVKTENH

SEQ ID NO: 268546 - protein, 57 aa, Glycine max
  Clone ID: PAT_MRT3847_8451C.1.pep
SSPYHDSGTSLYHSNADIVSSKHTSVAPAASSACPACISFNAPTAALPASTRVSSHA

SEQ ID NO: 268547 - protein, 108 aa, Glycine max
  unsure (1)..(108): unsure at all Xaa locations
  Clone ID: PAT_MRT3847_84520C.1.pep
LYERFFLRLNGGPLPGEGGGLKLGRLAGKPSLGDHLCLPLARKGXRRIGRGGPTCGGLSAGCSNGGCASRVDTGACMLGIPTTVLTDLEDAIGALRLTNVQCGASATG

SEQ ID NO: 268548 - protein, 77 aa, Glycine max
  Clone ID: PAT_MRT3847_84521C.1.pep
ASVSIVNGLKSADPKMKCPLCREGAVYEGAVRLEELNILLSRSCQEYWEQRLQTERVERVKQIKEPWDSQCRAFVGV

SEQ ID NO: 268549 - protein, 67 aa, Glycine max
  Clone ID: PAT_MRT3847_84522C.1.pep
AQNDAGITYFTKGADKYINSQSLNLCYSKPTYIPPYQPPGLTGLITKCIHPYIIGSNITFHIILSGI

SEQ ID NO: 268550 - protein, 94 aa, Glycine max
  Clone ID: PAT_MRT3847_84523C.1.pep
LGRIKGAFYYCNVLQLQKYDATIHLCEQSQHLAETNFVLANNTVNSDSSLCDSYSSVKLWRWSLKVTCYFHLGRLEASLNVLEKLQQVVSVTDN

SEQ ID NO: 268551 - protein, 73 aa, Glycine max
  Clone ID: PAT_MRT3847_84524C.1.pep
KKVKYVPYSVFLIYTTITRLYKTEGSLKLLKYNFSASSSLWKLKSHNRRSLKSHLVLIGSLFHCHLPVPDLGI

SEQ ID NO: 268552 - protein, 152 aa, Glycine max
  unsure (1)..(152): unsure at all Xaa locations
  Clone ID: PAT_MRT3847_84525C.1.pep
RPGGLTDVGLGYVXQYSPNVRWMLLGYVGETDAGLLEFSKGCPSLQKLEMRGCSFFSEYALAIAATQLNSLRYLWVQGYSASASGRDLLAMARPYWNIELIPSRSVVVSNQQEEPVVVEHLAHILAYYSLAGPRTDFPDTVIPLDPGTYVDT

SEQ ID NO: 268553 - protein, 150 aa, Glycine max
  unsure (1)..(150): unsure at all Xaa locations
  Clone ID: PAT_MRT3847_84526C.1.pep
GLTDVGLGYIGAXYAPNVRWMLLGYVGETDAGLLEFSKGCPSLQKLEMRGCSFFSEYALAIAATQLNSLRYLWVQGYGASPSGRDLLAMARPYWNIELIPSRRVVVSNQQEEPVVVEHPAHILAYYSLAGPRTDFPDTVIPLDPATYVDT

SEQ ID NO: 268554 - protein, 110 aa, Glycine max
  Clone ID: PAT_MRT3847_84527C.1.pep
QRGFEQFPPEYESELQLNATFTPAAFSPRRKGEHPYRGEIIGFPDVQANSSQPASTPSTAPSTPNPATPQTNALATGTSGTPSGSAAQSSGTINTNRGFLFRCFGPSPTS

SEQ ID NO: 268555 - protein, 676 aa, Glycine max
  unsure (1)..(676): unsure at all Xaa locations
  Clone ID: PAT_MRT3847_84528C.1.pep
MSLLRRRKGSEPEKGPSPSSEPKVLSEDETEDDKNNKKNKKKRDEVGEKKKNKWSCFDSCCWWVGCICTLWWFLLFLYQMMPSSIPQYVTEAFTGPMPDPPGLKLKKEGLKVKHPVVFVPGIVTGGLELWEGHLCAEGLFRKRLWGGTFGEVYKRPSCWVDHMSLDNETGLDPPGIRVRPVSGLVAADYFAAGYFVWAVLIANLARIGYEEKTMYMAAYDWRIAFQNTEVRDQTLSRIKSNIELMVATNGGNKAVIIPHSMGVLYFLHFMKWVEAPAPMGGGGGPDWCSKYIKXVVNIGGPFLGVPKAIAGLFSAEARDIAVARTIAPGFLDNDLFRIQTLQHVMKMTRTWDSTMSMIPRGGDTIWGGLDWSPEEGYHPSQRKHSSDNTQLTDQETNQTNVVNYGRMISFGRDVAEAHSPEIEMADFRGAIKGRSIANTTCRDVWTEYHEMGFEGVRAVAEHKVYTAGSVVDLLQFVAPKMMARGSAHFSYEIADNLDDPKYNHYKYWSNPLETKLPNAPDMEIFSMYGVGLPTERSYIYKLRLVAECYIPFEIDTTQDGGSDEDSCLQGGVYTVDGDETVPVLSSGYMCAKGWRGKTRFNPSGMRTYVREYDHSPPANLLEGRGTQSGAHVDIMGNFALIEDVIRVAAGAKGEDLGGDKVYSDIFKWSEKIKLPL

SEQ ID NO: 268556 - protein, 107 aa, Glycine max
  Clone ID: PAT_MRT3847_84529C.1.pep
GGVYTVDGDETVPVLSSGFMCAKGWRGKTRFNPSGIRTYVREYDHSPPANLLEGRGTQSGAHVDIMGNFALIEDVIRVAAGAKGEDLGGDKVYSDIFKWSEKIKLPL

SEQ ID NO: 268557 - protein, 107 aa, Glycine max
  Clone ID: PAT_MRT3847_8452C.1.pep
NQDLLMSKLYLGRQICNVVANEGTDRVERHETLSQWRGRLDSAGFDPVHLGSNAFKQASMLLALFAGGDGYRVEENNGCLMLGWHTRPLIATSAWKLPSPNDLHCKL

SEQ ID NO: 268558 - protein, 121 aa, Glycine max
  Clone ID: PAT_MRT3847_84530C.1.pep
LDVPCVSKTVLLASPISATQHLLQHRSSLLQRVPAFQSYSAYNTRMRVRVELLHYLIQCNQRRPCSLINSIIKMVPVFQTLLVIQHNQSILLHAPPAWEILYGVFEFLHPLLLHLFLTKNL

SEQ ID NO: 268559 - protein, 130 aa, Glycine max
  Clone ID: PAT_MRT3847_84531C.1.pep
RVFFKKKKFSCPGSFLRKLKNLLTGKGGPLPRVFLKGRNVGGLKNLVNLNKRGRLGRILNPPRLKRGIGSQTFEGCGGARFFPCFDWAGSCNLFHKKRGPNCNKKGWVPSPACISKLPNRRFNFVIQIPP

SEQ ID NO: 268560 - protein, 166 aa, Glycine max
  Clone ID: PAT_MRT3847_84532C.1.pep
MQAEQINYAICILNPDGNSGVSGIVKFIQPAGGKVLVNASIKGLKAGKHGFHIHEFGNLTEGCKTAGAHYNPQKRTHGGPEDNERHVGDMGNVVADETGESALIYEDALLQLSGEFSILGRSVVCHADEDDLGRGNFEDSKTTGHAGARLACGVIGLSNAFEYKKI

SEQ ID NO: 268561 - protein, 46 aa, Glycine max
  unsure (1)..(46): unsure at all Xaa locations
  Clone ID: PAT_MRT3847_84533C.1.pep
MAHQLSKGEEFVKNAEMNLSXWGSFGSYYADAADLFNKTSNCFKLA

SEQ ID NO: 268562 - protein, 88 aa, Glycine max
  Clone ID: PAT_MRT3847_84534C.1.pep
KVHFSWSFIETFFFLNEHKIVLFIFVESLNCVWFFCNAGVVGFVLGVGFILKHVYVIKAKVVVLGKVIVVCYTCLFLVVCLGIFAFVV

SEQ ID NO: 268563 - protein, 250 aa, Glycine max
  unsure (1)..(250): unsure at all Xaa locations
  Clone ID: PAT_MRT3847_84535C.1.pep
ACRLPVGGRHVVPWYVKVYYHTLQLLAXDKGSQALTDFVEILRVSPSEDKVSPGVMELVLQFPCEMKSAVLSIEFDKGFLHIDEYPPDANQGFDIPSAIISFPDFHAGLQFSDKSQSKSPLLSKLQERSPVLSYTEVLLVPLTTPDFSMPYNVITITCTVFALYFGSLLNVLRRRVGEEERLLKNKDANKTVFFRRELAKLSAKLRGRPLELTLPCPSSSSSSSSFVSPKLILRVLLVAGIAVVWQYYSQ

SEQ ID NO: 268564 - protein, 62 aa, Glycine max
  Clone ID: PAT_MRT3847_84536C.1.pep
MEDESGLELSLGLSFGGSSAKPKGKNGSSSDARDEEVGRGGKMVDDFKSMFDNGPQEPESIT

SEQ ID NO: 268565 - protein, 172 aa, Glycine max
  unsure (1)..(172): unsure at all Xaa locations
  Clone ID: PAT_MRT3847_84537C.1.pep
MPPFLNLEFRLRENYQEGLIKPPGFQIFCDLERTLFPGVVPPGGPDAGLGNGGIKNGPQDFPWIGEIGWGLSTEKLLAMKAAFHPPFQWFLEEKGASYTTRNFRQLLVGLGTXIRIXGDENHGKILPTGANGLHESGKGKKGHRGKIIKILTSRSQTXLGATFKRFRNGHGI

SEQ ID NO: 268566 - protein, 41 aa, Glycine max
  Clone ID: PAT_MRT3847_84538C.1.pep
FERVGTILTKSLGYSVLCADILPNSDFIVQSAQIKFDQYLI

SEQ ID NO: 268567 - protein, 101 aa, Glycine max
  unsure (1)..(101): unsure at all Xaa locations
  Clone ID: PAT_MRT3847_84539C.1.pep
FGFFVANAKSDLSLLLFRPFATASQLILNDLNDLHXDPTTSCIAGPEHEDMFHWQASTYXGPSDSPYAGCALLXTQNKPPKCPFKAPKGAFRTNVVHPNIN

SEQ ID NO: 268568 - protein, 595 aa, Glycine max
  Clone ID: PAT_MRT3847_8453C.1.pep
MKRDHKDSCGGGGAAGGTVKGECSSMQSNGKAKMWEEEQQQQQQQQQQQQQQGMDELLAALGYKVRASDMADVAQKLEQLEMVMGCAQEDGISHLASDTVHYDPTDLYSWVQSMLTELNPEPNNNLDPSSFLIDNNNNIINSTAPVFNDDSEYDLRAIPGIAAYPSSLPQDNHLDEIETANNINKRLKPSPAESADSAASEPTRHVVLVDHQEAGVRLVHTLLACAEAVQQENLKLADALVKHVGILAASQAGAMRKVASYFAQALARRIYGIFPEETLDSSFSDVLHMHFYESCPYLKFAHFTANQAILEAFATAGRVHVIDFGLKQGMQWPALMQALALRPGGPPTFRLTGIGPPQPDNTDALQQVGWKLAQLAQIIGVQFEFRGFVCNSLADLDPNMLEIRPGEAVAVNSVFELHRMLARSGSVDKVLDTVKKINPQIVTIVEQEANHNGPGFLDRFTEALHYYSSLFDSLEGSSSSSTGLGSPSQDLLMSELYLGRQICNVVAYEGPDRVERHETLTQWRGRLDSAGFDPVHLGSNAFKQASMLLALFAGGDGYRVEENNGCLMLGWHTRPLIATSAWKLPSSSESSGLTQ

SEQ ID NO: 268569 - protein, 53 aa, Glycine max
  unsure (1)..(53): unsure at all Xaa locations
  Clone ID: PAT_MRT3847_84540C.1.pep
XDWISNLIYXFLFSYAFKAQTLLSSLFXXXXXXXXCLYPLGKEEGXTIXXLXL

SEQ ID NO: 268570 - protein, 83 aa, Glycine max
  unsure (1)..(83): unsure at all Xaa locations
  Clone ID: PAT_MRT3847_84541C.1.pep
XAFQIGXXXQDXXVLIGXXGXXIDVVERSVLWRCCWRWKXQGSRNXXADLAXXXXCRPXVLXXLPPFXLXXFLFSLVFPLLNL

SEQ ID NO: 268571 - protein, 118 aa, Glycine max
  unsure (1)..(118): unsure at all Xaa locations
  Clone ID: PAT_MRT3847_84542C.1.pep
LIFGDTSCHPMQVRHCYLMYENSVTDGHPAHDLMMSDFLYSESSVLHLQPKPTVGTPSYIATXVLLMQQYDGXTAHVWSCEVTSLAMHLLSYSLQDPDDAHDLLNTLHMVLGVQHCIP

SEQ ID NO: 268572 - protein, 146 aa, Glycine max
  unsure (1)..(146): unsure at all Xaa locations
  Clone ID: PAT_MRT3847_84543C.1.pep
IRDWLFSWKSENQKYERKRRAIYKGEKMGLWFTKLFSRLFAKKEMRILMAGXDAWXVRQPVLYMLKLGEIVTTMPSMGFNAETVESRNMRYTVWDVGGQDKIRALWRHYFENTQGLILVVDSSDRDCVDAAWDVLHRMWNEDALID

SEQ ID NO: 268573 - protein, 86 aa, Glycine max
  Clone ID: PAT_MRT3847_84544C.1.pep
GGCTSRSLSPLRYHANNPKNLSFIIQPEKHPRPFGLAPQTTWRTCHPNASPNLCYFKAGPPKPIYLYPPVTMPPVCCLLATVRTRG

SEQ ID NO: 268574 - protein, 101 aa, Glycine max
  Clone ID: PAT_MRT3847_84545C.1.pep
PTPRPPPGPPPQRFPGAPPTIFPPPPFLNPEPMKVFKTHDLEATPPVVSLQNGKLFLFPYSIPWGPIPKIMYFFFKKTYTPPPKVIFSCPFPHGVFLGLVT

SEQ ID NO: 268575 - protein, 78 aa, Glycine max
  Clone ID: PAT_MRT3847_84546C.1.pep
GSRSYILFLNHLAYAAYQNGLIRTGDHRATHLVFLLGLSMTLFAGVRTQDEGPSTYHAPRTPKASSPAVQRSASPVPS

SEQ ID NO: 268576 - protein, 40 aa, Glycine max
  Clone ID: PAT_MRT3847_84547C.1.pep
LRPLNSPMCIPYFQLNIQKYIYELITNFILSLLLSLLDNS

SEQ ID NO: 268577 - protein, 189 aa, Glycine max
  unsure (1)..(189): unsure at all Xaa locations
  Clone ID: PAT_MRT3847_84548C.1.pep
MGRNLFIRGDWKCYGTTEEXELKLVLLKMNLRNLDKHVLVICGEHCLSDTSLSKKALLPDIHVSAHIEVXQSGAYTVEVFAETLVPLPITWIIIGXHSQQRPFLNEXNEFVGDKGAXSAXQGREAIACIAETLKQREAGTTTAGDPDQTHAIATKIIYCDNVILIYDPDGSIRTGKAATNAPAQXVHAD

SEQ ID NO: 268578 - protein, 75 aa, Glycine max
  Clone ID: PAT_MRT3847_84549C.1.pep
WDQICLSTPVTTSLNMIWTLQLYLSVHVLHFFQIMSNTLMILVTHFFHGLNVKESKKNYIVHQFHGITPQNRSPK

SEQ ID NO: 268579 - protein, 63 aa, Glycine max
  Clone ID: PAT_MRT3847_8454C.1.pep
MKLWFVHSKRNSYFNKFLPFRIQINDQMGPLFLILDIFLNINIYIKISRIKKKRPHRTLKLLL

SEQ ID NO: 268580 - protein, 40 aa, Glycine max
  unsure (1)..(40): unsure at all Xaa locations
  Clone ID: PAT_MRT3847_84550C.1.pep
LNSSIYPKSQRANTXFLRYGHASDLCSHNSIIVLLPILVS

SEQ ID NO: 268581 - protein, 42 aa, Glycine max
  Clone ID: PAT_MRT3847_84551C.1.pep
FVKMQMKFCNCKFCKHAHQIKLMRSSFNIILFSDLMSTRINC

SEQ ID NO: 268582 - protein, 53 aa, Glycine max
  Clone ID: PAT_MRT3847_84552C.1.pep
HTKNTILLTPNGTKRITVKPLLNIKPPNTINDPNYKNRLTLGKKTKKKGAGHF

SEQ ID NO: 268583 - protein, 440 aa, Glycine max
  Clone ID: PAT_MRT3847_84553C.1.pep
MENSSFPRRFALLFAISFTLILCGHMITATTEGFEAPLAHSTPPPPPPAIHEHSFFSHTALLPPILSHLGFHQLATAAPSLSDTATTGSAAWTGPSTIFAPSDASLRTCFSCSVPNLLREHIVPGLFTIDYLRKLAFGTKIETLSPGHCITVTSDTLHRNTNNTAAKVFVGGVEITQPDLFNNGMVVVHGLQGFVSPLSPFSCDVERMNSLSFPFHPDHPSGHARHHLHHSNSPTAQPAAMMRLMLRDAMLRLRNNGFSILALAMKVKYAELVTLNNMTVFAVDDLSIFSGSHAYISNVRFHIVPNHYLSIADLEKLPVGIALPTLERGQSLLITTSGGGETLAPMRINYVRVRVSDVIRNVKIVVHSVYLPFPHINPVAAAYDSILGGSEGAENIPDSAEQTTQGTCSAVDGRGSCVVPPMPDQVQVKPMVEIEDHHGL

SEQ ID NO: 268584 - protein, 243 aa, Glycine max
  Clone ID: PAT_MRT3847_84554C.1.pep
MDSRVVQSVVHENDEHYPHIVALEQVTHGAEEDHFDHEKKSVLNKVKAKAKKINDTIKKHGHQVLDRGHEYNNEDQHTLDDHDLDYDDERAEDPQVHKTPIHESEDVKTATPTSEQVENLGKSGIDSGGTRGTTVMGEEPRHDALLGGVSSTTEIDQNIATDSAKTFSVEEKAGPPKDNLEKSIGLDLEEEPHAPGSRPEAYPPTNYQTKITDPSVIGKDEIEEITPVEESFAKMNMHDEPKP

SEQ ID NO: 268585 - protein, 76 aa, Glycine max
  unsure (1)..(76): unsure at all Xaa locations
  Clone ID: PAT_MRT3847_84555C.1.pep
LLLIMEGAXXXNLVKXNTXQIIDVFAPGXLIVXIEFRXPSXKQLXXGAPAXXXMNHQAGXXIRTXVXTXSSXPEIS

SEQ ID NO: 268586 - protein, 64 aa, Glycine max
  Clone ID: PAT_MRT3847_84556C.1.pep
ARANIFGNGLTSLLNPVCGERSTFELLVHEGRINSAISTSLYAVMTSATTYQMQSEVLCLKAAG

SEQ ID NO: 268587 - protein, 163 aa, Glycine max
  unsure (1)..(163): unsure at all Xaa locations
  Clone ID: PAT_MRT3847_84557C.1.pep
PTRPSVLLAPFGELRERVVLNIPHVELLTAGSTQVRSAATGLADGCPYLYAMVHDSQTXTLRGDFGIRVTVATINNVCAYGLNPGISGXSLLLGTIPQSISQQTGWNQMATARTPLNFDPSKQSFCQFSIDLLSGRILVDKTGDWITLXQNTPISNSLRVACW

SEQ ID NO: 268588 - protein, 119 aa, Glycine max
  Clone ID: PAT_MRT3847_84558C.1.pep
KGEKNPRLSPRVSKRVETQNLRGFMGGLSTGGGFKNQEYLGKSWFFSPGEKKKIPLGGGPGLYPPFVPPKCFPSNSTKFPFDHETPISQMGQPPRGFRTLQRKPPLKGVPPFLVGLSGF

SEQ ID NO: 268589 - protein, 149 aa, Glycine max
  unsure (1)..(149): unsure at all Xaa locations
  Clone ID: PAT_MRT3847_84559C.1.pep
MKRGKGPINCCNQDLSQCRSGKLLFRIRRALCLNECAKHNPKVDGDTENNVAEXLSEELNLRETEALKNQHRADMALLESKKIASQYQKEADKCNSGMETCEEAREKAEMALVAQKKHSALWEQRARQKGWNEGLAKSKKQSKGKVHTA

SEQ ID NO: 268590 - protein, 31 aa, Glycine max
  Clone ID: PAT_MRT3847_8455C.1.pep
TINTDHFVDKDSGAKSMFSCSFPMIALDHDT

SEQ ID NO: 268591 - protein, 106 aa, Glycine max
  Clone ID: PAT_MRT3847_84560C.1.pep
MVEATQASKDNHVVAFEARSTEDWLLHAQELVPVALANAREVKGFPGRWKMIISKLEQIPSRLSDLSSHPCFSKNALCKEQLQAVSKTLREAIELADLCVKEKYEG

SEQ ID NO: 268592 - protein, 60 aa, Glycine max
  unsure (1)..(60): unsure at all Xaa locations
  Clone ID: PAT_MRT3847_84561C.1.pep
FHWSLXHSSVINHGXASFXXLVFRFFKWVXXSXSVSRGASLQQXGAXSQKLNGPQNXXTV

SEQ ID NO: 268593 - protein, 105 aa, Glycine max
  unsure (1)..(105): unsure at all Xaa locations
  Clone ID: PAT_MRT3847_84562C.1.pep
HHYLELRFPLHRSFAPSLTPILLKTELCLFIGANIYPXKGITFVRGDSHVFLFANSKCKTYFHNRLNPSKLTLTAMYIKQHKKDIAQXSFMNRIRAAKKPYSKSI

SEQ ID NO: 268594 - protein, 346 aa, Glycine max
  Clone ID: PAT_MRT3847_84563C.1.pep
MYADPDAEVVSLSPKTLLESDRYVCEICNQGFQRDQNLQMHRRRHKVPWKLLKRETTAVVKKRVFVCPEPSCLHHDPCHALGDLVGIKKHFRRKHNNHKQWVCERCSKGYAVQSDYKAHLKTCGTRGHSCDCGRVFSRVESFIEHQDACNVGRLGPETQSQAQAVQAAACLSRTASSETNFSTGSPWPQSGTIIIPNPTVTVVEPSSYTIVTAETNNKVHPNLELQLSNTTPTASSQEERVHQEQLRIAKAKKALAEEARKQAKRQIELAELEFTNAKRIRQEALAELDKAYAFKDHAIKHINSIMLQITCRACKHHFHSPTDDQIFSYITQARQVQKHRLKPIIN

SEQ ID NO: 268595 - protein, 67 aa, Glycine max
  Clone ID: PAT_MRT3847_84564C.1.pep
LLINSCCRIVSLMLSLRQDFDPTKIHSINRALNAQMEFYPYKKKTKMIEKQLFDLEKPKLAVDTLQL

SEQ ID NO: 268596 - protein, 73 aa, Glycine max
  Clone ID: PAT_MRT3847_84565C.1.pep
YITTPHTKLKSLSKRINNFQNRSPSVRILIFLSRRLRYDHYEDSLGAGFEPIPCGFVHESPRMLAKEGDNLFP

SEQ ID NO: 268597 - protein, 70 aa, Glycine max
  unsure (1)..(70): unsure at all Xaa locations
  Clone ID: PAT_MRT3847_84566C.1.pep
LVYPCRPMIPTPTNGKKRISIHCQHKQQXNLDHEGIERTREFFLIGKLIYINWVQGYHKPIKKVYPDTNG

SEQ ID NO: 268598 - protein, 105 aa, Glycine max
  unsure (1)..(105): unsure at all Xaa locations
  Clone ID: PAT_MRT3847_84567C.1.pep
MHFVLPLKDLTNIRCTSNTPHAAVKDTDYTRRRSSLASGERPRKNSEARLELEDGSIRRAQSFGASGTQVGEVDDNHXLTEDQENLTDARYADQLELMTNPHIGN

SEQ ID NO: 268599 - protein, 64 aa, Glycine max
  Clone ID: PAT_MRT3847_84568C.1.pep
VENVKIKLFLRFKQRKRRTLVFISSTSARRLRKNVWKTIKKVTYLRRRRGETSSLQRVLCAASS

SEQ ID NO: 268600 - protein, 75 aa, Glycine max
  Clone ID: PAT_MRT3847_84569C.1.pep
RRSEESICLSSGMVFVQVSFVYYRLFISGLVLIVFVQLLLRYVCSIYCSVLRYFSRLCILVYVILSIKSLLSFCG

SEQ ID NO: 268601 - protein, 99 aa, Glycine max
  unsure (1)..(99): unsure at all Xaa locations
  Clone ID: PAT_MRT3847_8456C.1.pep
VVSKMNKDAQMRAAINQXLIETGERERXKELLRAXLIECGWKDQLKAHCKEVIXEKGLEHVTVXDLVAEITPKGRALVPDSVKXELLQRIRXFLXQHAS

SEQ ID NO: 268602 - protein, 92 aa, Glycine max
  Clone ID: PAT_MRT3847_84570C.1.pep
GNRGGEKNGNHGPYPCCIKKKNCIIGFWKGKKKRGKKKPGEHKISKGYKLGPTRGSKNKIYGGCPFYWELKNPLLIMPGASIYRPPPLEMQL

SEQ ID NO: 268603 - protein, 91 aa, Glycine max
  unsure (1)..(91): unsure at all Xaa locations
  Clone ID: PAT_MRT3847_84571C.1.pep
VLSIVDEHSSPWPQPVHSLCNPSDYSGCFALRLQAQHDECQIQKLNALKXDNRIQSEGGFIETWNPNNKPVQSAGVALSRCTLNRNALRRP

SEQ ID NO: 268604 - protein, 58 aa, Glycine max
  unsure (1)..(58): unsure at all Xaa locations
  Clone ID: PAT_MRT3847_84572C.1.pep
XXWFTQCIGLRPEIEFKILSSILGSCFVPRILPCRPPSATHAALASVVATMDAAMVSL

SEQ ID NO: 268605 - protein, 83 aa, Glycine max
  Clone ID: PAT_MRT3847_84573C.1.pep
ETQHNPRPGDPFFFCISTEHWIYSDSPTDTTASTTKTTTPHTHPTCKQHLHRVENTVTPVTNTPSTVSRSLRMTASMAQQGHA

SEQ ID NO: 268606 - protein, 68 aa, Glycine max
  Clone ID: PAT_MRT3847_84574C.1.pep
FQITCMNLFHNLWPIKIQKHTNMQTQQQLAQNPHRSLNFNSAIRETKSRSLSENEKKQNHSSTLQFLS

SEQ ID NO: 268607 - protein, 44 aa, Glycine max
  Clone ID: PAT_MRT3847_84575C.1.pep
SIFKSSQGLQWNRSISNVNRDKIINKTGFKKKKIDLFCDQALMC

SEQ ID NO: 268608 - protein, 53 aa, Glycine max
  Clone ID: PAT_MRT3847_84576C.1.pep
RTRGVNVAGQGGYVFHYIGSCTFFFGRIWFPTEDLFLFGRICFQLIVSTRYHI

SEQ ID NO: 268609 - protein, 95 aa, Glycine max
  unsure (1)..(95): unsure at all Xaa locations
  Clone ID: PAT_MRT3847_84577C.1.pep
AXXRTXXXXXARXSSCXXHLXLXSHXISIDXXXWXXVSGXDPIXAXSXRXKVXRXLXLXYXLPPXARXPRXXCQXIXXGXXXSXGXXXPPXXXXX

SEQ ID NO: 268610 - protein, 76 aa, Glycine max
  Clone ID: PAT_MRT3847_84578C.1.pep
LYLIEEHYRVCQLTFVIFRCYVLQADNNYGMNDEYAHALTNRCNVIHSCIRSNDPPTATPSSCNSTTTSDNLLRAY

SEQ ID NO: 268611 - protein, 119 aa, Glycine max
  Clone ID: PAT_MRT3847_84579C.1.pep
HASALMDPSAHHSSSGDLFLHSSEFFGFLTGHRRNLSDFPSDHPPFLALLTLSTEPQNDFLGMPNSFMQDVFLVFEIDVQATLLAWWLPISVHLSPESRLNPCTFAGTRYPDLISVADI

SEQ ID NO: 268612 - protein, 109 aa, Glycine max
  unsure (1)..(109): unsure at all Xaa locations
  Clone ID: PAT_MRT3847_8457C.1.pep
RSTHLVCYIGPTLLDAFDHISEPYMLSDKPLRLTLQDVYKIGGIGTVPIVRCDTGVFEYXMSLTLSSTVLTAVCNFVXMLHESLTQAHTDDIVVSNVKNVAANDLKLGY

SEQ ID NO: 268613 - protein, 101 aa, Glycine max
  unsure (1)..(101): unsure at all Xaa locations
  Clone ID: PAT_MRT3847_84580C.1.pep
PPQICHDQGSLHGKGWTNSRVXPNDRRICTPGPFASWPIIGPNALLPIREYRVVLSGTTADAAFPRYFGNSACNRTGASFKGLAIPTHLLHKIHLQPRPVQ

SEQ ID NO: 268614 - protein, 139 aa, Glycine max
  unsure (1)..(139): unsure at all Xaa locations
  Clone ID: PAT_MRT3847_84581C.1.pep
GVGKPCSPVGCSSFMVLGFLEVVFSSGREQKTFRGDAEPFGYRTLAKPYKVPSQKGGGEPRRQPQTEKSPEDRGGQEPKLHQPXPGGTXEKNXTKTHKKRGPASETDTQQPTRPPNAGKGKTQARPEDRQNKGPTGAAT

SEQ ID NO: 268615 - protein, 179 aa, Glycine max
  Clone ID: PAT_MRT3847_84582C.1.pep
MVAILKRQGENESEETIIGLAKSLMQLSRVQQQSNKPLLKTFSPTEFECKTCNRKFSSFQALGGHRASHKKPKFEAEELKEEAKKTKPKMHECSICGMEFSLGQALGGHMRKHRGAISENDNNNEALSSIKQAIAKAPVLKRSNSKRVMCLEMDLNLTPLENDLKLLFGNKAPRVDLSL

SEQ ID NO: 268616 - protein, 182 aa, Glycine max
  Clone ID: PAT_MRT3847_84583C.1.pep
MVAILKRQRETEAEESIIRLAESLMQLSRVQQKSKPLLKTFSPTEFECKTCNRKFPSFQALGGHRASHKKPKFEGEELKEEAKKGLSLGNKPKMHECSICGMEFSLGQALGGHMRKHRGATSENNNEAFSSSIKQAISKVPVLKRSNSKRVMCLEMDLNLTPLENDLKLLFGNKAPRVDLSL

SEQ ID NO: 268617 - protein, 66 aa, Glycine max
  Clone ID: PAT_MRT3847_84584C.1.pep
VKVGFILFFIKSFFPKDQKKCGLAKSFSSFNSSIQLSLSHSHIFSFLCEEQGAPKGPRTPGAGLRN

SEQ ID NO: 268618 - protein, 83 aa, Glycine max
  unsure (1)..(83): unsure at all Xaa locations
  Clone ID: PAT_MRT3847_84585C.1.pep
MQTTCSKVLHLIPPSNFFVDNIIIKKIVIYSQLFDVNQEHQLNNKDLAHHPKCVNLAGKLFNKRNDRPYTTFLTEYPEVWIQX

SEQ ID NO: 268619 - protein, 63 aa, Glycine max
  Clone ID: PAT_MRT3847_84586C.1.pep
DGTPQNVVGSSVVRLVGPSPFRNCFSICMYTYIALLVYYYNRLKFSEKALYMEIDINYCTQKK

SEQ ID NO: 268620 - protein, 80 aa, Glycine max
  unsure (1)..(80): unsure at all Xaa locations
  Clone ID: PAT_MRT3847_84587C.1.pep
INXRXTGRSRXFXFVTFXTEXAXRDAIXGXNXQNLXXRNITVNXAQSRGKXXXXXXXXXXEXASGYGGGGGYSRGGGGYG

SEQ ID NO: 268621 - protein, 38 aa, Glycine max
  Clone ID: PAT_MRT3847_84588C.1.pep
RPTRAELGTGQRSNRFSLCSIRCLLRLGGLHLNECHAI

SEQ ID NO: 268622 - protein, 50 aa, Glycine max
  Clone ID: PAT_MRT3847_84589C.1.pep
FAFCHRSLRWPETLRIICASIHSSLAEHFTVDTGVRGRNKRLLLLYQRHD

SEQ ID NO: 268623 - protein, 101 aa, Glycine max
  Clone ID: PAT_MRT3847_8458C.1.pep
MANVRLFINFLLSICNYETEKAFLVACHHQVVEVKVGLHCDDCIKKILKAIKKIEDIETYNVDTKLNKVIVTGNVTTDQVIKVLQKIGKNATAGEDTQTNK

SEQ ID NO: 268624 - protein, 133 aa, Glycine max
  Clone ID: PAT_MRT3847_84590C.1.pep
LTRLRPSKYRRAAWIGLYVLILAFSPGMGTVPWVVDTEINPLRYRGVCGGIASKTVWISNLIVPESFLSLAKALGTAWTFMMFGIVAIVAIFFVIIFVPETKGVPMEEVEKMLEQRSVQFKFWEKRDSGSEKH

SEQ ID NO: 268625 - protein, 61 aa, Glycine max
  Clone ID: PAT_MRT3847_84591C.1.pep
HVISHVLYTKAQEHYLELWLAKIKAPLMFTSLSTGIPAATFMRGIFANFLQRRPVPTSTTP

SEQ ID NO: 268626 - protein, 573 aa, Glycine max
  Clone ID: PAT_MRT3847_84592C.1.pep
MEGGVPEADMSAFRECLSLSWKNPYVLRLAFSAGIGGLLFGYDTGVISGALLYIKDEFKAVDRKTWLQEAIVSTAIAGAIIGASVGGWINDRFGRKKGIVIADTLFFIGSVIMAAASSPAILIVGRVFVGIGVGMASMASPLYISEASPTRVRGALVSLNSFLITGGQFLSYLINLAFTKAPGTWRWMLGVAAVPALLQIVLMLTLPESPRWLYRKGKEEEAKSILKKIYPPHEVEGEIQALKESVDMEIKEAESSEKINIVKLLRTSAVRRGLYAGVGLLIFQQFVGINTVMYYSPTIVQLAGFASNRTALLLSLITAGLNAFGSILSIYFIDKTGRKKLALISLCGVVFSLALLTAAFRESEIHSPMVSAIQSSQFNNNNTCPDYKTALNSAEWTCMTCLKASPSCGYCAADDKLLPGACLIANVDTKKMCGNDHRAWYTTGCPSKYGWAALIGLALYIIFFSPGMGTVPWVVNSEIYPLRYRGVCGGIASTTVWISNLIVAESFLSLTEAIGTAWTFMLFGIVAIVAIFFVIVFVPETKGVSMEEVEKMLEQRSVQFKFWEKRDSGSEKH

SEQ ID NO: 268627 - protein, 227 aa, Glycine max
  unsure (1)..(227): unsure at all Xaa locations
  Clone ID: PAT_MRT3847_84593C.1.pep
RVVDDNTISEFNDWVADLEVEEVQCVGRKFTWYRPNGAAKNKLDRFFVSDAWISKWPGSTSFILNRNFSDHCPVLLRSRIVDWGPQPFKVLDCWLNDKTFENLVKGSWTNXTNKGVGGYSLKEKIKKLKERMKQWNKQQFVDTFNKVQQIEYDLNKLEAGSNGRQLSTQELAIREKLQEDLWTAAQSHESLMRQKAXSKWIREGDCNSRYXHMLMNSTGVVQSMECS

SEQ ID NO: 268628 - protein, 65 aa, Glycine max
  Clone ID: PAT_MRT3847_84594C.1.pep
SSSSRVRCEGEPFQVAIVDNGYFSLLYPQTHFHKSFIFVQSVGIWQQFHGAVSVLSNEHVCVCAI

SEQ ID NO: 268629 - protein, 111 aa, Glycine max
  unsure (1)..(111): unsure at all Xaa locations
  Clone ID: PAT_MRT3847_84595C.1.pep
XXXXXXXXXXLXXXXXPXXXXXXSXXXAXXTXXLXTXXTKXWIMXXDXQXSXXSXXXXXTHXXXXXXXXDGXXVXXXXXXYTXXXPKTVXXDAXXXXXXXTXACXSKXQXX

SEQ ID NO: 268630 - protein, 467 aa, Glycine max
  Clone ID: PAT_MRT3847_84596C.1.pep
MPSSSTTIVSKCVIHPDQKSNMKPLRLSVSDLPMLSCHYIQKGVLLTAPPSSFDDLILSFKHTLSIALSHFPALAGRFETDSNGYVNIVCNDAGVDFIHAKAKHLTLNAVVSPSLVDVHPCFKEEFFAYDMTISYAGHNTPLAAVQVTELADGVFVGCTVNHSVTDGTSFWHFFNTFAAVTKGGAAKKVLRAPDFTRDTVFNSAAVLTVPSGGPAVTFDVNRPLRERVFHFSREAIQKLKQRANNTVNNELTEVMGKQVNDGWKIVNGNGKINGNGRNEISSFQSLSAQLWRAVTRARKFNDPAKTSTFRMAVNCRHRLEPKMDALYFGNAIQSIPTVATVGEILSRDLRFCADLLHRLDVAHDDATVRRGIEDWESAPRLFPLGNFDGAMITMGSSPRFPMYDNDFGWGRPVAIRSGKANKFDGKISAFPGREGNGSVDLEVVLAPATMAGLENDMEFMQYVTQVV

SEQ ID NO: 268631 - protein, 207 aa, Glycine max
  Clone ID: PAT_MRT3847_84597C.1.pep
MPSSSTTIVSKCVIHPDQKSNMKPLRLSVSDLPMLSCHYIQKGVLLTAPPSSFEDMILSFKHSLSIALSHFPALAGRLETDSHGYVNIVCNDAGVDFIHAKAKHLTLNAVVSPSLVDVHPCFKEEFFAYDMTISYAGHNTPLAAVQVTELADGVFAHTLPSNGSSFGSAVYRHRRRNHKQKCAEARTQEQTERKRKETGGGQGQKGS

SEQ ID NO: 268632 - protein, 73 aa, Glycine max
  Clone ID: PAT_MRT3847_84598C.1.pep
PLALLRSGPITNNIQAASAKAGNPTLAAGWTRQLSDAFKAQLDSTIQALGVTWVQLDLCDHQMMVKSITLRGG

SEQ ID NO: 268633 - protein, 135 aa, Glycine max
  unsure (1)..(135): unsure at all Xaa locations
  Clone ID: PAT_MRT3847_84599C.1.pep
MAEGKEESKSSEESVKLFVGQVPKRMSEDEALXLFKELALVDEVNIIRDKATRASRGCCFVICPSREEADKAVNACHNKKTLPGVSEWASVPHASSFFAFQNVQRGMDFFFFLLTLWFIRKKMTLINAEFSQKKN

SEQ ID NO: 268634 - protein, 345 aa, Glycine max
  Clone ID: PAT_MRT3847_8459C.1.pep
MARVSALFHSLLLISSLVLASQIHVSSGKLVPGLSWNYYLLTCPKLERIIRKHLEDVFEKDSGVAPGILRLFFHDCFPNGCDASILLNGDGDEKQHRANFGLRQEAIDAIENLRVLIYKQCLPVVSCSDILVIAAREAVRQLGGPDFDVPLGRKDGLGPNATAPDNLPAPFFRTDDLLRGFGNRGFDATDVVALSGAHTYGRAHCPSLVNRTIETDPPIDPNFNNNLIATCPNAESPNTVNLDVRTPVKFDNMYYINLLNRQGVFTSDQDIAGSPKTKEIVNQFASDQKLFFKKFSDAFVKVSQLDVITDRIGKGEIRDKCFVANKRRSSMASVVEEVVELAQEI

SEQ ID NO: 268635 - protein, 141 aa, Glycine max
  unsure (1)..(141): unsure at all Xaa locations
  Clone ID: PAT_MRT3847_845C.1.pep
MLMPKKNRIAIYELLFKEGVMVAKKDVHMPKHPELADKNVPNLHVMKAMQXFSALQSLKSRGYVKEQFAWRHFYWYLTNEGIQYLRDYLHLPPEIVPATLRRSRPETGRPRPKGLEGERPARLTRGEADRDTYRRSAVPPG

SEQ ID NO: 268636 - protein, 89 aa, Glycine max
  Clone ID: PAT_MRT3847_84600C.1.pep
IWQCGALIIIMCGIRLALMLSGECRVFSEILALDLSFEQSSMPSPTLRQSQLLSWCQDLGFVTGFLPRFESTLASSSASVRLLVESESN

SEQ ID NO: 268637 - protein, 166 aa, Glycine max
  Clone ID: PAT_MRT3847_84601C.1.pep
GKPEEKKEAKAAAKKGGKKEGVAKEPEVVHLGPPGVAPGELVFGVAHIFASFNDTFVHITDLSGRETISRVTGGMKVKADRDESSPYAAMLAAQDVAVRCQQLGINALHIKLRATGGNGTKTPGPGAQSALRALARAGMKIGRIEDVTPIPTDSTRKKGGRRGRRL

SEQ ID NO: 268638 - protein, 98 aa, Glycine max
  unsure (1)..(98): unsure at all Xaa locations
  Clone ID: PAT_MRT3847_84602C.1.pep
TGENPVRELIADDAWLNGRIITTGQQRGAAMIKARRLTSALIDGSAASDHIKNWVLVTTNGTXIXMGGYSDGNYNVPAGLIYSFPVTXCQGEWAIRQG

SEQ ID NO: 268639 - protein, 94 aa, Glycine max
  Clone ID: PAT_MRT3847_84603C.1.pep
GSPWGIPNAMVPPFNIPVVGQGPVFEKPLNCDLDPYGTPKGREIFPLLESPKNFFSPPVAQRIMVIHEAFVNPHVKKTGGGPGFFEEKKSVFGD

SEQ ID NO: 268640 - protein, 165 aa, Glycine max
  Clone ID: PAT_MRT3847_84604C.1.pep
DDDIHLNLGMLVSTLAKYRSRPRIYIGCMKSGPVLYQKGVKYHEAENWKFGEEGNKYFRHATGQIYAISKDLATYISINWPILHRYANEDVSLGSWLLGLEVEHVDERSMCCGTPPDCDWKARTGNVCVASFDWSCSGICKSVERMRDIHKTCGEGDGAVWNVDL

SEQ ID NO: 268641 - protein, 70 aa, Glycine max
  Clone ID: PAT_MRT3847_84605C.1.pep
LPGYPITTHRPLNANPGQAMLISHAELKITSKGFGTDNDLTLFCQIPRITGHSATHCARIDDALTPCDYL

SEQ ID NO: 268642 - protein, 69 aa, Glycine max
  unsure (1)..(69): unsure at all Xaa locations
  Clone ID: PAT_MRT3847_84606C.1.pep
KTXMXXXXSXXETXPKVLICHHLXAQLVTXRRXALXRELGLIEILRNIYHFQKITXXHQGCVLRCXTCS

SEQ ID NO: 268643 - protein, 82 aa, Glycine max
  Clone ID: PAT_MRT3847_84607C.1.pep
VIRHRQCLHARIHAHLVKQVLSANAVAGLSIECLMDEKDVKGFIKREEFENLASGLLEKFNIPCNKAGIHLIFTTLIIITCF

SEQ ID NO: 268644 - protein, 69 aa, Glycine max
  Clone ID: PAT_MRT3847_84608C.1.pep
MSMTSDSHEIINRMVVIINSFSLSSWYLDVPIKYQIINKINSVFSLSRVQAFSICYWSNLVKSFIKWIV

SEQ ID NO: 268645 - protein, 82 aa, Glycine max
  Clone ID: PAT_MRT3847_84609C.1.pep
IHKLPPHGPYLALNSGNSVQNSDMHGFLTVFRCQPTSLSSRLKLHRPSSLTTLTIFFHKHKHQHQHNASFPHPYTISPRSRP

SEQ ID NO: 268646 - protein, 179 aa, Glycine max
  unsure (1)..(179): unsure at all Xaa locations
  Clone ID: PAT_MRT3847_8460C.1.pep
TQRKIMCANTGASSSLACQEKQALPLSDDHKPNRADEWKRIEAAGGRVIQWNGYRVLGVXAVSRSIGDRYQEPWVIPEPEVKCVQRDKSDECLILASDGLWDVMTNEEACEIARKRILLWHKKNGNNSVSSEQGQEGVDPAAQYAAEYLSRLALQRGTKDNISVIVIDLKPQRKIKKKE

SEQ ID NO: 268647 - protein, 162 aa, Glycine max
  Clone ID: PAT_MRT3847_84610C.1.pep
MGRKNTIFLALVVTLITKETMAEQHVVGGSQGWDESTDFNSWVSGQTFKVGDQLVFKYSSLHSVVELGSESEYKNCDLGNAVNSMSSGNDVVKLNKPGTRYFACGTMGHCDQGMKVKITTVSGSETSSPASSSSSSSNSSSASQCLVYLVLIVGLLIASLLN

SEQ ID NO: 268648 - protein, 127 aa, Glycine max
  unsure (1)..(127): unsure at all Xaa locations
  Clone ID: PAT_MRT3847_84611C.1.pep
HTCCRWIFLLFGILDDFRDGVSKYPNFFXVVENNERRVLEMVNWDPLLTVSALEKEFVVDEDSAKRKFRFSVKYEKDLDLELDDSRKLNLLNTLPLVFSYSNVAEVATSILLGRNRDVLGFVLEGCV

SEQ ID NO: 268649 - protein, 54 aa, Glycine max
  Clone ID: PAT_MRT3847_84612C.1.pep
PGINSRGDKYIFGRVVIQGSFNAPLFRSRSIKYCGPNVGNSNFHSGFVIGPLKL

SEQ ID NO: 268650 - protein, 64 aa, Glycine max
  Clone ID: PAT_MRT3847_84613C.1.pep
FSCFFLSHRKYASMRGSNPIVKSSKKKREGGPLRYELWEALTYNIGLAHGEHANIDQLEATNTS

SEQ ID NO: 268651 - protein, 275 aa, Glycine max
  Clone ID: PAT_MRT3847_84614C.1.pep
MLTVYAPRAILKCHLHQDSASAQQAYPCKINNNANLVNCNPKPFGTPCSNILFHSSSSGKCDKLQKSLHLFHHVATHKWLCGLQDSISSDDEYRSSRNIAISLFRRYRNFIDRGGADNLKEFITAGVNAYALGCTDEGLRKELMDMKNSGIEIDVMQSYGGSTSLKSKIISEEVDECILWLSIIFITILCTPQPTIVRWSSTPPVSDEVRLQWKGFCALIANAYFMKGMAWLPVKTLQLEQTAVMGQAEKPSVVASRMRLIFSTLEVVSPQWPRA

SEQ ID NO: 268652 - protein, 163 aa, Glycine max
  unsure (1)..(163): unsure at all Xaa locations
  Clone ID: PAT_MRT3847_84615C.1.pep
CPFLVLILIARARESHXRFADFCHAXCSHTPISSPVRDLVKPVPAXIESCISRYLIRTTQCASSLYCEGDHHPRRXYERLITKPSYQQQWRVGTCLKELKDTTQEGYSFEELCIKKEAIEGDEKFCAKSLRTVIGFAISKLGKNIQVLSSSFAICKTNNTVEG

SEQ ID NO: 268653 - protein, 87 aa, Glycine max
  unsure (1)..(87): unsure at all Xaa locations
  Clone ID: PAT_MRT3847_84616C.1.pep
MGSQATSDKIRVPLLSSNIVDKTMKGFRRPQGDRKSSVNTNWRRPKGIHSRVRTKFNGCTLGPNIGYGSDNKXRQYLPKGFKKFVVH

SEQ ID NO: 268654 - protein, 32 aa, Glycine max
  Clone ID: PAT_MRT3847_84617C.1.pep
HRMFHSYDRRQWNQLISCSPMPPYWFGVEKWL

SEQ ID NO: 268655 - protein, 100 aa, Glycine max
  Clone ID: PAT_MRT3847_84618C.1.pep
ARDLNRFNRNAAKNYRYCCPPTKMIHLSTLPLDITEEEIVSLVEEHGIIVNSKVFEMNGKKQALVQFENEEQATEALVCKHASTLSGSVIRISFSQLQNI

SEQ ID NO: 268656 - protein, 295 aa, Glycine max
  Clone ID: PAT_MRT3847_84619C.1.pep
SGPDSRVDPASGLDGQGQIVEDVLTSGLSAKLMRYLRISVLGETSGNQKDVTHITESRHASTNTSARGRDDGRGRFRQLLESNHLDDTKMIDERSLDDVTLERVDGEPPDGLGEGTDVHKVDSDGEDTWRCRDIRDGRIKYGEHDDNIRDDSSRRRANRGWGRSRGKGRVNEGAVESDPILSSPGSGSRLGQGRSVRDRSILRNADVRRGADSKKTLGRIPSEASAFEREDDDDCFEECRIGSKDITDLVRKAVRSAEAEARSANAPEEAVKAAGDAAADLVKTAASEEYKSSND

SEQ ID NO: 268657 - protein, 78 aa, Glycine max
  unsure (1)..(78): unsure at all Xaa locations
  Clone ID: PAT_MRT3847_8461C.1.pep
NLKGRHSKMFPFGVGKTGCPGVHYAMPVVELALPIHLFRFKWNLPGGLGMQGLYMQXAIGISIPKKAHLWLKAAPFRE

SEQ ID NO: 268658 - protein, 316 aa, Glycine max
  unsure (1)..(316): unsure at all Xaa locations
  Clone ID: PAT_MRT3847_84620C.1.pep
MFKNCVGFQALIQYQSRQSAVAARSTLQGRNIYDGCCQLDIQFSNLDELQVNYNNDRSXVILDFTNPNLPTEQKGRPSQPGYGDAGNMYAAQGSGARAVGFPQMANAAAIAAAFGGGLPPGITGTNDRCTVLVSNLNPDRIDEDKLFNLFSIYGNIVRIKLLRNKPDHALIQMGDGFQAELAVHFLKGAMLFEKRLEVNFSKHPNITQGADTHEYINSNLNRFNRNAAKNYRYCCSPTKMIHLSTLPQDITEEEIVSLVEEHGTIVNSKVFEMNGKKQALVQFGNEEQATEALVCKHASTLSGSVIRISFSQLQNI

SEQ ID NO: 268659 - protein, 36 aa, Glycine max
  Clone ID: PAT_MRT3847_84621C.1.pep
MDLLESSIQALRLEGQPLRSIRRSVLDRGTTAVRLY

SEQ ID NO: 268660 - protein, 97 aa, Glycine max
  Clone ID: PAT_MRT3847_84622C.1.pep
TRKPVDRYRAGAGLQQMKADLSSNTTPSALQLYYLYLSKSVHIGITGQGYKKLAEPAEMNLDGEKTMCCCAMPLQIISVEASKYIYHIDVPCDGLQY

SEQ ID NO: 268661 - protein, 47 aa, Glycine max
  Clone ID: PAT_MRT3847_84623C.1.pep
IAPASIIAILLFSSWQARTDSNHTAKLAPEIIAVPVFDLPSLASFVC

SEQ ID NO: 268662 - protein, 750 aa, Glycine max
  unsure (1)..(750): unsure at all Xaa locations
  Clone ID: PAT_MRT3847_84624C.1.pep
MGFALAYTASGCCSNLQFQSLLFAAASLRSKPCLSLCNSTYRPKRILQRSPIVGAQSENGALVTSEKPDTNYGRQYFPLAAVVGQDSIKTALLLGAIDPGVGGIAISGKRGTAKTVMARGLHAILPPIEVVEGSIANADPTCPEEWEDGLTECLEYDSTGNIKTRIIKSPFVQIPLGVTEDRLIGSVDVEESVKTGTTVFQPGLLAEAHRGVLYVDEINLLDEGISNLLLNVLTEGVNTVXREGISFKHPCGPRLXATYNPEEGAVREHLLDRIAINLSADLPMSFENRVAAVGIATEFQENSSQVFEMVEEETDNAKTQIILAREYLKDVTLNREQLKYLVIEALRGGCQGHRAELFAARVAKCLAALEGREKVYVDDLKKAVELVILPRSIVTENPPDQQNQPPPPPPPPQNQESGEEQNEEEEQEDDKDEENEQQQEQLPEEFIFDAEGGLVDEKLLFFAQQAQRRRGRAGRAKNVIFSEDRGRYIKPMLPKGPVKRLAVDATLRAAAPYQKLRRAKDSGNNRKVFVEKTDMRAKRMARKAGALVIFVVDASGSMALNRMQNAKGAALKLLAESYTSRDQVSIIPFRGDAAEVLLPPSRSISMARKRLERLPCGGGSPLAHGLTTAVRVGLNAEKSGDVGRIMIVAITDGRANISLKRSTDPEAAAATDAPKPSAQELKDEILEVAGKIYKAGMSLLVIDTENKFVSTGFAKEIARVAQGKYYYLPNASDAVISSATKEALSALKSS

SEQ ID NO: 268663 - protein, 61 aa, Glycine max
  unsure (1)..(61): unsure at all Xaa locations
  Clone ID: PAT_MRT3847_84625C.1.pep
SSIPDFIPNHLPLPHLXPFPPFLLXPHIVLPPSCFHXLLLXXRMSSTYXLILLATHRMQTR

SEQ ID NO: 268664 - protein, 92 aa, Glycine max
  Clone ID: PAT_MRT3847_84626C.1.pep
GALPQLFKKGVVFLPHAFGRNPGRGPPFSGTREFKLVAAPAAAIEEKDVAKFPEVAQGFFCLPPPGFWEAPLFFRGRGKLKAQDLWPPGGFS

SEQ ID NO: 268665 - protein, 97 aa, Glycine max
  unsure (1)..(97): unsure at all Xaa locations
  Clone ID: PAT_MRT3847_84627C.1.pep
TVHGETRADTGARFQGDETQAQTQFFQERNRKPDNCKWQETTGKNRLRKREGTAKEQATPRNTDQARREKPSNSLETSPMKVSTPGGELTDPXHCKK

SEQ ID NO: 268666 - protein, 47 aa, Glycine max
  Clone ID: PAT_MRT3847_84628C.1.pep
QSQIPNSPFTFQSYINIIGNSFHALKPCPNITHYALLHLHIFTHLQH

SEQ ID NO: 268667 - protein, 103 aa, Glycine max
  unsure (1)..(103): unsure at all Xaa locations
  Clone ID: PAT_MRT3847_84629C.1.pep
MASSMISWPGVTTVKRADAGMVASFTGLKSMAGFPTSNTNNDITFIAINGGRRRCTQASPPIGNKKFXTLSYLTDLDNAQXAKEVLFLLTKGLIPCFKFELEH

SEQ ID NO: 268668 - protein, 307 aa, Glycine max
  Clone ID: PAT_MRT3847_8462C.1.pep
MVNSTPTSFYRTTTLTPSPSLLSTPLPSCSSSSTHHHSYLHPRHSSFHTQPLRLSNLRYHTHLPSTPKTLKVNCSTSEPLKVMISGAPASGKGTQCELIVQKFGLVHISTGDLLRAEVAAGTEIGNKAKEFMNTGQLVPDEIVTAMVAARLAREDVRHKGWLLDGYPRSFGQAQSLEKMQIRPDVYIVLDVPDEILIDRCVGRRLDPVTGKIYHLKFFPPDTEEIKARLITRPDDTEEKVKSRLNIYKQNAEAASSSYSSITHKIDGSHSKEAVFKEIESLLSQLQQDKVKIIESGEKQFLIQRRTD

SEQ ID NO: 268669 - protein, 139 aa, Glycine max
  Clone ID: PAT_MRT3847_84630C.1.pep
VETLFFFFPVFGGADKHSYRYLFIRAPVKVLKHPIPRHFYRKELIWHNKKDHTWGGPPPPPSLSIGVPRSNKGFALGLSLLGAGAEKKKLDTPLRGHHITLAGENLSDTALPEIFFYWVKETTGGGNYWRHPQIPGTPP

SEQ ID NO: 268670 - protein, 42 aa, Glycine max
  Clone ID: PAT_MRT3847_84631C.1.pep
KPNKAAPVHASAHGIWIMFVFLHSYVLFIFFIFYILIISTIL

SEQ ID NO: 268671 - protein, 185 aa, Glycine max
  Clone ID: PAT_MRT3847_84632C.1.pep
MGASGNNFLQVVAKNFDVLALPLVTLVYPLYASIKAIETRSSTDDQQWLTYWVLYSLITLFELTFAKVLEVLAIWPYAKLILSCWLVLPNFNGAAHVYRHYVRPFYMNPQMPQMPQMPQIPGTSQMWYVPRKNIFSKQDDVLTAAERYMEEHGTEAFERLITKADREARARRNGNYMIFDDDYID

SEQ ID NO: 268672 - protein, 56 aa, Glycine max
  Clone ID: PAT_MRT3847_84633C.1.pep
RHLESGPSHSLRRRSSNQQLMLHQGTGMGKGIRYSVQGGVRRTAQIIRDTTERLSP

SEQ ID NO: 268673 - protein, 76 aa, Glycine max
  unsure (1)..(76): unsure at all Xaa locations
  Clone ID: PAT_MRT3847_84634C.1.pep
XHXFNLFXXFLXXRSXXPXXXFXYXSXLLMLXXVVVCXXVXFILCLCELLXXFXLXLTFXMNXXXXVYFXXWSSXX

SEQ ID NO: 268674 - protein, 45 aa, Glycine max
  Clone ID: PAT_MRT3847_84635C.1.pep
WLIDMTKQTNEFFYPGLIWVYIHPYAVTLMLCCLSEGRGREIGRK

SEQ ID NO: 268675 - protein, 65 aa, Glycine max
  Clone ID: PAT_MRT3847_84636C.1.pep
LPFEGLDPPPRVPRTTPNPPGSRGFPCPRFPVFSPPLLLECPGRLDLRPPLNPVCQLCFFPVVPF

SEQ ID NO: 268676 - protein, 118 aa, Glycine max
  unsure (1)..(118): unsure at all Xaa locations
  Clone ID: PAT_MRT3847_84637C.1.pep
KMTQVDPLEEANFDQELKAVVQESMEQRRQELRGRPTLNMMIPMNVFEGSAKDHHGRGVGGKXGDEALDEEXGGNKEVQVRVLVKRGNKQQTKHMFIPRNSSLVQSTKQKEAAELQEK

SEQ ID NO: 268677 - protein, 156 aa, Glycine max
  Clone ID: PAT_MRT3847_84638C.1.pep
MPSSNSGESRRASKPQSSGGAAPPPPEQENPPCPRCDSTNTKFCYYNNYNYSQPRHFCKSCRRYWTHGGTLRDIPVGGGSRKNAKRSRTHHVAATSSSSTSCTMTSAQEHHAHTLLAPVASTHYGVLDGDVKQTSNGNGNVCGSFTSLLNNTHGSG

SEQ ID NO: 268678 - protein, 53 aa, Glycine max
  Clone ID: PAT_MRT3847_84639C.1.pep
HACALIYSIFMRILLCLWLGALLQVRLHEPHMQPTIIEHSTQTQTAYTLSLFN

SEQ ID NO: 268679 - protein, 79 aa, Glycine max
  Clone ID: PAT_MRT3847_8463C.1.pep
CSPTVQLRAGSMEDILLDTRWEDVICPICLEVPHNSVLLQCSSYDKGCRSFVCDTSQLHSNCLDRFKSTHSMPSSFTYD

SEQ ID NO: 268680 - protein, 65 aa, Glycine max
  Clone ID: PAT_MRT3847_84640C.1.pep
IFDMLYMIDLIEHLRAYDWIDKLGTHLIGVRIKDPALGSTSTDDEFRHKSIMWRYHRGQCSGITK

SEQ ID NO: 268681 - protein, 48 aa, Glycine max
  Clone ID: PAT_MRT3847_84641C.1.pep
MLPIDLLAECSLSKRRSASIVLSIRGYDPRDELSAYSSSQILDLLSGP

SEQ ID NO: 268682 - protein, 43 aa, Glycine max
  Clone ID: PAT_MRT3847_84642C.1.pep
AALVFVLMLVYTSLLTRFTALNLRCRTTTDGSHDLYIPMKCSA

SEQ ID NO: 268683 - protein, 48 aa, Glycine max
  Clone ID: PAT_MRT3847_84643C.1.pep
GKSQTGLRAPKLRTLPLQSYYNFLAAPLFTKLGLVQHLCNCNNFCFPP

SEQ ID NO: 268684 - protein, 61 aa, Glycine max
  Clone ID: PAT_MRT3847_84644C.1.pep
RTRISIAQHILRSVSFSNTVSWGQQQESQVLPLGIIAGKGLSKPFGIGCGPSGSLKMTSQI

SEQ ID NO: 268685 - protein, 49 aa, Glycine max
  Clone ID: PAT_MRT3847_84645C.1.pep
KKHEVGNVIVRSVELVSNHGRAVHAGRSLKMTNEKRIGDGPKDDDPRSI

SEQ ID NO: 268686 - protein, 47 aa, Glycine max
  Clone ID: PAT_MRT3847_84646C.1.pep
VELLELRDPCESTRRFKSSSTHCCNKFYSQICYPARQQNVQDFVSYR

SEQ ID NO: 268687 - protein, 58 aa, Glycine max
  Clone ID: PAT_MRT3847_84647C.1.pep
MSQLARTLNKLFIAHPVTISCILRYSICAHRLNLSFNASRVMVSSACFPNAIKKEIVQ

SEQ ID NO: 268688 - protein, 89 aa, Glycine max
  Clone ID: PAT_MRT3847_84648C.1.pep
KLLLFAAKVNGIATLVSFSDNIAPTVPTRSPTVAPIQFIAFSSNLIFFIQIRGLFALDVIKREFGNREEKSEMRVKHCSVSVVYSSESE

SEQ ID NO: 268689 - protein, 57 aa, Glycine max
  Clone ID: PAT_MRT3847_84649C.1.pep
DRQLFCSPVSQSRRTSILPDPMNALNVKNQHPSAKLQGFPNHAIRPRRPRRSARQVD

SEQ ID NO: 268690 - protein, 69 aa, Glycine max
  Clone ID: PAT_MRT3847_8464C.1.pep
CSPTVQLRAGSMEDFLLEAWWEDVICPICLEVPHNSVLLQCSSYLDTCRSFVCDTSQLQNLIGSFLQHT

SEQ ID NO: 268691 - protein, 148 aa, Glycine max
  unsure (1)..(148): unsure at all Xaa locations
  Clone ID: PAT_MRT3847_84650C.1.pep
LPLEIGPGDQFLMYAYATDETLYLMPLSYVXSTKLGALFTQAXRSEPXPWLTPDGKTQVTSGSYNDNVSMAPDETHTELIYTQHVWTETSDXFASDLTVHVSNPGNPDMLLDQKTIIHSNPSGRIVIGGPYSDAGMTARKTIIDAYPG

SEQ ID NO: 268692 - protein, 235 aa, Glycine max
  Clone ID: PAT_MRT3847_84651C.1.pep
HASEEIEDKKTDSVEQVEEDKKVGVVEEAKEDKKEDGVKEAKEDKKEDGVKEAKEDKKEGVEEATEDKKEDGVEEVNEDRKEDGVGEVKEDKEVDGVSCVKEVEEDGEVDGVKKVEDKKGDELKEIEEDKKDDHISENDKMDEDTEIKETMEGEPENGKEESEKPVVDAMEVEGGIKEKEESKENEKVEVVMEEDEKDEDEDKDNIDKSKEEKAEDSKGEKGSKKRGEGRSMGRK

SEQ ID NO: 268693 - protein, 300 aa, Glycine max
  unsure (1)..(300): unsure at all Xaa locations
  Clone ID: PAT_MRT3847_84652C.1.pep
MGEEESVNEVSKTDSNGKSFQEKTLDEITEKKDLETDGGKVLENNGIKKNIVKEIEDKKAVGVEKVEEDKKNGVVEDAKEDKKEDGVKEAKEDKKEVVEEVKEDNKEDGVEEAKENKKEDGVEEVKEVKEVDGVKEIKEDKEVDGVKEVKEDKEVDGVKEVVEDKKSDELKGXSGKKMKKLDKGGKQKTSTPTKSTSKRNPEKVTRGKGKKKEKSSPSDNQLRDAICEILKEVNFNTATFTDILKKLAKQFDMDLTPRKASIKSMIQEELTKLADEADDEDREEDAEKDEAPSTGQEVEG

SEQ ID NO: 268694 - protein, 395 aa, Glycine max
  Clone ID: PAT_MRT3847_84653C.1.pep
MESNSEFDVIIIGAGVMGSSTAYHATKRGLKTLLLEQFDFLHHCGSSHGESRTIRLTYPHHYYYPLVMDSYRLWQEAQAQVGYQIYFKAHHMDMAHHNEPAMRALIDYCRNLQIPFKLLGRQELADKFSGRIDIPEGWVGLSNEHGGVIKPTKAVAMFQTLAYKNGAVLKDNTKVIDIKKEGGTGGVEVFTAGGEKFRGRKCVVTVGAWAKKLVKAVSGVELPIEPLETHVCYWRVKEGQEGKFAIGSGFPTFASFQKDIYVYGTPTLEFPGLIKVGVHGGEPCDPDKRPWGAAVMMEKLKEWVEFTFKGMVESTEPVIKQSCIYSMTPDEDFLIDFLGGDFGKDVVLGAGFSGHGFKMAPVIGRILTDLAVHGETKSHDISYFRIARFRITSMI

SEQ ID NO: 268695 - protein, 62 aa, Glycine max
  Clone ID: PAT_MRT3847_84654C.1.pep
GIEGPVSNQCPRQACAVQLIFRKQQEQPSPSCRVRDWSRRAQASYSMHFSRLWHQLTGKQKD

SEQ ID NO: 268696 - protein, 90 aa, Glycine max
  unsure (1)..(90): unsure at all Xaa locations
  Clone ID: PAT_MRT3847_84655C.1.pep
DILSVLPDGSKMDITKVYPLNACFDDRDDXPVDICTTRXYGGSSKRTVHEVAQLANEDFFSINILEHSLASVANVIRPLVETSRNEDLDA

SEQ ID NO: 268697 - protein, 148 aa, Glycine max
  Clone ID: PAT_MRT3847_84656C.1.pep
MEKMQHAEELVREFLVFRGFTNTLESYEAELRTDIGKGFEVDKILDLIFSLYVPKFHADSLLALLAFFKHYLSSSSDAPLASTLSKLETSLLRFYVVHAVQCNRNDKVVDFFTLYGAELLQRSQDWTNWFAIPYKKNPHLDPEFRVFF

SEQ ID NO: 268698 - protein, 86 aa, Glycine max
  Clone ID: PAT_MRT3847_84657C.1.pep
MSAISAKQALEVAVNAAVCGSKGHRYCPVSQRVLLRLNDNKIAYTLHLNDCSSIPVRFLGVNPKGNVPLVPFDGKWVADSDVIVGI

SEQ ID NO: 268699 - protein, 437 aa, Glycine max
  Clone ID: PAT_MRT3847_84658C.1.pep
GRNTPDPRVRALEIVSDVSDSVDGVGEVLQPDSEDRDARPVNWETDASEVHPPTEASSNGIVSLSSVQNGMAEKRSSLVMDDSSSTCSTDSLPSMVMNDHYKGNSFSNYKVQKSPNRGKNQVKASCNVDSCTTEMDSQPSGSSADAVDVNESGSSKLGGSEPEGAVLCLQDRLKWLDQPVIRKEEDISSLQKKQTIKDQVNIERTVDNESLSKEKKSAVPSSSSSPPRNLPVQMKSENQTRVTGDPVHVRKTSFGVSQSTDKEASSSSTSVSQVTIGPKTEIQKASPPRLTERSMAQVAMLSRPSSAPLVPGGPRPTAAVVSMVQTAPLLARSVSATGRLGPDPSPATHSYVPQSYRNAIMGNPVVSTAASLPHSSSSSGVNPSPGYSHPPMVSSPLFISRSSDKMDSNTSQSGVPFGMISRDVLQNGPNWIDSSQR

SEQ ID NO: 268700 - protein, 144 aa, Glycine max
  Clone ID: PAT_MRT3847_84659C.1.pep
AAAPSPNEENVYMAKLAEQAERYEEMVEVIENDSAAADNEELTVYERNLLSVTYKNVIGARRTSWRIISSIDHKEESHSNDDHVYVIRDYRSKIYSNLSNICDSILKLLNCLLIPFASSYEFKVFYLDIKADYPQYLIKFKTST

SEQ ID NO: 268701 - protein, 65 aa, Glycine max
  Clone ID: PAT_MRT3847_8465C.1.pep
HEKTEIPLYIFKNVFVHPATPQPFLIPPFCFFYSYFRAFPSSVSHLVFFRELSINYSRLASFSSA

SEQ ID NO: 268702 - protein, 54 aa, Glycine max
  Clone ID: PAT_MRT3847_84660C.1.pep
KMELSVTHLKREENILHPNYNKKRYHTIDRGGGKTQNGRDILGQLTDFDKCDVN

SEQ ID NO: 268703 - protein, 101 aa, Glycine max
  Clone ID: PAT_MRT3847_84661C.1.pep
DLFTSSTAKSLGQLKHMSIRDCQAIQEIVSKEGDHESNDEEITFEQLRVLSLESLPSIVGIYSGKYKLKFPSLDQVTLMECPRMKYSYVPDLHQFKPLEQI

SEQ ID NO: 268704 - protein, 249 aa, Glycine max
  Clone ID: PAT_MRT3847_84662C.1.pep
MAYLNARRTLASTLSRALSSSSASASRFRFAFAFALLPAKQTAPNPHWASFAVRTQSSGSGYSPLNDPSPNWSNRPPKETILLDGCDYEHWLIVMEFPDNPKPSEDHMVNAYVKTLAQVLGSEEDAKNKIYSVSTSTYTGFGALISEELSYKVKELPGVLWVLPDSYLDVPNKDYGGDLFVDGKVIPRPQYRYSDRQPSRSRPRPRHDRRRETMQVERRDQQNWNQGQGGPMQPSTAMNGQNFASGGEH

SEQ ID NO: 268705 - protein, 95 aa, Glycine max
  Clone ID: PAT_MRT3847_84663C.1.pep
DWCTASYRAPLLSPLKEPLFHSMSEPISTLLTSVFQVACPQTTSHCCIYCSCSSSMTDFVTRLRMVQYLLCSHSHASRAEHNCPLDNNYFNANSC

SEQ ID NO: 268706 - protein, 57 aa, Glycine max
  Clone ID: PAT_MRT3847_84664C.1.pep
GRGFIIKNHSFATLHFSWLLPALRLYSGGLLTPLVEVIEDTCFFCSRLPERGFFSHN

SEQ ID NO: 268707 - protein, 75 aa, Glycine max
  Clone ID: PAT_MRT3847_84665C.1.pep
FFFFFFGKIQLAYSNLGRDFNCTNHTPYYVSNSYVKITSEKMFKNLKPLDAELHLICISGANLHQLITLCKHQNP

SEQ ID NO: 268708 - protein, 121 aa, Glycine max
  Clone ID: PAT_MRT3847_84666C.1.pep
NKLLFKTRARFPFFFFPPSICPMASNPPGGEKYFPPPFFFWAPNFFFFNPPLLGSLFFQWPRVPPLCNKGTPLFFEAPNPIKMDFSLTTPKHLLNLKNWGPPAPNPFFPPPKLNKTFLVFG

SEQ ID NO: 268709 - protein, 59 aa, Glycine max
  unsure (1)..(59): unsure at all Xaa locations
  Clone ID: PAT_MRT3847_84667C.1.pep
LYCWFTXLLYHIPEGTSPNLIITLTVNAYQVLTIKLPDIIHYTYNDRYSITHNLVLIMK

SEQ ID NO: 268710 - protein, 67 aa, Glycine max
  unsure (1)..(67): unsure at all Xaa locations
  Clone ID: PAT_MRT3847_84668C.1.pep
XQSLVDLXCXYXFRRLSRIXXTIHATLKRVDHFVIXDPCGXRXLPGPSXRHXNFPYXIDRXXAXKXX

SEQ ID NO: 268711 - protein, 107 aa, Glycine max
  unsure (1)..(107): unsure at all Xaa locations
  Clone ID: PAT_MRT3847_84669C.1.pep
HTYVXXSIRDSSSXXKXXXDXXXXXEHRXIXXKLQXLSRXXXXLXRXXXKXXXGXXXXXXVDEYXARVDXCXXXXXNNHXXXXAXTXDDYXQRXTXSXAFXXXIXXG

SEQ ID NO: 268712 - protein, 78 aa, Glycine max
  Clone ID: PAT_MRT3847_8466C.1.pep
KEAFIGIHTRSLSFKRESNVPYFKSFPSLKGVPGALLFHLDITFWLLAPGFFLLPFYSFWTFPLLSFSFFLPPGWVFF

SEQ ID NO: 268713 - protein, 49 aa, Glycine max
  Clone ID: PAT_MRT3847_84670C.1.pep
VVNLYQIHPDKTRGSSECVPLCMWYMKDWIKFFYPSQLMLNVASATKGV

SEQ ID NO: 268714 - protein, 57 aa, Glycine max
  unsure (1)..(57): unsure at all Xaa locations
  Clone ID: PAT_MRT3847_84671C.1.pep
RGRPXNXKKSFKFLXXXXXADLVSLDRGWAIKLSLNYRYIGNFFCSKSNSHTTYKKW

SEQ ID NO: 268715 - protein, 66 aa, Glycine max
  Clone ID: PAT_MRT3847_84672C.1.pep
PFLSLFIIIQSLLLNHHSTYFKHDGWGTCELKLKNIYTYKGLPSYLCRSCIHIFLNCGINNRMLSS

SEQ ID NO: 268716 - protein, 60 aa, Glycine max
  unsure (1)..(60): unsure at all Xaa locations
  Clone ID: PAT_MRT3847_84673C.1.pep
THFDTATFSTTYKIVGDXKXIPCDLSHNSSSSGSTXXSVDLEHEYWGASQHLTSRSQVIL

SEQ ID NO: 268717 - protein, 90 aa, Glycine max
  unsure (1)..(90): unsure at all Xaa locations
  Clone ID: PAT_MRT3847_84674C.1.pep
EIVQSGQAVSMIGGPLAAALSSPIRMSTTNVYGTAATAVGDYXPSQYMADIGMRPNAVKVPCVQFTTRLYTGSLQVAEPHIPTYYFLYNS

SEQ ID NO: 268718 - protein, 157 aa, Glycine max
  Clone ID: PAT_MRT3847_84675C.1.pep
MSEGTSLVLESSENGTDLSQDDIGTIEEIPEETILSRQTSVNLGPFIGQRFVSQEAAYEFYCSFAKHWGFSIRRHRTRGKDGVGRGVTRRDFTCHRGGYPQIKPSDDGKVQRNRKSSRCGCQAYMRIVKRSDFDVPEWRVTGFRNIHNHELLKSNEV

SEQ ID NO: 268719 - protein, 27 aa, Glycine max
  Clone ID: PAT_MRT3847_84676C.1.pep
MLKLTNLQCFGVYFFIELHSRRPGMAF

SEQ ID NO: 268720 - protein, 67 aa, Glycine max
  Clone ID: PAT_MRT3847_84677C.1.pep
TIAFSRGEFIRYALDSLKLKHGALPQAPNRPCLNHAAITCRAPLYYTRLKAPEQTIMEKGSRILMRW

SEQ ID NO: 268721 - protein, 109 aa, Glycine max
  unsure (1)..(109): unsure at all Xaa locations
  Clone ID: PAT_MRT3847_84678C.1.pep
PPKCTSFFWVNQGGALPGFVAPSWAIKKKGAQXKANPLPHCFPLLLGGQIRPFFPPPPKFFVPNPVFFFPGVGLNLVSPLKWGRAPPSQKKKKKKKKKKKKKKKKKTPP

SEQ ID NO: 268722 - protein, 84 aa, Glycine max
  Clone ID: PAT_MRT3847_84679C.1.pep
FYFHLAPIQLQATKTRNRFQFSSALVTITTPHHIHIKKVILHKKIDHHEPFCNTKGPFIKKMDEIFIFQAEESIRNSKKEAITY

SEQ ID NO: 268723 - protein, 81 aa, Glycine max
  Clone ID: PAT_MRT3847_8467C.1.pep
ARNSARAHLHITKFYPILSLVMKNKGLGWSIMARTTKIANYYKTMGHCLWANRVISDSESTALFNHANSHHALALSYGHDE

SEQ ID NO: 268724 - protein, 92 aa, Glycine max
  Clone ID: PAT_MRT3847_84680C.1.pep
EATFPSPSSPLLLKTAPASCGPPKAAPALPSPIKTNTFYDPPLKCPIARTFYKSPTPDEPTLIIGGYLTYYGSFVFFTEATKLMIEKKANHT

SEQ ID NO: 268725 - protein, 44 aa, Glycine max
  Clone ID: PAT_MRT3847_84681C.1.pep
NNLVTIYRVIKREVVSSGERKSIINFGFYYFLKKSKIENFNKNL

SEQ ID NO: 268726 - protein, 64 aa, Glycine max
  Clone ID: PAT_MRT3847_84682C.1.pep
WEPLYSKGKTSGGIGLRVHVLSKTRVSRKGFMFVWGVNLFLKLFLCGTQGSLFWVAKGKRSYMA

SEQ ID NO: 268727 - protein, 130 aa, Glycine max
  Clone ID: PAT_MRT3847_84683C.1.pep
MKHSASRGKSQGRLTRKDLRLHKLVFEADVLPDGTELAYYAHGQKLLVGYKKGCGVFCTCCNEQVSASQFEAHAGWASRRKPYLHIYTSNGISLHELSISLSKDHRRFSNNDNDDLCIICEDGGDFCVWM

SEQ ID NO: 268728 - protein, 62 aa, Glycine max
  unsure (1)..(62): unsure at all Xaa locations
  Clone ID: PAT_MRT3847_84684C.1.pep
GSVWISSXLKGLNDDCEHFXCFPPVHLFXSYKEGFLHSTIPPWFYNATPYTPYYPLLLIHTF

SEQ ID NO: 268729 - protein, 138 aa, Glycine max
  Clone ID: PAT_MRT3847_84685C.1.pep
VGVGRHSDMGAITVLLQDGIGGLYVKVEEDEDAGKGEWLEIPPIPGALVINIGDTIQILSNGKYKSAEHRVRTTSTQSRVSVPVFTMPIATDRIGPLPEVVKKDGLARYREVVLQDYMNNFFGNAHAGKKSFDFARIN

SEQ ID NO: 268730 - protein, 168 aa, Glycine max
  Clone ID: PAT_MRT3847_84686C.1.pep
MENSLYDELLQEIFQKLPSSSSSSVSLVCKRWLRLHRSSTTSLSLRLTTPHFSLIPSLSSFLSHHPFLSSLSLSLSPPLFSLSPHLLSLIISPFSNLLSLSLTPAPVSLSSLLSLSASCPRLNSLRITLPRPVFLNWLLSFPCLKELSITFSSDDEESHDFDSDSDFE

SEQ ID NO: 268731 - protein, 122 aa, Glycine max
  unsure (1)..(122): unsure at all Xaa locations
  Clone ID: PAT_MRT3847_84687C.1.pep
PPWGGGVQKDLGGGKGTLGAPPGRPPGWAPPGPAGGSFLRGGAFPPPGGPKKRGGWAPRLCWSPPPPPLGKIPKKPPPPGXSKAPPPGGSIEAPPPLYGGLCKKKVRGPPSQYPPGVFCNKT

SEQ ID NO: 268732 - protein, 311 aa, Glycine max
  Clone ID: PAT_MRT3847_84688C.1.pep
MRLAMSTPSKSIICSSEDDYELRRGPWSVEEDYLLTHYIANHGEGRWNLLAIRSGLRRTGKSCRLRWLNYLKPNVKRGNLTSEEQLLIFELHSKWGNRWSKIAQQLPGRTDNEIKNYWRTRIQKQAIYAKFEDHRRAGFVEFVKGLQMTRCLHKSQESSPSAMSTQDQAIPLPFDGVTVPHYSSFGIGTTPTIQITCHGDLNHLNQHEQNSDSEHHNSSCISSSESANIPNMSQPFGYTTSQFQALDNCDFGMCLYDGYSIDNNSYDRDALNLTTTMVAGNLELPVFDCQTLETNRLNKEFASSTWSMDEL

SEQ ID NO: 268733 - protein, 62 aa, Glycine max
  unsure (1)..(62): unsure at all Xaa locations
  Clone ID: PAT_MRT3847_84689C.1.pep
QAARLFDYXLIHILLXLEFETLFIIERNILHVHQSFLRVCYFRRSGTKFHNITNFKKIEDLS

SEQ ID NO: 268734 - protein, 63 aa, Glycine max
  unsure (1)..(63): unsure at all Xaa locations
  Clone ID: PAT_MRT3847_8468C.1.pep
VTFXSIYSVXQQEXVXSYKQKWLVXQYVTSXSTXXXLPCQXXQXTAXXQDTIXNYKLRXXGXX

SEQ ID NO: 268735 - protein, 38 aa, Glycine max
  Clone ID: PAT_MRT3847_84690C.1.pep
VQLWTASIGGLSMNDFIVAAKIDQIKTSDLVPRKRVWA

SEQ ID NO: 268736 - protein, 66 aa, Glycine max
  Clone ID: PAT_MRT3847_84691C.1.pep
MEIKKRFGVLMCAEDSEYVKKVYGGYSGVFVRMLAEEGETWDVYKVARGEFPDENDLGLYDGFVIT

SEQ ID NO: 268737 - protein, 119 aa, Glycine max
  Clone ID: PAT_MRT3847_84692C.1.pep
VLAFKGPTLPKGGPFFLDRLNWVGAPPPRVYFLLGPFKKKGHLFASLRGFGLGKPPPLGAPPGAFSSRKSPQPKGGAQGRKVKALGKRGAPNFKGLSLEVPSIGLGCPLGDFKTLGWFI

SEQ ID NO: 268738 - protein, 114 aa, Glycine max
  unsure (1)..(114): unsure at all Xaa locations
  Clone ID: PAT_MRT3847_84693C.1.pep
WCGWASCGQVNLTHSDGTEHXDACNGTKSEPHPWELFNLIAGCGPNNEIQMWSHEGAKQTTGRXSILIDKPKQSTVXDTRLGIAQYXEIVGKTLRPDLNVPQATAIACDNATTS

SEQ ID NO: 268739 - protein, 52 aa, Glycine max
  Clone ID: PAT_MRT3847_84694C.1.pep
ASLVSCSAYHKGKINVLGGLLDDPMVSVSISEDSLRMLMQEVRVIPPIPVFL

SEQ ID NO: 268740 - protein, 67 aa, Glycine max
  Clone ID: PAT_MRT3847_84695C.1.pep
RRKHYQCSPKENQIVYGFVKFHHFSDHVSMGFNIASSLFKSTKHGCTKSKIGSFLWQLHRMTTIKSF

SEQ ID NO: 268741 - protein, 40 aa, Glycine max
  Clone ID: PAT_MRT3847_84696C.1.pep
SCRCSCDTKCLIVLLYRTIKITHMTHYFAEEVLLLNPSAK

SEQ ID NO: 268742 - protein, 205 aa, Glycine max
  unsure (1)..(205): unsure at all Xaa locations
  Clone ID: PAT_MRT3847_84697C.1.pep
MASAGDLFRHGLPEVGGAGKLHVLAVDDSHVDRKVIERLLKISSCKVTVVESGSRALQYLGLDGDLANSIGLDSVKVNLIMTDXSMPGMTGYELLKKIKESSVFREVPVVVMSSENILTRIDSCLEEGAEEFLLKPVKLSDVKRVTDFIMRGEGMKGVKRSKKRSRSDDCIPSLSTAFSSVSHPCDLSSPPSPCVSQSKKSRLSI

SEQ ID NO: 268743 - protein, 65 aa, Glycine max
  Clone ID: PAT_MRT3847_84698C.1.pep
QNTVVIIRPGKAKTRYRRYISRRVPIIVYRTEGAKAVKAFRNIPGIEVDNVARLNLLKLAPGRHL

SEQ ID NO: 268744 - protein, 122 aa, Glycine max
  Clone ID: PAT_MRT3847_84699C.1.pep
MASAGDVFRQGLPEVCAAGKLHVLAVDDSHVDRKVIERLLKISSCKVTVVESGSRALQYLGLDGEKSSIGLDSVKVNLIMTDYSMPGMTGYELLKKIKESSVFREVPVVVMSSENILTRIDR

SEQ ID NO: 268745 - protein, 248 aa, Glycine max
  Clone ID: PAT_MRT3847_8469C.1.pep
RTSRIVKKKRMLSEDSDASASSPPARKKALKQGDMQLELLRMVLKREAEKNKNKSKSKNKKNNNKKKNKKKEKRRKEEKEELCYTKEELRRELPNGVMEISPASPTRDYNNVGSHCDVKVGVDSKTVTPRYFRSKNVDRVPAGKLQIVPYGSNLKKGKRKKCHWCQRSESGNLIQCSSCQREFFCMDCVKERYFDAQNEIKKACPVSRGTCPCKDCSASQCKDSESKECLTGKSRVDRILHFHYLICM

SEQ ID NO: 268746 - protein, 56 aa, Glycine max
  Clone ID: PAT_MRT3847_846C.1.pep
KGRPFFFLFYFFIFFFIFVIFLFFIFNFIFFFFIWFFFFFFFVFLCTKTSHSINFA

SEQ ID NO: 268747 - protein, 64 aa, Glycine max
  unsure (1)..(64): unsure at all Xaa locations
  Clone ID: PAT_MRT3847_84700C.1.pep
MRECISIHIGHAAIQVGNACWEXYCLEHCIGPDGQMPSDKTVGGGDDAFNTCFSETCAGKHVSR

SEQ ID NO: 268748 - protein, 70 aa, Glycine max
  Clone ID: PAT_MRT3847_84701C.1.pep
FLFGTKQNHLELSGGLKNQRGKYTRGGTHNLTYNTHTLTHSYTDTIILNTPNTSLFFYAHINLIDITEKI

SEQ ID NO: 268749 - protein, 84 aa, Glycine max
  Clone ID: PAT_MRT3847_84702C.1.pep
MGVRPPPNPLSSPKSGAPKKKAVAKPKAKNGAPKPKAKAAKAAPKKVPPKPSKKTPVKAVKKPKRVVKKPKRVEFPAKKAQAKK

SEQ ID NO: 268750 - protein, 111 aa, Glycine max
  Clone ID: PAT_MRT3847_84703C.1.pep
SWDGPLSSVKLIIQGKNLELTDAVKHPAEHNARKTPQNHTHLPKQTKDKITIRQRPKFRAKTHNSYHAREGENHQTAAVRADEDDKNLYEKKKTAKTIHKRNWLQLNDTVS

SEQ ID NO: 268751 - protein, 85 aa, Glycine max
  Clone ID: PAT_MRT3847_84704C.1.pep
IIYILILVGIAMAVVIILTTCTQLPCFNRLPCFNRSYSICQFNGRYKFLVMCFAWNLQSGRCGLHCQCSIFYFIFVQSLAHKTFL

SEQ ID NO: 268752 - protein, 51 aa, Glycine max
  Clone ID: PAT_MRT3847_84705C.1.pep
MGIIRSCFSFIAGTVFGIYVAQSYQVPDVKKEADTALLQAKQVEEKYRKSK

SEQ ID NO: 268753 - protein, 108 aa, Glycine max
  Clone ID: PAT_MRT3847_84706C.1.pep
ELQRRISTTLYRSTAHMEALRVAPRSPTRVRRHQPRGRMGLQPLTALVRHALHIAASLSRRPRGRSRFRRRRSSQTIAQRRGIMHTCASCRIVSTTRTATAGQFQLAL

SEQ ID NO: 268754 - protein, 80 aa, Glycine max
  Clone ID: PAT_MRT3847_84707C.1.pep
QVTFIVFVVFFFSSSSSHFPPLSMAPPTISKIRIRNLNRSKKENPYSSYTRTFLISAEASSASVPPRRSSRIARTTIISR

SEQ ID NO: 268755 - protein, 85 aa, Glycine max
  Clone ID: PAT_MRT3847_84708C.1.pep
HTHCCQYNSTGLIASQKNPSLCMDSDTRQQNFHDNGPDAYDYQQIRILLQLVRQKHIFLAWNFSLFEAKLAQPHLKTDPEPSVSE

SEQ ID NO: 268756 - protein, 236 aa, Glycine max
  unsure (1)..(236): unsure at all Xaa locations
  Clone ID: PAT_MRT3847_84709C.1.pep
MKKLKHYYSHHHHNSSEQQQRKCIFPLITIISLFSLFFLLLFALTLTPLSATRVFPFSISTATPPPPSPFVESKLFPLPTPPPSPLPPRLAYLISGSSGDAAALLRTLSALYHPRNRYVLHLDRDSSPEDRRLLTRHVDRHLTFQKFRNVRVVTKANLVTYRGPTMVANTLHAAAIALTESDDWDWFINLSASDYPLVTQDDLLHAFSHLPRDLNFIDHTRDIGWEXHQRARPILL

SEQ ID NO: 268757 - protein, 142 aa, Glycine max
  unsure (1)..(142): unsure at all Xaa locations
  Clone ID: PAT_MRT3847_8470C.1.pep
XXXXSXTXXXXXXXXXXXXXXXXXXVIXXXXXXXXXXHXRXXXXVXTXQXXXCXXXXXXRXXXVXXXXIXXXXETVTSSHDXAXXNXSXSXACXXXAXLARSXXXLXHXXXXVXXRQXXXRGSRAXSLXVRXXXETXDAXAX

SEQ ID NO: 268758 - protein, 293 aa, Glycine max
  Clone ID: PAT_MRT3847_84710C.1.pep
KKGGGSLFSASAFDDGEEEEDETVIRFSGKKKSSRGSKNSASAFDAIDDDADGKVVDDKNDDVDDDDEPVISFTGKKKSSKGGKKGGSVFSAAVLGEIDDDEENKDPDGGGDDDDDIGPITFSGKKRKSSQKAANSVSKGASVEEGDDKDEDDVSLVAFSGKKKSSKKKGSSTAAKGSDENMDVVDPEAPSVGSTDAGNSNVNKSEEVAGNSKNKKKNKKKSGRTAQEEEDLDKLLAELGETPPVPKPTTLPQDDKVQPIPEVVPVADASGQKEGPKEPRRASLLQEEKYKKG

SEQ ID NO: 268759 - protein, 81 aa, Glycine max
  Clone ID: PAT_MRT3847_84711C.1.pep
TNYNSTKPVFILNIDEGNGKGNITRFYSTEALRVTQHILQDISPPHYNDPFVSQNKGLHVLYSNSEAENLAGIPFDWWRVC

SEQ ID NO: 268760 - protein, 235 aa, Glycine max
  Clone ID: PAT_MRT3847_84712C.1.pep
EVAGISKNKKKNKKKRERPAQEEEDLDKLLAELGETPPVPKPSTPPQDDKVQPTPEKALEADASGEKEGEEETVDTAAAKKKKKKKEKEKEKKAAAAAAAAAAAVAGTVPENETAEDKAEVIEPKKNDSKAKKAADKKVPKHVREMQEALARRQEAEERKKREEEERLRKEEEERRRQEELERQAEEARRRKKEREKEKLQKKKILGRPLSEKQEDVPRRLEAMKKQILNNTGGM

SEQ ID NO: 268761 - protein, 53 aa, Glycine max
  Clone ID: PAT_MRT3847_84713C.1.pep
LKTANYNTSFISSINMNLIINHRNSLDHILNPLTEVKLKLIIYIYRTLPLGAG

SEQ ID NO: 268762 - protein, 114 aa, Glycine max
  Clone ID: PAT_MRT3847_84714C.1.pep
VVTVFNNDPSNHPFVVKFFDNPNVKAMMFVNFTADNADSLKLKFRESAEQYRQQGVSFLVGDLEASQGAFQYFGLNENQVPLMIIQHNDGKKLLKTNVEPDHITTWMKAYKDRK

SEQ ID NO: 268763 - protein, 53 aa, Glycine max
  Clone ID: PAT_MRT3847_84715C.1.pep
CHLAEQTDTVDFQLPDVFGKTLTTGDGSILALGCIHLGLDVELGLNTHKGANK

SEQ ID NO: 268764 - protein, 57 aa, Glycine max
  Clone ID: PAT_MRT3847_84716C.1.pep
DKVIEKASNNKIATIILTERSIFPSGSSKGPIPQCQLSNPAPILLALASSWFGLSDG

SEQ ID NO: 268765 - protein, 113 aa, Glycine max
  unsure (1)..(113): unsure at all Xaa locations
  Clone ID: PAT_MRT3847_84717C.1.pep
HSLSIPRSIPSVPSHFSPLLPPNPHPPPLLDHTXRPHPLLAPCPPLXAPLSPPNSSPSSSLASTSPSSASSTPAPPTLSSSPPSPSKSPSSTLVTALVEIHRQNGIFWFEIGI

SEQ ID NO: 268766 - protein, 241 aa, Glycine max
  unsure (1)..(241): unsure at all Xaa locations
  Clone ID: PAT_MRT3847_84718C.1.pep
CCHFVIPFALYFERGQXRRFTWKVWFWLFINVLTRGTMARGLFYYGXATYSANCLNLIPLCTFLTSITCRMEILELQTWATKAKFNXVGAILCVGGALVTSLYKGKEFYLGHRSHFKNVVVSHKTNMLWGTFFLVCCCFSYTAWFIAQVXEVFPMRXLWGTMLASMHYGSNPMXAILGAIIDSSKAAXKLEWNLQLVTIMYSGAMASVATLCLILWTIRVKGPTYPPMFNPLGLIFGALYY

SEQ ID NO: 268767 - protein, 70 aa, Glycine max
  Clone ID: PAT_MRT3847_84719C.1.pep
FALNRALNPPVALRAIFVGGIAAFFKKAGALKAPGGAKMGAAAVSMTAAATAVVGGSHQEQTDVFPQFPK

SEQ ID NO: 268768 - protein, 65 aa, Glycine max
  Clone ID: PAT_MRT3847_8471C.1.pep
SYPPNPFLKLRKTLCFFPYLKKGGEKLHFDVKAELEPLIHFKTTLYQHTFFLTKVFNITPHWPCN

SEQ ID NO: 268769 - protein, 204 aa, Glycine max
  Clone ID: PAT_MRT3847_84720C.1.pep
MAHRKRRLDQLKHPFSPHPFEAVAFGSWQAVEFIKIEGGTMSMHFVDNHHMVMEKGPLSDIRIRSRNATLSDCSRFLRPGIDVCVLSAPQQSDDADAINIDPVWADAKISSVQRKPHDSECSCQFYVNFYVHQGSLGAELRTLSREIKVVGINQISILQKLESTPCENQHYRWASSEDCSIISHTKLLLGKVVCDLSWVSGTTA

SEQ ID NO: 268770 - protein, 72 aa, Glycine max
  Clone ID: PAT_MRT3847_84721C.1.pep
IISIFLKHANKKKRGGKKKKKKNQRGEQKTREKGGAQNRKGLKPNAKIATPKKNPDAKNLMTRKPKLQKKKG

SEQ ID NO: 268771 - protein, 40 aa, Glycine max
  Clone ID: PAT_MRT3847_84722C.1.pep
TFEHIHSKKRSKLEHQKLQDLVYVKYNQALLDRFVCHDVD

SEQ ID NO: 268772 - protein, 62 aa, Glycine max
  unsure (1)..(62): unsure at all Xaa locations
  Clone ID: PAT_MRT3847_84723C.1.pep
LAKQAFYEAIVELDPLGGESSKDSPLVMQFFCDTLTLGAFYKQDNGANXIKKAAPKGGGGQN

SEQ ID NO: 268773 - protein, 95 aa, Glycine max
  Clone ID: PAT_MRT3847_84724C.1.pep
RMPMNVLIVKPMTHMKVMNCDEHFQSLLLIRIYGCSEGHKTWPNHLAPKEESIAYFTEPQSHGTLKGFEQMKFLSSYIGPCSYLRSNIGGVLKSI

SEQ ID NO: 268774 - protein, 127 aa, Glycine max
  unsure (1)..(127): unsure at all Xaa locations
  Clone ID: PAT_MRT3847_84725C.1.pep
MTQETVGVVGKVSEISNSNMSKNGPVIRSECSLTSLESGMTTSALVLLSSQTLRGLQFEDLLGAPAELIRRGKHGXYKVMLDNGVLLAVKRIKDWGISKQDFERRMNLIAQVKHPRVLPPVAYYCSQ

SEQ ID NO: 268775 - protein, 32 aa, Glycine max
  unsure (1)..(32): unsure at all Xaa locations
  Clone ID: PAT_MRT3847_84726C.1.pep
RSELSSWHCARSIQSKCFNSTKCFNMXCAYQP

SEQ ID NO: 268776 - protein, 48 aa, Glycine max
  unsure (1)..(48): unsure at all Xaa locations
  Clone ID: PAT_MRT3847_84727C.1.pep
QKLSIKGCKLYRKEDYPQREIRLFCPKSRIYSMNQGKFQKXIMPCSIR

SEQ ID NO: 268777 - protein, 81 aa, Glycine max
  unsure (1)..(81): unsure at all Xaa locations
  Clone ID: PAT_MRT3847_84728C.1.pep
KKQQCLVPKGGKGXGNVGANXXRKXIXDNXQGFXXPAIRRLARXXGVKXXXGLIYKETXGVLKIFLEXVIRXAVXXTXXXK

SEQ ID NO: 268778 - protein, 59 aa, Glycine max
  Clone ID: PAT_MRT3847_84729C.1.pep
QVGANQLMGTSRFNNPSKVHLGLPYLQDVSQYSLSLTLPFVFILYFCVLPYRHFFQHTK

SEQ ID NO: 268779 - protein, 35 aa, Glycine max
  Clone ID: PAT_MRT3847_8472C.1.pep
RTQARQLGSQVIAKSRRLSRSVVPPTIGAPADSHN

SEQ ID NO: 268780 - protein, 109 aa, Glycine max
  unsure (1)..(109): unsure at all Xaa locations
  Clone ID: PAT_MRT3847_84730C.1.pep
STNSLRGSYLLATSPRTTIHTQHHLSVLLSSFDKDGSGYITXQAFSQACDEFRIKHVRSQEIIKAIDHDNHGRIDYNEFAPMMXKGHLLAVGKKGLENSFSVKSRDVSQ

SEQ ID NO: 268781 - protein, 69 aa, Glycine max
  Clone ID: PAT_MRT3847_84731C.1.pep
VYLFSFFSWLMVLNRCNLHLFYFFVPAATLSIQPYSSCDWIFMKLLVVMLSRNLNRMYCYMIIMSALVV

SEQ ID NO: 268782 - protein, 85 aa, Glycine max
  unsure (1)..(85): unsure at all Xaa locations
  Clone ID: PAT_MRT3847_84732C.1.pep
FXCGXCXXTPLCLXRLKXHGWRDGVEXAQVLLHXTXKXSMEDNXQFXSXEXKLQTLSXSAHEDXPQVXXXSTIXXLVYSIFXNVS

SEQ ID NO: 268783 - protein, 71 aa, Glycine max
  unsure (1)..(71): unsure at all Xaa locations
  Clone ID: PAT_MRT3847_84733C.1.pep
XLLGXSQXXPIKSXNXARLSYSNLTQECFHLYLLSLNFWLFLCTRNTSILTLFSTLLNVVKIEILSRIEKQ

SEQ ID NO: 268784 - protein, 79 aa, Glycine max
  Clone ID: PAT_MRT3847_84734C.1.pep
RIMFSLRSGKNVVIKNRIWGGFPDGHLVLWAYGVFYIQGGFLFSCCRPTLRRLLSECGLKKNLGLGIGLPFSSGFAWDW

SEQ ID NO: 268785 - protein, 67 aa, Glycine max
  Clone ID: PAT_MRT3847_84735C.1.pep
HSHKLSLQFLIQFHLPHFNHSIPPTIYKSSSTSSSTLPSTTPFPLSTSFSLKSFSYPLTSSSTSYTT

SEQ ID NO: 268786 - protein, 27 aa, Glycine max
  Clone ID: PAT_MRT3847_84736C.1.pep
LLALSSQHTQRSRPPSTNTHTTYHPLF

SEQ ID NO: 268787 - protein, 85 aa, Glycine max
  Clone ID: PAT_MRT3847_84737C.1.pep
PKPPGTRADRGPCVIGGALGDGQVQELIIPVDIFLIRMDEGARVEDCSKGAQDRRKPRRTKGAEGILRRPVYDLLTTMQAHTSDQ

SEQ ID NO: 268788 - protein, 110 aa, Glycine max
  unsure (1)..(110): unsure at all Xaa locations
  Clone ID: PAT_MRT3847_84738C.1.pep
MDQHHFLHHHHYHHPQEHRSRYTSLTPQSHLHSHHHNNLPPPPPNPSPPLSYHRTPXPYTPPTPQPQHQQQQFPYTPLPDPLEEEPQPQRHIPYDLPRTTTPWNPNPNPN

SEQ ID NO: 268789 - protein, 45 aa, Glycine max
  Clone ID: PAT_MRT3847_84739C.1.pep
LRHAHDLLLIRLNTDYRPRTPHVICSVWTLVVEAHVLCRLMTAPE

SEQ ID NO: 268790 - protein, 41 aa, Glycine max
  Clone ID: PAT_MRT3847_8473C.1.pep
QKKGLKESERWTNVYFLLGFFVLYRVLCFLVLVRRVSRSKT

SEQ ID NO: 268791 - protein, 72 aa, Glycine max
  unsure (1)..(72): unsure at all Xaa locations
  Clone ID: PAT_MRT3847_84740C.1.pep
IIYTFFTNRIISCIFSLENNNIYTDNICYGGNCLYYLKFSSFHLPSAQIIPDLSLFFRSNQFRACSSXIXHI

SEQ ID NO: 268792 - protein, 67 aa, Glycine max
  unsure (1)..(67): unsure at all Xaa locations
  Clone ID: PAT_MRT3847_84741C.1.pep
GAFXFXRGRRFTTPPPLXXXCXLXFDKIFLXLNCXSTRAFXHXTRIFFYXLXRGKXKFFFKIFLEIY

SEQ ID NO: 268793 - protein, 27 aa, Glycine max
  Clone ID: PAT_MRT3847_84742C.1.pep
MMEATICLIEQGKIKTPPSGRKGGSLS

SEQ ID NO: 268794 - protein, 257 aa, Glycine max
  Clone ID: PAT_MRT3847_84743C.1.pep
MPPSSLFSNMHFLFFFLLSSIHLSVQLNHTTTTTNNSTSLFSLSFPLTSLSLSTNTALKMMLRNSLIANTNNNNTQLKSPPSSPYNYKLSFKYSMALIVDLPIGTPPQVQPMVLDTGSQLSWIQCHKKAPAKPPPTASFDPSLSSTFSTLPCTHPVCKPRIPDFTLPTSCDQNRLCHYSYFYADGTYAEGNLVREKFTFSRSLFTPPLILGCATESTDPRGILGMNRGRLYFASQSKITKFSYCVPTRVTRPGYTPT

SEQ ID NO: 268795 - protein, 95 aa, Glycine max
  unsure (1)..(95): unsure at all Xaa locations
  Clone ID: PAT_MRT3847_84744C.1.pep
DERVAGTAFVDYKSLLMSQRRLGKRIGLTDGFAASTPIEAAIVKHIPSTLTLFNEAIDAHTXSYDDQPSWRRKNAWLYRRFQMRSSYRSTIHDAH

SEQ ID NO: 268796 - protein, 70 aa, Glycine max
  unsure (1)..(70): unsure at all Xaa locations
  Clone ID: PAT_MRT3847_84745C.1.pep
TKTAHXXTLWNHLYELPRRTSHLSFCKRSIRQIEQKWDQFSYIKRTNSRSNRYHLRLQNHNXHYFISAKC

SEQ ID NO: 268797 - protein, 64 aa, Glycine max
  Clone ID: PAT_MRT3847_84746C.1.pep
KKFWKSSLNLTGLAYLRALFFLTNPWGPLNPLKIFGMVNFDQNFLKKFSKIMCPPTNFFPPFPG

SEQ ID NO: 268798 - protein, 63 aa, Glycine max
  Clone ID: PAT_MRT3847_84747C.1.pep
NRACHKPVKKLLKSIMTTFIIKRMNLYIYSSNQQEPAIKDSIDGVALSTVLPARLHCFTRKIQ

SEQ ID NO: 268799 - protein, 50 aa, Glycine max
  Clone ID: PAT_MRT3847_84748C.1.pep
GIDDHILTNFTGLKVFWPCKPTLIVSCTNEARPDYGVARVIERGTEFRYE

SEQ ID NO: 268800 - protein, 55 aa, Glycine max
  Clone ID: PAT_MRT3847_84749C.1.pep
SIQIILRMQVFKVQRLIICGMGFCIYFKLIALHNSNFNYKIHKKTIFFFMYDVGL

SEQ ID NO: 268801 - protein, 78 aa, Glycine max
  unsure (1)..(78): unsure at all Xaa locations
  Clone ID: PAT_MRT3847_8474C.1.pep
LSFSCCCCFCSFSSSLNSLFPTSLEKVKIQKPEHKPAAEVSQEYAAALGSRTGREPQRYRNSRRQGEGCIPXRLTIGV

SEQ ID NO: 268802 - protein, 35 aa, Glycine max
  Clone ID: PAT_MRT3847_84750C.1.pep
TTTFIVSPKQPQFFILNASTILKVSLASHPNNIYR

SEQ ID NO: 268803 - protein, 113 aa, Glycine max
  Clone ID: PAT_MRT3847_84751C.1.pep
LTHTCDNHCYFSANSNTTRVPSQALSSGCTHAPSLTHTQRLSCSLAPSSSNAFVSLLANAPTLFGDFLFSHCYRPTLVFRYRSLYLTLSRVLYTTQHACFVLVPPPPPSRWYY

SEQ ID NO: 268804 - protein, 148 aa, Glycine max
  unsure (1)..(148): unsure at all Xaa locations
  Clone ID: PAT_MRT3847_84752C.1.pep
SXEXGTPNQNTPXANHNTERTSTGTAETHRKATSRQAERKKETEKQTNEEKERFFLRGGDEKRGNRAGKKKPXRGGGRRPKKKTPGKTPQRGKRTETNRTPSGXPPAREAXTTGKKNEKEHREDPAKPTNQRPGQRAPHGTQPNQQGT

SEQ ID NO: 268805 - protein, 77 aa, Glycine max
  Clone ID: PAT_MRT3847_84753C.1.pep
DIDVYVRRYVIESLGGSRGWVWWSLLTGWISGYMTMTYAEGEDVGHGFDVDVLLIGLVPVHYFYYPLLGSGHGYAST

SEQ ID NO: 268806 - protein, 109 aa, Glycine max
  unsure (1)..(109): unsure at all Xaa locations
  Clone ID: PAT_MRT3847_84754C.1.pep
MGNCCVVPSGQTRKEKKQKKKWNPYEDGWGKKLVVLTEPTGRDIRLRYDLCRELGRCEFXVTYLCQDRETKEELACKSISKNKLRSAIYIEDVRKEVEIMLSIVNHSIV

SEQ ID NO: 268807 - protein, 187 aa, Glycine max
  Clone ID: PAT_MRT3847_84755C.1.pep
MSSLSGLKFNYSFSWKPSASRKNVVKKNSFISRQTSNEGQSFLPKEEEMKWVFQKFDTNKDGKVSLEEYKAAARALDRAIGEAEAVKAFRVMDTDEDGFIDFKEFMKMFNEEGRIKETEIKNAFQVFDLNGDGKISAEELSQVLKRLGESCSLSACKKMVKGVDGNGDGFIDLNEFTRMMMSGKKLG

SEQ ID NO: 268808 - protein, 42 aa, Glycine max
  Clone ID: PAT_MRT3847_84756C.1.pep
MSKIVAFNVYCPSVDFFLNWILAHLAFASLSETMLELLHEAL

SEQ ID NO: 268809 - protein, 52 aa, Glycine max
  Clone ID: PAT_MRT3847_84757C.1.pep
PNECCSIFSQGFLTNVRFYGSEIKTLSNEPGLCRTQPRAIKNSTLISPLRMV

SEQ ID NO: 268810 - protein, 66 aa, Glycine max
  unsure (1)..(66): unsure at all Xaa locations
  Clone ID: PAT_MRT3847_84758C.1.pep
MAETFLFTSESVNEGHPDKLCDXISDAVLDACSNRTRQQGACEHAQTTWHGLGESRQGYVATRDSA

SEQ ID NO: 268811 - protein, 73 aa, Glycine max
  unsure (1)..(73): unsure at all Xaa locations
  Clone ID: PAT_MRT3847_84759C.1.pep
PEWFDAGKSXYLASSSTLFMIEFILVHYVEIRTWQDIKNPVCVYQDPIFMPYFLPPRECGYPISGCDPFNFDP

SEQ ID NO: 268812 - protein, 58 aa, Glycine max
  Clone ID: PAT_MRT3847_8475C.1.pep
LTSRATTFVQTTFPASDHTVRLSEIFYYLSELRIMPDLNSQFRLNNQCRTTPRDFGFL

SEQ ID NO: 268813 - protein, 357 aa, Glycine max
  unsure (1)..(357): unsure at all Xaa locations
  Clone ID: PAT_MRT3847_84760C.1.pep
NKCVSSRQQDLIKTGDREDVELVSCNTKGFIVSFGSLVGFLPYRNLASKWKFLAFESWXRRLGFDPSVCMLVAGPFAPCDAEIKNLSPDSPPSLEIDGKVEDRISPDMKLEDLLRIYDQEKLKFLSSFVGQKIKANVLVADRKMRKLIFSXRPKEKEELVEKKYGCEKTTEGGDIVXCCVQKIAYFGIFVEVEGVSALIHQSELSWDATLNPASYFQIGQVLEAKVHQINFALERIFLSLKEVMPDPLMNPLEAIVGDHDPLDGRLEAAQTDVEWPEVDSLVEELQKIEGVQSVSKGRFFRSPGLAPTFQVYMASIFEDQYKLPARSGNKIQVVIVQTSLDKERMKSAVMTCANRVE

SEQ ID NO: 268814 - protein, 189 aa, Glycine max
  unsure (1)..(189): unsure at all Xaa locations
  Clone ID: PAT_MRT3847_84761C.1.pep
KSRVQKIAYFGIFVEVEEVSALIHQSDXSWDATLNPASYFQIGQVLEAKVHQINFALERIFLSLKEVMPDPLMNSLEAIVGDHDPLDGRLKAAQTDVEWPEVDSLVEELQKIEGVQSVSKGRFFRSPGLAPTFQYGNQICSXVYMASIFEDQYKLLARSGNKIQEVIVQTSLDKERMKSAVMTCANRVE

SEQ ID NO: 268815 - protein, 77 aa, Glycine max
  Clone ID: PAT_MRT3847_84762C.1.pep
IYAIGAGITAAAGTRLALQWILVKGFRLYSFQLPDSMSPVLLFIVTTSPCQDWVICAPAAFLGCGSRFSGSLSGIEP

SEQ ID NO: 268816 - protein, 63 aa, Glycine max
  Clone ID: PAT_MRT3847_84763C.1.pep
INIHFFNYKILYCSVFLNDPILFIFLYFFFIFFFYFIYLLWGAGFFIFIMLFFFFIKFFFFYN

SEQ ID NO: 268817 - protein, 39 aa, Glycine max
  Clone ID: PAT_MRT3847_84764C.1.pep
QLQTTALTYPCIWIYIDQLEHPNYHPLTINFTTVLHLIN

SEQ ID NO: 268818 - protein, 139 aa, Glycine max
  Clone ID: PAT_MRT3847_84765C.1.pep
MHAYVSSEFGSRVHLAKSSGSALTVWGTGKPRRQFIYSLDLARLFIWVLREYNEVEPIILSVGEEDEVSIKEAAEAVVEAMDFSGEVTFDSTKSDGQYKKTASNGKLRSYLPDFCFTPFKQAVKETCAWFTENYEQARK

SEQ ID NO: 268819 - protein, 59 aa, Glycine max
  Clone ID: PAT_MRT3847_84766C.1.pep
QGNTYLLKRLPYSIRTLYQCSICIQWATETIRHLFQAKCDCPIHLHLTFIRKPNFNFHF

SEQ ID NO: 268820 - protein, 46 aa, Glycine max
  Clone ID: PAT_MRT3847_84767C.1.pep
NKYRIYYIVYKKILVFTSADTWKDILYMACLDTPPVPREIKIQLVW

SEQ ID NO: 268821 - protein, 100 aa, Glycine max
  Clone ID: PAT_MRT3847_84768C.1.pep
DSVIGVKVTTIHNMGAYGLNPGLSGAKLWGTITNSILQQTVRNQMATARTPLDSDSSRQSFCQISIDLLGGGSLWDKTGDWITLIQRPPIRNQLRVAVWK

SEQ ID NO: 268822 - protein, 61 aa, Glycine max
  unsure (1)..(61): unsure at all Xaa locations
  Clone ID: PAT_MRT3847_84769C.1.pep
HSIYIIYLCLFNILCPQMCHVILNSGCTNKMYKRLGHRHRLEFIYMTRKEQGIIVEKCXFN

SEQ ID NO: 268823 - protein, 180 aa, Glycine max
  Clone ID: PAT_MRT3847_8476C.1.pep
MSRTVEITVLSAENLQMNKKPIRGNAFVTVQSDASNDTSATTVDSEGGSYPSWNEKLVMDVPLHARFITVEVKCKTSSAGSNSIGVARIPVSDFVGGYVPENQLHFLSYRLWDGKVRRNGVVNISVRVKVAQQQQQQQQHSCNSNSMSLSSAVTGVPVAGNGSTGVVTGIPAIWLNYQRN

SEQ ID NO: 268824 - protein, 106 aa, Glycine max
  unsure (1)..(106): unsure at all Xaa locations
  Clone ID: PAT_MRT3847_84770C.1.pep
CRRFGLFISLKKKKKKKKKKKKKKKKKKKKKKKKKXLGGGRGPNXPYRESINARYLAVVLQTLDWKNPCVPQFNRLEAIPLFPVWFITKRPKRSVFQNLHNLNGYW

SEQ ID NO: 268825 - protein, 74 aa, Glycine max
  Clone ID: PAT_MRT3847_84771C.1.pep
FVEQIIAGIVEHRISEQFASQTFFVNMLSFVARTVNSYWGTQVSFFSLSSICFCSLSMLNVHNLVSKWISFIYG

SEQ ID NO: 268826 - protein, 57 aa, Glycine max
  Clone ID: PAT_MRT3847_84772C.1.pep
KKSISFAGWGPHAYFQMLAEPNGVQTSSNSNYAQHAEVQILSVCIPPQHDGDNARIH

SEQ ID NO: 268827 - protein, 87 aa, Glycine max
  unsure (1)..(87): unsure at all Xaa locations
  Clone ID: PAT_MRT3847_84773C.1.pep
TQVNKNKEIGEVLCTDTNRRHRILLMSDLPRKQIDRVANNHCKTXNDIAVWTKRSCHKATKSFERASDHRTRAISILPTNGDRMSAC

SEQ ID NO: 268828 - protein, 62 aa, Glycine max
  unsure (1)..(62): unsure at all Xaa locations
  Clone ID: PAT_MRT3847_84774C.1.pep
ILHYFXXKLSXXIFIXLNXSXPXSPITXXXFXXSXSFLXXXMLXXXEXXLXXNSXLXYXXXX

SEQ ID NO: 268829 - protein, 84 aa, Glycine max
  Clone ID: PAT_MRT3847_84775C.1.pep
IDHFFTLSARDLGVPVIKTWINAKSTAINGTRSVSLIGTLIETFICARAPLTFFTWTLYDKPAHVDQMHGQLARLLAIMGTCDL

SEQ ID NO: 268830 - protein, 355 aa, Glycine max
  unsure (1)..(355): unsure at all Xaa locations
  Clone ID: PAT_MRT3847_84776C.1.pep
APFAPVTVLPRREDLFSAAAPSGPAKKSNVQSSAGPKSDKVQLIEHRRAYNCEIMLSKVKVPLHDLMSSVLALEESALDTDQVENLIKFCPTKEEMELLXKMTRXNGTKMGLVELHYTAKFRNGVVGTSSVIERTTCSVQPLPFSLSNCMIVSIFRKPGASGSAIGFRLDSLLKLTETRARDKKMTLMHYLCKVLDDQLPDVLDFSKDVANLEPAAKMQLKFLAEEMQAINKGLEKVVQELSTSENDGPISETFCKKLKKFLGSAEADVRSLASLYSSVGRNVDQLILYFGEDPARCPFEQVVSTLLNFTRMFNKAHEENRKQLELEMKKTAESEKKKCESERILPTAIRTGNVK

SEQ ID NO: 268831 - protein, 75 aa, Glycine max
  Clone ID: PAT_MRT3847_84777C.1.pep
HFFILEAYLFQYEFPITAVKVQLFSPSCHTVLQFHFQHLYPFCFSMSIIASFLIHSFVFFPIYLLVTACKKKLVL

SEQ ID NO: 268832 - protein, 78 aa, Glycine max
  Clone ID: PAT_MRT3847_84778C.1.pep
KRIWFFLKKSWGSRGALSQKSEPLGGGTPGGGAKGGQGFKKGKKTLFLKNVGLGDKLLSQKHLVGLRARVQEVWGAVK

SEQ ID NO: 268833 - protein, 363 aa, Glycine max
  Clone ID: PAT_MRT3847_84779C.1.pep
MVTSPPAMPTKGRVLIIGATGFIGKFVAEESLISAHPTYLLVRPGPLNPSKDAIVKNFQDKGAIVIHGVINNKDFVEKILKEYEIDIVISAIGAKSLLDQLILVEAMKSVKTIKRFLPSEFGHDVYKADPVEPGLTMYKEKRLVRRVVEESGIPYTNICCNSIASWPYYDNCHPSQLPPPLDQLQIYGHGNVKAYFVDGIDIGKFTMKVVDDARTVNKNVHFRPSNNCYSINELASLWEKKIGLTIPRVTISEDDLLAVAAENCIPRSIVASFTHDIFIKGCQVNFNIDGLGDVEISTLYPDEAFRSLEDCFEGFALMIDDKINKGENKITGTKSVVEAVPFTASCGEESPPQKCSNFVVTNY

SEQ ID NO: 268834 - protein, 159 aa, Glycine max
  Clone ID: PAT_MRT3847_8477C.1.pep
MENPSSSERSRAGIEDNMLAMFDASETKDAHQDALDDRIAFIDAVRASCEHGKPPTSKIFGAVFHMLRTGKSLELIVGSYKLLVDLDKHFPRVYLSGTDDSRSSSNSPSKLVVVKEAWSPIIDFVDKGHCCSEAGDKQSGGLLTPLAFQVVIKGLAEVL

SEQ ID NO: 268835 - protein, 103 aa, Glycine max
  Clone ID: PAT_MRT3847_84780C.1.pep
GGDPPPFLGAGGNQLTPQFSFFFFAKIRDPKKAPRREARGPSLLSGFKAGLMGFQERGAFNFPPLGQKIKLGGKKPRGGDNKLRAPPLGGPLFKKENLWKKKG

SEQ ID NO: 268836 - protein, 87 aa, Glycine max
  unsure (1)..(87): unsure at all Xaa locations
  Clone ID: PAT_MRT3847_84781C.1.pep
NHCSXXFLGFTFVXSLLFLXLVXKAISLADLSXGSXLAXGDFHQLPSSLVWSRNLAPWCDAASAFFFLFFGGVGTPPFPWTGILPSG

SEQ ID NO: 268837 - protein, 94 aa, Glycine max
  Clone ID: PAT_MRT3847_84782C.1.pep
MGDVAKDLTAGTVGGAAQLIVGHPFDTIKVKLQSQPTPLPGQLPKYSGAIDAVKQTVAAEGPRGLYKGMGAPLATVAAFNAFLFTVGDKWGSIT

SEQ ID NO: 268838 - protein, 65 aa, Glycine max
  Clone ID: PAT_MRT3847_84783C.1.pep
IASGRPFFCLVFFFFFFFFFFFFFFLGLNFYTTLCFHIPTRVLYISTCPIRSNGIQLGFKGPKTL

SEQ ID NO: 268839 - protein, 104 aa, Glycine max
  unsure (1)..(104): unsure at all Xaa locations
  Clone ID: PAT_MRT3847_84784C.1.pep
PIAAGEKGGRRKRGKKSVETYKIYIXKVXKXHPELVXKQAMGXMNSYQDILRKLSGMFRLXRYNKKPTIXXREXQTGVRLVLXGELXKHAVXEGTKGVXKLNSC

SEQ ID NO: 268840 - protein, 318 aa, Glycine max
  unsure (1)..(318): unsure at all Xaa locations
  Clone ID: PAT_MRT3847_84785C.1.pep
CGEFVFAALYDDRFIRVHVRHTKELFSLSNPNASLSTSLSRQNDKEQDKAXNSGDTLKIXVPELDGPGYMEDISGLLSNVLPSSLKDVKCVESILFSAFNPPPSYRRLVEDSFYMDVTTLEGNVFCITGSTRMFYVNSCTTKTFDPRPSKATLEATTLATLLQKISPRFKTAFHEIWEQKAAAHCFEKEQPVLMPNLWLGSYPVPDXDSDRAENSVTLLYGSEPLGMPREWNEELQTCREFLHTTPLERLMRDRALYRVTSDFVDAAISGAVGVISGCIPPINPTDPEHLYMMVNNMLHNIHILFFMSILVHFFMNMV

SEQ ID NO: 268841 - protein, 210 aa, Glycine max
  unsure (1)..(210): unsure at all Xaa locations
  Clone ID: PAT_MRT3847_84786C.1.pep
MICCWHKMDATTPKYSNAMYDEIVXEDSSYYEXVXYNPGKIPFVTISGFEEYNMIDTTTNLDXYKAPTLLDALDHITEPKKPSDKPLMLALHDVYKTRCIASVPLXTTIDRSLXKPEKLETCAPTTLTTEFYDVEMHHESLTEAHPGDTAGLNANIVAIKALKRSYGASDSLDDPAHEASIFTGQVMMMNHAGQIVYGYAPVLDCHTYHI

SEQ ID NO: 268842 - protein, 96 aa, Glycine max
  Clone ID: PAT_MRT3847_84787C.1.pep
MMMVHPRDQVGGETHKNLVEPNVAASKKARNCACMVSYSVLILALLTLSILLLPLVLPPLPPPPLLLLFVPVFILVVLFFLAFSPSTLPNMAVLTS

SEQ ID NO: 268843 - protein, 60 aa, Glycine max
  Clone ID: PAT_MRT3847_84788C.1.pep
FFFFFWIQEQIYSPTTRREGIIYLTCQLDKADFENNNACRQLQTHVEHSALQLSNKTKAQ

SEQ ID NO: 268844 - protein, 46 aa, Glycine max
  Clone ID: PAT_MRT3847_84789C.1.pep
ERSITLLFRRSFQLCTQTNGKKKIEMNHVKFTYQLENDSRTRRYLR

SEQ ID NO: 268845 - protein, 61 aa, Glycine max
  unsure (1)..(61): unsure at all Xaa locations
  Clone ID: PAT_MRT3847_8478C.1.pep
KQLSGLLQLXHNDLNQPKXQTLNKKSTTTEQTHVDNLVTXSNSDXLRHMXSHDPXCXDFAS

SEQ ID NO: 268846 - protein, 109 aa, Glycine max
  Clone ID: PAT_MRT3847_84790C.1.pep
MEAFPRDQRGSLEVFNPSSSYSTEKSVNSPVRVQSTWKTWIDELPEQQQQQQCGGTNEVTATSWMALKDSAPPPTTLAAVLGESFVAAVVEVGNAAKRAAEWGLVLKTD

SEQ ID NO: 268847 - protein, 61 aa, Glycine max
  Clone ID: PAT_MRT3847_84791C.1.pep
NTSSLNSRCSKYYLSFNNVIWQIHTMYNWSVESLLAQSFCVHFVSTGHGPTISVRRWCYMV

SEQ ID NO: 268848 - protein, 399 aa, Glycine max
  Clone ID: PAT_MRT3847_84792C.1.pep
RQDRYRCAAACSAVDVSSMFIVRKNGKSSLHNAARYGVHRIVKTLIALDPGIVCIKDKKGQTALNKAVKGQCTSVVEEILLADPSILNERDKKGNTALHMATRKCRSQIVGLLLSYSAVDVNAINKQQETALDLADKLPYGDSALEIKEALAEYGAKHARYVGKEDDAMELKRTVSDIKHEVQSQLIQNETTRRRVSGIAKELKKLHREAVQNTINSVTLVAVLFASIAFLAIFNLPGQYITDEGKEIGKAKIADHVSFQVFCLLNSTSLFISLAVVVVQITLVAWDTRAQKQIVSVVNKLMWAACACTCGAFLAIAFEVVGKKTWMAITITLLGVPVLVGTLASMCYFVFRQHFGIFRSDSQRRIKRASGSKSFSWSYSANISDLDEYNSDIEKIYAL

SEQ ID NO: 268849 - protein, 110 aa, Glycine max
  Clone ID: PAT_MRT3847_84793C.1.pep
AQKQIVSVVNKLMWAACACTCGAFLAIAFEVVGKKTWMAITITLLGVPILVGTLASMCYFVFRQHFGIFRSDSQRRIKRTSGSKSFSWSYSANISDLDEYNSDIEKIYAL

SEQ ID NO: 268850 - protein, 133 aa, Glycine max
  Clone ID: PAT_MRT3847_84794C.1.pep
MEAKGVRFLAYQSIFSSVGSGDFDGVKKLVEEVKKEEGSSLSDVMSLQNDAGETALYIAAENNLQEMFSFLLSICHFEVVKIRSKADMNAFHVAAKRGNLGFFFYFSWNKFFLRMLLLIQLNHLHMIESHSSN

SEQ ID NO: 268851 - protein, 399 aa, Glycine max
  Clone ID: PAT_MRT3847_84795C.1.pep
MAQAHALFSPFNPRLLPSSSPILRRRFFSLPISPLTHRTVIASENVAVSPDAASSTHSLPQVIETLISGVDLSEEEAEACLNLLLHEPNEALISALLVLLRAKGETYEEVVGLARAMFKHATKVEGLDDVVDIVGTGGDGANTVNISTGASILAAACGARVAKQGSRSSSSACGSADVLEALGVVIDLGPQGVKRCVDEAGMGFMMSTKYHPSMKIVRPVRKKLKIKTIFNILGPMLNPAHAPFAVVGVYTEDLVLKMAKALNRFGMKRALVVHSEGLDEMSPLGPGIVLDVMADRVDKFAFDPLEFGIPRCNIESLKGGGPEYNAEVLKRVLGGERGPIADALILNAAAALLVSGCVSNLAEGVSVARETQQSGKALKTLNLLKDVSNNIKDELGMDA

SEQ ID NO: 268852 - protein, 111 aa, Glycine max
  Clone ID: PAT_MRT3847_84796C.1.pep
QQVDNIYKGEAKNHKLNHLHSQNMVVLKSTSPLSSLTSHFFNLSSSSSSSSKFTSPHSLRRRHLHHVHSTSRVAQFTIRAYMENPNTLCSFANRVIGALPRVGLIGRILSD

SEQ ID NO: 268853 - protein, 55 aa, Glycine max
  Clone ID: PAT_MRT3847_84797C.1.pep
SNKGASDDQISQLPSWRHKEAGVKLELGNGSEGSKKLINEDPVSGTISTYRLQIN

SEQ ID NO: 268854 - protein, 79 aa, Glycine max
  Clone ID: PAT_MRT3847_84798C.1.pep
MVICAALLSVRSFRSKFERMKPHVNIVTIVHLDHGMTTLTVSTICLFELNLHSLLFMIFEISSSFMLGICFLTSMVINV

SEQ ID NO: 268855 - protein, 159 aa, Glycine max
  Clone ID: PAT_MRT3847_84799C.1.pep
RSLSKISSVNSDSVFLLVLDSKCGVVIKFSGDLGKLDLLNSSDPYLSVAEWIKTNAEICVTPVEPIWNRLGNPNWGDIGTLQVLLATFYSIAQWNGPPRKSVASLISDHSLRLQKRRTECCIIETENALVPYHETSDHQAGEIVELDQNELFSHNRASR

SEQ ID NO: 268856 - protein, 80 aa, Glycine max
  Clone ID: PAT_MRT3847_8479C.1.pep
INLYYPETSLAHYRGNFRPPHTAAPYSSSPLAGLCSLASSDTMVEVDFSIAFENNDETRSATIEPDLLPDGGGGSYRGCG

SEQ ID NO: 268857 - protein, 88 aa, Glycine max
  Clone ID: PAT_MRT3847_847C.1.pep
TELKGSSIPMAMVYKMAHSESKFFKGWLPAEKMKSPLVLKTSLGPYTQLALLDPPRILVFNNNNFHDPKLNIILFITPSFDVLHLGGL

SEQ ID NO: 268858 - protein, 64 aa, Glycine max
  Clone ID: PAT_MRT3847_84800C.1.pep
PFGFPHLGGLLMGSPHDAQGWRSGWWFAWDFRCLCVHSWLALLAMLVTLNCCCCWFFFSSSIFF

SEQ ID NO: 268859 - protein, 139 aa, Glycine max
  unsure (1)..(139): unsure at all Xaa locations
  Clone ID: PAT_MRT3847_84801C.1.pep
EGLPGLCISRGGGCRCQASGCTEGAQGSTMFCKAHGGGKRCTAPGCTKGAEGTTPLCKGHGGGKCCADHGGGICTKSVHGGTNFCVAHGGGMRCSVPDCMKSARQQSDYCICHGGGKRCKFEGCGKSAPXGTDFCNAHG

SEQ ID NO: 268860 - protein, 91 aa, Glycine max
  unsure (1)..(91): unsure at all Xaa locations
  Clone ID: PAT_MRT3847_84802C.1.pep
EAMGKVLARGHSRVPVYSGNPRNINGLLLVKSHHTVRPEIXQSVSAVSIRRIPRVPSDMPLHDILNEFQNGTSHIAAVVKAMGKGIETPQI

SEQ ID NO: 268861 - protein, 64 aa, Glycine max
  Clone ID: PAT_MRT3847_84803C.1.pep
TDVGRIESPKLIKKNHKFMHPRQTRQARSQPYQILILFYFYLLFLSFNFIILSFIFYFLYHILI

SEQ ID NO: 268862 - protein, 41 aa, Glycine max
  Clone ID: PAT_MRT3847_84804C.1.pep
DLKHVYYNTRGMTVNLPKISLQQLPKYGSPKLLNNLAPSRA

SEQ ID NO: 268863 - protein, 84 aa, Glycine max
  unsure (1)..(84): unsure at all Xaa locations
  Clone ID: PAT_MRT3847_84805C.1.pep
SNSYSKVNDVFLNFRGEDTRKTFVSHLYAALSNAGINTFIDHKLARERXLGEELLAVIKGSRISIVVFSANYASSTWCLHELVE

SEQ ID NO: 268864 - protein, 79 aa, Glycine max
  Clone ID: PAT_MRT3847_84806C.1.pep
LHNKNLTLGMTGGSDATTLATTMVGMRHNESHNVNSNFNSNSLERTCKRKCTVDSNRDCLGALPVDVLIKVLSRVQHED

SEQ ID NO: 268865 - protein, 131 aa, Glycine max
  unsure (1)..(131): unsure at all Xaa locations
  Clone ID: PAT_MRT3847_84807C.1.pep
FSFVFNRRMGKLTLPQGTSXRSVKRMPFSIGRGSMGHRRPSLMNMPKADLXLWRYFGADLVFGASKTTCPYIKCTVSLFIAFVNMADDTINFEDFSHKLQQLGETQEKAGLKLSYEEFFTAWRTQVRSAQL

SEQ ID NO: 268866 - protein, 163 aa, Glycine max
  unsure (1)..(163): unsure at all Xaa locations
  Clone ID: PAT_MRT3847_84808C.1.pep
RLDVWRVACGVPYGFPLTVICNSIFNEMLIGYSYEKLLRQDKAPSLSXQFLRNISFSECVWXDDNLISVHEYVKPYFRGSKLTSFLTGHNITITDGIDITSATMQSRKLADGEFLKRNSKHMSNVPXVPPEDKDSLRTQLHSXTCNNLEXMHEAFIVNLADVL

SEQ ID NO: 268867 - protein, 79 aa, Glycine max
  Clone ID: PAT_MRT3847_84809C.1.pep
SSVKTRSASLLCALLSLAILLASRSAASATPRSAVPSHHVSTFNRSLFPSTSLFGIGSSAYQAEGAASLDGRGPTIWDT

SEQ ID NO: 268868 - protein, 41 aa, Glycine max
  Clone ID: PAT_MRT3847_8480C.1.pep
CWVESRIPARAAKNSFHHETPIAVIQLSSILRSQKYIYINS

SEQ ID NO: 268869 - protein, 56 aa, Glycine max
  Clone ID: PAT_MRT3847_84810C.1.pep
SSEGNHPFFWSKWRIINALRAYKETSHEDPQCRVYHEIITMEVKTFMPFCRLLAAV

SEQ ID NO: 268870 - protein, 141 aa, Glycine max
  unsure (1)..(141): unsure at all Xaa locations
  Clone ID: PAT_MRT3847_84811C.1.pep
MASVSATSLSFQPSLKLSTRTSQGCYKTSSLEVVSVGWTXITFPSLRSSRFCICAVKAQPETVQKVCNIVRKQLALPAESELTPDTKFSALGADSLDTEEIVMGLEEEFGITVEEDGSPRVRLQWPLFQQLERGLEAERSC

SEQ ID NO: 268871 - protein, 143 aa, Glycine max
  Clone ID: PAT_MRT3847_84812C.1.pep
MASVSATSLRFQPFLKLSTRTTTQGCYKTSSLGAVSVGWNRRTFPSLRSSRLRICAVKAQPETVQKVCDIVRKQLALPAESELTPDTKFSALGADSLDTVEIVMGLEEEFGITVEEDGSQNISTVQEAADLIEKLIQDKSGAS

SEQ ID NO: 268872 - protein, 83 aa, Glycine max
  Clone ID: PAT_MRT3847_84813C.1.pep
RLQDLILVPLNVLVFQFWKSPLYLLCNVSFCPKRLFRVVYISLGILYPKKISLSISFSSVHMFLMEINHSIDVNCSLNFSTTY

SEQ ID NO: 268873 - protein, 390 aa, Glycine max
  unsure (1)..(390): unsure at all Xaa locations
  Clone ID: PAT_MRT3847_84814C.1.pep
IPLLSVATSFVAEDIAKSSSAADAKTKQQLSSVSTALLLALALGFXEALALYLGAGAFLHLIGVPTQNPTYVPARHFLSLRAVGAPAVVLSLALQGIFRGFKDTKTPVICLGIGNFSAVFLFPLLMYYFRLGVTGAAISTVISQYIGTMLMIWCLNKRAELLPPKMGCLQFGSYIKSGGFLLGRTLSVLSTMTLGTSIAARHGPVAMAAHQICMQVWLAVSLLTDALAASGQALIASSVSRHEYKVVKEVTSFVLRIGLVMGICLTAILGASFGSLATIFTQDTEVLQVVKTLALFVSASQPFNALAYIFDGLHYGVSDFRYAAFSMMFVGAVSSAFLVFAPPLFGLQGVWLGLVLFMALRAAAGAVRLLSKNGPWWFLHRDLQIAEVVS

SEQ ID NO: 268874 - protein, 33 aa, Glycine max
  Clone ID: PAT_MRT3847_84815C.1.pep
FENSRGQGVLFHVTCFLECNQHDEQCMQCSSKR

SEQ ID NO: 268875 - protein, 48 aa, Glycine max
  Clone ID: PAT_MRT3847_84816C.1.pep
MADLKSTFLNVYSVLKSELLHDPAFEFSDDARNWVDRMLDYNVPGGVA

SEQ ID NO: 268876 - protein, 88 aa, Glycine max
  Clone ID: PAT_MRT3847_84817C.1.pep
PPCRPFFFVFLPRFIVFRRIHQPHLTILGATGIIASTTEWDRNIRHSNAYRTHIGFRLKARLSMGYLKIDMRTYLKTAREALELVHII

SEQ ID NO: 268877 - protein, 69 aa, Glycine max
  unsure (1)..(69): unsure at all Xaa locations
  Clone ID: PAT_MRT3847_84818C.1.pep
GCEKPAVPAASVTYPEPSMLAIRKIPRDCXSPGIGPFKDRQDYLYKQGPNELFKHRMQEYPTTDLRTYM

SEQ ID NO: 268878 - protein, 60 aa, Glycine max
  unsure (1)..(60): unsure at all Xaa locations
  Clone ID: PAT_MRT3847_84819C.1.pep
GRVGGFITQKQPVXNFLLMFPLFPSRIGFLGETLLYKYLLILSSIQHPPLPFKEVLFEKQ

SEQ ID NO: 268879 - protein, 136 aa, Glycine max
  unsure (1)..(136): unsure at all Xaa locations
  Clone ID: PAT_MRT3847_8481C.1.pep
XXXXXLSXXXXXXXXXFVXTXXXDXXSXXXXXXLXXXLXXCXVXXXFXXSXVAXXXXXXFXAXLRXXXXXSXVVXXXLLAXLXXXXXXXXXCXXHXXVXXXRXXXXXCXXRXXXLXVCXCSWXXSVXXXPXRRDXF

SEQ ID NO: 268880 - protein, 149 aa, Glycine max
  Clone ID: PAT_MRT3847_84820C.1.pep
QIFIKTLTGETITLEVESSNTINNIKAKIQDKERIPPNQQHLIFAQKQLKDNHTLTNYNIQKDNTLHLILHLHNNIQIFIKTLTNNTITLEVKSSNTINNIKAKIQDKEDIPPDQQHLIFAEKQLGNDHTLAYYNMREKSTLHLVLHLH

SEQ ID NO: 268881 - protein, 81 aa, Glycine max
  Clone ID: PAT_MRT3847_84821C.1.pep
MMSASSLQMTSSTAARGPGSIITAVASKSSGSGSTDPLILKSSFKESTTILPSATREHHSGKRWKDRCSSERIGPDAWSTG

SEQ ID NO: 268882 - protein, 61 aa, Glycine max
  Clone ID: PAT_MRT3847_84822C.1.pep
NFHLKLNEHLIFKFLKGVFEKSKTTLENFWVNRLSKFWVHNLFKCPSDEHFYSWVHPYYHQ

SEQ ID NO: 268883 - protein, 582 aa, Glycine max
  Clone ID: PAT_MRT3847_84823C.1.pep
MAVTEAQNPLLGENTCGSLLKKLQEIWDEVGESDEQRDKMLLQLEQECLDVYKRKVEQAAKSRAQLLQALSDAKLELSTLLSALGEKSFAGIPENTSGTIKEQLAAIAPVLEQLWQQKEERIKEFSDVQSQIQQICGEIAGNLNLNDVSPAVDESDLSLKKLDEYQSELQELQKEKSERLHKVLEFVSTVHDLCAVLGMDFFTTATEVHPSLNDSTGVQSKSISNDTLARLAKTVLTLKEDKKQRLHKLQELASQLIDLWNLMDTHPEERRLFDHVTCNMSASVDEVTVPGALALDLIEQAEVEVERLDQLKASRMKEIAFKKQAELEEIFARAHIEVDPDAAREKIMALIDSGNIEPTELLADMDNQIAKAKEEALSRKDILDKVEKWMSACEEESWLEDYNRDENRYNASRGAHINLKRAEKARILVNKIPALVDTLVAKTRAWEEDHSMSFTYDGVPLLAMLDEYAMLRHEREEEKRRMRDQKKHHEQRNTEQETIFGSRPSPARPVSSSKSGGPRANGGANATPNRRLSLNAHQNGNRSTSKDGKRENRLSAPVNYVAISKEDAASHVSGTEPIPASP

SEQ ID NO: 268884 - protein, 290 aa, Glycine max
  unsure (1)..(290): unsure at all Xaa locations
  Clone ID: PAT_MRT3847_84824C.1.pep
FFLFYVMKAEVEVERLHQQKANRMKEIAFKKQDELEKIYAHAYVEINLEAAXGNILSLIDFGNIEPYELLADMDKQIATAKEEALSRKDILDKVEKWMSACEEESWLEDYNRDDNRYNASRGAHLNLKRAEKARILVNKIPALVDTLVAKTRAWEEDHGMSFTYDGVPLLAMLDEYAMLRHEREEEKRRMRDQKKHHEQRNTEQETIFGSRPSPARPVSSSKSGGPRANGGANGTPNRRLSLNAHKNGNRSTSKDGKRDNRLSAPVNYVAISKEDAASHVSGTEPIPASP

SEQ ID NO: 268885 - protein, 291 aa, Glycine max
  Clone ID: PAT_MRT3847_84825C.1.pep
RRTCQERIIWQVLLRSFLSSMEQKSDLGVVNELSDRELRLSNCPDNNTLLSPRNQNSGAPSNIPGLDRVLSPRACQAASSSDGPNTISFPNPLLEQQTTDGVPLSIPAAADCRDDIEHLTNAVLGDKRITSDQQKGAPETITELSQGTPVSRTVNVLDPPEQVQQLSVGSSPDHDTSGEMHVQRLPSAELPSSHLDSTNLPLTTEIEHQPTVVPNQDVQPDSNLELYSHSHEVVVHPASNSDPNTVTPSEVRVQSAGTINLSIPLEINYQHMQAETHSASRMLHLSYDPLN

SEQ ID NO: 268886 - protein, 172 aa, Glycine max
  Clone ID: PAT_MRT3847_84826C.1.pep
PRVRRFTGPVDGLLTRLNRLNFLDLSLNQFTGPIPAQIFTFPLTNLQLERNQFSGPIQPFNEVMIQTVDLSYNRLSGEVSPMLANVQNLYLNNNGFTGQVPGSFVERLLAAGIQILYLQHNFLTGIAISPTAEIPVSSTLCLQYNCMVPPVQTACPFNAGRRKIRPPQQCNR

SEQ ID NO: 268887 - protein, 135 aa, Glycine max
  Clone ID: PAT_MRT3847_84827C.1.pep
MSERTGPKVGSFNGVFVLSLMSRMVGPKKAREMWFLTRFYDAVEAEKMGLVNTVVPLENLEKETIKWCREILRNSPTAIRVLKSALNAVDDGHSGLQEIGGNATLIYYGTEEAKEGKTAYLQRRRPDFSKFNRRP

SEQ ID NO: 268888 - protein, 71 aa, Glycine max
  Clone ID: PAT_MRT3847_84828C.1.pep
LNAQWGKAGFGIMKWRQRWIIESRRESLRAAPVMLLLELYMLLIYWLWDLSPTPENRHYDWLVHLWAVFTP

SEQ ID NO: 268889 - protein, 191 aa, Glycine max
  Clone ID: PAT_MRT3847_84829C.1.pep
MAEGRGSTLVHLLVVVLCLVAFGFAIAAERRRSVGTMHKIEGTNETFCSYSSDVATGYGVGAFLFLLSGESLLMGVTKCMCFGRPLTPGVNRAWSIIYFLSSWVTFLVAEACLIAGATKNAYHTKYRGMIYAHNFSCEALRKGVFIAGAVFVVATMILNVYYYMYFTKAMTTPVSHKANRVSSTVGMAGYA

SEQ ID NO: 268890 - protein, 163 aa, Glycine max
  unsure (1)..(163): unsure at all Xaa locations
  Clone ID: PAT_MRT3847_8482C.1.pep
WRDKMFGAWLGELDKLTQSLDSDKPMEXVKRSPLGQETNMANFSYRFSIYNLNEALNQGETVDLDALMADLCSIEQELSSIGSGNSKRQITETKATQKLPVSRHTLKHGTLKGLSSSSNRIAKPSHASYSLDDVTGQLEQASLSMDEAAQQSVLENTKPLVTN

SEQ ID NO: 268891 - protein, 72 aa, Glycine max
  Clone ID: PAT_MRT3847_84830C.1.pep
KQKVGKGGLFFAKRGVSLPKKFSSPPFLMDKKGILFFLNPGNPNWRGGLLFFKSWQGTRAFGGTLPFGGPGV

SEQ ID NO: 268892 - protein, 78 aa, Glycine max
  Clone ID: PAT_MRT3847_84831C.1.pep
LGSHHKLKKNGRTWKCPSGDQAKFIPKFPFFKYFLGDNFFFYPPLVKNRDPIKKPPPSPPLEVFFPSPGGGKKFFGGG

SEQ ID NO: 268893 - protein, 88 aa, Glycine max
  Clone ID: PAT_MRT3847_84832C.1.pep
PSEMLCSVSCTPFPSVGVPLCTCNDGPCPSFEPREAEAQDGSPCHSQAAMMDQNKMDGPRLEKTTCSGMFWGRRSCSREHQCNSEINA

SEQ ID NO: 268894 - protein, 77 aa, Glycine max
  Clone ID: PAT_MRT3847_84833C.1.pep
YIYAATCSLSFIFRILPVMARHLSLCMDLQSCDYGFQDSHVINLVRYHNLYIIVRGQKGYGLKNLLHLREKVEHHLP

SEQ ID NO: 268895 - protein, 70 aa, Glycine max
  Clone ID: PAT_MRT3847_84834C.1.pep
IFISVHLLHEPSCAGHCCGSAPFVKGRLYSHGSYEPHQLDWNLANGPQYSRYLAQKPFFPDAWADAWAYA

SEQ ID NO: 268896 - protein, 136 aa, Glycine max
  unsure (1)..(136): unsure at all Xaa locations
  Clone ID: PAT_MRT3847_84835C.1.pep
RFAPAMCMTLNLAVKYANVLRSIVLQDDYLPKTATAXDDXFKLIFCLPCSLFLGGLIDTFIPEGRKLRDPMTLYAPSKMYHIADRKSCTCWRFPSEVRTAIPVDGRFKHMALPCKTTSHHGIIHIERDADKALLLM

SEQ ID NO: 268897 - protein, 82 aa, Glycine max
  unsure (1)..(82): unsure at all Xaa locations
  Clone ID: PAT_MRT3847_84836C.1.pep
MGXIVKQILAXXXXXADXXTKAAXXXXSFKQECXXLKAKSENXAAXLXXAALASSDLXEXPTRRIXDXTEHVLDXGLCSSAP

SEQ ID NO: 268898 - protein, 101 aa, Glycine max
  Clone ID: PAT_MRT3847_84837C.1.pep
DLRVCGSVCSAIGSLLARSVLLRLHFYSLGFVLPLLQSECSFRLLARCFWCLFFLSVRSVSGAGLCLCSRFCSQQERPPRLVVLGHKDRPAAFGFCGSSPF

SEQ ID NO: 268899 - protein, 50 aa, Glycine max
  Clone ID: PAT_MRT3847_84838C.1.pep
HLSCSTSYLAIPAGYLLQAYHFLVTKNGQQETCIPHITGRKFKNSFCREL

SEQ ID NO: 268900 - protein, 128 aa, Glycine max
  unsure (1)..(128): unsure at all Xaa locations
  Clone ID: PAT_MRT3847_84839C.1.pep
IVYQGPRENVVEFFESMGFKCPERKGVADFLQEVTSIKDQWQYWARKDEPYSFVTVKEFTEAFQLFHIGQNLGEELACPFDKSKCHPNVLTTKKYGVNKKELLRACASREXLLMKRNSFVYIFKVTQL

SEQ ID NO: 268901 - protein, 198 aa, Glycine max
  Clone ID: PAT_MRT3847_8483C.1.pep
EKTPPASVIFCENKADVDDIHEYLLLKGVEAVAIHGGKDQEEREYAIAAFKAGKKDVLVATDVASKGLDFPDIQHVINYDMPAEIENYVHRIGRTGRCGKTGIATTFINKNQSETTLLDLKHLLQEAKQRIPPVLAELNDPMEDNEEITDISGVKGCAYCGGLGHRIRDCPKLEHQKSMAIANNRKDYFGSGGYRGEI

SEQ ID NO: 268902 - protein, 66 aa, Glycine max
  Clone ID: PAT_MRT3847_84840C.1.pep
SIRFFVVSRAQFLPPNIRHNSLSLSGYIIYHISCHLPLLLLLLLLCDLRLVPSTAFIIILLYKYTI

SEQ ID NO: 268903 - protein, 190 aa, Glycine max
  Clone ID: PAT_MRT3847_84841C.1.pep
MEEAKPAMGPPPPPAPPTTKKRPLEDSNAHSNYFKIRAVIRDLRPHFLEVLRTPDYKNCKASHEIQEQLKIVVKLYENMKADAASLAKSKNVQDGQMKAGQNMDQKTLKEQQPQHGKQSQVEKSFARPSEIKLTPPAPGFQKQLVEETQTQGTYVVGGSAFGWNFITFSGKEPVYYGRTKEQFRSAKVTE

SEQ ID NO: 268904 - protein, 31 aa, Glycine max
  Clone ID: PAT_MRT3847_84842C.1.pep
KFSTYLAKNKKKSYLYLFLTILPNLILNSSN

SEQ ID NO: 268905 - protein, 45 aa, Glycine max
  Clone ID: PAT_MRT3847_84843C.1.pep
GTLFFLSYSCTCLGYPFVADYCKQYVIKAANRNSIECHLCTMTSV

SEQ ID NO: 268906 - protein, 69 aa, Glycine max
  unsure (1)..(69): unsure at all Xaa locations
  Clone ID: PAT_MRT3847_84844C.1.pep
KQASHLIKYDSILXTCDADVKPVVNYIFSVYGQEIKADIDRIPANLPWKDXGIDLVIEXTEVFEDRQGA

SEQ ID NO: 268907 - protein, 35 aa, Glycine max
  Clone ID: PAT_MRT3847_84845C.1.pep
RREARPRWATSRRAGPSCSRRRRPRSSGDVLRHGE

SEQ ID NO: 268908 - protein, 103 aa, Glycine max
  Clone ID: PAT_MRT3847_84846C.1.pep
CEVANAMEFTFFIMQLLLLAWHLNLARDDVIFPINILSMDKSIHTFLALSYSLTSVKAVVLRLTLSTELIDLVHTNESSKALMNSILICMSKGLISPCFCTNK

SEQ ID NO: 268909 - protein, 59 aa, Glycine max
  Clone ID: PAT_MRT3847_84847C.1.pep
MGQGQSKDELLYQQVSYGNAEGIKTLHRECAGLEWRDKDAKTPLIVACMNPHLYNVGKT

SEQ ID NO: 268910 - protein, 168 aa, Glycine max
  Clone ID: PAT_MRT3847_84848C.1.pep
INLHVAEVQNTGGVCFPLGKGMYRVLNIPEDEAVLLNSREKAPYLICVEVLRCEMPSNSKEASSSQKLSQGGIPLANGDALMQKPPPWAYPLRTAQEVYRNSNDRMSSSTAHAIDQAMTHVSEAKIKFVSVNFSVEMQLNGQPQEIEVADLHGGKHRSASFIERVCLM

SEQ ID NO: 268911 - protein, 114 aa, Glycine max
  Clone ID: PAT_MRT3847_84849C.1.pep
MIKQILNRLPRKPSKSGESREGGAILTPSSTPSTSARSSDAAGYSHGNATASPLSGTADSNLVPGLNHGDRIVQAMNSKLNLNGSFPVTAYEALPSFRDVPNSEKQNLFIRKLQ

SEQ ID NO: 268912 - protein, 42 aa, Glycine max
  Clone ID: PAT_MRT3847_8484C.1.pep
KVMFWRQIKSAQIKKSKKKIFEKLSYLVINEFGPETSQGSLV

SEQ ID NO: 268913 - protein, 53 aa, Glycine max
  Clone ID: PAT_MRT3847_84850C.1.pep
HYPSYYYTHSDDNSLPKEKNIKWPLIAGSLQDPSLITRACYVIAPPKCHPNSV

SEQ ID NO: 268914 - protein, 84 aa, Glycine max
  Clone ID: PAT_MRT3847_84851C.1.pep
AMIKQILNRLPRKPSKSGESREGGAILTPSSTPSTSARSSDAAGYSHGNATASPLSGTADSNLDPGLNHGDRIVQAMNSKLNLN

SEQ ID NO: 268915 - protein, 67 aa, Glycine max
  Clone ID: PAT_MRT3847_84852C.1.pep
VKSHNHKNKLKYLCAKTPSQAEMISSTHNNQQNSHIQVITDLHIHKPKLATNFLNDQAYIPKKNGFT

SEQ ID NO: 268916 - protein, 59 aa, Glycine max
  Clone ID: PAT_MRT3847_84853C.1.pep
LVLLTNFCFVSSVFPPRSEFCFTLGRNLISLLLASHLAQTRLLELTLASLACSLGGRLK

SEQ ID NO: 268917 - protein, 64 aa, Glycine max
  unsure (1)..(64): unsure at all Xaa locations
  Clone ID: PAT_MRT3847_84854C.1.pep
RPNVPLLVQENKNLLKLKLMWYIFSLLFPPLGVGINYYFAPXNPPLAYPVMIRSHFYFTIFLKR

SEQ ID NO: 268918 - protein, 213 aa, Glycine max
  Clone ID: PAT_MRT3847_84855C.1.pep
MAFASVVAIVAFLLLQPLSATSDLLSPLLSPIFDDVCKEVECGKGTCKPSKNSTFFFECECHPGWKRAPSNDKMGLKFLPCIVPNCTLDYSCSKAPAPVQEKSTKSNESIFDACHWIDCGGGSCNKTSKFSYSCECDVGYDNLLNVTTFPCFRECSLGLGCSELGISVKNSSTSAPPTLNDNSKNEGSSILQGNSLRLVMLIMFVAKLHLQIG

SEQ ID NO: 268919 - protein, 34 aa, Glycine max
  Clone ID: PAT_MRT3847_84856C.1.pep
FRRGIFVNWEDSGWGDLDFLMQGVSTCLGKRFHG

SEQ ID NO: 268920 - protein, 81 aa, Glycine max
  Clone ID: PAT_MRT3847_84857C.1.pep
PVSINEIEWTKIQRRVVSTIRLALAPDIKHALKETTLKALWEKLKNIDTSKSLTNCLCLKMELYQLKMEMEGDLHDHINKR

SEQ ID NO: 268921 - protein, 80 aa, Glycine max
  Clone ID: PAT_MRT3847_84858C.1.pep
MSQLLDKAKNYVAEKVTNMPKPEASVTDVDFKRVSRDSVEYLAKVSVSNPYSTPIPICEIKYSLKSAGKLVPFSIDVLLA

SEQ ID NO: 268922 - protein, 84 aa, Glycine max
  Clone ID: PAT_MRT3847_84859C.1.pep
GEYEVRLVLYRCTSTLNISMPMLIHTNGYLSSKNTATVSLDQIFKSQREHISTFILKPVHGEAYSIYAPNHYLKSSIDILSQYN

SEQ ID NO: 268923 - protein, 106 aa, Glycine max
  Clone ID: PAT_MRT3847_8485C.1.pep
EITKTNPRIFGVADHDSSENCNGLVSNDVLDLVGPDARLVYVGKTAGYHSRTHEEIHGLILSFAEAGATCVRLKGGDPLLFGRGWEKEVFLLQSGQRVAMVFILLQ

SEQ ID NO: 268924 - protein, 44 aa, Glycine max
  Clone ID: PAT_MRT3847_84860C.1.pep
VCQGKLGYLQNISHYLKFVFEPLQFGLFKGKICYDAKKKKKKGG

SEQ ID NO: 268925 - protein, 54 aa, Glycine max
  Clone ID: PAT_MRT3847_84861C.1.pep
MDMKKVTCAVLISAASVSAVVAATEVPAPAPGPSSGASACLPPIGSLVGASVLS

SEQ ID NO: 268926 - protein, 69 aa, Glycine max
  Clone ID: PAT_MRT3847_84862C.1.pep
RNPLGGGPPPPNKKRLVISYNSLEPVEIPRIGIPSMVLWVGGFFKKKKNQKKKKKKNKKAQTKGGNSRG

SEQ ID NO: 268927 - protein, 103 aa, Glycine max
  unsure (1)..(103): unsure at all Xaa locations
  Clone ID: PAT_MRT3847_84863C.1.pep
IGTLQTSTYLMSLAKNRNRELTHWHQCIYQENINYQSLSSIANPKNVLVIHPXYRRHLGYSPYHASLQNIKLCTIDNIVDXVFNQSFPDISSGFDYPHLTLTG

SEQ ID NO: 268928 - protein, 89 aa, Glycine max
  Clone ID: PAT_MRT3847_84864C.1.pep
YFKAFFSTILAVCFFLHVVFVLLLFPSSSFPPFFLFVAPLPILCLLAPCSSSLTDLSFVRFDLSHLVCIRIFGNKLVWCFFHFTLYEYI

SEQ ID NO: 268929 - protein, 49 aa, Glycine max
  Clone ID: PAT_MRT3847_84865C.1.pep
TEVLSTLVGWRLITVVLFFSFERVIFFRLIHQSHLDCILSNGVRNREVV

SEQ ID NO: 268930 - protein, 44 aa, Glycine max
  unsure (1)..(44): unsure at all Xaa locations
  Clone ID: PAT_MRT3847_84866C.1.pep
AGKSWKGHXHCQLCLXGLYXIWKXLLLEXTWLXXSVEINXSTXX

SEQ ID NO: 268931 - protein, 169 aa, Glycine max
  Clone ID: PAT_MRT3847_84867C.1.pep
MNGLEIEETTTEDSVAVEKANLIETERPSALMAPSPRQFQILGRELGNLEIPKRGNVFEGLENEIEGVEQSCVSFPMESHTGSQETTLAFVPELDHTISEKKNLSDDNDVETIPQESILKRINSHKEMKSYQLGKQLSCKWTTGAGPRIGCVRDYPCELQFRALEQVNL

SEQ ID NO: 268932 - protein, 54 aa, Glycine max
  Clone ID: PAT_MRT3847_84868C.1.pep
AILQNFTTNYTRAWEPLNHLSFMNILEKERKLKTYYALKGVALSKNIKNGWGKT

SEQ ID NO: 268933 - protein, 116 aa, Glycine max
  Clone ID: PAT_MRT3847_84869C.1.pep
MEQPPSSSIAAGIQFGWALQLSLLTPYVQTLGVPHAWASFIWLCGPISGLLVQPIVGYSSDRCRSRFGRRRPFILAGAVAVAIAVFLIGYAADIGHAAGDDLAKKTRPRAVAIFVV

SEQ ID NO: 268934 - protein, 87 aa, Glycine max
  Clone ID: PAT_MRT3847_8486C.1.pep
QYSCTMQDFIVDMDMDFFTFWASKVHHLMSLFTRTIHSQLGISDDDSLLFSPGASIETSSPFNSFSTHASTSTSTHATCTSDSAMSY

SEQ ID NO: 268935 - protein, 61 aa, Glycine max
  Clone ID: PAT_MRT3847_84870C.1.pep
TFSLATMDWLQFNLQGKGNPLSAPTGKWAIFFGACVGLLWWDRNNFVFNNTLNNFVFFHKE

SEQ ID NO: 268936 - protein, 95 aa, Glycine max
  Clone ID: PAT_MRT3847_84871C.1.pep
SPLGTVGDKLGPFQIFLYPFSIPPGGVPHPLEGSPHLLFLPPPPACCSSDAIPGFFPPPVMPPPAFEIRKILFFFLPPPSDKTKSLPNKKIKHFL

SEQ ID NO: 268937 - protein, 127 aa, Glycine max
  Clone ID: PAT_MRT3847_84872C.1.pep
MEIEDTSSRVSIAFPLGLALLVALLLFFCCFFCCCLHWEKLQPLFPFCMVIVDTQPQTQADFTPPPHKPGFPVLMMQHNRGESLPVLMPGDEVPKFIALACPCQPSTNEMITIHVQKTAPNDFCGGA

SEQ ID NO: 268938 - protein, 87 aa, Glycine max
  Clone ID: PAT_MRT3847_84873C.1.pep
LFFLQIFLLILFIIFSIPDFFFQVHKISIIDIIHFAFFFCNSFFYYYSVVLFLTFIIFGSSFINLIFFIDIYTYSVYRIYIYKEHEH

SEQ ID NO: 268939 - protein, 126 aa, Glycine max
  Clone ID: PAT_MRT3847_84874C.1.pep
MEIEDTSNGVSISFPLGLALLVALLLFLCCFFCCCLHWEKLQPLFPFCMVIDTRPQTQADLTPPLHKPGFPVLMMRHNRCESLPVLMPGDEVPKFIALACPCQPPTNEMITIHVQKAAPNDFCSGA

SEQ ID NO: 268940 - protein, 60 aa, Glycine max
  unsure (1)..(60): unsure at all Xaa locations
  Clone ID: PAT_MRT3847_84875C.1.pep
RTLLSIISGLCTCILXLTGLNRFTLYLLLMAFTSLGLVVKAXFSTHTYFDYWNRQLLDGF

SEQ ID NO: 268941 - protein, 102 aa, Glycine max
  unsure (1)..(102): unsure at all Xaa locations
  Clone ID: PAT_MRT3847_84876C.1.pep
DRRVRKKKHLKTNFFFQPVILIGGALYTFHANVPPNANLGDMSGLTXMHSTARPLTTIDRGSLDGAXAYKDSKVCNMLTMQEFQRGPHRTPFPTFXSPYPGC

SEQ ID NO: 268942 - protein, 108 aa, Glycine max
  Clone ID: PAT_MRT3847_84877C.1.pep
ANTVKCDSSYMLKSSSQVGEVVMSGGLKPLLPNVNISGSSACMVEPVTRRYLPRRKVSALRDFPALCGRNAPHLSKDKDVCLEGISSLNNKKACQQNLALDDNNPLKI

SEQ ID NO: 268943 - protein, 88 aa, Glycine max
  unsure (1)..(88): unsure at all Xaa locations
  Clone ID: PAT_MRT3847_84878C.1.pep
IWKDPLLFRGGXPSSNKRAPKNSSGPRLWEKITLEEHILALIIKNKFLLLHKNAINRGWATVATLATKTRGEITLYINKINLWTIYKG

SEQ ID NO: 268944 - protein, 62 aa, Glycine max
  Clone ID: PAT_MRT3847_84879C.1.pep
GQRKPWRCHITAVPVRFRHLCGVKYPMWVGQRIGHRGTWNNARLTPLRADGNPHTPPKCAPI

SEQ ID NO: 268945 - protein, 95 aa, Glycine max
  unsure (1)..(95): unsure at all Xaa locations
  Clone ID: PAT_MRT3847_8487C.1.pep
NNLQKESTLHLALRLSGGMQIFVKTLTGKTMTLXVESSIPIDNVKAKIQDQEGIPPVQQRLIFAGQQLKDGRTPADYNIQKESTLPLVLGLRGGF

SEQ ID NO: 268946 - protein, 47 aa, Glycine max
  Clone ID: PAT_MRT3847_84880C.1.pep
FKIITENLTLGGYLFHNSEGYLFIIVPSEACGSSGSYTFNLECQFKC

SEQ ID NO: 268947 - protein, 90 aa, Glycine max
  Clone ID: PAT_MRT3847_84881C.1.pep
EPFYASRGVKSKPHLGEMIFPKKGGGPKKGFQKWSFERGKQTSGDLSFPVENPKQTPTFDVFLGISQNFEIGGNPLKPAFFVPQAKAKFF

SEQ ID NO: 268948 - protein, 55 aa, Glycine max
  Clone ID: PAT_MRT3847_84882C.1.pep
KAFAVESDYMLLVIDLSSLLRSVKALHNLITNTMLNKGHERAQDSKTVTVPSTAA

SEQ ID NO: 268949 - protein, 66 aa, Glycine max
  unsure (1)..(66): unsure at all Xaa locations
  Clone ID: PAT_MRT3847_84883C.1.pep
PNYSVLSLFFFVTLYTCLLSATFHDDHIFLPSQLHDHDLVICTTTDLSLYYNPVIXILTHPYDGAS

SEQ ID NO: 268950 - protein, 120 aa, Glycine max
  unsure (1)..(120): unsure at all Xaa locations
  Clone ID: PAT_MRT3847_84884C.1.pep
ACASPVASQLKSTFSKTLVSPRGLCVSSPLHLAPSRAQYIFSVSAIQSEKPTYQEIHPINGDPFIESLDTPVTYSPXIVWHLYNLPVYRTAESPLLREIDVGLAHIYLLVRPFENAASLK

SEQ ID NO: 268951 - protein, 189 aa, Glycine max
  Clone ID: PAT_MRT3847_84885C.1.pep
TFIKLIGARLFLKSREAGGGKVDQTLRSGRDLVGHGTHTLSTAGGNFVPGANVEGNGNGTAKGGSPRARVVAYKACWNKLDEGGCYDADILEAFDHAIYDGVDVISASLGGSNPYPEALFTDGISIGAFHAVARNIVVVCSAGNDGPAPLSVTNVAPWSFTVAASTMDRDFRSRISLSNNQSIIVRDII

SEQ ID NO: 268952 - protein, 67 aa, Glycine max
  unsure (1)..(67): unsure at all Xaa locations
  Clone ID: PAT_MRT3847_84886C.1.pep
LXXNXXTLKRXGSXXXPVNKGMPXYEVXVCQKIWGGXRIXLXVXSFXPTXGHKXPISLVIXRXFXLX

SEQ ID NO: 268953 - protein, 40 aa, Glycine max
  Clone ID: PAT_MRT3847_84887C.1.pep
CCRRSCELSPCNCPQGTGAFFAFFALDSTHCRRRSRHTNV

SEQ ID NO: 268954 - protein, 71 aa, Glycine max
  Clone ID: PAT_MRT3847_84888C.1.pep
KNFPRKNLLPLISPTLKRAPFGETGSPSNTRPEINSGVKGSLSRGPFFFFFFFFFFGDGFCFPLLSSSRSR

SEQ ID NO: 268955 - protein, 49 aa, Glycine max
  Clone ID: PAT_MRT3847_84889C.1.pep
LGHECIQEFLRRSIFSSQEDGCISINKSKALTTILAGNDRVYMEDNYTT

SEQ ID NO: 268956 - protein, 72 aa, Glycine max
  Clone ID: PAT_MRT3847_8488C.1.pep
KTLTGKTITLEVESSDTIDNVKAKIQDKEGIPPDQQRVIFAGKQLEDGRTLADYNIQKESTLHLVLRLRGGF

SEQ ID NO: 268957 - protein, 76 aa, Glycine max
  unsure (1)..(76): unsure at all Xaa locations
  Clone ID: PAT_MRT3847_84890C.1.pep
XXINLTDXLPLXXXSVTQXXYTXFSSVXHPWXAFLRAXASKPGEXVMGXMRVAMVXXIXXXXXSSRIPSXRTRXXY

SEQ ID NO: 268958 - protein, 101 aa, Glycine max
  Clone ID: PAT_MRT3847_84891C.1.pep
RNSAPGELDRENIAFRLFFLSFWGGFYRTFGGVLTKKDQHFIPVLHLSQERTIHARAVKSDSDKLYYKLLLARLNKSTRQLRCSGSNIPLPKLIQQCWASR

SEQ ID NO: 268959 - protein, 86 aa, Glycine max
  unsure (1)..(86): unsure at all Xaa locations
  Clone ID: PAT_MRT3847_84892C.1.pep
HFIKWGEKKLFWINLILPFGYELLMCDTDMVWLKNPLPYLASYPKADVLTSSDQVVPTVVDDSLEIWQEVGAAYNIGIFXWRPTES

SEQ ID NO: 268960 - protein, 75 aa, Glycine max
  Clone ID: PAT_MRT3847_84893C.1.pep
EKKPKPGNPKQRVWPPGVPTSQNHNPLKPWVGKQKNPQKKKNLSSPGFTKKGNKGCFNFGLKGGQAPLTPIVLGF

SEQ ID NO: 268961 - protein, 52 aa, Glycine max
  Clone ID: PAT_MRT3847_84894C.1.pep
SPNNPKNIHQRSLLIHSSLSQKIMIDSFIFDLLLIHHGRAEFLGCPSQTGKK

SEQ ID NO: 268962 - protein, 44 aa, Glycine max
  Clone ID: PAT_MRT3847_84895C.1.pep
HGLNGLNLKVSNKVRLLASKCFILQGSSGNLLCFLLMFRENEFQ

SEQ ID NO: 268963 - protein, 290 aa, Glycine max
  Clone ID: PAT_MRT3847_84896C.1.pep
MSKEIFHLCLSRYFYFYGSDQRVWACIHEIVHFFQFDIRGNPYGFLAAHPLVPLVSLHHLDQLSPFFPNQTQLHSMKKLISAYHIDPARIVQQSICYDHKRRWSISISWGYTIQIYTKLLIAADLQMPLQTFQTWRSWKDGPFIFNTRPMSSDPCQQPARFFLDQATKVGKSGSITIYKRHEGKEAKCNREGTNNEEVQRIRVSALKLDPEYWKNVPLSLDLAVLNQVPRRHCCQLLGGGSIKNGSMNIRIKKCRPHETITTPMYIHSYQNIHIVSTFRYYGKYVLFFSP

SEQ ID NO: 268964 - protein, 525 aa, Glycine max
  unsure (1)..(525): unsure at all Xaa locations
  Clone ID: PAT_MRT3847_84897C.1.pep
MNHTRLESCHESPLKVYKFCFVPEKLGDMVILLIRFGILVCLVASISLALHSAFSKPDRWFPLPEHIRAVQNTSVIDNRPTNISHLQFGIAGSANTWHGRSNYTKLWWDPNTTRGYVWLDKKPKILHSDILVPPYQISRGWTRFKHVHSASAVRIARIVYESFKLGLPNVRWFVMGDDDTVFFTENLVTVLGKYDHNEMYYIGGNSESVEQDVMHSYNMAFGGGGFAISYALAAQLAKIMDGCLSRYFYFYGSDQRVWACIHEIGVPLTRENGFHQFLEYTTDMHSLINFPSLPSCITSMYYKAWKFSNKFDIRGNPYGFLAAHPLVPLVSLHHLDQLSPFFPNQTQLHSMKKLISAYHIDPARIVQQSICYDHKRRWSISISWGYTIQIYTKLLIAADLQMPLQTFQTWRSWKDGPFIFNTRPMSXDPCQQPARFFLDQATKVGKSGSITIYKRHEGKEAKCNREGTNNEEVQRIRVSALKLDPEYWKNVPRRHCCQLLGGGSIKNGSMNIRIKKCRPHETITI

SEQ ID NO: 268965 - protein, 84 aa, Glycine max
  unsure (1)..(84): unsure at all Xaa locations
  Clone ID: PAT_MRT3847_84898C.1.pep
YDHSYDLYEGYCAIIKGSREDRIYGNCIDAKFGWTRYGTPPNSSXPKCKRARTSPKTDCXGFMHGERTPYGTWIICFFIKHHNH

SEQ ID NO: 268966 - protein, 53 aa, Glycine max
  Clone ID: PAT_MRT3847_84899C.1.pep
QINHFLKPTKKILQTYFLNSIMFAPSPIPDFQSQSHDSSFQFQTSPMRPCLVF

SEQ ID NO: 268967 - protein, 364 aa, Glycine max
  Clone ID: PAT_MRT3847_8489C.1.pep
MGKGGMSIDEHGEGKEENMAAWLVGMNTLKIQPFKLPTLGPHDVRVRMKAVGICGSDVHYLKTLRCAHFIVKEPMVIGHECAGIIEEVGSQVKSLVPGDRVAIEPGISCWHCNHCKHGRYNLCDDMKFFATPPVHGSLANQIVHPADLCFKLPDNVSLEEGAMCEPLSVGVHACRRANIGPETYVLIMGAGPIGLVTMLAARAFGAPKTVIVDVDDYRLSVAKSLGADDIVKVSTNIKDVAEEVVQMTTEMGAGIDVTFDCAGFDKTMSTALSATQPGGKVCLVGMGHSEMTVPLTPAAAREVDVVGVFRYMNTWPLCLEFLRSGKIDVKPLITHRFGFSQKEVEEAFETSARGGNAIKVMFNL

SEQ ID NO: 268968 - protein, 430 aa, Glycine max
  unsure (1)..(430): unsure at all Xaa locations
  Clone ID: PAT_MRT3847_848C.1.pep
SVFHSTFGEIKDGPKSLQSISGQSNSSTYVEAESRRSGSELNSMDASDNSTDXXRRSAFPSLSQRPSNLREFTVSELKTATKSFSRFSXMLGEGGFGCVYKGLIKSVDDPSTKIEVAVKQLGRRGIQGHKEWVTEVNVLGIVEHPNLVKLVGYCADDDERGIQRLLIYEYMPNRSVEHHLSPRSDTPLPWSRRLKIAQDAARGLTYLHEEMDFQIIFRDFKSSNILLDELWNAKLSDFGLARLGPSDGLTHVSTAVVGTMGYAAPEYVQTGRLTSKSDVWSYGVFLYELITGRRPIDRNRPKGEQKLLEWVRPYLSDGRRFQLILDPRLERRHILKSAQKLAIIANRCLVRNPKNRPKMSEVLEMVTRVVESSVSTNLQPPLKSVASAEASQAAEIKNKKVTKDQNPDCNWLRMWRPKLLRALDCCSFKV

SEQ ID NO: 268969 - protein, 168 aa, Glycine max
  Clone ID: PAT_MRT3847_84900C.1.pep
MGEFTIQISNDLVNQLVDDAVPKKKTRKTRRKVARETEKPQSNETIKPDSAVTPGWPVQSPLFLPATLPVQPVHSELEGIQSVLQESERVLERLQKQEENMLQEVTQKAKDLHDKEYKLPNPKPEPCMAERLATLSCYKEHIKDPLKCASLVTGFADCLRRFGRLGDK

SEQ ID NO: 268970 - protein, 76 aa, Glycine max
  Clone ID: PAT_MRT3847_84901C.1.pep
LHLAFRYLYKNCKHPQYKWQTLHVPQDPYFMDSCCILAEHTILSRLTCCCPITLGYLEVNFFKPRFHVSIVVYNSS

SEQ ID NO: 268971 - protein, 98 aa, Glycine max
  Clone ID: PAT_MRT3847_84902C.1.pep
IHVRPRNHKVQFFASFLLKLVGDQTREKKPKKWKFLIRLAKWTGGSNGVVESKAKGPAGVQGFPILRWLKPGYLVGEKPGTWGWPNRRPWPEKEGMEG

SEQ ID NO: 268972 - protein, 100 aa, Glycine max
  Clone ID: PAT_MRT3847_84903C.1.pep
FPRRLAWVGPLFFLPPVAPFPVSFLAVLFGVRLGFLGSSPPFPLLSRLLGFCPRLLSVVGGCPFAFVSWSVLFCSVGRGAFLCPPRVFPFRDRGGAGRPL

SEQ ID NO: 268973 - protein, 113 aa, Glycine max
  Clone ID: PAT_MRT3847_84904C.1.pep
KKSNGSSESESRISNAMSPPQIDKETSTHPQISSNLEQNESPRFNKLDQESASPPRCDVQELKTTLPPQLDKPDSTSLVCFEDKLPESKLQAAKRNSSRKYSPIHYRDASVED

SEQ ID NO: 268974 - protein, 63 aa, Glycine max
  Clone ID: PAT_MRT3847_84905C.1.pep
KRTFMFLHQLQIYLSLKIVYNTFRLAIRKGLYIYIYIYIYIYIYIYNCRTKKVRIYDSMSLSK

SEQ ID NO: 268975 - protein, 87 aa, Glycine max
  Clone ID: PAT_MRT3847_84906C.1.pep
MAEEQRGAPPSNPTLSFDPSRTVGIIKRKALIKDLAAVYHAECLAYCQELLELQTKWEEVFRWLMHNSFREQNMHRQRIPFACCWCS

SEQ ID NO: 268976 - protein, 121 aa, Glycine max
  Clone ID: PAT_MRT3847_84907C.1.pep
MASLLLASPPPLSVQLHSSTSHLSFSHSQTLSSPLSTSFASLSASATSTLSPTPSVYCGRGDRKTAKGKRFAHSFGNARPKDKKKGRGPPRPYAPPAPSKKDKFEDNEVVKIEIDESLFSG

SEQ ID NO: 268977 - protein, 74 aa, Glycine max
  Clone ID: PAT_MRT3847_84908C.1.pep
IRCLFIVNCSQFNIFNVAILKKKKKKKKKKKKKKKKKKKKKKKKKKKKKKKKKKKKKKKKKKKKKKKKKRGGPF

SEQ ID NO: 268978 - protein, 85 aa, Glycine max
  Clone ID: PAT_MRT3847_84909C.1.pep
MAEEPKVPPPSNPTLSFDPSRTVGIIKRKALIKDLAAVYHAECLAYCQELLELQTKWEEPYIDLKTPEESKKETARPSKRVKKLR

SEQ ID NO: 268979 - protein, 49 aa, Glycine max
  Clone ID: PAT_MRT3847_8490C.1.pep
RFGVVSSAKVIQYARHGDPSSNAILITSAFLSSQPAITVVLSHADGRVG

SEQ ID NO: 268980 - protein, 77 aa, Glycine max
  Clone ID: PAT_MRT3847_84910C.1.pep
GKGYGFPSLKRSSSRPLQMYIRNCFIRVCSSHESVIKQEAAIADAFQQLFGSVDTRSSSLSCLMSGRKRGVAPEILA

SEQ ID NO: 268981 - protein, 60 aa, Glycine max
  Clone ID: PAT_MRT3847_84911C.1.pep
VEERGWFSQRGTVEGQKALRATRVDRGLERGERGFGLVYGCWCQGMVPRVGAVVDRWGLW

SEQ ID NO: 268982 - protein, 52 aa, Glycine max
  Clone ID: PAT_MRT3847_84912C.1.pep
PQFFLGRPFGFSTYQVRTSDLPLGSLEAYARCLLLPQCRALRYPLLSFVMTL

SEQ ID NO: 268983 - protein, 92 aa, Glycine max
  unsure (1)..(92): unsure at all Xaa locations
  Clone ID: PAT_MRT3847_84913C.1.pep
MTLIPGTTSEEAYNMLIXDIXKLVPTLVDIXCSMDEKPAGIIIFDKPNTRWFTILPMELNXLVVRRKILNFARLIMKKRDKLSCQVGINPYS

SEQ ID NO: 268984 - protein, 108 aa, Glycine max
  Clone ID: PAT_MRT3847_84914C.1.pep
SLLLTVLSLGMCCVLFVDVQRTKIFIVDRNLYRVRRPNFLYQQRWSIFNMVLSKKICWKSRDLVKDYSRTCFFVYSNITTVPELALPTTIGRKFNIFLTRQGASKLGD

SEQ ID NO: 268985 - protein, 60 aa, Glycine max
  unsure (1)..(60): unsure at all Xaa locations
  Clone ID: PAT_MRT3847_84915C.1.pep
VTFSDSIELPWAQEXCFFWIYGLCYSFILMNFIFDKLAHFGCFFFSVFFYTLRIIFCDFK

SEQ ID NO: 268986 - protein, 56 aa, Glycine max
  Clone ID: PAT_MRT3847_84916C.1.pep
PLELSRIWVVGLSKRRVLRIQKVCFRDLDISREFGLRNRWGDKDVLFFKPHKGALF

SEQ ID NO: 268987 - protein, 118 aa, Glycine max
  unsure (1)..(118): unsure at all Xaa locations
  Clone ID: PAT_MRT3847_84917C.1.pep
IRKLGLRHGELPASYMEGVXNGLNATHETADMHSFSXGVAVRXSSLSVGKCPCKVGTGAFKYISHVYNMDPYVVASMMAETSILVVSMKFSHIVFKFGPLKIVSNGHLFLIFTFAGWC

SEQ ID NO: 268988 - protein, 129 aa, Glycine max
  Clone ID: PAT_MRT3847_84918C.1.pep
PKQGNNTITTIQEASHRPKEKTQEPIILPIIDLKPLSNENITKVEIMGKTPKPLSQTSSSLPQMPYVFTKGDNGRTVNGFLYRYTKSEVSIVCVCHGSTFSPAEFVQHAGGTDTTHPLRHITVIPSAFG

SEQ ID NO: 268989 - protein, 66 aa, Glycine max
  Clone ID: PAT_MRT3847_84919C.1.pep
LVLLHIFIFIYYNFGVFFSSFLIILALITFPLDLSVPPLPPSLLPLVLMDLHLSYASLFSLTHTTL

SEQ ID NO: 268990 - protein, 127 aa, Glycine max
  unsure (1)..(127): unsure at all Xaa locations
  Clone ID: PAT_MRT3847_8491C.1.pep
KFWQLANGRXNXLKXXPGXISRGLPEGGXXXRXXXSSXPXHFTFGKPXACGXXXSTXASXGTSVXIXMGXXYHKHTSXXAAXXPPTXFPSXPTCIXVXXXFTXSXAQSXDGDCXSRSXXXXTXXXVX

SEQ ID NO: 268991 - protein, 221 aa, Glycine max
  unsure (1)..(221): unsure at all Xaa locations
  Clone ID: PAT_MRT3847_84920C.1.pep
MASKFCFFLFLILLPLFASSDTVPNPTTPVSPGTACKSTPDPSFCKSVLPPQNGNVYDYGRFSVKKSLSQARKFLNLVDKYLQRSSSLSATAIRALQDCRTLGELNFDFLSSSFQTVNKTTRFLPSFQADDIQTLLSAILTNQQTCLDGLKDTASAWSVRNGLTVPLSNDTKLYSVSLALFTKGXVPRTKAKAMHPTKKQLXFKNGRLPLKMSSRTRAIYE

SEQ ID NO: 268992 - protein, 616 aa, Glycine max
  Clone ID: PAT_MRT3847_84921C.1.pep
MTIHSVVIQKLLSTNAQVGRRVAAHHLKEFTYGFRNKMAIIDSDKTLICMRSACNFMASLARHNGRFMFINTNPLFDEIFDLMTKKVGSYSPSTNSLWRTGGFLTNSLSPKKFRSRNKKLVFGPTQPPDCIFIVDTERKSSVINEAFKLQIPVVALVDSAMPLDVYKRIAYPVPANHSVQFVYLFCNLITKTLLDEKAKSDAANPDIDAQMEEAPRKGKGKTYLDKVDVTVVLYDNLAPLPQDIEETKKLLDKLVVLKFNGSQGRNMCFDGPKSAIDICDGLTYLDLIINQIETLNSKYGSRVPLLLFNKDDIHDSSLKVLEKYSKSSVEVHTFKQGEDRELKSLGEYYSKEEVHPFDDVDVFRLLMTGGTLDSLLSQGKEYILVLKSDNVATVLDPNILNHLMINDIEYCMEVTPSNSFNLMLPTTKFKLREIGGDQDKHLKDNFKLIDTTNMWVSLRAIKRFVDTVEVRQKKPSFSKDTAAGPAIKFFDNVFGVSVPESRFLPLDATSDLLLLQSDLYTCREGVLTRNPARTNPLNPVIDLGPEFEKFGDFQSRFRSIPSIIELDSLMVRGDVWFGANITLKGQVTIAAKPGLKLEIPDGVTIENKEINDPADI

SEQ ID NO: 268993 - protein, 120 aa, Glycine max
  Clone ID: PAT_MRT3847_84922C.1.pep
MNRRTRPSIPHPFHKYLKPGALARIRDSRISARSHRLNSLLRHQISLHRPPSPSPLPDSNQPQATATAADTGFPFFLARIYGPRCPQRKKLMAAKSILFVPVNPAADSPDLVIDDLLVVN

SEQ ID NO: 268994 - protein, 77 aa, Glycine max
  Clone ID: PAT_MRT3847_84923C.1.pep
PKNQPCGSTTFGMVMNLESDQCFLWPRRPQTEPLPLVNAMCTTEQRPNSNRHVRLPVPKMQGAATPTPWSTRGACSP

SEQ ID NO: 268995 - protein, 70 aa, Glycine max
  unsure (1)..(70): unsure at all Xaa locations
  Clone ID: PAT_MRT3847_84924C.1.pep
PLKPFSNVFPCXALLQSPLVLTCLHILLVLHQIAPEPSSCKVLFFLNFISFISLSTQDXSFFSLYALSCM

SEQ ID NO: 268996 - protein, 67 aa, Glycine max
  Clone ID: PAT_MRT3847_84925C.1.pep
FSWKALLQSPLVLTCLLILLALDQIAPEPSSCKVLFFLNFILFISLSTQNFYFFFSIFFYVCNYIGR

SEQ ID NO: 268997 - protein, 291 aa, Glycine max
  Clone ID: PAT_MRT3847_84926C.1.pep
MASAWVKSWQCKSRAFEDVYHPHPKILSAGCRKSVESIKEMVDIPKPKPRPRKPKPKPKPPLEKHPSSKYPSSTTKPEFEARTTMTRSRSSTTTTTTSSRGIIELPEGHPSRNVVEIIFHTSWGPKPFPGRVELIFKVQNAPRSVSRFEEFREAVKARAAAGLAEGNDGEENARCIADGNEVMRFHCLGFAEDGVPYDGGGCAWSFPEKKGAAICTFSGSGGAHETAGGGKGRRAMLVCRVVAGRVSKQLGFLDSLLDKRVGFDSVSGDNGALLVFDSRAVLPCFLIIYRL

SEQ ID NO: 268998 - protein, 145 aa, Glycine max
  unsure (1)..(145): unsure at all Xaa locations
  Clone ID: PAT_MRT3847_84927C.1.pep
PLVRIQQAYFYTRVLEVHRKGTFLHRGXNTILSNIPYYKKHGYGVLIXHSSLYYGLIYMDTAPTLPXNFKNYSMLAPLDFKMIYLSGITLYIQSITESNCEQAAYHTWXTLRLKDPHDTFTSNAXXYITSLGEILIRHGYNMVEI

SEQ ID NO: 268999 - protein, 35 aa, Glycine max
  Clone ID: PAT_MRT3847_84928C.1.pep
MLRSKKVLIHDDQSMSSNKIQKGTKPGGPNLNHPL

SEQ ID NO: 269000 - protein, 45 aa, Glycine max
  Clone ID: PAT_MRT3847_84929C.1.pep
DSKDTILLHQTSIWSVRVKRDTHIIAQELLRKTVHTPQPITFIKM

SEQ ID NO: 269001 - protein, 64 aa, Glycine max
  Clone ID: PAT_MRT3847_8492C.1.pep
AHTCIIPSSITSAFVSTVSCSTYVLFSCLIMGQPIIFLHTYTSGVALRHVAITIPLVNTSHYRR

SEQ ID NO: 269002 - protein, 66 aa, Glycine max
  unsure (1)..(66): unsure at all Xaa locations
  Clone ID: PAT_MRT3847_84930C.1.pep
LXXXNRLPAXPGSGNXXXVVXXXTVVTGXPPPGKVRGRRXDSFYXTXLXPXNLGSXGXKXSTXXXX

SEQ ID NO: 269003 - protein, 231 aa, Glycine max
  Clone ID: PAT_MRT3847_84931C.1.pep
MVLLTLLTCWAKACLWHVHHFYGIKHCQPLTLPRPPQYHMHQTRTQTPHTQNSEGAHIACYIIALRTARGTQKINLSKKKGECLEREQNILFSFSSFFEYQQMATTVMTTLPQFSGLRPQFSAAPVKNLVAVQPMSRKGKGALGARCDYIGSSTNLIMVASTTLMLFAGRFGLAPSANRKATAGLKLEVRDSGLQTGDPAGFTLADTLACGSVGHIIGVGVVLGLKNIGAL

SEQ ID NO: 269004 - protein, 31 aa, Glycine max
  Clone ID: PAT_MRT3847_84932C.1.pep
ITNDPKLVLSFLMPSYYMEEHANTDLKSNQG

SEQ ID NO: 269005 - protein, 76 aa, Glycine max
  Clone ID: PAT_MRT3847_84933C.1.pep
DLKEPNKISIKDNTWGDHNLTNVSLDSMLTICFLCCLNKSDKIMYKFLNKMFLSPQNRIFLLPRKVSDWSTQSTCS

SEQ ID NO: 269006 - protein, 142 aa, Glycine max
  Clone ID: PAT_MRT3847_84934C.1.pep
LWPGPFLVRGWRGAGGACGLPFPCVRARGFLFFFGGSGLLFLRRVRLSLCLWCFFCGWRVGSLFSLLGPPVAFSRLFVGPLVVVVVGLFPVGFAFLLLCCSRSLSVCLLGWLFLILLPASVVLCLPFLLGVWSGRSVGPRFV

SEQ ID NO: 269007 - protein, 73 aa, Glycine max
  Clone ID: PAT_MRT3847_84935C.1.pep
VQYFHPGLVLGGFDDPLFCHTVIFKKNQNNKKVGYKTYDMDKEKGGVLNQRKKKKLLPLKNQRHQTKKAGKFL

SEQ ID NO: 269008 - protein, 44 aa, Glycine max
  Clone ID: PAT_MRT3847_84936C.1.pep
PRVRFRATHLASQSAKRERCLAFRLLSWRADMGPFKIQFFFELR

SEQ ID NO: 269009 - protein, 39 aa, Glycine max
  Clone ID: PAT_MRT3847_84937C.1.pep
RVLWLYLCAITSFKVHSRELEKMQFRPQNLNISHTILLK

SEQ ID NO: 269010 - protein, 71 aa, Glycine max
  Clone ID: PAT_MRT3847_84938C.1.pep
SRSRRLRALLRHHDRCLARFVSHGGLQVLGFLILHFMNELIFQNNIYNKLETFHVTTSEFILLFVVGLMVK

SEQ ID NO: 269011 - protein, 114 aa, Glycine max
  Clone ID: PAT_MRT3847_84939C.1.pep
LHTQLHPSFYKNTYPKVHSIVHKVIRNISNKDPHMLTTLITLHFHDCFIQRCDTSVLLNNTATIYSNQQALPNNNSLTSLDVINNINTSVKKAYPNIISYTNILTLTSKISSIL

SEQ ID NO: 269012 - protein, 137 aa, Glycine max
  Clone ID: PAT_MRT3847_8493C.1.pep
YGCEKTTEGENGPVTDVDPIGNSPVIIKKSLMEEIASTWVNVSLRMKDDQETDKAFGWVLEMYAYAVASALHGVKHNLRKDFMLQPPWDLNVENKFIIHYTYGCDYNMKGELTYGKIGEWRFDKRSYLLGPPPKNLP

SEQ ID NO: 269013 - protein, 68 aa, Glycine max
  Clone ID: PAT_MRT3847_84940C.1.pep
GQSHHGNSSSRDAHHHSHDASHHSHEADHDSNHASLNSDHANHHHANHHSRHSHHANICFHVPQLHYA

SEQ ID NO: 269014 - protein, 347 aa, Glycine max
  unsure (1)..(347): unsure at all Xaa locations
  Clone ID: PAT_MRT3847_84941C.1.pep
AVFSDRGWGHWITLPDLEVSNNYFPAENVICEVGYGVGHGRNLIIGPEVAFKKILNKLGPAEKVFRVXLDTTMDVWHKNLVRLLGHCVEGVHRLLVYENVNIGNLGQXPHGTMSQIGTLTWEARMKVIAGAAKALAYLHEAIDPKVVHRDIKSSNILIDTDFNAKVSDFGLAKLLDSGESHKFGXIGSRFGYVAPEYANTGLLNERSDIYSFGVLLLEAVTGRDPVDYSRPSNEVNLVEWLKMMVGTRRTEEVVDSRLEVKPSIRALKCALLVALRCVDPEAEKRPKMSQVVRMLEADEYPFREDRRNRKSRTASMEIESLKDISGPSDAEKLKGGSEGHEPETTQG

SEQ ID NO: 269015 - protein, 89 aa, Glycine max
  Clone ID: PAT_MRT3847_84942C.1.pep
MVMVAMMHYRFLLCFRPILNRCPLGRSVSSLQNLEQAVRAEVEAKNYIKIPELLISSDACQISKPFSFFSSFPQNIPVQIVDEMLASLI

SEQ ID NO: 269016 - protein, 144 aa, Glycine max
  Clone ID: PAT_MRT3847_84943C.1.pep
NEICKVHDGNCFVNNTFVLIKAEAVSPFIQILKDKNWEAVKAALNALSTLLRNEFWKGGANYIAKLSGVKAIVNVLEAGDVKVQEKALWMLERIFRIKEPRMKYAEFAQMVLIDMAQRSDSRLKSTVAKVLAVLELLLVQSSYF

SEQ ID NO: 269017 - protein, 45 aa, Glycine max
  Clone ID: PAT_MRT3847_84944C.1.pep
IHQTSKIFFFFRQKHCDVYDQAIGPVVGLSKNRTYYILMDLKPSF

SEQ ID NO: 269018 - protein, 78 aa, Glycine max
  Clone ID: PAT_MRT3847_84945C.1.pep
MKCNPGNSKNIIPFPLCIIKQFQFKYYFIFYFIFLQLDNLSFFLFFLFSFIVSFFFFITQHTLTSILLSFFLRSTFIS

SEQ ID NO: 269019 - protein, 62 aa, Glycine max
  Clone ID: PAT_MRT3847_84946C.1.pep
RSRSRTSCLQPAHPGSGSAGGRVQRLENHRTPRVGGRRLSLRTLIQAERVRDSSTAQLIDVS

SEQ ID NO: 269020 - protein, 56 aa, Glycine max
  Clone ID: PAT_MRT3847_84947C.1.pep
DLTCRACQSKADSMLLMPCRHLCLCKDCEGFINVCPVPQLIKAASVEVYLSYTYNI

SEQ ID NO: 269021 - protein, 46 aa, Glycine max
  Clone ID: PAT_MRT3847_84948C.1.pep
DSLKGKCVVHTISYDYYLKIDNVWLKYGVQMPNIATTLINNALQSA

SEQ ID NO: 269022 - protein, 75 aa, Glycine max
  Clone ID: PAT_MRT3847_84949C.1.pep
MPWPSICCPITKKLVICYICLVEYEDGDNMRVLPCHHEFHRTCIDKWLKEIHRVCPLCRGDICIFDSTPTENSSD

SEQ ID NO: 269023 - protein, 77 aa, Glycine max
  Clone ID: PAT_MRT3847_8494C.1.pep
GILQLYDEGHTIAFYTNRSYFQGTLLRTHYAYEFFNRCGNTYNITTSSLIPPTDTDDKVKGPSLMNGEAERVLPFSS

SEQ ID NO: 269024 - protein, 63 aa, Glycine max
  Clone ID: PAT_MRT3847_84950C.1.pep
EADHIPTWLKAYTDGHDAPFVKSEPMPETNDEPVKVVAGASLDDIGCKSGKNVVLEYNAQLVW

SEQ ID NO: 269025 - protein, 44 aa, Glycine max
  Clone ID: PAT_MRT3847_84951C.1.pep
PMIVSRKDAKTAIGTGDIAMQSVTASLRVASITVVINAVIMCVS

SEQ ID NO: 269026 - protein, 64 aa, Glycine max
  Clone ID: PAT_MRT3847_84952C.1.pep
FCVMMVDAFVWLSCGIVSGLLVRCERLGEVKVKVRCGGRRRQTRYAEGGCCVADVPLLSSSRSR

SEQ ID NO: 269027 - protein, 156 aa, Glycine max
  Clone ID: PAT_MRT3847_84953C.1.pep
MSDHGRAKAASGSRNRLESKNIVNRTSSFNYRSSSAVPLHELPWASFDQYRLRKGRVIRSIFPEKSTSQLLNREEWRVKMTPIQVLFLTCQPVAHITAKCISEADDYPPEIPGHITKFFEIQIVLENYAEDINNGFAVGLLAGYNSFKKNKAKYSG

SEQ ID NO: 269028 - protein, 63 aa, Glycine max
  Clone ID: PAT_MRT3847_84954C.1.pep
KKHKQNKTIYTIKRVASFFDRLTFVCVQFLIRSLLPEIIITIHKLDLWNKFLHINNFSGILLC

SEQ ID NO: 269029 - protein, 130 aa, Glycine max
  unsure (1)..(130): unsure at all Xaa locations
  Clone ID: PAT_MRT3847_84955C.1.pep
QPLPSPAPSFEVSSTLNPRRHDDGDGGGPDHYEMDEDEMEELDNKKDFDIEYDPLVPAAAAXAASAADDNIAFVESKSFVSTQGWDSDTVLDYKINEDEFHKICLVDCDFFIRKPPDPDNDVYDFREMYV

SEQ ID NO: 269030 - protein, 76 aa, Glycine max
  unsure (1)..(76): unsure at all Xaa locations
  Clone ID: PAT_MRT3847_84956C.1.pep
LAYACSQGNGTSDRIQPKGKCFKPDSVFWHAXSYAFSAYWAQFRKVGGTCYFKWACNSKPQKDPSYGSCKFPSVTL

SEQ ID NO: 269031 - protein, 100 aa, Glycine max
  Clone ID: PAT_MRT3847_84957C.1.pep
EDDTRVGSNLAIKITRVYTPDKLSLNIFIAHDRSHSGEIRTTYCRSRSSHSTRLRAVRKHRCPLPSTRYARNHHHHHALGTHRLAVHLNTTPSVPPAPPQ

SEQ ID NO: 269032 - protein, 329 aa, Glycine max
  Clone ID: PAT_MRT3847_84958C.1.pep
MMTSSSLFFSSPPLFLNPHPPRSFLPFRPLKPLFNPSLLLRPPSKSRHNPFLTRADDDDGDGGGPDHYEMDEDEMEELDNKKDFDIEYDPLVPAAAAAASAAGDDDIAVVESKSFVSTQGWHSDTVVDYKINEDEFHKICLVDCDFFIRKPPDPDNDVYDFREMYVTPPDTDVYSVPHASAPMPQKYIRCAQSDYGSYNVTEPPIDAPRDPLYKTEREILKVYLTKHYKNRRKGDSEFVLDFEEIYVIDSKSKSITRAKVLVTAPGGRTRDRRSDLLVISDRGSSFKIIHASEKEDPTTVIEKQEWEHSREEMERHLRKLRDFSISNWF

SEQ ID NO: 269033 - protein, 113 aa, Glycine max
  unsure (1)..(113): unsure at all Xaa locations
  Clone ID: PAT_MRT3847_84959C.1.pep
MEAGLTAKATEHFAFNRSEALVLDLQADDGSGIKTHRYXIHCYKRGXKFILLNIGDRVVANGXIKTESAAXKQRRTTTGIYNKRLERSHSRISLRGTNSDGDSQDQHVWQDLT

SEQ ID NO: 269034 - protein, 65 aa, Glycine max
  Clone ID: PAT_MRT3847_8495C.1.pep
HAFVTAKDGEVLFDGYPDIDELPRKLNIFLGVNEVKDAPRNPPWVCVCLQSFCVSQTYVWSSRTF

SEQ ID NO: 269035 - protein, 660 aa, Glycine max
  unsure (1)..(660): unsure at all Xaa locations
  Clone ID: PAT_MRT3847_84960C.1.pep
SKHPRGGTKPKYPGRPTRPRFSAALIMNKLDPERLGYIELWQLETILLQKDTYLXKKKALSYTSQALSQNLQGLRARSPIRRMSRRMLYYLQENWRRLWVLALWISAMIGLFTLKFIEYKRKNAYNIMGNCLLTAKGASDNLKSKMALLLLRVCRNTVTGLKSTMLACLAPFVDNINFHKIITAAVMIGVILHAGNHLACDFPRLVSSSEKDYKTYLDGVFGDHRPSYGDLVKGVEGVTGILMVILMAIAFTLATKWFRRNLIKLPKPFNRLTGFNAFWYSHHLFVIVYVLLTIHGVYLYLERRWHLQTTWMYLAVPILLYAGERTLRFFRSGFYTVRLIKVAIYPGNVLTLQISKPSQFRYKSGQYMFVQCPAVSPFEWHPFSITSAPDDDYLSVHIRQLGDWTQELKRVFSAACEPPVAGKSGLLRADETTKKCLPKLRIDGPYGAPAQDYRNYDVLLLVGLGIGATPFISILKDLLNNIIKMEELADSVSDSSRGSDLSTGSADSISSNKISPKRKKTLKTTNAYFYWVTREQGSFDWFKGVMNEVAELDQRGVIEMHNYLTSVYEEGDARSALITMVQALNHAKNGVDIVSGTRVRTHFARPNWKKVFSRICSKHCNGRIGVFYCGAPVLAKELSKLCFEFNEKGQTKFEFHKEHF

SEQ ID NO: 269036 - protein, 91 aa, Glycine max
  unsure (1)..(91): unsure at all Xaa locations
  Clone ID: PAT_MRT3847_84961C.1.pep
KKGSLSLEQIKALEKNFWVXNKLYPXRKVKLPQKLGLHPKQKTVWFPTPRPRWKPPPLGRDKKFRGLWNFFLPQFFGGVDPKNPCYILRGG

SEQ ID NO: 269037 - protein, 86 aa, Glycine max
  Clone ID: PAT_MRT3847_84962C.1.pep
YVDSRSGIDILNISSLTIEGIADKSYISGGGSQSAGDVSARVDQETLHRVFIPELSPIIDLLGQGRSSLDGDHSEGSFSRRGAPLL

SEQ ID NO: 269038 - protein, 72 aa, Glycine max
  Clone ID: PAT_MRT3847_84963C.1.pep
TLQESLKINVGSVTLKHWTFRNQTDPEVLASEELSHMAWLLDLDRYSKAIARKRNDDCVKYGTPPSVVFSQP

SEQ ID NO: 269039 - protein, 119 aa, Glycine max
  Clone ID: PAT_MRT3847_84964C.1.pep
SFSFKSFSILIKPAWKRDNKYTILLSPKLLFLLFSSTLIILIFFFAFLTSHPSNPSNPTFTAFNTRLSFNARTEGKDGFFVDVGANVGMASFAASAMGFRVLAFEPVFENLQRICEGVY

SEQ ID NO: 269040 - protein, 141 aa, Glycine max
  unsure (1)..(141): unsure at all Xaa locations
  Clone ID: PAT_MRT3847_84965C.1.pep
VVFFLVFFFFGGCFCVFFLLVLDPLVSVVYATVLSGVVALWGGGLFXESXXRDLFDRGVXRKLXHIRIGLVFVLCWPLFXAGPWASFFGALIPVVGXXRVLGVGLGXWGGEAPXVSVGRFGDCGDLLXGPLCCAAAFCLGR

SEQ ID NO: 269041 - protein, 226 aa, Glycine max
  Clone ID: PAT_MRT3847_84966C.1.pep
MVAFAGDLNKDFDITWGDGRAKILNNGELLTLSLDKASGSGFQSKNEYLFGKIDMQLKLVPGNSAGTVTAYYLSSKGSTWDEIDYEFLGNLSGDPYILHTNVFSQGKGDREQQFYLWFDPTADFHTYSITWNPQRIIFSVDGTPIREFKNLEPIGVPFPKNQPMRMYSSLWNADDWATRGGLVKTDWTQAPFTASYRNFNAETCIWSSGASSCAKTSSTPTTSSGS

SEQ ID NO: 269042 - protein, 285 aa, Glycine max
  Clone ID: PAT_MRT3847_84967C.1.pep
MASTVSYMLLLPLLVMVAFAGDLNKDFDITWGDGRSKILNHGELLTLSLDKASGSGFQSKNEYLFGKIDMQLKLVPGNSAGTVTAYYLSSKGSTWDEIDYEFLGNLSGDPYILHTNVFSQGKGDREQQFYLWFDPTADFHTYSIMWNPQRIIFSVDGTPIREFKNSEAIGVPFPKNQPMRIYSSLWNADDWATRGGLVKTDWTQAPFTASYRNFNAEACIWSSGASSCAKTSSTPTSGSGSWLSQELDATGHQRLKWVQKNYMIYNYCTDTKRFPQGLPPECNIS

SEQ ID NO: 269043 - protein, 46 aa, Glycine max
  unsure (1)..(46): unsure at all Xaa locations
  Clone ID: PAT_MRT3847_84968C.1.pep
GYHDSLEIEQVSKSLGXVTCMLNXNKPQFKAVLLSHKPFAGEPKVL

SEQ ID NO: 269044 - protein, 159 aa, Glycine max
  Clone ID: PAT_MRT3847_84969C.1.pep
VKLKESPFTGQQEKPSALITYLYIGHFLARWGARMWEFSVGLYMINIWPESLLYAAIYGAVESAAIAVFGPIIGRWVDKLSCVRVLKLWLVTQNLSFVIAGGSVVALLVHSSLKSTNFSIFILLVIIINVCGGIGVLSTLAGAILIEREWEYPLSFGEK

SEQ ID NO: 269045 - protein, 37 aa, Glycine max
  Clone ID: PAT_MRT3847_8496C.1.pep
SVLRKNAEIASQKKKPNSNFTPISKRGDGSDGLGDAD

SEQ ID NO: 269046 - protein, 88 aa, Glycine max
  unsure (1)..(88): unsure at all Xaa locations
  Clone ID: PAT_MRT3847_84970C.1.pep
GDEIYRDASLSLIPNVPAQILMGDMLHPPPPAHISYDXFVTQSTGRPMSLTTTAKILTDGNFSCTNEISSCTERTMKSFPHILMPPRT

SEQ ID NO: 269047 - protein, 47 aa, Glycine max
  Clone ID: PAT_MRT3847_84971C.1.pep
LTILLIRLILKMANVETMTPTCRLSWMAKENQIQYLLADHCWFTMQD

SEQ ID NO: 269048 - protein, 64 aa, Glycine max
  Clone ID: PAT_MRT3847_84972C.1.pep
QLQSEQQILLVNSTSNMSAVNHTILNYIMCFSYSNSSPAHVVSNMITKSKFHSSVSLRKIIFYE

SEQ ID NO: 269049 - protein, 51 aa, Glycine max
  unsure (1)..(51): unsure at all Xaa locations
  Clone ID: PAT_MRT3847_84973C.1.pep
KECLTSYFKSLSSKNXEAGSFIFLQPPLPFSFSKSSTNQVNHYVQEMNSHH

SEQ ID NO: 269050 - protein, 125 aa, Glycine max
  unsure (1)..(125): unsure at all Xaa locations
  Clone ID: PAT_MRT3847_84974C.1.pep
PRPRRGFPPNQQRGFFCRAIKFEDGGTLAGSNIQKEGTSXLGWGFCGGKQIFVKTLPGKIITPEVEDSGTLFNFKAKIPAKEGFPPGPQRFIFSGHHLKNGRAPPFSNIPKESPLPLGLGFRGGF

SEQ ID NO: 269051 - protein, 75 aa, Glycine max
  Clone ID: PAT_MRT3847_84975C.1.pep
RSCDCLYFSSQATLSLAMDILLSDENGLVDIQQGVGRLINAIVTVLGPELAPRSIFFSRSKVNFSSIFKIKIETY

SEQ ID NO: 269052 - protein, 29 aa, Glycine max
  Clone ID: PAT_MRT3847_84976C.1.pep
YIHIICLAVLCDYHVRKLHVRTRLISNDI

SEQ ID NO: 269053 - protein, 49 aa, Glycine max
  Clone ID: PAT_MRT3847_84977C.1.pep
YTLCYYIGMFPYKKAPKSFLLTTARSYYSITSQEARDFHTNRNQLCTWT

SEQ ID NO: 269054 - protein, 206 aa, Glycine max
  Clone ID: PAT_MRT3847_84978C.1.pep
MDKKPCNSSSHDPEVRKGPWTMEEDLILINYIANHGEGVWNSLAKASGLKRTGKSCRLRWLNYLRPDVRRGNITPEEQLLIIELHAKWGNRWSKIAKHLPGRTDNEIKNFWRTRIQKHIKQAETSQQHGNSENNDHQASTSTSKVSTMAHPNETFSPPSYQGTFEPFQPQFPTITDQSSCCTTTNDNNNYWSIEDIWSSMQLLNGD

SEQ ID NO: 269055 - protein, 81 aa, Glycine max
  unsure (1)..(81): unsure at all Xaa locations
  Clone ID: PAT_MRT3847_84979C.1.pep
LADVRIEVALKCKCLGTGRIRTLTQTTPVGFKIXTSSANEFLVNSPSGLMLPLSSASFQVILKPQSDLPHCYPRSPSDRFL

SEQ ID NO: 269056 - protein, 107 aa, Glycine max
  Clone ID: PAT_MRT3847_8497C.1.pep
YFFFFFFFFLCFFLFFLVFFFFFFGKGENFLLAKKNFLGGGKIFTFKKKKWFLFPLLAPLLKINLLTGQKWGGFKKKGKREPTFPRFPLLNQKFFGPVPFKGGEQRP

SEQ ID NO: 269057 - protein, 59 aa, Glycine max
  Clone ID: PAT_MRT3847_84980C.1.pep
VSTMAHPNETFSPPSYQATFEPFQPQFPRINDQSSCCTSNSNYWSIEDIWSSMQLLNGD

SEQ ID NO: 269058 - protein, 31 aa, Glycine max
  Clone ID: PAT_MRT3847_84981C.1.pep
WPLLKASFRLLKPQLRRGARKLVLFISYLVA

SEQ ID NO: 269059 - protein, 99 aa, Glycine max
  Clone ID: PAT_MRT3847_84982C.1.pep
LLPTPNFRDSALVPLPILGWLVTKFGLYHHYGVGAVRYNFSITYIIILLRQVSTVDFPFIILVGRVILFIRSLPIHPRGGSILGSNFYLYWALYAIHNI

SEQ ID NO: 269060 - protein, 55 aa, Glycine max
  Clone ID: PAT_MRT3847_84983C.1.pep
PHVRLEGTQLNSTGERDSPGVHQLRECQHLCKPQQYITCDTSYNGRLKNIQHVTT

SEQ ID NO: 269061 - protein, 80 aa, Glycine max
  Clone ID: PAT_MRT3847_84984C.1.pep
EKKEKVTFALLVEQKGPRKPIQKGVFFPKWGSAKKGEEKAKAHYHYRGFAILGKLINLKNRPITNPKRGPLSFSPPLDLK

SEQ ID NO: 269062 - protein, 71 aa, Glycine max
  unsure (1)..(71): unsure at all Xaa locations
  Clone ID: PAT_MRT3847_84985C.1.pep
IDHLLXXNLIXNLTVLKVSNLFFXPLXNPTYIDNVHVILSEDLTVHPRKYFICYGIIPNIVHCHLLQTISF

SEQ ID NO: 269063 - protein, 54 aa, Glycine max
  Clone ID: PAT_MRT3847_84986C.1.pep
IGIPAVMLPQDAGEDLKNHILNNSPLSVQMYSPLRPLADAAQVLLWLMAASTIL

SEQ ID NO: 269064 - protein, 58 aa, Glycine max
  unsure (1)..(58): unsure at all Xaa locations
  Clone ID: PAT_MRT3847_84987C.1.pep
SACSKVMEPLMSYNCKIPLSDYELHDKKVCFFLNVLYVRLNKIGKNALLVXLGGDKSV

SEQ ID NO: 269065 - protein, 50 aa, Glycine max
  Clone ID: PAT_MRT3847_84988C.1.pep
PLQQSSKHPSFSLHRSSKAPSFHKNAGRSRMATMAYSEAKFLFMKLVSSK

SEQ ID NO: 269066 - protein, 73 aa, Glycine max
  unsure (1)..(73): unsure at all Xaa locations
  Clone ID: PAT_MRT3847_84989C.1.pep
MAKTTSLLLFKMLLFGSLALIHAAKSSXDLTDVNHKVYYDVEINGKDAGRIVIGAYGKAVPXTADNYPALCTR

SEQ ID NO: 269067 - protein, 92 aa, Glycine max
  unsure (1)..(92): unsure at all Xaa locations
  Clone ID: PAT_MRT3847_8498C.1.pep
XVACXRTXSSXFGSXSXTXXXYFXLXXSHSXXXLCXIILAXSXXXXLXIXXRAXAQDLKSXRXVRHIVVXTVVRRTXMPXRSPSXGAXXXXX

SEQ ID NO: 269068 - protein, 170 aa, Glycine max
  unsure (1)..(170): unsure at all Xaa locations
  Clone ID: PAT_MRT3847_84990C.1.pep
RSXXVFHYGSISLIVXXCRSAHLKAMXVAKESGCLXXYDPXXRLPLWXXAEEARKQILSIWEKADLIKVSDAELEFXLGEHGSRYYTKSFKGSVDAFHVNTVDTTGAGDSFVGALLAKIVDDQSILEDDPRLREVLKFANACGAITTTQKVAIPALPKEEVALNLIKGGS

SEQ ID NO: 269069 - protein, 44 aa, Glycine max
  Clone ID: PAT_MRT3847_84991C.1.pep
VKLKRSDEIKSKLSFSWCPTLESLIIYYSYAFCFNLIYKTFSLS

SEQ ID NO: 269070 - protein, 47 aa, Glycine max
  Clone ID: PAT_MRT3847_84992C.1.pep
PQSMAPKTVKMMCISPGRPFMSKPPCFEAQFHLNNLNIRYWSSNFFG

SEQ ID NO: 269071 - protein, 331 aa, Glycine max
  Clone ID: PAT_MRT3847_84993C.1.pep
MALNNGVPATGTGLIVSFGEMLIDFVPTVSGVSLAEAPGFLKAPGGAPANVAIAVSRLGGKAAFVGKLGDDEFGHMLAGILKENGVRADGINFDQGARTALAFVTLRADGEREFMFYRNPSADMLLKPEELNLELIRSAKVFHYGSISLIVEPCRSAHLKAMEVAKESGCLLSYDPNLRLPLWPSAEEARKQILSIWEKADLIKVSDAELEFLTGSDKIDDESALSLWHPNLKLLLVTLGEHGSRYYTKSFKGSVDAFHVNTVDTTGAGDSFVGALLAKIVDDQSILEDEPRLREVLKFANACGAITTTQKGAIPALPKEEAALKLIKGGS

SEQ ID NO: 269072 - protein, 128 aa, Glycine max
  Clone ID: PAT_MRT3847_84994C.1.pep
MTGETVNPKAYPLADAQLSITILDLVQQAANYKQLKKGANEATKTLNRGISEFVVMAADTEPLEILLHLPLLAEDKNVPYVFVPSKQALGRACGVTRPVIACSVTTNEGSQLKSQIQQLKDAIEKLLI

SEQ ID NO: 269073 - protein, 330 aa, Glycine max
  Clone ID: PAT_MRT3847_84995C.1.pep
MALNNGVPATGTGLIVSFGEMLIDFVPTVSGVSLAEAPGFLKAPGGAPANVAIAVSRLGGKAAFVGKLGDDEFGHMLAGILKENGVRADGITFDQGARTALAFVTLRADGEREFMFYRNPSADMLLKPEELNLELIRSAKVFHYGSISLIVEPCRSAHLKAMEVAKEAGCLLSYDPNLRLPLWPSPEEARKQILSIWEKADLIKVSDVELEFLTGSDKIDDESALSLWHPNLKLLLVTLGEHGSRYYTENFKGSVDAFHVNTVDTTGAGDSFVGALLSKIVDDQSILEDEPRLREVLKYANACGAITTTQKGAIPALPKEEDALKLIKGA

SEQ ID NO: 269074 - protein, 522 aa, Glycine max
  Clone ID: PAT_MRT3847_84996C.1.pep
MANVDELLSSLISDVHAYTGKDPLLPWLRAIRKVKDTLPPKTLKEKLPAFLQKCAHTFELDRRYRNDMRYLRVWLHLMDFVDDPKTLLRTMETNHIGTKRCEFYQAYALYYEKSKKSDEAEKMYHLGVKNLAEPLDKLQKSYEQFLQRMERKNNKRIQHQEAKASRRPLSLKSFPSLDNKTEGSKSNGVDCVEGVQKGPRIDNYAAKGVADDKNIKTKKDERKRFCGDDTVVVKFVDTAMVGKSEAEDACHHGLVDPTINMKEAMNAINSMFREPLETVPLGKKSHKNHSKEDRSTKNEFEVLVDENLDNGIKPSGSLSLRNRTEASQPHQEPLQIYIDDEETSETSDVNLFEGGCTSSASQPNGFVFLRSKDIPSKKSSDMDADSDRNSKFREDTVVCRFVGSAILDEPEVENVCHHGLVDPTINLKEAMDDINNMFGKPIDFVRRRTTTKQEKAHQSIRGNDIGGFSILADDELQEQEVPPPPPPKLLGKSKESDLFEPTILTKEAIDDINKMFNMPLDF

SEQ ID NO: 269075 - protein, 551 aa, Glycine max
  Clone ID: PAT_MRT3847_84997C.1.pep
MANVDELLSSLISDVHAYTGKDPLLPWLRYPLIPTLSPFLCFPLHFSVSSLIPNFTCSAIRKVKDTLPPKTLKEKLPAFLQKCAHTFELDRRYRNDMRYLRVWLHLMDFVDDPKTLLRTMETNHIGTKRCEFYQAYALYYEKSKKSDEAEKMYHLGVKNLAEPLDKLQKSYEQFLQRMERKNNKRIQHQEAKASRRPLSLKSFPSLDNKTEGSKSNGVDCVEGVQKGPRIDNYAAKGVADDKNIKTKKDERKRFCGDDTVVVKFVDTAMVGKSEAEDACHHGLVDPTINMKEAMNAINSMFREPLETVPLGKKSHKNHSKEDRSTKNEFEVLVDENLDNGIKPSGSLSLRNRTEASQPHQEPLQIYIDDEETSETSDVNLFEGGCTSSASQPNGFVFLRSKDIPSKKSSDMDADSDRNSKFREDTVVCRFVGSAILDEPEVENVCHHGLVDPTIKIRLELDALEPMFGKPIDFVRRRTTTKQEKAHQSIRGNDIGGFSILADDELQEQEVPPPPPPKLLGKSKESDLFEPTILTKEAIDDINKMFNMPLDF

SEQ ID NO: 269076 - protein, 81 aa, Glycine max
  Clone ID: PAT_MRT3847_84998C.1.pep
LKRFFLRKGWDPSIKGLKENLKAPNQQLKFFFKEGKFPLGGPLNFKGGGPGPFFFIFWKKGKIFFLTVNWKNQKAPGRFPR

SEQ ID NO: 269077 - protein, 117 aa, Glycine max
  unsure (1)..(117): unsure at all Xaa locations
  Clone ID: PAT_MRT3847_84999C.1.pep
QKGHPIAFFSKTFPPKLLGAXAYVRDLCAITTTVKKWRQYLLGHHFVIITDHKSLKELLTQVIQTPEQHMYLARLLGYDYEIXYRSDSHNQAADSLSRLPKSDASMSMIYPYHHCFF

SEQ ID NO: 269078 - protein, 78 aa, Glycine max
  Clone ID: PAT_MRT3847_8499C.1.pep
LLQPHRVISRYLNRLQSQIYSSRGLDAQETQSTLPRILNQVHDIAMGPLPQNFYLFRLFCSANHIPFPLINSGKITLL

SEQ ID NO: 269079 - protein, 42 aa, Glycine max
  Clone ID: PAT_MRT3847_849C.1.pep
LHSSKPKNCCWQSRGGGTRRGIINFDRCECDVPIKLKLSTSI

SEQ ID NO: 269080 - protein, 172 aa, Glycine max
  Clone ID: PAT_MRT3847_84C.1.pep
MVPQSVITQVSDSSGVNAISNVSSGHGFYDWLFECHGFWHNATLNIPSFLFVFYLALQARHSLLKLSLARSYIIISYNLCLWLITLLNLAWCFLQAWECTSGRKLTWNLLSLFTTSGMLFLEVSLLAFLFQGNNAGGLDAMKREFCICSLVAVSYILYRLIALILRAQGICH

SEQ ID NO: 269081 - protein, 57 aa, Glycine max
  Clone ID: PAT_MRT3847_85000C.1.pep
PSKSSYHAKKKKNSREFNPPNVLTISHTKNSPQGGRQRKIRIMNTENQFNQDFWSVN

SEQ ID NO: 269082 - protein, 90 aa, Glycine max
  Clone ID: PAT_MRT3847_85001C.1.pep
AYGQWELKKQVLKWSQLWGSLGLPLCKSSLKTHLLLLLEVPLLLKHYYHIMVQSLGGIMRGNPRVSPTLGPPSAGFPRGAIKKFWSCVFK

SEQ ID NO: 269083 - protein, 59 aa, Glycine max
  Clone ID: PAT_MRT3847_85002C.1.pep
LDAFAGDFCFLLHDIQFIAASLCRHSLPCLSSYVSFFVRPHCSRRVSLALCFPTYSKFC

SEQ ID NO: 269084 - protein, 73 aa, Glycine max
  Clone ID: PAT_MRT3847_85003C.1.pep
PRVRPRVRFDFCYVNSSDADSINFFYGCVCSKTYCPFCVDVKKLFGDLGANYKAIELDTECASLFNSFLFFFR

SEQ ID NO: 269085 - protein, 158 aa, Glycine max
  Clone ID: PAT_MRT3847_85004C.1.pep
SSTLHFAFSPDPSSPPSDSGTGSPSSGRGSFRERKKKKRKRERERVRRRKNERVTTKLKSLEGTTLSRETQACRELSFPFVQRKMVERESCREEEEEEEEGLFGWGGEDGSETEIVLVVFNVQVLWNCYVLSPLSISLASTSSALFFCVGASGFRTRG

SEQ ID NO: 269086 - protein, 95 aa, Glycine max
  Clone ID: PAT_MRT3847_85005C.1.pep
GLLPLRWASLPSQGSKTQHHIPTPLNHTTNQPTFIPIHLTISLLLTSPLLPSSLLLLLSLLLMTTYQRPDTFNVANAGCQNFFRLFRASKPICAH

SEQ ID NO: 269087 - protein, 62 aa, Glycine max
  unsure (1)..(62): unsure at all Xaa locations
  Clone ID: PAT_MRT3847_85006C.1.pep
SHLNNIMLHETNIYIKVSXVYLTIRNFXCNFYTCEIILKKYFSKVNYDCTFNSCRINIELSK

SEQ ID NO: 269088 - protein, 60 aa, Glycine max
  Clone ID: PAT_MRT3847_85007C.1.pep
PLNSKGPCISLRSQDNMALASHGSGRKSEIRLEIPMCQPWRGFSVPMILLLECPWHPSLS

SEQ ID NO: 269089 - protein, 104 aa, Glycine max
  Clone ID: PAT_MRT3847_85008C.1.pep
PGSPFHPGWSKAPVFGGETPKTNLGIFPVAKGLLPQDFFKTKRAPASAPPTLAKFPKAGRENFSEAGQEEPNRPQNKSGPVSGVTLGGPPLMSLVKALVAPLLS

SEQ ID NO: 269090 - protein, 58 aa, Glycine max
  Clone ID: PAT_MRT3847_85009C.1.pep
SGFSLFWAHSIITQRWINGTGNTMILIYKQLCSFMTFVENLWQTGWIHYQISLYCESV

SEQ ID NO: 269091 - protein, 52 aa, Glycine max
  Clone ID: PAT_MRT3847_8500C.1.pep
SDSVSVFAAEDVRTSDLLRFSHSQSHHGVTKRLTSTLSSWDISTLGSQLPLV

SEQ ID NO: 269092 - protein, 67 aa, Glycine max
  Clone ID: PAT_MRT3847_85010C.1.pep
NPKGVIKEFFKPKKNLWKPPLAPGVWASQPHGKTCFFSLALNPFPEPQKPLENSPLPVHPPPAFFKL

SEQ ID NO: 269093 - protein, 55 aa, Glycine max
  Clone ID: PAT_MRT3847_85011C.1.pep
HPPGMHLLAGYLVIARISLERFSAILLHVPALHGRIETEIDGLQKYLFQEFRTVV

SEQ ID NO: 269094 - protein, 65 aa, Glycine max
  Clone ID: PAT_MRT3847_85012C.1.pep
KSKVLIKEQFLYLQVLLYAHRQGSNPYYIVKEPKLFVTCATPYSCLYFIFFCFMSNAFNATIFKH

SEQ ID NO: 269095 - protein, 58 aa, Glycine max
  Clone ID: PAT_MRT3847_85013C.1.pep
NGRMWLVLVCRSMDMTMIRIVNIYVIDMVYFVCCFAPIVYFHECGRRYLLILPSACFI

SEQ ID NO: 269096 - protein, 60 aa, Glycine max
  Clone ID: PAT_MRT3847_85014C.1.pep
AHTECMINGLWYYLLCSPPGTGVFARSYLVMLGVDDAEFHQITILSPAMSTTCGHYKGPC

SEQ ID NO: 269097 - protein, 77 aa, Glycine max
  Clone ID: PAT_MRT3847_85015C.1.pep
IGQDSFSSLSFLDKLNLLGEVKLSPQPFTFYTYISTVLVRIIINLILILLLISLSMIFISIFNTYISLTNSIFHILH

SEQ ID NO: 269098 - protein, 70 aa, Glycine max
  unsure (1)..(70): unsure at all Xaa locations
  Clone ID: PAT_MRT3847_85016C.1.pep
AHASEIIGPVLYVSFPPGKMPXNMYNSLGGKGPNTIGQQINVTCELQQLLXNNRIRAVSIIATESLMRGM

SEQ ID NO: 269099 - protein, 43 aa, Glycine max
  Clone ID: PAT_MRT3847_85017C.1.pep
FFFFFFFFFFFFFFFFFFFFFFFFFWKKAQGPCFFFLKKTPLF

SEQ ID NO: 269100 - protein, 165 aa, Glycine max
  unsure (1)..(165): unsure at all Xaa locations
  Clone ID: PAT_MRT3847_85018C.1.pep
SVPRREQMFWIDAYQKKVFRSALPKGNQSHEGQELQIHFDDNVTPLSMAVDYLTGNIYVTGVVGAENIANAEAAGRRKRRWSQPLDETGVVFVATSDGRYRKKIVFGQLQIPTAIVTLPKLGRICYSDAGLEAKIECADMDGNRRQTIISELIYXPTNMAVDEGR

SEQ ID NO: 269101 - protein, 131 aa, Glycine max
  unsure (1)..(131): unsure at all Xaa locations
  Clone ID: PAT_MRT3847_85019C.1.pep
FATWILKLVCKSLTEGTLYVEGLIRASFISAACSLLCYGNADLHMACFDFVHIIGMVTNYDAISYYLEFGQGGLPVFRNMAYDSSLGIFLNTLYSSCPEDIVKLTAADLVSVFLXSMRRTKSQQVKVNIDT

SEQ ID NO: 269102 - protein, 53 aa, Glycine max
  Clone ID: PAT_MRT3847_8501C.1.pep
FRSRKVSRHHCMTSSFFGGGGGRANDKSAVEGPRTVRNKRGDGKQLGKIVRTP

SEQ ID NO: 269103 - protein, 475 aa, Glycine max
  unsure (1)..(475): unsure at all Xaa locations
  Clone ID: PAT_MRT3847_85020C.1.pep
MLGLTXKVYYARNIKTGEGVAIKVIDKEKILKGGLVAHIKREISILRRVRHPNIVQLFEVMATKSKIYFVMEYVRGGELFNKVAKGRLKEEVARKYFQQLISAVGFCHARGVYHRDLKPENLLLDENGNLKVSDFGLSAVSDQIRQDGLFHTFCGTPAYVAPEVLARKGYDGAKVDLWSCGVVLFVLMAGYLPFHDQNVMAMYKKIYRGEFRCPRWFSPDLSRLLTRLLDTKPETRIAIPEIMENKWFKKGFKQIKFYVEDDRLCNVVDDDGLMDNDDDTASIVSVASFSDYSVSESDSEIETRRRINAPLPRPPSLNAFDIISFSPGFNLSGLFEEKEDETRFVTAAPVNRIISKLEEIAQLVRFSVRKKDCRVSLEGTREGVRGPLTIAAEIFELTPSLVVVEVKKKGGDRAEYERFCNDELKPGLQNLMVEESATSSELSTPIQPSLLRGLSEPVPDISSDIETPLCIPSDD

SEQ ID NO: 269104 - protein, 102 aa, Glycine max
  Clone ID: PAT_MRT3847_85021C.1.pep
MEAKFFRFLKIVGVGYKARAEAAGRLLYLKLGYSHDVELAVPPAVRVFCFKNNVICCTGIDKQRVHQFAATVRTCKPPEVYKGKGIMYVDEVIKKKQGKKSK

SEQ ID NO: 269105 - protein, 266 aa, Glycine max
  unsure (1)..(266): unsure at all Xaa locations
  Clone ID: PAT_MRT3847_85022C.1.pep
MDKSLKFVSMEILENRRWMYQRLDANKRWTNEFREGVFEFVXFVTSQDMFQMQGEQTRCPCKKCKYNVFKFVDDVMRDLYEEGFMPNDYWWKNHGEELPQFPLIVLQGSYYGSGGQREELNPYEQMIMDHAGPSIGKYKEQEGAIETECMEKNPNLEAQKFFDMLAIAQATLWEGCEHHSKLPASLACLSLKSDYNMSKGCFNCTVQFMGDTMPKNNTMVGNXFYQAKRSVQKFGLGCLKIDCCLNGCMLYYKENSDKNINNCFYF

SEQ ID NO: 269106 - protein, 87 aa, Glycine max
  Clone ID: PAT_MRT3847_85023C.1.pep
LVTKKTRKGMTGSIHDIPIIKRHTTTPCTSLNTQHDLLTFHYSTREEYQPYLEQQWSCANPGVQKSNRPLSDERYTLILSWRWNRLA

SEQ ID NO: 269107 - protein, 66 aa, Glycine max
  Clone ID: PAT_MRT3847_85024C.1.pep
SPKVIFSPKCVHNTPKQVIFAQHSPNCRPITSPGTQPNSNVFPHGQEMTTWDLKMLVFNRAPDIDI

SEQ ID NO: 269108 - protein, 72 aa, Glycine max
  Clone ID: PAT_MRT3847_85025C.1.pep
PTRLPTLSVPKDYQSRRPLGNCVGDPDPTLLLISSHFPRPVTEKECEIALTHASVAYIQSIPTPLNQLLVRP

SEQ ID NO: 269109 - protein, 100 aa, Glycine max
  unsure (1)..(100): unsure at all Xaa locations
  Clone ID: PAT_MRT3847_85026C.1.pep
FPSRPLHIPKAYASSTEQLPFFPANSLSLAWRSPLSAPPICAKNVSEFFVLSAFGQAKEKAVEMYAGKGGEDSRKKLGFGPLVSGXEVXPPPPLRCFIGS

SEQ ID NO: 269110 - protein, 67 aa, Glycine max
  Clone ID: PAT_MRT3847_85027C.1.pep
VGVIFSIYWPSSPTTFLLAERTCIWQSCFQSIICLCSSPYVYRQYVNPWVSLQMGSQFPPPPCSKIN

SEQ ID NO: 269111 - protein, 55 aa, Glycine max
  Clone ID: PAT_MRT3847_85028C.1.pep
FNRSVKKTENHKQRWKKKYKGEGKQHKYSQAIDTNDSSFLTKSECKGVLCSKRQL

SEQ ID NO: 269112 - protein, 74 aa, Glycine max
  Clone ID: PAT_MRT3847_85029C.1.pep
VDGKSGDKDMWALVYVRMNPHLFEQNLCRKFVGFVKNMNQGISPPKCWQNVEREFKHFAQVTQPLVQEPQMLMP

SEQ ID NO: 269113 - protein, 82 aa, Glycine max
  unsure (1)..(82): unsure at all Xaa locations
  Clone ID: PAT_MRT3847_8502C.1.pep
QLPTSCNRVQRFLSSIDKRYFLPSEDDNLSEDASQAKKVFGFKPIVWFXQLVKIIVSADIEMAKXKEKFLFIAGYIDAQQHR

SEQ ID NO: 269114 - protein, 83 aa, Glycine max
  unsure (1)..(83): unsure at all Xaa locations
  Clone ID: PAT_MRT3847_85030C.1.pep
KDSACGAAVEEELPTGIXGXDVVPXAXEVLXIGLYSKTXKEIQXVPEXXGYRKAXESFTXXRLXXCXEXXDXAXIXKRXPLRG

SEQ ID NO: 269115 - protein, 49 aa, Glycine max
  Clone ID: PAT_MRT3847_85031C.1.pep
AITVSIIWIWIRNLWLISLAYFTIFSVFGEQQAMFSSDVGQLFLFFSAH

SEQ ID NO: 269116 - protein, 119 aa, Glycine max
  Clone ID: PAT_MRT3847_85032C.1.pep
RNLEKKKTLKTWEGNNTTNPKKAPLKREGTNHFTCAKFRKHPICKAQCGGPHRVKRGIVTKEKKGKEQSFFQQSFLKKRAKEKKPKNQKKKKFYQNQRFKKLEPIKKTPPKQIHIFFFF

SEQ ID NO: 269117 - protein, 237 aa, Glycine max
  Clone ID: PAT_MRT3847_85033C.1.pep
MVVEDTQKSVITEDQYPSRVVSDNNNDDDDDDLEEGEIPVDGEDSGATATTKPPAALARNPHPLENSWTFWFDNPSSKSKQAAWGSSIRPIYTFATVEEFWSIYNNIHHPSKLGLGADFHCFKHKIEPKWEDPICANGGKWTMTFPRGKSDTSWLYTLLAMIGEQFDHGDEICGAVVNVRSRQDKIAIWTKNASNEAAQVSIGKQWKEFLDYNDTIGFIFHEDAKKLDRGAKNKYVV

SEQ ID NO: 269118 - protein, 60 aa, Glycine max
  Clone ID: PAT_MRT3847_85034C.1.pep
KEHSKNPFRLTKSFQGERTGLLRIRHHIFCKRVGFIGNRKLKTLNASLTVANIPFTCVEF

SEQ ID NO: 269119 - protein, 55 aa, Glycine max
  Clone ID: PAT_MRT3847_85035C.1.pep
HELKGDFKPLHPLRSELYVNLFITSSVRFINVINFKTHMHNIIHDSQIIYKYFNF

SEQ ID NO: 269120 - protein, 113 aa, Glycine max
  unsure (1)..(113): unsure at all Xaa locations
  Clone ID: PAT_MRT3847_85036C.1.pep
VPRTYCVLNPQNPCGINTWLGRLTLPHRTCRSGKTMPVCICAGAGAQNAXLMNMRYAALINGERFCGKPLHYKGLGLPPPYPKCSVSCLIPYRHIPDDTINYEAFPDQLLQLG

SEQ ID NO: 269121 - protein, 74 aa, Glycine max
  Clone ID: PAT_MRT3847_85037C.1.pep
TISRKFSLIRLPKTYFYLVHKLLLAYERNLFNFFSIFFLLEVFVEKSIRPCKCYWIMDSQSCENVHVSIFSYTL

SEQ ID NO: 269122 - protein, 61 aa, Glycine max
  Clone ID: PAT_MRT3847_85038C.1.pep
MLILPKSRCLVDVRWNLDDLRCWPYHATKVLGLPCTTQRNYQAYLSLYDCKTQTCSEITDP

SEQ ID NO: 269123 - protein, 97 aa, Glycine max
  Clone ID: PAT_MRT3847_85039C.1.pep
KQKGGLSIAKNPYRRKQKFFGAHKQDPQISLGKNKGGETGETNKGQVKINPRKGWQNRRTIIKWGGPRPKSIFFLTKTFVDTPPTECGFAFQTGAEF

SEQ ID NO: 269124 - protein, 156 aa, Glycine max
  unsure (1)..(156): unsure at all Xaa locations
  Clone ID: PAT_MRT3847_8503C.1.pep
MEEPIVVNKGEEPLDLPPGFRFHPTDEEIITYYLTEKVRNSSFSAIAXGEADLNKCEPWDLPKKAKIGEKEWYFFCQKDRKYPTGMRTNRATESGYWKATEKIXEIYKGKGNLVGMKRTPRFYERRAPKGEKGYWVIDEIRSEGQWDATNLPRARR

SEQ ID NO: 269125 - protein, 72 aa, Glycine max
  Clone ID: PAT_MRT3847_85040C.1.pep
PRLVSFLLSQSIYENPLSSSRPFTFAVPEQRIRNISFFDLSHCTHASTLTHYPESDTTGMADSRSDQTILGK

SEQ ID NO: 269126 - protein, 97 aa, Glycine max
  unsure (1)..(97): unsure at all Xaa locations
  Clone ID: PAT_MRT3847_85041C.1.pep
MATTAMTTRPQFRGLRPQPSAAHVTNLIAGQPMSPKAKGASGARCDYIGSCTNPIMXACTTTTLAAAWTGXAPSAYRKATACLKLQERDSGLLTGDP

SEQ ID NO: 269127 - protein, 167 aa, Glycine max
  Clone ID: PAT_MRT3847_85042C.1.pep
GPELRVRQPDGLLHRNAIGEAEENPKSTAIDTSQKKTSEQEEDDINEIGEEEKEKLNDVDYLTGNPLPNDILLYAVPVCGPYSAVQSYKYRVKIIPGPAKKGKAAKTAMNLFSHMSEATTREKELMKACTDPELVAAIVGNVKISAAGLTQLKQKQKKGKKSSKQES

SEQ ID NO: 269128 - protein, 43 aa, Glycine max
  Clone ID: PAT_MRT3847_85043C.1.pep
LFKTLTKSENEQNQFKNSVINSLNLFRKSNKLNLSFKKNKFDK

SEQ ID NO: 269129 - protein, 107 aa, Glycine max
  unsure (1)..(107): unsure at all Xaa locations
  Clone ID: PAT_MRT3847_85044C.1.pep
LYFFXXKTSPYMGYTESFWGAYGNLADYTINFEAFPHKLMHFGEINSKYVFTISQKKFFLAWSTHVLPXSNLLTDGCPHLNAMEHDNLLSTILXDFFIGVTKLVQLF

SEQ ID NO: 269130 - protein, 60 aa, Glycine max
  Clone ID: PAT_MRT3847_85045C.1.pep
IYSFINKFFFFFFFFFFFFFFLEMQICTNNKQWFTNFIMVFSLILQFQNIIVGEMELDFP

SEQ ID NO: 269131 - protein, 103 aa, Glycine max
  unsure (1)..(103): unsure at all Xaa locations
  Clone ID: PAT_MRT3847_85046C.1.pep
XXXXXXXXXXXXXAXTXXXXXQXXXXXLXXHXXRIXXXXXXRXXXPXLXXXXGLXVXXXXXXXXXXXLXXLXVXWRXHXXXXXXWXXXXLXXXXXXHXXXAIX

SEQ ID NO: 269132 - protein, 85 aa, Glycine max
  Clone ID: PAT_MRT3847_85047C.1.pep
GFRLLVLSFVALCVCSPLSSKAVGSISRLAPDQAIQVGLPHIHPCQSKETQPIIDKHTGWEPYYSNPNGHILITDDDFVYSLKVR

SEQ ID NO: 269133 - protein, 196 aa, Glycine max
  Clone ID: PAT_MRT3847_85048C.1.pep
MAFAGTTQKCMACDKTVYLVDKLTADNRVYHKACFRCHHCKGTLKLSNYNSFEGVLYCRPHFDQLFKRTGSLDKSFEGTPKIAKPEKTGEEKPAATKVSSMFGGTRDKCAGCQKTVYPTEKVTVNGTPYHKSCFKCTHGGCVISPSNYIAHEGKLYCKHHHIQLIKEKGNLSQLEGDHEKSTEEEKINGEVVAAET

SEQ ID NO: 269134 - protein, 196 aa, Glycine max
  Clone ID: PAT_MRT3847_85049C.1.pep
MAFAGTTQKCMACDKTVYLVDKLTADNRVYHKACFRCHHCKGTLKLSNYNSFEGVLYCRPHFDQLFKRTGSLDKSFEGTPKIAKPEKTGEEKPAATKVSSMFGGTRDKCAGCQKTVYPTEKVTVNGTPYHKSCFKCTHGGCVISPSNYIAHEGKLYCKHHHVQLIKEKGNLSQLEGDHEKSAEQEKINGEVVAAET

SEQ ID NO: 269135 - protein, 72 aa, Glycine max
  Clone ID: PAT_MRT3847_8504C.1.pep
KLLKAYRLFEISTFQPFGMGDLMFMAFLILTKLFTFFPFVSPVFWGPFYSSWWEPCFFVTNVMFFSRVDLNV

SEQ ID NO: 269136 - protein, 112 aa, Glycine max
  Clone ID: PAT_MRT3847_85050C.1.pep
MLVFQAKCIKHMEAFTQRFISRWSVTLYARYSDTPQKKSKLAPLQERRMMDQCKIFAKAGDGGNGCSSLRKGRPDGGNGGRGGDVILECSHRVWDFSGLQRHLIAEKGGPGS

SEQ ID NO: 269137 - protein, 46 aa, Glycine max
  unsure (1)..(46): unsure at all Xaa locations
  Clone ID: PAT_MRT3847_85051C.1.pep
ERRMMDQCKIFAKAGDGGNGCSSLRKGRPYGGNGGRGGDIXLECSH

SEQ ID NO: 269138 - protein, 69 aa, Glycine max
  Clone ID: PAT_MRT3847_85052C.1.pep
YISMRDSEKKLNNKGSKKSRPLNVHKKGQGKKEEVEVGSKSHTKTACTDISRKRVISSLKVKGPRKEES

SEQ ID NO: 269139 - protein, 155 aa, Glycine max
  Clone ID: PAT_MRT3847_85053C.1.pep
MSRVFGRWKNAKEMALLSGSLPRGHHRTGFNFCPISTHLNMIAGHRWREAPVGVQERYKWDRGGSDDTSSRKIRAEANCPRCTKDMNLVFYNRHFPTPQIESELGGGEREKGYQSVNLCPSCKTAYYFRPYDTTPLQGTFVEIVGSLVLTINGVI

SEQ ID NO: 269140 - protein, 103 aa, Glycine max
  Clone ID: PAT_MRT3847_85054C.1.pep
MSHAHSHMGSGSRTTRRAFEFGKTHVVRPKGKHQATIVWLHGLGDNGLRYGCHHLFNNGIGHSNIATTITYSFLYWLFYILFSFVEPFTSLFHSTSLNLLMFF

SEQ ID NO: 269141 - protein, 108 aa, Glycine max
  unsure (1)..(108): unsure at all Xaa locations
  Clone ID: PAT_MRT3847_85055C.1.pep
ASGRAGGPKRTHASTRRESXXXEAXKGKTRAXXXQRRDRENXGGTQPNRRAAQPPFGRXRRTNFFFSERXTQQXRSQKGEGDAPRSGASAAGEETRSGTATQASAQAP

SEQ ID NO: 269142 - protein, 116 aa, Glycine max
  Clone ID: PAT_MRT3847_85056C.1.pep
LRIRNQVQFLTFRFPDLGFPLCDHHHLPRAHPSSNPSYNRNFAFFHTQKHLPPATVSEIHDPTQTLRFLGTLFFYPPPPSITDLKLSSETKRPNFFIFILFYIYIPSLVMQKSDES

SEQ ID NO: 269143 - protein, 126 aa, Glycine max
  Clone ID: PAT_MRT3847_85057C.1.pep
MEPIGLGCGMFSGLVGVESPLQQQQQEQNPHHLQHHPQMVPYATHHDTENPHHPHLHHSIKQGYPPFLSKTKQQQQQQQQQSSFSDDDEPGSADDDPKKKVSPWQRMKWTDTMVRLLIMAVYYIGD

SEQ ID NO: 269144 - protein, 100 aa, Glycine max
  Clone ID: PAT_MRT3847_85058C.1.pep
RKHAPLYSSTRSLKYHYHHIYVDVRKCISNLRSRLVHCSYHCVCNRAGNGGMSVWFLCLSYKSCTRRPHLLQQQTTWSNSFQVTPRRRHLETHLDLGRTR

SEQ ID NO: 269145 - protein, 59 aa, Glycine max
  Clone ID: PAT_MRT3847_85059C.1.pep
IPTPSSFQRILVRNLLKSYWCGQKEIYNVHRSFYVCIVIIALLIYHPQTKKLNTLVKEA

SEQ ID NO: 269146 - protein, 127 aa, Glycine max
  unsure (1)..(127): unsure at all Xaa locations
  Clone ID: PAT_MRT3847_8505C.1.pep
EFGTRQTEHQTTRHHVQDTPPRLRRPGCGLRPVPRLPVRQDRGRLPRCLLCLLCLPCLLWSQHLWRLPLRLLRPWLWFCLPLPLRQIDAADANVLTGVPTVPARSTTTASSTVCLLTTFFFGAXXVQ

SEQ ID NO: 269147 - protein, 195 aa, Glycine max
  unsure (1)..(195): unsure at all Xaa locations
  Clone ID: PAT_MRT3847_85060C.1.pep
VHVKKSSECLGGVIGVGGSGGTSLLSSPFASLPIGVGGRAMENLVREGFIQLPIDWACFIYIKRTEVADYIVGGVMACESSRFDAVIENKVPLVLSVGALDMVSFGAKDTIPLKFQQRNIYEHNKQVSLMRTTVDENRKFADFIANKLKNSSSMICVCLTEKCVSALDAPGKAFYDPEASGTLLREYXTYSTNDD

SEQ ID NO: 269148 - protein, 49 aa, Glycine max
  Clone ID: PAT_MRT3847_85061C.1.pep
ATYNEIFCCKCYINPMLSWYLTRDLSLARPILRAQLNAMFSTFHYCDEQ

SEQ ID NO: 269149 - protein, 87 aa, Glycine max
  Clone ID: PAT_MRT3847_85062C.1.pep
MNSICLRDYVGLRQHSPYAPHFAGQSRPGTPHRKFRVVAGKFNPRLNGRNLRVAVVGGGPATGARTETLSNGGVKTFLIERKMNNCK

SEQ ID NO: 269150 - protein, 73 aa, Glycine max
  Clone ID: PAT_MRT3847_85063C.1.pep
TFHLGILANLLWLIYTKIESLSMGSYERTRGNITNGYTELKDYNHTYKVTVMCMQYTKTNVIQLDKNTLTEAD

SEQ ID NO: 269151 - protein, 173 aa, Glycine max
  unsure (1)..(173): unsure at all Xaa locations
  Clone ID: PAT_MRT3847_85064C.1.pep
HIXASTGGASPXRIVRAIGELARSIGSRDFVAGQVVDINSEGLADVDLERLEFIHVHKTAALLEGAVVLGAILGGGTDDEVEKLRKFARYIGLLFQVVDDILDVTKSSQELGKTAGKDLVADKVTYPKLLGIEKSKVFAAKLNKDAQDQLVGFDPVKAAPLIALANYIAYRQN

SEQ ID NO: 269152 - protein, 51 aa, Glycine max
  Clone ID: PAT_MRT3847_85065C.1.pep
GSRFLSLISFYPFFYFLDYLLTSRFGLCEKNANEVDTAFVFGWIANGGCST

SEQ ID NO: 269153 - protein, 105 aa, Glycine max
  Clone ID: PAT_MRT3847_85066C.1.pep
KPQGTRPWENPERCAQKPLRIPNSITWFLIGGWVPVKLVIPWSNVWGINPPNPKGSLLIDLGHLPLGLGPQPRGWPPPNNGSLWETVLTGDVPALGRIYLHGNSF

SEQ ID NO: 269154 - protein, 41 aa, Glycine max
  Clone ID: PAT_MRT3847_85067C.1.pep
ILIHKILDNFNFRLDKNTFFSIIFFHLILNFTQTLHFFNFY

SEQ ID NO: 269155 - protein, 47 aa, Glycine max
  Clone ID: PAT_MRT3847_85068C.1.pep
EEMLWLMGGVVPVRISLVCVKLYCPINVLLVCYQCVELIYNYPRYVG

SEQ ID NO: 269156 - protein, 36 aa, Glycine max
  Clone ID: PAT_MRT3847_85069C.1.pep
LYSCSKVLNARFMNKIILFYNIVHLWFRPVKCSYHL

SEQ ID NO: 269157 - protein, 85 aa, Glycine max
  Clone ID: PAT_MRT3847_8506C.1.pep
DFQIGSPIYSAKSVRFKMGHPKASLDATDDEMFVWTYTSPEFPMSKVFNISGLSTGFPLHNFCLIDFLMPDMKNEMWFAIKGCLI

SEQ ID NO: 269158 - protein, 144 aa, Glycine max
  Clone ID: PAT_MRT3847_85070C.1.pep
MALKTVPVRVRLRVGFTSSAEGVFVSSLRFFAALAPVCDGVLARVSSDPPALPSFFRCALSSIRSSSSSSVSVSTSVSSSLSPSSTLLAATREPPDCFEAEDAVVAVRRVYTRARTAWLARAKYGPFGDEFGGPMSHSATRESF

SEQ ID NO: 269159 - protein, 45 aa, Glycine max
  unsure (1)..(45): unsure at all Xaa locations
  Clone ID: PAT_MRT3847_85071C.1.pep
CVQVFITSINYTXHYSAWYWTNSDPLSVELILSIEACRPNVYYNM

SEQ ID NO: 269160 - protein, 133 aa, Glycine max
  unsure (1)..(133): unsure at all Xaa locations
  Clone ID: PAT_MRT3847_85072C.1.pep
MQMISGFLFNGSAVVAMADMNCFANASDRKLGVQLQTIATDFQRISKIHDQLFVALSGLVTRLLNIXYNRLRFRHKLXSLREERDMKPETFACSVFVLLYEKXFESYFCQPVIAGLGDEDQPFICPMDCIGPK

SEQ ID NO: 269161 - protein, 183 aa, Glycine max
  Clone ID: PAT_MRT3847_85073C.1.pep
MAATVKQMSLIVSLFGVVSFILGVVAENKKPAAGTPVPGLDGVSVTCKYPADPTVALGYLSTAFLVASTVTGYLSLFYPYKGKSIPQGVLFKHTTFTVFFNISLFTTGLAAAMLLWPTITEHIHLTRNVHRNINYECPTAKTGLLGGGAFLSLDSSLLWLIALMLADNAREDFFEEEGRWWQG

SEQ ID NO: 269162 - protein, 72 aa, Glycine max
  Clone ID: PAT_MRT3847_85074C.1.pep
LRWPFQSCLAIVLKTTKVRSLLRLFACSHTRPIFSLIVPNEGKGTTLLKNLPPNTFGRDTNKGCNNLECHQI

SEQ ID NO: 269163 - protein, 114 aa, Glycine max
  Clone ID: PAT_MRT3847_85075C.1.pep
MLVYQDLLTGDELLSDSFRYKEIENGMLWEVEGKWVVKGAVDVDIGANPSAEGGGEDEGVDDAAVKVDDIGDTFILKEQPAFYNMRIVTFLNRVMKNATPKLDAYNYEVSKKHI

SEQ ID NO: 269164 - protein, 205 aa, Glycine max
  Clone ID: PAT_MRT3847_85076C.1.pep
MAATVKQMSLIVSLFGVVSFILGVVAENKKPAAGTPVPGLDGVSVTCKYPADPTVALGYLSTAFLVASTVTGYLSLFYPYKGKSIPQGVLFKHTTFTVFFNISLFTTGLAAAMLLWPTITEHIHLTRNVHRNINYECPTAKTGLLGGGAFLSLDSSLLWLIALMLADNAREDFFEEEGEDGDKGEFGTASSDAYYDADSGPKASS

SEQ ID NO: 269165 - protein, 130 aa, Glycine max
  Clone ID: PAT_MRT3847_85077C.1.pep
MLVYQDLLTGDELLSDSFRYKEIENGMLWEVEGKWVVKGAVDVDIGANPSAEGGGEDEGVDDASVKVVDIADTFRLHEQPAFDKKQLATFMKKVIRNLTPRLDAQQEEWLRMHSEGPTKYPGLYIKISHF

SEQ ID NO: 269166 - protein, 168 aa, Glycine max
  unsure (1)..(168): unsure at all Xaa locations
  Clone ID: PAT_MRT3847_85078C.1.pep
MVVYQGTLTSDELLFYSFPYKEIDNGMLWEVEGKWVCKGAVDVDIGANPSAEGGREDEGVDDAAVKVVDIVDTFRLQEQPAFDKKQFVTFMKRFIKNLTPKLDAXQQELFKKHIEGATKYLLSKIKDFQFFVGESMGDDACLVFAYYKDGADDPTLLYFAYALKEVKC

SEQ ID NO: 269167 - protein, 168 aa, Glycine max
  Clone ID: PAT_MRT3847_85079C.1.pep
MLVYQDLLTGDELLSDSFRYKEIENGMLWEVEGKWVVKGAVDVNIGANPSAEGGGEDEGVDDAAVKVVDIVDTFRLQEQPAFDKKQFVTFMKRFIKNLTPKLDAEQQELFKKHIEGATKYLLSKIKDVQFYGGESMGDDAWLVLAYYKDGAADPTFLYFAYALKGGQG

SEQ ID NO: 269168 - protein, 53 aa, Glycine max
  unsure (1)..(53): unsure at all Xaa locations
  Clone ID: PAT_MRT3847_8507C.1.pep
MFXLRTVATKRKHAAFKPCYLTTLFSTGWTEVNIHSLNNCTHQSRTPDFTLPI

SEQ ID NO: 269169 - protein, 89 aa, Glycine max
  Clone ID: PAT_MRT3847_85080C.1.pep
PEARPLLHNEIVTKKEWHDVCTTKNTIDYWVVNGGEKVREKLLLELGDHLTDPVTDIHNHNDDHYDERRSCRNARMTGSFAGTFACPSI

SEQ ID NO: 269170 - protein, 54 aa, Glycine max
  Clone ID: PAT_MRT3847_85081C.1.pep
ITLASFSMIPLLSFYQKAKTLLSGGLCPPLKFPGRRGKKKNLVPDDTKGMSAPP

SEQ ID NO: 269171 - protein, 176 aa, Glycine max
  Clone ID: PAT_MRT3847_85082C.1.pep
MNFIENSANMLVYQDLLTGDELLSDSFRYNEIENGMLWEVEGKWVVKGAVDVDIGANPSAEGGEDEGVDDAAVKVVDIVDTFRLQEQPAFDKKQFVTFMKRFIKNLTPKLDAEKQELFKKHIEGATKYLLSKIKDFQFFVGESMNDDACLVFAYYKDGAADPTFLYFAYALKEVKC

SEQ ID NO: 269172 - protein, 168 aa, Glycine max
  Clone ID: PAT_MRT3847_85083C.1.pep
MLVYQDLLTGDELLSDSFRYKEIENGMLWEVEGKWVVKGAVDVDIGANPSAEGGGEDEGVDDAAVKVVDIVDTFRLQEQPAFDKKQFVTFMKRFIKNLTPKLDAEQQELFKKHIEGATKYLLSKIKDFQFFVGESMGDDACLVFAYYKDGAADPTFLYFAYALKEVKC

SEQ ID NO: 269173 - protein, 93 aa, Glycine max
  unsure (1)..(93): unsure at all Xaa locations
  Clone ID: PAT_MRT3847_85084C.1.pep
CFFIFNIQSSLSLFLIFDCINIFIVNLPVFFFSQLLXFFIPYLFFNLSKSYFLFFYISLFFIFYFSLFNFIFISYSFLYFSFLHKLFMSSFIF

SEQ ID NO: 269174 - protein, 40 aa, Glycine max
  Clone ID: PAT_MRT3847_85085C.1.pep
QWKPPLRIDCLSFRSYHVENAGLEVINLGTRVMWPDYDGN

SEQ ID NO: 269175 - protein, 44 aa, Glycine max
  Clone ID: PAT_MRT3847_85086C.1.pep
TVISGPVLRKIVCGIPSNTIDITQSHIRSFLSAKFSERSLEYKV

SEQ ID NO: 269176 - protein, 125 aa, Glycine max
  Clone ID: PAT_MRT3847_85087C.1.pep
LVDFYLKRKIQQKSLPIELIKQVDIYKYDPWDLPKLAGTGEKEWYFYCPRDRKYRNSARPNRVTRAGFWKATGTDRPIYSSEGKCIGLKKSLVFYRGRAAKGMKTDWMMHEFRLPCISDSCPAKK

SEQ ID NO: 269177 - protein, 123 aa, Glycine max
  Clone ID: PAT_MRT3847_85088C.1.pep
RQADASLKAGKWQRNKYVGVSLVGKTLAILGFGKVGSEVARRAKGLGMHVIAHDPYASADRSRAIGVELVSMEEAMTTADSISLHMPLTPATDKMLNDEAFAKMKKGVHIINVARGGVIDHQF

SEQ ID NO: 269178 - protein, 197 aa, Glycine max
  Clone ID: PAT_MRT3847_85089C.1.pep
MSVSSSSRGRITTELQVPKKWTDRETSPERTKVWAEPKPKPKTPRKVSVVYYLSRNGQLEHPHFMEVPLSSPHGLYLKDVINRLNALRGKGMATLYSWSAKRSYKNGFVWHDLSENDFIYPTTQGQDYILKGSEIVEHNVTGAGARVNKSEEESDSPVVITRRRNQSWSSIDMNEYRVYKSESFGDSAGRIGADAAT

SEQ ID NO: 269179 - protein, 163 aa, Glycine max
  unsure (1)..(163): unsure at all Xaa locations
  Clone ID: PAT_MRT3847_8508C.1.pep
SAAKRAMKGVGGYHDWPYYASPTSNLSAFAAPFSVNPYTSSEASSQFMDTAESAETLPPIQFQPYRYDFFSGPVRELDSAAQFSHLGLPSYSARSNLVEAQPYTASSAIHDHSSNSAAPYHWSSGAPSSDWPSLREANRSPELGFSGQSAXSWDQFPEFNSPW

SEQ ID NO: 269180 - protein, 61 aa, Glycine max
  Clone ID: PAT_MRT3847_85090C.1.pep
APDRLRMVLINCVHMAYGLSRRVQIDRDPLGYIESHRTKSYHSSSSVLILFPMPHRVSQEP

SEQ ID NO: 269181 - protein, 259 aa, Glycine max
  Clone ID: PAT_MRT3847_85091C.1.pep
MLAINYKFKYISGNMVFLGVLLVGFLLGAYGDSDGWMDAHATFYGGGDASGTMGGACGYGNLYSQGYGTNTAALSTALFNNGLSCGACFEIKCVNDQRWCLPDTVVVTATNFCPPNNALPNDAGGWCNPPLQHFDLSQPVFQQIAQYRAGIVPVAYKRVPCQKRGGIRFTINGHSYFNLVLITNVRGAGDVQAVSIKGSRTNWQPMSRNWGQNWQSNTYLNGQSLSFKVTTSEGRTLVSNNVAPDSWSFGQTFTGKQFN

SEQ ID NO: 269182 - protein, 43 aa, Glycine max
  Clone ID: PAT_MRT3847_85092C.1.pep
WVPIIFNISNSNIRALVNWVKKFQSLGCHFSSEICLYNDFFKH

SEQ ID NO: 269183 - protein, 70 aa, Glycine max
  Clone ID: PAT_MRT3847_85093C.1.pep
TRAINYGVSFSSSVAGRQGSLYGVRCSVYDPISKLFGRAGSGVVVVFTELITSRIRRSCQSTSKVGLGLQ

SEQ ID NO: 269184 - protein, 71 aa, Glycine max
  unsure (1)..(71): unsure at all Xaa locations
  Clone ID: PAT_MRT3847_85094C.1.pep
KVFHYPPKNEEHPSSLALFLFWGLTPLYLPLDIPEFVLHNEGNPPENGGXYYILSDLTTFGGIKATPPANE

SEQ ID NO: 269185 - protein, 53 aa, Glycine max
  Clone ID: PAT_MRT3847_85095C.1.pep
TSPLSSGVAGTMAANGSGLQMATIRNLLMAWVLTLPCAIMLSATLYVIFSRIF

SEQ ID NO: 269186 - protein, 67 aa, Glycine max
  Clone ID: PAT_MRT3847_85096C.1.pep
HGSRTLYQHAVRRESENSNQWVGFRVCSSELWVKLGELEAINGSKGSHWWLLGCQVEWHKNGTFTIN

SEQ ID NO: 269187 - protein, 85 aa, Glycine max
  Clone ID: PAT_MRT3847_85097C.1.pep
IANNLFLRIIIMHTEKLCHYMRINHRRKGDLHYFCHLRTRAEENGHRQGQPKQGMNAETESASAMQLSTRANTPDLHSPLQGTYT

SEQ ID NO: 269188 - protein, 78 aa, Glycine max
  Clone ID: PAT_MRT3847_85098C.1.pep
AEKAQLQGNITANDDNSVWKKAIIISTGFYNTMNNKTLGRAATFSGTHRQNSSRWESISTSDDVANLQRSMSAVKDML

SEQ ID NO: 269189 - protein, 66 aa, Glycine max
  Clone ID: PAT_MRT3847_85099C.1.pep
RTRYWGLCASTKCSTGVRSQPGMYALILELVLGYRVSVAPLLSALIPACSPDIAYPSSAHLPLIGF

SEQ ID NO: 269190 - protein, 397 aa, Glycine max
  Clone ID: PAT_MRT3847_8509C.1.pep
EFLFRLTRPTLGAVPTVVTYNTIMYGLCKWGRVSDARKLLDVMVNKNLMPDLVSYNTLIYGYTRLGNIGEAFLLFAELRYRSLAPSVVTYNTLIDGLCRLGDLDVAMRLKDEMIKHGPDPDVFTFTTFVRGFCKMGNLPMAKELFDEMLNRGLQPDRFAYITRIVGELKLGDPSKAFGMQEEMLARGFPPDLITYNVFIDGLHKLGNLKEASELVKKMLYDGLVPDHVTYTSIIHAHLMAGHLRKARALFLEMLSKGIFPSVVTYTVLIHSYAVRGRLKLAILHFFEMHEKGVHPNVITYNALINGLCKVRKMDQAYNFFAEMQAKGISPNKYTYTILINENCNLGHWQEALRLYKDMLDREIQPDSCTHRSLLKHLNKDYKLHVVRHLENVIAAGE

SEQ ID NO: 269191 - protein, 84 aa, Glycine max
  unsure (1)..(84): unsure at all Xaa locations
  Clone ID: PAT_MRT3847_850C.1.pep
NKAXQAVERATRXAREXAAVEARRRAERAAVEKANTEARKRAERAAVQRAQAEARERAATEAKERAEKASAEAKERECGKELQL

SEQ ID NO: 269192 - protein, 348 aa, Glycine max
  unsure (1)..(348): unsure at all Xaa locations
  Clone ID: PAT_MRT3847_85100C.1.pep
MSEIDLAVFKPEMMKPYVWLQTSDDSIQQVEQEIAMFCPLICQEIIQKGMGSSKSCAICLPQQVSPAMLSLILDYCRFRQVPGRSNKDRKFYGEKYNKRNTYGLCVFTSAADRLRVLPLVDLTXLRALARIIEGKTPEEIRDIIPLPDDLTEVQKLEPLRNITADPRIRLLNRLYAKKRKELKERGRLKNVEVEEEHVEGRSVVDLVAVLVGERAVPDRVSLLSGNGGAPGEVSTSRAXCEGXRKNGQKKKKIALMADTKVQKQIEFARPSNYPXAEEDIFSPKVNLDDSDIFDEIDPALKEKFYREVEDFARRLNSDWPERMQELLSSGQERKTILFTTDGFLRRQA

SEQ ID NO: 269193 - protein, 102 aa, Glycine max
  Clone ID: PAT_MRT3847_85101C.1.pep
CMGETHPFFGLKNPAGPPKALRGVNKVFYKKTKPGYFLDVTPLSPAKKNAPPQGENGVMPINFTPWGFPGVPAPWNKVFRAAPKGQNFKPRFWAPLVFVSPF

SEQ ID NO: 269194 - protein, 63 aa, Glycine max
  Clone ID: PAT_MRT3847_85102C.1.pep
KTQFLHHVPCLQRLFIFKLHALTPSSTYMTGTMKWNAYPTYFKRSFQTHYTSHEFLPWWVHPT

SEQ ID NO: 269195 - protein, 46 aa, Glycine max
  unsure (1)..(46): unsure at all Xaa locations
  Clone ID: PAT_MRT3847_85103C.1.pep
KDICIHERRRGXGDRLTNRQTRKRQWSEWGSLWLSIAHLCIYACCR

SEQ ID NO: 269196 - protein, 65 aa, Glycine max
  Clone ID: PAT_MRT3847_85104C.1.pep
LLLIMKIKKQHSRIREFLRTPVLRMAPLPRAYSPTHFRRCVLDLYDLNRWKVDDHKRTPNNLNPP

SEQ ID NO: 269197 - protein, 117 aa, Glycine max
  unsure (1)..(117): unsure at all Xaa locations
  Clone ID: PAT_MRT3847_85105C.1.pep
GRKFFVGGNWKCNGTTEEVKNIATTLNDAKVPGEDVLEVVVSPPFVRLPVGKSLLLPYLHDMEQSCXFRNGGAYLVVASAAMLVKLPISCVVSGIHHEGRIIINDVSWTGEMGVYEL

SEQ ID NO: 269198 - protein, 41 aa, Glycine max
  Clone ID: PAT_MRT3847_85106C.1.pep
PQTLNYKTALVIHQTVRGLLNSFSMLSPHSYYTNLLPYTAF

SEQ ID NO: 269199 - protein, 109 aa, Glycine max
  unsure (1)..(109): unsure at all Xaa locations
  Clone ID: PAT_MRT3847_85107C.1.pep
PRVRGRVGRHEARDAGEDDWAALVRPIWRTVWETGTASLREGVFXTPCDYQLLAELPPXSHMARVAFLVPKCVAPHRMACVLHLAGLRYNLLLLFLSCKEQTEIGGSQF

SEQ ID NO: 269200 - protein, 52 aa, Glycine max
  Clone ID: PAT_MRT3847_85108C.1.pep
LFFYQCLQVQVNILIAKKIDFSCNNIFIIHMLFRGRAFHCIKKHDRVLLFLS

SEQ ID NO: 269201 - protein, 43 aa, Glycine max
  unsure (1)..(43): unsure at all Xaa locations
  Clone ID: PAT_MRT3847_85109C.1.pep
PKXRXEXFIQLLQXQRXYIGLXVXIXXFNXPILASAAXQXYXG

SEQ ID NO: 269202 - protein, 44 aa, Glycine max
  Clone ID: PAT_MRT3847_8510C.1.pep
LAYDPYLIHKKFPLRKKARLGIIKPNQAWVPSKMLLGENLYGAV

SEQ ID NO: 269203 - protein, 38 aa, Glycine max
  Clone ID: PAT_MRT3847_85110C.1.pep
DILDHHLDFIFCIYSKNKAYLMPNNFLHSSLCTSGRVG

SEQ ID NO: 269204 - protein, 248 aa, Glycine max
  unsure (1)..(248): unsure at all Xaa locations
  Clone ID: PAT_MRT3847_85111C.1.pep
PGGSYGKDERFTPLEKQYTFFGKLQFPVKTDIDAWTEKIKRLHLLLTVKESAMDVPSNLDARRRISFFSNSLFMDMPPAPKVRNMMSFSVLTPYFKEPVLFSLSHLGEPNEDGVSILFYLQKIFPDEWKNFVQRFDNKSEEKLRVENEEELRLWASYRGQTLTKTVRGMMYIRQALELQAFLDMAKDEELMKGYKAAELESKESTTGXGSLWTQCQSLADMKFTYVVSCQQYSIISDLGDPQAXEILK

SEQ ID NO: 269205 - protein, 169 aa, Glycine max
  unsure (1)..(169): unsure at all Xaa locations
  Clone ID: PAT_MRT3847_85112C.1.pep
LDVPSNLDARRRISFFSNSLFMDMPPAPKVRNMMSFSVLTPYFKEPVLFSLSHLGEPNEDGVSILFYLQKIFPGFPISSRYLSKNCLTXKHEWKNFVQRFDNKSEEKLRVENEEELRLWASYRGQTLTKTVRGMMYIRQALELQAFLDMAKDAELMKGYKAAELESKES

SEQ ID NO: 269206 - protein, 67 aa, Glycine max
  Clone ID: PAT_MRT3847_85113C.1.pep
RHASLGNRSQLRCSSEYDYSSAYCSSHLTLLGTVIVPSGSQLTDCSVDFSDARQDIRSLCNYASKAA

SEQ ID NO: 269207 - protein, 81 aa, Glycine max
  Clone ID: PAT_MRT3847_85114C.1.pep
MIIESQLKSYQSLTWMNSYLPFLMKTTLKYSDKENQYFKQQPNFIFFGKAKNFNLSTCLSLGINCSQKSPFTMLTIIIYYD

SEQ ID NO: 269208 - protein, 47 aa, Glycine max
  Clone ID: PAT_MRT3847_85115C.1.pep
TIMVIPRCIDFTVKSKSESSLFKGKKGEERLSRFSSINGIEVNRQAH

SEQ ID NO: 269209 - protein, 82 aa, Glycine max
  unsure (1)..(82): unsure at all Xaa locations
  Clone ID: PAT_MRT3847_85116C.1.pep
AYQAENNQVHSLIIXTRIYYDKENEQREHIIDGCDALDKICKPSVTDRSKLYAHSEVYIHMNRDKTDXTLTMVDRGIGMTNS

SEQ ID NO: 269210 - protein, 81 aa, Glycine max
  Clone ID: PAT_MRT3847_85117C.1.pep
QSTQPIDQPANMSGDEGPTTAYTWQISAQDQQGGPGLDKDMKEQANWTQLEYWGDDGKPYLKEYEGRGLLENKAVLITGGD

SEQ ID NO: 269211 - protein, 174 aa, Glycine max
  Clone ID: PAT_MRT3847_85118C.1.pep
MDKALTKLGSTWISKKAKAEISHITDDLSSLSNTVEEKAKLFINKLKGKTQKALPDLLREYNIPPGLFPRNITCYEFDASKGKLIVYLSSPCEVCFKDSSIVRYANRVKGTLSKGKLSVTDGMKTKVPVWVKVTSVAVESYKSDKVWFTTPGVKKSRPKDAYEMPRDAIKVEEF

SEQ ID NO: 269212 - protein, 54 aa, Glycine max
  Clone ID: PAT_MRT3847_85119C.1.pep
DCQDPRSSLQPGTDSSSKLSKDGHGKQEHALIIPKDGTLNRVIQHGSHFIGMEY

SEQ ID NO: 269213 - protein, 189 aa, Glycine max
  Clone ID: PAT_MRT3847_8511C.1.pep
MAITGVHGWGDIKSLSVQVITGRWFVVFASFLIMAAAGATYMFGLYSSDIKTTLGYDQSTLDLLSFFKDLGSNVGILSSLINELTPPWVVLAIGAILNFFGYFMIWLFNAGKSTLGCPRHWCHPQLLWLLHDLAFRTGSLVTCVKNFPESRGAVLGILKGYVGLSGAIITQLYHAIYYDDTRSLILLIG

SEQ ID NO: 269214 - protein, 81 aa, Glycine max
  Clone ID: PAT_MRT3847_85120C.1.pep
FSQVNYYIVGAARSPLELFGGPPSAAQAFCLNTNRFNQVEAKLRLVGPVVAAAHPARRCSCGATPVSSQCAAPVYRYLGTV

SEQ ID NO: 269215 - protein, 484 aa, Glycine max
  unsure (1)..(484): unsure at all Xaa locations
  Clone ID: PAT_MRT3847_85121C.1.pep
TRPLVQLMQPDSGDKKIDLAGRMMLVDVIALTDRYECLCGFVQHRGLPVLDEWLQEVHKGKIGEGNMPKESDKSVDEFLLALLRALDKLPVNLHALQTCNVGKSVNHLRTHKNYEIQRKARSLVDTWKRRVEAEMNMNDSKSGSNRTMSWPAKSANSESPQVGNRKTGGSSDNVAKSSSVQPSISKNSQSKLSSGEALSKSSSSPGSTKLMTTSAVSNSKDQNSKVLVGAATSDLPLTPIKEERSSSSSQSQNNSISCSSEHAKTIGSSREDSKSSTAVSASGGKRPEGASRTRKSSNGLHVTGVAVGPKXAQLCKKFSXRNSPSEKVSPTRVPHEKSADQPLTDQGNNQRLILRLPNTGHSPSRGASGGSYEEPGITCSKASSPADRNENQDRRMKTRPECLLTHVSNMMNEACDASEALLGVDEGKGPQTVDERCRANEDGDKVAESSKPAKLSSGFVSRSWQTYXLSPMNALIESCVKIPE

SEQ ID NO: 269216 - protein, 142 aa, Glycine max
  unsure (1)..(142): unsure at all Xaa locations
  Clone ID: PAT_MRT3847_85122C.1.pep
RRGHISIERIKRLVRGXVPNTLDFADFKTCVDCIKGKQANMSKKGANRSSSILEIIHTDICCPDMDARGQKYFITFIDDYSRYMNIYLLHNKYEALDAFKVVKAEVENQCGKQIKIVRLDRGGEYYGRYTENGQAPGPSVKF

SEQ ID NO: 269217 - protein, 64 aa, Glycine max
  Clone ID: PAT_MRT3847_85123C.1.pep
EAQAKLNNFIAQEESYWQQRSKIFWLKYGDLNSKFFHSSAKARKSGNNISSLTCDDSALVHNQK

SEQ ID NO: 269218 - protein, 197 aa, Glycine max
  Clone ID: PAT_MRT3847_85124C.1.pep
TFVFFELNLTKRSQIVAFLFIMARRSPPRVNQTYETGCTWRMLRIFNFREGHSDRRLVSNRRLNAHANGDGNSRTRSDVLGTVDEKRLQIGVSSRRRRDYSCKSIRGVENEQVADWREEVTKMIVDQRFVNKNYQGKDGTGCEPNQFLDALQILHSNKELFVKLLQDPNSWLGKQIHDLQRSQVKEPCQPARPKRVT

SEQ ID NO: 269219 - protein, 67 aa, Glycine max
  Clone ID: PAT_MRT3847_85125C.1.pep
ATGQGGVVDYIILFPLFCVFARIQPFKELNCMDGKSKDSICLVLFLCLPDHQPCHPQKQYQILTWLP

SEQ ID NO: 269220 - protein, 45 aa, Glycine max
  Clone ID: PAT_MRT3847_85126C.1.pep
DQLGHGEPSNTWEQKRIQMDPICIWTPYVRNKIKEGLSDCSARHE

SEQ ID NO: 269221 - protein, 98 aa, Glycine max
  Clone ID: PAT_MRT3847_85127C.1.pep
GSSLVRPPREKTFKDQGHKKGELGTENRFTKGTAMKIKQTRNKRTPNKKNGNATEDRPEIKSREHEQIRWRTPFFFFSVPLFFFIFFFLFFFFFFFFF

SEQ ID NO: 269222 - protein, 122 aa, Glycine max
  Clone ID: PAT_MRT3847_85128C.1.pep
FSVLTDTVRADYDFGHALNAKLISRGQSSHSGPPIRLDKPYYELFVDFQDLKAEAVDKMAEEYTTPAVTAYNNEPSNHPTLVQIFNSANAEAMLLMNFTAKGAAAMISNYREVAEQYIQLGA

SEQ ID NO: 269223 - protein, 106 aa, Glycine max
  Clone ID: PAT_MRT3847_85129C.1.pep
TTSERHFFQGRGIISDLTRNLLLFNTYCSDLDLMEQHMMFNIGLHIYTGHLQIMEPNNETECQTTELPIDSINNCGIFRRASTINIFYKVNKDMLLNQDQEKFLVS

SEQ ID NO: 269224 - protein, 52 aa, Glycine max
  Clone ID: PAT_MRT3847_8512C.1.pep
YHVIDHCAVSQTYTYALIDLYFIKLLTVTITDQDICLVSKLICHSNYSKAIL

SEQ ID NO: 269225 - protein, 304 aa, Glycine max
  Clone ID: PAT_MRT3847_85130C.1.pep
LEEDPVPEAEGTINDSDVSQLKKAILNLGVDNSKLIRTAFASASTFRGGDKRGGANGARIRLEPQKNWEVNNPRELSEVLSALEKVQKDFNGSNKKVSMADLIVLAGVAALEKASGASVPFTPGRTDATQEQTDAKSFEHLEPFADGFRNYGHGTDRVRTEHMLIDRAELLTLNVPETVVLLGGLRALNANWDGSNKGVLTKNPGKLTNEFFVTLLDPSVSWRATDSNKETFEGENRKTGQKWTAGRPDLVLGSHPELRATAEVYGSSDAQDKFVKDFVAVWNKVMNLDRFDLQGSTQPQSARL

SEQ ID NO: 269226 - protein, 70 aa, Glycine max
  Clone ID: PAT_MRT3847_85131C.1.pep
TRKKLKQKESLGRHTRSYNQRGRNEHASQPNFTGEGVSQTLKQTRTLTISSHACKSLREGTHGDPPDEVA

SEQ ID NO: 269227 - protein, 92 aa, Glycine max
  Clone ID: PAT_MRT3847_85132C.1.pep
HWTKIQFAIWQQKCYLIHVPFTHMKRINGCKKLCLYACKDNSALFFALETNTLLSLLLPYRQKSLHFTLNINWVHVRFNLYSLTGARILQTC

SEQ ID NO: 269228 - protein, 57 aa, Glycine max
  Clone ID: PAT_MRT3847_85133C.1.pep
FFFFFWRTHPLFLSYERKCKMEVHKWSVTRLTPQSEKKTHKSHTVSTYLLITQPSIA

SEQ ID NO: 269229 - protein, 49 aa, Glycine max
  Clone ID: PAT_MRT3847_85134C.1.pep
GLPLNFSRLGTQHLSLSLVYNSSLIEIKTSPFVLYPWRHALFPLASYLL

SEQ ID NO: 269230 - protein, 101 aa, Glycine max
  unsure (1)..(101): unsure at all Xaa locations
  Clone ID: PAT_MRT3847_85135C.1.pep
MAYAWLAPMAGLLLATYTILYPTNIDPTNCYGACIPIXCHPCRSRKXRCVPIXLTTGFCIHTTGLSFVANMIDQHTNLCKSNDGCMHEGRGXFCARYPNNY

SEQ ID NO: 269231 - protein, 127 aa, Glycine max
  Clone ID: PAT_MRT3847_85136C.1.pep
LGEVENAQQCFNKCMESGNAVCLDRRVIVEAAEGLQKAQEVVKCINNAAELLKERTSDAAVTALELASKALSISLYSEKLLQMKAEALCLLQKYDATIQLCEQSQHLAEKNFVLTNNAENSDSSLCD

SEQ ID NO: 269232 - protein, 136 aa, Glycine max
  unsure (1)..(136): unsure at all Xaa locations
  Clone ID: PAT_MRT3847_85137C.1.pep
TXXHLSXXXYXLISHXXXTXSXHXXLXYSXXILSXXTFGXSVTXTXHXFXXXXXXXTXHXIXXIXCXXXLXTXLXSPXVXIXLSXATXXAXXXPRSXXXHXXLXXXXLWLXXIXXXXXXXSXXXFXXTXAXXXXLX

SEQ ID NO: 269233 - protein, 501 aa, Glycine max
  Clone ID: PAT_MRT3847_85138C.1.pep
MASDPEQPAHSSFAKEARSGGEIGSAIEPLLNGVHDSESYSVSAAILPFLFPALGGLLFGYDIGATSSATISIQSPTLSGVSWYKLSSVEIGLLTSGSLYGALIGSLLAFNVADFLGRRKELIGAAVVYLVGALVTALAPNFPVLVLGRLVFGIGIGLAMHAAPMYIAETAPTPIRGQLISLKEFFIVLGMVAGYGIGSLFVETVSGWRYMYGVSSPVAIIMGVGMWWLPASPRWLLLRAIQGKGDVQNSKDIAIRSLCQLRGQAFYDSVPWQVDEILAELSYLGEEKEATFGELFQGKCLKALWIGSGLVLFQQITGQPSVLYYAGSIFQSAGFSGASDATRVSILLGFFKLIMTGVAVVVVDKLGRRPLLLGGVSGIVISLFFLGSYYIFLDNSPVVAVIGLLLYVGSYQISFGPIGWLMIAEIFPLRLRGRGLSIAVLVNFGANALVTFAFSPLKALLGAGILFYTFCVIAVASLVFIYFVIPETKGLTLEEIEAKCL

SEQ ID NO: 269234 - protein, 44 aa, Glycine max
  Clone ID: PAT_MRT3847_85139C.1.pep
PYYKSPYATTKNSQSLNCENYTQINHVNEHPKHGLKWGKLSRQQ

SEQ ID NO: 269235 - protein, 128 aa, Glycine max
  Clone ID: PAT_MRT3847_8513C.1.pep
MAASRSTFPLMKYLRVRVDALPRNTPLTLAPNFLIRRFCEEVRGCFLDKSEVTDRVISCVKNFQKVDPSKVNPNAHFQNDLGLDSLDSVEIVMALEEEFGFEIPDNEADKINSIKLAVDFIASHPQAK

SEQ ID NO: 269236 - protein, 98 aa, Glycine max
  Clone ID: PAT_MRT3847_85140C.1.pep
MARSFSNVKVLSALVADGFSNTLTRRGYAAATQSATRGGAASISSKIAPKSGEDKVGGGAEKVSWVPDPVTGYYKPENIKEIDVAELRATVLGKKFNH

SEQ ID NO: 269237 - protein, 35 aa, Glycine max
  Clone ID: PAT_MRT3847_85141C.1.pep
HTWPTIKILTHYIKSLSISQIHLLDQSSSVFFKSH

SEQ ID NO: 269238 - protein, 48 aa, Glycine max
  Clone ID: PAT_MRT3847_85142C.1.pep
KSKIEVANFVQNEICNALEFACTNLTRKDKYLVLAGNEGVSPSNDCNR

SEQ ID NO: 269239 - protein, 72 aa, Glycine max
  Clone ID: PAT_MRT3847_85143C.1.pep
FPHPHSSAAALFFFFFLHINKNHPLLKGGWGGRLYFFFFFFLFLSLYYLPNPNPDFIPQTANIPSYFILTPK

SEQ ID NO: 269240 - protein, 66 aa, Glycine max
  Clone ID: PAT_MRT3847_85144C.1.pep
LARGKNTFIFTWGPTPTPVEKTTLSTLFFASIDIKTGAFNIVFSQHWCSNRGFNIVFCPPDVEPGF

SEQ ID NO: 269241 - protein, 42 aa, Glycine max
  Clone ID: PAT_MRT3847_85145C.1.pep
IPATNFHNEYKGYMVVPADVADLPILKDIIHRVARWQLAKRH

SEQ ID NO: 269242 - protein, 90 aa, Glycine max
  unsure (1)..(90): unsure at all Xaa locations
  Clone ID: PAT_MRT3847_85146C.1.pep
EKTKTKENREAAEXXEARPSXGAGNQRNPXRKKTGHXEXXXEEKSAXXRHAEEAHNNRAXKTKPEEXXEPTKDXXKGEQXRTDXKTGNQQ

SEQ ID NO: 269243 - protein, 318 aa, Glycine max
  unsure (1)..(318): unsure at all Xaa locations
  Clone ID: PAT_MRT3847_85147C.1.pep
SSSILYEYSIKEYTETEQFDLGLTWKHPIVWNSPHAPLYASRFSMGSGNERGAIAISLKLIQGLVAINNVKERCKFQANVLQIVPXWYVKVXYYHTLQLVVDERPQALTDFVERMRVSPSEDKVSPGVMEMVLQCHCEMKSAALNCGFLHIDEYPPDVNQGFDIPSAIISFPDFHAGLQLSNKSRSKSPLLSKLQVICGRVAYTEVLLVPLTTPDFSMPYNVITITCTVFALYFGSLLNVLQRRVGEEERLLKDKVANKAVFLRRVLSKLSAKLRGRSLELTPPAPSWSSSSSFVTPKLILRVLVVAGIAFAWQYYSQ

SEQ ID NO: 269244 - protein, 83 aa, Glycine max
  Clone ID: PAT_MRT3847_85148C.1.pep
TKNQSKDIVRVLNFDWGKGRKLGHSHQCKLCLCGSHVQSQEGRRREMNTVTSEFVFRLCSDLQLPTEVVSAILNLSLSKFSSS

SEQ ID NO: 269245 - protein, 92 aa, Glycine max
  unsure (1)..(92): unsure at all Xaa locations
  Clone ID: PAT_MRT3847_85149C.1.pep
AXDWGPGGGXDLIVDDGGXXXXLIHXGVXAXEXXEKTGEXXXXNSTXNAELQIXLTIXRXGLKTXPXRXRKMKERLVGXSEXTXTGVKRLXQ

SEQ ID NO: 269246 - protein, 128 aa, Glycine max
  Clone ID: PAT_MRT3847_8514C.1.pep
MAASRSTLPLMKYLRVRVDALPRNTPLTLASNLLIRRFSEEVRGCFLDKSEVTDRVISCVKNFQKVDPSKVNPNAHFQNDLGLDSLDSVEIVMALEEEFGFEIPDNEADKINSIKLAVDFIASHPQAK

SEQ ID NO: 269247 - protein, 159 aa, Glycine max
  Clone ID: PAT_MRT3847_85150C.1.pep
MSRCAPRCVTRSATRLFNLTRALSIEAREQKVERIATELLNLNRFERHDFTVLWRLKMGLHRYDAAPVAGVATPSVVGAKVGASVAVEKTAFDLKLEKYDAAAKIKIIKEVRSFTDLGLKEAKELVEKVPCVLKKGLTKEEANPIMEKLKELGAAVVLE

SEQ ID NO: 269248 - protein, 59 aa, Glycine max
  unsure (1)..(59): unsure at all Xaa locations
  Clone ID: PAT_MRT3847_85151C.1.pep
AKXXAFKLXTXXMNDTXXPLRVXQIXFCXXIXXFVGSPSEXXVRSRCXEFXCKARGESN

SEQ ID NO: 269249 - protein, 136 aa, Glycine max
  Clone ID: PAT_MRT3847_85152C.1.pep
MCSKEENGSRLLGIADTPPQKFDPTNIYQEFEISNDMYYGKPNGFNFKSVASNGVTPYAMTHKNWRAYCKTLKTFQPTKEALGLDVTLRARLPPLTFSLPCNFSSPIVVRKWYCPFIFVREGDVDSQIKNSPYYEM

SEQ ID NO: 269250 - protein, 89 aa, Glycine max
  Clone ID: PAT_MRT3847_85153C.1.pep
YSLIYTFFFFYKKQKPSGGGFIHIPLLTKMNITSLKHENPTLLCVKFVCLLLKPRRLDSSGVKIETRASLTMANITHALPNYRTSLNLA

SEQ ID NO: 269251 - protein, 111 aa, Glycine max
  Clone ID: PAT_MRT3847_85154C.1.pep
TRSISYIQTIASMTDKNQQQPKGFFGTAASGLGNTLGAATNTLGKGVGTVTDAAGNVVTTAGKGVGDTVTGVTQGLGDTTKAGGNFVKDTGRSGTDHLGLTEAEKKEQLKQ

SEQ ID NO: 269252 - protein, 113 aa, Glycine max
  unsure (1)..(113): unsure at all Xaa locations
  Clone ID: PAT_MRT3847_85155C.1.pep
FCFQTLMCSHLIFGDLNHWISAAMIGVSGCLRYRGRLNCDLRRLSEFLIPMSRLHLIWVSFTHLSCHLFIDYLSLTIPXLTQLMWHTLNMMCARLHSGLRYLTAHAMFLDYMT

SEQ ID NO: 269253 - protein, 160 aa, Glycine max
  Clone ID: PAT_MRT3847_85156C.1.pep
MTKQKERRKESKLSRYMKAPLRFLKKARDMYVKGMIECSGQLSYVEASIGCPTGQLCTLPRSFSVGSATRSTTSDDDFKELVRAASLRSYGNRVQFGDAAAAAVKKMKMHRSRSVGIFGRIDEEKVCEFGDDGIKVRPNAYPRSKSYAARRDGSAKDCFS

SEQ ID NO: 269254 - protein, 40 aa, Glycine max
  Clone ID: PAT_MRT3847_85157C.1.pep
KKGEKRDFGNPTIYYKTKFMTFKAPFNLVLTIYFRLKGNF

SEQ ID NO: 269255 - protein, 87 aa, Glycine max
  Clone ID: PAT_MRT3847_85158C.1.pep
TFLSFMTSTTPSFLVYSMTSSTPCYFLPYGASYTPYFLTFIDCFTPFSGLTSLTTFTTSYCICYLANCTTPTLLTCTTFFTLSGGIS

SEQ ID NO: 269256 - protein, 45 aa, Glycine max
  Clone ID: PAT_MRT3847_85159C.1.pep
VSRVITFQNCTHLKIGLLHHNSSIMSKYRTGSHHGRTYKTLVLLV

SEQ ID NO: 269257 - protein, 43 aa, Glycine max
  Clone ID: PAT_MRT3847_8515C.1.pep
PPPNFNSFLKTTIIIFLYHYFPISTSIYYPIPLSYSNLKNSLN

SEQ ID NO: 269258 - protein, 65 aa, Glycine max
  Clone ID: PAT_MRT3847_85160C.1.pep
QAYFLSCLVYERPVKRTMKQDETYGPQLPCMPISISSNVQTTLNGKTRTYSGTLAIPLTTRLLTA

SEQ ID NO: 269259 - protein, 70 aa, Glycine max
  Clone ID: PAT_MRT3847_85161C.1.pep
MERPSFVKTLGKTKKGHLQTSVLVSATQCEIARSVTLCDGRCLRNKLGGLQCLGILGVSKVIITRVLFLC

SEQ ID NO: 269260 - protein, 54 aa, Glycine max
  Clone ID: PAT_MRT3847_85162C.1.pep
LNTLSAGDIKNVDLFFKMDIFPIITMYHNTIYADGSNTHVHIDSGSNETWYYPV

SEQ ID NO: 269261 - protein, 49 aa, Glycine max
  Clone ID: PAT_MRT3847_85163C.1.pep
VDSDRRSASTVTAYAPTTTILLCIRLNVMSHNMLPKLNWVPYTLVDTDP

SEQ ID NO: 269262 - protein, 177 aa, Glycine max
  unsure (1)..(177): unsure at all Xaa locations
  Clone ID: PAT_MRT3847_85164C.1.pep
MGLLRNFVVVTVIALSEFLSIGAGETNSSSQTCDFQAIFNFGDSNSDTGCMSAAFYPAALPYGETFFNEAAGRASDGRLIIDFIAKHLGLPLLSAYMDSIGSSYSHGANFAAASSTVRRQNKTFFDGGSPFSLEXQVAQFIQFMTRTAKFYQQGQGNXFPRPEDFAKAIYTFDIGQK

SEQ ID NO: 269263 - protein, 126 aa, Glycine max
  unsure (1)..(126): unsure at all Xaa locations
  Clone ID: PAT_MRT3847_85165C.1.pep
MIEISMSSVMKMKVLGFFVXATTLVALQCHAYDMFPLRMNTGYGSRTPDVKCACWTHAVGSHNIFGFEIILEQFVEAALEYIHGEHYRSDSNTVHQQAYFYATYLEVDPKDTFVFSIYGTVLANIP

SEQ ID NO: 269264 - protein, 372 aa, Glycine max
  Clone ID: PAT_MRT3847_85166C.1.pep
ARDEARGSARGPLLLVAGTRCFHANYNRRFGDEVGPWKLTAFQRLNFTAEDVLECLSLSDKILGMGSTGTVYRAEMPGGEIIAVKKLWGKQKENNIRRRRGVLAEVEVLGNVRHRNIVRLLGCCSNKECTMLLYEYMPNGNLDDWLHGKNKGDNLVADWFTRYKIALGVAQGICYLHHDCDPVIVHRDLKPSNILLDAEMEARVADFGVAKLIQTDESMSVIAGSYGYIAPEYAYTLQVDEKSDIYSYGVVLMEILSGKRSVDAEFGDGNSVVDWVRSKIKSKDGIDDILDKNAGAGCTSVREEMIQMLRIALLCTSRNPADRPSMRDVVLMLQEAKPKRKLLDGVLGRCAGDNVVVGGDIPLPQKPIADQC

SEQ ID NO: 269265 - protein, 98 aa, Glycine max
  Clone ID: PAT_MRT3847_85167C.1.pep
KKGGGKGGPQLPNARAFNHQERGQHLRERKKSVLIYRKAPPLPFPSLKSFNLGPLISKKSYSIIMLVNKLKPHILHFSPTEVPKCNAIYFSISTNFIS

SEQ ID NO: 269266 - protein, 129 aa, Glycine max
  Clone ID: PAT_MRT3847_85168C.1.pep
SYGVVLMEILSGKRSVNAEFGDGNSIVDWVRSKIKSKDGINDILDKNAGAGCTSVREEMIQMLRIALLCTSRNPADRPSMRDVVLMLQEAKPKRKLLDSVIVGRCAGDNVVGGGGGDIPLPQKPTADQC

SEQ ID NO: 269267 - protein, 59 aa, Glycine max
  Clone ID: PAT_MRT3847_85169C.1.pep
FVGPAWLSDDSISIPYATHVRLSCLQSSLIIIVTLYPFLLMTLSLWNVPLTDWAGHLDL

SEQ ID NO: 269268 - protein, 97 aa, Glycine max
  Clone ID: PAT_MRT3847_8516C.1.pep
KTLFDLFYVFPPWKKGKMFGLILLQGQQVIWLKNPSYKNALKKDFCFTYGHHRGFLYLPSTIIPLMYTQVAPSFPASDGPQEHPKLFSYQAWGERLP

SEQ ID NO: 269269 - protein, 55 aa, Glycine max
  Clone ID: PAT_MRT3847_85170C.1.pep
MFDNNIAKRVFVPSTAPKKGKDYPVGPVVPGFSAFVVIGSTLIQIIRPAKSGGMA

SEQ ID NO: 269270 - protein, 107 aa, Glycine max
  Clone ID: PAT_MRT3847_85171C.1.pep
LKMIQEETPTLDDNNLSSILQKPSWVHSLQLLKKQRPQFQEQKWCSSGELSSFPSPCDQNAALFHRHSKVASGHQRWVRTEGGDGCCCCCCCCCPWLEEQKKEEQLL

SEQ ID NO: 269271 - protein, 257 aa, Glycine max
  Clone ID: PAT_MRT3847_85172C.1.pep
MLKQFIALAKAQWGDQQDKQHMNVRIRGTQAHTEQTRAVMAQIQQQHEGKRHGFSAQQQRKMLQRSAFLNQFHVEATYALKAYAQNMMNRGIELLKSVYFWNTKSQLLGGPNAPKNGKIAATISIDPLQPSNANVTIRTPAQQLHMQQIQMPAAVGRPFPLIRQQSAQQTHSLAQLFYKQFSLKSRAQCIVDGRNVDTFDGFAFTAPLSSNCFSVLAKHCSSPMEEQHQQQPQFVVMLKKVPANRTPTNRHKKRTKC

SEQ ID NO: 269272 - protein, 75 aa, Glycine max
  unsure (1)..(75): unsure at all Xaa locations
  Clone ID: PAT_MRT3847_85173C.1.pep
IXTEXLFSYCWGXGFYGHLRTLTKARXRYYKLINDLRASSLLXEDPECIRMHDVVCDVAKSIASRFLPTYVVQGT

SEQ ID NO: 269273 - protein, 99 aa, Glycine max
  unsure (1)..(99): unsure at all Xaa locations
  Clone ID: PAT_MRT3847_85174C.1.pep
FFFFTKFLYLEGTPPGRGILYKRNGNTILEAYTNANNEGSITDSKSTSKYCTFLGGNLVTWXSKKQDVVAQSRAEAEFWAMAQGICELLWLKIILEDSN

SEQ ID NO: 269274 - protein, 386 aa, Glycine max
  unsure (1)..(386): unsure at all Xaa locations
  Clone ID: PAT_MRT3847_85175C.1.pep
MAPSSAVPDEQVVVGEEIEHVRVVTLNRPRQLNAISPELVSQLATYLEKWEKDEKAELVIIKGAGRAFCAGGDLRVFYDGRKIKDACLEVVYRFYWLCYHISTYKKTQVALVHGISMGGGAALMVPLKFSVVTEKTVFATPEASFGFHTDCGVSYYHSRLPGYLGXEYLALTERRSSGKEIVAVGVATRVRPRILFIGQTXDLSILNSGDENAVRSAIEEFSSEVKLDEESALNKQSIINECFSKDSLEEIIKSLEAEAYKEGNGWIDAVLKGMKRSSPTALKIALRSVREGRNQTLPECLKKEFRLTMNILRTTISKDMYDGIRALSNDKDDTPKWECSSLDKVXNGKLDLIFQPFEKNLELQIPESEEYRWDGKYENSAYALPN

SEQ ID NO: 269275 - protein, 120 aa, Glycine max
  Clone ID: PAT_MRT3847_85176C.1.pep
MEVKTRVQRCMDDQSVLVATYEGEHNHTHPSQMEVTTGSNRCMTLGSVPCSASLSSSPPTATLDWTKSKSSSESKNTSPKTESPEVPQVLVEQMATSLTKDPNFRAALVAAISGKMLHNN

SEQ ID NO: 269276 - protein, 77 aa, Glycine max
  Clone ID: PAT_MRT3847_85177C.1.pep
PSSHSSTSIGYSSASLCLCMHIISSSAQTSSIIVIIFLHPIFLMRVTINMNLAGHLVGILVDITSINKRFSKQPQCR

SEQ ID NO: 269277 - protein, 85 aa, Glycine max
  unsure (1)..(85): unsure at all Xaa locations
  Clone ID: PAT_MRT3847_85178C.1.pep
STVGIQKEVHLGQLDHFPVKKSYIKTIPWLSFNCQLKHLRSMVHYXIIKTSMQPPFIFIKWIFSTRFGKHGLYPFMIFMQPVETT

SEQ ID NO: 269278 - protein, 134 aa, Glycine max
  Clone ID: PAT_MRT3847_85179C.1.pep
NSARAYLQPLLLWTGAILICRALEPLILPSETSQIVKERLLNFVRSLSTVLAFAYCLSSVIQQVQKFLAESTDASEARNMGFQFAGKAVYSAVWIAAFSLFMELLGFSTQKWVTAGGLGTVLLTLAGREIFTNF

SEQ ID NO: 269279 - protein, 119 aa, Glycine max
  Clone ID: PAT_MRT3847_8517C.1.pep
TKTYYKQTQKKVHGRKKDPKGTPPAPLRPQYQSRLTFSREPRPPHRPKKNGPPLPLLGAPTKNRGEFLSPTRRSETPELALKLKAGIQNPITVPKATQCLLKKRKNKVFHTKKPLGKKQ

SEQ ID NO: 269280 - protein, 487 aa, Glycine max
  Clone ID: PAT_MRT3847_85180C.1.pep
MGFQFAGKAVYSAVWIAAFSLFMELLGFSTQKWVTAGGLGTVLLTLAGREIFTNFLSSVMIHATRPFVVNEWIQTKIEGYEVSGTVEHVGWWSPTIIRGEDREAVHIPNHKFTVNVVRNLSQKTHWRIKTHLAISHLDVNKINNIVADMRKVLAKNPQVEQQRLHRRVFLDNINPENQALLILVSCFVKTSHFEEYLCVKEAILLDLLRVIGHHRARLATPVRTLQKIYSDADLENIPFADSTFGHGAGTVPHRPLLVIEPSYKINGDDKKSRAARPAVDQDNKTATQTKVDTKTHNVARGTQDDTEGDNKVLTPNSDANGNSKTVVTPKPDPEVGENKPLKSDSNKENVEVPESPSKSKVTGLVVDNSAQKDVDVKQSKVQITKNIKPNIDSDNVVSSSTNNADKIGGFNTNMPMKQQGEKKPAAQAHASRTVLEENIVLGVALEGSKRTLPIDEEIDNVTCREAKEMAALQGGNGSPKASDGNDK

SEQ ID NO: 269281 - protein, 53 aa, Glycine max
  Clone ID: PAT_MRT3847_85181C.1.pep
GNTHLATIEGSKIMAQAMATIAGLHGSPQAVLGRSLHESGSTLVTVTSGIMVV

SEQ ID NO: 269282 - protein, 147 aa, Glycine max
  Clone ID: PAT_MRT3847_85182C.1.pep
RLATPVRTLQKIYSDADLENIPFADSTFGRGAGTVPNRPLLVIEPSYKINGDDKKSRSARPAVDQDNKTATRTKVDTEGDNKVVTPNSDANGNSKTVVTPKSDANGNTKTVVTPKPDPEVGENKPLKSDSSRENVEVPESPSKSKVT

SEQ ID NO: 269283 - protein, 48 aa, Glycine max
  Clone ID: PAT_MRT3847_85183C.1.pep
KHNKREFVFKTKEKVEEKGGPFAFIVEGLLIMAFGVHKAMYFAYVSKK

SEQ ID NO: 269284 - protein, 52 aa, Glycine max
  Clone ID: PAT_MRT3847_85184C.1.pep
HAILQIYKDHQFSEVSPHYFVKHLAVSIDNFLQSQGYPLQVDSRGSPGTELE

SEQ ID NO: 269285 - protein, 72 aa, Glycine max
  unsure (1)..(72): unsure at all Xaa locations
  Clone ID: PAT_MRT3847_85185C.1.pep
KGSWQQEQDSGVCHGWVRIHIRASIXGSHEEAIQHLTMMTHVDHATSATAGPDRGAGEAKTRYGREVDVNIA

SEQ ID NO: 269286 - protein, 70 aa, Glycine max
  Clone ID: PAT_MRT3847_85186C.1.pep
FSHLPFNRGEDPLIPGNWGGNTFSLRCQQFKKKNFLKNQKLLLNFLYLQSGLAKGPAGPLFLGFGKDSCA

SEQ ID NO: 269287 - protein, 30 aa, Glycine max
  Clone ID: PAT_MRT3847_85187C.1.pep
DLVALSDADKLREIGGHQDTHLNANFKTHR

SEQ ID NO: 269288 - protein, 100 aa, Glycine max
  unsure (1)..(100): unsure at all Xaa locations
  Clone ID: PAT_MRT3847_85188C.1.pep
GPTPLGLKTPGDEPFPRGPGPLDYREIIFGPLAYREIIFGPLAFVPKKKKKKKKKKKXKKXKKKXKKXKKXKKKKKXKKXXKXXGRXXLLPYGTRVPCDV

SEQ ID NO: 269289 - protein, 58 aa, Glycine max
  unsure (1)..(58): unsure at all Xaa locations
  Clone ID: PAT_MRT3847_85189C.1.pep
APXAHIVCSQXSQEAVTIPXHFQATRIATETSAGXQNGCRQFXAFATDNELSHDGNVV

SEQ ID NO: 269290 - protein, 73 aa, Glycine max
  unsure (1)..(73): unsure at all Xaa locations
  Clone ID: PAT_MRT3847_8518C.1.pep
PXXXDXXXPKVAXMVXLXKGXFXSLFLVGAKGSEENGTHMXVSVWLKDWLVSSQTVSHHHFWMFXLNLTTGMF

SEQ ID NO: 269291 - protein, 56 aa, Glycine max
  Clone ID: PAT_MRT3847_85190C.1.pep
RVSRFLIFFKKLKLLPICELGLLDSILLLFIYFNLFGVLCIKLNMKICCCCGLLFC

SEQ ID NO: 269292 - protein, 80 aa, Glycine max
  unsure (1)..(80): unsure at all Xaa locations
  Clone ID: PAT_MRT3847_85191C.1.pep
MAAASSMALSARSLGGKAVKLGRSAPEXGTVSMRKIVSRQVSSGSPWYKPDRVKYVRPFSGEPSSYRSGKFPGDYGWDTA

SEQ ID NO: 269293 - protein, 45 aa, Glycine max
  Clone ID: PAT_MRT3847_85192C.1.pep
LPPPPKLVLFGNYGHVDFILSLQAKQDLYDPMISFFKSSGKFSSM

SEQ ID NO: 269294 - protein, 75 aa, Glycine max
  unsure (1)..(75): unsure at all Xaa locations
  Clone ID: PAT_MRT3847_85193C.1.pep
XGLXCXFXXXRXCFXXFFXXXXFXXPFVSCLEXXSXVXFXXSXLSEXXXWPRCTIAXADSAXXRAEXXAYXRVPA

SEQ ID NO: 269295 - protein, 91 aa, Glycine max
  Clone ID: PAT_MRT3847_85194C.1.pep
MQYKLTRRDHNSTPSKERHQRQKQRRMSKVKILVVGGTGYLGQHLLQAYVHANANNGTPFAFDLAFTHHSSPAPQPLLGAIPLSISFKGYV

SEQ ID NO: 269296 - protein, 116 aa, Glycine max
  unsure (1)..(116): unsure at all Xaa locations
  Clone ID: PAT_MRT3847_85195C.1.pep
SSDPEDLPPPTLXPTFLKNSTNPKINKRGPIWYIQGVSYYPKHYIISVVTLDFDDPSHLALLTTKTTHIQSISFCTSLQTPSTKHTNNIMMLNIATLQPVGQIKTNVPNVKITTQL

SEQ ID NO: 269297 - protein, 74 aa, Glycine max
  unsure (1)..(74): unsure at all Xaa locations
  Clone ID: PAT_MRT3847_85196C.1.pep
RRPFVLFTLRHAFDFLTEGHFGASADTQTHHXIKGMTKKEATGGNTENTXLSMACAMKSTFRGRAPTDIYTICS

SEQ ID NO: 269298 - protein, 67 aa, Glycine max
  Clone ID: PAT_MRT3847_85197C.1.pep
CMFLYMPHLDMVFSRLPLVPTRLAFPIPRPFRCPLGGEYSIWMPKVMLAFLKFPVKFLCPFCQKPLL

SEQ ID NO: 269299 - protein, 80 aa, Glycine max
  unsure (1)..(80): unsure at all Xaa locations
  Clone ID: PAT_MRT3847_85198C.1.pep
LDQSRVAVDLVSVATHEIGHVLGXGHSLVNXAVMHPTLIRQSTKDDLRIDDMVXVLAIYGFKPNFXTLSSLLLAQNSLIA

SEQ ID NO: 269300 - protein, 328 aa, Glycine max
  unsure (1)..(328): unsure at all Xaa locations
  Clone ID: PAT_MRT3847_85199C.1.pep
MSPAAPDAAEYSFAVEYDGPPLTCDLPRAVPISVDNIPVAAVVSQVPLSDSLSLPVVQPLLPPQQHHQPLRTEARVSKLASETTVSPTSVIAFEHRASQSNVGELSGELSSSGAFEFSTGNDGSGDLSDLGGSSRVLEETRSSSTIEFRDKSGRSSGALRVLEDGKESLDFNELNQQDWASTESVLSLEYPSTRVSSLKAEDIDAKRPPIVTFDVDSDDALVEEFDVEDTVSSNKPVKRAPLTKGKKGSCYRCFKGNRFTEKEVCLVCDAKYCGNCVLRAMGSMPEGRKCVTCIGFPIDEAKRGTXGKCSRMLKRLLNELEVRQIMKA

SEQ ID NO: 269301 - protein, 93 aa, Glycine max
  Clone ID: PAT_MRT3847_8519C.1.pep
WSGPPSSYLLVAVPYPCIFLCSLTGSFILTSEFSLLRSLSFPRSLFPRDCPSLVLLYILPNLVFLLPCFVLCFCSITCIRRRTCTSKASCLLF

SEQ ID NO: 269302 - protein, 39 aa, Glycine max
  Clone ID: PAT_MRT3847_851C.1.pep
TLITHLWLHFFDLVYHLSSTAISSGRSRIYYYALSEDHY

SEQ ID NO: 269303 - protein, 98 aa, Glycine max
  Clone ID: PAT_MRT3847_85200C.1.pep
RIVLHGHIRREWRSSLGCVSSQFETSISRLSCQNRHVCPGRRFQGRHFHRRQEEQSEPRSSKSSAAFAGAVVGRIVASTPTARTLKEPGIRQQSILML

SEQ ID NO: 269304 - protein, 91 aa, Glycine max
  Clone ID: PAT_MRT3847_85201C.1.pep
GLFLISELVSVSLLFIKKSLYFLSCKNVPKIPPQISPSCGALPYISFPGVIPFLISGVCTLEVGSFGGVDRSTTITCACSMGMYHSRVCAC

SEQ ID NO: 269305 - protein, 38 aa, Glycine max
  Clone ID: PAT_MRT3847_85202C.1.pep
SPQRRPQTQFRRGMCLRPRGRKKQKYVYFLNLMYLRLS

SEQ ID NO: 269306 - protein, 99 aa, Glycine max
  Clone ID: PAT_MRT3847_85203C.1.pep
LEVDESLAQVCSESGAMDPLMNSYFERMQATTRKWYLNILEADRTQPPKKTEDGKLYTPAAVDLFRILGEQVQIVRDNSTDLMLYRIALATIQVISDKT

SEQ ID NO: 269307 - protein, 104 aa, Glycine max
  Clone ID: PAT_MRT3847_85204C.1.pep
TMCFMHMKVAHKILLKLFIETQCMLKFIHGSGGHRRILRLLGVLRPMEVFSIKAVKMNFGMNQVKKISKKKVPYKFGGSRSSCLHPVKNKGVYMEKYSLCRCHM

SEQ ID NO: 269308 - protein, 73 aa, Glycine max
  Clone ID: PAT_MRT3847_85205C.1.pep
CFTTKQGNHPKSSPTTINTSHCYPPGNNKHHILTSPNAIMGSSSTTFCIYNWIEPWMGHVFFCNTTLLLNIAY

SEQ ID NO: 269309 - protein, 156 aa, Glycine max
  Clone ID: PAT_MRT3847_85206C.1.pep
RTPPPAGTRGALDQQEVKRYSGALPTSKLSNNFSSMKLHPPLASGVQRKLDMVNQDGIKNEKPVRTTKPKYRQPGKDSSPTSMSKGRSVRGVSETAEKLRNLSVTNRRQSSIGIGQPRPPPPMKAGGNWISESGNFILGPAQQISTGRTFARKVAG

SEQ ID NO: 269310 - protein, 45 aa, Glycine max
  Clone ID: PAT_MRT3847_85207C.1.pep
KIKRIIELVFLLDQLQNELCPKKSQSGMMPNELFQVTGKLTFPCK

SEQ ID NO: 269311 - protein, 403 aa, Glycine max
  unsure (1)..(403): unsure at all Xaa locations
  Clone ID: PAT_MRT3847_85208C.1.pep
RRIKYLRQIKQPNLVKRKDILXKVKSXYCVFVYFAYKLYQLMNFREKLFSEAVVRNWCFQVFQGLXYMHQRGYFHRDLKPENLLVTKDFIKIADFGLAREISSQPPYTEYVSTRWYRAPEVLLQSYMYTSKVDMWXAMGAIMAELFSLRPLFPGASEADEIYKICGVIGNPTFESWADGLKLARDINYQFPQLAGVHLSALIPSASDDAISLITSLCSWDPCKRPTASEALQHPFFQSCFYIPPSLRNRAVARTPPPAGTRGALDQQEVKRYSGALPTSKLSNNFSSMKLHPPLASGVQRKLDMVNQDGIKNEKPMRTTKPKYRQPGKDSPTSMNKGRSVRGVSETAEKLGNLSVSSRRQSMGQPRPPPPMKAGGNWISESGNFILGPAQQIPTGRTFARKVA

SEQ ID NO: 269312 - protein, 82 aa, Glycine max
  Clone ID: PAT_MRT3847_85209C.1.pep
KITPFLFIGTMGYIGPTNSMIYQQKLMRLALKKINKLLPFFDRRFFSHLSNIGIIIIFQEFGPEGVGLSNLGHFFNGNGPGF

SEQ ID NO: 269313 - protein, 79 aa, Glycine max
  Clone ID: PAT_MRT3847_8520C.1.pep
PFMVHLSWLEGDRNRPFYGWRILWTRSYRATDLNDCSCLSCDQEHNLGRRGIYIADNCNGQFREGHGEACMKSTIRTFT

SEQ ID NO: 269314 - protein, 34 aa, Glycine max
  Clone ID: PAT_MRT3847_85210C.1.pep
PVHGQINMHLNCLLLNVNHYHFPITIYDMIQSNI

SEQ ID NO: 269315 - protein, 51 aa, Glycine max
  Clone ID: PAT_MRT3847_85211C.1.pep
LYITRLFHFTAGSSDYRRPLSSVPTKYTLESWLSFSPHFITIFFFQTNRLE

SEQ ID NO: 269316 - protein, 247 aa, Glycine max
  Clone ID: PAT_MRT3847_85212C.1.pep
RPSVRFTTCEFYMAYKDYNDLMDLTEQMLSGMVKELTKGSYKIKYHADGIDKEPIEIDFTTPFRRIDMIEELEKMAGLSIPKDLSSEEANQYLKDACVKYEIKCPPPETTARLLDKLVGHFLEETCVNPTFIKNHPEIMSPLAKWHRSKPGLTERFELFVNKRELCNAYTELNDPVVQRQRFAEQLKDRQSGDDEAMALDETFCTALEYGLPPTGGWGLGIDRLTMLLTDSQNIKEVLLFPAMKPQD

SEQ ID NO: 269317 - protein, 500 aa, Glycine max
  Clone ID: PAT_MRT3847_85213C.1.pep
MEVPSEVPSTDTGTSTGTGETMSKNALKRELKNKQREEERKRKDEEKAKKAAEAQQAKDNKSAPADDEDMDPTQYLENRLKYLAVQKTEGKNPYPHKFFVTMSIDQYIKEYGGLSNGQHIEDVSVSLAGRIMHKRTSGSKLVFYDLHGGGCKVQVMADASKSDLDEAGFSKFHSNVKRGDIVGVTGFPGKSKKGELSIFPKNFVSLSHCLHMMPKQKSAAAAIDPANLKRNPWVPGSTRNPETYILKDQETRYRLRHLDLMLNPEVREIFKTRSKIISYIRRFLDDLDFLEVETPMMNMIAGGAAARPFVTHHNDLNMRLFMRIAPELYLKELVVGGLDRVYEIGKQFRNEGIDLTHNPEFTTCEFYMAYKDYNDLMDITEQMLSGMVKELTKGSYKIKYHADGIDKEPIEIDFTPPFRRIDMIDELEKMAGLSIPKDLSSEEANQYLKDVCLKYEIKCPPPETTARLLDKLVGHFLEETCVNPTFIINHPEIMSPLAKW

SEQ ID NO: 269318 - protein, 440 aa, Glycine max
  unsure (1)..(440): unsure at all Xaa locations
  Clone ID: PAT_MRT3847_85214C.1.pep
HQLILGKVTKLHPNVKRVDIVGIIGFPGKSKKGELSIFPKTFVLLSHCLHMMPRQKSAAAANNANLKKNPWVPRTTRNPETYILNDQETRYRLRHLDLMLNTKIGVIFEIGNKVVLNIPKDLSSEEANQYLKDTCLKYEIKCPPPETIARLLDLLVGHFLEETXVNPTFIINHPEIMSPLAKWHRSKRDGIDLTHNPEITTCEFYMAYKDYNDLMDITEQMLSGMVKELTKGSYKIKYHADGIDKEPIEIDFTPPFRRIDMIDELEKVAGLSIPKDLSSEEANQYLKDTCLKYEIKCPPPETTARLLDKLVGHFLEETCVNPTFIINHPEIMSPLAKWHRSKPGLTERFELFVNKHELCNAYTELNDPVVQRQRFAEQLKDRQSGDDEAMAFDETFCTALEYGLPPTGGWGLGIDRLTMLLTDSQNIKEVLLFPAMKPQD

SEQ ID NO: 269319 - protein, 165 aa, Glycine max
  Clone ID: PAT_MRT3847_85215C.1.pep
MVRMHNHLAILLGSSYIIMYPDHDHQVDKSLLSLVKSDRAGLHVRDSQGRWILVDGDLGPQEAIVFPGLALYQATAGYVNPALLKTEINMEANMYGRCSLAFKLLPKSMTNLDCSEMRAAGYGIEAQFQLPVPVDDFMQRSHPTDHLFNRPSLQCFNFQPTHDGI

SEQ ID NO: 269320 - protein, 271 aa, Glycine max
  Clone ID: PAT_MRT3847_85216C.1.pep
MFFNGYGYQGTSSFEQTFRCYSASFIEKPEIENGDKIIMPPSVLDRLAFLRMDYPMMFELRNGASERVSHCGVLEFIADEGTIYMPYWMMQNLLLQEGDIVRVKFVSLPKGTYVKLQPHTKDFFDISNPKAILETTLRKFSCLTTGDTIMMTYNNKKYYLDVIETKPANAISIIETDCEVDFAPSLDYKVTTASKTLDKGKFNPFFGTGRRLDGNSIPPVYSSRPSDVPNVNSLSSTTSSSPNFARPSQGKLVFASNFYRTKIIGKIILVF

SEQ ID NO: 269321 - protein, 210 aa, Glycine max
  Clone ID: PAT_MRT3847_85217C.1.pep
MAEGKEESKSSEESVKLFVGQVPKHMTEPELLAMFKEFALVDEVNIIKDKATRASRGCCFVICPSREEADKAVNACHNKRTLPGASSPLQVKYADGELERLEHKLFIGMLPKNVSEVEISALFSKYGTIKDLQILRGSQQTSKGCAFLKYETKEQALTALEAINGKHKMEGSSVPLVVKWADTEKERQARRAHKAQSQASNVPHTDSQHP

SEQ ID NO: 269322 - protein, 130 aa, Glycine max
  Clone ID: PAT_MRT3847_85218C.1.pep
AQVLDSSVSALVKRPKKGRSEKEKEEEEEVLVIEGIEFERDLGVKFDVYINDEDDVPGGPSKTEFAGSFVSVPHKHKHKHGKMKTNLRLGITELLEDLGAEDDEHVVVTLVPKFGKGHVIVGGIKIEFHK

SEQ ID NO: 269323 - protein, 69 aa, Glycine max
  Clone ID: PAT_MRT3847_85219C.1.pep
PSSFYRYSYVANQTRTKIEFQINRCTDTKLTTTIICTTKCSHLSTSNAMEDNVMIKVLTESTNIKVGGY

SEQ ID NO: 269324 - protein, 81 aa, Glycine max
  unsure (1)..(81): unsure at all Xaa locations
  Clone ID: PAT_MRT3847_8521C.1.pep
SQRVCDXQXXXXRXAFXGHLXPLFIEHXTDFRXPLTAMADXNPQNPLPNGKSHYXXXCGVXXXGNXXXNVYTXSMQIXXWX

SEQ ID NO: 269325 - protein, 100 aa, Glycine max
  Clone ID: PAT_MRT3847_85220C.1.pep
ARIRLGKWKTKPPILISIRRQCKVTACFIYQHHSLLSEPQQSEIVCLYNPGHQRHWYWKQAQKNACVQDKDSYAKKNDASGVHSRTTLTASVLSNQLYKR

SEQ ID NO: 269326 - protein, 73 aa, Glycine max
  unsure (1)..(73): unsure at all Xaa locations
  Clone ID: PAT_MRT3847_85221C.1.pep
PPKXXXEXSPSFXXLPTXLIXSLPQLXAQPSAXSMMXXXLIYXXKXXXLTQXGXXXVAXVLLXIXMXVRMXQA

SEQ ID NO: 269327 - protein, 73 aa, Glycine max
  Clone ID: PAT_MRT3847_85222C.1.pep
TFKCNDIYSSRETREKIYIWRNICMRLIMSVQSELHGLAALQWSICQDSLSRYVQKLHDISELLKETTRLCST

SEQ ID NO: 269328 - protein, 62 aa, Glycine max
  Clone ID: PAT_MRT3847_85223C.1.pep
RATLVSFELWITHDKLIREHWYKDPRRQEICQRNPDLDHPSSLDAVAMDATIPYDERWRRAS

SEQ ID NO: 269329 - protein, 60 aa, Glycine max
  unsure (1)..(60): unsure at all Xaa locations
  Clone ID: PAT_MRT3847_85224C.1.pep
MKMKVLVFFVATILVAWQCHAYDMFPLRLHTGYGAGTRKLNSQVRGLXVKAHNIFGLETI

SEQ ID NO: 269330 - protein, 204 aa, Glycine max
  unsure (1)..(204): unsure at all Xaa locations
  Clone ID: PAT_MRT3847_85225C.1.pep
PPPPPAPPPSPXPPPPPPAPGMPPPPPAPPPCPPPPSIPPPPPPPSQRHPPPPXPPSPPPPPPPAPPSELPHGRTLPRPPVPPIPQMPIRPPPSPPXPPPPPPSPPXTVSPTQPCTLSPMIPPIPLPAQSASALVHVPTVATNPAHDQFITLCLHASRPHHSQFTPGFSSNITSSFMIWYPASFGITSCHIFTLASPSSPLASS

SEQ ID NO: 269331 - protein, 73 aa, Glycine max
  Clone ID: PAT_MRT3847_85226C.1.pep
HCMADYDYDRRCRNCLLHSYAKLDTTPDDCIRFLNTYQQNPTFLLRRPLQLTHPRVTRLQQLQFTLSNAPNPK

SEQ ID NO: 269332 - protein, 95 aa, Glycine max
  Clone ID: PAT_MRT3847_85227C.1.pep
PSYYNQGGVSPDYYGGSPNRYQQGPPQGQYGPPQGQYGPPQGQYGYGGQQMQYQQGPPPPGGYYQDDRRADGGGGGLFAGLCAGLACCCCLDCLF

SEQ ID NO: 269333 - protein, 59 aa, Glycine max
  Clone ID: PAT_MRT3847_85228C.1.pep
VCHFSVSSQNISESGLQQASLPPRGWNSYDSFCWTISEEEFLQSAEMVSQRLKAHGYQV

SEQ ID NO: 269334 - protein, 89 aa, Glycine max
  Clone ID: PAT_MRT3847_85229C.1.pep
AVQHNAGSGLRSGHPPKIPFPSSQESSLPIPFWLLQKESPGYLDVLFDNPDLGPFLSKLGRDTIVFGDGPAKGLDFAIRAFTFSERCAI

SEQ ID NO: 269335 - protein, 108 aa, Glycine max
  unsure (1)..(108): unsure at all Xaa locations
  Clone ID: PAT_MRT3847_8522C.1.pep
TYKLECGTNTXGKASVINALGFRFNTDTTFRDPGPXVGVGTSHITTQIPEERKVEYSSENKEMRKYIHSFDVVNLNYDEALNAVGFIVETSFELSRMYGNVLITSIKI

SEQ ID NO: 269336 - protein, 85 aa, Glycine max
  unsure (1)..(85): unsure at all Xaa locations
  Clone ID: PAT_MRT3847_85230C.1.pep
KVRAQIWEKTSPPPGXSIAIMGGLVNGPGEMAYPNFGYVGGPPGKIDLYVGKTLVKGGIAMGHATNALFVLIKKHGRWGGPPPKE

SEQ ID NO: 269337 - protein, 56 aa, Glycine max
  Clone ID: PAT_MRT3847_85231C.1.pep
SKILQRDWIEPKHMTRRSSKATLSRVSAMHLLVHDLLEVVRMNVPHIGMGVGVEAG

SEQ ID NO: 269338 - protein, 119 aa, Glycine max
  Clone ID: PAT_MRT3847_85232C.1.pep
MGHNNTCHHHVKGFHADPFQHSLSFASNGGGDRRRKCRSNEKSGSGGFICLPFFLFLLASTSTIQHVSGHLWDAVVVTQADFQALRAIKNEIIAIRGVLKSWNDSGVGACSGGGLESMC

SEQ ID NO: 269339 - protein, 98 aa, Glycine max
  Clone ID: PAT_MRT3847_85233C.1.pep
EVRNQKRECASGTCLCLTFFSFFCFAIVCSKSHLLTTFMGHNNTCHHHVKGFHTDPFQHSLSFASNGGGDRRRKCRSNEKSGSGGFICLPFFCFLAST

SEQ ID NO: 269340 - protein, 151 aa, Glycine max
  unsure (1)..(151): unsure at all Xaa locations
  Clone ID: PAT_MRT3847_85234C.1.pep
RVDPRVLPDPPLRGGREGGARRFNVGVIDRRSAGEMPVTVXDWAGWPGNWGVKKHHSVEYWMMGGGGDVXGGXXVGRGSDPELAQAFFVRGFSSLSFNTHGHTMKEPATXIERQLQXCVLGQGDLMELLKKSNYWXRCXGGDHVFPMTHPN

SEQ ID NO: 269341 - protein, 41 aa, Glycine max
  Clone ID: PAT_MRT3847_85235C.1.pep
RWYLQWFLHSASSLSSSSVISTVILRLSILVITGCVSGQVG

SEQ ID NO: 269342 - protein, 61 aa, Glycine max
  Clone ID: PAT_MRT3847_85236C.1.pep
QSTSSKMAAPLLSNKIMNNKVKGFRTPHIDMIISVKTKCHISHGIDSILRTMFMGYTLDPK

SEQ ID NO: 269343 - protein, 37 aa, Glycine max
  Clone ID: PAT_MRT3847_85237C.1.pep
HRVPLYRVTLVSSDDCKHLDDLISNKQTHYSLRHLRR

SEQ ID NO: 269344 - protein, 533 aa, Glycine max
  Clone ID: PAT_MRT3847_85238C.1.pep
MLMSGTEQVTMGGLGLNLTPITTFAIITVIATVLIWWFWNALNWVWLRPKRIERRLKEQGIQGNSYRPLIGDIRDMVKMIKEAKSKPMDPHSNDIAPRVLPYVVHTIAKYGKSSFMWLGPTPRVFILDPDKFKEMATKVYDFQKPDTSPLFKLLASGFANYDGDKWAKHRKIVSPAFNVEKMKLLVPIFCQSCDDLISKWESLLSSSNGSCELDVWPFVQNVSSDVLARAGFGSSYQEGKKIFELQREMIQLTMTLFKFAFIPGYRFLPTHTNRRMKAIDKEIRESLMVIINRRLKAIKAGEPTNNDLLGILLESNYKESEKSSGGGMSLREVVEEVKLFYLAGQEANAELLVWTLLLLSRHPDWQEKAGEEVFQVFGNEKPDYERIGQLKIVSMILQESLRLYPPVVMFARYLRKDTKLGELTIPAGVELVVPVSMLHQDKEFWGDDAGEFNPERFSEGVSKATKGKLSYLPFGWGPRLCIGQNFGLLEAKVAVSMILQRFSLHFSPSYAHAPSFIITLQPERGAHLILRKL

SEQ ID NO: 269345 - protein, 106 aa, Glycine max
  Clone ID: PAT_MRT3847_85239C.1.pep
MFPHSLKCQQAYLNGTVYDCSDNPSVPKGYLCNGLQKSCTSFLLFRSKPPYDSPEKIAYLLGSEASTIASINMISRNDKIPSNKSIIVPVFCSCSRNIYQHNTPYT

SEQ ID NO: 269346 - protein, 64 aa, Glycine max
  Clone ID: PAT_MRT3847_8523C.1.pep
LLLVVCTNHFVNSSDRVHKGTAFCAHLVFNLNMIVLASTAIHCIEWLVSLVMLCCFNHDLLSLI

SEQ ID NO: 269347 - protein, 183 aa, Glycine max
  Clone ID: PAT_MRT3847_85240C.1.pep
MATKVYDFQKPDTSPLFKLLASGFANYDGDKWAKHRKIVSPAFNVEKMKLLVPIFCQSCDDLISKWESLLSSSNGSCELDVWPFVQNVSSDVLARAGFGSSYQEGKKIFELQREMIQLTMTLFKFAFIPGYRRMKAIDKEIRESLMVIINRRLKAIKAGEPTNNDLLGILLESNYKESEKSSG

SEQ ID NO: 269348 - protein, 44 aa, Glycine max
  Clone ID: PAT_MRT3847_85241C.1.pep
QAKVAVSMILQRFSLHFSPSYAHAPSFIITLQPERGAHLILRKL

SEQ ID NO: 269349 - protein, 93 aa, Glycine max
  unsure (1)..(93): unsure at all Xaa locations
  Clone ID: PAT_MRT3847_85242C.1.pep
RYAYVSSEFGSSXLALFTVSIXSXVXXXXXXTXGXIVRXXXXXXSXVXSSXXGYAFWAXKXGXDXXXLGXXXXXXLXXXIXXGMMXMXXPXXP

SEQ ID NO: 269350 - protein, 42 aa, Glycine max
  unsure (1)..(42): unsure at all Xaa locations
  Clone ID: PAT_MRT3847_85243C.1.pep
XRCTHIYLAVCNXSXRLIIHTHYTMSAFLMQCIIHSITSHST

SEQ ID NO: 269351 - protein, 86 aa, Glycine max
  unsure (1)..(86): unsure at all Xaa locations
  Clone ID: PAT_MRT3847_85244C.1.pep
DEGAQVLAGLVSGARKVKRREDGGARRXSGTDGVRERRGSXXARRRSQDEPVQSGMNGIPKHSYWLDLWLFILFDLALFIFVYLLP

SEQ ID NO: 269352 - protein, 179 aa, Glycine max
  Clone ID: PAT_MRT3847_85245C.1.pep
LFSAEQLKDLGCKWVVLGHSERRHIIGENDEFIGKKAAYALSQGLGVIACIGELLEEREAGKTFDVCFQQLKAYADAVPSWDNIVIAYEPVWAIGTGKVATPQQAQEVHVAVRDWLKKNVPDEVASKTRIIYGGSVNGGNSAELAKQEDIDGFLVGGASLKGPEFATIVNSVTSKKVAA

SEQ ID NO: 269353 - protein, 309 aa, Glycine max
  Clone ID: PAT_MRT3847_85246C.1.pep
MAATSTSLASQLYIGLRRPCLKLDSFNSQSFSLFDPNLRLSLSPPKPSRAVIAMAGTGKFFVGGNWKCNGTKDSISKLVADLNNAKLEPDVDVVVAPPFLYIDQVKNSLTERIEISAQNSWVGKGGAFTGEISAEQLKDLGCKWVVLGHSERRHVIGENDEFIGKKAAYALSQGLGVIACIGELLEEREAGKTFDVCFQQLKAYADAVASWDNIVIAYEPVWAIGTGKVATPQQAQEVHVAVRDWLKKNVSDEVASKTRIIYGGSVNGGNSAELAKQEDIDGFLVGGASLKGPEFATIVNSVTSKKVAA

SEQ ID NO: 269354 - protein, 57 aa, Glycine max
  Clone ID: PAT_MRT3847_85247C.1.pep
ICPSLLGYRLLSNFGGLPTPQIPPQYAAFPIPPPPPPPPPPPPPPPTPPPKTEDVIQ

SEQ ID NO: 269355 - protein, 73 aa, Glycine max
  Clone ID: PAT_MRT3847_85248C.1.pep
GRKTGNALTKEKPGWAPTRKLKDGLTTPHPGTKEQREKEKAEGVDSPGYGSSKVGQTQAPAQQGPLRAADGKE

SEQ ID NO: 269356 - protein, 100 aa, Glycine max
  unsure (1)..(100): unsure at all Xaa locations
  Clone ID: PAT_MRT3847_85249C.1.pep
GSENLXEXHRSXQGWLRAYXNLXXVWGPXXDXLLTILWNXFSSTXPDSXPXPNXXNPXXTEYTDAHAYLPDGPGIREIDEQQGHQYVXLXREXXPSYYMI

SEQ ID NO: 269357 - protein, 47 aa, Glycine max
  unsure (1)..(47): unsure at all Xaa locations
  Clone ID: PAT_MRT3847_8524C.1.pep
XXSXXXWSXXAXXLIXXXXXSRXXXRXLAXNXEXSSRXRXTXACSYF

SEQ ID NO: 269358 - protein, 86 aa, Glycine max
  unsure (1)..(86): unsure at all Xaa locations
  Clone ID: PAT_MRT3847_85250C.1.pep
GIFRSKIWALAYILVWXHVCVPEPLIEFIVYTSPCYILVHHCINRDDQSGIIAGTLYMGVNIWTGMKVKLRTFQGKHEPAIQKYIW

SEQ ID NO: 269359 - protein, 68 aa, Glycine max
  Clone ID: PAT_MRT3847_85251C.1.pep
TFTQLDQPYQPTCFPTSSSSPPPATSLPRTFPASLLLPPLSVVMLLPARLDLPFLETTLQSPLPAPSL

SEQ ID NO: 269360 - protein, 70 aa, Glycine max
  Clone ID: PAT_MRT3847_85252C.1.pep
ISINREHRLPYLKTGNKSNRYLIPRISQLLATSLCTNFLWEGKSLFCAGHRHLRIILFSTLSLFAEHSPI

SEQ ID NO: 269361 - protein, 82 aa, Glycine max
  Clone ID: PAT_MRT3847_85253C.1.pep
ACIRSPFVSILSDPQPMVLFVGATGWCYTLYRILSARSYLLVLLLCQSDLHSPALIRPDALHALAWIYSCRYAPPRVCVRVR

SEQ ID NO: 269362 - protein, 52 aa, Glycine max
  Clone ID: PAT_MRT3847_85254C.1.pep
FGSKSDFCCLLSGTIYMEPNFVIVPLVLLLIYIYIYIYIYIYIYIYIYIYIY

SEQ ID NO: 269363 - protein, 63 aa, Glycine max
  Clone ID: PAT_MRT3847_85255C.1.pep
RLFFNWNGSTLHYNRIRSPLHVNRPSRPREWKNPGGLRWEQPHTKLSGGKSRLPIWKIEPATP

SEQ ID NO: 269364 - protein, 126 aa, Glycine max
  Clone ID: PAT_MRT3847_85256C.1.pep
KNQARQKMKKKKKPEEKIKNPGGPKKRANPNKLGTPQTPVKRKKTFRAQGIKKIANPRGKAVCKFGPRGFFFLHKKKGKKLCPLKRKDPKKRGKKGEPNKMEPQTREKKPSQKEQEKKGGGKIKKK

SEQ ID NO: 269365 - protein, 41 aa, Glycine max
  Clone ID: PAT_MRT3847_85257C.1.pep
IITIKNMYTDHFTFILHKIFFVQFNPRFISSAELKDKRLIF

SEQ ID NO: 269366 - protein, 98 aa, Glycine max
  Clone ID: PAT_MRT3847_85258C.1.pep
KKKIGNFICLKKPQICLGQKQGGGKKNNLRGGEKNINQGQTSQRKKAIQTTKRQKREKKKKWFKKKTGGKGEAQTGNEKLMGGRNNQGKEKNPQLINF

SEQ ID NO: 269367 - protein, 61 aa, Glycine max
  Clone ID: PAT_MRT3847_85259C.1.pep
VIRGALSQWLHLLSWFFLLLLRPIAVYMDITVQPGILPAGSRISKLNIIFSSIDPVQVLRY

SEQ ID NO: 269368 - protein, 91 aa, Glycine max
  unsure (1)..(91): unsure at all Xaa locations
  Clone ID: PAT_MRT3847_8525C.1.pep
ALSLTLSGAXYNILEMNSYIKSFPYAXHIIKQHLKIVYKHHKNTDFSYLTNIIHDCPIQIYDASLYLDYTICISSYKETDRIFKMRNFMYI

SEQ ID NO: 269369 - protein, 513 aa, Glycine max
  Clone ID: PAT_MRT3847_85260C.1.pep
MALLSSVLKQLPHELSSTHYLTVFFCIFLILLKLIRRNKYNFPPSPPKLPIIGNLHQLGTLPHRSFQALSRKYGPLMMLQLGQTPTLVVSSADVAREIIKTHDVVFSNRPQPTAAKIFLYNCKDVAFAPYGEEWRQKKKTCKVELMSLKKVRSFRSIREEVVSELVEAIGEACGSERPCVNLTEMLMAASNDIVSRCVIGRKCDATWGDSGNCSFAALGRKIMRLLSAFCVGDFFPSLGWVDYLTGLIPEMKATFLAVDAFLDEVIAEHESSNRKNDDFMGILLQLQECGRLDFQLNRDNLKAILVDMIIGGSDTTSTTLEWTFAEFLRNPNTMKKAQEEVRRVVGINSKAVLDENCVNQMNYLKCVVKETLRLHPPLPLLIARETSSSVKLRGYDIPAKTMVFINAWAIQRDPELWDDPEEFIPERFETSQVDLNGQDFQLIPFGIGRRGCPAMSFGLASTEYVLANLLYWFNWNMSESGRILMHNIDMSETNGLTVSKKVPLHLEPEPYKT

SEQ ID NO: 269370 - protein, 162 aa, Glycine max
  Clone ID: PAT_MRT3847_85261C.1.pep
VSFYRKEVVRRLVEAVREACGGSERENRPCVNLSEMLIAASNNIVSRCVIGRKCDATVGDSVNCSFGELGRKIMRLFSAFCVGDFFPSLGWVDYLTGLIPEMKATFLAVDAFLDEVIAERESSNRKNDHSFMGILLQLQECGRLDFQLSRDNLPLLSSSRSR

SEQ ID NO: 269371 - protein, 48 aa, Glycine max
  Clone ID: PAT_MRT3847_85262C.1.pep
LHGARTTDVTGSNWTLFCNTNTTHHHFSSITSLEESLMMLNQTMKTTT

SEQ ID NO: 269372 - protein, 74 aa, Glycine max
  Clone ID: PAT_MRT3847_85263C.1.pep
MASWKKTIATPFKKACTFFNQQPPRDHKNKSQTEQQNRIMDLHGEVMACGYEDVQVMWSILDKSKSTACNITSS

SEQ ID NO: 269373 - protein, 87 aa, Glycine max
  Clone ID: PAT_MRT3847_85264C.1.pep
MAGTGKHCFLFLFLNPCNYINFVLILMGFFFLFMHLTLQPYQPGYTAPPPRPNPEETTIDIGGGWTISGTPLDLRDPRLLAIAEAEP

SEQ ID NO: 269374 - protein, 115 aa, Glycine max
  unsure (1)..(115): unsure at all Xaa locations
  Clone ID: PAT_MRT3847_85265C.1.pep
LCKGFSPISPGGAFAPLGLGEAPHPFPGLKGKELKTGPLGIFPPFGFFFPAFFLGKGPFXNLFAPVFFFFSPKVWGFPPNFFPGQKGCLQPKQFFVPLSSSPVFNPLFPKGTPPL

SEQ ID NO: 269375 - protein, 163 aa, Glycine max
  Clone ID: PAT_MRT3847_85266C.1.pep
KILGQDLDSEEYQNISKVNFTLDESDAVVNGKIAVIVFKNAVPVLSKKLATVKGFLGILDKFKPGLRTPVKVEMIKILEENFPDTEELYDIKAHCVMDQYYACRYKNLSEDDLESFAPEEKRIELAVNIYRMGIDKVPTVKMWNLFISFNLRLLSKSADGEDQ

SEQ ID NO: 269376 - protein, 56 aa, Glycine max
  Clone ID: PAT_MRT3847_85267C.1.pep
RVVGYVSSGTPPHKKTVEVITVVGQPLILVGFDPFKALTASLESAGSLCLVADGIE

SEQ ID NO: 269377 - protein, 52 aa, Glycine max
  unsure (1)..(52): unsure at all Xaa locations
  Clone ID: PAT_MRT3847_85268C.1.pep
LVFTDLYVGPEVIHCSGTYDRKAIIINGXQRRILIFGSILYPRSTPENVVGS

SEQ ID NO: 269378 - protein, 66 aa, Glycine max
  unsure (1)..(66): unsure at all Xaa locations
  Clone ID: PAT_MRT3847_85269C.1.pep
MYLAERKXTNIMMMAILDGVQIAYSIDFVPFNILRSAAFHGXYYISPLESSLFSYASVEHILPIFF

SEQ ID NO: 269379 - protein, 78 aa, Glycine max
  unsure (1)..(78): unsure at all Xaa locations
  Clone ID: PAT_MRT3847_8526C.1.pep
TFIHLFVLHGAGHAFSNKIGLDDKLVLANTQQFFDGNLPVDSWLPILEKRFYXVGQLPSXAVDANVTCGIRHGGLPTT

SEQ ID NO: 269380 - protein, 82 aa, Glycine max
  Clone ID: PAT_MRT3847_85270C.1.pep
LIIKKIIALMRRLEHIGEKIIYSILWHAIIYLISTMSLEEVHQLLLYILIINIKVLFGHSIWSQLVRRPTCELMYPVIHCVY

SEQ ID NO: 269381 - protein, 63 aa, Glycine max
  Clone ID: PAT_MRT3847_85271C.1.pep
PPAQGLVARALNVPLFLMKVLVLRRVTIYVMLGWVSAGIVVFGYLWACCVRLSPFPLSFFLWS

SEQ ID NO: 269382 - protein, 71 aa, Glycine max
  Clone ID: PAT_MRT3847_85272C.1.pep
NRLNVKYRTRYKIEYVFVSNLIQFIIIKISARFPSLYNYFFCLYNSNCRSHHISTNKSSRLLLKNTCIFCL

SEQ ID NO: 269383 - protein, 60 aa, Glycine max
  unsure (1)..(60): unsure at all Xaa locations
  Clone ID: PAT_MRT3847_85273C.1.pep
NLPPFFFFFQKFLVLTQKSPTRGWPWNHYFRSSGRIKKWPPPISKEFHRYNLKIFFLXRI

SEQ ID NO: 269384 - protein, 165 aa, Glycine max
  Clone ID: PAT_MRT3847_85274C.1.pep
MSQYQFNLNIYVILDFPRFISLDVSNKRFNFLLQVEYQVEPCSKGYNSSACIDVRKTSFPMQTGGYVIYGVGHQHVGANESTLYGQDGGVICSSIPKYGNGNEAGNEKGYVVGMSTCYPRPGTIKIKDGETLTLEIIYSNNQSHSGVMGLFYILVAEQLPHQHLL

SEQ ID NO: 269385 - protein, 224 aa, Glycine max
  Clone ID: PAT_MRT3847_85275C.1.pep
MGVAFYLDTIFVPLSLFITVGYHAYLCHTIKNKPSRTTYGISKKRRTDWSLNLNQGDASKAMLTVQSLRNTLMSTILTATITILINLGLAALTNNTYNASHLFSSEFFGSKSDKIFVLKYGSASICLVMSFMFSSMAIGYLIDANFLMNAYGEFLSGGYTQTILERGFTLALVGNRVLCVAVPLMLWMLGPVLVLLATLVLVFVLHEFDFVCKFPDNNKQCIIK

SEQ ID NO: 269386 - protein, 66 aa, Glycine max
  Clone ID: PAT_MRT3847_85276C.1.pep
MKGQLTPREFLDGFGIFDLMNTKWDIQCTCALQGEGLYEGWDRMSTSLNDRLADGYSLIQLGTSSL

SEQ ID NO: 269387 - protein, 36 aa, Glycine max
  Clone ID: PAT_MRT3847_85277C.1.pep
YGVIRGEGHLSKTHESANLTIVDNLRFNEFTVLRIG

SEQ ID NO: 269388 - protein, 117 aa, Glycine max
  unsure (1)..(117): unsure at all Xaa locations
  Clone ID: PAT_MRT3847_85278C.1.pep
PCTWTMVTXFXLRNLVIGRGTPSQSLSXGTLSPSMGNLTNLQIVLLQNNXISGPIPSELGKLPKLQTLGVADNFFKGEIPPSLGHLXSLEDLRLNNNSLVGECPESLGGMTQLKFRD

SEQ ID NO: 269389 - protein, 89 aa, Glycine max
  Clone ID: PAT_MRT3847_85279C.1.pep
GVAIVSKKILRVFHVASDKGVRNLAPICRDSPNARGLHQMFQVGAGSKLCLVLQVNCSLKSKERAKENPQPHFVVWKNSPRIPGPLVSS

SEQ ID NO: 269390 - protein, 43 aa, Glycine max
  Clone ID: PAT_MRT3847_8527C.1.pep
HFWLRLPTLGGSLTQFFFLPHHVFDPYYIIWDYFCHLVRTSNS

SEQ ID NO: 269391 - protein, 67 aa, Glycine max
  unsure (1)..(67): unsure at all Xaa locations
  Clone ID: PAT_MRT3847_85280C.1.pep
MTVCISIHIGHAGIHVGKTCWXLYWLEHGIQPDRQMLSDTTVGGRDDALNIFISETGSEXHVPRAIF

SEQ ID NO: 269392 - protein, 58 aa, Glycine max
  Clone ID: PAT_MRT3847_85281C.1.pep
IGQCVSWNQRCAREFYFSKVTFCFFQRVKSLKIAFFQNLGSCLIPGAWVFYLLSISLF

SEQ ID NO: 269393 - protein, 194 aa, Glycine max
  Clone ID: PAT_MRT3847_85282C.1.pep
HASVELEEAEDEEWYTTSSKYSFKNNAGNGCKVRRWLLKRGLCLGRKILVAGFLASAAPVVVPPLVVASAVGIVVSMPCAIFLASHACTQSLMSKLLPRPTPQDTLLREEMCFQPGNDVIHTYEEEQVLVYEIKRDIEMVGVQCLKNGENMTSGSECGPQEEDATDGIEGHSRGETNGVQVPLISDKNVAVTMI

SEQ ID NO: 269394 - protein, 41 aa, Glycine max
  Clone ID: PAT_MRT3847_85283C.1.pep
LQAPRTFISGAVAHSLFYHFGPELAISSMTFNKKSLQMALV

SEQ ID NO: 269395 - protein, 71 aa, Glycine max
  Clone ID: PAT_MRT3847_85284C.1.pep
RSRRTLLVGEESSCNGLAWCRKWLASMMELSRWLNAESFRSSWSSLARRLLSLELGMASIQETTRKNSLFV

SEQ ID NO: 269396 - protein, 182 aa, Glycine max
  Clone ID: PAT_MRT3847_85285C.1.pep
CHYCCRNFPTSQALGGHQNAHKRERQHAKRAHLQSTMVQGSTFSDAHHVYNLMNYRYGSSIPTPPPPTMPYPTWNNNNNNTRFYGTTTTTSFSHHHQHQQQPINGSPLAFWRIPNGTTINNNNPSFSHERSSTLPPLFATEEIANVRASSQVVVGASGPMTTQNRYVYDSKQRDHVSLDLHL

SEQ ID NO: 269397 - protein, 92 aa, Glycine max
  Clone ID: PAT_MRT3847_85286C.1.pep
SFLLACPNSKTFMVTNFFKYIAKAKLKEFNQSVSTSISHFHKKRGVLYMAGLPHLIFAHIPSFHDIPDDTLLPHNFDLPFQKSTKVPPYFKP

SEQ ID NO: 269398 - protein, 88 aa, Glycine max
  unsure (1)..(88): unsure at all Xaa locations
  Clone ID: PAT_MRT3847_85287C.1.pep
RNHLFIPHYINFQIYSLKAGQKIAIMPVSTLNPNSTPDTMYYTQITLQLLYNNFXYVMSGKLYMITQGSRPEKADINYLFCGLLMMLN

SEQ ID NO: 269399 - protein, 80 aa, Glycine max
  Clone ID: PAT_MRT3847_85288C.1.pep
AEESGKDFLPHTHIPKCLLLFSQLQLFFSFCFDFILVSDVKCFAVSVVRIRVFVTLKRHRLFNFFMKLTRWDWVLCLTQN

SEQ ID NO: 269400 - protein, 73 aa, Glycine max
  unsure (1)..(73): unsure at all Xaa locations
  Clone ID: PAT_MRT3847_85289C.1.pep
HTEICMMLCAVHVPWLYGAHHTIVTDRAGEDLSSRLVSRMLTMGHGFAGAMDDTYCYXKDADNRELTAYEFRE

SEQ ID NO: 269401 - protein, 69 aa, Glycine max
  Clone ID: PAT_MRT3847_8528C.1.pep
FFFRIVTKLYEFRNDTCFLSIRSRNLTGHVITPFLAFGMLRKLTDCVTILPFDFRHVTEFHRWRNNASF

SEQ ID NO: 269402 - protein, 48 aa, Glycine max
  Clone ID: PAT_MRT3847_85290C.1.pep
RQKKKDPHNKYILISCILVLFMQGNMDLTCQIYYYCLILKKGCTVLGP

SEQ ID NO: 269403 - protein, 92 aa, Glycine max
  Clone ID: PAT_MRT3847_85291C.1.pep
VGPFFEGLRGFFLTKVLKNEMVLLNPPPGLGMGNPNLCLLVLPPNSSSMNVNGQGCLNLPPVFSHFQPVVVCGTCQTVLSQPSGVRARLTEG

SEQ ID NO: 269404 - protein, 55 aa, Glycine max
  unsure (1)..(55): unsure at all Xaa locations
  Clone ID: PAT_MRT3847_85292C.1.pep
KIXRHSVAXIXXXTFNXQTXTPPILINLQXTXRFGNPVLTXLLVNNSFNLKTXRV

SEQ ID NO: 269405 - protein, 75 aa, Glycine max
  Clone ID: PAT_MRT3847_85293C.1.pep
FQECLNGALLLCSQLLEGKKMTLCAEHRVRISCGVALLVYSLNTVLFLIGLCVRLQHWLFLYQLSVYLQGQAEEI

SEQ ID NO: 269406 - protein, 64 aa, Glycine max
  Clone ID: PAT_MRT3847_85294C.1.pep
MHACAGGPPLTYLCSLMVGEWDDTMRRGLSHCDVSACVTGVTPAECGYGDHLYECCSLTTRRTD

SEQ ID NO: 269407 - protein, 106 aa, Glycine max
  Clone ID: PAT_MRT3847_85295C.1.pep
GFQLMREARHCKLTSQVLVNYDLEIFTLRCLGSGIRLLLQVGSRHSQLSRVQGPQLRNRQNSSPGSLDQSIRCTAVMPWIMGQPGFLRACFGTSEGPEDFLETVGL

SEQ ID NO: 269408 - protein, 304 aa, Glycine max
  Clone ID: PAT_MRT3847_85296C.1.pep
HSCAVGRLPNGRRIAVKRLSTNSSQGSVEFKNEILSIAKLQHRNLVELIGFCLEVQEKILIYEYMSNGSLDNFLFDPQQKKLSWSQRYKIIEGTARGILYLHEHSRLKVIHRDLKPSNILLDENMNPKISDFGMARIIELNQDLGKTQRIVGTFGYMSPEYAIFGQFSEKSDVFSFGVMIIEIITGRKNINSHQLPDIVDSLMSYVWRQWKDQAPLSILDPNLEENYSQFEVIKCIHIGLLCVQENKNIRPTMTKVIFYLDGHTLDELPSPQEPPFFFRDIKDKKIPMQHFSVNKMSTSIFYPR

SEQ ID NO: 269409 - protein, 118 aa, Glycine max
  Clone ID: PAT_MRT3847_85297C.1.pep
EETGPKGIQIVQEIPCPQRAHPKKVFPKNRGAENKGARKHGQLFKKKQGKTDGREKTKHNWGLRFWQKGLQSHLFFFGGMPQNFCFTQWGRGGAPPFCIPPFWGLDEPLPTGVILGNP

SEQ ID NO: 269410 - protein, 202 aa, Glycine max
  unsure (1)..(202): unsure at all Xaa locations
  Clone ID: PAT_MRT3847_85298C.1.pep
LLNKEFDDRFPARVLGSFRFGSSNEIMSKNIPPSRKEAAFPPQPLMEIPSQFKAAIEXLNLLGGRNANAPQRVALPTPSYGSASMGISKPYGSASFGASKPYGSASFDAPKPYGSASFSSSKPSHAASFEQSAPSYYDNTDPVGTAPPAPSSSYDNQLCPICLTNSKDMAFGCGHQTCCECGQDLQSCPICRSPINTRIKLY

SEQ ID NO: 269411 - protein, 101 aa, Glycine max
  unsure (1)..(101): unsure at all Xaa locations
  Clone ID: PAT_MRT3847_85299C.1.pep
MGKTHGMGSARKLKSHRKRQRWADKSYKKSHLGNEWKKPFAGSSHAKGIVLKKISIEAXQPNSTIHXYTKVQLIKNGKKITTFIPNNNYLNYIKENNEVLI

SEQ ID NO: 269412 - protein, 33 aa, Glycine max
  Clone ID: PAT_MRT3847_8529C.1.pep
FKIRVNLFMSKGSERLLIFLFLSIALYNDFGLC

SEQ ID NO: 269413 - protein, 50 aa, Glycine max
  unsure (1)..(50): unsure at all Xaa locations
  Clone ID: PAT_MRT3847_852C.1.pep
NVYLERIPIEEVVXCHLICSIASLTLXDGANLVQVFGPNKLDEKYRLQVF

SEQ ID NO: 269414 - protein, 91 aa, Glycine max
  unsure (1)..(91): unsure at all Xaa locations
  Clone ID: PAT_MRT3847_85300C.1.pep
FFPSWRGCFFFLYSPWGGCFLFPPKGSHISXNSNSVQSVNLAGEKPPPCPEEGGGLAMAKKVKRLSFVLKREIGLSPCSCRGAGFPCLKVG

SEQ ID NO: 269415 - protein, 117 aa, Glycine max
  Clone ID: PAT_MRT3847_85301C.1.pep
RRYVGYDDEANKLNADVLRKYIFGGHVADYMKLLAEQDNEKFSKVFSRYVKAGVKAEGLEALYKKAHAAIRADPSIKKAERKPPKHSSKKAQRLNNKQRKNAVKVRVPRANKASAQE

SEQ ID NO: 269416 - protein, 74 aa, Glycine max
  Clone ID: PAT_MRT3847_85302C.1.pep
QLSRRTRAFPPDNLIAVDLAAKTSTAISVKMPTTFTLLISIERIHIARLQVFISTESMRISIIYPKHESSRGDR

SEQ ID NO: 269417 - protein, 103 aa, Glycine max
  unsure (1)..(103): unsure at all Xaa locations
  Clone ID: PAT_MRT3847_85303C.1.pep
APRGRRAQRGEGKGEPHHGARAREQEEEHQAPRAKPGSKRKKAPAQQQRXRAKKKREGRGPAQGGGPQKERKKAVKGFEQRKECHRSLXGSREIKQPPRKGGP

SEQ ID NO: 269418 - protein, 80 aa, Glycine max
  Clone ID: PAT_MRT3847_85304C.1.pep
PVLINRSWCCLKGLVGFGIGILGTTTEFFVDKYYCGLTFPRIIVWNFAFCFPSVPFLSIFVIPCIWSNLCNREGDLTLFF

SEQ ID NO: 269419 - protein, 60 aa, Glycine max
  unsure (1)..(60): unsure at all Xaa locations
  Clone ID: PAT_MRT3847_85305C.1.pep
RXNRVDPRVRTYMRTHYIRKNTTLKKKHTMGGNSYCVDFPIITSLSKNLVVFNFHNMNMI

SEQ ID NO: 269420 - protein, 48 aa, Glycine max
  Clone ID: PAT_MRT3847_85306C.1.pep
ILHLHRNGFYPKKFQVLGHCLKKLYSFVRSQEKTSSWGGWFVLIYLFL

SEQ ID NO: 269421 - protein, 90 aa, Glycine max
  Clone ID: PAT_MRT3847_85307C.1.pep
PLQKRSQPHPLIIPIFADMRSTLIIASLALTVLAAPVPTPVPVAEQAPSRRDLSDNTAPVEAFIEKRFRRTGDGTLIDSRSIHIDHNARS

SEQ ID NO: 269422 - protein, 88 aa, Glycine max
  unsure (1)..(88): unsure at all Xaa locations
  Clone ID: PAT_MRT3847_85308C.1.pep
DNLRXTSEFSLDILDDRVRVRASYHDLLXCSSIPDNGCLLCXNPVTREYRLLPKSRDRHVTRFHPDCEATLVSVAYDSAYRKFSVVLA

SEQ ID NO: 269423 - protein, 108 aa, Glycine max
  Clone ID: PAT_MRT3847_85309C.1.pep
DNEEMNGFCVYESGSNLHRRFMHGHGFDTHTLFPLALAPEPGLLTCGPSCLRALTPPYLYFFFNSIMLTMVAFLLAHIPPPLYGRLLPGLLFFHHFVYYPLLLHSSLS

SEQ ID NO: 269424 - protein, 61 aa, Glycine max
  Clone ID: PAT_MRT3847_8530C.1.pep
LVVLYESMVLQLILFRQSHDSLKVMIDSAIGILHYNRRALLSFQGKKIHFGLHVGNGRQNP

SEQ ID NO: 269425 - protein, 64 aa, Glycine max
  Clone ID: PAT_MRT3847_85310C.1.pep
EKPKRKSSTISIAFTQTDLEILTLYYANIGNLHKILSSFLSPKPLHTTPKAQRTGMKYSKQLES

SEQ ID NO: 269426 - protein, 143 aa, Glycine max
  Clone ID: PAT_MRT3847_85311C.1.pep
HSGWVDLLIRLGFLIDFLSHAAIVGFMGGAAITITLQQLKGFLGIEKFTKKTDVISVIHSVLSSAHHGVCFLFFLSIPKHLFDQLVLANPGPIVIDKLHTSNFATLLGEDKIFLTVAEAVAYCSTKLAEEPVAFSCVTFARAE

SEQ ID NO: 269427 - protein, 175 aa, Glycine max
  Clone ID: PAT_MRT3847_85312C.1.pep
MAQPQPESHATNGSHEPLLKIPKLHQNGDVSATAPFLRVKKLSDKAVLPSRASPLSAGYDLSSAVETKVPARGKALVATDISIAIPEGTYARVAPRSGLAWKHSIDVGAGVIDADYRGPVGVILFNHSDTDFEVKVGDRVAQLIIEKIVTPNVVTEVEDLDETVRGEGGFGSTGV

SEQ ID NO: 269428 - protein, 48 aa, Glycine max
  unsure (1)..(48): unsure at all Xaa locations
  Clone ID: PAT_MRT3847_85313C.1.pep
EDQEEEVDEEKQEEEEEHKDENDXSNSSSSIQHDEDDFPISILLEPLG

SEQ ID NO: 269429 - protein, 88 aa, Glycine max
  unsure (1)..(88): unsure at all Xaa locations
  Clone ID: PAT_MRT3847_85314C.1.pep
KTTYWLQTRLVALKTDLQILIGDVIASNSSHLYFFHVWNNYXLLPHMYLLYYHILHPTEKYYPLPTELTESTFYLYQPTNSLILLISF

SEQ ID NO: 269430 - protein, 53 aa, Glycine max
  Clone ID: PAT_MRT3847_85315C.1.pep
SPLRQVGILSIVTKKLSSYCSLTMGVRTIAFWALWLQCKQGLSPFYLCILQRT

SEQ ID NO: 269431 - protein, 90 aa, Glycine max
  unsure (1)..(90): unsure at all Xaa locations
  Clone ID: PAT_MRT3847_85316C.1.pep
HARDDDLVERSSTIAPGYVPKELDERIGLELPALMGPPLKGIPGTFXVTHRRINFIGDYRETRTTMDGFHFSGETGKQEKERSWLMASLH

SEQ ID NO: 269432 - protein, 76 aa, Glycine max
  Clone ID: PAT_MRT3847_85317C.1.pep
QLNNTLEKETAWRVGRGDKFRFWEHCWIGNDTPLMVKYSRLYQISCQQQQIIMQMGSNTSAEWEWKFNWRRPLFDK

SEQ ID NO: 269433 - protein, 231 aa, Glycine max
  Clone ID: PAT_MRT3847_85318C.1.pep
LKAVSEENPNETVKRETVDLGNGSDVVYIQRLIPSDQSWKWFHYLDKHIPWTRPTIRVFGKSFLQPRDTCYVATPGLTELTYSGYQPHAYSWDDYPPLKDMLDAVHKALPGSSFNSLLLNRYNGGNDYVGWHSDDEKLYGPTPEIASLTFGCDRDFVLKKKPCKKSCDGSDEPASKRLKKGSHDADQHTFRLRHGSLLVMRGYTQRDWIHSVPKRAKAEATRINLTFRRVF

SEQ ID NO: 269434 - protein, 57 aa, Glycine max
  Clone ID: PAT_MRT3847_85319C.1.pep
SESTICSLFDSHIIIIFNIPTKILILVCHTQPFPQINSTCGPNTIPFTLIIAFNIFN

SEQ ID NO: 269435 - protein, 102 aa, Glycine max
  Clone ID: PAT_MRT3847_8531C.1.pep
TYGSTQGGPIFFELFLVENCPDLEGTQGDAESNGEEKKFGNFQATGEWTVAMVSTIEKLGKERASIFWRRGFLVFIFNLIKLCPEFWPFKKKKKKKKKQKTK

SEQ ID NO: 269436 - protein, 73 aa, Glycine max
  Clone ID: PAT_MRT3847_85320C.1.pep
FEWQHPSFHINAIHRPEGEEDLAPSLWTEATNCIWACLLQTQWVTILSRATASINVTAWGAYEKVHGTRKGMI

SEQ ID NO: 269437 - protein, 246 aa, Glycine max
  unsure (1)..(246): unsure at all Xaa locations
  Clone ID: PAT_MRT3847_85321C.1.pep
PLSYLSCFHYVFPCKLIHKSTPELHPSPCSPPRSLPRYHVSWTPGPQFLITLHGFLLXASMGFLMPVGILAIRLSNREKNPXRHRILCYVHSILQMIAVLLATAGAIMSIKNLNNLFNNSHQRLGVALYGAIWLQVLLGIFRPQRGSKRSVWFFAHWILGTAVTFLGVLNVYLGLGAYHQKTSKGIKIWNILFTVQISLIVFFYLFQEKWVYIQNQGVVLGKEIKAPICQESRPDEKEKVLKGDTC

SEQ ID NO: 269438 - protein, 157 aa, Glycine max
  Clone ID: PAT_MRT3847_85322C.1.pep
MKIEFVQFFTLHYQKKELGRMGVQQKLISFLFHTCLVFIMFSLVSSSQEHHQITSSPSKTKDSNHIKMSPGLQFQITLHGFLLWASMGFLMPVGILAIRLSNREESPKRHRVLFYVHSILQMIISLLATAGAIMSIKNFNNLFNNSHQRLGVALYGV

SEQ ID NO: 269439 - protein, 157 aa, Glycine max
  unsure (1)..(157): unsure at all Xaa locations
  Clone ID: PAT_MRT3847_85323C.1.pep
NSARAAHAAEVSLEEEMQILGQEYINLENEQRKLERNAESVNSELFTECQELLQMFGLPYIIAPMEAEAQCAYLELEKLVDGVVTDDSDVLLFGARSVYKNIFDDRKYVETYFMEDIEKELGLTREKLIRMALLLGSDYTEVGLALLMLIEXVNAFP

SEQ ID NO: 269440 - protein, 97 aa, Glycine max
  Clone ID: PAT_MRT3847_85324C.1.pep
NLFPRNASLSLDQKNLSRGSLDLYPDQNPNQLEGPLKTTLGGIASQKIFLPYLGPGLPLKPSFVTSLFFTDLCLLCFWVPDQAFPKKAASTPLIQAR

SEQ ID NO: 269441 - protein, 82 aa, Glycine max
  Clone ID: PAT_MRT3847_85325C.1.pep
STRATRTGLDAPNPTVLNRRVGKLTFPQGTSRRVERMPLSTRGGAGAKNAILMNVPDAVVSYAEMWTGANCLCMALRRYAHQ

SEQ ID NO: 269442 - protein, 63 aa, Glycine max
  Clone ID: PAT_MRT3847_85326C.1.pep
LKQVFTPWCINCEATSKQVEKLAKHYKGSSNLIFARIDASANEHPKLESKCDEKACHLVFNGF

SEQ ID NO: 269443 - protein, 46 aa, Glycine max
  Clone ID: PAT_MRT3847_85327C.1.pep
KTNILRFFLLFERKKMLGEGLEKEYLEPSTSPSFNCYSTYEPPGIA

SEQ ID NO: 269444 - protein, 71 aa, Glycine max
  Clone ID: PAT_MRT3847_85328C.1.pep
CGNLCQQKNIRKGLQYTNIKKPRPINIFPLLCSCHRNLPFVHLIITPSSNSFAYQIQKAVFSTHEGGGETD

SEQ ID NO: 269445 - protein, 54 aa, Glycine max
  Clone ID: PAT_MRT3847_85329C.1.pep
VLATTSPMEVVVVEEDCCNDGCCIAKHACNEIHQKANILLRDLYPPLLSSSRSR

SEQ ID NO: 269446 - protein, 51 aa, Glycine max
  Clone ID: PAT_MRT3847_8532C.1.pep
PNIPGEFLFYVYIYIYIYIPFKEKNLFPSKFMVAILLIERNKPKKNSLNLL

SEQ ID NO: 269447 - protein, 84 aa, Glycine max
  unsure (1)..(84): unsure at all Xaa locations
  Clone ID: PAT_MRT3847_85330C.1.pep
INKTTKLNMLIDITNHQINKTQGTNEAYQQRNKKKKKKKKXGTSPFQRVKKLAMDLQGHAFFKRHVTTEIQSWKFRNRIQCALN

SEQ ID NO: 269448 - protein, 33 aa, Glycine max
  Clone ID: PAT_MRT3847_85331C.1.pep
ITNCPSIKKILHNLLSLDYLVKKDLIFLTEGHL

SEQ ID NO: 269449 - protein, 214 aa, Glycine max
  unsure (1)..(214): unsure at all Xaa locations
  Clone ID: PAT_MRT3847_85332C.1.pep
MEIGKEDEIMDMSMSPPLVGSTNNDTCHNKDIMSQAYLQNKYSEIDIKIEGSNMEQNRPLPIFLKFENVEYKVRNRKAGSSNLVKTMVSKVSTQLTVEEDRYKKILKGITGSIGPGEILALMGPSGSGKTTLLRVIGGRIVDNVKGKVTYXNDVRFTTAVKRRIXGFVTQEDVLYPQLTGEENLVFSALLRLPTNMSKQQKYAKSEYXIKELGL

SEQ ID NO: 269450 - protein, 63 aa, Glycine max
  Clone ID: PAT_MRT3847_85333C.1.pep
NLKAIMAFTSNLFQISQNCSYLVSLGFHDWMLVCKLYCHFTVCTRLCSATEERYLVSYLNESR

SEQ ID NO: 269451 - protein, 112 aa, Glycine max
  unsure (1)..(112): unsure at all Xaa locations
  Clone ID: PAT_MRT3847_85334C.1.pep
MNSNLEFMATPTTTKRKPVFVKVDQMKPGTYGHTLTEKVVSCNPVXRRPLAAVDLSMLSVCAPQRIGKCLDXYETVTIIVTVRNEQEDHMKASATVSLRNAKIDMFKGSMTL

SEQ ID NO: 269452 - protein, 401 aa, Glycine max
  unsure (1)..(401): unsure at all Xaa locations
  Clone ID: PAT_MRT3847_85335C.1.pep
MKKSSSSSFQNLGSFPSPGAPYYRERNIRSQKGWCSERVSNSKLSTSASSISRRHTMAGLITTPFCGGRTLPSKWDEAERWICSPVSAYAESRSCSHAQLQRRPKSISGPIVPPGVASFYSNQGLVVRNLVVGSPFSTGVLAPVAVSVHHFDAHDGNVFGYDLDSGMQFSRPXINENGMVLSSLSTAEPRALTPDEKHDGTMNGENVASHSSRCDKGTQMSPGEIENDSHSSPKSCATSIVDQQQCHSSKLEVRDVEVDSQATIVRWSKRHATKLAKKDTLHSKDLREISAEAQASWDIDESNIDTSKLQREEAKIIAWENLQKAKAETAIRKLEMKLEKKRSSSTDKILNKLRRAQLKAENMRSSIPVQQSHQVSKCRVFSFSKYAQIWSPTSCFRSHDQ

SEQ ID NO: 269453 - protein, 218 aa, Glycine max
  Clone ID: PAT_MRT3847_85336C.1.pep
VEPNCTFHIINSFEDGHEVVVRGCRSLDSLIPGPDPSLKEFEWLSRCHEWRLNMQTGEVKERGLCGANIVYMDFPMINGNFIGIRNRYAYTQVVDPIASSTQDVPKYGGLAKLYFEESCAKFSMRNREQPEEPIRVECHMFEKNTFCSGAAFVPRDGGLEEDDGWIIAFVHNEDTNISEVHIIDTKKFSGETVAKITMPRRVPYGFHGAFMPISFETQ

SEQ ID NO: 269454 - protein, 143 aa, Glycine max
  Clone ID: PAT_MRT3847_85337C.1.pep
MGTRIPSHQLSSGLYVSGRPEQVKERPPTMTSRSVPYTGGDPKKSGELGKMLEIPGVEPKPSRPSSGSVRSGPNSGPAGGRLSGSGPMSRKSSGSGPIALQPTGLITSGPVGSRRSGQLEQPAATAGGKMVYGSAVTSLSEEV

SEQ ID NO: 269455 - protein, 155 aa, Glycine max
  Clone ID: PAT_MRT3847_85338C.1.pep
GINASTHASGGIPAEAGGEPGLALRNHRFDSPLSSAWEGVTTLAELFERACREHQERVLLGTRALVAREMETSPDGGTLKKHDRGDYRWLTYGKPFECVSRFAYGLATLGFHREERVAILADARERWWIAQKGRCRRNETVVTMYTQGERKAGVH

SEQ ID NO: 269456 - protein, 121 aa, Glycine max
  unsure (1)..(121): unsure at all Xaa locations
  Clone ID: PAT_MRT3847_85339C.1.pep
LPSCXRARAFMLLELLMAACFTFCLSHQNLKEFALTNPEKSNTKETDRKDTKADEELDAEVLEVLHPTHEWHALXPEQACPCRSHVQLNLQTWEREAKLQYEDKFRNNLKGKXRLDINNHT

SEQ ID NO: 269457 - protein, 345 aa, Glycine max
  Clone ID: PAT_MRT3847_8533C.1.pep
MDLRGNLNYKRSSLTVKPVSSDRKFLIDFIVTTYLGPDVKSHNPRCSVIRRLIAGSPPYISSDLGPSYVSVSFLERLYYYLLRDASPDLVLDINMFHMYLKGKLVLPTSDFITQEYSQQFTSFFPLDLHQQIWYPDSFRVVKGVVLVDDPSTSCIKEEDLNRFRSLTGVRTFKLNLSECQCFQLDCRSSKEGGDNCMNKMPETFPNGGCQSEKLQQERKRKYTDGTSLMPKFPDVLPTEHNAKVEPSKKKCKSDGPTFMPLLPIPDVDDCNRDSSLILTGTARRGPFGPSVGVVDIGISKVAYLFRVSLPGVKKDFSMFLLFLFAQVSYSSLFIVFDYQLEGFLS

SEQ ID NO: 269458 - protein, 67 aa, Glycine max
  Clone ID: PAT_MRT3847_85340C.1.pep
YDLRGNACTDCLIHFFCEPCALCQEYRELQFRGFHMTIGWHGNVEQRSRGVAMTVATAPPVEQGMNR

SEQ ID NO: 269459 - protein, 93 aa, Glycine max
  unsure (1)..(93): unsure at all Xaa locations
  Clone ID: PAT_MRT3847_85341C.1.pep
IKIKQNRLYINRIKIILFNSITNQFVNFYKVPTTLSVCIFSLMMSIILHPAVKKRENILSLVGRKNAGRVAGSHPGNCRFRKTRGFKNKKSXF

SEQ ID NO: 269460 - protein, 106 aa, Glycine max
  Clone ID: PAT_MRT3847_85342C.1.pep
PKVGPKKPRGWGCPSPPRGKIFKVPVRVFKNKGAPPKKKGAGGHFKTKGEGFQNRAFYPPPEKKNRFPPAQKSIPNGGGPKRNFQLKAFFLKKKKTQKNPGRVKAF

SEQ ID NO: 269461 - protein, 56 aa, Glycine max
  Clone ID: PAT_MRT3847_85343C.1.pep
HSCSIHLISYDHCVFFLLNCIWCLAFMFWCSILNCNYWMLIDHVFFFHYIIVFSTT

SEQ ID NO: 269462 - protein, 124 aa, Glycine max
  Clone ID: PAT_MRT3847_85344C.1.pep
EELSRSLLVDGLSKVTVDKLMDITEIEYVIVSRYNVILVSLSRQQSMAFFPLRSQTTTRFFCALHNLYRSRLWQSFCLGTLKINSLIFKFMQSLVSCEHNIVCACTRGLFKSQLSFTTPNIVMV

SEQ ID NO: 269463 - protein, 84 aa, Glycine max
  Clone ID: PAT_MRT3847_85345C.1.pep
REITSGPIPSPGPFKASHPPILYGPGKGPHTISFSLAKHIASDWDITSQSNMGLGIDLPVIGKLTIPFFFKEKNKPPPLPDMFA

SEQ ID NO: 269464 - protein, 83 aa, Glycine max
  unsure (1)..(83): unsure at all Xaa locations
  Clone ID: PAT_MRT3847_85346C.1.pep
LPSRPPRPPAFSVAAGVRFFGSCRLLRFVFSVFFCVSFSXVXLLXCAVGSFVXASAGLVXXXFALSWGDGRALILPHGXLLAL

SEQ ID NO: 269465 - protein, 100 aa, Glycine max
  Clone ID: PAT_MRT3847_85347C.1.pep
YEFELCTRGSSRVDLQHGHGVAEGKKSTRWKCWWIALTYTIWQHRNKIVFQNATFDEAKLMDDAVLFFFLSAKLLIKTMEKDFGMHFNQWSSNLKEGFRS

SEQ ID NO: 269466 - protein, 80 aa, Glycine max
  Clone ID: PAT_MRT3847_85348C.1.pep
SLRPHTRPKYLLSNVAIQINFGREGHGVFLIQYSGRVYNAPNQSPKGTCLHLSLHMKVKNPTPSRNPSTPPARSGSSFKK

SEQ ID NO: 269467 - protein, 46 aa, Glycine max
  Clone ID: PAT_MRT3847_85349C.1.pep
NENEMAMNVILSKFKNTKNIRSQYIINFQYFYFLKTENKKSNQTYY

SEQ ID NO: 269468 - protein, 111 aa, Glycine max
  Clone ID: PAT_MRT3847_8534C.1.pep
SRFSKSSGDASRGVKFLTIVSQDVKVRDLQGQITDHFTFSLTEETELGKALWLSHRLKIEKILIILDGVWEKLDLEAIGIPLNENDKRYCILLTTCNQSNCTLMNCQSMIE

SEQ ID NO: 269469 - protein, 45 aa, Glycine max
  unsure (1)..(45): unsure at all Xaa locations
  Clone ID: PAT_MRT3847_85350C.1.pep
TSFNSXKPPPGSILIQLSIQTVCNTHLSYRTFSVHKEHCLPTTCI

SEQ ID NO: 269470 - protein, 70 aa, Glycine max
  Clone ID: PAT_MRT3847_85351C.1.pep
MSSCGCGSSCNCGSTCSCYKCSFDYVEKITDETLVLGVGPVKAQLNGAGMGVVALNGVGRCGSDCISDSG

SEQ ID NO: 269471 - protein, 88 aa, Glycine max
  unsure (1)..(88): unsure at all Xaa locations
  Clone ID: PAT_MRT3847_85352C.1.pep
HFFKDNIIGAIGSXAAFSTXXFSXXLKGILILFXXWKGNTLSSLQXPHXXMAXSSVMTAVXISXXSTLRKRLCKRQLCEGQFKPLQKD

SEQ ID NO: 269472 - protein, 194 aa, Glycine max
  Clone ID: PAT_MRT3847_85353C.1.pep
NLTINNQLIEGASLFVNLPPNQAFSLILSTDAKLANATFRDAQLCRRGTLDRTKVNGKIVLCTREGKIKSVAEGLEALTAGARGMILNNQMQNGKTLSAEPHVFSTVNTPPRRAKSRPHGVKTTAIGDEDDPLKTGDTIKMSRARTLFGRKPAPVMASFSSRGPNKIQPSILKPDVTAPGVNILAAYSEFASAS

SEQ ID NO: 269473 - protein, 126 aa, Glycine max
  Clone ID: PAT_MRT3847_85354C.1.pep
YGCEKTTEGDPTWCGVCYPSSSSKMLRKLMRLLLLLMFFLCFSYVLSAYAISATSTQYFEGDEAELSALSSLTRLDHVDGNGAVAPCGRGQNLYSWNRYYLAPCSNNKTERNDESSFFFGQFPIFS

SEQ ID NO: 269474 - protein, 92 aa, Glycine max
  unsure (1)..(92): unsure at all Xaa locations
  Clone ID: PAT_MRT3847_85355C.1.pep
GAVKKFYCYSSGTVVLREIRKYXKSIELLIRKLPFXRLVREIAXDFKIDLRFQSHXVIAXXEAVEAYLVGLFEDINLCAIYVKRVIIMLKDI

SEQ ID NO: 269475 - protein, 214 aa, Glycine max
  unsure (1)..(214): unsure at all Xaa locations
  Clone ID: PAT_MRT3847_85356C.1.pep
PPPPPXPPTPRENNHPPTPPNSRPXXPPHPAHPPPPPPXPPDRKQPRPPPPNQPPPTXPTAPXXPPPPPPTPHHHAPXPPETPPPAEGAARRTHPPPAPTPPPPPPPXXSANPAPPPPPAPRRPPGPPPPRPPAHTPRPPTPPQTPPPTPPPPPRPPHNPHRAPPGGPQAXXRPQGSEQAPTHQEKKRGGGRGNSPRVRRASEAGGQGRGPPPG

SEQ ID NO: 269476 - protein, 173 aa, Glycine max
  Clone ID: PAT_MRT3847_85357C.1.pep
ARGLEEEKSFQFHDVFNLDNENRAEDMPTLIDRKDNVFIISNPKSKYPVLQLDLRLISDLAVVIGSATCGGIAFACAGQPVMTGYLLARSIIGPGGLSFVSAMVQVETVAQFGVIFLLFALGLEFSTTKLLVARAVAILGGLLQIFLFMCLCGITASLCGGKSSEGIFVGAFL

SEQ ID NO: 269477 - protein, 107 aa, Glycine max
  Clone ID: PAT_MRT3847_85358C.1.pep
KEARVKVCTQFLQSIERNCREDRDETSQLKLDDCFQTRDGSTARYDDPATMTQRRAFMEKKTHADSSDAHTAAIVEVKTSHTDHATDRIDMKDERISDPHDLDRPEK

SEQ ID NO: 269478 - protein, 123 aa, Glycine max
  Clone ID: PAT_MRT3847_85359C.1.pep
SELFTLEELNPCMQHPMKSFGCLKSALRIMFIFFNLLLSFYDLVLSRVGHKISSWCIVIIVWRVCLDTIVRLLPYNLVVTSSSCGNDLCADSCGCILPITAPSMLGVSCIGLSFYCDLCLEPN

SEQ ID NO: 269479 - protein, 213 aa, Glycine max
  Clone ID: PAT_MRT3847_8535C.1.pep
MKILCSLPPTLSYFHFSLFMQDPKNDSNTRKPWYQRAIEVTSLWKSVSKSTEIPTPNSSTLWKRSSSMPKSPQVPTTPSPNNKNKLRKCASLKVASSFTRVCLCAPIYSYNEILRAEVPPRRSNSYPRSKPLHASHERTPSARLSTEGRRVFRGKSLTDDVLMRRFVIEEEAMMQIRRRNQMEVIRKRSMMRRKKLGPSPLSRMVMANDIGQF

SEQ ID NO: 269480 - protein, 107 aa, Glycine max
  unsure (1)..(107): unsure at all Xaa locations
  Clone ID: PAT_MRT3847_85360C.1.pep
MMMMMMIAITVSILLGNVQSFDGGSLCEELIIPSGYPCSEYTIQTKDGFLLGLQRVSSSSSLRLRNHGDGGPPVLLLHGLFMAGDAWXLNTPEQSLGFILADHGFDV

SEQ ID NO: 269481 - protein, 186 aa, Glycine max
  Clone ID: PAT_MRT3847_85361C.1.pep
MVKMHIDEMILPMGIHQLNFKSEWGASLLVSLCDTRLSCNDMLSSITGKNCCFNESRVEFYLEQEPHPSSSKNLNHLFQMIRKGTYSKYDYGKLKNLIEYGKFNPPKFDLSRIPKSLPLWMAYGGNDALADITDFQHTLKELPSPPEVVYLENYGHVDFILSLQAKQDLYDPMISFFKSSGKFSSM

SEQ ID NO: 269482 - protein, 105 aa, Glycine max
  unsure (1)..(105): unsure at all Xaa locations
  Clone ID: PAT_MRT3847_85362C.1.pep
MSFMILMGRGCLFKLHVLYFFIATIFGSWYCHAFNMFFLCMNTGYMSITTEVICASXRVVVETHNIFCFLTNHEVSVXATKLYFHXGEQSRSNFDTVNQLSFFYA

SEQ ID NO: 269483 - protein, 435 aa, Glycine max
  Clone ID: PAT_MRT3847_85363C.1.pep
MDGRTRKHYMIGVVRVASEVDAIQNNNKGWMRIQRFLATLAITVSILLGNGNPVQCFDGGSHQKQQHSLCEELIIPYGYPCSEHTIQTKDGFLLGLQRVSSSSSLRLRNDGERGPPVLLLHGLFMAGDAWFLNTPDQSLGFILADHGFDVWVGNVRGTRWSHGHISLLEKKKQFWDWSWQELALYDVAEMINYINSVTNSKIFVVGHSQGTIISFAAFTQPEIVEKVEAAALLSPISYLDHISAPLVLRMVKMHIDQMILTMGIHQLNFKSEWGASLLVSLCDTRLSCNDMLSSITGKNCCFNESRVEFYLEQEPHPSSSKNLKHLFQMIRKGTYSKYDYGKLKNLIEYGKFNPPKFDLSRIPKSLPLWMAYGGNDALADITDFQHTLKELPSTPEVVYLENYGHVDFILSLQAKQDLYDPMISFFKSSGKFSSV

SEQ ID NO: 269484 - protein, 247 aa, Glycine max
  Clone ID: PAT_MRT3847_85364C.1.pep
HDKEYRSKIWKFRSHNFTLSVIWTPFLVKAAIFEDFNGVTSSEIQLYLDTLDQWTNQYKNFDYVVIGGGKWFLKTAIYHENKTAAGGHYCPGKNLTELGFDYAYRKVLQEVFKFFTKSNHKATVLFRTTTPDHFENGEWFSGGYCNRTVPFKEGQIHMIDVDSIMRSIELDEFEKAASLGSKRVNLKLLDTTLLSLLRPDGHPGPYRKFQPFAKDKNAKVQNDCLHWCLPGPIDSWNDIIMQMLLNA

SEQ ID NO: 269485 - protein, 40 aa, Glycine max
  Clone ID: PAT_MRT3847_85365C.1.pep
TSSFYAILLYTTGNFCRNHPLEGDELPPIRLRHRGPTQGN

SEQ ID NO: 269486 - protein, 318 aa, Glycine max
  unsure (1)..(318): unsure at all Xaa locations
  Clone ID: PAT_MRT3847_85366C.1.pep
LMKGNKKYQRVGPWNGLQFSGGRPKINNPVYLYKFVSNKEEIYYEWTLKNASLLSKLVVNQTAQDRSRYVWSETTKSWGFYSTRPEDPRDLXRICGANEYCSPSVLPMCECLKGYKPESPEKWNSMDRTQGCVLKHPLSCKDDGFAPLDWLKVPDTKRTYVDESIDLEQCKTKCLKDCSCMAYTNTNISGAGSGCVMWFGELFDIKLFPDRESGQRLYIRLPPSELESNWHKKISKIVNIITFVAATLGGILAIFFIYRRNVADKAMPFVCFVSRLVAGEVPLSFLLTITLASVNSLFKCWYWVFRGSFEILVKWPYS

SEQ ID NO: 269487 - protein, 42 aa, Glycine max
  Clone ID: PAT_MRT3847_85367C.1.pep
GNLTNCRLYASYPDASRCPSPEILQIKRNNNSRIMNSKSGYL

SEQ ID NO: 269488 - protein, 70 aa, Glycine max
  Clone ID: PAT_MRT3847_85368C.1.pep
SLFFDSLLLMSATRFNANDVYFALGWICKFILTVWLVFFIKMAHVARFKSIEVSEIIYVRKGFITCQLST

SEQ ID NO: 269489 - protein, 56 aa, Glycine max
  Clone ID: PAT_MRT3847_85369C.1.pep
YFFFFFFFFFFFFFFNNKHTILFILNYSCTTLCYDKSTSETSNNNKLSLVFPRVPY

SEQ ID NO: 269490 - protein, 27 aa, Glycine max
  Clone ID: PAT_MRT3847_8536C.1.pep
CFFKLYELLVNYELYQTKIFKSNMVQK

SEQ ID NO: 269491 - protein, 68 aa, Glycine max
  Clone ID: PAT_MRT3847_85370C.1.pep
FHVTKNAETRLSWLLLSKGEVQPCAINNVFYWRKFFRNNLIMIWTTRGCIHLNCGKRGMNRTHKWTRQ

SEQ ID NO: 269492 - protein, 135 aa, Glycine max
  unsure (1)..(135): unsure at all Xaa locations
  Clone ID: PAT_MRT3847_85371C.1.pep
VVFYVSDAMLYVAAFPVGIPGXVVFIHPVHTHGLISYDPSTLIPAVCSARHAEEVLTESDRRRGDTVHIEAVKRSLQTTARESGDTNRCTAQNVGCADXPRFTSAYMGLIELDTNFGSAXSGGLTHEQGREQGIW

SEQ ID NO: 269493 - protein, 110 aa, Glycine max
  unsure (1)..(110): unsure at all Xaa locations
  Clone ID: PAT_MRT3847_85372C.1.pep
FXXLXXXXXXSXXNXXIXXRIHPXPXXVHSXVXXXXXXXXXXXXXTXAXXXXXXXXXXXCVXXXXXXXXXXXXXXXXTXAMXXXXRXFXXXLXXSHXXXXSEXTYACXRX

SEQ ID NO: 269494 - protein, 44 aa, Glycine max
  Clone ID: PAT_MRT3847_85373C.1.pep
MINCINCWGAFKGHHITLYIFKQSTSWDYYQKQRLQFFSYQQIF

SEQ ID NO: 269495 - protein, 177 aa, Glycine max
  Clone ID: PAT_MRT3847_85374C.1.pep
MQQSDQTVLSLRPGGGRGSRLLAPRFDSSSSSASPAFGSFPADLPLLRPHGGAPSPFSIKAGDARFEGRERVRYTREQLLLLREGVEILDDVLKIKQDIEAELFGEDQSWARSENNPSQQFRYSEPDNRDWRGRSGQLSGNADERSWDNLKENREFGNTNNRQDQLNSQFARAQISS

SEQ ID NO: 269496 - protein, 100 aa, Glycine max
  Clone ID: PAT_MRT3847_85375C.1.pep
VSFRAISILRIVVVVDSIVAGAQRKQTIFTFYPRFYMLIHSAVHGNGLTTVQQAITDTSLHYTAIYIHSTSRFLTRSAGSHHPNPIIPIFYNLADINHPL

SEQ ID NO: 269497 - protein, 37 aa, Glycine max
  Clone ID: PAT_MRT3847_85376C.1.pep
TCNYVAFTYFERCKWLLMNTEAACVTTRAYVEGEVSR

SEQ ID NO: 269498 - protein, 51 aa, Glycine max
  Clone ID: PAT_MRT3847_85377C.1.pep
HGAVPQDSMSLNELPGDRIGSATNHGQFSRRSPAKVPKEERVRFVWGRDQN

SEQ ID NO: 269499 - protein, 83 aa, Glycine max
  Clone ID: PAT_MRT3847_85378C.1.pep
DISDCVSLSKFPENMGELRSLENLNCRGCTRLTDLPYSITELESLSAVVCDEKTAALWEPFKTMLRDLKLKVAQVDFNLNWLS

SEQ ID NO: 269500 - protein, 69 aa, Glycine max
  Clone ID: PAT_MRT3847_85379C.1.pep
MADQPESSDAKGTKRDFSTAILERKKALNRLVVDEAVNDDNSVVALHPDTMEKLQLFRGDTILIKGKKR

SEQ ID NO: 269501 - protein, 63 aa, Glycine max
  Clone ID: PAT_MRT3847_8537C.1.pep
LMDNLPSELAQELAYIKHLYCASPLTLHPTIANMDLRSLFPYSPSDGTPMARHINHLPGFPDE

SEQ ID NO: 269502 - protein, 78 aa, Glycine max
  unsure (1)..(78): unsure at all Xaa locations
  Clone ID: PAT_MRT3847_85380C.1.pep
VXNNILXFQXXXLLXXNEXXXLPXXAAYIGLCVLSXXHXCLGRXRPTGSSSSSQXTGITXXXGNVPXLLVXMLLSFGG

SEQ ID NO: 269503 - protein, 160 aa, Glycine max
  Clone ID: PAT_MRT3847_85381C.1.pep
MGGSRVQVNKPHKSRFSSKSSRNLHKTSVKDRLAIAKSERNVGKGARAARIQRNKMIRDQKRAAVLKEKRELSGSRSPPRVIVLFALCASVDLESLADDLLSLLSKDTCVVLSGTVASSEYRTRITVLKAPHGDLLSCITRLLPYYSDYRTRIINFVKRC

SEQ ID NO: 269504 - protein, 48 aa, Glycine max
  Clone ID: PAT_MRT3847_85382C.1.pep
GGADLRVSLARKRCREEELVQRTRRSTATFLVLTLALHCPLLSSSRSR

SEQ ID NO: 269505 - protein, 42 aa, Glycine max
  Clone ID: PAT_MRT3847_85383C.1.pep
RSVVRPMLRKPMFHNPTRDSTGSLDHNSDRDKLMIHQEFKPT

SEQ ID NO: 269506 - protein, 39 aa, Glycine max
  Clone ID: PAT_MRT3847_85384C.1.pep
TYLSAAPVVGTPWVGALSYLLIEINRLFAHASIFPFYPL

SEQ ID NO: 269507 - protein, 66 aa, Glycine max
  Clone ID: PAT_MRT3847_85385C.1.pep
MILTKQYRCIHSASCQCTKGHLTDDAIFVVLHNGDMNRTLIATLACVCEWFDDLAKRDLWKEVGQT

SEQ ID NO: 269508 - protein, 56 aa, Glycine max
  Clone ID: PAT_MRT3847_85386C.1.pep
LVHICQKTAQVMICMRVRASGSIANSTSFLRRSSYSTILIEESRSVQIRGGALSHT

SEQ ID NO: 269509 - protein, 92 aa, Glycine max
  Clone ID: PAT_MRT3847_85387C.1.pep
RLCPSIMLLDDAWPSMIFSRRCLSIIFWRPCPSSMDLTTMPFYHLLTTMPVYHLLTTMPLYHLLPTQPVYHLLTTWGHIAKHINKHINQPNG

SEQ ID NO: 269510 - protein, 119 aa, Glycine max
  unsure (1)..(119): unsure at all Xaa locations
  Clone ID: PAT_MRT3847_85388C.1.pep
XXSXXXXYXXXXQRTAXCXXXXXXHRXXXXXGNXDXXXGXXXXXXRXXLTXXALXXLXXXXXCXLMWXXXXXXXXCXVXXXXXXXGXXXXXXPXXXXXXEXXVXXXXCXMXXKVWTXPX

SEQ ID NO: 269511 - protein, 122 aa, Glycine max
  Clone ID: PAT_MRT3847_85389C.1.pep
RYLGNPEFADRHMSKRHRRHRGTSGRSSILAFRLAELARNSAHECPAQQLPLRLLLLARFSENCRLAIYLPTPPFQGVDLVSISTSDFTYSRRYLLAEATWTLRLPHSKLHDTASCQEVTKV

SEQ ID NO: 269512 - protein, 40 aa, Glycine max
  Clone ID: PAT_MRT3847_8538C.1.pep
VWILLKGGLCYICISFKFRVCTLDGVVAIVSIIGIIEDDI

SEQ ID NO: 269513 - protein, 60 aa, Glycine max
  Clone ID: PAT_MRT3847_85390C.1.pep
GGGVSASLCLCPPECIGTGKVRFHWCGVPHSSNTELCWDFTEGGPRCLLSPPYQLWISFL

SEQ ID NO: 269514 - protein, 34 aa, Glycine max
  unsure (1)..(34): unsure at all Xaa locations
  Clone ID: PAT_MRT3847_85391C.1.pep
TSSLEFLPFXKNTYLXSKRMVFSFPQLRXVRNLY

SEQ ID NO: 269515 - protein, 72 aa, Glycine max
  Clone ID: PAT_MRT3847_85392C.1.pep
IGRLNSCKRKSHLSRENVPPRIIQFILSLHSIFHAPNQTSLRNNFNLPIHCLSELMTKLLRIILFTFDIRAN

SEQ ID NO: 269516 - protein, 83 aa, Glycine max
  unsure (1)..(83): unsure at all Xaa locations
  Clone ID: PAT_MRT3847_85393C.1.pep
KPLGFALHAYIVILANWAWALATYXKTNTNRQLNVCYAFKACGTITALLSNSLGRLVXSRIYAQVIAWYANYPWEDVFSLRKH

SEQ ID NO: 269517 - protein, 67 aa, Glycine max
  Clone ID: PAT_MRT3847_85394C.1.pep
KLHWGLTTLGFPLHRQAPLNNPPQSEIAPMILQPLPKTNAGFNHWPEQIFCQDSRAHQECSFTACWL

SEQ ID NO: 269518 - protein, 187 aa, Glycine max
  unsure (1)..(187): unsure at all Xaa locations
  Clone ID: PAT_MRT3847_85395C.1.pep
FGTRRYLSDDRKGISCQSFSLRDAFLNLIKGLNPRIVLLVDEDCDLSASSLTSRITTCFNHLWIPFDALETFLPKDSCQRSEFESDIGQKIENIIGYEGHQRIERLESGVQMSQRMKNVGYLSVPFCDETVREVKGLLDEHASGWGMKREEGXLVLTWKGNSCVFATAXVPCEILRDHHIGMDASLS

SEQ ID NO: 269519 - protein, 37 aa, Glycine max
  unsure (1)..(37): unsure at all Xaa locations
  Clone ID: PAT_MRT3847_85396C.1.pep
EMXXXKGVVXHVXLSXVXGRRHYQSGLRSSYKDYANL

SEQ ID NO: 269520 - protein, 83 aa, Glycine max
  unsure (1)..(83): unsure at all Xaa locations
  Clone ID: PAT_MRT3847_85397C.1.pep
HTRGHKGGAGGIFTSERRGAPPPTQNKSHGSDTRTKGALHESKKGAEEPPGGGGPKNGTPEXREGAPDPSTDNKHANKQNGEP

SEQ ID NO: 269521 - protein, 251 aa, Glycine max
  Clone ID: PAT_MRT3847_85398C.1.pep
TRPVIYRDLKPENVLIRSEGHIMLTDFDLSLKCDDSTSTAQIISDQNPPRTVPRNDSHVEPTRATSSCMIPNCIAPTASCFHPKRKKKKKQTHFNGPAFVAEPVNVRSMSFVGTHEYLAPEIVSGEGHGSAVDWWTLGIFMFELFYGVTPFKGMDHELTLANVVARALEFPKEPAASAAMKELISQLLVKDPAKRLGSVMGASAIKHHPFFQGVNWALLRCTTPPFVPPPSSAKAIYDDHQTCPEIFIDCY

SEQ ID NO: 269522 - protein, 130 aa, Glycine max
  unsure (1)..(130): unsure at all Xaa locations
  Clone ID: PAT_MRT3847_85399C.1.pep
AYACKLIISTKMMISLLTYGLRMSSFSKLRTVNPFYTMLRPVIYFHSKVSIATSLLRAIATKCIPKAMFXHITDKAINTIILTQHEARRLAHNSIGTNHNLYCIICQXTPIAAKVLKSMRINLQDSPIEL

SEQ ID NO: 269523 - protein, 52 aa, Glycine max
  Clone ID: PAT_MRT3847_8539C.1.pep
MANAASGMAVHDDCKLRFLELKTKRTHRFIVFKIEEQQKQATAEKLGEPAQG

SEQ ID NO: 269524 - protein, 125 aa, Glycine max
  unsure (1)..(125): unsure at all Xaa locations
  Clone ID: PAT_MRT3847_853C.1.pep
FFVVERGLPIVVYWLYPVGQLPSEAVAGNGTCGRGRGGLPTSAWISFADKNRSXDMNKKIXTTLGKGMNDVFLTRDDPCPETLLSVLLGVXNAILGHNSLNSMLTRLLENCESNKYMVDESSFAF

SEQ ID NO: 269525 - protein, 250 aa, Glycine max
  unsure (1)..(250): unsure at all Xaa locations
  Clone ID: PAT_MRT3847_85400C.1.pep
MEEAKVETPMTTWRDNCSQSLSPRARIVSVASNIAFQPLHNPDPQVWGVLTAVSYNARKRHQGINILLTANEHCIGRLVEDVRFQIDSNSVSANHCRIYRMIVTNENMENATSIFLKDASTNGTYLNWERLKKNGAAVKVCHGDIISFAAPPQHDLAFAFVFREALVPSLMPDNAVAKRKAEDFVSDNKRLKGLGIGAPEGPISLDDFRSLQRSNMELRKQLENQVVTVDTLRXDNCAAVECHESVCNHW

SEQ ID NO: 269526 - protein, 164 aa, Glycine max
  unsure (1)..(164): unsure at all Xaa locations
  Clone ID: PAT_MRT3847_85401C.1.pep
PVPRXAGTTGRPTRGESRIGPLPLEGNRAHNXQTPHYPHPSSRTRASQQQRLCRKLSRRNLMGXSPLVLRPXXGLLGQPSGKRAPGRPQSEVXQFQGGPPRERREPRGSEKVGFKKGNLXTQNAAGPKGGXTGRENDKXPNKKKKKKKKKKNIKGGRSPETKXT

SEQ ID NO: 269527 - protein, 246 aa, Glycine max
  Clone ID: PAT_MRT3847_85402C.1.pep
QTGQEQLRCGATADIKADHAVLVGPTSEEERKGDYDWTQEWYPLYLTQNVPEDAPLGLRVFDKQLVLFKDGNGQFRCYEDRCPHRLAKLSEGQLIDGRLECLYHGWQFEGEGKCVKIPQLPADAKIPRAACVKTYEVRDSQGVIWVWMSLKTPPNVSKLPWFENFARPEFQDISTIHELPYDHSILLENLMDPAHIPISHDRTDWTAKREDAQPLCFEVTERTHIGFAGWWGREKDGSMPNFLRFE

SEQ ID NO: 269528 - protein, 188 aa, Glycine max
  unsure (1)..(188): unsure at all Xaa locations
  Clone ID: PAT_MRT3847_85403C.1.pep
MALVNPFLSPPRTPLSLRVSAPPNQALLRWTLCSQYSFKPSSLRSKHAMCGATADIKAAPLADGEADHAVLVGPASEDERKGDYDWTQEWYPLYLTLNVPEDAPLGLRVFDKQLVLFKDGNGQFRCYEDRCPHRLAKLSEGQLIDGRLECLYHGWQFEGEGXCVKIPQLPADAKNPSAACVXTYEVRD

SEQ ID NO: 269529 - protein, 439 aa, Glycine max
  unsure (1)..(439): unsure at all Xaa locations
  Clone ID: PAT_MRT3847_85404C.1.pep
MHVIAAVLNFILSLSVDEQNSLRRALKQRTPRIEVDLMNYLQNKKERHSKSSYDPSDVVGASSEEGYVGLSRKAHYIGRNXGSSSLDIDGGRKWSSQDSALIKGTSGQAVTDETEEHTDSNSGAFGLKTKELAYTANSTGQNFGLQTSHGHVDSSINFEGLSSDLNVNGLMSSEHLNITEDFGHDKEHHSAEDVKVNYMTDNGPSIPQILHMICSGGDGSPISSKRTALQQLAEVSIANDHSVWTLYFNQILTVVLEVLDDSDSSVKELALSLIVEMLKNQKGAMENSVEIVIEKLLHVTKDIIPKVSNEAEHCLTIVLSQYDPFRCLSVIVPLLVTEDEKTLVICINCLTKLVGRLSQEELMAQLPSFLPALFEAFGNQSADVRKTVVFCLVDIYIMLGKAFLPYLQGLNSTQLKLVTIYANRISQARTGKAIDAVQD

SEQ ID NO: 269530 - protein, 62 aa, Glycine max
  Clone ID: PAT_MRT3847_85405C.1.pep
IQLWRFLQLFCRIIPRNEVNGIFEYMRSYMRELGTCICGNLPDVMNSGYLGNILMVVSGLIC

SEQ ID NO: 269531 - protein, 123 aa, Glycine max
  unsure (1)..(123): unsure at all Xaa locations
  Clone ID: PAT_MRT3847_85406C.1.pep
FGSSTAATKRQKEPTDCLFCMGPTLAPLGKRSCAIALSILFGCXNVPFFSDGLPPVCWALTSEIFPLRLRAXASALAAWANKDCNGLEDMTFISESDAIRVAGTFMTLSAISALAIGLVVSLA

SEQ ID NO: 269532 - protein, 152 aa, Glycine max
  Clone ID: PAT_MRT3847_85407C.1.pep
AFKIIQFFAYHSTPELERLTIVFFTMEGPALAWFQWMMCNHRFPTWAGLLQAIETRFAHSPYEDPTGILFKVTQTGSVSEYLHQFKALANRIVGLPPSLRLSCFFLGLNPDIRCEVQVLQPLTLVQAVGLAHPQEDKLAEQRRPYRSRTTPG

SEQ ID NO: 269533 - protein, 60 aa, Glycine max
  unsure (1)..(60): unsure at all Xaa locations
  Clone ID: PAT_MRT3847_85408C.1.pep
GNPHSSYXPMDYSSPHFNQKNXNKYYKGGCESCIAXSPYITLQFNWKDRIYFLITFFHCR

SEQ ID NO: 269534 - protein, 150 aa, Glycine max
  Clone ID: PAT_MRT3847_85409C.1.pep
MAKAVCTLYGSDATVYGSLVVTQAHEDAKSVITGELKGLPAGKHALHVNVFGDVSQPGGVFNPFGKNHGAPEDEERRVGSLGNVNVAEDGSVKVHVEDKLVKLIGPHSIIGRSLVIHEGEDDMGKGGDELSLQNGNAGAIKAFGVVGISS

SEQ ID NO: 269535 - protein, 80 aa, Glycine max
  Clone ID: PAT_MRT3847_8540C.1.pep
SPRAPWTVQLRSQQHCEYAGHPLQERRSLDCRNMTAVKIPWVNCTNVSCSSTQAGQYASKQSRRLPWPACVRNMITITRA

SEQ ID NO: 269536 - protein, 101 aa, Glycine max
  unsure (1)..(101): unsure at all Xaa locations
  Clone ID: PAT_MRT3847_85410C.1.pep
LFYIAHNGLGIAVRISEPLKAQIHILSYADFYHVAGGDDGEVTGGPEVSLHPGREDMHETSXSSSLSPIYSNGADHKRDVFGTDIGLNDQDIAALIGDYTS

SEQ ID NO: 269537 - protein, 192 aa, Glycine max
  Clone ID: PAT_MRT3847_85411C.1.pep
ARESTWWRDLKIVAQHPQQGQVLNRSIVWKVGRGDKFKFWEDSWIGEETHLLEKYPRLHSISLQQDHFIQQMGDVKDSGWEWDFKWRRPLFDSEIDLAVSFLEDIQGHRIRANSADQWVWVADPSGQYTVRSAYTVLREDLMQEDQYGEFKELWKVKVPSKVAEFAWRLLKDRLPTKDNLRRKHVDYKNLHA

SEQ ID NO: 269538 - protein, 155 aa, Glycine max
  unsure (1)..(155): unsure at all Xaa locations
  Clone ID: PAT_MRT3847_85412C.1.pep
MAPAGKLSGLRREGSDWFCNGGLPSDITVSVDGVTFHLHKFPLVSKCGKIARAHEESKNTNETLKMVLEEFPGGPDTFLIAAKFCYGYRVELTARNVVSVHCGAEYLEMTDEFGEGNLLSKSESFFHKNTLRNWKDWILALQXSEPVLPRAEKLH

SEQ ID NO: 269539 - protein, 55 aa, Glycine max
  Clone ID: PAT_MRT3847_85413C.1.pep
NEYLFLQIPQQTLDRFQPAPVEPNREKAESILLWSTAFDYISKKPIAHRPPVPSY

SEQ ID NO: 269540 - protein, 114 aa, Glycine max
  Clone ID: PAT_MRT3847_85414C.1.pep
PQEMQSTKSKICSGSNPYPTNPTLYISLDQIRLLCAVPTRTKLCAFFPAVAASFDYLPRAKAETFRDLRLWKLSVTNGCQCGDYLCFVSLGNTGNRGSCICTMEEAAIAMEEAF

SEQ ID NO: 269541 - protein, 69 aa, Glycine max
  Clone ID: PAT_MRT3847_85415C.1.pep
QNILQDMVRAVVKSLARYIASHHALQTVLAPFSAIYCPIGSAVGALVIAPTVARIVTRSPPMSTVSNPS

SEQ ID NO: 269542 - protein, 53 aa, Glycine max
  Clone ID: PAT_MRT3847_85416C.1.pep
IIIITSRKNFILLMNKKYFLSELYDNQNIKALLTENIYIYIYIYIYIEKYRYI

SEQ ID NO: 269543 - protein, 36 aa, Glycine max
  Clone ID: PAT_MRT3847_85417C.1.pep
KKLMVTKKVFYEVLFRQEEWFVLINSQKKVRFGKKF

SEQ ID NO: 269544 - protein, 40 aa, Glycine max
  Clone ID: PAT_MRT3847_85418C.1.pep
NCMCLIETRYRAITIWPCRPRTCNIDEAPGLSQPKYARNP

SEQ ID NO: 269545 - protein, 103 aa, Glycine max
  unsure (1)..(103): unsure at all Xaa locations
  Clone ID: PAT_MRT3847_85419C.1.pep
PPTAQEETVSSKASDFTTALFSKMSXPEATAKYVEAIEIVSESFSRSDCSNSGAVLWADTXSYQLLRKQPVELTLRLPGGHRPKQFVALANTIEPIEPDSNSR

SEQ ID NO: 269546 - protein, 61 aa, Glycine max
  unsure (1)..(61): unsure at all Xaa locations
  Clone ID: PAT_MRT3847_8541C.1.pep
ACXXLRGILTXLNLSSCPYXTPXVPXHLQVCQWPXMXSCIFLISLXXLXXFXXXIXXXXTX

SEQ ID NO: 269547 - protein, 105 aa, Glycine max
  unsure (1)..(105): unsure at all Xaa locations
  Clone ID: PAT_MRT3847_85420C.1.pep
MNMPNAVLSMCRNLVGDLAYEGSKMTIPSIKCTLSFCIGLVNLAEDAINLQACPHXLEQLGQIHAKDXIVLXHEEYLTASATHVRAATTLIADGCPYLYAMVRDT

SEQ ID NO: 269548 - protein, 89 aa, Glycine max
  unsure (1)..(89): unsure at all Xaa locations
  Clone ID: PAT_MRT3847_85421C.1.pep
RHAYSSEFGSTPXXPHXLHKVXXISGVXXLGLXXYXAHVXXPQXPXXKXVWXXASLYHLVHTAAXVXAPIXKHPNXFGGLLTXGXLATL

SEQ ID NO: 269549 - protein, 105 aa, Glycine max
  unsure (1)..(105): unsure at all Xaa locations
  Clone ID: PAT_MRT3847_85422C.1.pep
SHVGIPTTEGGLGATTLPEIIYPVYLVLEDPKALCLVTSWIPWATPATPPVTPPATTPITAHIEALSLTVLFFVLHLASPSSPLYGAFTPCKHINKHINQPKXPT

SEQ ID NO: 269550 - protein, 55 aa, Glycine max
  Clone ID: PAT_MRT3847_85423C.1.pep
IRCSSRQQYHFVMLSQQYHCVVLLVALPFCRIIAAAPSCAVVAAVSFSGLVAAIS

SEQ ID NO: 269551 - protein, 251 aa, Glycine max
  unsure (1)..(251): unsure at all Xaa locations
  Clone ID: PAT_MRT3847_85424C.1.pep
ENTDELPGERHRKRRRSLSFDPSLGLCELREMCSGGSSSSSSSSSESTETPSHQDLDDGVSEHSGDCLDQDSVSDQFSVEFEVESLDSEDYSLSDEGHELSDEDDEVYRVTVYQTGESDTDSFEGDPEISLADYWKCTSCNEMNPPLPSHCKRCWTLRENWLPDDKGKDKVEISEKAKLENSAQAEEGLDVPDGKKLTENDAKEPCAEEDSEEKAEQTPLSQESDDYSQPSTSSSIVYSSQXSVKELKEET

SEQ ID NO: 269552 - protein, 72 aa, Glycine max
  Clone ID: PAT_MRT3847_85425C.1.pep
GGSISSQRVFILIDGGSTHNFVQQRMVRTLGLNAQPTHLLRVTVGNNNEVECHHLCVEVTVHVQGQSFTVGL

SEQ ID NO: 269553 - protein, 105 aa, Glycine max
  unsure (1)..(105): unsure at all Xaa locations
  Clone ID: PAT_MRT3847_85426C.1.pep
QTTITFVFLGLLRGTGAFPTGLVYRIVGGYTCCRNSVPYLALWYFGCQFWGGSLXNYNGEVSQDPCAXAXIMTRLGEYNIGVSDGSEHGFIAAEIIRQPEYMCNT

SEQ ID NO: 269554 - protein, 133 aa, Glycine max
  unsure (1)..(133): unsure at all Xaa locations
  Clone ID: PAT_MRT3847_85427C.1.pep
LKLFIGIHGYIIAYSVASRQSFVLVRVIRDKILNHLVSFPCLQSMLSCTEALLXGADYVPLVVVGNKSDLKPEQRQVSLDEGRQLGEEFRCAFTEASARLDFNVARAFELMIGEIEKSQNPSQPTGGNKCALM

SEQ ID NO: 269555 - protein, 208 aa, Glycine max
  unsure (1)..(208): unsure at all Xaa locations
  Clone ID: PAT_MRT3847_85428C.1.pep
GSRLTDDAVKISMSLLDVGIVPYVYFCWXLLHVMTQTPKEEPGKLTDCIEKAITWLGPAGRYLVQGPEGDGYLIKEAXELLNSIDYQVKKPLCKLSIDLCVSLNAPSRARRRPYPGLMLXLYKNIQSRSETQWALHVKKLSCGADVTALHVWINDXLRHWNDGXDLAPLLGDDTGQGTHXFRQGLASVFESHLRELNVPFHQAPDKAG

SEQ ID NO: 269556 - protein, 318 aa, Glycine max
  unsure (1)..(318): unsure at all Xaa locations
  Clone ID: PAT_MRT3847_85429C.1.pep
MVGGHKKKKRCSEFASKNKDHKMGNHCRCILVCQSTGQGTALDGQITSCQEPRHGTSNSRTVDTNTGLSRCSKSCRLRWTNYLRPGIKRGNFTPHEEGMIIHLQALLGNKWAAIASYLPQRTDNDIKNYWNTHLKKKLKKFQAALDPHSASDSTASXSISTKELYHHQSQSSSTTTYASSTENISRLLEGWMRSSPKQLNKGSSSQDDEDIQLQGINDDDKNNNNFESTTKLVNLHHLQHKVRNKDEHQEEKSSEASAAADHHHHHHHDIAAAHERNNVRQKSENSSGAPPLSFLEKWLLDENVGHQVEEMMELSPMF

SEQ ID NO: 269557 - protein, 106 aa, Glycine max
  Clone ID: PAT_MRT3847_8542C.1.pep
HASAHASGPVDHENYKHASSGFTVHQNSGGAVGIEISGFSEEEVPLSKLLELVFEEGLEVVNCLSTKVNGRLLHSLQCEVDNSGSVDLSELRRKFSDVIPSLRCSA

SEQ ID NO: 269558 - protein, 88 aa, Glycine max
  unsure (1)..(88): unsure at all Xaa locations
  Clone ID: PAT_MRT3847_85430C.1.pep
MGRPPCCDKVGIKKGPWTPEEDIILVSYIQEHGPGNWRSVPTXKGLSRCSKSCRLRWTNYLRPGIKRGNFTPHEEGMIIHLQALLGNK

SEQ ID NO: 269559 - protein, 59 aa, Glycine max
  Clone ID: PAT_MRT3847_85431C.1.pep
TRPLVYNFLRFNFFIINFFSLLSLLLSFLFSLSKQSRLLHHSSDLKNNLLRSHETDPTP

SEQ ID NO: 269560 - protein, 54 aa, Glycine max
  Clone ID: PAT_MRT3847_85432C.1.pep
MQENLLAIKKKNKNYFQRKHKTSFVFITIPISLNLSILTCISSPHLKITGFMVY

SEQ ID NO: 269561 - protein, 44 aa, Glycine max
  Clone ID: PAT_MRT3847_85433C.1.pep
IEAITKICHAKVTFLTCLPFNNNSPLSSTNERGHFFMFIYILEM

SEQ ID NO: 269562 - protein, 82 aa, Glycine max
  Clone ID: PAT_MRT3847_85434C.1.pep
HFILSYITNECVYPLIKEELQQRKLDMNSHILYLPAQCSPSTGLSQYRAFAKDIKSRVLFYFSFDLIIDVQDCEHEISHGTG

SEQ ID NO: 269563 - protein, 65 aa, Glycine max
  Clone ID: PAT_MRT3847_85435C.1.pep
KEKLVLKKGRRQTLKGFFKNSQGKTRAIPPHRSPVEFPIYQNNNKRAVGPPPSLILLKKNLNNLP

SEQ ID NO: 269564 - protein, 54 aa, Glycine max
  Clone ID: PAT_MRT3847_85436C.1.pep
RPTPPKKKKKKKKKKKKKKKKKKKKKKGKKEKKKQKLKNQKKKRKKTFNWGTFN

SEQ ID NO: 269565 - protein, 95 aa, Glycine max
  Clone ID: PAT_MRT3847_85437C.1.pep
MANSNLPRRIITETQQWLSEPTPGIRAYPSEDNMAYFNVMILGPTQTPYERRVFKSELYLPEEYPMAATKVKLLTKIYHSNIDKLSKICLDILKD

SEQ ID NO: 269566 - protein, 60 aa, Glycine max
  unsure (1)..(60): unsure at all Xaa locations
  Clone ID: PAT_MRT3847_85438C.1.pep
GETINYKYHCGECKGKKVIEDMTVLEFIDEHGMXNRHKITFTGEVKEAGESSIGDIVIVI

SEQ ID NO: 269567 - protein, 55 aa, Glycine max
  Clone ID: PAT_MRT3847_85439C.1.pep
FNTYTFLLTIFLPNLTPILLLSYTTLIKLISLIFTLLTSIILTPTNSFYKTLLIY

SEQ ID NO: 269568 - protein, 62 aa, Glycine max
  Clone ID: PAT_MRT3847_8543C.1.pep
NKLAQFPTFLHFSFKSLNLDKLNKRFPQKGGNQKINWGAGNFVEIFKNFGMVKGYLNGCPGG

SEQ ID NO: 269569 - protein, 276 aa, Glycine max
  Clone ID: PAT_MRT3847_85440C.1.pep
MQVTETRTVQVKQLSDLAGVREIHEFFSFSGEIEHVEILSEDGKSKTAYVTFKDPKALEIALLLSGATIVDQVVKITPAENYVPNREMEEVRVVENAINVAPSENSENVSLSIEEGKASPTNRRIYLSKAQDAVTSMLAKGSAIRQDAVNKAKAFDEKHQLTANASAKVISLDKRVGLTEKLTVGIAAVNQKVKSVDQRLQVSDKTMAAIIAAERKINNTGSAVKTSRYVTAGTAWFNGAFSKVAKAGHVASTKTREKFHLAVSNLTAKEPSVAAA

SEQ ID NO: 269570 - protein, 158 aa, Glycine max
  unsure (1)..(158): unsure at all Xaa locations
  Clone ID: PAT_MRT3847_85441C.1.pep
MQVTETRTVQVKQLSDLAGVREIHEFFSFSGEIEHVEILSEDGKSKTAYVTFKDPKALEIALLLSGATIVDQVVKITPAENYVPNREMQEVRVVENAINVVPSENSENVXSXIEEGIASPTNRRIYLSRAQDAVTNMLAKGFRHRQDAVNKAKAFDEK

SEQ ID NO: 269571 - protein, 119 aa, Glycine max
  unsure (1)..(119): unsure at all Xaa locations
  Clone ID: PAT_MRT3847_85442C.1.pep
PLAKEVKNLLRKGRNPCLEFEVEDGFVFRXHNRSPGLFHGRYWAMWKLPKVGCPYAFQVLKEVSKGXVGNPNGFIRIIGIGNVCQRQGIKFIAYQAPGFLMLKNCKTFGTAPPLWLFGP

SEQ ID NO: 269572 - protein, 73 aa, Glycine max
  unsure (1)..(73): unsure at all Xaa locations
  Clone ID: PAT_MRT3847_85443C.1.pep
WYGLSCRITNRRVFWKTFLEVKNSSQLFWFCQGYNWKNCQHGSRYMPRLHQKLASPSLECPSEKCSGRWITCX

SEQ ID NO: 269573 - protein, 307 aa, Glycine max
  unsure (1)..(307): unsure at all Xaa locations
  Clone ID: PAT_MRT3847_85444C.1.pep
HENKYDHNYMYYIGSLSESHSQNLFFSYGRAYGGGGFAISYPLAKALSKMQDRCIQRYPALYGSDDRMQACMAELGVPLTKEXLGFHQYDVYGNLFGLLAAHPVTPLVSLHHLDVAEPIFPNATTVEAIRRLTIPMKLDSASLIQQSICHDRHRRWTISASWSFAVQIFRGIFTQREMEMPSRTFLNXTFLNWYRRADYTAYAFNTRPVSRNPCQKPFVFYFSKAKYNSTMQQIVSEYERHRVPHPDCRWKMANPAAFDKVEVYKKPDPHLWDRAPRRNCCRVRKSKEKGTMVIDVDMCRDGEVSET

SEQ ID NO: 269574 - protein, 67 aa, Glycine max
  Clone ID: PAT_MRT3847_85445C.1.pep
VERERERRVAEKEKMKKSSGSAADKKRVRRSSALDPTSDAPPRVRVSNSHLYFFIPKSLSLLCCSHC

SEQ ID NO: 269575 - protein, 109 aa, Glycine max
  Clone ID: PAT_MRT3847_85446C.1.pep
KERSRSARQLTWVCLLKFQQLAASLGWLSHGLLFLLRTAHRRITDSASFRGDTSRLYRAIRFFLITVLLLLGFELVAFFKGWHFSPPDPSDVLGVIGVVYAAGLDVRAT

SEQ ID NO: 269576 - protein, 84 aa, Glycine max
  unsure (1)..(84): unsure at all Xaa locations
  Clone ID: PAT_MRT3847_85447C.1.pep
PALVFCLLGVFWLFWGSPSLPXLLVFFLPGALCALALCLGLFXFLLSWRGLLCFAFAVWXRGSAVPPCDAALXVXVLVXCLNNQ

SEQ ID NO: 269577 - protein, 55 aa, Glycine max
  Clone ID: PAT_MRT3847_85448C.1.pep
FEKQLAFSTAAVASFILFDQICEFRPIFHECNNCYSSNTVTLYVLRGKVPLIISG

SEQ ID NO: 269578 - protein, 153 aa, Glycine max
  unsure (1)..(153): unsure at all Xaa locations
  Clone ID: PAT_MRT3847_85449C.1.pep
HKSISIPFPQREQDHPSIERKHTHTHTKQNSASYTNCSSVSTEKPSEFKARAGITVKNMINEDSXETIVKHNEALTDRIGKNVDLELVSTDIDPXTKFAKKSNRSVLKDWSKKCNLNAQRVNYTAXSMIDSRSGEPGASTVTYMHHKEFFLIA

SEQ ID NO: 269579 - protein, 114 aa, Glycine max
  unsure (1)..(114): unsure at all Xaa locations
  Clone ID: PAT_MRT3847_8544C.1.pep
MIIPPAAKAFALLIQSASADDVVVLSEDNFNKGVRYDRXALLALYAPWXGHCREPATQYDELGFTSKKPEYPLLGQAYCDEHKTSCSKFGVSGYATIQWSFKRISQPQRYEGPP

SEQ ID NO: 269580 - protein, 319 aa, Glycine max
  unsure (1)..(319): unsure at all Xaa locations
  Clone ID: PAT_MRT3847_85450C.1.pep
PSTGRFPGRPAADISNNTSSAVQVKNEPTYPTMDINAKKSRELDVQVESQGAQLNQLPSSSSNAVSQETERSSLHLQGLNKEQQQHXTFPFSIWNSGGNYNPFSGSTSSSTSSIRPQPFDSHMRQIPHQSISPNQLGGSTQGLIGLTKLDQQNSFNDPKRMPGGFVSPVANNTTSQQSSNSWQPSANKEQSSGSFSSVPYVKKEPNDLSTEQQHRHNLSKLHGLHSVNSVQNEQGSSANQGTLKEEFSGGYPASTSMPHTTSSLLPLNSASPSVSQLDPSATLSPQIPSNTSVINARTPLKKPSPGQKKPIEALGSSPP

SEQ ID NO: 269581 - protein, 49 aa, Glycine max
  Clone ID: PAT_MRT3847_85451C.1.pep
LVRRSRSYIRINNRITLRDKHAKGKSIYKLHLIKHWLETKCQYVGCGSN

SEQ ID NO: 269582 - protein, 81 aa, Glycine max
  Clone ID: PAT_MRT3847_85452C.1.pep
SALLASGLNWPESSLALNYNLPAPPYKFLSFQSQTGLFCKNGVLLNFVALMCARILFQIQKFSNCSSKGIPPNLVCIGLMG

SEQ ID NO: 269583 - protein, 76 aa, Glycine max
  Clone ID: PAT_MRT3847_85453C.1.pep
DASSPCLNHTYKPNVYYLKPKQLTLLVKCRVRHHLNATVLPNNILIMVSTEIQHPEQRKGHHILLLVRVQFIASII

SEQ ID NO: 269584 - protein, 145 aa, Glycine max
  unsure (1)..(145): unsure at all Xaa locations
  Clone ID: PAT_MRT3847_85454C.1.pep
IGKILNEAHVAQDISVESFEGIINNITANNYLTFADEEIPIEGQGHNRALHVSIKCLDHIVAKILIDNGSSLNVMPKSTLDKLPFNALHLRPTSMVVQAFDGSRWDVRGEIGLPIQIGLHICQISFQVMDMNLAYSYLLGXPWIH

SEQ ID NO: 269585 - protein, 72 aa, Glycine max
  Clone ID: PAT_MRT3847_85455C.1.pep
EITSWAAGGYSVSIVRLYAAVFRIDAVVKVVIGVSTNSIVVGVTCRVAVVNPSTSLGNSVFESKLYSELVEG

SEQ ID NO: 269586 - protein, 100 aa, Glycine max
  unsure (1)..(100): unsure at all Xaa locations
  Clone ID: PAT_MRT3847_85456C.1.pep
MNGQIMYMMMLLRATLHVFFCIIDRVVANMNSELGTKRYCLKGTMACVVMPXISEWEIYLFAECINSGLKQGVILLVGQEGMFMERLESEYSVQLRIKVF

SEQ ID NO: 269587 - protein, 44 aa, Glycine max
  Clone ID: PAT_MRT3847_85457C.1.pep
GGLGIGFSIIPVASCLGGALGLSSLPPLGSFPPTKQYSGFPQLM

SEQ ID NO: 269588 - protein, 120 aa, Glycine max
  Clone ID: PAT_MRT3847_85458C.1.pep
QGALPWPVIHACFMTYHIIAFSLRPYSGTEQPRSDKAVRSSYRVAIAQLFTRQLKVRSKSSAREPVLRVCSQATISPLAVVFNVKAVLSLSFHPMNPCEERCKENFGNAFVLEPNPQAKC

SEQ ID NO: 269589 - protein, 67 aa, Glycine max
  Clone ID: PAT_MRT3847_85459C.1.pep
KTIFERDKFCIIILVYSHSLTPSFSGVLSLFLYRTLITLFPSLLLQSSFALSFYLLLLSNLCPTSST

SEQ ID NO: 269590 - protein, 139 aa, Glycine max
  Clone ID: PAT_MRT3847_8545C.1.pep
METPTVTIPKIGPKPSKKLKLPTPKELISHYESQGMDSQDASLKVIEDLQKALFGVISSGKGKHDKLLTESSRKIDAISNRLTVLDMKLDSKPGYVETFAIGLASGAALKGIGAIVPHIIAPLFQIWNSVFTATKSSPQ

SEQ ID NO: 269591 - protein, 38 aa, Glycine max
  Clone ID: PAT_MRT3847_85460C.1.pep
ERGESKLVKGSSAFLGMFYTLLSFLVARHLIKEIFLKK

SEQ ID NO: 269592 - protein, 70 aa, Glycine max
  Clone ID: PAT_MRT3847_85461C.1.pep
AICSPTHPEITRMRSLRMSVLITRERTQGGRWCKNTEIPLHLETSAWEDKKLLLGPDFLKNWYVASHVKH

SEQ ID NO: 269593 - protein, 295 aa, Glycine max
  Clone ID: PAT_MRT3847_85462C.1.pep
IEHPETMQQQQQQKSHGGRKQGQHQQQEEEGGSVLSGFSKHFLAQSFNTNEDTAEKLRSPDDERKQIVTVEGGLSVISPKWQEQEDEDEDEEEDQPRPDHPPQRPSRPEQQEPRGRGCQTRNGVEENICTMKLHENIARPSRADFYNPKAGRISTLNSLTLPALRQFGLSAQYVVLYRNGIYSPHWNLNANSVIYVTRGKGRVRVVNCQGNAVFDGELRRGQLLVVPQNFVVAEQGGEQGLEYVVFKTHHNAVSSYIKDVFRAIPSEVLSNSYNLGQSQVRQLKYQGNSGPVVNP

SEQ ID NO: 269594 - protein, 55 aa, Glycine max
  Clone ID: PAT_MRT3847_85463C.1.pep
FKCFPFLNFVCILTSIICRTILSDVYITIWLGNLCQKGLFQRSLLLSPEVQFTLV

SEQ ID NO: 269595 - protein, 517 aa, Glycine max
  Clone ID: PAT_MRT3847_85464C.1.pep
MGKPFFTLSLSSLCLLLLSSACFAITSSKFNECQLNNLNALEPDHRVESEGGLIETWNSQHPELQCAGVTVSKRTLNRNGLHLPSYSPYPQMIIVVQGKGAIGFAFPGCPETFEKPQQQSSRRGSRSQQQLQDSHQKIRHFNEGDVLVIPPGVPYWTYNTGDEPVVAISLLDTSNFNNQLDQNPRVFYLAGNPDIEHPETMQQQQQQKSHGGRKQGQHQQQEEEGGSVLSGFSKHFLAQSFNTNEDTAEKLRSPDDERKQIVTVEGGLSVISPKWQEQEDEDEDEDEEYEQTPSYPPRRPSHGKHEDDEDEDEEEDQPRPDHPPQRPSRPEQQEPRGRGCQTRNGVEENICTMKLHENIARPSRADFYNPKAGRISTLNSLTLPALRQFGLSAQYVVLYRNGIYSPHWNLNANSVIYVTRGKGRVRVVNCQGNAVFDGELRRGQLLVVPQNFVVAEQGGEQGLEYVVFKTHHNAVSSYIKDVFRAIPSEVLSNSYNLGQSQVRQLKYQGNSGPLVNP

SEQ ID NO: 269596 - protein, 146 aa, Glycine max
  Clone ID: PAT_MRT3847_85465C.1.pep
AQDIALEKQKQGEITKQKNDITRIQERESFQGQRCGKNTSVTHTDQPNTLLQAYSSGIQFFDAKTLILGPWNDCYHETSQEHERTARAVHQRNVAYTSPRHIIIISTTAHYCSSHLISSLLMLSLLSLTLSHSLYLSISLYHLVPN

SEQ ID NO: 269597 - protein, 53 aa, Glycine max
  Clone ID: PAT_MRT3847_85466C.1.pep
SNCYRGTHHCTGLGHKRRAHSKEFIYRCLAVRVLYRKCDTTLISTGSATILLP

SEQ ID NO: 269598 - protein, 199 aa, Glycine max
  Clone ID: PAT_MRT3847_85467C.1.pep
MALNICLRFLALAALAFLVTIQGTLGETLECENLSHDTCAFAVSSEGKRCVLEKRVKRTGEEAYTCRTSEIEVEKQIKGHIESDECIKACGLDRKSFGISSDSLMERGFTQNLCSPQCYQSCPNIVDLYFNLAAGEGVFLPKLCAAKGANARRQMAEIKSSGIVAPGPVHSLQFTAISPQPFDAVELADEPAVAPFPQY

SEQ ID NO: 269599 - protein, 42 aa, Glycine max
  Clone ID: PAT_MRT3847_85468C.1.pep
MGFLLKKKKKKLIIKKKKKKKNKKKKKKKKKKNKKKKKNKKK

SEQ ID NO: 269600 - protein, 88 aa, Glycine max
  Clone ID: PAT_MRT3847_85469C.1.pep
RAPDYSFSASESQREMPVPPPLSPVYLEVELMCFEKEKESWDLNTAETLDAAGGKKEHGNGSFKATKYTGTTMRYDNGMNFIQYDFSF

SEQ ID NO: 269601 - protein, 51 aa, Glycine max
  Clone ID: PAT_MRT3847_8546C.1.pep
WKNAYIVSCAPYAGIGSLLFGYDTDDIFGALSCIKHEAIDCARKTRLREVI

SEQ ID NO: 269602 - protein, 77 aa, Glycine max
  Clone ID: PAT_MRT3847_85470C.1.pep
GWDCSVQHPWLYMELYSVPDGKYIFEICPFVSIQSSYETIVEDDTTHQNVDCMDTTCNYESRAGQGAVYQFSTIKHS

SEQ ID NO: 269603 - protein, 112 aa, Glycine max
  Clone ID: PAT_MRT3847_85471C.1.pep
MASPTGSLYSNCSMESNSRRGSSCAYPSWPTGPSLEYRNPSSYISDEDLFGEDFEDEYCPILKKAPAPPRVPPMAQALPELPPLYAQKKPKTQRRRKQRKQRRTFAAHDSHQ

SEQ ID NO: 269604 - protein, 73 aa, Glycine max
  Clone ID: PAT_MRT3847_85472C.1.pep
QFTLSYPIFYPSLFLKHTTPPIITTITHISYTFSTLFNLHYLLHSVHLSLINYLYTLIYTTHNTYTLYVIHNS

SEQ ID NO: 269605 - protein, 85 aa, Glycine max
  unsure (1)..(85): unsure at all Xaa locations
  Clone ID: PAT_MRT3847_85473C.1.pep
MNMMRRLKSIASGRTSISSDPGGDSNSKRAKFEPETEVKADEKTNTTETICTDQEQLIDTSXETSNVGTSDVSTVARTEKSGFEE

SEQ ID NO: 269606 - protein, 49 aa, Glycine max
  unsure (1)..(49): unsure at all Xaa locations
  Clone ID: PAT_MRT3847_85474C.1.pep
SRGRITLLENSRIPFALALLFDDAVLVYLIIAFVPYTXIDWDAYMSQIT

SEQ ID NO: 269607 - protein, 61 aa, Glycine max
  Clone ID: PAT_MRT3847_85475C.1.pep
QLGIGFREVIFQDKSRYCNKTQEPEQRKAKYAFTYKLKLLYRKLIFTSSQVWILCSSICIC

SEQ ID NO: 269608 - protein, 130 aa, Glycine max
  unsure (1)..(130): unsure at all Xaa locations
  Clone ID: PAT_MRT3847_85476C.1.pep
RVTAPLQHIQSRTQQTPEDIERVVNMGTMHRSLPMDPXSIYGQGGMHSKPGIANAXLNAGVGRLTLHGWPVTGIDQIRPGLGAAGQMPLLQSADQMQLLTYQRQQQILAQVQAQGNIGYAAAYGDIDPQR

SEQ ID NO: 269609 - protein, 102 aa, Glycine max
  Clone ID: PAT_MRT3847_85477C.1.pep
GFLTKAFHEVSSNQKPYHAKLISWSILHRWRLCYGPGGYTTRTLIKTRMTALQNDNFYTRNATLYGPKSKLGLLPLMEAKKNFRYLSGPPAKQYTTSNARKR

SEQ ID NO: 269610 - protein, 55 aa, Glycine max
  Clone ID: PAT_MRT3847_85478C.1.pep
IWCSNSIFANTTELPALSSANAGKLFTIGVNYTSLPCQDERVLQLILKVWPTSIL

SEQ ID NO: 269611 - protein, 92 aa, Glycine max
  Clone ID: PAT_MRT3847_85479C.1.pep
CHHASDGSLCIKSVIPISLLLAFSVDSRLFNACAACFSELIYEQVARGGSYNSRGLVLVDDVCMSFIWSMQGKASTLALFDPAQVEDEGWCG

SEQ ID NO: 269612 - protein, 56 aa, Glycine max
  Clone ID: PAT_MRT3847_8547C.1.pep
FIWTIHHSVKFGKGWLLCTVNSTSTELLIACKFCEFNWKHVSYALVEVSYYQFSLE

SEQ ID NO: 269613 - protein, 53 aa, Glycine max
  Clone ID: PAT_MRT3847_85480C.1.pep
NKNCPKPNINNSCRDSTSPAREEKKPLKRSTFLKKLSQFSKSSSHATKSKRWQ

SEQ ID NO: 269614 - protein, 68 aa, Glycine max
  Clone ID: PAT_MRT3847_85481C.1.pep
ETRILKLIPKAKKKGGMGNLDCPIGIPDQKNLVGRSWNQWIKIKKVGPIQLFQSPNPHDLIPGKNRVI

SEQ ID NO: 269615 - protein, 135 aa, Glycine max
  Clone ID: PAT_MRT3847_85482C.1.pep
MTKIFTVEELSQATNNFDESMVLGQGGQGTVYKGILSDNRIVAIKMSRIGNPNQVEHFINEMILFSQINHRNVVKLLGCCLETEVPLLVYEFVPNGTVYEHLHNQGQSLRLTWKTRLQIATETARALAYLHSATT

SEQ ID NO: 269616 - protein, 62 aa, Glycine max
  Clone ID: PAT_MRT3847_85483C.1.pep
DISSLAVWKRIQQKLCALVALMREASSALRKTNYCVKLTRYPGSWKNTLLLIVQQPPTGSPG

SEQ ID NO: 269617 - protein, 58 aa, Glycine max
  Clone ID: PAT_MRT3847_85484C.1.pep
ELAPQVQRDSSAHSSAFFTWRFISMVVRGGLAISSWLSIEIYNLLTHATIGTGKLSVC

SEQ ID NO: 269618 - protein, 51 aa, Glycine max
  Clone ID: PAT_MRT3847_85485C.1.pep
FKRRTYLQRSQTCYPVSQISVYTNIRCNFHLLITTAPSPTTINLTVRTLTG

SEQ ID NO: 269619 - protein, 56 aa, Glycine max
  Clone ID: PAT_MRT3847_85486C.1.pep
FFIIFGKSCSCPLNGSHHRCHDCHSRTPHISSTNAANLHHFAFLNNLGRRTMNPFD

SEQ ID NO: 269620 - protein, 76 aa, Glycine max
  Clone ID: PAT_MRT3847_85487C.1.pep
FMTTLNLVMVLIERAKSDLVFLDCRMWSLDLQFNHLPLKVNITLVKLLKMLTKKLPHLAQVIAAHFLISSENLNSV

SEQ ID NO: 269621 - protein, 154 aa, Glycine max
  Clone ID: PAT_MRT3847_85488C.1.pep
MASLSPTAPGVPPFPPPTAARRAASRRFQASPRLDPEPDPEPPSPSSLSASLVVTDERTRRIARELEKLKARERKEMRNRKVASQKAVSVILWREATKAMIDKSGGGRKKKGPINSKKLLPRTVLEALHERVTALRWESALKVFELLHEQIWYN

SEQ ID NO: 269622 - protein, 157 aa, Glycine max
  unsure (1)..(157): unsure at all Xaa locations
  Clone ID: PAT_MRT3847_85489C.1.pep
LECTYFFFEIQCGSCDESLSFQPGSYNPLDEPSPLGLRLMKSPSLTDVIHMMLSQHEESKXKDHKAACYSSSAAAAAGAAAADSKLTAFNCTGTILKIGTWENKSRYEGDLLAKCYLAKHKLVWEGLDGCLQNKIAMPWSDIMAIKAYYPEDGPGTL

SEQ ID NO: 269623 - protein, 91 aa, Glycine max
  Clone ID: PAT_MRT3847_8548C.1.pep
NLNLGDKEKNSNLEGGNFSLIYQAMVRRYTRVGDMNTQQSSWIYKQGEKEGLSKGLLHQMEAITLPPFIQGPRGGPIANRGGCFFPAAFRG

SEQ ID NO: 269624 - protein, 70 aa, Glycine max
  Clone ID: PAT_MRT3847_85490C.1.pep
MKYVFNGKRKKKNMKRKTYGSDDGKFVDRPSRPRKKTEDGLTIYTEEELGISNADAGNTPLCPFDCSCCF

SEQ ID NO: 269625 - protein, 599 aa, Glycine max
  unsure (1)..(599): unsure at all Xaa locations
  Clone ID: PAT_MRT3847_85491C.1.pep
MVQLMRSDTDNHCLKKVKLEVQDEIPPLHTHKRPKLESPPKCGASDESISIPPASYNPLDEPSPLGLRLRKSPSLLDLIQMRLSQQEESKKKDQKASSSSSVAAAAAAAADSKLKASNFPGTILKIGNWEYKSRYEGDLVAKCYFAKHKLVWEVLDGCLKNKIEIPWSDIMAIKANYPDDGPGTLEVVLARRPLFFREINPQPRKHTLWQATSDFTGGQAGINRRHFLQCPQGLLGKHFEKLIQCDPRLNYLSQQADLVLDSPYFEPGTTSIHDHIESSDGFDRKSEERSGIFGLQDVESGSAVQSSSSKSEHNLGKAVENVSQEITSPSSVMNIHAMKDFRSRGAETLKFLSNLDQIKLPGLHPSMSMDDLVSHIGHCISEQMGSDNPNFAGDNQYSRSILEEFTQYLFNDSQHATTSDEQRVMSKVNSLYCLLQKDPSTAEDMTKNGNSLGDANALSRVNSLYSPSAECRRRNGQKWQWSERXDVMSRVNSLYCLLQKDPYTAEDTNTMTRNGNGLDADEGGKVGVSNSNITELSQPCKTKVSDLEVQADDASGCKQGGTGMSRKESAGDLLLNLPRVASLPQFLFNMSEDSVNKVR

SEQ ID NO: 269626 - protein, 222 aa, Glycine max
  unsure (1)..(222): unsure at all Xaa locations
  Clone ID: PAT_MRT3847_85492C.1.pep
TSFPGTILKIGNWEYKSRYEGDLVAKCYFAKHKLVWEVLDGCLKNKIEIPWSDIMAIKANYPDDGPXARRPLFFREINPQPRKHTLWQATSDFTGGQAGINRRHFLQCPQGLLGKHFEKLIQCDPRLNYLSQQADLVLDSPYFEPGTTSIHDHIESSDGFDRKSEERSGIFGLQDVESGSAVQSSSSKSEHNLGKAVENVSQEITSPSSGNCCSFFLYHLKI

SEQ ID NO: 269627 - protein, 604 aa, Glycine max
  Clone ID: PAT_MRT3847_85493C.1.pep
MVQLMRSDTDNHCLKKVKLEVQDEIPPLHTHKRPKLESPPKQCGSSDESLSIPPASYNPLDEPSPLGLRLRKSPSLLDLIQMRLSQQEESKKKDQKASSSSSSAAAAAAAAAADSKLKASNFPGTILKIGTWEYKSRYEGDLVAKCYFAKHKLVWEVLDGCLKNKIEIPWSDIMAIKANYPEDGPGTLEVVLARRPLFFREINPQPRKHTLWQATSDFTGGQASINRRHFLQCPQGLLGKHFEKLIQCDPRLNYLSQHPDLVLDSPYFEPGTTSVHDHIESSDGFDRKSEERSGIFGLQDVESGSAVQSSSSKSEHNLGKAVENVNQEITSPSSVMNIHAMEDFRSRGAETLKFLSNLDQIKLPGLHPSMSMDDLVSHIGHCISEQMGSDNPSLAGDSQYSRSILEEFSQYLFNDSQHATTSDEQRVMSRVNSLYCLLQKDPSSAEDINTMTKNGNSLRDANALSRVNSLYSLLQHAEDTMTRNGNGLRDADVMSRVNSLYCLLQKDPSTAEDTDTMTRNGNGLDADEGGKVGVSNSNTTELSACKIKVPDLEVQPDDASGCKQGVSGMSRKESAGDLLLNLPRIASLPQFLFNMSEDSVNKVR

SEQ ID NO: 269628 - protein, 110 aa, Glycine max
  Clone ID: PAT_MRT3847_85494C.1.pep
GPKGGKNSQFSFFGIKPPQDTTFFQHGKTKTNKQAGNKIPTPLTKEGGHQLTRANSGKITQKRTNFTRGEREHGREPCLKVYIKRGPLKTFSFKKGPQDRRTKNFKNTRL

SEQ ID NO: 269629 - protein, 69 aa, Glycine max
  Clone ID: PAT_MRT3847_85495C.1.pep
PLPQPQNRTHLNYLFFFINYSPSITFHIILFPLKQKLNLLIFNFKNYIMVFIHNTLIFFSFSHPPLSKI

SEQ ID NO: 269630 - protein, 129 aa, Glycine max
  Clone ID: PAT_MRT3847_85496C.1.pep
SREQSEWNLPLGITAFGHQERGVFHVSSFVIFSFSIFSTCVCLLLSFFVLPISRLPYDLQLERLFFTSLLAGTLRVAHPGVLHLNGAIMRRPSATYFAQLPSVHFSLAKQPPALRIAVLTSCLCSGSYA

SEQ ID NO: 269631 - protein, 39 aa, Glycine max
  Clone ID: PAT_MRT3847_85497C.1.pep
LPGSSKIIFGLHHNFFFFFFFFFFFFFFFFFFFFFFFFF

SEQ ID NO: 269632 - protein, 46 aa, Glycine max
  Clone ID: PAT_MRT3847_85498C.1.pep
VVQFCTIMLRAEVMKALRQARFIYCVNDWDRSCNPYVGVDIAMILV

SEQ ID NO: 269633 - protein, 95 aa, Glycine max
  Clone ID: PAT_MRT3847_85499C.1.pep
SCSSCHSSSYNCMQSRRMMLEYKLFSNAVKFLQFIEVEDCFQSRQCILYILDLHHLFMVYVLAYSHVPVLEFVYTFGTHRLTFEPYVSIGKLVVL

SEQ ID NO: 269634 - protein, 322 aa, Glycine max
  unsure (1)..(322): unsure at all Xaa locations
  Clone ID: PAT_MRT3847_8549C.1.pep
MNFKICTDFIQNKLVLSIPDYVLSRLVSSTWDEVVVLASSDLSLQLRIHAMALLSNYIPFAERHHLQSFLVAADSICCLCNAQPSQDGPILQLSLALIAYACLYSPAEDISLIPQNLWENVETLGSTKHDGKLGDLEKRTCQVLCRLRDEGDEAKEALKEVLSKNSPLLYDPDFANTRESVVQVLGNLTAVHSYFDLFTRKIDQDDMELEEAELELDIIQKEHALPGRMDDSKDWNQIPGLPCKYFLPKKGXSRLQQIRECIRSLEKSKLKEDIIARRQKKLLMRHARQKHLEEAALREADLLQELDRERTAEMEKELEDKI

SEQ ID NO: 269635 - protein, 85 aa, Glycine max
  Clone ID: PAT_MRT3847_854C.1.pep
QKYFIPGKSLEIMPQSPKKKSEFALSPFNSLVHLKIEPYSYVFLQNINKNLKEKKNSYLLLMGGQSTSLISPLAVKNDSRKADAW

SEQ ID NO: 269636 - protein, 145 aa, Glycine max
  unsure (1)..(145): unsure at all Xaa locations
  Clone ID: PAT_MRT3847_85500C.1.pep
RLQVSVRNYLVEPRVIVNVAIGSNPSPESEGEDEGVYHAAVKGVDIVVPFRLQKQPAFYKNQFXVTFIKRFIKGLTLKFDAEQXQLFNKPMXVASKALLSKIKDFLFFVGESMGHDACLVFAYNKDGDVDPSFLDFAXALKQVKC

SEQ ID NO: 269637 - protein, 75 aa, Glycine max
  Clone ID: PAT_MRT3847_85501C.1.pep
NSRFTILTLTFWSLTHCTRSSLCLVTYRGSAPHPRFQSLRLTCAIHLRQHNNVQDNHATLQVDSRGSPGTELEFV

SEQ ID NO: 269638 - protein, 116 aa, Glycine max
  Clone ID: PAT_MRT3847_85502C.1.pep
AVPAIGQIPKLSCTLLRIAHTILCFPSKLYEIPLPRSLSLIKAPTFISRNCSAPKTYISILQLHLLELELYPFKAVKFSIRDGQIRARQGYKIWEFMGGQAHALQRHTRAWCHEIH

SEQ ID NO: 269639 - protein, 230 aa, Glycine max
  unsure (1)..(230): unsure at all Xaa locations
  Clone ID: PAT_MRT3847_85503C.1.pep
DFDLDNTLYFFTAGRYEYRNKGVDMFLESLGRRXLNQKLKASNSSTTIVAFIIMPAATNSYAVEALKGQAVIKQLQETVNIITDRIGQRIFEKAARYSGGEIEDAVIDPRELLTNEDKVLLKRRVIALRRGNLPPIVTHNMVDDNGDLIMMQLRYLKLFNHREDRVKIVFHPEFLSSNNPLIGLEYDEVVRGMSXLGVFPSYYEPWGYTPAECTVMGLPAITTNFVSFGM

SEQ ID NO: 269640 - protein, 59 aa, Glycine max
  Clone ID: PAT_MRT3847_85504C.1.pep
ARGEGRIIILFIHIIFLIWLFTLFDPGQNSDPFFSLYQCFASSHVQKNPGVHLGLPSFW

SEQ ID NO: 269641 - protein, 136 aa, Glycine max
  Clone ID: PAT_MRT3847_85505C.1.pep
LAKCKIGSWVKGVLRVGLGRSSLLYFALLMFFSPWFGPHVYQALWVASEWMLLCTGFYAILSLCKHISNPTPYYWHNRALFLAFWFCCERYSFGASKSSLAARSCQSLRTWLNLYCAFALWGISPPPPPPPPPPPP

SEQ ID NO: 269642 - protein, 77 aa, Glycine max
  Clone ID: PAT_MRT3847_85506C.1.pep
PRARLPLFFLSPRVYASDTLQHFSMEFRYAAAQDRRRPPATPPPHPLSTGAYVFDRPLRGYEVPSGRASQQRVRLLE

SEQ ID NO: 269643 - protein, 66 aa, Glycine max
  Clone ID: PAT_MRT3847_85507C.1.pep
MYTTSVKVMLMFQCSACLETRQKLRISSILPKNVKAITISFWLKMESHIDNVQPNTLVMFDYLNFC

SEQ ID NO: 269644 - protein, 42 aa, Glycine max
  Clone ID: PAT_MRT3847_85508C.1.pep
PYKNKVNKFGLNVFYFPFPFITTLLFPSIDMTHMISLYKACV

SEQ ID NO: 269645 - protein, 98 aa, Glycine max
  Clone ID: PAT_MRT3847_85509C.1.pep
PPRGYGGTPPPQGFGSPPQGGGAGFPPPPPGFGNPPPPGFGDPPRAQKPKKNKFGMGLGAGLLGGPLGGMFFGKMVSEAPDYKAGYNAGFKKAGGFYF

SEQ ID NO: 269646 - protein, 134 aa, Glycine max
  Clone ID: PAT_MRT3847_8550C.1.pep
SCVAKLLTLPSSPIPLSHRITTLDVIVNPSLNSDTASATPPRTSSPLLSSSHWPLSHHLFLHYLPLSNKSLRMSTAPPFVSASSSPASAPLPDATSHARAHQFHADLDQNPRLRIHIYVVVVLLVIIIPFALLI

SEQ ID NO: 269647 - protein, 198 aa, Glycine max
  unsure (1)..(198): unsure at all Xaa locations
  Clone ID: PAT_MRT3847_85510C.1.pep
LERFSKCSEGVELLEKKFDLKLEDIASKEKHLTSDLDGFFYENRKHMEQAQVLLNQMQMEMMVETQNLELEVEKLSLKLSAAHDEKERIASNAMLEVSTLRADKAKLESAFEEAQSKVSLAKKEVDMIQSQYEQKLEDLTTQLAEYKIKMEMLMTEHEKLLKLVEDYKSRELKFKSTINALEXKLTVTEYERPQVMDE

SEQ ID NO: 269648 - protein, 208 aa, Glycine max
  Clone ID: PAT_MRT3847_85511C.1.pep
GLGFPRVRTIRELFEFIVDASITDDAVDSYLEEVQQKILARDVSAEDEIADSVFVQSYIPKTLEDVKNAEEDVQRITSGKDTKDLYYQTITGLKHALSLTQTSQQKTQQQKSSPTKDSPVISDDKSNLLEDDAEGQSGKDEDDESDSEEDSCSESEVEDPADIKAARKEARKENKKKVKEEKREARKTKVPKAVKKRKKKLAKAKKTR

SEQ ID NO: 269649 - protein, 546 aa, Glycine max
  unsure (1)..(546): unsure at all Xaa locations
  Clone ID: PAT_MRT3847_85512C.1.pep
MENDDEHKLHNHTEQVQEQEQEKMKKKKDEVWSSSDSEIGEALDWLDSREEDEGSSFSLTLWRPNAHGGHHHHSSTLQPLANRNQKFSHHIRASPLEEWEGRMNVGMSNSVTTAIRGSVRDMAIGKTKTTEKADRATVEQAIDPRTRMVFGSMLNRGVFHDINGCISTGKEANVYHATKSDTQELAIKVYKTSVLVFKDRDRYVQGDFRFRNGYCKHNPRKMVKTWAEKEMRNLMRLKAAGIRFPTPYLLRLHVLVMEFIGKSGWAAPRLKDAALSLDKLREGYVEIIIAMRTLYQKCKLKCKLVHGDLSEYNILYFEGHLYIIDVSQAVDPEHPHALDFLREDCVHVSDFFKKHGVXAVMTIRELFEFIVDASITDDAVDSYLEEMQHEILTRGDISADDEIADSVFVQSYIPKTLEDVKNAEEDVQRITSGKDTKDLYYQTITGLKHALPTKDSPAVSDDKSKLLEDDAEGQSDEDEDDESNSEEDSPSESEVDDPADKKAARKEARKENKKKVKEEKREARKTKVPKAVKKRKKKLAKAKKTR

SEQ ID NO: 269650 - protein, 93 aa, Glycine max
  Clone ID: PAT_MRT3847_85513C.1.pep
MVHKSIFSELFVHQSHAVGIGGGDVLVTAFAHGSKLIHETVQEALIRARLSVGPIVEREATVTTISIGQSVQGAVRDSRRAMSESRTHEVCAR

SEQ ID NO: 269651 - protein, 80 aa, Glycine max
  Clone ID: PAT_MRT3847_85514C.1.pep
RQNLQFLFGILVLIFLGHLGHQGNCEDKMSIVDSHAVKYSRGETRMNPEMDSNIGQHCHQQNSRLMRYPSSPTSFVTSPF

SEQ ID NO: 269652 - protein, 39 aa, Glycine max
  Clone ID: PAT_MRT3847_85515C.1.pep
KMNGRGNIGKADLEEVCTLYLDAKSSARLLQEQQEKYIS

SEQ ID NO: 269653 - protein, 86 aa, Glycine max
  Clone ID: PAT_MRT3847_85516C.1.pep
LRPAFAWFIVFSVSYICTHTHIHCSFIPFSVSGILSDQSTKYKSLIPFCLFQVLPWFIFICYSCSWSSTIFFPAMYFINILEFLLF

SEQ ID NO: 269654 - protein, 129 aa, Glycine max
  unsure (1)..(129): unsure at all Xaa locations
  Clone ID: PAT_MRT3847_85517C.1.pep
LFNTQEFFDGNFSVDSWLPIFENCLYTVSXLPAEADYGNVTCESGRGGXPTSAWIXTATPIGSMNEHMDLHXLGRGEKIGFFTTADASPGDLLAERLGVQNXIVGSNATDSMFARVCESCKSHKCLVDE

SEQ ID NO: 269655 - protein, 153 aa, Glycine max
  unsure (1)..(153): unsure at all Xaa locations
  Clone ID: PAT_MRT3847_85518C.1.pep
GAEAQPAFFVLGDSLADNXSTSFLASTARAHAPTYGIDFPSGRPTARLSNGYYIPDFISLSLGAXSTLSYLDPELYSQRLLGGANCASDGIAILTDTGLQFGIIILIYPQLEYWPEYQXSVSAMIXPEQTERLINGALFLSTIAGNDYVNNYY

SEQ ID NO: 269656 - protein, 659 aa, Glycine max
  unsure (1)..(659): unsure at all Xaa locations
  Clone ID: PAT_MRT3847_85519C.1.pep
RLVRCLSLLAWNKEETDLHNKDATGQRVLHAFEVDVSMSSNGFSYIIKNLKDLVPVLINSFLEFIXIVHAMKSLEGNSFACMISILHSIYLIVRSIAYGTDRIQNPQVLGEDLXAAVWDVNISSTFLKKLFPRFPLNPVDHLSEKDCDRLFDLNMIVAKIFFELNEWTSLPPNLLETFLEFFENALLGKFCRATQSGKAVWEECLVQLLSFIPKFLSRGASSWTSRLLQAFTQTFRESKPGSLLKLACVSAIEDMLTPIESMLSIETSNPENLELQDALLAWIRELPLLLIQLGDKHPTCSQVVLRLQLRIGQCSLLNSSLVCMYDNTQYSLLDFYCTCQGGQICYGPFLRLPRESQELSLCSLYYFSYLDLPILKSIACCCLSADLDPYVLFRIIEVLHSAYRDGHIKIADYLSVFITLVLRFKVSPEIGSAGFKSDPLCQTLKSMTTVLCSYMAQMGDNSLVLQIVEKVVIDQIPQMPSLDNSCSLLRMLVTVDSKPTRLSEQSIIILGQHLSEYLMDAVQCIPEDGDEQGTPSIQLSTQHYYLLPCFFLFDRCHKLMNLVLKRMGSAITESSLSPISDKCTQHTRNCLDRVNAVTSVLFLMHKDAKLQPIMSLFKEDIDNVIHKVFSLKTSGRISTTIEERHEIQCAFERLKILTG

SEQ ID NO: 269657 - protein, 46 aa, Glycine max
  Clone ID: PAT_MRT3847_8551C.1.pep
MAAPESPLWYVGVGRQSVSFRVMKQMGLEEGEGLGKDKQGVEGSRS

SEQ ID NO: 269658 - protein, 577 aa, Glycine max
  Clone ID: PAT_MRT3847_85520C.1.pep
MGVSILTRFHFSLPLPRATARKRIFHFCPPIACRSSMDQSSGLNLEDLKWDHSFVRELPGDPRRDSFPREVLHACYTQVSPSVQVHNPQLVAFSQDLLDIQRPDFPLFFSGATPLVGAPYAQCYGGHQFGMWAGQLGDGRAMTLGEILNSNSERWELQLKGAGKTPYSRFADGLAVLRSSVREFLCSEAMHHLGIPTTRALSLVTTGNLVTRDMFYDGNPKEEPGAIVCRVAQSFLRFGSYQIHASRSDEDLGLVRVLADYAIRHHFPHIQNMSKSDSLSFCTGDEDHSVVDLTSNKYAAWVVEIAERTASLIARWQGVGFTHGVLNTDNMSILGLTIDYGPFGFLDAFDPKFTPNTTDLPGRRYCFANQPDIGLWNIAQFTTTLQAAHLINEKEANYAMERYGTRFMDDYQVTMTKKLGLPKYNKQMINKLLSNMAVDKVDYTNFFRTLSNVKADINIPDDELLVPLKSVLLDIGKERKEAWTSWLKAYIHEVSTSGIPDDERKISMDSVNPKYILRNYLCQTAIDAAEIGDFGEVRSLLKLVEHPYDEQPGMEKYARLPPAWAYRPGVCMLSCSS

SEQ ID NO: 269659 - protein, 126 aa, Glycine max
  Clone ID: PAT_MRT3847_85521C.1.pep
FSSPQSPPNLFFCSPPTGGGVKVPMAGFSPPPWRDEDLGPFFWGVKTTNGPAPKVYLLGFGPPPPRVILCGQYEILFSPKLGFFKKKGKNFFQGFLGLLAVACFFFFEKGWGVILGFYGFKKGFTP

SEQ ID NO: 269660 - protein, 152 aa, Glycine max
  unsure (1)..(152): unsure at all Xaa locations
  Clone ID: PAT_MRT3847_85522C.1.pep
MDQSSGLNLEDLKWDHSFVRELPGDPRRDSFPREVLHACYTQVSPSVQVHNPQLVAFSQPVADLLDLDHKELPYAQCYGGHQFGMWAGQLGDGRAMTLGEILNSNSERWELQLKGAGKTPYGRFADGLAVLRXSVREFLCSEAMHHLGIPTT

SEQ ID NO: 269661 - protein, 81 aa, Glycine max
  unsure (1)..(81): unsure at all Xaa locations
  Clone ID: PAT_MRT3847_85523C.1.pep
YLSIPTPQXXXLHCQPYPSLWLPLQRVSCPRVIAIQXSLCRIRQTMSQSRAVFLRRACKGXLSSXHXXFVXIGGXCRYWCL

SEQ ID NO: 269662 - protein, 141 aa, Glycine max
  Clone ID: PAT_MRT3847_85524C.1.pep
MDQSSGLNLEDLKWDHSFVRELPGDPRRDSFPREVLHACYTQVSPSVQVHNPQLVAFSQPGADLLDLDHKEFQRPDFPLFFSGATPLVGAVPYAQCYGGHQFGMWAGQLGDGRAMTLGEILNSNSERWELQLKGAGKTPYS

SEQ ID NO: 269663 - protein, 64 aa, Glycine max
  Clone ID: PAT_MRT3847_85525C.1.pep
TIRIRVDLIRNKGLDVWDTIRFLLRIESQCNRRQSRGRSESSAADDESKFWSAIPIAVQRCGVS

SEQ ID NO: 269664 - protein, 39 aa, Glycine max
  Clone ID: PAT_MRT3847_85526C.1.pep
EFQAKKYLLISCEQIFIYSHRKLGICWTIFNVLQSGMTG

SEQ ID NO: 269665 - protein, 99 aa, Glycine max
  Clone ID: PAT_MRT3847_85527C.1.pep
GSLRGEDTRSRFTGYLFEAVNREGFRACKDDHDIMKGESIAPELIRAIEGSQSVLVVCAKDYAFSTWRLRELAHMWNCLQPSARHLVPIFYDVDPSQAP

SEQ ID NO: 269666 - protein, 68 aa, Glycine max
  Clone ID: PAT_MRT3847_85528C.1.pep
LSHSHIHSYTLSLFVAWITDLISIFRYFSTLFLMFLLYSHCMYDSPFGQLNHASFWTFVEMVSYILLN

SEQ ID NO: 269667 - protein, 48 aa, Glycine max
  Clone ID: PAT_MRT3847_85529C.1.pep
PRVRQIEYYFSDANLVKDAFLRSKMDEQGWVPVTLIADFPRVSYLCLV

SEQ ID NO: 269668 - protein, 70 aa, Glycine max
  Clone ID: PAT_MRT3847_8552C.1.pep
GDYLKGKNDPLRGGLPRGKCKRLPLSLKETLITTYPQFGRLIWGVKRTVPNHKLKASQFIIKLAISTPIL

SEQ ID NO: 269669 - protein, 108 aa, Glycine max
  Clone ID: PAT_MRT3847_85530C.1.pep
YTFEPGSSIGMVTKWRKCFPSGALGVCSVITEFALAPNLTKLLPLILPSTALAWTILCLIITTHYPCLLFSVPCELGLIFSLVIITSLTVSPGPIIIIISPSDQFKYE

SEQ ID NO: 269670 - protein, 77 aa, Glycine max
  unsure (1)..(77): unsure at all Xaa locations
  Clone ID: PAT_MRT3847_85531C.1.pep
XDXWLQQXGSTHXTRTAWSPGLLGKVLXSLIALGAFFLNVQPWEXLVEVNGVXXGNHLLXXTXRXXXHXQPXITXXX

SEQ ID NO: 269671 - protein, 53 aa, Glycine max
  Clone ID: PAT_MRT3847_85532C.1.pep
VTLMFSFTFLGWTPYFQEQVYSGSGTLFWEIMKSFNLTYKTYPLNSNFINFEF

SEQ ID NO: 269672 - protein, 266 aa, Glycine max
  Clone ID: PAT_MRT3847_85533C.1.pep
MATNENLPPNVIKQLAKELKNIDESPPEGIKVVVNDDDFSIIYADIEGPAGTPYDNGVFRMKLLLSRDFPHSPPKGFFLTKIFHPNIATNGEICVNTLKKDWNPNLGLRHVLIVVRCLLIEPFPESALNEQAGKLLLENYEEYARHARLYTGIHAKPKSKFKTGAISESTTALNVDQSNTSVLNAEVKTAPSGATLPLQSPLAPSTNNTTRGNKQEQAVVGAEPAVNSSCATSMVHAAAPMKAGGVAKAQADKKKIDARKRSLKRL

SEQ ID NO: 269673 - protein, 33 aa, Glycine max
  Clone ID: PAT_MRT3847_85534C.1.pep
NHEFWFMGFLNYDGAVESLQDALQSGRQIQSEA

SEQ ID NO: 269674 - protein, 137 aa, Glycine max
  unsure (1)..(137): unsure at all Xaa locations
  Clone ID: PAT_MRT3847_85535C.1.pep
CVVKETLRLHLPTPLLPPRVTMFNVKLKGFYIPAKTMVFINAWAMQKDPRFWERPXKFLPKRFXNSQVDFKGQKNFQFFPFGFGKKGCPGMNFGIAFIEYGPASFFYWFDWKLPYPLNVNISEVFGLVVSKKVPLFL

SEQ ID NO: 269675 - protein, 102 aa, Glycine max
  Clone ID: PAT_MRT3847_85536C.1.pep
RKLSYFRLTKFKTNLLDGNLPSLSEISLLIPHRMVYSKEMMIRRVMAHGSIMHNSDWNVNLMKQISISGLCNNLGGARIMQGSISRMVLKEIIYEKLMQDTM

SEQ ID NO: 269676 - protein, 75 aa, Glycine max
  Clone ID: PAT_MRT3847_85537C.1.pep
IFETPSLPPLSDIRGSKTHVQSHGLTPVIGEALLTGQNIIMKILSNANNQYSRLKNCLVARILASIYYIQRAGLT

SEQ ID NO: 269677 - protein, 124 aa, Glycine max
  Clone ID: PAT_MRT3847_85538C.1.pep
AEVAGALEARKNDDYKEINVPAGKTYEVLLSVDAVNSYIAWDFSLVQGTINMDIGFSLEFLSPTGEKTLMLPYRRYESDQGNFCTLMAGSYKLIWDNTYSTFFKKVLRYKIDCIPPVTDSVQSD

SEQ ID NO: 269678 - protein, 434 aa, Glycine max
  Clone ID: PAT_MRT3847_85539C.1.pep
MASTEGLVPITRAFLASYYDKHPFTPLSAHVSTLSSQIRSMANDFLTQHPPIQGESILINEADQQPPHKMDENMWKNREYIEETIFLLQSSNWPEALKQQSTADSVEFAITLGKLKDKLHITLKALESFQTKNAEHVFNTVMTYLPQDFRGTLIRQQRERSERNKQAEVDTLVNSGGSIHDRYALLWKQQMDRRRQLAQLGSATGVYKTLVKYLVGVPQVLLDFTRQINDDDGPMEEQRHRYGPPLYSLTSMILSIQLFLSLSWARYDANNLKMEQITVLEQAVDVYTMELERFLTFISEVFANAPFFISAEVAGALEARKNDDYKEINVPAGKTYEVLLSVDAVNSYIAWDFSLVQGKINMDIGFSLEFVSPTGEKTLMLPYGRYESDQGNFCTLMAGSYKLIWDNTYSTFFKKVLRYKIDCIPPVTESVQSD

SEQ ID NO: 269679 - protein, 201 aa, Glycine max
  unsure (1)..(201): unsure at all Xaa locations
  Clone ID: PAT_MRT3847_8553C.1.pep
DASLLPRKVAARTVCTHALVHICRRIQPIHLVLRLCEAMXIFCMTLCGKTLTLLVESYDALDNCWATMRDEYSFPPYQQRVFFAXKQLVEGRTLAVYSLQKESPLHLVILLLGVMQIFIKTLCGXIITLQLESSDTIDNVKAKIXQDKEGIPPDQXRLIFAGKQLEDGRTLADYNIQKESTLHLXLRLRGGMQIFVKTLTG

SEQ ID NO: 269680 - protein, 126 aa, Glycine max
  Clone ID: PAT_MRT3847_85540C.1.pep
PCVIISREPCYPKEHAGDDKTDSKAKNENAGPSSEKTLDMSWMDPCIEFAIKTLTDTIPSDSADQNPKNCIQLSSVCLDNIYQTDYSCRQYFGTQKPMFHKQSFVDPSLQHTRNIGIVNSAAEARL

SEQ ID NO: 269681 - protein, 220 aa, Glycine max
  Clone ID: PAT_MRT3847_85541C.1.pep
PASDYTLDFPLRAFLTDPCIAFAIQTLTGVTFEASKNSQTSSNLRNSQHSKTSAPTLASGKGDDKKSNDGLGDHELSSLENLAIPQEHAGDAKTDLKAKNENAGPSSEKTLDMSSWMDPCIEFAIKTLTGTIPSDSADQNPKNCLQQQLSSSNSQHSEMALSSVSLDNIYKTDYSCSQYFDTQKPMFNKQSFVDPSLQHTRNIGIGNSAGSRLSHCGERY

SEQ ID NO: 269682 - protein, 40 aa, Glycine max
  Clone ID: PAT_MRT3847_85542C.1.pep
EERFVPMDSFPPLLAKHILQLLALWVMDRTSSLDRQCQLE

SEQ ID NO: 269683 - protein, 229 aa, Glycine max
  unsure (1)..(229): unsure at all Xaa locations
  Clone ID: PAT_MRT3847_85543C.1.pep
KDLNRPWEDPMPESGERHLAQELRGVGLSAYDMPEWKKDAYGKTITFGQRSKLSIQEQRQSLPIYKLKKELIQAVHDNQVLVVIGETGSGKTTQVTQYLAEAGYTTRGKIGCTQPRRVAAMSVAKRVAEEFGCRLGEEVGYAIRFEDCTGPDTVIKYMTDGMLLREIMVDENLSQYSVIMLDEAHERTXHTDVLXGLLKQLVKRRPELRLIVTSATLNAEKFXGYFFNC

SEQ ID NO: 269684 - protein, 95 aa, Glycine max
  unsure (1)..(95): unsure at all Xaa locations
  Clone ID: PAT_MRT3847_85544C.1.pep
LLHFGFCCAFRSRGQPXPYECHIHTLNALDPDHRIESEGGLIDTWNPNSKPFQCAGVALCRXTLNLYDLRRPSYANSAQEIYIQQRDGIFRMIYP

SEQ ID NO: 269685 - protein, 329 aa, Glycine max
  Clone ID: PAT_MRT3847_85545C.1.pep
MPSIPEERLLTPNPDRFCMFPIQYPQIWEMYKKAEASFWTAEEVDLSQDLRHWATLSDGERHFITHVLAFFAASDGIVLENLAGRFTKEIQLPEARAFYGFQIAIENIHSEMYSLLLETYIKDSTEKNRLFRAINTIPCITKKAQWALRWIDASESFAERPRVRACVEGIFFSGSFCAIFWLKKRGLMPGLTFSNELISRDEGLHCDFACLLYSLLRKKLSEERVREIVRDAVEIEREFVCDALPCALVGMNGELMSRYIEFVADRLLDALGCGKVYGAQNPFDWMELISLQGKTNFFEKRVGEYQKASVMSSLNGNGGAHVFKMDEDF

SEQ ID NO: 269686 - protein, 230 aa, Glycine max
  Clone ID: PAT_MRT3847_85546C.1.pep
MASNKLLATILVLSLLFYSTFTHANCPPPTPTPSPSPKPTPPTPPTPKPTPPTPKPTPPTPKPTPPTPKPTPPTPTPTPPTPKAGCPPPSPPKPTPPTPPTPKPTPPTPKPTPPTPTPTPTPPTPPTPKAGCPPPSPPSPPSNKASCPKDTLKLGACADLLGLVNIIVGTPPSSQCCALIKGLADLEAALCLCTAIKSNVLGINLNVPVTLSVILSACQKTVPPGFQCPS

SEQ ID NO: 269687 - protein, 58 aa, Glycine max
  Clone ID: PAT_MRT3847_85547C.1.pep
TIFGKTGKKGSLECPKNESLLKGSSKNQGVEIIFSYHHPQPLISDHQMDRPKQEAIMK

SEQ ID NO: 269688 - protein, 93 aa, Glycine max
  Clone ID: PAT_MRT3847_85548C.1.pep
ISAVPFTDTVAPTDPILARKMRPILMEIVNDDPTKNPANQPPYQDRYAILEPGPSNSLAIASTGYSKDADTGGHDVALWEGTSVPSTKPDVTG

SEQ ID NO: 269689 - protein, 61 aa, Glycine max
  Clone ID: PAT_MRT3847_85549C.1.pep
ELMPERTSNVLTYSMIYLIFLQLFHVVLPTRGINKPHTNYSGGCIYISQGLQIMIIFYGMT

SEQ ID NO: 269690 - protein, 101 aa, Glycine max
  unsure (1)..(101): unsure at all Xaa locations
  Clone ID: PAT_MRT3847_8554C.1.pep
SFENYTSKFRPLMRHKILCSHSPSPSILLLLPSSSYPWLLMVVSFFLTHLLLEVDXSIIFHLVHSTAINLQEAKDSIDEEDPRPTSFTWSYIMFPPPLKMI

SEQ ID NO: 269691 - protein, 213 aa, Glycine max
  Clone ID: PAT_MRT3847_85550C.1.pep
MGTPETSREPCPDRILDDIGGAFGMGAVGGSAFHFLKGLYNAPRGARVVAASQAVRLNAPRVGGSFAVWGGLFSSFDCTMVYLRQKEDPWNSIFAGAATGGFLSMRQGLPAAARSAAFGGVLLALIEGAGIMLNKFLSAQQPMPMIVDEPLPPNGLPGQPVASAPDAASQSSWLGGWFGDGKKDEAAAEATGGSETKVLESFDAPPVPNFEYK

SEQ ID NO: 269692 - protein, 278 aa, Glycine max
  Clone ID: PAT_MRT3847_85551C.1.pep
MATELLQIDPPQLTFTFELKKQSSCLVHLINNNSSHHVAFKVKTTSPKKYCVRPTVGIVKPHGTCDFTVTMQAQRTAPPDLHCKDKFLVQSAVVPKGTTEDEISSDLFVKDSGRLVDEKKLRVVLINSPSSPVNGDLKQDPPSQMLPSLTAEKGMEAAQDMEEDGADKGTFPSTRSVEKVGDMKQVNDAVNLSFATKDSEELKSRLSIMDAKLREAEGTIMKLNEERRRNIREKDLLKQELEMLKKKIKMKRAQEGFPLLFVCVVSIVSMAVGYYIHP

SEQ ID NO: 269693 - protein, 618 aa, Glycine max
  unsure (1)..(618): unsure at all Xaa locations
  Clone ID: PAT_MRT3847_85552C.1.pep
SGFIDWLCEESLGATLNANFQDSYGCCIFFCEEELVSIMFSERLGADESHCQDLQSLSVSKRLVRSVSQKWRKKSNRNSGEEADDVNGVSLRCLNLYGRGGGCKVGADTGDDFGDSSSRRRSSASDEGKGYKPICGPEETAVDCFSYGVKDRFWRRHNRKNSELEELFTNNRMHIFLPDDILEMCLVRLPLTSLMNARLVCKKWRSLTTTPRFLHMRREGSYQSPWLFLFGAVKDGFCSGEIXHALDVSLNQWHRIDAHFLRGRFLFSVAGIQDDIFIVGGCSSLTNFGKVDRSSFNTHKGVLAFSPLTKSWRKMPSMKYARSNPILGVSEVSLDFPTCQSHQSRQDRRFPRSRIGGVSDVYEDPHKLSMRRHCRPAFNETEALSLPSRKTYKFLRQKSEHSSSKGSKRFLLIAVGGLGSWDEPLDSGEIYDSVSNKWTEIPRLPFDFGVARSGIVCGRMFYVYSETDKLAAYDIERGIWIAIQATPIPPRVHGYYPKLVSSDGRLFMLSVSWCEGDGQIGRRNKAVRKLWELDLMYLTWTEASAHPDAPMDWNAVFVSDKSLIFGVEMFKIIGRVLGFFTVCDVSDMANWNHISRDHVTHELDVSSCLTKSVAVLHL

SEQ ID NO: 269694 - protein, 57 aa, Glycine max
  Clone ID: PAT_MRT3847_85553C.1.pep
LLDSLLHEFVVNVISLPCMNLYVYQLLSKGNRHFQQLERLSSMEAQNNNSELLANKI

SEQ ID NO: 269695 - protein, 59 aa, Glycine max
  Clone ID: PAT_MRT3847_85554C.1.pep
NYSSWYSVSLKLTLLISIQISVDYSCHKMYFSLIFLFFFVCTRTPSPKARMIPDLERIK

SEQ ID NO: 269696 - protein, 67 aa, Glycine max
  Clone ID: PAT_MRT3847_85555C.1.pep
STRRSWTLGGRPFGLFFFCNRKKHDAYLYQSIHEMACDKTLFKNYPYRRYLDSILETLLLWAGSRNT

SEQ ID NO: 269697 - protein, 59 aa, Glycine max
  Clone ID: PAT_MRT3847_85556C.1.pep
SRTWSSFRYPYSPHSMKAYLSAGFKLIVYRVRACLLQCRKRRRFEPRLRSPCAVALKKR

SEQ ID NO: 269698 - protein, 111 aa, Glycine max
  Clone ID: PAT_MRT3847_85557C.1.pep
ANEVNLVEWLKTMVGTRRAEEVVDSSLQVKPPLRALKRTLLVALRCIDPDADKRPKMSQVVRMLEADEYPLREDRRKRKSGTASMEIETVKDISGPSDAEKMGISESHVEE

SEQ ID NO: 269699 - protein, 75 aa, Glycine max
  unsure (1)..(75): unsure at all Xaa locations
  Clone ID: PAT_MRT3847_85558C.1.pep
GLXXGFGDDWSVSLSSSVTLVGVVGFLGVSARGGCVGCSVAECSIFSFSGLSASSWFSRPSSLSSRLELEPNRLE

SEQ ID NO: 269700 - protein, 48 aa, Glycine max
  Clone ID: PAT_MRT3847_85559C.1.pep
IFQRGTNICCLTNTMGEGHSTDETYSTSKVNAEICVYFLDIQDTNNLL

SEQ ID NO: 269701 - protein, 222 aa, Glycine max
  Clone ID: PAT_MRT3847_8555C.1.pep
MRSTIVLRLGRRARIPFQRALATQSNNNNTLVFIPLPRCLSATRSFHFQRNSPFGFSSGHGQRRSMFIQTQPTPNPSSLMFYPGKPVMEVGSSDFPNPRSAMNSPLAKSLFAIDGVTRVFFGSDFVTVTKSEEAAWEFLKPEVFAAIMDFYSSAQPLFLDSQAAAAMDTAIHQDDSETVAMIKELLETRIRPAVQDDGGDIEYRGSDLDTGIVKLRMAGACS

SEQ ID NO: 269702 - protein, 72 aa, Glycine max
  Clone ID: PAT_MRT3847_85560C.1.pep
YGGFFTFTGARLKRARQMWVYTGNALRGPSTSPIGPLSNAYPQQQARAPACQGHELPSRRPFHKRRTHFTSE

SEQ ID NO: 269703 - protein, 75 aa, Glycine max
  unsure (1)..(75): unsure at all Xaa locations
  Clone ID: PAT_MRT3847_85561C.1.pep
CTSLLCVGATGLVIYAECLYSLXAGSAMSVFMQASFFMGXYMACIGYGLVLRLGIVGIRIGLFIVAAEEGSHKCG

SEQ ID NO: 269704 - protein, 39 aa, Glycine max
  Clone ID: PAT_MRT3847_85562C.1.pep
MGRRPARCYMQIKNKPYPKSRFCRGVPDPKIRLYDVRMQ

SEQ ID NO: 269705 - protein, 433 aa, Glycine max
  unsure (1)..(433): unsure at all Xaa locations
  Clone ID: PAT_MRT3847_85563C.1.pep
MEDESGLELSLGLSFGGSSAKPKGKNGSSSDTRAEEVGRGGKMVDDFKSMFDNVPQKPESITGTRRTDSPKPEENFFSDLSKAKEDNASLNLNGRGFLVANSNKPVEIEEDKRSEAANKRKMPFDEIRDQKKHDSDVHADLHDRARASHISITEEGSTAENEDVADSETENSTSRPISHHTKEIRGSADSNATDFSGQKRFTGSSEKDFKHAGMTYGASFSVQPVNMLNIPGVMHVMPTAATGERSGAQSVSNGSLPVMFGYSPVQLPMLEKDNSWGLVSRPQQLHPSFVGRGPINSAALQVISNNISEAMPYEGRPLERTKGDGTEAMQGAIIEFSNIKPGLAVDVKFGACGCYPNMPWVSTSGSGPNXRTISGVTYKYSTNQVRIVCACHGSHMTPEEFVRHSNEDQAAAEGNAVLGTVANGNPAASFPTA

SEQ ID NO: 269706 - protein, 77 aa, Glycine max
  Clone ID: PAT_MRT3847_85564C.1.pep
ESHSSIQKSKLDFPDSPVENFNINVQRYKISCGKRQQDCRLLLSPKLYSPLQLPGLHLNGEHTPQGSCENHGMHIQF

SEQ ID NO: 269707 - protein, 116 aa, Glycine max
  unsure (1)..(116): unsure at all Xaa locations
  Clone ID: PAT_MRT3847_85565C.1.pep
FFHAETPEGIMLGFNLCHWMVGHPNARCGGTNRWGDLLSRLWTEGLLRARVRXHFTDKLEGGKTVLATGGFPESTRIALVCAVRSCFRGRSSYDIATICSXNGEIWSWGCTKARTL

SEQ ID NO: 269708 - protein, 51 aa, Glycine max
  Clone ID: PAT_MRT3847_85566C.1.pep
LAVVLNLEICIQVSRRSCFESNIQLMLCWHSSCNNVHLQDRFFQMIIKFLC

SEQ ID NO: 269709 - protein, 134 aa, Glycine max
  unsure (1)..(134): unsure at all Xaa locations
  Clone ID: PAT_MRT3847_85567C.1.pep
FWPASARLSISNVILLRRFSTKVYTTPVALSNDETGWPREEGSRVRAEYPDCLLLPTLGTQHTDHHIFRNPVHTPDPHRHTAPHRSGQSNTPDAGHVAATPHTRLRHRQLPPLRNRTPCGVSNGPLSXLTRWSE

SEQ ID NO: 269710 - protein, 87 aa, Glycine max
  Clone ID: PAT_MRT3847_85568C.1.pep
HAVLVQARDSVVDLFNRIGRSIPVGSRRIWKIPLHPMRRVGVNNGVVVAARLILSIRICVDISSVILDGARADAIQSLATACTPTRP

SEQ ID NO: 269711 - protein, 58 aa, Glycine max
  Clone ID: PAT_MRT3847_85569C.1.pep
HHIPNPNNMCQQIYSPFQNISLFLNKKMFQFICHFRKLKFEFFLSQLYLCLSYLYQVE

SEQ ID NO: 269712 - protein, 119 aa, Glycine max
  Clone ID: PAT_MRT3847_8556C.1.pep
PFLFLGRPRPPCRRVKWGPPRPLQLGPRISKRGDRGDEPNPNPRPGGEKKRNRGIQLKPLKPGPPTHYFALKTPNRATISPPGKRKKDRTGGTNQARVIIKHKGPDGKFITRLPGFPPI

SEQ ID NO: 269713 - protein, 119 aa, Glycine max
  Clone ID: PAT_MRT3847_85570C.1.pep
DTKHREMEAAWITILVLILILSLIGAWKLLNWLWLTPKRLERLLREQGLQGNPYTLLVGDSMEVIKIRKEALSKPITLFSHDIVPRVSSYAQHTLNKHGKNSFIWFGPIPRVTLTDPGL

SEQ ID NO: 269714 - protein, 635 aa, Glycine max
  Clone ID: PAT_MRT3847_85571C.1.pep
TQASSPEEADAVVSVLGEMDAWILCPFFLQGGRYTIEDIHYVDDSDTLVPAGDTEFAKDASFGYKSSNLRDWVEEKTDGQILGSSVASISIQLLRKGGPDAVCQHLCSLQKGSICIVNAASERDMTVFSLGMIKAELMGKRFLCRTAASFVSALMGIISKPPILPNDIGIARERNGGLIVVGSYVPKTTKQVEELKLQCGQFLKSIEVSVEKLAMSPIEEMEEEISRAAELADVYLKAHKDTLIMTSRNLITGKTAAESLDINFKVSSALVEIVKRITTKPRYIIAKGGITSSDLATKALGARCAKIVGQALAGIPLWQLGPESRHPGVPYIVFPGNVGNSTALAEVVKSWTSPIRLTSTKEILNNAEKGGYAVGAFNVYNLEGVEAVVSAAEEEQSPAILQIHPGALKQGGIPLVACCISAAEQASVPITVHFDHGTSKQDLVEALDLGFSSVMVDGSHLSFNENAAYTKFITLLAHPKNMLVEAELGRLSGTEDDLTVEEYEARLTDVTMASKFIDETGIDALAVCIGNVHGKYPASGPNLRFDLLKELHALSLKKGIFLVLHGASGLSKELVKTCIHLGVRKFNVNTEVRKAYMDSLVTPKNDLVHVMASAKEAMKVVVAEKMHLFGSAGRA

SEQ ID NO: 269715 - protein, 65 aa, Glycine max
  Clone ID: PAT_MRT3847_85572C.1.pep
TLKQWDSYLQYDVSSSINFLAECLSCIDDALCPLKLLTDQQHFYDILSPTVSKKPSWPTHCRDTC

SEQ ID NO: 269716 - protein, 75 aa, Glycine max
  Clone ID: PAT_MRT3847_85573C.1.pep
MQMKPPFSHSTSLLRGKARLSPYLFTLIDFILFVAILYGEDFMCIFGQQIQNYYNYPHKLFSTTGEFIVHSLFFI

SEQ ID NO: 269717 - protein, 147 aa, Glycine max
  Clone ID: PAT_MRT3847_85574C.1.pep
CPEFLGDEVLLKGLDSLSVFNCDKFNVSAGFQHLWKLWISNCRDVGDLHALKDMTSLKVLRLRNLPKLESFPNCFGNLPLLCELSIFFCSKLSCLPTSLSLINLQHLTIFGCHPDLEKRCEKETGEDWSKIAHVPYISVGSKHYSPD

SEQ ID NO: 269718 - protein, 440 aa, Glycine max
  Clone ID: PAT_MRT3847_85575C.1.pep
MMGEKSNSNSGDAINSTLLHGKYELGRLLGHGSFAKVYHARHLNTGKSVAMKVVGKEKVVKVGMMEQIKREISAMNMVKHPNIVQLHEVMASKSKIYIAMELVRGGELFNKIARGRLREETARLYFQQLISAVDFCHSRGVFHRDLKPENLLLDDDGNLKVTDFGLSTFSEHLRHDGLLHTTCGTPAYVAPEVIGKRGYDGAKADIWSCGVILYVLLAGFLPFQDENLVALYKKIYRGDFKCPPWFSSEARRLITKLLDPNPNTRITISKIMDSSWFKKPVPKNLVGKKREELNLEEKIKHQEQEVSTTMNAFHIISLSEGFDLSPLFEEKKREEKELRFATTRPASSVISRLEDLAKAVKFDVKKSETKVRLQGQENGRKGKLAIAADLYAVTPSFLVVEVKKDNGDTLEYNQFCSKELRPALKDIVWRTSPAENPTLA

SEQ ID NO: 269719 - protein, 60 aa, Glycine max
  unsure (1)..(60): unsure at all Xaa locations
  Clone ID: PAT_MRT3847_85576C.1.pep
KEGKDKQIDGFHEAGSKGRPRXASMIPHDEPVGQAQRAXSYFDFFPVEVDRQEGAAHFGE

SEQ ID NO: 269720 - protein, 83 aa, Glycine max
  Clone ID: PAT_MRT3847_85577C.1.pep
PLRQNIYSLLRFLSSVMEGVKGVIASKRVDTKLDVNNNGASTIIRKPKPTANADNEHTSPDSHLSTFYNNIGNITNVFCYVYY

SEQ ID NO: 269721 - protein, 438 aa, Glycine max
  Clone ID: PAT_MRT3847_85578C.1.pep
MGEKSNVGGDAINTTLLHGKYELGRLLGHGTFAKVYHARHLKTGKSVAMKVVGKEKVVKVGMMEQIKREISAMNMVKHPNIVQLHEVMASKSKIYIAMELVRGGELFNKIARGRLREEMARLYFQQLISAVDFCHSRGVYHRDLKPENLLLDDDGNLKVTDFGLSTFSEHLRHDGLLHTTCGTPAYVAPEVIGKRGYDGAKADIWSCGVILYVLLAGFLPFQDDNLVALYKKIYRGDFKCPPWFSSEARRLITKLLDPNPNTRITISKIMDSSWFKKPVPKNLMGKKREELDLEEKIKQHEQEVSTTMNAFHIISLSEGFDLSPLFEEKKREEKELRFATTRPASSVISRLEDLAKAVKFDVKKSETKVRLQGQEKGRKGKLAIAADLYAVTPSFLVVEVKKDNGDTLEYNQFCSKELRPALKDIVWRTSPAENPTLA

SEQ ID NO: 269722 - protein, 87 aa, Glycine max
  Clone ID: PAT_MRT3847_85579C.1.pep
LDHRIFFLFSKNHNCPRVRWKNLQAFRNFHDIPQLNNFAAPKHNNRGLVTLLQRKRVLSAHLIEHYFPPKIMITNKKTKRAAGRESR

SEQ ID NO: 269723 - protein, 49 aa, Glycine max
  Clone ID: PAT_MRT3847_8557C.1.pep
LSICPFVKLKDYPNMEVYATYTSTPSPIEVSLLGVPVSIEVARINDLKL

SEQ ID NO: 269724 - protein, 67 aa, Glycine max
  Clone ID: PAT_MRT3847_85580C.1.pep
IMFNWTFMMLVILYTFQILLTYTIQHQLKIQLYPSLVIFKTTKKINVTNKNIIYQVNWSFYKEQTLK

SEQ ID NO: 269725 - protein, 113 aa, Glycine max
  unsure (1)..(113): unsure at all Xaa locations
  Clone ID: PAT_MRT3847_85581C.1.pep
WGXXXCXALXRVFGLGXVSRGVPLACGGVFSGFGWXRXXAVFGXPVWAAPWLXWXLGLXLSLGCXXXPGWVARAGVVPGXRRCRASSPXFLLXVVVVVVPVLXFRXAXPTPGA

SEQ ID NO: 269726 - protein, 100 aa, Glycine max
  unsure (1)..(100): unsure at all Xaa locations
  Clone ID: PAT_MRT3847_85582C.1.pep
MMNKTLLTYFYLFIYILLSSGVILYNKVVTPVKMTFEXYATCVIPISAFFASSLWFGNTAYLHISVAFIQMLKALMPVATFLMACMCGTDKSRCDMFFNM

SEQ ID NO: 269727 - protein, 345 aa, Glycine max
  unsure (1)..(345): unsure at all Xaa locations
  Clone ID: PAT_MRT3847_85583C.1.pep
LKLKLLLLRKLLSLGAAMMNKTLLLTYFYLFIYILLSSGVILYNKWVLSPKYFNFPLPISLTMIHMGFSGAVAFFLVRVFKVVTPVKMTFEIYATCVIPISAFFASSLWFGNTAYLHISVAFIQMLKALMPVATFLVAVMCGTDKARCDVFFNMLMVSVGVVISSYGEIHFNIVGTVYQVTGIFAEALILALTQVLLQKKGLTLNPITSLYYIAPCGFVFLFVPWYLLEKPVXVEYNWLCYFISSSCEVYVLKRLNFSIFXLVPGGTGPVASRGAGVPRGWLRIALSPVTFPASTVTGVLMXGFAFALCGVAMYNYIKVKDARASQLPVQPICTRKVKTQIQDYF

SEQ ID NO: 269728 - protein, 94 aa, Glycine max
  Clone ID: PAT_MRT3847_85584C.1.pep
MASFARGAASLTRIGLSSSKTPLQLIHRRGLADHHGPPKVACWKDPMSPSKWKEEHFVIVSLTGWGLLIYGGFKLATGGKGKKEEVLAKASTEA

SEQ ID NO: 269729 - protein, 76 aa, Glycine max
  unsure (1)..(76): unsure at all Xaa locations
  Clone ID: PAT_MRT3847_85585C.1.pep
ILRNGXRGAGTRIAPGVPHPLIGIGGLKAEPRAFLMAHGCNSHGTHRGCATENGFMGGGIMKQVHSLGSWMVRYNY

SEQ ID NO: 269730 - protein, 83 aa, Glycine max
  Clone ID: PAT_MRT3847_85586C.1.pep
GVMEILLFGLPFGDQPLHFLSWRKFPKPFKTGLGRLNFTPFFILTIWGIFYPTGLPTPKKKKKKGNFPNLIGTLLTAYLFKPS

SEQ ID NO: 269731 - protein, 62 aa, Glycine max
  Clone ID: PAT_MRT3847_85587C.1.pep
LDQHCKVSNSQNLTWIPAPDHQVSHTQSLIVKHKCHHHHPFHTSLVMPPATLSLVSIKYATF

SEQ ID NO: 269732 - protein, 43 aa, Glycine max
  Clone ID: PAT_MRT3847_85588C.1.pep
ILLKPAHKYCKCVFLLGWKKCLSFYLGPVKAGVSCVFSPRFVN

SEQ ID NO: 269733 - protein, 96 aa, Glycine max
  unsure (1)..(96): unsure at all Xaa locations
  Clone ID: PAT_MRT3847_85589C.1.pep
XXRXXLGXXXRLXFTXLXRXXXXXXXXXVEXLXXXSAGPSXXXAAGXXCGXXXXXXMVRXXVRRXVXXXAXRXIXGXXLXXGXRAEFRAXVRVXAX

SEQ ID NO: 269734 - protein, 115 aa, Glycine max
  unsure (1)..(115): unsure at all Xaa locations
  Clone ID: PAT_MRT3847_8558C.1.pep
RLIAHGTPRTIGGGAFAKNAVLIQKPKAVLALWRDLVGDLVIEAPKTTYTHIKWTDDSLIAYGNXADDTINEEAFPHKLVQSGEIQDKVVXKFAQEEXHTAWPTQVRPATTRRAE

SEQ ID NO: 269735 - protein, 71 aa, Glycine max
  Clone ID: PAT_MRT3847_85590C.1.pep
SHVITSQLICNRFHSHDKGLAGGSLSPVQVGVNHEASTRGFRTSCIGWNSQYTCDSYILRSEQHLSQRKNL

SEQ ID NO: 269736 - protein, 473 aa, Glycine max
  unsure (1)..(473): unsure at all Xaa locations
  Clone ID: PAT_MRT3847_85591C.1.pep
MAATYYLLPTSPKTFSPFLRNPPSIPSGHHVSLLGSLLDYPFHCSSRRGNNSVEANCNAKKKNPWLDPFDDGEDPEMEYGSLFADGKQEEDPRPPDDPDNPYGFLKFPSGYAVEIASLALKVRGDVRRCCCVISGGVYENLLFFPAIQLIKDRYPGVQIDVVASERGKQTYELNKNVRWANAYDPDDEFPEPAEYTDMVGVLKNRYYDMVLSTKLAGLGHAAFLFLFMTTDRDRYSYIXPIVNAAGXGFLLSHTIVPQXLNVAYXGYNMYXDWLGKPFREVPRQPVPPLRVSISKKXRKLKELMEAKYEKAGAKKGKYVVIHGIKSDSKASMQSMGDPDSLLPIEVWAEIADVIRDVTPLFVIPHEKERENVEEIFSEDASIVFITTPGQLAALINDSAGVIATNTTAVQLANARQKPCIALFCSEEKGNKFVPRAEEKKCIIISSKTGKLIDIDVEAVKNAVQTFNLSPALV

SEQ ID NO: 269737 - protein, 56 aa, Glycine max
  Clone ID: PAT_MRT3847_85592C.1.pep
CEKTTEGTLSKVITFVVVYDNFCDRQLGKLLLNNFASLVFFLNISSSKVVFLQTFH

SEQ ID NO: 269738 - protein, 38 aa, Glycine max
  Clone ID: PAT_MRT3847_85593C.1.pep
EASTSLHSHPFFTSCSLFGSTGLQIQSPRGFGAYRGFH

SEQ ID NO: 269739 - protein, 120 aa, Glycine max
  Clone ID: PAT_MRT3847_85594C.1.pep
PSFLISSGYFTGKRKAESEVLSKYPNSGIVLRPAFIYGKRRVNGYELPLDLVGEPAEKILRAIENFTKPLSSLPASDLLLAPPVSVDDVALAVINGVTDDDFFGVFTIDQIKDAANKVRV

SEQ ID NO: 269740 - protein, 303 aa, Glycine max
  Clone ID: PAT_MRT3847_85595C.1.pep
MASFLSFLPAVSARPIPTSAFSPKRPLFQTPPTLHFKNHRFAVSCSYAEAGVYANSSSNTIDVVADVRSERIVVLGGNGFVGSAICKAAVSRGIEVISLSRSGRPTYSGAWVDQVTWISGDVFYVNWDEVLVGATAVVSTLGGFGSEEQMKRINGEANVVAVNAAKEYGIPKFILISVHDYNLPSFLLSSGYFTGKRKAESEVLSKYPNSGIVLRPAFIYGKRRVDGFELPLDLVGEPAEKILRAVENFTKPLSSLPASDLLLAPPVSVDDVALAVINGVTDDDFFGIFTIDQIKEAANKVRV

SEQ ID NO: 269741 - protein, 38 aa, Glycine max
  Clone ID: PAT_MRT3847_85596C.1.pep
PTKATLDVILIIFSIYNYSNLYLYLLVYCNQDPSSERA

SEQ ID NO: 269742 - protein, 110 aa, Glycine max
  Clone ID: PAT_MRT3847_85597C.1.pep
TPPLYSTYKLFLSELSFCLCRILNSLSAIYYHSLTRFFHQIKCLRLFPFFSYLKDSCCLKNWYLCQSHLCKCLSCCWLFHNLFHRYIHSTYSTKNSYFLPKSFIFYSFIV

SEQ ID NO: 269743 - protein, 79 aa, Glycine max
  Clone ID: PAT_MRT3847_85598C.1.pep
MASAVDASGNPIPTSAVLMASSKHIGIRCHSENLEFLKCKKKDQNPEKCLDKGRDVTRCVLGLLKDLHQKCTKEMGEYV

SEQ ID NO: 269744 - protein, 183 aa, Glycine max
  Clone ID: PAT_MRT3847_85599C.1.pep
MASSSPSLMFTVRRCQPELVAPATPTPHQLKPLSDIDDQDGFRFQVPIIQIYHNQPSMAGKDPVEVIRQALAKTLVFYYPFAGRLREGPDRKLMVDCTGEGVMFIEADADVTLYQFGGEALQPPFPCFQELLYNVPETEEITNTPLLLIQVQYTLFIIYIFIHFFVQRKKKTFKSHMKILKTT

SEQ ID NO: 269745 - protein, 66 aa, Glycine max
  Clone ID: PAT_MRT3847_8559C.1.pep
NISLATQLDMFAEFEIETLESKRIGKNNIGCGSGGATNEVALGTFGLLPMEDDTLSKKNPKLFFFF

SEQ ID NO: 269746 - protein, 110 aa, Glycine max
  Clone ID: PAT_MRT3847_855C.1.pep
SFFSSRLPFFCRYTLFPRSPDFKNPFPFSPSDQTLLVSPRVFAQCRYPESNTQLDFTHYLSTTTSPEKKKPLLLRMGSGALNPSHAPRILARRPSSSHPNFCPAHPLSPL

SEQ ID NO: 269747 - protein, 83 aa, Glycine max
  Clone ID: PAT_MRT3847_85600C.1.pep
KPKIKRHRKIKPTYREKIKIKETSYQESWIDIAPLSATPGSKQPHPMESSFLKGLNEFSSRAFPLVTKHRGTNLNFPLMMITN

SEQ ID NO: 269748 - protein, 149 aa, Glycine max
  Clone ID: PAT_MRT3847_85601C.1.pep
LANHLKETSEFQLQNLASSLSCIKDFQSKLSSLSLPNNLVDTCFDPLQFVISPNICAGIQTIPDWTKKVGQSTPLNTACRSDLTDISLCDVCLQAGLQVKQKLISIDGNASHSIDCFYFAILYAAGIVNEYGPESNGAVSCIFSISAYS

SEQ ID NO: 269749 - protein, 43 aa, Glycine max
  unsure (1)..(43): unsure at all Xaa locations
  Clone ID: PAT_MRT3847_85602C.1.pep
SQDEKRDPEKLKIEREDLERRQKEKKARLQAEAKAAEEAXRKA

SEQ ID NO: 269750 - protein, 323 aa, Glycine max
  Clone ID: PAT_MRT3847_85603C.1.pep
MEIRADADTSSFSSLFAAVSYGFTSMAMVFINKAVLMQYAYSMTLLTLQQLVTTLLIHFGRKTGYTKARELDMTTAKRLLPLSIFYNANVAFALASLKGVNIPMYIAIKRLTPLAVLVAGCFSGKGKPTTQVALSVILTAAGVLIAALGDFSFDLFGYSMAFVSVFFQTMYLVLVEKSGAEDGLSSLEIMFYNSFLSLPFLMFLIVATGEFPNSLSVLFAKSYSFSFLVILILSLVMGIILNFTMFLCTIVNSALTTTIVGVLKGVVSTTFGFFLLGGVQVHALNVSGLVINTAGGVWYSYAKYHQRKSKAVKLVPDVEAHRK

SEQ ID NO: 269751 - protein, 48 aa, Glycine max
  Clone ID: PAT_MRT3847_85604C.1.pep
PLKSSPCKIFWMFVPPPPKKSVRYYHLLICLFKNPQFFSVVIENFHAQ

SEQ ID NO: 269752 - protein, 132 aa, Glycine max
  unsure (1)..(132): unsure at all Xaa locations
  Clone ID: PAT_MRT3847_85605C.1.pep
MMSAPANLETGGEEKKLEIEKEKEVESQVEVADTESKPWKEQITVRGLVVSMVLGIIYSIIAMKLNLSAGIVPNFNASAALLDFLFVRSWNIVLQKAGFISKPFTRQENTIIQTXAVSCYSIAVHGRIVFLF

SEQ ID NO: 269753 - protein, 68 aa, Glycine max
  Clone ID: PAT_MRT3847_85606C.1.pep
MEIRADADTSSFSSLFAAVSYGFTSMAMVFINKAVLMQYAYSMTLLTLQQLVTTLLIHFGRKTGYTRA

SEQ ID NO: 269754 - protein, 258 aa, Glycine max
  Clone ID: PAT_MRT3847_85607C.1.pep
MASVDKFWAFALALLLLASPLLQVARCQSDSEDVVEAAEESSDIGIVGDDVQDFGDGTFPSAPGIETISVFPKNSARLITAGEETELLVGVKNDGDSSLNVIAIKASVHLPFDHRMLVQNLTAQGFNNGSVPASAQATFPYLFAVSKFLQAGTFDLVGTIIYEIDEHPYQSTFFNGTVEVVESGAFLSMESVFLVTLGVALLVLLGLWIHGQIQYLSKKTKRAPKVEVGTKTTDASTDEWLQGTAYTQSLSSKSKKKK

SEQ ID NO: 269755 - protein, 48 aa, Glycine max
  unsure (1)..(48): unsure at all Xaa locations
  Clone ID: PAT_MRT3847_85608C.1.pep
MKKHNFFAAKKNLYXSSFTITYTEVKTALYNPSHHIHTDLXSLRHIRS

SEQ ID NO: 269756 - protein, 267 aa, Glycine max
  unsure (1)..(267): unsure at all Xaa locations
  Clone ID: PAT_MRT3847_85609C.1.pep
SHKRQWGASWDEQFXLLFWRGIKERRHDYFSWLRITQVLSTAVILGLLWWQSDTKNPKDLQDQAGLLFFIAVFWGFFPVFTAIFTFPQERAMLSKERAADMYRLSAYFLARTTSDLPLDLILPVLFLLVVYFMAGLRLSVAPFFLTVLTVFLCIVAAQGLGLAIGATLMDLKRATTLASVTVMTFMXAGGFFVQKVPIFFSWIRYISFNYHTYKLLLKVQYEHITPTIDGIRIDSGFTEVAALTAMVFGYRLLAYLSLRRMKLLAGN

SEQ ID NO: 269757 - protein, 49 aa, Glycine max
  Clone ID: PAT_MRT3847_8560C.1.pep
TRRRQKGSMLFGRDFLLSFNLYNIFFYSGHTLSHFLCQLTNLNFLIVEF

SEQ ID NO: 269758 - protein, 88 aa, Glycine max
  Clone ID: PAT_MRT3847_85610C.1.pep
KNPPERASPKKKFCFPGKKLPSLFWLAGPLFLKKKNLGGVFKKIFGKIIKMGVVLILFTRIGAILGRGPQKFRGANSGKPHFYPHREF

SEQ ID NO: 269759 - protein, 105 aa, Glycine max
  Clone ID: PAT_MRT3847_85611C.1.pep
NHPSFFFCEPFFQVLNLISVHCPNHKGSCKLQWLSMMLRVVPFLHRTTLILFSTVDLFFWNLLIWFFSRVLIAVIFFSIFFPFYLFANLSLFFIIHHFFIYSLFY

SEQ ID NO: 269760 - protein, 77 aa, Glycine max
  unsure (1)..(77): unsure at all Xaa locations
  Clone ID: PAT_MRT3847_85612C.1.pep
RRSRTNTAAQLXPQELIRXILLRLXVKSLLRXXCVXKYVSVSDXGSPICXFPXCPSCLAXPXVNFRSXXXQLXPRQX

SEQ ID NO: 269761 - protein, 141 aa, Glycine max
  Clone ID: PAT_MRT3847_85613C.1.pep
MGSFPKAKPNNTHTDTNTNTHNRVMGFLLVFFPEENNNTTPTIATKSTKPNLVSSSPSPHSLKRISSSSNNALLSKAQSTISICFLLLFTTLLLFTLSTFEPTHHKPRSIPPKSKLRKNTSSSDVAFPSTALQRMGTLYRR

SEQ ID NO: 269762 - protein, 82 aa, Glycine max
  Clone ID: PAT_MRT3847_85614C.1.pep
FFSMSPPECSQAGKSQETVARLEKLEKGKFLFLFKVMLKELANYLSGESEKTKNLFGAKKSSGREKLNLNSGRAKSNFKYCK

SEQ ID NO: 269763 - protein, 58 aa, Glycine max
  Clone ID: PAT_MRT3847_85615C.1.pep
TALKCIDGLHTMKTNNDITYIDSTGGEALCMQVRSPIGNKKDETLNYLPDLDDAHIGK

SEQ ID NO: 269764 - protein, 87 aa, Glycine max
  Clone ID: PAT_MRT3847_85616C.1.pep
PTPPPPTPRPPPPTPARPTPPQPPPPDHPPNPPTPRQHPPPRALFRRVRLPKPTKVIWQHPAQHARPTRKIPHLFQRRQPRAKRAPP

SEQ ID NO: 269765 - protein, 96 aa, Glycine max
  Clone ID: PAT_MRT3847_85617C.1.pep
RKSGRAPRARKKRLSHFAGEPEEGKTGSRPMRHRTGITQQPKKKHRLKRETTTKQNRQNQREPTRTKTKEDLSKPGTRAKNLTEPSKTTRVGNRRT

SEQ ID NO: 269766 - protein, 179 aa, Glycine max
  unsure (1)..(179): unsure at all Xaa locations
  Clone ID: PAT_MRT3847_85618C.1.pep
AAAPAGAAAALLPGPTPPPINGETGKRRFVSGDGQETTQSTRPSVVEADLRVRVGLXNSAPYIXDVECPKDGEDFTRLHKLIXDKPTTRCFTILPXEYNLAYRRKFLKYVMDHYERXRDKLSCQDGIHPYSMEWTGLANRLLSYGNDILGCDYASYDGLITKQVMSKMADMINRLCGAD

SEQ ID NO: 269767 - protein, 48 aa, Glycine max
  unsure (1)..(48): unsure at all Xaa locations
  Clone ID: PAT_MRT3847_85619C.1.pep
LGXXXLSXXGXXXSLXFKXEINIDSGGIVGFWVSLGXIHXNNPLDSFL

SEQ ID NO: 269768 - protein, 63 aa, Glycine max
  Clone ID: PAT_MRT3847_8561C.1.pep
LYNAYPTPSLSVSVVSLIFVSLVYSFSQRLPLPLPAPLPPSPPPPPPPPPPPPRRRHYTHVAR

SEQ ID NO: 269769 - protein, 369 aa, Glycine max
  Clone ID: PAT_MRT3847_85620C.1.pep
MPKPSEGTEEKHSVPSSAAVMQTDENDKEEDEFSEDDWDAFQSFPVSKSEDGDDSKTEYVAEGKDPSTVKMSSEIESSIGGVEFQECSISKSINSEKELKGDECLEAVKEKHDQTYPSANKPHDNENQEMEEKLQTSVLQEEGTSIPGSELVSCDQKPEEEAKMEEKLQNSGLQEEGISILGNERVYCDHKPEVEAEMEEKLQNSGLQGEGTAIPRNERVSCDQMSEVEAVMEEKLQNLGLQEEGTSIPGNERVSCDQKPEVEAEIEEKLQNSGLQEEGTSIPGNEQVSCDQKREVEAEGSIEEEVVSDSPTLQQGFSEPGNSEQLNRCDEDAEKDSVNENESHHPQLEMSETPIECTKLEPFAEDHKE

SEQ ID NO: 269770 - protein, 70 aa, Glycine max
  unsure (1)..(70): unsure at all Xaa locations
  Clone ID: PAT_MRT3847_85621C.1.pep
XPRGXNDLKXXRFSREXFNKWQAQRWWAENYDKVMELYNVQRFNRQAFPLPTPLRSXDESSKLESVXESP

SEQ ID NO: 269771 - protein, 57 aa, Glycine max
  Clone ID: PAT_MRT3847_85622C.1.pep
NQFHGRHYSLVRPSPFFFFLHSNCLYLALHGYSFKGRKDYYNQYTTYTVSFINLYIN

SEQ ID NO: 269772 - protein, 43 aa, Glycine max
  Clone ID: PAT_MRT3847_85623C.1.pep
LTRHTHVKHLGALRLTQSSNQWLHFSRLDAHMVLIRLGHTQKH

SEQ ID NO: 269773 - protein, 709 aa, Glycine max
  Clone ID: PAT_MRT3847_85624C.1.pep
GSRDAFSAAVIVNIAFSFIPASFAVSIVKEREVKAKQQQLISGVSVLSYWASTFIWDFVSFLFPASFAIVLFYVFGLDQFVGGVSLLPTILMLLEYGLAIASSTYCLTFFFFDHTMAQNVVLLIHFFSGLILMVISFIMGLMPSTMSANSFLKNFFRISPGFCFADGLASLALLRQGMKDKTSDGVFDWNVTGASICYLAVESFSYFLLTLALEMFPSLNLTSFMIKKWWGKINIFQHNNPYLEPLLESSSETVAMDFDEDVDVKTERNRVLSGSLDNSIIYLRNLRKVYFEEKHHGRKVAVDSLTFSVQEGECFGFLGTNGAGKTTTISMLCGEECPSDGTAFIFGKDICSHPKAARRYIGYCPQFDALLEFLTVREHLELYARIKGVPDFAIDNVVMEKLTEFDLLKHANKPSFSLSGGNKRKLSVAIAMIGDPPIVILDEPSTGMDPIAKRFMWDVISRISTRRGKTAVILTTHSMNEAQALCTRIGIMVGGRLRCIGSPQHLKTRFGNHLELEVKPTEVSSADLQNLCQAIQERLLDVPSHPRSLLNDLEICIGGTDSVTSGNTSIAEISLTREMIGLIGRWLDNEERVKTLISGTPVCDGASQEQLSEQLFRDGGIPLPVFSEWWLSKQKFSEIDSFILSSFRGARCQGCNGLSIRYQLPYNEDFSLADVFGLLERNRNRLGIAEYSISQSTLETIFNHFAANP

SEQ ID NO: 269774 - protein, 138 aa, Glycine max
  Clone ID: PAT_MRT3847_85625C.1.pep
KPKTKKIMWGPPAAGGQRGTQKKKPIHDGGGPPAPPKKKGGGGVYWVKKHPKKRREGGLGIFVLQITQGAGNPKNKGRGPGPHPWGFLAPKTRRPPRAQGGDPFRDGKRGAKSPDYGLLPLNRGGGGGAKPFYCWEGG

SEQ ID NO: 269775 - protein, 60 aa, Glycine max
  Clone ID: PAT_MRT3847_85626C.1.pep
QVIWVITGFPQSQRSKISCSSSTLGFPFKEVLSFHRKVGYLIHSETFCPFFFFFFFFFFI

SEQ ID NO: 269776 - protein, 302 aa, Glycine max
  Clone ID: PAT_MRT3847_85627C.1.pep
MEPSKNNAQSKEDDTVALRRKRARRVSFADNEITSVHVFRRDDDDDSTSSPSEPPSSSDPSILGFFRDLASDSDDDEQPKLEDEAEAAANSFLRPVGSPSPGGSITADYDDDDDFGGPVSAHFVRPDRLSDSGVLEDITMDSTAFSLHYQSLAGSDSGDIKTRQFVRLGTPSSQGSYMELTEATKRPAEVVLDANSAGKDSNDMSIEVDHQMSFGYDIPSPAFDAAAAILAEGAPKESPHHSLEGSVISPVTHLHQIQPSDSSIKENKEFNVVKSRRKWVTSFLIVKGLCPCGGNPWGGSGL

SEQ ID NO: 269777 - protein, 136 aa, Glycine max
  unsure (1)..(136): unsure at all Xaa locations
  Clone ID: PAT_MRT3847_85628C.1.pep
MNIPTVLALPFPAQGHVNPMMTFSQKLVENGCKVIFVNTDFVHKRVVRSMVEQQDHSLDDSSSLLKLVSIPDGLGPDDDRNDQAKLCVAIPSSMPEALEELIEDIIHFEGEKYRISFICADLCMAWALDXGNKFGI

SEQ ID NO: 269778 - protein, 34 aa, Glycine max
  unsure (1)..(34): unsure at all Xaa locations
  Clone ID: PAT_MRT3847_85629C.1.pep
GQIQMSLLTKKXIKLIRKXSKSNSFHKLKYTSIF

SEQ ID NO: 269779 - protein, 173 aa, Glycine max
  Clone ID: PAT_MRT3847_8562C.1.pep
MGDLEKQERVGENERLLEGMPVLDFDMLCSSVALQSAHGSWGKLGGGDEEQLLDCFDDRRIAFESAFCPCYRFGKNMKLAGFGSCYIQAIVYFLLAIGAFVTFIAYTITRTHYFLYPAVALIIVVGAYLGFYRTRMRKKFNIKGSDSSLDDCIYHFVCPCCTLCQVISNFSLL

SEQ ID NO: 269780 - protein, 129 aa, Glycine max
  Clone ID: PAT_MRT3847_85630C.1.pep
VLEAFSERYYDQAQNILANKDAALLLSYSSVMLNTDQHNSQVKKKMTEEDFIRNNRRINGGNDLPRQFLSELYHSICKNEIRTTPKQGSGFPEMTPSRWIYLMHKSEKSAPFIVSDSTAYLDYDMFSKM

SEQ ID NO: 269781 - protein, 301 aa, Glycine max
  Clone ID: PAT_MRT3847_85631C.1.pep
MLCLGRFGGVSHYPIKSGWSRRDYTNNRPRWCLMAAQESDSSFAPSLDSDKTASAGFCIIEGPETVQDFAKMELQEIQDNIRSRRNKIFLHMEEVRRLRIQQRIKSAELGILSEEQENELPNFPSFIPFLPPLTSANLKQYYATCFSLIAGIILFGGLLAPSLELKLGLGGTSYADFIESLHLPMQLSQVDPIVASFSGGAVGVISALMVVEINNVKQQEQKRCKYCLGTGYLACARCSSTGALVLIEPVSTVKGGDKPLSPPKTERCSNCSGSGKVMCPTCLCTGMAMASEHDPRIDPFD

SEQ ID NO: 269782 - protein, 216 aa, Glycine max
  Clone ID: PAT_MRT3847_85632C.1.pep
IGRMLSLGRFGGVSHYPIKSGWSRRDYTNNRPRWCLMAAQESDSSFAPSLDSDKTASAGSLFYACILSLSFFLSSFFHSILSADSASLKAQKRYRILPRWNFKKFRTTFEVGGTKSSYTWKRSHLPMTSYILLLFLRERVLQLDISLLLFLYSTISDIEVVLLAMVLFPSIKIMLIYYFFFTDFPNLVQNLFKIQIAIHASYSLGSPFLKQHPLIL

SEQ ID NO: 269783 - protein, 311 aa, Glycine max
  Clone ID: PAT_MRT3847_85633C.1.pep
MSEPPKTRAVICVGDIHGFITKLQSLWKNLEGSLDRSEFETATLIFLGDYCDRGPATRQVIDFLISLPSRYPRQKHVFLCGNHDLAFAAFLRLLPAPADGCGFSEGWREYEASEEREGWFKGEGYEDMHLQGRRWSGKIKVKFNTVKGTEYQGSIYDAGPTFESYGVPHGSAGLVKAVPDDHKKFLADLVWVHEEDDVFVNTDDGVKCCKLIAVHAGLEKGKDVKEQLKLLKARDTRVPKVEALSGRKSVWDIPEELTASPAIVVSGHHAKLHVEGLRLIIDEGGGYKDRPVAAIILPSMKIIRDTDELAK

SEQ ID NO: 269784 - protein, 210 aa, Glycine max
  Clone ID: PAT_MRT3847_85634C.1.pep
RRLVKDILNLVYICECNGLPEVAEYWKQVIKINDYQKSRFVNRVVSSMFNTVATKKIAILGFAFKKDTGDTRETPAIDVCKGLLGDKARLSIYDPQVTEDQIQRDLWMNKFDWDHPIHLQPTSPTTEKKVSVVWDAYEATKDADGVCILTEWDEFKTLDYQKVYDNMRKPAFVFDGRNIVDVEKLRDIGFIVYSIGKPLDPWLKDMPAVA

SEQ ID NO: 269785 - protein, 83 aa, Glycine max
  unsure (1)..(83): unsure at all Xaa locations
  Clone ID: PAT_MRT3847_85635C.1.pep
RIXLAKLIEPHLPIRPLLNIPGALGKLKRRQVQKTVXLNMTVLLPPLSQSNLHPTNRKLLVKSKTLTGKLHAKNKLTNLKSFC

SEQ ID NO: 269786 - protein, 53 aa, Glycine max
  Clone ID: PAT_MRT3847_85636C.1.pep
EGKLSNMHAWMAWSSFLYPNEDFSVWCQIVVVVASLPTMTSWVNVTDAVVIEI

SEQ ID NO: 269787 - protein, 45 aa, Glycine max
  Clone ID: PAT_MRT3847_85637C.1.pep
KIIVSTRVHTLSMNPVSPTTRILLYCSYNSRCIAQHVLGITRITH

SEQ ID NO: 269788 - protein, 105 aa, Glycine max
  Clone ID: PAT_MRT3847_85638C.1.pep
MLCACSSGEQFKFEEPPHSPESLATRDFSASGLSSRTGEWEPKFDDTQVEEAESTLKDALSLNYEEATALLGRLEYQRGNFDAALQVFQGMDITGLTPRMIKAIA

SEQ ID NO: 269789 - protein, 59 aa, Glycine max
  Clone ID: PAT_MRT3847_85639C.1.pep
KTWGFRIPQMSSMLLRRSQKFKKLSRKNRWWSLKKIKPPKYLKLKNLLDKRICCSLCTP

SEQ ID NO: 269790 - protein, 246 aa, Glycine max
  Clone ID: PAT_MRT3847_8563C.1.pep
MGDLEKQERVEEDAEGEKERLLEGMAVLDFDMLCSSVALQSSHGSWGKLGGGDGDEEQQGGVLRMWEGELLDCFDDRRIAFESACCPCYRFGKNMKLAGFGSCYIQAIVYFLLAIGAFVTSIAYTITRTHYFLYLAVAFIIAVGAYLGFYRTRMRKKFNIKGSDSSLDDFVYHFVCPCCTLCQESRTLEMNNVQNGTWHGRGDTICIGGFRDESKALCELRPPSVVSIMPNDENCMEKSTDVSNGS

SEQ ID NO: 269791 - protein, 83 aa, Glycine max
  Clone ID: PAT_MRT3847_85640C.1.pep
SRVISVYFLLRSALYLNFIIDTNWPTFPRAIQGYSSPSFKDERECKKGQTTMSSVYTSMRARLSLEPKIARDMKTVWKRNEFT

SEQ ID NO: 269792 - protein, 100 aa, Glycine max
  Clone ID: PAT_MRT3847_85641C.1.pep
AKGKYIAFVTTEAETDNPEVELKPGIALFGPVDEIFYGPYARFDPSNDHEAEGCFISPSYDAPPPFETPVKNVVELSSKIPGKVFDLSVDLSAARAATKK

SEQ ID NO: 269793 - protein, 75 aa, Glycine max
  Clone ID: PAT_MRT3847_85642C.1.pep
LGKNIFQIKFASYGLPQGTCGTFRKGSCHAPKSYDAPQKNCIGKQSCLVTVAPEVFGGDPCPGIAKKLSLEALCG

SEQ ID NO: 269794 - protein, 76 aa, Glycine max
  unsure (1)..(76): unsure at all Xaa locations
  Clone ID: PAT_MRT3847_85643C.1.pep
TWMPGGEQLFQFDPDKRIVIRFMICHITSSYSILNRAIYSQETHHNYFLRLQHLDGSHELSAXDKHIFSTAVLMWN

SEQ ID NO: 269795 - protein, 185 aa, Glycine max
  unsure (1)..(185): unsure at all Xaa locations
  Clone ID: PAT_MRT3847_85644C.1.pep
MQHILVPLGSKEQQSMYFLHYHRPHHRCYLSMNGCREGQHQHARTRNNPVGTIETRTLAAVASPAMAMYSLNMAISELKSDALFGTSSGIVRVQVPIEEQVEAIDWLHSQNHLLLPRCFFFGRKQCSSPCCINGEEKLVSVAXGVGSAVFFSQPHPFSYWDWISIRRFLSERCPLIRAYGAIRFN

SEQ ID NO: 269796 - protein, 152 aa, Glycine max
  Clone ID: PAT_MRT3847_85645C.1.pep
MKARDRIRGRERERMEKKEEKVVVGVPVPVYYGGENEYQRGIIPPNAVFGDPKGIPIQQTIYRDTPAPFNCPYCAHTALTTVRSKPSLAAFVGCLMPMMLGVCFLCPSMDCLWHKYHYCPKCQEKVADFEKSDPCVVMDPPHWTQESFALSG

SEQ ID NO: 269797 - protein, 54 aa, Glycine max
  Clone ID: PAT_MRT3847_85646C.1.pep
KYYLIHRTTGSLTKQHGQILWLTCNSKKPLNNLIFCLLVKEFTFLRRSSHISLA

SEQ ID NO: 269798 - protein, 87 aa, Glycine max
  Clone ID: PAT_MRT3847_85647C.1.pep
PTLTRTTPLREVMSHKAAKNHHDDEDADNDMTVALTHHSSRERITGTVSKHIGQCTNSHKMRIMCLSYEECQGTRMQKNQNTWRQVM

SEQ ID NO: 269799 - protein, 60 aa, Glycine max
  Clone ID: PAT_MRT3847_85648C.1.pep
LEPNRLELEPSYQPPVTFVVVQKRHHTRLFSNNHDDRNSTDKSGNILPGIFFLTSVIFYH

SEQ ID NO: 269800 - protein, 171 aa, Glycine max
  Clone ID: PAT_MRT3847_85649C.1.pep
MDALTLSSSVNISKPFHFLTLSKKQQRERHPRTQFGVSCRGRKELGGGVEDNLYKVLSLSPKSATTDDIKKAYRSMALRYHPDVCQDCSKKEESTRMFVQLNAAYQTLSNPRLRAEYDCELGLRSEKIGVGDETWRYIWQNQLAELKRRSHIRMAQNQGSWGSRIRPQNIN

SEQ ID NO: 269801 - protein, 238 aa, Glycine max
  Clone ID: PAT_MRT3847_8564C.1.pep
MGDLEKQERVGENERLLEGMPVLDFDMLCSSVALQSAHGSWGKLGGGDEEQQGGVLRMWEGELLDCFDDRRIAFESAFCPCYRFGKNMKLAGFGSCYIQAIVYFLLAIGAFVTFIAYTITRTHYFLYPAVALIIVVGAYLGFYRTRMRKKFNIKGSDSSLDDCIYHFVCPCCTLCQESRTLEINNVQNGTWHGRGDIICIGDIRENKALYELRPPSIVSIKSTDENCMEKSTDVSNGS

SEQ ID NO: 269802 - protein, 70 aa, Glycine max
  unsure (1)..(70): unsure at all Xaa locations
  Clone ID: PAT_MRT3847_85650C.1.pep
LIFDFFTFLFCISFSIIFLLILLYFLLFFIFIYIFIXLFFFFFFYYFFFFLFFFYYLFFFFFFYFFFYFY

SEQ ID NO: 269803 - protein, 132 aa, Glycine max
  unsure (1)..(132): unsure at all Xaa locations
  Clone ID: PAT_MRT3847_85651C.1.pep
SRVHVSQSLFALLSLTHSPCSSSCGFLCRTRTKRREILHIQRGQCGNQIGAKFLKEVCAEQRFDXTVRYQWNNQLQLERVGVVYNESKCRRFLPISLLMDLEPGTMDSLLSVPYWEMLRAENFFFXHSGAGN

SEQ ID NO: 269804 - protein, 56 aa, Glycine max
  Clone ID: PAT_MRT3847_85652C.1.pep
RSRILCMSSGRIKVRSSRQIISDYYQDRHGHTHYVVNLFWYMKSNAGVHLRFSNFG

SEQ ID NO: 269805 - protein, 76 aa, Glycine max
  unsure (1)..(76): unsure at all Xaa locations
  Clone ID: PAT_MRT3847_85653C.1.pep
KSYFDIISVQQTIKRFYYFLIFLINHILNNSITNFYFSYSNQLSNDNLTMIWLIYFVLIHVISKNXLIIIVNAINL

SEQ ID NO: 269806 - protein, 145 aa, Glycine max
  unsure (1)..(145): unsure at all Xaa locations
  Clone ID: PAT_MRT3847_85654C.1.pep
MMEKLRRVVNEIAYAQTLSHLPPLHRSLVPFLSIASSLYKLAVSLRCSLYQRRFFQLHRLPVPVISVGNLSWGGNGKTPMVEFIALCFCHYGISPLVLSRGYGGGDEVNMLRRHLLGTPTKFGVGANRAAVASRXIQKYGYVDIG

SEQ ID NO: 269807 - protein, 68 aa, Glycine max
  unsure (1)..(68): unsure at all Xaa locations
  Clone ID: PAT_MRT3847_85655C.1.pep
FFPRFXVXXXXRVPGVFXXAFSSPXXASFLXXFSXXXXPSXXVSXXSVXXXXRXXLCXGPLGXLXFXC

SEQ ID NO: 269808 - protein, 59 aa, Glycine max
  Clone ID: PAT_MRT3847_85656C.1.pep
CLILWSVQRMFIGPLVFTFGTESEPPRVIRVECLFCCIYRGYLISLETNFLENEKKKKK

SEQ ID NO: 269809 - protein, 88 aa, Glycine max
  Clone ID: PAT_MRT3847_85657C.1.pep
MKESGFENNDTKQAAADVLFLYSKFAMACIGCKARPCDLRFHLMKEISGMPSSLNRESPQNAASPDAMGESSSTGTARLDRTDSFRAL

SEQ ID NO: 269810 - protein, 459 aa, Glycine max
  Clone ID: PAT_MRT3847_85658C.1.pep
MESDLGKLFIGGISWDTDDERLKEYFGKYGEVIEAVIMRDRTTGRARGFGFVVFADPSAAERVIMDKHIIDGRTVEAKKAVPRDDQQTINRQTGSIHGSPSPGRTKKIFVGGLPSTITESDFKKYFDQFGTITDVVVMYDHNTQRPRGFGFITYDSEEAVDRVLYKTFHELNGKMVEVKRAVPKELSPGPTRSPLIGYNYGLNRTSSFLNSYAQGFNMNPIGGYGVRMDGRFSPLTSARSGFTPFGSSGYGMGVNLDLGLNPSYGGTSGYGGNLGYGRMSPFNDGNSNRYTTPIGNSGGNGRSGSLMNSASRSVWGNGGLNNAVNSPVSPGAYLGSGSGTFGVSIGNAGTNWGPSVPTQGGGAASGYSTWGSYEGGDNSIGLGGGGYGRNSSPSVPQSSTFTAPTGDYEGSYGDLYRSGSVYSDSTLRSAASEIDASGSFGYGGLGGIASDDLVKSSEG

SEQ ID NO: 269811 - protein, 81 aa, Glycine max
  Clone ID: PAT_MRT3847_85659C.1.pep
AEIVLIFLGRVSYLKLADLFPEGPISQPLKKKKGGTLGLTPPFKGPKPWTWRKGRTGPLFSKEVGLTQNPGGPETLPRLIP

SEQ ID NO: 269812 - protein, 95 aa, Glycine max
  unsure (1)..(95): unsure at all Xaa locations
  Clone ID: PAT_MRT3847_8565C.1.pep
EFVSRRDPLAHLSFPPGFRFYPTGDDLLVQYLCRNVFGPHFSLSIIAEIDFYKFVPSPLPFKAAFGGKECYFXRPRFRIYPFVLRPNSQRDFCFL

SEQ ID NO: 269813 - protein, 275 aa, Glycine max
  Clone ID: PAT_MRT3847_85660C.1.pep
MESLEERVFMLMNEQYYYSNSNVSDQLHMHHHRSVSVENLNLWWENNTDSDDSAERILYWESQISLLQEILERYHLSGSKLRLEVGRIIKEVKASDFCSCLKANSSDCITCLRRRVVDGLCERGFSTNLCISKWRTTKKFPGGCHEYIEVIANTSTRKKIHFLVELELREQFQIAKASENYRKLVSCLPEFYIGKLEYLTAIVRVMCNAAKKSMKEKKMHVGPWRKSSFMQMKWSGFNQICNSNKSLGSVATYPHAQASESYFRISGAPTPLVVT

SEQ ID NO: 269814 - protein, 86 aa, Glycine max
  Clone ID: PAT_MRT3847_85661C.1.pep
TESSFAEPVNHSSSQTGDAIRRVSLQAAEAVRSEIPNTKFARLSHRSRCCFPTIGLDSPQTQSDDDAYAADLIHWNWNNNIVHSST

SEQ ID NO: 269815 - protein, 99 aa, Glycine max
  unsure (1)..(99): unsure at all Xaa locations
  Clone ID: PAT_MRT3847_85662C.1.pep
LISYIIYVLGCHEYIEVIANTSTRKKIHFLVELELREQFQIAKASENYRKLVSCLPEXYIGKLEYLTAIVRVMCNAAKKSMKEKKMHVGPWRKSSFMQM

SEQ ID NO: 269816 - protein, 69 aa, Glycine max
  Clone ID: PAT_MRT3847_85663C.1.pep
TPDVYPLAARTNSSTASYVAQPFLSSVSQHKSFQLFHPILGVRARRITRKDLSIVSVYKLPVAVLFSNQ

SEQ ID NO: 269817 - protein, 169 aa, Glycine max
  Clone ID: PAT_MRT3847_85664C.1.pep
LLIPSNLSSIDSFDITASLASNVVGSDSEPENTNFLEPAFFSDLPIYYLQNQCTQNSTFSVSLQIAGISKQQEVICAQGLRLWRNSSSEVNNELYKGYRRSNTERQINEIAAGYDFLNSNRSIFNVSIWYNSTYKNDTGSNQIALARIPRSVNLVSNAYLQFLLGPWSK

SEQ ID NO: 269818 - protein, 80 aa, Glycine max
  Clone ID: PAT_MRT3847_85665C.1.pep
LGGFFPGGNIFGKPGDWDGFWKVGPGPSNFFLLKNGPLFWSLGLIDSVVFMPFIVRLPCSFVPLPSKLNTFGKGLFFFYP

SEQ ID NO: 269819 - protein, 296 aa, Glycine max
  unsure (1)..(296): unsure at all Xaa locations
  Clone ID: PAT_MRT3847_85666C.1.pep
MMSYAIGALVVPSPTPLPFLNSTAPVEVEHGHGLGVKPIQDGYKWRFVLAYDGTKYAGWQYQQSPPTVQCTVEKALTQATKLQRKDLCLVGASRTDAGVHAWGQVAHFFTPFNYDNLEQLHAALNGLLPTDIRIREISPASAEFHARFSAKTXVMREAATYFVGKHDFSAFANASHNDRVPDPVKHVFRFDLKEMGALLQLEVEGSGFLYRQVRNMVALLLQIGREAIPPDIVPHILASRDRKELAKYSLPAPPHGLCLVSINYNESHLLPPPESPPANSFGRHQTIRKCKVPFFL

SEQ ID NO: 269820 - protein, 79 aa, Glycine max
  Clone ID: PAT_MRT3847_85667C.1.pep
RKKSKKKKKKKKKKKKKKKKKKKKKKKKKKKKKKKKKKKNQIPGGPPKRFKPNLPFQASSNPSKRAPKFQSTALRLKTS

SEQ ID NO: 269821 - protein, 42 aa, Glycine max
  Clone ID: PAT_MRT3847_85668C.1.pep
FFFFFFFFFFFFFFFFFFFFFDEKGVKKSNFMFGVQKLNLIS

SEQ ID NO: 269822 - protein, 204 aa, Glycine max
  Clone ID: PAT_MRT3847_85669C.1.pep
MACLHDHSCEDHDCSSNWSLYKHIDLSKVTALNEANPGSVKSVFKAWEERLDSSGVHLESNEGDPELLVFIPFTSDVKIKSISIVGGADGTSPSKMRVFINREGIDFSDAQSMQAIQEWDLVENMQGVLEYQTRYSKFQSVANITLHFPENFGGDTTKIHYIGFKGEATQLKRDVVATIVYELMPNPSDHKTRAESGGGLSHIE

SEQ ID NO: 269823 - protein, 364 aa, Glycine max
  Clone ID: PAT_MRT3847_8566C.1.pep
FSVYFTGNVYDNLSSEVKQGNEVQNDGSNALGNYVQYHEGQGYDGSLESHTNRQGDGLNASANHVQYQEGETYVASSEEHTNGQDLSSSQYWEDLYPGWKYDYKTGQWYQIDGYRATATTQQSSEANIAVARGAASDGKTEISYMQQTAQSVAGTLAESGTTKNVSSWSQVSEGNNGYPGHMIFDPQYPGWYYDTIAQEWRSLETYNSTIQSSSLGLENGHASANTFSPNDNSLYSEYSQTDNYGLQGIDNQAVDGSWSGLYGTNHKQGFDMYTTGSVTTRGDSITSGGNQQINHSYGSSISVNEHQQNTSSSFGSVALYNRVNHDRGLANGTFEPQSFGPTGDTAQQLNYSTTKLSEQKVVSN

SEQ ID NO: 269824 - protein, 153 aa, Glycine max
  Clone ID: PAT_MRT3847_85670C.1.pep
RVLIGKVRAAKRGMAKVAKPSSVPSSSHQLGSGPLKTGSMARKKTPSELRTRRLRSFYDVDNSPESLLAFSGNNNVHALYDFLLNYSFVTEPSSIGLNVALKSTCEKPESKAAGSESLQDHGSTFGIPEAVVTSRLCSCSLKGVSTLSGMRTC

SEQ ID NO: 269825 - protein, 216 aa, Glycine max
  Clone ID: PAT_MRT3847_85671C.1.pep
MASLQTTSIFSSSSFSSSLRKVNASIHVPNPPRVTYSVPKAPTRKLQVEELINGSVDSTPLEKNAFTTHIYEGLFSPSKKSNMATVQLYSILEAVADRIEMHKNICEQRNNWNTLLLNSINMITLTATAMAGVAAATSGDTTPLLALKLSSALLFSAATGMSLIMNQIQPSQLTEEQRNATRLFKQLHTQIQNIIALGNPTEKDVKGSMEKVLALD

SEQ ID NO: 269826 - protein, 527 aa, Glycine max
  Clone ID: PAT_MRT3847_85672C.1.pep
MKLTRKNKFISMTETVGGDFYISRPLLSLSIHAPFPSLTVFISLIAKSISMASEDRNEEELHVLLVAFSAQGHINPLLRLGKKLLSRGLHVTLATTELVYHRVFKSSAATPTATVPTSITTNGIQVLFFSDGFGTGLDNKTITPDQYMELIGKFGPISLSNIIKDHFLNGSQKLVCIINNPFVPWVADVAANFNIPCACLWIQPCALYAIYYRFYNNLNTFPTLEDPSMNVELPGLPLLQPQDLPSFVLPSNPHGSIPKVLSSMFQHMKKLKWVLANSFHELEKEVIDSMAELCPITTVGPLVPPSLLGQDENIEGDVGIEMWKPQDSCMEWLNQQPPSSVIYVSFGSIIVLTAKQLESIARALRNSEKPFLWVVKRRDGEEALPLPEGFVEETKEKGMVVPWCPQTKVLSHPSVACFLTHCGWNSMLEAITAGTPMIAWPQWTDQPTNAKLISDVFRLGIRLAQESDGFVATEEMERAFERIFSAGDFKRKASELKRAAREAVAQGGSSEQNIQCFVDEIIGTKST

SEQ ID NO: 269827 - protein, 705 aa, Glycine max
  Clone ID: PAT_MRT3847_85673C.1.pep
CVRACCPPDLATFHTETVQSGLALSRLHILFHSVALLFLYYYRISHILLEPSFVWIFMTIAELIFGELWLFKQAFRWRPVSRAVMPEKLPSDGKLPALDIFVCTVDPEKEPTVQVMDTVISAIAMDYPSNKLAVYLSDDGGCPVTLYGIREASRFAKEWVPFCRKYGINSRCPKAFFSPMGEDERELLLLRNHEFLAEQEQLKAKYNIMQKNIDEFGRDPKNRSIVFDRPARIEIINEQSEIPLVVYVSRERRPNVPHTYKGGALNTLLRVSGLFSNGPYVLVVDCDMYCNDPSSAKQAMCFFLDPETSKDIAFVQFPQMFHNLSMKDIYDSQHRHAFTTMWQGMDGLRGPGLSGSGNYLSRSALIFPSPYEKDGYEHNAQNKFGNSTMYIESLKAIQGQQTYKTSISRNVILQEAEAVASCSYEIDTNWGNEVGFSYVILLESTVTGYLLHCRGWRSTYLYPKRPCFLGCAPTDFMEGMLQLVKWSSELFLLGISKYSPFTYGISRIPILHNFTFCYFTSTCQYIVALIVYGIIPQVCFLKGTPVFPKVTEPWFVVFAILYVSSQSQHLIEVLYGGGSLGTWWDEQRIWIVKSIVGGIFGSILAIKKRFGLNKAKFILSNKVVAKEKFEKYEQGKFEFEGAALFMSPLVGLLIVNILCFFGGLWRLFNVKDFEKMSGQLFLLGYLAALSYPIFEGIITMKSKVQ

SEQ ID NO: 269828 - protein, 56 aa, Glycine max
  Clone ID: PAT_MRT3847_85674C.1.pep
FLFMSYMLGSHRALKLKPFCGLDSQFHFYSLKFNNIFLIFPLFQQIFFFIVLFHKI

SEQ ID NO: 269829 - protein, 55 aa, Glycine max
  Clone ID: PAT_MRT3847_85675C.1.pep
ILLDYAIAFLYCWLVLDQTKKVDPSQYPNHYPWLELRNISHARSFFFFSPRAVRF

SEQ ID NO: 269830 - protein, 67 aa, Glycine max
  Clone ID: PAT_MRT3847_85676C.1.pep
SLSSMRMRFRAMEGTIRVHMCVRVSGRLRLMHSKIMSVGWYETNEATPQRDPSPAQSRILLFYVSRT

SEQ ID NO: 269831 - protein, 487 aa, Glycine max
  Clone ID: PAT_MRT3847_85677C.1.pep
MKCPYCSAAQGRCATTSSGRSITECTSCGRVVEERQSHPHHVFHVRAQDNPLCLVTSDLALPALNQNNEEEDPFEPTGFITAFSTWALEPSPLYLQSSLSFSGYLAELERTLESSSSSSSSSSSSSLSSTVVVDNLRAYMQIIDVASILGLDCDISDHAFQLFRDCCSATCLRNRSVESLATAALVQAIREAQEPRTLQEISIAANVPQKEIGKYIKILGEALQLSQPINSNSISVHMPRFCTLLQLNKSAQELATHIGEVVINKCFCTRRNPISISAAAIYLACQLEDKRKTQAEICKVTGLTEVTLRKVYKELLENWDDLLPSNYTPAVPPERAFPTTVIASGRSSTAKVDAVEVISSLDPEKLPDIKHSKPNEGPGMVHHPRGKDEAVGGYHASHSTLNQQSTFWQSQLPSGTHNHQNVLQGMDIDVSQRNHQQPEHMAEDTTNGAANGSSLKSNQLCSPPASSASSVMRQFSAPPSSGPSNVR

SEQ ID NO: 269832 - protein, 52 aa, Glycine max
  Clone ID: PAT_MRT3847_85678C.1.pep
QQQKAAHNITPNSPQPPNLEAELLKQNKIKQNLYYPETLCPYPKLRINAHFL

SEQ ID NO: 269833 - protein, 65 aa, Glycine max
  Clone ID: PAT_MRT3847_85679C.1.pep
LAAHYLLTTINSLRNDLHVIVEMDLYKTYPCDIHDTSELCYDLKNEWYFFIHKDTICATRTRTNK

SEQ ID NO: 269834 - protein, 65 aa, Glycine max
  Clone ID: PAT_MRT3847_8567C.1.pep
KKREPIRLIPIFLMDALPINPIFTINQPLFLNITSRQVTNRRILNKCRSNLPVLPTKIPSPKRSM

SEQ ID NO: 269835 - protein, 66 aa, Glycine max
  Clone ID: PAT_MRT3847_85680C.1.pep
IYLLQQLAGRLNHLIRSWFTLPSPRSVQYRNVQKSVCICWNLYNAICVTLESYVNGMNGLQGGLGI

SEQ ID NO: 269836 - protein, 86 aa, Glycine max
  Clone ID: PAT_MRT3847_85681C.1.pep
VLVISGMQCLGESAHATSRLFPVLLTPLILSAALSSVIWSNRCCLPSMKWHFMFLPILYMIRHVCNTVVTQCTIVDSLTLYRSVVR

SEQ ID NO: 269837 - protein, 147 aa, Glycine max
  Clone ID: PAT_MRT3847_85682C.1.pep
RAYICRTALCVHLYAKESVRRGQKPLPGTDIASLFEDARVNDDLNSITSKSIFREELVASLVESCFQLSLPLPEQKNTGMESRVIGALAYGTGYGALNWTEPALEVVEVCRPCVKWDCDGRTYAVDCYLKLLVRLCYIYDTRGGVKR

SEQ ID NO: 269838 - protein, 32 aa, Glycine max
  Clone ID: PAT_MRT3847_85683C.1.pep
LDRALIFFLNCGLGIKVLRLVEIACMGSLKCL

SEQ ID NO: 269839 - protein, 61 aa, Glycine max
  unsure (1)..(61): unsure at all Xaa locations
  Clone ID: PAT_MRT3847_85684C.1.pep
LNYKDVRKFAILRGLCXKVGIELVPRDFDMDSPIPFQKSDIVSLVPVHKQAACSSADGRQL

SEQ ID NO: 269840 - protein, 151 aa, Glycine max
  unsure (1)..(151): unsure at all Xaa locations
  Clone ID: PAT_MRT3847_85685C.1.pep
LSGYFFIALEILPDDTIXFMRLFPQAVAVWYRFMTQLVCNFXQEEFVTSWSTQXRAATTPVADGCTYLYAMVHDSSVSTIPCEYVIGVQFLLXELMFAYGLNPGISRTRVSGTITKSILHXTVWNXIVTLITPLYYEFSKQMFXQFSVDRL

SEQ ID NO: 269841 - protein, 112 aa, Glycine max
  unsure (1)..(112): unsure at all Xaa locations
  Clone ID: PAT_MRT3847_85686C.1.pep
PPRGRAHLRECKRETPNPTNEHPTHAPAGESXXXARPTDEXQRQXARPNTPKPDSQQDPQKPGQTGGENDNRPPTKKXEDTQXPTNXXXXKEPHPGKTXXXEXSKXPPTQPY

SEQ ID NO: 269842 - protein, 163 aa, Glycine max
  Clone ID: PAT_MRT3847_85687C.1.pep
MSSTHPKNPATTTTSTTLIVLSIILLCFPTTAKTDNPPCPYPCYPPPIGTVTPTTPSGGSTVPPAPPQPGLLYPPPSGNYPYYPTPPYGGGGGVGSNDGSGSGSGGFGSPPPPDPILPYFPFYYRKPPHKPEDNSASTTTMYKWTGMVGITSLLSSSLLLLFV

SEQ ID NO: 269843 - protein, 57 aa, Glycine max
  Clone ID: PAT_MRT3847_85688C.1.pep
LITTTRIINKKNTKRKRERKEQANQVITNYKLQTQSSSLEKQEKLYILWPLKRKIGE

SEQ ID NO: 269844 - protein, 132 aa, Glycine max
  Clone ID: PAT_MRT3847_85689C.1.pep
MVVRIRLSRLGCKNKPFYRVMAADSRSPRDGKHLEVLGYYNPLPGQDGGKRMGLNFDRVKYWLSVGAQPSEPVERLLFRAGMLPPPPMVAMGRKGGPRDTRPVDALTGRVLNQEKPADANNTEQQHDTPENP

SEQ ID NO: 269845 - protein, 54 aa, Glycine max
  unsure (1)..(54): unsure at all Xaa locations
  Clone ID: PAT_MRT3847_8568C.1.pep
XXXXPXXXNXXTXXLTXTXSIXXXMXRXPRIIXXXHXXXIFXRLIPXXRXXXQL

SEQ ID NO: 269846 - protein, 45 aa, Glycine max
  Clone ID: PAT_MRT3847_85690C.1.pep
EFTHSKIHSLPYFILSLRGSMTRADKSQNDNYINSLLIEPFFPVT

SEQ ID NO: 269847 - protein, 69 aa, Glycine max
  unsure (1)..(69): unsure at all Xaa locations
  Clone ID: PAT_MRT3847_85691C.1.pep
GGXFXNFRSIDLXXEIKXSXQARXLSPSGLGFHXXTAPPXXPQQSTEAXLXXLRFRPCXXSDSXHXRCQ

SEQ ID NO: 269848 - protein, 247 aa, Glycine max
  unsure (1)..(247): unsure at all Xaa locations
  Clone ID: PAT_MRT3847_85692C.1.pep
RIGGAQFTLNGIHYKLVANEGNNTLHLTRYIKDDDXPRITFSYHSYDGEGGFPGDLLVTVSYILGKNSLSIIMKAKALNKPTPVNMVNHAYWNLXNHNSGNILDEVVHIFGSQVTLFDDNLIPTGQYASVRGTPNDFLEPHIVGERINQLPNAXYVLDGKKVTEIMCLMVKMDKKSGRVMKLFTNAPGLQFSTANFVKNHKGKGGFVYQPRSPLCLESQAFPDSVNHPNFPSPIVTPDNAFQACHVA

SEQ ID NO: 269849 - protein, 104 aa, Glycine max
  unsure (1)..(104): unsure at all Xaa locations
  Clone ID: PAT_MRT3847_85693C.1.pep
KKVFEHVFGPVYGKKGGHLXQIRQLSGAIVPVYYPPVGTSGGKVVILGTPDQPFNAKSLFQAFFQTGQASLWKMEFHKQLGPKMGHKNVTPIPSLCEWGFPLFF

SEQ ID NO: 269850 - protein, 63 aa, Glycine max
  Clone ID: PAT_MRT3847_85694C.1.pep
KPVSKISMSRTLVKSLHTELTDTHGGIIMFRNVYKRIYSGGAINSELIPPSRRPPDNGHRTLS

SEQ ID NO: 269851 - protein, 380 aa, Glycine max
  unsure (1)..(380): unsure at all Xaa locations
  Clone ID: PAT_MRT3847_85695C.1.pep
MASTVVAAAVRSDVPPRQPVDPSASSSPDVADRSDSFNSSPNHFSDTEIQLQTPDVLKSEEYRQLFRLPLEEVLIEDFNCALQENLLIQGHMYLFVNFICFYSNIFGYETKKIIPFPEVTSVRRAKTAGLFPNAIEILAGNKKYFFASFLSRDEAFRIINEGWSRQGNGAIAIMEQKESMSESSSQENGFVAVENVKSSDNXNGSLSTDLSKDTTLTSIVGDDPVSTADSEKQCNVKQVAEPELNNDAPSAASWNEEDIDAPSILEAYTCVADSVFPMKVEDFFRYLFSDDALNFLESFRQKCGDKDFRCSPWHPQEKFGYARELSFQHPIKIYLGAKFGGCHEVQKFRVYRNSHLVIETSXKSVMYLMQIISGLRDCGV

SEQ ID NO: 269852 - protein, 180 aa, Glycine max
  Clone ID: PAT_MRT3847_85696C.1.pep
MEEKLKYPFLSSFLTLFFCISATSIAPHNSQTQTLLLRTLPNPPTLSWPESTISGSDPEPDPFSLSVHLNHIDALSPNKTPSQLFHLRLLRDGARVKTLNSLAAATNQTRPTNTGSGFSSSVVSGLSQGSGEYFTRLGVGTPPKYLYIVLDTGSDVVWLQCKPCTKCYSQTDQIFDPSKS

SEQ ID NO: 269853 - protein, 226 aa, Glycine max
  unsure (1)..(226): unsure at all Xaa locations
  Clone ID: PAT_MRT3847_85697C.1.pep
LKFIFHLILQTPDVLKSEEYRQLFRLPQEEVLIEDFNCALQENLLIQGHMYLFVNFICFYSNIFGYETKKIIPFPEVTSVRRAKTAGLFPNAIEILAGNKKDYXEGWSRHGNGAIAIMEQKESMSESSCQENGFVAVENVKSSYITNNGSLSTDLSKDTALPSIVDDPLLTEDSAKQCSVKQVAEPELNIDAPNAASVSWKWNEEDIDAPSILEAYTCVADSVFPI

SEQ ID NO: 269854 - protein, 78 aa, Glycine max
  Clone ID: PAT_MRT3847_85698C.1.pep
LGFNQLCPRKCDFQEKGLLTFSQGWVGPHVWELKKILFCFQVFFKTFLLKFVKQFMILPTKATKIWVPGFFAWEKKFF

SEQ ID NO: 269855 - protein, 183 aa, Glycine max
  Clone ID: PAT_MRT3847_85699C.1.pep
MASTVVAAAARSDVPPRQPVVDPSPSSSPDNAANRSDSFNSSPNHFSDAEIQLQTPDVLKSEEYRQLFRLPQEEVLIEDFNCALQENLLIQGHMYLFVNFICFYSNIFGYETKKIIPFPEVTSVRRAKTAGLFPNAIEILAGNKKYFFASFLSRDEAFRIINEGMVATGQWSHSNYGTEGINV

SEQ ID NO: 269856 - protein, 103 aa, Glycine max
  unsure (1)..(103): unsure at all Xaa locations
  Clone ID: PAT_MRT3847_8569C.1.pep
SXYXIRXPXXCXXXLXXXLFXXXXFAXXXSXAXXQXRXXXXXXXXXISXXXXVAXXCXVLXLXVYXXXVCCVVSXSAXXXKLXXXXXXXXSXXIPCXRXXXCI

SEQ ID NO: 269857 - protein, 129 aa, Glycine max
  Clone ID: PAT_MRT3847_856C.1.pep
MMEKASSSNEVRTLVLVGRTGNGKSATGNSVLGRRAFKSRTSSSGVTSVCELQRTIMKDGSIVNVIDTPGLFAGTDSAGKEIVKCIDMAKDGIHAILMVFSVRTRFSEEEQATFLTLQALFGHQIVDYM

SEQ ID NO: 269858 - protein, 188 aa, Glycine max
  Clone ID: PAT_MRT3847_85700C.1.pep
MEFQAHEMLKQKNLEKQAQNGEINLDREVKTGESSEGSQEQSNHTKILATSNAFDATTHNVGSHLPGNFIEPSSVPLFKEFMTKFRSSLRSHSNLSLLLITVVALIFFIQQCSILVLLARPQHIHMNTPVDITNRMNNEVTRSPSDIAWLEKRIHHLKDEMYMVESRLERMRYEHLLLKNQLKDLEHK

SEQ ID NO: 269859 - protein, 36 aa, Glycine max
  Clone ID: PAT_MRT3847_85701C.1.pep
SVIILTRLSLDVYKQCEKGLVFRLLKLLYNRTVHNL

SEQ ID NO: 269860 - protein, 85 aa, Glycine max
  unsure (1)..(85): unsure at all Xaa locations
  Clone ID: PAT_MRT3847_85702C.1.pep
QRFKSSFQFAFQHDYLRSIXNYXKRMKRTKMFVKKHLPNVGCHPFLAGLHAALQWNLESSTVVAWQCQTRYSFESGDLXCHTTRL

SEQ ID NO: 269861 - protein, 69 aa, Glycine max
  Clone ID: PAT_MRT3847_85703C.1.pep
YTILDDHLINNIMIPLSFPIFYRSDQILIQALGYQDQEINLNGIAPICPSPDPSVNTIFQRASIASDLD

SEQ ID NO: 269862 - protein, 110 aa, Glycine max
  Clone ID: PAT_MRT3847_85704C.1.pep
GIGPKPLGYKKPLVFLSQGFEVVSSKSQTRAFLGPVFGRVPPPLFIFFLGGVSSGLEKNQSPPHLEKGEKVKINPLLNSLWGRGQKNGVGQNKQGFFSPLVKGVIFGKGF

SEQ ID NO: 269863 - protein, 425 aa, Glycine max
  unsure (1)..(425): unsure at all Xaa locations
  Clone ID: PAT_MRT3847_85705C.1.pep
KTPRDSNGHGTHVASTAVCVAVSNASFYGLATIRLEGGSPESRLAVYKVCYRNGCRGSAILAAFDDAIADGVDVLSLSLGVLPLSRPKLTSDTIAIGAFHAVQRGILVVCAAGNAGPLKYSVVNDAPWILTVAASTIDRDLQSNVVLGTNHVVKGRAINFSPLSNSPEYPMVYGESAKAKRANLGTARKCHPNSLDRNKVKGKIVICDGKKDPKYITMEKINIVKAAGGIGLAHITDQDGSVAFNYVDFPATEISSKDGVALLQYINSTSNPVGTILATVTVPDYKPAPVVGFFSSRGPSTLSSNILKPDIAAPGVNILAAWIGDDTSXVPKGRKPXLYNIIXGTSMAAAHVXGMGTSRKDDISDXRWLMNLIXQVMTSAIQNDNLKAPISTDSRSIATPYXDYXSMGKFTSKPLEPGLVYETTT

SEQ ID NO: 269864 - protein, 118 aa, Glycine max
  unsure (1)..(118): unsure at all Xaa locations
  Clone ID: PAT_MRT3847_85706C.1.pep
CIKKGMTGSIAISIMRYIIIRAPLSMASPRLAQQGYEIRLEXPGRNVCGYSRWGNKSGDNSVPXGAIPYAELSLEVKIPHDMQSKNGSAFGKNFADNVSSVLIKPGGFKMSPCYSSFL

SEQ ID NO: 269865 - protein, 123 aa, Glycine max
  Clone ID: PAT_MRT3847_85707C.1.pep
ERQHASLFILINLRLRLYITMNNTNAANGKGKFKPYRNRPGKRQGLLELFSFLLILASVPAFLGGVFSIFVALSAFVLGIIGLFAWTRRHAKLFILLAIAVIAAAIVSIILRGTFHAQCVPFH

SEQ ID NO: 269866 - protein, 43 aa, Glycine max
  Clone ID: PAT_MRT3847_85708C.1.pep
VSNLSQLHTCDMRPEIGPLAYYSIRLWLHLLMLCNQSWKTLDP

SEQ ID NO: 269867 - protein, 106 aa, Glycine max
  Clone ID: PAT_MRT3847_85709C.1.pep
MGRGQVLSAYRALLKATRKTFSGDTMMLKESAVEVRKKFEENKNVSSEAEIQKLLLEAEEASHFITNMLVQAQLNPDSGTYAVKPCKEHAGATLELPSEEIIRKSA

SEQ ID NO: 269868 - protein, 66 aa, Glycine max
  unsure (1)..(66): unsure at all Xaa locations
  Clone ID: PAT_MRT3847_8570C.1.pep
PISHHQFTLIVITFHLLRIFSLPXRALEYDEIQFIIDSEHHIFNRSQPSCMSSSXLVTVCMDYQTK

SEQ ID NO: 269869 - protein, 108 aa, Glycine max
  Clone ID: PAT_MRT3847_85710C.1.pep
KKMPLVGGVQEGIIRKVFFVNSTINSPLWVGTPAIKRAGFFWFCSLLFSLYSARSGKPCFGGALFFLHKIVHIYFKKRVKNEIKKHIIPKKKKKKKKKKKKKKKKKKK

SEQ ID NO: 269870 - protein, 75 aa, Glycine max
  Clone ID: PAT_MRT3847_85711C.1.pep
LPSFFFFFSVFFHSFFFFLGVRVKTSSDFHFNPWDNKKPFVLPLFLLSFPLRRGPLLRPTFGPLPNKGMVAPQLF

SEQ ID NO: 269871 - protein, 127 aa, Glycine max
  unsure (1)..(127): unsure at all Xaa locations
  Clone ID: PAT_MRT3847_85712C.1.pep
KTLGNQAVSKAILKKGGSPPWEKFFXRGPQVPSPPKAVFSKPPARENFLRRGSPLFGFFGAQWGVFLGGPKGENRXFSFLFPCFPFSGSFPFHQFXVAPFFFFVIKGVQIGAPASLFVVSPGGPQVF

SEQ ID NO: 269872 - protein, 38 aa, Glycine max
  Clone ID: PAT_MRT3847_85714C.1.pep
ILWFYVLIIILLFLCEPRNVVTSSLHIEKDGMPLEMII

SEQ ID NO: 269873 - protein, 59 aa, Glycine max
  Clone ID: PAT_MRT3847_85715C.1.pep
NVDSKKMRITASIHPLHIIYIYIDIYIYIYIYIISFFRKLYYVINVFAKMLKRTKLHFR

SEQ ID NO: 269874 - protein, 92 aa, Glycine max
  Clone ID: PAT_MRT3847_85716C.1.pep
LFFCFALFFASLSPGVGLILCVPLWFFSGWFFFCSLYCGPPGPIRPWFFCLAQDLLFVLSGPLPFSVSPCRSSFFSFSVACFLNWCFGCPPL

SEQ ID NO: 269875 - protein, 125 aa, Glycine max
  Clone ID: PAT_MRT3847_85717C.1.pep
VLHGLGFPLQLSPWHMPPSRSLVVCFGCTSISSLWFDLAYAYASGWFLRGASSCLFAFGCVFRCSCAVCGLSGLLPSGVESSIEELPWSQWCSGDLLLSVFLSPLWCLAALSCSGCPGFILLRRA

SEQ ID NO: 269876 - protein, 177 aa, Glycine max
  Clone ID: PAT_MRT3847_85718C.1.pep
DKEGIPPDQQRLIFAGKQLEDGRTLSDYNIQKESTLHLVLRLRGGMQIFVKTLTGKTITLEVEPSDSIENVKAKIQDKEGIPPDQQRLIFAGKQLEDGRTLSDYNIQKESTLHLVLRLRGGMQIFVKTLTGKTITLEVEPSDSIENVKAKIQDKEGIPPDQQRLIFAGKQLGDGRTL

SEQ ID NO: 269877 - protein, 77 aa, Glycine max
  Clone ID: PAT_MRT3847_85719C.1.pep
FMGDFVNFLGSFSLVPLTFMFPSMVFIKVKGRTARIEKKAWHWFNIVFSFLLTIATTISAIRLIVNNIQKYHFFADA

SEQ ID NO: 269878 - protein, 54 aa, Glycine max
  Clone ID: PAT_MRT3847_8571C.1.pep
ETHAYTDNTERLTGQDDRTGPELIYAHATGPRSTQEEASYFREAIVRVACLQTQ

SEQ ID NO: 269879 - protein, 34 aa, Glycine max
  Clone ID: PAT_MRT3847_85720C.1.pep
IKLRGISGVALVTGPQQLLSRRIYQISRNIYPGL

SEQ ID NO: 269880 - protein, 93 aa, Glycine max
  unsure (1)..(93): unsure at all Xaa locations
  Clone ID: PAT_MRT3847_85721C.1.pep
XGCSYSVSSGXRXXQXRKXSLPXQLNQXXXXRGHXVXSEXXXXEXGXERRERRKEGGXXSRYEXETETWKWTALLCVRXXRDTXEXTTRNERC

SEQ ID NO: 269881 - protein, 384 aa, Glycine max
  unsure (1)..(384): unsure at all Xaa locations
  Clone ID: PAT_MRT3847_85722C.1.pep
MAATAPLGRWTSNSNDSTRSSPPRVPDDFRNLTSSGDISSISSGSGEIPPVSVLAPPFLYREGSNDVETAAPREKCVGRSNKGVSWGHTSVIGRRKEMEDAIAVIPGFMSRTCDRIGGCTAPGSRSSGEIAALHFFGGNDPHRGSQVAERCAKPKHAVLAGEGNRKXGGGARWHRRWETVFANSFERTDNEILSDAVAPEMVGSTASVVILSGCQIITSNCGDSRVVLYRRTQTIPLTVDQKPDRQDELLRIEGGGGRVINWNGARVFGVLAMSRAIGDRYLRPWIIPVPEITFTARTDEDECLVLASDGLWDVMTNEEVGEVARHILRRRRRSLSMEEASPAQVVADSLTEIALGRNSKDNISIIVVDLKSKRKRQQRPPLIS

SEQ ID NO: 269882 - protein, 133 aa, Glycine max
  unsure (1)..(133): unsure at all Xaa locations
  Clone ID: PAT_MRT3847_85723C.1.pep
YASELPFLNNKPTAICKKDVWRVECGIPSGFPLTVICNSIFNEMLIRYSYEKYLRQXSNVLWVVPVDKERVLSQLXNVRXNNLEMQEAYLVKHVNVLRELFLHSPQEARQFRRKALSRIEWLLKADEPTIAQI

SEQ ID NO: 269883 - protein, 143 aa, Glycine max
  unsure (1)..(143): unsure at all Xaa locations
  Clone ID: PAT_MRT3847_85724C.1.pep
FEFIPKKIDAXLRQRIDPQYNEVQAQMETNLFKFVFDEVETPKGSMLGLKIPQHKIALPKNTGGGTILRNDLLINFWTEGNFIASVDLQCTYLIRGMIXMVCTLGIPESTALALACAMNXSFLGRASSDIYTILYQDCEILDP

SEQ ID NO: 269884 - protein, 69 aa, Glycine max
  unsure (1)..(69): unsure at all Xaa locations
  Clone ID: PAT_MRT3847_85725C.1.pep
TXXRKXRXFLARGTTVLCTSTSIRVWERDASWLNIIGKAYGRLMHIEELLPKGNGLHEVFSSDTLNTLN

SEQ ID NO: 269885 - protein, 47 aa, Glycine max
  Clone ID: PAT_MRT3847_85726C.1.pep
MNYPAALELHIHTYSCSTVVGDIYIMHSPIYHTLILFHNIILFKHYS

SEQ ID NO: 269886 - protein, 59 aa, Glycine max
  unsure (1)..(59): unsure at all Xaa locations
  Clone ID: PAT_MRT3847_85727C.1.pep
XYXXVGSSNRLRXTXKEQXNFRPKAXERVFXQFSVLYADLMSNANKDDRIXNXNIXLSX

SEQ ID NO: 269887 - protein, 194 aa, Glycine max
  unsure (1)..(194): unsure at all Xaa locations
  Clone ID: PAT_MRT3847_85728C.1.pep
ENFKNDLERMNCLDLNDAINTAAQAYHERYEQLKEQVGRGEKPISIMDQKAIDGDKGKKEPEAPKEKKKAISISKAEGKPNKLAPPSGWKNPSGTSGGMQSAQNVINLLDFDDEVESSNGNKQEHAHVQPQGHNSDVEVSQTHNTITVKSTNTASISGAXDLLDLDSEDGSNNLMQPVMADDAYNRRCTNNSGT

SEQ ID NO: 269888 - protein, 146 aa, Glycine max
  unsure (1)..(146): unsure at all Xaa locations
  Clone ID: PAT_MRT3847_85729C.1.pep
ERVKRMQALHDTIHEVYGQFKDADLTTFKCVCIPNLLSLYETERMIXELNNYQHDTHAIEXNQLLNPMKDYPGXQGIPLPKMQRKSPAQIVELYDENNGPKTPGLPDEVIGKEMLAKLSEMLSNPLGATEEQLYRRLGCPSVLTGL

SEQ ID NO: 269889 - protein, 83 aa, Glycine max
  Clone ID: PAT_MRT3847_8572C.1.pep
GLGIGVLADTVEFVFLRMRENSIRWKVRIVSQSEIVVVSQSVRDRGFRYCGRCYPFYFSSFITHSGFQLTCFFLPLTKFLFFN

SEQ ID NO: 269890 - protein, 144 aa, Glycine max
  unsure (1)..(144): unsure at all Xaa locations
  Clone ID: PAT_MRT3847_85730C.1.pep
AGVGTPAAAAAAATDAKAGKYGAAAGLVPVGPCFVPVVVGVPGAGVPGVGVPGAVIPVVPGAGIPSAAVPGVVSPEAAAKAAAKAAKYGARPGVXVGGIPTYGVGAGGFPGFGVGVGSIPGVAGVPGVGGVPGVGGVPGVGISP

SEQ ID NO: 269891 - protein, 47 aa, Glycine max
  Clone ID: PAT_MRT3847_85731C.1.pep
SYGVRFSIYPPTRVIQLVSGGSIASVHTNNQHIVGMSFLCNHHGNYV

SEQ ID NO: 269892 - protein, 129 aa, Glycine max
  Clone ID: PAT_MRT3847_85732C.1.pep
MVAARQFTCSAPRFTAQLRAPAQRRLGSTSTENEFIQERQHIKEHVKGTTALCEKISIYGVVPSLILAGANGWWLWKAHCEHWDHMTPLEERTEYPYHNIRTKNFQWGDGDKTLFWNESVNYLNKDQVA

SEQ ID NO: 269893 - protein, 81 aa, Glycine max
  Clone ID: PAT_MRT3847_85733C.1.pep
NLIMLKDKSFSRGRNQLRNNLNRILAWSIKEFVKGGKTRNMLHKFSLKMGNTPGFTKLLKLGLGATKSNSYLATHYQNFGP

SEQ ID NO: 269894 - protein, 80 aa, Glycine max
  Clone ID: PAT_MRT3847_85734C.1.pep
INISIQIQVTPLGPPEPSGCLRRLNTFCFSGTLYGRKWLPYLPLFEKPRGGAPLSEKPGESPPSIGGTVDPLEKLFAAIL

SEQ ID NO: 269895 - protein, 123 aa, Glycine max
  Clone ID: PAT_MRT3847_85735C.1.pep
RPGKPGTTHFERSTPRNNTTGTERKCQNQTPPKAKTGNNGDGRTGRKGAREAPQRDEEEHAAANDPATTTEDTTNTNKDDREHGHRKQHEGTAKDEKTTRNEDKPSTKERTQKTQTRPQGGQP

SEQ ID NO: 269896 - protein, 175 aa, Glycine max
  Clone ID: PAT_MRT3847_85736C.1.pep
MIPDLPLPFLFSLFIIFFHLAESKPSLTATPTTLPASGATVNLRWSGIPSPSDLDFLAIYSPPTSPHDNFIGYLFLSQSATWRTGSGNLSLPLVDLRSNYSFRIFSWTRAEINPKRQDHDHNPLPVTRHLLAFSEEVSFALPGGPQQIHLAFGGAHGKEEDMRVMYITRDPRETY

SEQ ID NO: 269897 - protein, 55 aa, Glycine max
  Clone ID: PAT_MRT3847_85737C.1.pep
FGCRGNVRDGGIVGVKALSWHMIRFRRGHLCRTFWRSCTMGILCGARQLLVMTRD

SEQ ID NO: 269898 - protein, 95 aa, Glycine max
  unsure (1)..(95): unsure at all Xaa locations
  Clone ID: PAT_MRT3847_85738C.1.pep
ENXXPVTGXAXDNLRXWWKXKVRXDXNGPAXIAXYXAYNTXXWRNDGCNSIXPXXHTLQDLHXXTLGSLLSALXXHCXPPHRXFPFXKGVLHGQG

SEQ ID NO: 269899 - protein, 53 aa, Glycine max
  Clone ID: PAT_MRT3847_85739C.1.pep
QKRKYVMCTHRRWITSQWGKNYRGWADFYLGKKMFAFLKKETKRKLKVWKKEE

SEQ ID NO: 269900 - protein, 61 aa, Glycine max
  unsure (1)..(61): unsure at all Xaa locations
  Clone ID: PAT_MRT3847_8573C.1.pep
YLFSLLKVMHIKLPMYRNGHGTRSNSALRRHNRKRIXLGFGFRGSLLKAPHLVGVEFLKPR

SEQ ID NO: 269901 - protein, 51 aa, Glycine max
  Clone ID: PAT_MRT3847_85740C.1.pep
TYTLQISFNISCNKSSKNTSHLTPYVNLHIPIKFIYPLSYTYYSLIYFIIY

SEQ ID NO: 269902 - protein, 137 aa, Glycine max
  Clone ID: PAT_MRT3847_85741C.1.pep
CGASLPWEDGKVATFHCSFLANLSMDITAIGTRGTLHVHDFVIPYHEKEASFLAGTETGFNDLVTGWDKQPSKHTVTTDLPQEALLIREFARLVAEIKFKNSKPDKKWPTITRKTQLVLDAVKASIQRGFEPVQIQE

SEQ ID NO: 269903 - protein, 80 aa, Glycine max
  unsure (1)..(80): unsure at all Xaa locations
  Clone ID: PAT_MRT3847_85742C.1.pep
PVFQKEGQKQGSQKRQLMLSWTRNGLSYKKNDTIPSGWKDTIAKRFHQNKRQXLWWXXQRPLKITDVIFFVALCFLSSFF

SEQ ID NO: 269904 - protein, 82 aa, Glycine max
  Clone ID: PAT_MRT3847_85743C.1.pep
HTTMGMDLDEVMKIANRHCAWDGHAFEEYHLLERGGTLWLFYSTGAQQKGYAIYISTIQKPYYLTYLHVWWLIIFTMLTMKR

SEQ ID NO: 269905 - protein, 325 aa, Glycine max
  unsure (1)..(325): unsure at all Xaa locations
  Clone ID: PAT_MRT3847_85744C.1.pep
MGHHSCCNQQKVKRGLWSPEEDEKLIRYITTHGYGCWSEVPEKAGLQRCGKSCRLRWINYLRPDIRRGRFTPEEEKLIISLHGVVGNRWAHIASHLPGRTDNEIKNYWNSWIKKKIRKPSTVTSSMTXHKVLIHQPQFNFNSNQLDHYGNQENLTAKPPMQETLFSSTCPLFMFDTSSLDQGTTTVDTTNNVRAELFQDSLGLSSSETWNMSHHQVHALPPQLAATFTATNVIDTTNYLPPLIENVENMVPNMEVQSCSIDEEGEMALECLRRQDLNEWVENQQQCPSFLFWDNINVEGQLRGEELAPNTSNMGNNTLSPFPSSL

SEQ ID NO: 269906 - protein, 151 aa, Glycine max
  Clone ID: PAT_MRT3847_85745C.1.pep
QNGGSFFPQGGGAHTPGLVGGGFTLREGGDHFFVETLPGPAFGKFNRLFRNGDFWAPRKKWCLVFKKFYKGVPPRDPLGVGGNAASFFFLAPDPFFGGKWGIRLHLFFPPEKEGAQSVFWCSPDGAQDTIEMLLSLYKIKVYNIDIPKWAR

SEQ ID NO: 269907 - protein, 54 aa, Glycine max
  Clone ID: PAT_MRT3847_85746C.1.pep
GLGIDVILIFSYFSGPFIYTLNFNFNGHRVSFYLFKPLGIFSLILLFNIRMKFM

SEQ ID NO: 269908 - protein, 62 aa, Glycine max
  unsure (1)..(62): unsure at all Xaa locations
  Clone ID: PAT_MRT3847_85747C.1.pep
NDDDDLNDLDQGEDXNTHHLVLAQFDKVTRTKSRWKCTXKDGIMHINNKDILFNKATGEFDF

SEQ ID NO: 269909 - protein, 110 aa, Glycine max
  Clone ID: PAT_MRT3847_85748C.1.pep
KMYVKVSMDGAPLPVRIPGSTHASDSELVLALEKFFGCYGIREALKDAENAEHVPIYEDKDGDWMLVGDVPWEMFIESCKRLRIMKRSDAKGFDLQPKGSLKGFIEGVTK

SEQ ID NO: 269910 - protein, 310 aa, Glycine max
  unsure (1)..(310): unsure at all Xaa locations
  Clone ID: PAT_MRT3847_85749C.1.pep
MAASSTSQVYIQVIDDVMIKVRDEFVNNGGPGDEVLKELQSIWESKMLQAGAIVGPIERSGAPKPTPGGPITPVHDLNMPYEGTEEYETPTAEMLFPPTPLQTPLQTPLPGTVDNSMYNIPTGPSDYPSAGNEPGANNEIKGGRPGPYMQPPPSTWTNQNQNQRAPLDVNVAYVEGRDEAERGASNQPLTQDFFMSSGKRKRDEIASQYNAGGYIPQQDGAGDAASQIFEIEVYGGGMSIDAGHSTSKGKMPAQSDRPASQIPQLDGPIPYDDDVLSTPNIYNYGSXNEDXHIANTPAPFEVPASTPASI

SEQ ID NO: 269911 - protein, 69 aa, Glycine max
  Clone ID: PAT_MRT3847_8574C.1.pep
QTPLFCTVPSDARTHSTHSESIKDKRDKVGLSLSSKIQESTWIWLVISWVSLCKSDEGEGLWSKISERT

SEQ ID NO: 269912 - protein, 41 aa, Glycine max
  Clone ID: PAT_MRT3847_85750C.1.pep
SLFNFKIYFSKTFHRNFKNFNLILSLLTQSTHQTHNTITNL

SEQ ID NO: 269913 - protein, 234 aa, Glycine max
  Clone ID: PAT_MRT3847_85751C.1.pep
METQSHEDLQQPPPVTSNDTHSDDASNHRDAEQKQDILRTEEVVQILQVIASTGRFWHDWDKLKSMLSFQLKQVLSEYPEAKMTSEQQYASLGESYIELVNKLDEALTCFIEGPPFTLQRLCEILLDAKGIYPNLSKLALALEKNLLVTSTLTICTDPYPQATEKEPDDQEKASEKQQQQQQSDSAQNGIEPLVSDNDEVMPEADVGDDMTIDMEAFEGVKSSEINSEPNANNA

SEQ ID NO: 269914 - protein, 384 aa, Glycine max
  unsure (1)..(384): unsure at all Xaa locations
  Clone ID: PAT_MRT3847_85752C.1.pep
MAASTTSQVYIQVIDDVMNKVRDEFVNNGGPGDEVLKELQSIWESKMMQAGAIVGPIERSGAPKPTPGGPITPVHDLNMPYEGTEEYETPTAEMLFPPTPLQTPLQTPLPGTVDNSMYNIPTGPSDYPSAGNEPGANNEIKGGRPGPYMQPPPSPDRAPLDVNVAXVEWRDGAERGASNQPLTQDFFMSSGKRKRDEIASQYNAGGYIPQQDGAGDADSQIFEIEVYGGGISIDAGHSTSNGKMPAHSDRPASQIPQFDGPIPYDDDVVSTPNMYNYGVFNEDYNIANTPASSDVPASTPAPVAQNEVDEEDDDDDEPLNENDDDDDLDDLDQGEDQNTHHLVLAQFDKVTRTKSRWKCTLKDGIMHINNKDILFNKATGEFEF

SEQ ID NO: 269915 - protein, 101 aa, Glycine max
  Clone ID: PAT_MRT3847_85753C.1.pep
SLFFFFLFFFHGGEKNTKITPPFIVLYQNMQTYLNLLTNHRGEKKCPPPKALFFPPPHKNTPGDKPDFFFPTFRKKTLKLVTNLPDHNNHIWGALNKKRYH

SEQ ID NO: 269916 - protein, 39 aa, Glycine max
  Clone ID: PAT_MRT3847_85754C.1.pep
VDSPNQGRFTWLEYAEYQSLFALTALVSVSSCFLESHGV

SEQ ID NO: 269917 - protein, 103 aa, Glycine max
  Clone ID: PAT_MRT3847_85755C.1.pep
RPTHLARARLIIIFTLKTMYVEHINYKLPVTESVDIAISEIAITVSCVQPRCGIYKGSVASQEFLLSSLSGMKGTTAHFHHLPMCRQGYHNSLNTQMLENPRA

SEQ ID NO: 269918 - protein, 82 aa, Glycine max
  Clone ID: PAT_MRT3847_85756C.1.pep
NSARAFSHTAALATMHSYLSVFLPTEAAAHYQPQLNPISTITNAMNASYETHKPFTQSLIDQIQHILLTTIVTGIDVWNLTM

SEQ ID NO: 269919 - protein, 114 aa, Glycine max
  unsure (1)..(114): unsure at all Xaa locations
  Clone ID: PAT_MRT3847_85757C.1.pep
LTLPGHLNSYLRNLALNLIPFLRLHFIFVLLAPLTQRMSYXYLFLTVPALTYQLWDAKIMICAIYPRLGRYLTASAIFREKISTYEVYNQMINSHNESSDYFDYWITNSVKSLC

SEQ ID NO: 269920 - protein, 89 aa, Glycine max
  Clone ID: PAT_MRT3847_85758C.1.pep
QTSKSLLPWSEDLKIVGRCIDSIASKTSVDPAYITWSYTCNRKLTEPDKIVEDKMTFLEKIESVPKDWWGEDICELDIDLYKRVMVAVE

SEQ ID NO: 269921 - protein, 89 aa, Glycine max
  unsure (1)..(89): unsure at all Xaa locations
  Clone ID: PAT_MRT3847_85759C.1.pep
ERTSTTRRTRARRKPQTPGKTSPEARDDKXHPAERAKTXGRTXAAKKXGXEAXERTTTKGXAXNXXTKXTXTKXXGXAKXANTXTNGRG

SEQ ID NO: 269922 - protein, 60 aa, Glycine max
  Clone ID: PAT_MRT3847_8575C.1.pep
YKKVCRKECVTRIPRALNFLLMDCPELKPDPIFWSSKSKDLFFCTSLECESVYWVAIRVK

SEQ ID NO: 269923 - protein, 37 aa, Glycine max
  Clone ID: PAT_MRT3847_85760C.1.pep
PPLLQLHGLFPLSRSPLFHCASTFLQDLDERQRDRER

SEQ ID NO: 269924 - protein, 84 aa, Glycine max
  Clone ID: PAT_MRT3847_85761C.1.pep
IHNGDLVLVVVLGNSLRRNSSGILVHSICHRISAWINSVSTAHVITKSVQPAQQVKRGETFVRDTTTLLWSFTDLRAEWRCDSD

SEQ ID NO: 269925 - protein, 44 aa, Glycine max
  Clone ID: PAT_MRT3847_85762C.1.pep
RNASRAGIADHMNKDISALAPSTIKIKVVAPPQRKHGVCIGGSI

SEQ ID NO: 269926 - protein, 46 aa, Glycine max
  Clone ID: PAT_MRT3847_85763C.1.pep
IQLAMVVTDHHSDQPCASLREVRGVNQCPKHRHRQALLRRLVPFSC

SEQ ID NO: 269927 - protein, 417 aa, Glycine max
  unsure (1)..(417): unsure at all Xaa locations
  Clone ID: PAT_MRT3847_85764C.1.pep
TRPLIQREKSISAIISSVANMIPEKYLLEQRAVVDVDGGTLLNEDYDIRSVLQYLLDDVSEFLSTKLVEVKEEREISEDKGCIFVLKAFIDYLLEREKENFGARRKDNENSVTLTTIHQAKGLEWDVVFIVKANDSEIPLLHDFKGTVKDTAALLEEERRLLYVAMTRAREKLFILHVMMDSNWQMLQPSRFLKEIPRHLTEVQGEISFQELLIKQEALQKETAHCTTDLLIKEKQSEADVIPMPHEILDNHSSETSNELAQFAEANNRNDFLRSFXRFSVENRSIVSHLFHQWAKKKAFQDPKRLLDKVSFVIDERLRQKRNKNKDLLNTLKSCLSCDEAFQYAQYVLRWEQIPADKRAHLMREKQEHFLKLKIENAMGSATPTDKQISYLKKLGCTAIPTSRLHASHLIEQFKSL

SEQ ID NO: 269928 - protein, 158 aa, Glycine max
  Clone ID: PAT_MRT3847_85765C.1.pep
MKGKSQSQRIGKKSRKMKGALSTTTNTTRHLQLQLGQVSLIPLQQPSSTTATTSSAVSCFQNLLDAEAPNASSSRVALIDNAAAAAADDRDCILSQDFFCTPDYITPDNQNVFNGFDCDRENTPCPKSPEKLNTTKSKRCRPDAMSVHPLSPTFSSDH

SEQ ID NO: 269929 - protein, 61 aa, Glycine max
  Clone ID: PAT_MRT3847_85766C.1.pep
TIFYGELCICANILGRQRCCAEARTLRCIRVLRHALPRTHEPLGTRTRSCPTRDQAVYEWG

SEQ ID NO: 269930 - protein, 106 aa, Glycine max
  Clone ID: PAT_MRT3847_85767C.1.pep
FLCCPVMESWSYVAEEKGYVSSEALSPPNTLERSKGSCFGWELKTPCSFSNDMLGLGQQNVEDQGFGELGFPGMLGKQLCGDDPNPIGAVQSRKVDDVVVDCRITS

SEQ ID NO: 269931 - protein, 43 aa, Glycine max
  Clone ID: PAT_MRT3847_85768C.1.pep
GEKHSPLNVQRSHPKHNNNMICSIVSLRVKNSVAPLHIDRVLK

SEQ ID NO: 269932 - protein, 181 aa, Glycine max
  Clone ID: PAT_MRT3847_85769C.1.pep
LQERRLMNDEVKNKTYEDSSMPMQNVVSPDSSVDFLVSDATTEVVGRSHYNPTNHQYKSTVFLSQEIDSLSYTSKKQDTSDFQEDSVLSLCSEADPDSISSFEEAYEPSPISVLEPLFGEDSRFSSKCGDHVYDSSEVDDEEYDLNVSSDEDCENEYVDDPEEKKDIAGLFRAEESRDFSY

SEQ ID NO: 269933 - protein, 87 aa, Glycine max
  Clone ID: PAT_MRT3847_8576C.1.pep
THCKNGTIISLRTSQRPIWRHDRFPQKSSSIYKAVNALFVGKKKNMNNCSTRKSLKGFLSSCFLGPPTHIFKIFWCKRSYILARNIL

SEQ ID NO: 269934 - protein, 80 aa, Glycine max
  Clone ID: PAT_MRT3847_85770C.1.pep
RWYYWACPVAWTIYGLVASQFGDITNVMKSENMSVQEFIRSHLGIKHDFVGVSAIMVSGFAVLFVIIFAVSIKAFNLQRR

SEQ ID NO: 269935 - protein, 91 aa, Glycine max
  Clone ID: PAT_MRT3847_85771C.1.pep
MFLAMNYLITNYHKITILVAAKGAHKLPNINGTEDLKEALQKLRTVLSKLLAGKVLWTPQNEDDTLSKRKLLEDYPQLAKGMANFLVKKHE

SEQ ID NO: 269936 - protein, 56 aa, Glycine max
  Clone ID: PAT_MRT3847_85772C.1.pep
KQMAYFRVQSTVSNAINAIGKLKMVGYYILSYLLKKRLVVKSKISQQNIQLHFSCS

SEQ ID NO: 269937 - protein, 81 aa, Glycine max
  Clone ID: PAT_MRT3847_85773C.1.pep
EQTKCHFHQSRQVITKKISSNTKACYWKKKITPHPTDLSKINQPIPAYIINLAQHKINAYSLRLAYKFGQVLNGVPARQGP

SEQ ID NO: 269938 - protein, 46 aa, Glycine max
  Clone ID: PAT_MRT3847_85774C.1.pep
KKKKKKKGKKMKKKKKKITKKGKKKKKKKKKKKKKKKKKKKKKGQV

SEQ ID NO: 269939 - protein, 38 aa, Glycine max
  Clone ID: PAT_MRT3847_85775C.1.pep
GGLAHRGTTILGAYKRGHINPLKWGRPLPNVEYKILPS

SEQ ID NO: 269940 - protein, 121 aa, Glycine max
  unsure (1)..(121): unsure at all Xaa locations
  Clone ID: PAT_MRT3847_85776C.1.pep
PLLQFLLFLFTLVPFQPQPIFPFFKPFSTTPQPQLYQPHKNQRHRRHHRLFPLPPTPNYYCFFLFSTLTFFVRXTPPLRAASALRGAGEVVHLLSLSPVGPLVRGFWLPPLWVFLFVFFFG

SEQ ID NO: 269941 - protein, 41 aa, Glycine max
  Clone ID: PAT_MRT3847_85777C.1.pep
FAIYDSAMLLGEEDIIFKCVYECIYFQKPFFFVNVYGISDF

SEQ ID NO: 269942 - protein, 98 aa, Glycine max
  Clone ID: PAT_MRT3847_85778C.1.pep
EKKLKLYSYWISSCSFRVRFALNLKALEKLLKDHARRYATGDEILLADLFLAPQLDTAIKRFNVDMKEFPTLSRLHETYNEMAAFRKALPENQPDAVH

SEQ ID NO: 269943 - protein, 107 aa, Glycine max
  Clone ID: PAT_MRT3847_85779C.1.pep
SICRSCFKSESCQFNRWFLVRINLILKYYCSCVSALEKLLKDHARRYATGDEILLADLFLAPQLDTAIKRFNVDMKEFPTLSRLHETYNEMAAFRKALPENQPDAVH

SEQ ID NO: 269944 - protein, 52 aa, Glycine max
  Clone ID: PAT_MRT3847_8577C.1.pep
KKSQNKTTKPHTLHPLQNRWQGPGQEETMSWFNLKWWGPKTFLSDPPISSVV

SEQ ID NO: 269945 - protein, 64 aa, Glycine max
  Clone ID: PAT_MRT3847_85780C.1.pep
KRCIKFGHSMSTVTRCAQTAGTDGMKSKIIAPPHMIAHSLRSLLFPLKVETFFHPMENDRRKNK

SEQ ID NO: 269946 - protein, 91 aa, Glycine max
  Clone ID: PAT_MRT3847_85781C.1.pep
VRIRGAFSVYPQGHPFEGKSCVLIGCFILISSLSGQVQFSGVSERVGSLSVAFTLFAGSLPGVFLFFFPFYHLLTTMQAHKQAHKSAQRFQ

SEQ ID NO: 269947 - protein, 44 aa, Glycine max
  Clone ID: PAT_MRT3847_85782C.1.pep
PSSLSHMAHVKCSSCTINVATNVDVVTAEALFRCSLLYTATPSE

SEQ ID NO: 269948 - protein, 205 aa, Glycine max
  unsure (1)..(205): unsure at all Xaa locations
  Clone ID: PAT_MRT3847_85783C.1.pep
MLKLYSYWISSCSFRVRFALNLKDQFNFLFYPCSEFLKLNPIGFVPVLVDGDSVIVDSLAIIMYLEDKYPDPPLLPRDIHQRAINFQAATIVSSSIQPFQNYTVXKGFMALEKLLKDHARRYATGDEILLVCXESMEFNRIRLLLSTGYEMLLADLFLAPQLDTAIKRFNVDMKEFPTLSRLHETYNEMAAFRKALPENQPDAVH

SEQ ID NO: 269949 - protein, 211 aa, Glycine max
  Clone ID: PAT_MRT3847_85784C.1.pep
MEEKKLKLYSYWISSCSFRVRFALNLKGLPYDYLAVTSFSDPEFLKLNPIGFVPVLVDGDSVIVDSLAIIMYLEDKYPDPPLLPRDIHQRAINFQAATIVSSSIQPFQNYTVVKYIEEKVGTDEKLPWTQSVIGKGFMALEKLLKDHARRYATGDEILLADLFLAPQLDTAIKRFNVDMKEFPTLSRLHETYNEMAAFRKALPENQPDAVH

SEQ ID NO: 269950 - protein, 103 aa, Glycine max
  unsure (1)..(103): unsure at all Xaa locations
  Clone ID: PAT_MRT3847_85785C.1.pep
SKKKHQHLMTTTYPPFCRREGDTACCSYKNTEQNSRKKSGVPRGNLISSFPSPCGQNALFHRHSTVASGHQRQVRTEGGDGCCCYYCCCWPWVEEXKKEQPLL

SEQ ID NO: 269951 - protein, 326 aa, Glycine max
  Clone ID: PAT_MRT3847_85786C.1.pep
MMPGNGQLTVPPGFRFHPTDEELLYYYLRKKVSYEVIDLDVIREVDLNKLEPGDLKDKCRIGSGPQNEWYFFSHKDKKYPTGTRTNRATTAGFWKATGRDKSIYHTNSKRIGMRKTLVFYTGRAPHGQKTDWIMHEYRLDEDDADVQEDGWVVCRVFKKKNQSRGFQQELEEEEHLTTHMRASGPCQVLEQKHLHMQGGPYDHYNFDGTMHLPQLFSPESAIAPPTNSSLALSMNAMDILECSQNLLRLTTTGCGLNLMQQQQEERFSGDWSFLDKLLASHHGMDQSKCNPPTNHHAATAVGTSAQKFPFHYLGCDTTHDIMKFSK

SEQ ID NO: 269952 - protein, 91 aa, Glycine max
  Clone ID: PAT_MRT3847_85787C.1.pep
MAKRGYKIQEFVAHSASVNCLNIGKKACRLFITGGDDHKVNLWTIGKPTFLTSLSGHTSPVESVAFDSGEVLVLGGASTGVIKLWDLEEAK

SEQ ID NO: 269953 - protein, 185 aa, Glycine max
  Clone ID: PAT_MRT3847_85788C.1.pep
MANLDYQSIKKAQTEKTKAKKAKAKANKGKQNEHVEDDLVPPPPISHVASKRKNRGPSQHEAAAKRPKVESVSSSTPSPTESKSTLNSPWTSLLIFWQGLVGCTNSGSMNSKMMSPRRLKLKVEEKLRSDLSESVAKILKTHEVNLFKESNLSIFDIDKDVNHEGELVPEVQVEGVIEKPTKPVT

SEQ ID NO: 269954 - protein, 477 aa, Glycine max
  unsure (1)..(477): unsure at all Xaa locations
  Clone ID: PAT_MRT3847_85789C.1.pep
MASKPKSNGNSKCNKGFADSYMLLNPEDAHFFDLVHVLYSRNLGNRKFVDSNAEGSYEGSFRQRWLIFVSVVLQKLLLLIAKPLSFFGSCVEFFINLLVLNGGFIMIVINFLTGHLVVPDRNAPNYLSCIGNLDARVKLDAITRDDCRYYVSLAMMASKASYENAAYLKXLIKNHWKMEFVRFFDCWNDFQEKATTQVLIVLDKHENRDTYVVAFRGTEPFDADAWCTDLDISWYGIPGIGKMHGGFMKALGLQKNVGWPKEIQRDENLPPLAYYVIRDILRKGLSENPNAKFIITGHSLGGALAILYPTIMFLHDEKLLIERLEGIYTFGQPRVGDEAYAQYMRQKLRENSIRYCRFVYCNDIVPRLPYDDKDLLFKHFGICLFFNRRYELRILEEEPNKNYFSPWCVIPMMFNAVLELIRSFTIAYKNGPHYREGWFLFSFRLVGLLIPGLPAHGPQDYINSTLLGSIEKHFKAD

SEQ ID NO: 269955 - protein, 65 aa, Glycine max
  Clone ID: PAT_MRT3847_8578C.1.pep
MSLKINMVVLKVCQTLLFLAGVTASRMELSFFKSDQPSSYDHDESSKPCCDLCMCTRSMPPQCIC

SEQ ID NO: 269956 - protein, 42 aa, Glycine max
  Clone ID: PAT_MRT3847_85790C.1.pep
RLASNAGIATNRGPSNGCERRGFEEVKVVAGLACIITTFLIN

SEQ ID NO: 269957 - protein, 112 aa, Glycine max
  unsure (1)..(112): unsure at all Xaa locations
  Clone ID: PAT_MRT3847_85791C.1.pep
KKDFICHWVGKSKWVKSKEWFGQKQIWGVGTVPILIDCAKTGTLKNHGPLAFPKVNQGGPKVPMGQPKNAPXNLKNWMPREPPKSKSGDKVSPQKCPPSPKTQTLPLFVHKK

SEQ ID NO: 269958 - protein, 31 aa, Glycine max
  Clone ID: PAT_MRT3847_85792C.1.pep
PGCCYMVSLICYTTSSHILYVQPLYMHAISY

SEQ ID NO: 269959 - protein, 116 aa, Glycine max
  unsure (1)..(116): unsure at all Xaa locations
  Clone ID: PAT_MRT3847_85793C.1.pep
EIVLTLLLSLRFISLVWDEEGNIGXGIVSRRLNWKQLTVMETIDIFFNYXRRIFKNIFSHAEQISQAMIVRGFKGDCGTQKIYFXSESSFGMIDIICLQCLTLLIRAVLLSEYYLA

SEQ ID NO: 269960 - protein, 113 aa, Glycine max
  Clone ID: PAT_MRT3847_85794C.1.pep
LTLLLSLRFISLVFDEVRNIALGIVSRRLNWKQLTVMETIDIFFNYFRRIFKNIFSHAEQISQAMIVRGFKGDCGTHKIYFLSESSFGMVDIICLLCLTLLIGAALLSEYYLV

SEQ ID NO: 269961 - protein, 93 aa, Glycine max
  unsure (1)..(93): unsure at all Xaa locations
  Clone ID: PAT_MRT3847_85795C.1.pep
MKIHIASLLRRFLSLANLLDNVTASSASLRSTVPTHQVLTLSQILFPSNFRFEIRSSAYQTXRAATVHGRRPSIWETYTIQHTEKIWDQNTGD

SEQ ID NO: 269962 - protein, 80 aa, Glycine max
  Clone ID: PAT_MRT3847_85796C.1.pep
RASREKGNHFSSKDSTFLISFDFPFVLLLSLGVHPSAQTQKKNLTPQSSNTPPPSGQNVNNYNVPTTRTTSSHDQCDTKF

SEQ ID NO: 269963 - protein, 40 aa, Glycine max
  Clone ID: PAT_MRT3847_85797C.1.pep
TTCKSKLFISIQIGLGALDQPGSLYQTKMGVTRNHVLIPL

SEQ ID NO: 269964 - protein, 191 aa, Glycine max
  Clone ID: PAT_MRT3847_85798C.1.pep
MSALKLNNGHLGGEGLNLGEAKRANDIGAMMNLAGFNGNNGANVGSATVLGGNNNSNGLGGFPVQSNNNMIPGSAAAFSNGGLSGGQYPSSLLMNMNGFNNHPSPSPLMMNMNMQQARQAMMQQQPQMMYHRSPFVPPNTGYYYNHSSYSPAHYSYSYGLPSYPAAGGGGDDHSAAHMFSDDNTSSSCSIM

SEQ ID NO: 269965 - protein, 56 aa, Glycine max
  Clone ID: PAT_MRT3847_85799C.1.pep
TSFVYFSVLCLNFKFKLVKSWIKFNHSPIWYKDSMDRTFYYFPFYNSLFLLVRFDV

SEQ ID NO: 269966 - protein, 66 aa, Glycine max
  unsure (1)..(66): unsure at all Xaa locations
  Clone ID: PAT_MRT3847_8579C.1.pep
APCFLAPSRSXXXXPXXPXXQXXLKFXNFPKXSTPXCXQNPXPVPPITTDFNXCSIAWKAEEDGEA

SEQ ID NO: 269967 - protein, 79 aa, Glycine max
  Clone ID: PAT_MRT3847_857C.1.pep
VPYWWRLSGKQIQAFRFWEKMNLVLEYRWAGTIVTTTTFYPITWTSCFWSFTGTSNHTLPFKSFLLRIPMGESSSPKFG

SEQ ID NO: 269968 - protein, 80 aa, Glycine max
  Clone ID: PAT_MRT3847_85800C.1.pep
EIKNAIKEESKGKFKGIFGFTEKNVVSPDFIGESRSSIFYAKAGIALKKNFVKLVFWGANEGGNSSRGIDFFGFVAKKFF

SEQ ID NO: 269969 - protein, 131 aa, Glycine max
  Clone ID: PAT_MRT3847_85801C.1.pep
MNPDGRKRRFNEAIVNMLYPSPDSPPQPQREQELEPVEAAFIDDGSGSDIISDNLDDCDNNASTSGNEEHDDSETTEKLTRVQRKKIRKKKLNEEAIHRGKLIGPLLPPPMLQLFDQMLLKKVMPRTTLFR

SEQ ID NO: 269970 - protein, 77 aa, Glycine max
  Clone ID: PAT_MRT3847_85802C.1.pep
LCKSYPLLSLNGKLAWWVNIMRVWFSQYQLVHPMYSAVSFILLGLVCSLLPTLSLSCLAMLCYCVDAMNIFHILGPG

SEQ ID NO: 269971 - protein, 49 aa, Glycine max
  unsure (1)..(49): unsure at all Xaa locations
  Clone ID: PAT_MRT3847_85803C.1.pep
KNVFQRMFKEYITCQGNLAQLIGVSXYKFSEFLQIKKKVILLTYQKIPV

SEQ ID NO: 269972 - protein, 81 aa, Glycine max
  unsure (1)..(81): unsure at all Xaa locations
  Clone ID: PAT_MRT3847_85804C.1.pep
SLEDHLTSNKLPLVAYSCRRHDWGLGMLICQWWYFLSSVKYLNSTCALGTDVSRECRVKGRYRVKRGILAEVLVVVYLXYR

SEQ ID NO: 269973 - protein, 84 aa, Glycine max
  Clone ID: PAT_MRT3847_85805C.1.pep
NLIEKAEKTAKSHYWNSCTGCGCFVSMVWMLIFGGKKPVSSDFFSLRSFIVFLSWNYYSVLFYLNLDTKSLLVQAKVEKKPERT

SEQ ID NO: 269974 - protein, 57 aa, Glycine max
  Clone ID: PAT_MRT3847_85806C.1.pep
NVPPVFFRMSKVIFVYLKYRCVYLYLYFYLCHEFLIIHNTNTTDLPKKKKKKKKTKQ

SEQ ID NO: 269975 - protein, 75 aa, Glycine max
  Clone ID: PAT_MRT3847_85807C.1.pep
GITFSILSHLYNHMLIITYVLISLHPSYITCHLVIMNSHMSLSGEFQGNHLNESKVFALVFHFESDASLQRVPII

SEQ ID NO: 269976 - protein, 69 aa, Glycine max
  Clone ID: PAT_MRT3847_85808C.1.pep
AACYGWWGYIDMGHKTITDIVATQTTEGNPWRKYHKRELSHPHLKNLRHTEQALTTHMERTGLKRRGKP

SEQ ID NO: 269977 - protein, 50 aa, Glycine max
  Clone ID: PAT_MRT3847_85809C.1.pep
NFTVGGSIRKGILTSIAKATSIIRPIYRLLLLHTKHEFHHLALHMKKLIW

SEQ ID NO: 269978 - protein, 99 aa, Glycine max
  Clone ID: PAT_MRT3847_8580C.1.pep
WGPWATIGCPNFPFKENLFNRGGKTISQNPEKQVFFVFFAHMAKSLNQEKILKFLKGKIPKWFNGPFKYFNFWGHFFQIPIQHKNWGIFPNFHFRGFIF

SEQ ID NO: 269979 - protein, 156 aa, Glycine max
  unsure (1)..(156): unsure at all Xaa locations
  Clone ID: PAT_MRT3847_85810C.1.pep
WHRPPKNNSTIFFALFLFCAWTHXYLPLAIADLVLDHEGHPLEKGGXYYILTDITAFGGIRAIPTGKERCPLTVEQSRKQLDKRIGTLIWSPYQIRFIAKGHPLNLKFESFAVIMLXAGIPTNWSVAEDLPKRPAVXIGENKNAMDGCFILARVPD

SEQ ID NO: 269980 - protein, 372 aa, Glycine max
  Clone ID: PAT_MRT3847_85811C.1.pep
VFNTYSRELWSKILNSLELSEGNFCVLGSESNNSFFFFSNNTNNNKINDDDADISPLLAKADDPKMAEDPGVLEVVKQLDKACTEAGFFYVKGHGFPETLLKEVRDVTRRFFELSYEEKAKIKMTPAAGFRGYQRLGENITKGVPDMHEAIDCYREVTKDMYGDLGKVMEGSNQWPQNPPTFKVLMEEYVSLCRDLARKIMRGIALALGGSPNEFEGQRAGDPFWVMRLIGYPGVSSVNGTNVHKNDIGCGAHTDYGLLTLLNQDDDVNALQVRNLSGEWITAPPVPGTFVCNIGDMLKIYSNGLYESTLHRVINNNSKYRVSVVYFYETNFDTAVEPLDTHKTRANGNKEFKRAVYGEHLTGKVLTNFVDL

SEQ ID NO: 269981 - protein, 90 aa, Glycine max
  Clone ID: PAT_MRT3847_85812C.1.pep
LWSKAISAGYKRGLRHQREHTALLKIEAVYARDDTEFYLGKRCAYVYKAKNNTVTPGGKPNKTRVIWGKVTRAHGNSGMVRAKFRSNLPA

SEQ ID NO: 269982 - protein, 80 aa, Glycine max
  Clone ID: PAT_MRT3847_85813C.1.pep
KKGQERVATLSWARTNNYNSTQRKTSAGSSHLHESNSSKEDLPFSNKASLSKDFPKPQSSINIECSEACKLAESFTSRNP

SEQ ID NO: 269983 - protein, 116 aa, Glycine max
  Clone ID: PAT_MRT3847_85814C.1.pep
VLKRKKGFKGQRRHVLGDGEQPTLGPGTNVEEAYTTLTVELEKSAPTLVGIECPKDEKLSRRKIFDKPTTRCFTILPMEPKLVVRQKFLNVERYIMKKRDLISGQGGNNPYSMEWT

SEQ ID NO: 269984 - protein, 61 aa, Glycine max
  Clone ID: PAT_MRT3847_85815C.1.pep
SEIVSASKPAMPRNRFKPHLKRVHNVLEHVLDPIKPVRLPLYLERSTFSNVTPVQQQSRDV

SEQ ID NO: 269985 - protein, 118 aa, Glycine max
  Clone ID: PAT_MRT3847_85816C.1.pep
DSSPFSSTEAKREAFQVRIGLLPKFCCNYFLVDCWDAHVPNTFLLNEVVVSVLISCIQISQLGFIQYRKRETSPSRRSVLHRRLISFTIFPLFVFFPFVVPIGCQTDACGGSNWSEVR

SEQ ID NO: 269986 - protein, 64 aa, Glycine max
  Clone ID: PAT_MRT3847_85817C.1.pep
YIITPKLSLSGVLHSCPYSTFQMTNFLATGELEQEYCRVTNFQDVRYNMSKIIEQTQQIAGNTN

SEQ ID NO: 269987 - protein, 55 aa, Glycine max
  Clone ID: PAT_MRT3847_85818C.1.pep
REVNRNNKLAPSTFPSQKMLTKRFCIIHLKIVLCFPPQVAIQTLPNFFKDITNHC

SEQ ID NO: 269988 - protein, 150 aa, Glycine max
  Clone ID: PAT_MRT3847_85819C.1.pep
MGTVPGQLVWEIVKKNNSFLVKQFGRGTQSVEFSRESNNLYNLNSFKYSGLANKKTVTVQPEGKDQAVLLATTKTKKQNKPAALLHKSVMKKEFRRMAKAVENQVAENYYRPDLKKAALARLSAVHRSLKVAKSGVKKRNRQAVKVASRK

SEQ ID NO: 269989 - protein, 72 aa, Glycine max
  Clone ID: PAT_MRT3847_8581C.1.pep
QLLLKQLKCAYESHVVYCRTLNPPTKLTDLKLFLSYFPEFVVKQGNTAVYLLYAHARICSIIRKSLAGCGVA

SEQ ID NO: 269990 - protein, 98 aa, Glycine max
  unsure (1)..(98): unsure at all Xaa locations
  Clone ID: PAT_MRT3847_85820C.1.pep
PPPHTPTPPPPPTPPPPTHTHTPIPHQPILSPHIKHHQSHLPPPTPTPRRGCVSVDTTHHVQQNPPICKKKGPLPPSSQFPGPSKSTRPLXQPPLLST

SEQ ID NO: 269991 - protein, 194 aa, Glycine max
  Clone ID: PAT_MRT3847_85821C.1.pep
MRVVPHLEKKKKKKKKKSGPRVRPRVRCEYGCEKTTEGGLAGEEMATVPGQLVWEIVKKNNSFLVKQFGRGTQSVEFSRESNNLYNLNSFKYSGLANKKTVTVQPEGKDQAVLLATTKTKKQNKPAALLHKSVMKKEFRRMAKAVENQVAKNYYRPDLKKAALARLSAVHRSLKVAKSGVKKRNRQGVRVAGRK

SEQ ID NO: 269992 - protein, 75 aa, Glycine max
  Clone ID: PAT_MRT3847_85822C.1.pep
GTPGSSAFWCHGGFLSRAGDGELSSLDLPWENFEGFFIWGPPFPFFFFGILGLAPNSFFFYLDPPGVPPLGNGLG

SEQ ID NO: 269993 - protein, 111 aa, Glycine max
  Clone ID: PAT_MRT3847_85823C.1.pep
VRLEKTTEGNEGCPSLGKKKKEKKKKKRPTRPPTRPETQNKPAALLHKSVMKKEFRRMAKAVENQVAKNYYRPDLKKAALARLSAVHRSLKVAKSGVKKRNRQGVRVAGRK

SEQ ID NO: 269994 - protein, 104 aa, Glycine max
  unsure (1)..(104): unsure at all Xaa locations
  Clone ID: PAT_MRT3847_85824C.1.pep
KTTDREEWAIKGSEQALPETLKNYPMLXSLALILSSEPRRTPVTQAVAEAYLKKAGLLTXEKLVLTDPQDPLTPNAVSXPTXEREILLSHGHYSVGIIGDHRSD

SEQ ID NO: 269995 - protein, 285 aa, Glycine max
  Clone ID: PAT_MRT3847_85825C.1.pep
TLPPKVPCTAIQSHASNHAQRVPNKHQEQSVGAIQASGDSDAGEAPANGAHAGPNPGQPKQRVRARRGQATDPHSIAERLRRERIAERMKALQELVPNANKTDKASMLDEIIDYVKFLQLQVKVLSMSRLGGAAAVAPLVADMSSEGGGDCIQANGKSNGGGAQASTTNTNTNQTTATTTSNDSLTMTEHQVAKLMEEDMGSAMQYLQGKGLCLMPISLATAISTATCPTRNVNVNPLINAAAGATHFPTAANPAGEGPSSPSMSVLTVQSAIAGNDGAASVSKP

SEQ ID NO: 269996 - protein, 63 aa, Glycine max
  Clone ID: PAT_MRT3847_85826C.1.pep
LIGQLPPRLPSLGRQNNLKKTRINVSKSYNSNCAMSLDFRHNYDRVSLLFLFICVAIFSRHLC

SEQ ID NO: 269997 - protein, 74 aa, Glycine max
  Clone ID: PAT_MRT3847_85827C.1.pep
DRPTLGGKRIETRKRSIAAPMDPASSSDAEVQIYVDNAGDLELIANSVEYSDLNLARYGDTCAEVVITEGGIQS

SEQ ID NO: 269998 - protein, 64 aa, Glycine max
  unsure (1)..(64): unsure at all Xaa locations
  Clone ID: PAT_MRT3847_85828C.1.pep
FFPPSSGKFFKKLELEGTPIFPKGFXTFLSLGEKTAGKNFDLNKGLFLDKKKALGPLKKFYLAF

SEQ ID NO: 269999 - protein, 146 aa, Glycine max
  unsure (1)..(146): unsure at all Xaa locations
  Clone ID: PAT_MRT3847_85829C.1.pep
PKDVDVRWLEALANPGFYKEWLQGSFGAGAALAAETTNKTTNKFPLVLDSSVSALVKRPKKGRSEKEKEEEXEVLVIEGIEFERDLGVKFDVYIDDQAEDDGANGVTSEQEGTAKKKNKKDSNGEAFEAGEVSKKKKKKSKKKDIE

SEQ ID NO: 270000 - protein, 123 aa, Glycine max
  unsure (1)..(123): unsure at all Xaa locations
  Clone ID: PAT_MRT3847_8582C.1.pep
KAVTKANLKKGGSPTWEKLILKDPKDPSPPNEVSSKTPAKKKLIRQGYTIVGIFGDQWSDLLGGPKGKKRTFKLPNXPCTKLRSSFPSQQXKLAPIYQNEKKWVQKGAQASLYVVSTVGQQVM

SEQ ID NO: 270001 - protein, 94 aa, Glycine max
  Clone ID: PAT_MRT3847_85830C.1.pep
LILTFFALLSLQNAALKPGGHQAFLNVEPRKTNEVNFWNKYFIAEFLHSTKKAVAATAEADKDDDLAVFLKDDEILKIEARKKGFVFFVFNSNC

SEQ ID NO: 270002 - protein, 59 aa, Glycine max
  Clone ID: PAT_MRT3847_85831C.1.pep
IIRDYPLNTIEDRRQKPLDQVVEFLKSKNNGEWSLGTNNQSGEGVTNALQIFQSKNTGG

SEQ ID NO: 270003 - protein, 54 aa, Glycine max
  Clone ID: PAT_MRT3847_85832C.1.pep
LGGRSTTSQGSGRTPGPRGLIESAQPRPEQAGQRIPPDRTRNTLGTPAPVTPRT

SEQ ID NO: 270004 - protein, 95 aa, Glycine max
  Clone ID: PAT_MRT3847_85833C.1.pep
TAYTQKRREESQTKMSQLQFKDFSIMVIILSTSFWISSHHCMKEAMLLISFATEIRMVIACFIYLFFNFLLIYTTRQVTTFTPFFLLVGYGYNSS

SEQ ID NO: 270005 - protein, 86 aa, Glycine max
  unsure (1)..(86): unsure at all Xaa locations
  Clone ID: PAT_MRT3847_85834C.1.pep
VGKAYGAYNMYXGGGYHGNRLNKLYRSSIKEEEILAILKPMLKQYALERNEGERFGDFVIRKGIIVATNGGQDFHENTAELEEDDE

SEQ ID NO: 270006 - protein, 90 aa, Glycine max
  Clone ID: PAT_MRT3847_85835C.1.pep
PIFVTAVSLGAVDIVNTAHKMDPHEVMGSEDMSNTGHSTYRKTSSSYGQDYSRSSSWSWSMSASLPLQCLHWSRYCQAGVIACTACQVME

SEQ ID NO: 270007 - protein, 59 aa, Glycine max
  Clone ID: PAT_MRT3847_85836C.1.pep
TSSRKSNQLLYKSSLHLFHYLNVYPIIQIGPMNTSYNYHEKGCSCIWSDHKHNFWILHV

SEQ ID NO: 270008 - protein, 46 aa, Glycine max
  Clone ID: PAT_MRT3847_85837C.1.pep
DIANPKPSFTSRRGHSNNLFKRAPKIQSVGGPLKTQRTGKTRPCPQ

SEQ ID NO: 270009 - protein, 42 aa, Glycine max
  Clone ID: PAT_MRT3847_85838C.1.pep
SVENRIIDFHITLQAPGFIVLAADVSNLGIYVLTMLLTSRLL

SEQ ID NO: 270010 - protein, 94 aa, Glycine max
  Clone ID: PAT_MRT3847_85839C.1.pep
FLSFPINSLCYLMSINIFSISFISLIFIPLIHELVTSTYKFLPSYNVSPTHYLRYERLRIHLGIVSNILGSVWTNFFVNTFKIKMRRKIKLTSP

SEQ ID NO: 270011 - protein, 126 aa, Glycine max
  unsure (1)..(126): unsure at all Xaa locations
  Clone ID: PAT_MRT3847_8583C.1.pep
SSMICSPAGATVXRGGGGMVAPFAXLXSMGGLPTGETRADITCVASXGGRAPCFFFWPPXGAKKGEILSYLPEVGDAQLAKEVESLLRKGWIPCLEFELEPGFVSRAPGRAPRIYDGRSRSLGKLA

SEQ ID NO: 270012 - protein, 67 aa, Glycine max
  Clone ID: PAT_MRT3847_85840C.1.pep
LSSVGIDPPAATVYWLSLNIAAALMMSLQYSCVTWCRHMTHASVFLSSKEIRIVMRTCVTLCALMIE

SEQ ID NO: 270013 - protein, 52 aa, Glycine max
  Clone ID: PAT_MRT3847_85841C.1.pep
LYRPITIRPSSPPNAFPTPPSQNTLSVPLDCALPASSDEELAQTRTLTLPIP

SEQ ID NO: 270014 - protein, 199 aa, Glycine max
  unsure (1)..(199): unsure at all Xaa locations
  Clone ID: PAT_MRT3847_85842C.1.pep
MEAVSDQDTSVCTHCDRAIPAANIDLHYVHCSRKLEKCQVCDDMIPENXAEDHYLNTHAPVSCSLCSETXERDILDIHKEENCPKRMITCEFCEFPLPAIDLAEHQEVCGNRTELCHLCNKYVRLRELYNHEDSCNTIQDNSAGSSRYVRPAERDEGARRRPQNDFSGKRLFFTIAFTGIAVVLGSIFFQRKTDLSNVQ

SEQ ID NO: 270015 - protein, 94 aa, Glycine max
  Clone ID: PAT_MRT3847_85843C.1.pep
YSTTPILNPNLSSLKIKINHHHSPFQTPQLHNTPFKRTLEKDSNPKTIQDRKLNSLRVKTTLSMLRFYQMEIPPILPKSCLYIPTCIDNSMDAY

SEQ ID NO: 270016 - protein, 131 aa, Glycine max
  Clone ID: PAT_MRT3847_85844C.1.pep
FCSPKKAWPFFPPPPIGINQTPFLRGKSLPTKPGLRGQPFPGFKPQPPPNSPPPPFKKAPGKIGWGKNFFKKGKNTPLLKPPKKSFLLIPPPIKRKITFPPKKTRFRLKKPFKGQVFPIPRSPKEKKTKAT

SEQ ID NO: 270017 - protein, 60 aa, Glycine max
  Clone ID: PAT_MRT3847_85845C.1.pep
YNSTKLLFKIQYYLENTWGALMMSSRKSIQTVKYLSASTTSHMISFTLLFFFFNLYWEKK

SEQ ID NO: 270018 - protein, 67 aa, Glycine max
  unsure (1)..(67): unsure at all Xaa locations
  Clone ID: PAT_MRT3847_85846C.1.pep
FDYIIFGAGSHSXEDLPEKEDQEKPKRIDALLRQRIDPQYNEVQAXQMETNLFKLSLDEDETPTWNL

SEQ ID NO: 270019 - protein, 230 aa, Glycine max
  Clone ID: PAT_MRT3847_85847C.1.pep
MAEPSKVIHVRNVGHEISENDLLQLFQPFGVITKLVMLRAKNQALLQMQDVPSAVNALQFYANVQPSIRGRNVYVQFSSHQELTTMDQNQAREDEPNRILLVTVHHMLYPITADVLHQVFSPHGFVEKIVTFQKSAGFQALIQYQSRQSAVTARSTLQGRNIYDGCCQLDIQFSNLDELQVNYNNDRSRDFTNPNLPTEQKGRSSQPGYGDAGNMYAAQGSGARAGAKYF

SEQ ID NO: 270020 - protein, 251 aa, Glycine max
  Clone ID: PAT_MRT3847_85848C.1.pep
ADGFHRALVYDFFPNGSLEKFLAPPDNNDVFLGWEKLQQIALGVATGIEYLHLGCDHRILHFDINPHNVLLDDHFLPIITDFGLAKLCPKNQSTVSMTAARGTLGYIAPEVFSRNFGNVSYKSDIYSYGMLLLEMVGGRKNTNMSAEEIFQVLYPEWIHNLLEGRDFQVTIEDEGDVQIAKKLAIVGLRCIQWNPRDRPSMKTVVQMLKGDGDDLIAPPTPFDITGSSRTNALVPTRRQNFELEVIHEIEE

SEQ ID NO: 270021 - protein, 110 aa, Glycine max
  Clone ID: PAT_MRT3847_85849C.1.pep
MTEPSKVIHVRNVGHEISEQISFGNDLLQLFQPFGVITKLVMLRAKNQALIQMQDVPSAVNALQFYANVQPSIRGRNVYVQFSSHQELTTMEQSQGRGDEVGLFCVYLLD

SEQ ID NO: 270022 - protein, 47 aa, Glycine max
  Clone ID: PAT_MRT3847_8584C.1.pep
TRPAKMVTLVFWAERRLNKPDLDGLPMQAKKRDIQDLNIHLKGGHTP

SEQ ID NO: 270023 - protein, 133 aa, Glycine max
  Clone ID: PAT_MRT3847_85850C.1.pep
FRGRGGWLNLGKDGNWSNHTTGDAHGFNPFGLGGQFGDFSFPSFIFGFFPGLEFGFGFGSFLNTPVDWRETSKTHVWKLVLSGFFNEDLLVELPDKRVLQGNGERGNFVTRVKGPDNGNLKQLKGHMPYGGLG

SEQ ID NO: 270024 - protein, 80 aa, Glycine max
  Clone ID: PAT_MRT3847_85851C.1.pep
GSRKDPLNKQSISSLYLNGWAYCCKKRCHTITLLWNHRSHSMDVPHVFHDSLSQDPFLTCKISITVLHILTSLAQSTTYG

SEQ ID NO: 270025 - protein, 145 aa, Glycine max
  unsure (1)..(145): unsure at all Xaa locations
  Clone ID: PAT_MRT3847_85852C.1.pep
MPLNFCVLPPPPIVWDSEVKEIFFFFNSGPIGVFPNLGPFAPPVDIGFLRIRFFKAPWLPMAFMGGFFKITNNGIPVLVNYPEKGSALFPQKAPPPFXIPEVFFIKAEGKSPPIGAIFAFFRVRPRVKASHVFSYQVFGSQFRNS

SEQ ID NO: 270026 - protein, 136 aa, Glycine max
  unsure (1)..(136): unsure at all Xaa locations
  Clone ID: PAT_MRT3847_85853C.1.pep
PPPIVWDSEGKEIFFFSKTGQIGVFPNLGPFAPPVDLGFLRIRFFKAPWLPMALMGGFFKITNNEIPVFVNDPEKGSALFPQKAPPPFXIPEAFFIKAEGKSPPFGAIFVFCRVGPRVGAFHVFSYPVVGSQFRNS

SEQ ID NO: 270027 - protein, 64 aa, Glycine max
  unsure (1)..(64): unsure at all Xaa locations
  Clone ID: PAT_MRT3847_85854C.1.pep
MSXTCGXCXCADXTSCTKGXSYGXXVETEKSYIETXVMDVPAAEHDGKXXXGXNCTCTXCTCGH

SEQ ID NO: 270028 - protein, 74 aa, Glycine max
  unsure (1)..(74): unsure at all Xaa locations
  Clone ID: PAT_MRT3847_85855C.1.pep
MPPALSDPLSVTPASSDAVLQRSAPDNRRFGDLRGLQWRINLGVLPSSSSTSIDDLRRVTANXKKRYASLRRRL

SEQ ID NO: 270029 - protein, 56 aa, Glycine max
  unsure (1)..(56): unsure at all Xaa locations
  Clone ID: PAT_MRT3847_85856C.1.pep
ISIFWFSXSLRSGSNGPKCSGLVXFXXPRFKXXKXXXXXNSXXDLPXXITFSGXRR

SEQ ID NO: 270030 - protein, 96 aa, Glycine max
  unsure (1)..(96): unsure at all Xaa locations
  Clone ID: PAT_MRT3847_85857C.1.pep
FAFCTEAMTMSLNANPCSAAWQAGWVQPTGYHRDVAGAPGWAATPVQDVQATPARITASQEXSTQTYSAEAPHQPVSDNRRRGKLTLPQGTGRCGT

SEQ ID NO: 270031 - protein, 108 aa, Glycine max
  Clone ID: PAT_MRT3847_85858C.1.pep
LHLMPCEPSDFSWCFNSLPICDSFMQVQPSSSWVLNLDHFFLHLSFNYAFDNFPATVSSFQWSLIVFFGTIVTSPPCPNTCACFSPSSYLPCHAFFRRMFQIISSHRS

SEQ ID NO: 270032 - protein, 59 aa, Glycine max
  Clone ID: PAT_MRT3847_85859C.1.pep
RLCFPTQPKQCVNAKNKNHVSAMIQSEFEYFFSTAPPYFPCAEGSAQMPRTRGSTGNPD

SEQ ID NO: 270033 - protein, 51 aa, Glycine max
  Clone ID: PAT_MRT3847_8585C.1.pep
CVRCPFIADFSNIINSLHSLCLEYIYTGCQVFGAESNGEHVIVLRGNPSLY

SEQ ID NO: 270034 - protein, 76 aa, Glycine max
  Clone ID: PAT_MRT3847_85860C.1.pep
PLLHLIPIHHTHPSHLHHHHHHHGHHHHHHHYPTHAPHPSVLSLNHAPAPTPAHHYKKNLLCNVEPLMMFERKHLQ

SEQ ID NO: 270035 - protein, 77 aa, Glycine max
  unsure (1)..(77): unsure at all Xaa locations
  Clone ID: PAT_MRT3847_85861C.1.pep
MASRPGILSDWPWKPLGSFKYMLLAPCIVHSSYSMMVKDNSEKDMFNFLILPFLLWRMLHNXIWITFSRYRTAXGNA

SEQ ID NO: 270036 - protein, 51 aa, Glycine max
  Clone ID: PAT_MRT3847_85862C.1.pep
LGKLCVTVYRFQKGNPDDVLNPLCLLCNASFIIKYLKGKLANGFRKMVFLF

SEQ ID NO: 270037 - protein, 126 aa, Glycine max
  unsure (1)..(126): unsure at all Xaa locations
  Clone ID: PAT_MRT3847_85863C.1.pep
SERSGGXXKKKKKRKXXEVKDLRFEXXVDXXSSQLKRKERKKKYFEAKKRKHKKSNEEKMDFPGQEKIKFGDIVQAPPKLAVPPKAFKNASQERLRLQAIEEYRSRKGWASRLGSHLPPPATTLDP

SEQ ID NO: 270038 - protein, 44 aa, Glycine max
  Clone ID: PAT_MRT3847_85864C.1.pep
GYFIDAVLVADHLRALRFDYAYIRTLLSMSRSVTIMSDLLCKYV

SEQ ID NO: 270039 - protein, 131 aa, Glycine max
  Clone ID: PAT_MRT3847_85865C.1.pep
KIGGPQFKKGQLGKPNSSPPPRGTVRKRPPPGQKGGTPGKLKPGEKAMGPPPMAPNSGNQAGKTGGTGPKDRKGAPTGGGKGETTAPPVKGGPQGGPLGAPTKNPNKNPLGKKKKQILRAWEGLRGGGPTQ

SEQ ID NO: 270040 - protein, 147 aa, Glycine max
  Clone ID: PAT_MRT3847_85866C.1.pep
EKRMGQPTSACPISSSVMFRPQQAIPVQKLESFAASIAQFIGLELPPVNFYAIAYLFLQKLSLPVEKILPYACRIYEWSMPPDLWLSLSSNYFRLPTHVCVMSILVVAIRILYNINGFGEWEKSLSRDDDAKDNSEMGNAFASDNGH

SEQ ID NO: 270041 - protein, 149 aa, Glycine max
  Clone ID: PAT_MRT3847_85867C.1.pep
DEAVIRRLPRRLMVNLPDAPNREKILSVILAKEDLAPDIDFEAIANMTDGYSGSDLKNLCVTAAHCPIREILEKEKKERSLALSENKPLPGLCSSGDIRPLKMDDFRYAHEQVCASVSSESTNMNELLQWNDLYGEGGSRKMRSLSYFM

SEQ ID NO: 270042 - protein, 468 aa, Glycine max
  unsure (1)..(468): unsure at all Xaa locations
  Clone ID: PAT_MRT3847_85868C.1.pep
ECNKVTTELINVLVRFFQDKVAFHLPLDEALLSDWKQHLERDIETMKAQSNIVRVCTVLNRIGLDCPDLETLCINDQTLTTESVEKIIGWAISYHFMHSSEASIKDSKLVISAKSINYGLNILQGIQNENKNLKKSLKDVVTENEFEKKLLADVIPPTDIGVTFDDIGALENVKDTLKELVMLPLQRPELFCKGQLTKPCKGILLFGPPGTGKTMLAKAVATEAGANFINISMSSITSKWFXSNSINYVKAVFSLASKIAPSVIFVDEVDSMLGRRENPSEHEAMRKMKNEFMVNWDGLRTKDKERVLVLAATNRPFDLDEAVIRRLPRRLMVNLPDAPNREKILSVILAKEDLAPDVDFEAIANMTDGYSGSDLKNLCVTAAHCPIREILEKEKKERSLALSESKPLPGLCGSGDIRPLKMDDFRYAHEQVCASVSSESTNMNELLQWNDLYGEGGSRKMRSLSYFM

SEQ ID NO: 270043 - protein, 47 aa, Glycine max
  Clone ID: PAT_MRT3847_85869C.1.pep
MKEGEQQRVPLRERAEWSDVTSLPQNDCPNPVVPIQYTEDFFQVWIT

SEQ ID NO: 270044 - protein, 84 aa, Glycine max
  Clone ID: PAT_MRT3847_8586C.1.pep
EENTKGSNYHLLSKNNPKHWEGTEFGNPYPFSGGYNCAPRMGPPLGGGPPPLVAGPFFPPNFFFNYTRGNKKGGPRPIHHTLGG

SEQ ID NO: 270045 - protein, 70 aa, Glycine max
  Clone ID: PAT_MRT3847_85870C.1.pep
NLLSHLASVIPRCGFLSSRCQTCFYFLMFRSVGFLGILPFDIDKRSDILALGVRYGSSDTLRCLLSFCRV

SEQ ID NO: 270046 - protein, 70 aa, Glycine max
  Clone ID: PAT_MRT3847_85871C.1.pep
FLQNLLDGPKWVQLLFTPCILLNTPPFSCFWLISFRNVMELYGLRDDACLSVPKLSAKVCIPTTNVPEQN

SEQ ID NO: 270047 - protein, 72 aa, Glycine max
  Clone ID: PAT_MRT3847_85872C.1.pep
SCLNSLMEELFMASKYPQSNAVRLRQLGLFFMVVGWRWRHCGLREGAFEFAGVLLIKVILPVQRTFGKRPRI

SEQ ID NO: 270048 - protein, 262 aa, Glycine max
  Clone ID: PAT_MRT3847_85873C.1.pep
GSVSLRMRGWTPHSTTKQQRWWAGTTSPTPTTTTTPPSSLAQDAVVLEQVSAINFSGFTDESLLPSHLETVSATSNSSLPPKPKLSLFLPQTTKVPILIHPNTTQMKNPSKGLFQVPIFHHPNITQMKSPTMGLFLFLFLRPLLVLPLRLPLPLMKVPCLPFSNRRKRNKVPNGTLSLRSSNSPSPPRRKDCLWFSPKKKSKENWGDDHLLSELGSFSRKEQQKMPKKAMKEEEKVSREAEKIVQWAKQESARFNLGDQLSD

SEQ ID NO: 270049 - protein, 88 aa, Glycine max
  Clone ID: PAT_MRT3847_85874C.1.pep
GSRIGLIRKQIIPIQYMNIFASLFLDNVELIFPEELRSHFFWFQDRHNKKTDNSNSYMNIFASLFIENVELEFTEEFRCHFLWLQDRA

SEQ ID NO: 270050 - protein, 79 aa, Glycine max
  Clone ID: PAT_MRT3847_85875C.1.pep
EKVGIEVITSEAGALWYGCMDCTQTVNSKGYLSLDSRARFTGSDTERRPSLCGDDTRDWMNNGDRDMNGKLTSQMKPAI

SEQ ID NO: 270051 - protein, 219 aa, Glycine max
  unsure (1)..(219): unsure at all Xaa locations
  Clone ID: PAT_MRT3847_85876C.1.pep
MESSEDGSMSYREFHANGSRMVTSEVEAKLDEGNIQEAEDALREGLSLNFEEARALLGKLEYQRGNVEGALRVFDGIDLQAAIQRLQPSFSEKTPVKKGRTRTESPSSVSQHAASLVLEAIYLKSKSLQKLGKFTEAANDCKRILDAVEKIFYLGVPDIQVDNRLQEIVSHAVELLPELWKQAGCYDEAISAYRRALLSQWNLXYDCCARIQKSLXFFC

SEQ ID NO: 270052 - protein, 46 aa, Glycine max
  unsure (1)..(46): unsure at all Xaa locations
  Clone ID: PAT_MRT3847_85877C.1.pep
SAGTKLRMLVGLPEAFTSNWADDTCTNNMYIVSYXGIEGPLKRLPP

SEQ ID NO: 270053 - protein, 54 aa, Glycine max
  Clone ID: PAT_MRT3847_85878C.1.pep
SCEISRLSTLQCMDLMIMQSSFHRCTVCLRFIYCRLRQTPKKLSPCSQSKFNPP

SEQ ID NO: 270054 - protein, 247 aa, Glycine max
  Clone ID: PAT_MRT3847_85879C.1.pep
MAEKVTIMKLKVDLECEKCYKKVKKLLGKYPQIRDQKFDEKENIVFITVVCCSPEKIRDKLCYKGGGSIKSIEILELPKPKAEKPKADPPKAEKPKAEPEKKKDGGGEKPKAEPEKKKDGGGEKPKAEPEKKKDGGEKPKGDAPKKEAEKPKPGPEKPKDKPAPAPLPVQPHMAAPMAVPVGMLYAPPPCYEGRPVGPGYEYGGPMFCYDGYYARPVYDSYGGGRPCYVNRGDQYFSEENPQGCIIM

SEQ ID NO: 270055 - protein, 119 aa, Glycine max
  unsure (1)..(119): unsure at all Xaa locations
  Clone ID: PAT_MRT3847_8587C.1.pep
RHAGKKKFETLSYLPDPDDARLAKEVEYLLRKGWIACLHIDVQHAFEYXERNKSPGYYDGRYWTMWKLPMFGCTDASHVSKELQDDNTEXHNPLIRLIRLEQVRQVQCIIFIAYKPACF

SEQ ID NO: 270056 - protein, 126 aa, Glycine max
  unsure (1)..(126): unsure at all Xaa locations
  Clone ID: PAT_MRT3847_85880C.1.pep
TAARRRQKGETENSNIVPEAIINPISSKHWKTPSKLYQRPTAPDLLLEERGENNFKSFSTNNIYEWNIDAXTEYNIMNTLQHMTMVATTYQTSHECSEETIINILVAGFSGQLKGWWDNYLTNEEK

SEQ ID NO: 270057 - protein, 72 aa, Glycine max
  Clone ID: PAT_MRT3847_85881C.1.pep
NSRLILSVRNAPPPCYGGRPVGPGYEYGGPMLCYDGYYARPVYDSYSGGRPCYGNRCDQYFSEENPQGCTIM

SEQ ID NO: 270058 - protein, 209 aa, Glycine max
  Clone ID: PAT_MRT3847_85882C.1.pep
MAEKVTIMKLKVDLECEKCYKKVKKLLGKYPQIRDQKFDEKENIVFITVVCCSPEKIRDKLCYKGGGSIKSIEILEPPKPKPAGPEKKEAEKPKAEPEKKKDPEKPKADPPKAEKPKTEPEKKKDGGGEKPKEEPEKKKDGGEKPKPGPEKPKDKPTPAPLPVQPHIAAPMAVPVGMLYAPPPCYGGRPRWAWLRVRWAHALLRRLLCK

SEQ ID NO: 270059 - protein, 248 aa, Glycine max
  Clone ID: PAT_MRT3847_85883C.1.pep
MPRWIRVPSMMLFLLVVLLGFPRFNSCCRTSSTERNFARVLTQKFDEKENIVFITVVCCSPEKIRDKLCYKGGGSIKSIEILEPPKPKPAGPEKKEAEKPKAEPEKKKDPEKPKADPPKAEKPKTEPEKKKDGGGEKPKEEPEKKKDGGEKPKPGPEKPKDKPTPAPLPVQPHIAAPMAVPVGMLYAPPPCYGGRPVGPGYEYGGPMLCYDGYYARPVYDSYSGGRPCYGNRCDQYFSEENPQGCTIM

SEQ ID NO: 270060 - protein, 134 aa, Glycine max
  Clone ID: PAT_MRT3847_85884C.1.pep
ETSFATKVEALSRALRYWELPKPKAEKPKADPPKAEKPKAEPEKKKDGGGEKPKAEPEKKKDGGGEKPKAEPEKKKDGGEKPKGDAPKKEAEKPKPGPEKPKDKPAPAPLPVQPHMAAPMAGPVGMLYAPPPCY

SEQ ID NO: 270061 - protein, 74 aa, Glycine max
  Clone ID: PAT_MRT3847_85885C.1.pep
LLLRGGSRWQQQQGPQHGHGLLLLRRSLFRWWLFSFSLFWSLSFLGSSLPMTSQQHPYLPSLSHRHKKINSIVI

SEQ ID NO: 270062 - protein, 41 aa, Glycine max
  Clone ID: PAT_MRT3847_85886C.1.pep
GEILRYDSNKLFHFLKRVNAFLLSTRLEARPCIAIPPSLPL

SEQ ID NO: 270063 - protein, 83 aa, Glycine max
  Clone ID: PAT_MRT3847_85887C.1.pep
KKKQQIKKKKTKKTTRKKEILTLINKTNNQYLNNHKKYHSTLYTLYLKLINSNLTNSSITQIHSITYNFNYKNTHSYPPQLIT

SEQ ID NO: 270064 - protein, 67 aa, Glycine max
  Clone ID: PAT_MRT3847_85888C.1.pep
YFPIDSFLVNKVILMVQVRTAARFKVQNLCCYIEFTLSNNIEFNNDQIFLVVFGRVYNLIGMIGEYY

SEQ ID NO: 270065 - protein, 35 aa, Glycine max
  Clone ID: PAT_MRT3847_85889C.1.pep
SLWPSSFLRYGTHAQNRFLLCRSTFVVELMQCVGR

SEQ ID NO: 270066 - protein, 125 aa, Glycine max
  unsure (1)..(125): unsure at all Xaa locations
  Clone ID: PAT_MRT3847_8588C.1.pep
MLKRGRGGSAGNKFRMSLGLPVAVTVNLARQYGXMNLYIISVKGIKGRLNRLPLACVGDMVMATVKKGKPYLRKKDLSACIVRQCKPMVQKDGVYMYLEDNAVVIVNSKXEMKGSVITGPMEKRV

SEQ ID NO: 270067 - protein, 150 aa, Glycine max
  Clone ID: PAT_MRT3847_85890C.1.pep
HKLSPLSPGPRLSNDLPKLHVPAKLVIPSPGAYPMDEVDMVFVGADGVVESGGIINMMGAYQISLVAKSMSKPVYVAAESYKFARLYPLDQKDLAPALRPVDFGVPIPSKVEVECFARDYTPPQYLTLLFTDLGVLTPSVVSDELIQLYL

SEQ ID NO: 270068 - protein, 74 aa, Glycine max
  Clone ID: PAT_MRT3847_85891C.1.pep
ALLLLILYSTVLLLKDLLACVLLNKTIFPTLLCVWKKLFYLKVHTGNWVGPNFELSSPWILIPNRSLGAPKFSL

SEQ ID NO: 270069 - protein, 137 aa, Glycine max
  Clone ID: PAT_MRT3847_85892C.1.pep
PRPSAPGLLGCSEKKRRGRLSVSRKSLSLDQLVVPETVFALTEKPVCSFKGHLHDVLDLSWSKSQRLLSSSMDKTVRLWHLSSKSCLKVFSHSDYGARIQLFPLAVRLCFSRETTEGGLTAGLLDFRTSEGLIWKKK

SEQ ID NO: 270070 - protein, 70 aa, Glycine max
  unsure (1)..(70): unsure at all Xaa locations
  Clone ID: PAT_MRT3847_85893C.1.pep
MNFAYSAAASYGLXSNVELVRXWSKVPQFLRASPPKQQPNNQLHFTNNAXLWNAXSEPAIKDXRPAITLX

SEQ ID NO: 270071 - protein, 35 aa, Glycine max
  unsure (1)..(35): unsure at all Xaa locations
  Clone ID: PAT_MRT3847_85894C.1.pep
XXTXPNLSSKTXYIXSIXPXIXIIXIXXAQSHXSN

SEQ ID NO: 270072 - protein, 75 aa, Glycine max
  unsure (1)..(75): unsure at all Xaa locations
  Clone ID: PAT_MRT3847_85895C.1.pep
HWQVPAGLGPYSHAMKSTPTFLVSVSEVLSSFFPWTEGGLWSDRLKIDRAGSQKYGRDPKSSGQHSSVVRHYFVX

SEQ ID NO: 270073 - protein, 47 aa, Glycine max
  unsure (1)..(47): unsure at all Xaa locations
  Clone ID: PAT_MRT3847_85896C.1.pep
TLLLTLKSGNEGHTLKLRDQIYKATVNTXIEQDPYSKVARKTCTKTN

SEQ ID NO: 270074 - protein, 123 aa, Glycine max
  Clone ID: PAT_MRT3847_85897C.1.pep
VIIETENLQLGCVIAKQRAATTAVERAGIAKDVTALIGKTPLLYLNKLADGCVARVATKLQLMEPCSTEKDRIDYSLIADAEQTGLITPGKRVLIEPTSGDTCIGLALMATTQGYKLIITMPA

SEQ ID NO: 270075 - protein, 81 aa, Glycine max
  Clone ID: PAT_MRT3847_85898C.1.pep
APTPGGPLKDKARSCTPENGRPPPARQTEPDWHNDTNPEIATQPARPTKHQPHATPHKTERTAAKAPSAPSPEQHTGPIRN

SEQ ID NO: 270076 - protein, 73 aa, Glycine max
  Clone ID: PAT_MRT3847_85899C.1.pep
MKRRKRSHSESRNEEDRLSDLPECVLLHILTFLNAKHAVRTCVLSTRWKDSGRVSNPNSALLRLLDFQGFHQI

SEQ ID NO: 270077 - protein, 86 aa, Glycine max
  unsure (1)..(86): unsure at all Xaa locations
  Clone ID: PAT_MRT3847_8589C.1.pep
IEPPLCPSPXHXNPPPKGYPKRPPHPXHSHIPPPKPINPNSNXNHSFPTPPPPXXXXFCPLPPLSXPPPPPTKHQDLSKHKTQAPQ

SEQ ID NO: 270078 - protein, 68 aa, Glycine max
  Clone ID: PAT_MRT3847_858C.1.pep
MVGFSNNVIGLLFFLTFRLSIPILVAGVWLSKQGATECERWLEKPVIALGLYLMLVSLAGLVGACCRV

SEQ ID NO: 270079 - protein, 43 aa, Glycine max
  Clone ID: PAT_MRT3847_85900C.1.pep
SNKDHDPPRGTHLILRYQHYTRLNSYPSHLQTTILANESLTYS

SEQ ID NO: 270080 - protein, 68 aa, Glycine max
  Clone ID: PAT_MRT3847_85901C.1.pep
TRPLVMALRLSDFVFGSDACKKDSQCFCCSCDPVRTHMREIFSLLMANLVLKKKKKKKKKKKKKGQTI

SEQ ID NO: 270081 - protein, 262 aa, Glycine max
  Clone ID: PAT_MRT3847_85902C.1.pep
FGSSGSSSSRFGSREYQNQRAKEGRFCEKLKIKNRPKFVGVRQRASGKWAAEIKDTSKKIRLWLGTYQTAEEAARAYDEAACLLRGSNTRTNFSTQGCGVATNSPISLKLRNLLDRKAMSNQSQSQIQRQSSMISSTFQGADTSASPNVSAINKIMVMENYSACSSEGKSLFLVQNHQVCDNPYGLDMNMINCSTGITPNTSQFDYSWPLAQQRINELPISKDDFGLNAERQLSGYATNECHEEDTYAYDVNYPLSHFFCFT

SEQ ID NO: 270082 - protein, 132 aa, Glycine max
  Clone ID: PAT_MRT3847_85903C.1.pep
MVLRFRTLKTQSLSKKQQCLSLLNSCRSMDQLRQIQAQVHVSGLYQDTRVLSELVYFCSLSPSKNLRHARSFVHHAATPSPISWNILIRGYAASDSPLEAFWVFRKMRERGAMPNKLTFPFLLKSCAVLEPN

SEQ ID NO: 270083 - protein, 47 aa, Glycine max
  Clone ID: PAT_MRT3847_85904C.1.pep
PLVRSQLKITLPPSNILLRSNKELHSSHKTYYLTSVANSCLVYCYFY

SEQ ID NO: 270084 - protein, 81 aa, Glycine max
  Clone ID: PAT_MRT3847_85905C.1.pep
SFWYIFLPNQQIRAFFKNLRVNYSTDHQWTLKTIIPQFALHNHTITSLHHHQHSLINYQLTPHLFLVNQTFLLTHKRPTAF

SEQ ID NO: 270085 - protein, 216 aa, Glycine max
  unsure (1)..(216): unsure at all Xaa locations
  Clone ID: PAT_MRT3847_85906C.1.pep
MASHSHSCIILALFIAISFSSMDMALATRHLSPFPPLPPLPATPPLLPPLPPVPTVPIPITLPPLPPTPPLPPTPPLPRITTXPEHLHLPLRXPPPQMPPPTPPKPGLLKPPPKPGLLKPPPKPGLLKPPPPKPGKPPPPKPGKPPPPKPGKPPPPPKPGKPPPPKPGKPPPPKPGKPPPPPKPGKPPPPPKPGKLPTPKPGKPPPKPGEPPPKPP

SEQ ID NO: 270086 - protein, 81 aa, Glycine max
  Clone ID: PAT_MRT3847_85907C.1.pep
KKGSSKKNKPGEGKRWKKTIRGPFCPSHFLQKKKLKLDFWGRDFEKGNHGGGLPILKEGKYPACKDWRKTNDKGDFLVKLM

SEQ ID NO: 270087 - protein, 64 aa, Glycine max
  Clone ID: PAT_MRT3847_85908C.1.pep
GISPLIKQHLSLQLTTASLYGNPPPQMPPPTPPKTGLLKPPPGKLPPPKTGLLKPPPKPPKAGL

SEQ ID NO: 270088 - protein, 80 aa, Glycine max
  unsure (1)..(80): unsure at all Xaa locations
  Clone ID: PAT_MRT3847_85909C.1.pep
MXMPSXXLSXXXXXPXTXXRXXNHXXXRXPLFRPXXXSXEICXXXXPXXPXXXXXXXXPPXRXTPXXXXXXVIXYLEXRR

SEQ ID NO: 270089 - protein, 116 aa, Glycine max
  unsure (1)..(116): unsure at all Xaa locations
  Clone ID: PAT_MRT3847_8590C.1.pep
MAYLMLSGAESTKLISGSGIAPPGFGSVGLNFHKRXFLKRNVVSYGNKYMTPRCSISSLSPASQPGFNKEAFWFYKFLATTVYDHVINPWHWTEDMRDNALEHADVYDRKVRMVDV

SEQ ID NO: 270090 - protein, 93 aa, Glycine max
  Clone ID: PAT_MRT3847_85910C.1.pep
NTLQMPLSQAPASEGTAGLKLSPAETVTDACPDHGVHADHPHAKGTGAGPHPCHVQTKGPRSHRQLGERGHSCVRCEFPNAGYGRLSPCEHAF

SEQ ID NO: 270091 - protein, 91 aa, Glycine max
  Clone ID: PAT_MRT3847_85911C.1.pep
STSHQSEKFAPCDIEHRSPTLLDAFDGGRRETSGGSRGSVAGPAGCTPSEPAICKILLQFLRPEETTSLFEGSALLDVRILKFRELRLDRT

SEQ ID NO: 270092 - protein, 71 aa, Glycine max
  unsure (1)..(71): unsure at all Xaa locations
  Clone ID: PAT_MRT3847_85912C.1.pep
MGFIFSLRFPCVLAHFLGWPNTPLSPPITDQLTDDHIAXFIEAFILFYKDXDGYITTKEHYTVMLSLWQNP

SEQ ID NO: 270093 - protein, 41 aa, Glycine max
  Clone ID: PAT_MRT3847_85913C.1.pep
IMPISEDCETSLSGYFTEVSLTHGEMGKKSARMEFKLVHCG

SEQ ID NO: 270094 - protein, 70 aa, Glycine max
  unsure (1)..(70): unsure at all Xaa locations
  Clone ID: PAT_MRT3847_85914C.1.pep
AGLARRPGSSVLISSTPPLTLQRFLGFLFGSDHGDVFVIGGGPGCYVAVISPAXVCLSTTCIDERGSLGG

SEQ ID NO: 270095 - protein, 63 aa, Glycine max
  Clone ID: PAT_MRT3847_85915C.1.pep
YKSISDIQILNLLCPPRLISNKLPFHSHSQNYTCFLYILKCNNKFLFLLSNIIKDKQAYKCTL

SEQ ID NO: 270096 - protein, 101 aa, Glycine max
  Clone ID: PAT_MRT3847_85916C.1.pep
LHRQEDNRAPNHIKFHQTKISPLFPFLGKGAFSPTTPITMHNINYILALNPRTKISVSHRRGVTLLGHPPGKKNRGEGGPPFIAKVVTIFFTKGEVVFFTS

SEQ ID NO: 270097 - protein, 53 aa, Glycine max
  Clone ID: PAT_MRT3847_85917C.1.pep
KRRASKRLQAPCGVAHRVSSPANNEQVSHQQVKVYLGGKIHKAPPFKLVMVFL

SEQ ID NO: 270098 - protein, 56 aa, Glycine max
  Clone ID: PAT_MRT3847_85918C.1.pep
RLELLVPCSLYTPVLSCDSLLSGLILLLLRFIYLLLHLHSSYFIHTSYLTSNTLLN

SEQ ID NO: 270099 - protein, 67 aa, Glycine max
  Clone ID: PAT_MRT3847_85919C.1.pep
VTSKYCTINRPTPSIGNIIIPYIIFSLLFLHENSPGTWRKSNFSEPSRGHSTGISSMSPDHSHEVKA

SEQ ID NO: 270100 - protein, 72 aa, Glycine max
  Clone ID: PAT_MRT3847_8591C.1.pep
SWTNSRAINTCCRRCSTCSGRGPPRPFEHIKMVLPWVPHKLLRFWDTPWDHNSIFWPRHIKSTRAGPFAFAR

SEQ ID NO: 270101 - protein, 53 aa, Glycine max
  Clone ID: PAT_MRT3847_85920C.1.pep
LSETKTLSLRVLASNQRFHISSFCRTEVTIDQLRLSFVNLDSFSLNNNWDNAH

SEQ ID NO: 270102 - protein, 47 aa, Glycine max
  Clone ID: PAT_MRT3847_85921C.1.pep
RALYERDIYRKPSMHAVVGNLHSAAVVSKRKIVCVSTAFVKVQQLVA

SEQ ID NO: 270103 - protein, 84 aa, Glycine max
  Clone ID: PAT_MRT3847_85922C.1.pep
ASHFSLSRLSARLALSSNSLTRAKWENGGKRDIKIRKPFLSLICTKLKRAQENGSLWRGLKTVNFREHRAEQGAKFSSFREISE

SEQ ID NO: 270104 - protein, 177 aa, Glycine max
  unsure (1)..(177): unsure at all Xaa locations
  Clone ID: PAT_MRT3847_85923C.1.pep
MAVALIETADGGIAPTXHEDGLSESFDWRENGTVPAVNLQGLXICWAFCGTGXSMKGATFLATANLVILREPRFLAWDXKCDLTYPTSCDIGXTGGFMTXAYSYRLHSGGKEEEFPYPYSAERGECKPDPSQYSPLRXTLVTPIRADDNPIAGYSFRTGSLAMGAEAILMLASFGGA

SEQ ID NO: 270105 - protein, 200 aa, Glycine max
  Clone ID: PAT_MRT3847_85924C.1.pep
IPVVIEKTGRGERAYDIYSRLLEDRIVFIGTPIDDHVANVVIAQLLFLQKENKHQDINLYINSPGGHVTAGLAIYDTMQFVQCDVATYCIGQAASMGAVLLAAGAKGKRFALPNSRIMIHQPWGGARGTAADIEIQAEEILKLKKTLNSILSRHTGRPEADIEKDTDRDRFMASREAKEYGLVDEVVETLKVPGAKKQAK

SEQ ID NO: 270106 - protein, 93 aa, Glycine max
  unsure (1)..(93): unsure at all Xaa locations
  Clone ID: PAT_MRT3847_85925C.1.pep
EELFTQPYEKVNWKKARYPWAKGERYXPIFWFQNLFWNSYSILMDPLLIGGLLTSLLKKKAFKVPWNLFFNKNKIGHSLPMGGGKKVYFFLLG

SEQ ID NO: 270107 - protein, 91 aa, Glycine max
  Clone ID: PAT_MRT3847_85926C.1.pep
KVKKKRNNNGGKSNQVNEWGFTVSLMKRSVALQKGLPILGVFRTFAAVGVDPAIIGVGPAAAIPVAVKAARLNLDDTDRFEINDAFASQFV

SEQ ID NO: 270108 - protein, 123 aa, Glycine max
  Clone ID: PAT_MRT3847_85927C.1.pep
MRSIPIPPTTTTNTLAPTSSTVVVVTTMTTMTNKTSVPSAWHSPVPYLFGGLAAIMALIALALLMLACSYWRLTQESNNNNNNNVVKEGDDDSEKKEQPKVYEEKILVIMAGDHNPTFLATPS

SEQ ID NO: 270109 - protein, 53 aa, Glycine max
  Clone ID: PAT_MRT3847_85928C.1.pep
FSPFSFIKWSSNIKSFSLNVFGSISPFKEKKKEKRAGPNTYISGLDTTYNDLV

SEQ ID NO: 270110 - protein, 326 aa, Glycine max
  Clone ID: PAT_MRT3847_85929C.1.pep
EVRRWNKQDNWGRKTLKEASESTVPKIVGEGIYGVGPVLAALSADRREFYALYVQEGLDLSGNNRKKKDKKGFERVLKIAEKLGLSVKEASKHDLNMVADNRPHQGLVLDASQLEMVKVNELDPVSIDEGKGSLWVALDEVTDPQNLGAIIRSAYFFGASGVVLCAKNSAPLSGVVSKASAGSLELMELRYCKNMMQFLVSSAENGWRVLGGSVSSKAIALDEVVPGPPTILVLGSEGTGLRPLVERSCTQLVRIPGNIHFDSSTSELDGESSGLNSQSSGKEFLSFLAVESLNVSVAAGVLIHHLIGKKLVDSFPEEHKQIDMSE

SEQ ID NO: 270111 - protein, 270 aa, Glycine max
  unsure (1)..(270): unsure at all Xaa locations
  Clone ID: PAT_MRT3847_8592C.1.pep
MEIDLELPICEHEMLKSGSSGNDVTDTACDIYLEEQSINPSSMTEHSKKVLSENAFCCQDQVDLNSNQVDAIDKFPFKEPQNGLEFESKEAAYSFYREYARSVGFGITIKASRRSKKSGKFIDIKIACSRFGSKRESGTVVNPRPCKKTGCKAGIHIKKKQDGNWIIYNFVKEHNHGICPDDFFRGSKQTSIVASQKKGMQLALEEGDVQSMIEYFVSMQCKNPNFFYXIDLDQNRHLRTVFWVDSKGRLDYQNFHDIVLIALLPENKYS

SEQ ID NO: 270112 - protein, 174 aa, Glycine max
  unsure (1)..(174): unsure at all Xaa locations
  Clone ID: PAT_MRT3847_85930C.1.pep
MAECVASAFCVKLNTQRRPVRERGFSGQITNLKTFQRKYSRSGCKFVHFSTWKTFDLSVFGTTHLKFTPRLQELPLKCIGLGALVDFNGAKASDLVPVVGQMLLMGSIFLTYMAGVIPVEKSYASYXKTISDKNVFPESSDISGSSAKQISGFESKYVLNVVRRKLFKFSKCFS

SEQ ID NO: 270113 - protein, 116 aa, Glycine max
  Clone ID: PAT_MRT3847_85931C.1.pep
MAECVASAFCVKLNAQRRPVRERGFSGQITSLKSVQRKYSRNGCKFVHFSMWKTFELSVFGATHLKFTPHLQEFPLKCIGLGALVDFNGAAASDLVPVVDQMLLLGSIFLTYMAGV

SEQ ID NO: 270114 - protein, 88 aa, Glycine max
  unsure (1)..(88): unsure at all Xaa locations
  Clone ID: PAT_MRT3847_85932C.1.pep
RQRRPRFNALLGYLSHQSALPHHPPHRLHLHHRLSSSNRSMMPCSSVNPIQTCREVKRDSEAXYVVLSQPVVCVHACVRVRVGRNCNS

SEQ ID NO: 270115 - protein, 91 aa, Glycine max
  Clone ID: PAT_MRT3847_85933C.1.pep
IDVDMQVLSARISIKGSNAKNADNALGEEHDANVILTMGLYMQGDNYTCLEALGNIYDGESTIHNMAYADDVVRVSVQKIYDDDAKVSFFM

SEQ ID NO: 270116 - protein, 65 aa, Glycine max
  Clone ID: PAT_MRT3847_85934C.1.pep
CNHLYTLAITNVDVGALFISIMTKVKVLTRRFFVGHIFHVLSFMDLTVHKLALILMAILHSRSLF

SEQ ID NO: 270117 - protein, 88 aa, Glycine max
  Clone ID: PAT_MRT3847_85935C.1.pep
LFFNIILELGLKSGVESVVLEYIHNLVDILKDTTFEKGNAGLVKNYLEARGTFNTLKGIIALQSYNRGQLVRLTAISALQCVKSIVEF

SEQ ID NO: 270118 - protein, 37 aa, Glycine max
  Clone ID: PAT_MRT3847_85936C.1.pep
QLIYIASYISLHTMPTIDNRQLNVTPREPFCRLLAAV

SEQ ID NO: 270119 - protein, 81 aa, Glycine max
  Clone ID: PAT_MRT3847_85937C.1.pep
TIINPFTKYAVLITPIANAIEEKWLLCKRKPIAILVRTTILVSTVLMALFMPLLGYVMAFIGAFFSVTISLLFPCICYLKM

SEQ ID NO: 270120 - protein, 109 aa, Glycine max
  unsure (1)..(109): unsure at all Xaa locations
  Clone ID: PAT_MRT3847_85938C.1.pep
LXXXPXPXEXPKASWXXXTPCLWTXLQPTLXLDXTSXRRKXXXXQXGNQFXXLXKXXSXAFLXXXLXIXXHXPXXPEXXLSXXXXXISXNXTXXXDFDLEPNPXLLRSX

SEQ ID NO: 270121 - protein, 218 aa, Glycine max
  Clone ID: PAT_MRT3847_85939C.1.pep
TFSRTQHQWSRVTGIIASPGDPRALVGSARCDRNLSRHSATAPLTTTAIMPISIPVSTDPRTLIVIHSTVSTATSTPTEAAPLQIYPTPTSTTDPAHHDSNVFNYYFLFLAVFAILAAVLLRWLHVRKKRQKQQRRLIGQHALARDLEGWAGARRFMHGRVGRHQPTHVRREEGLDENGEAPPPYQPKSDVMVQVVSEPAAGPAVPLRALARDEHHRA

SEQ ID NO: 270122 - protein, 194 aa, Glycine max
  Clone ID: PAT_MRT3847_8593C.1.pep
LILERRIVNGDKGKRKNGVTHGSYGESGRGESQSSGIAVEFDRRDDPQVGVAWEKKSPATNVHVVDASEGDEGTVAHDGYRWRNLELPIFDSEDSMGWLTKIERYFWLRAVREEDKLEVVMVTMDEEALGWFQWWESWNPNHSCDRRTMQGFIGHFEKCVGMVKGLEEPFLVEVFLKGLKEEISTEVRLQNQRT

SEQ ID NO: 270123 - protein, 53 aa, Glycine max
  Clone ID: PAT_MRT3847_85940C.1.pep
LCFFLPVGEGFTFKRNSRRDFYLMKVCGLWNGVFFSFHVTFYCKNNGAKFRCA

SEQ ID NO: 270124 - protein, 52 aa, Glycine max
  Clone ID: PAT_MRT3847_85941C.1.pep
IDWELITIDPKSNARNSPTVMSTVVRGSHAKESHSAANPDALNYHEDHAYCA

SEQ ID NO: 270125 - protein, 70 aa, Glycine max
  Clone ID: PAT_MRT3847_85942C.1.pep
FFFFFFFFFFFFFFFFFFFFFFFFFFFFLGTNQKGPKKRGPPKGGTQKKKPGGGKKQGGSPGKEGPRKLG

SEQ ID NO: 270126 - protein, 183 aa, Glycine max
  Clone ID: PAT_MRT3847_85943C.1.pep
MSLPIPSRFVFNDIHDCEQVQLHSLARQLRGNCTATGCVVDLNTPCPAELMVMSSGEGVACKSACEAFDDPQYCCSGAYATPDTCKPSSYSQFFKSACPRAYSYAYDDGSSTFTCATADYTITFCPQPSTSSIKSGNGKYPMAVDNSGGNVDVRKNNVMAVIAYVLVAFVATQLGGPSLPKLH

SEQ ID NO: 270127 - protein, 284 aa, Glycine max
  Clone ID: PAT_MRT3847_85944C.1.pep
MASSAQFSTTLVVLCLFQFLAGSYSTTFTIVNKCSYTVWPGILTGAGTSPLSTTGFVLQPGESNVITVPAAWSGRLWGRTVCTQDATGKFSCVTGDCGSSAVECNGAGAAPPATLAEFTLNGAGGLDFFDVSLVDGYNLPMIVEPQGGSGAGNCSATGCVVDLNTPCPTELKVMSSGDGVACKSACEAFDDPQYCCSGAYATPDTCKPSSYSQFFKSACPRAYSYAYDDGSSTFTCATADYTITFCPQPSTSSIKSGNGKYPMAVDTSGANVDVRKNNVMAVIA

SEQ ID NO: 270128 - protein, 49 aa, Glycine max
  Clone ID: PAT_MRT3847_85945C.1.pep
IAFKRSKLLVCCPLPSIFYILLKTSFLERVVIKMNSWAGLVKHSRLLEA

SEQ ID NO: 270129 - protein, 81 aa, Glycine max
  Clone ID: PAT_MRT3847_85946C.1.pep
QLGGPFTAKGALKWMGYDFLLINTQCMMAMASIYRLGDQLASDSYLCVKRCNGNRCKDCHFSTCKTKTLICHVFIWSTYLE

SEQ ID NO: 270130 - protein, 174 aa, Glycine max
  Clone ID: PAT_MRT3847_85947C.1.pep
MGTRIPSHQLSSGLYVSGRPEQVKERPPTMTSRSVPYTGGDPKKSGELGKMLEIPGVEPKPSRPSSGSVRSGPNSGPAGGRLSGSGPMSRKSSGSGPIALQPTGLITSGPVGSRRSGQLEQPTAAAPTAGGKMVYGSGVTSFSEEVKVGFRGRAGGVFMGGVGMRPFGGGVGYG

SEQ ID NO: 270131 - protein, 64 aa, Glycine max
  unsure (1)..(64): unsure at all Xaa locations
  Clone ID: PAT_MRT3847_85948C.1.pep
VIDCISKVFPQEGVSGFXLGCPXFIRTTPAAVIAFTPFEMTPRFLVSNFPSDLGPHILPRVIVV

SEQ ID NO: 270132 - protein, 108 aa, Glycine max
  Clone ID: PAT_MRT3847_85949C.1.pep
PIYGPSPCGRSPRRRSLSPRGRSYTRSPPMVGVGGPYVKKGPRAAQTGGVFNLAPDCKRIVRLCYSTMGLRRKYKSILWGKARSFYSRVGTVSFFMSKPVGNFFREHL

SEQ ID NO: 270133 - protein, 51 aa, Glycine max
  Clone ID: PAT_MRT3847_8594C.1.pep
SARHADVGNTFNLGAACIKRYFRLLICEYSFFQKEKRMIIFYFGTLEHCNI

SEQ ID NO: 270134 - protein, 67 aa, Glycine max
  Clone ID: PAT_MRT3847_85950C.1.pep
KVRKMLLLLTPICGNKQPFKRNNHLWAKKYSCFAPLVTKGYSKCTESDQLHALLFNKDVARLYSFSL

SEQ ID NO: 270135 - protein, 49 aa, Glycine max
  Clone ID: PAT_MRT3847_85951C.1.pep
AINTKLDLSIFAHKYFEALKCSTLMVSAVTIVCLRPLIDEDNTYKDIIK

SEQ ID NO: 270136 - protein, 107 aa, Glycine max
  Clone ID: PAT_MRT3847_85952C.1.pep
ESTLITVEHFARVARYFSLTSGSQTLDRLCFTIRQMHCKGDRLTHLVVARSYLVCLEVRYKYLSEANVDLGLFPPVVRHIADADSVAAVHPLLLLSLALAIFVRTYE

SEQ ID NO: 270137 - protein, 99 aa, Glycine max
  Clone ID: PAT_MRT3847_85953C.1.pep
ALAFFLSLSTQFPKVGTALFNNPSPSSFHHRARNCNYISTPQISLSEETIIAPLIRAPDVPDGYSSYSSCCCCYLRAGGLGQALRLQGLVQSHSSPRFP

SEQ ID NO: 270138 - protein, 94 aa, Glycine max
  Clone ID: PAT_MRT3847_85954C.1.pep
RKFIKAPNIIEACWYQPLPNWVKCNVDGVAKAQGMRLLVVSSEAQMPLQWVVFPFTLVFTMFFCWTRIWLESYSRLVVDAILIQVSIPWKLQNR

SEQ ID NO: 270139 - protein, 64 aa, Glycine max
  Clone ID: PAT_MRT3847_85955C.1.pep
APPQSQFLLSFGIVYYAPPPEKKAVKIVFAESLRLIMEIHVTSPTSGSLRGWFVLYLADHRVEI

SEQ ID NO: 270140 - protein, 76 aa, Glycine max
  unsure (1)..(76): unsure at all Xaa locations
  Clone ID: PAT_MRT3847_85956C.1.pep
GDQRKLRPDGVGGEESMSQIGVGQVPGCRQSHCSQEWGDRXCSRRRAGILPYGFTRSPSREVMEVVGSXYFSGGAK

SEQ ID NO: 270141 - protein, 95 aa, Glycine max
  Clone ID: PAT_MRT3847_85957C.1.pep
SKFLINFCVRFTHKLVISLFLTFFFSFSVKTLFVTFDFEFRFRFLCLVLLKPMTPRLVSFWLRYGMASSILHPFCSFFFLSFFSLNFPCQYYVIL

SEQ ID NO: 270142 - protein, 86 aa, Glycine max
  Clone ID: PAT_MRT3847_85958C.1.pep
GEDAMQKSIDGYLVKPKVRHIQGNGIRGEGHIRHLNKSTNSEVNSLAKTNTGMPALKRSAFGRSTTVTAFTKSQTSEASLPVDQVS

SEQ ID NO: 270143 - protein, 113 aa, Glycine max
  Clone ID: PAT_MRT3847_85959C.1.pep
EKKKFKFYVAYSQAMFFAGSKRFVHISLVVLLGVTILQTWVSWHSCQVGAIRVLPSSAMAKVKFNHGVEDEKVKEDLLHKHFNRRTFGLNNGTQKGFDESKRRVPSCPDPLHN

SEQ ID NO: 270144 - protein, 171 aa, Glycine max
  unsure (1)..(171): unsure at all Xaa locations
  Clone ID: PAT_MRT3847_8595C.1.pep
PGSTPRPTRLGVWDKTSATLHCRKLADSDFLKRNFKQMPNVLGGATEDKASLWTQLHYVSCNNLEMQEAYLDNLVNALRELYLHSPEEARHSRRKALSCIEWLQKADVPTIAQIEEFHSMQRMMNAADSNDDIDLHVSIDLLCSQGAGXALANKIASNDKLALANTQELFD

SEQ ID NO: 270145 - protein, 423 aa, Glycine max
  unsure (1)..(423): unsure at all Xaa locations
  Clone ID: PAT_MRT3847_85960C.1.pep
MSTTTVSGGDPPSRGFDTPTLDREAAALLHAISEHGGYAYVSMAVLASGGDIRAAEAAREMAWEQLHSGPWHSVLPVWRDAYSMACLHVARHHYGNGEFWDALRVLDLGIIMGGTLLRKDLDSAIEKISEQTRKTVRVSDLGNSEHRLVDREFDMAELLHXPMLQLLPVKSLSNKLVAKKSALSLEKFLKDHYLSGCPVIISDCMAHWPAKMKWNDEDYLLRVAGDRTVPVEVGKNYLCTEWKQELITFSEFLQRIKSDSCSPGGLTYLAQHPLFDQINELRKDIFIPDYCFTGGEQLRSLNAWFRSVGTLTPLHHDPHHNILARISRKKXLGFNLHICLRIVRPTLVPRLHKFQPRVDLDXIIDEKPRFRRCKILEFVEXVILEEGXEMLYIPPKWWHYVRSLTTSFSVSFWWSEGESSDAS

SEQ ID NO: 270146 - protein, 91 aa, Glycine max
  Clone ID: PAT_MRT3847_85961C.1.pep
NKTKRPFFFKHCGGEAGIKGQKKGKKKIRGGGEILKTKPTFPLFFSLKKKNFFFKNFFPGEITHHSWAHWPHPPQILSPTKLKNLFTDPFF

SEQ ID NO: 270147 - protein, 129 aa, Glycine max
  Clone ID: PAT_MRT3847_85962C.1.pep
PPPLLFPSKLVGKTSTDSSEYIIHVISRSIKVRVGYLWLALPIVVKIKNPVSASSPASTVVNISRLVSISKLRSGSLGIACLSGGYSGCIVSSTPVSDEMVRATRSSQTPRNAVVPVCFVSLTFSLYLT

SEQ ID NO: 270148 - protein, 67 aa, Glycine max
  Clone ID: PAT_MRT3847_85963C.1.pep
LLYPTCHTPVYLGLFSLAKSLTPLSFFFSPSFVFGDLLLQQSLNAFWLLTRSLCFAFNVVLLYFCHE

SEQ ID NO: 270149 - protein, 56 aa, Glycine max
  Clone ID: PAT_MRT3847_85964C.1.pep
PLRAFFPHAGAPRREACQRRIDPITSRNSQQSWTNLVLPISTLLSGGCPYLFAFVH

SEQ ID NO: 270150 - protein, 49 aa, Glycine max
  Clone ID: PAT_MRT3847_85965C.1.pep
LTGTNWPSRAGSRTNDGVSFRVTLLAMLAVMAHPLFYLFAFMSEHGLYI

SEQ ID NO: 270151 - protein, 70 aa, Glycine max
  Clone ID: PAT_MRT3847_85966C.1.pep
KNYQVPRAEFISRESSNNMHRDLVVDSKLSPKWHEAPMTPADYRNTKTYDFEKIGSFLIQVNTLSLDEEV

SEQ ID NO: 270152 - protein, 88 aa, Glycine max
  Clone ID: PAT_MRT3847_85967C.1.pep
GQNFKMCKPGAAFKNIGLGAKRLTKSQGVVKKRLPKGGKVPFPGSPNFRDILLKKKNKVGGEGQKKKKKTPKKKKKKKKKKKGRPLAI

SEQ ID NO: 270153 - protein, 50 aa, Glycine max
  Clone ID: PAT_MRT3847_85968C.1.pep
QLVENESPMEGSPPGCSKILNWHLHLAANKIVYPKGWVLQKNLDAVIPVK

SEQ ID NO: 270154 - protein, 128 aa, Glycine max
  unsure (1)..(128): unsure at all Xaa locations
  Clone ID: PAT_MRT3847_85969C.1.pep
YNLIYRQDNINLFRRFLNTVGFLTCPCHISCYQTFPLRMKTRYCDPSSFLKFSTFKSSFXSHNILSFKTIPXNAYXPTNYYINIXQFTSYSKTVNQQSFLYSIELLIHHNDLFIFCIYYTLLSNIPYY

SEQ ID NO: 270155 - protein, 62 aa, Glycine max
  unsure (1)..(62): unsure at all Xaa locations
  Clone ID: PAT_MRT3847_8596C.1.pep
ISLIHILLFIKLLLLPCVWMKDLNKTIHFLMNLKYSYYXSVVWIRNFKEFKFTSIFKRILIE

SEQ ID NO: 270156 - protein, 67 aa, Glycine max
  unsure (1)..(67): unsure at all Xaa locations
  Clone ID: PAT_MRT3847_85970C.1.pep
IIGIYRISGIGTTTIAQDVDNKLCSEYEGCVFLCHIEXETDXHGILSLKRDLFLTLLGQEYWQIVTR

SEQ ID NO: 270157 - protein, 67 aa, Glycine max
  Clone ID: PAT_MRT3847_85971C.1.pep
SKIKSYKAPVIMEGEFPLIEMIIFPMRCTTLIPLNMQIFIRDLISVPLGTQPNDNLALRGIHIFLAM

SEQ ID NO: 270158 - protein, 68 aa, Glycine max
  Clone ID: PAT_MRT3847_85972C.1.pep
SVFPNQKRGSPMAVFSALMSAIVSAHQFESPHLRLEFWSQWGDKLLLPDSKSKERCPPRSHTSLELNM

SEQ ID NO: 270159 - protein, 102 aa, Glycine max
  unsure (1)..(102): unsure at all Xaa locations
  Clone ID: PAT_MRT3847_85973C.1.pep
LDLTIHRGKGKGLSIHGWKYARYNVLRNHTQVYVKYAATIHHDALSSYCIVRYATNSETKDXLTIXKIGNDYDNKIDDETTLMEIKLVCHMEHDNIIKNNDI

SEQ ID NO: 270160 - protein, 49 aa, Glycine max
  Clone ID: PAT_MRT3847_85974C.1.pep
FLTIIRVIIGDAPYMYIYIYTSSATGRTCIYWNVLCDRDCFYGSHIKRC

SEQ ID NO: 270161 - protein, 58 aa, Glycine max
  Clone ID: PAT_MRT3847_85975C.1.pep
IGRKLSTKPSFNSTEVTTMHTCESIAITLSLRNYVSLIKGLNKVCLLYHATCMVRFYW

SEQ ID NO: 270162 - protein, 49 aa, Glycine max
  Clone ID: PAT_MRT3847_85976C.1.pep
HNFLFPFFSTASHKLSSDSIFQVSLFFIEDLLNPLSRHSQILISHLMLC

SEQ ID NO: 270163 - protein, 137 aa, Glycine max
  Clone ID: PAT_MRT3847_85977C.1.pep
PPCIFSTSPSGKGDDDDDDMAEPFYACRRLCDLTIDYCTVKDARILCISSATLVSLTMRSDQSGDFYKIVLSTPNLCAFAFTGAPYQQLLGSNLSSLERVSIDAEIWSTSLESPLILLSWLLELANVKSLTVSASTL

SEQ ID NO: 270164 - protein, 165 aa, Glycine max
  Clone ID: PAT_MRT3847_85978C.1.pep
MLADFCCAGRDLKDRDHNGTDDKKEDLQKRMTLEEKIGQMGLIERSGGTPQVKNKYFIASVLSGGGSDTETNASADTRIQMVNGTQTGSLGTRLAIPMIDGLHAEHGHDNDYKAPTLAPNGNLRDTNDPLLINNIAHATALADRATGIQYDMAPCIADSTDTTRR

SEQ ID NO: 270165 - protein, 119 aa, Glycine max
  Clone ID: PAT_MRT3847_85979C.1.pep
ARVLSPDPTVKVVTTQLFERPSGYKMSEPNFFYVVNSAHLNQSDFGILFPWLTQKIFKAEQPERALRLNLRAQLQMLRENNVPVSRTFAGDLVDGTSFDKLDKFNEANGDPCKDGINND

SEQ ID NO: 270166 - protein, 109 aa, Glycine max
  Clone ID: PAT_MRT3847_8597C.1.pep
FKKVQNLFWGVLPQKKEQSSLGFLDLYQALLVFFNFKGPLLVPPTLPNLLNGEILRGVMERVPNGVFLIEMGVRVFKLGEKTVPIKEKIWGVIFFRKKKNWIPFKKKNN

SEQ ID NO: 270167 - protein, 74 aa, Glycine max
  Clone ID: PAT_MRT3847_85980C.1.pep
KTFGGCFTLFLRDSGKTTLFFWGPKGGGGKRAGWCSPLTISPCLFKGGPPFFPWGLRAPKGGRRPPPGVVKNVF

SEQ ID NO: 270168 - protein, 71 aa, Glycine max
  Clone ID: PAT_MRT3847_85981C.1.pep
LIVITTIIHSEKYFKHHKIREGCVLLVYSAIKCVLWWSGRSSNIGHWMWYVRVQERGAFQQWTSLRPCCRI

SEQ ID NO: 270169 - protein, 57 aa, Glycine max
  Clone ID: PAT_MRT3847_85982C.1.pep
PPFFFFLTHTNGFFGTSQNESNDSIMRTLVTETQTNFGTENMLISPTQFKFPAPIYP

SEQ ID NO: 270170 - protein, 107 aa, Glycine max
  Clone ID: PAT_MRT3847_85983C.1.pep
KTGEGLWQQGCERSRNARLLTPTYRATPTCTTPFFFTSTSSSFLSPHHQHVRGFNPQAIALFQNETKLPMHVLQDIQPRRLSHLLTSTIANAPFGYGPLGFFLSHPS

SEQ ID NO: 270171 - protein, 69 aa, Glycine max
  unsure (1)..(69): unsure at all Xaa locations
  Clone ID: PAT_MRT3847_85984C.1.pep
WMEKHXFQLIKLPHKVEXPAEEIKLSADNINXXRFMTTSSAVDIPPEHLETDGRQLDHTGITRXNLYCA

SEQ ID NO: 270172 - protein, 167 aa, Glycine max
  Clone ID: PAT_MRT3847_85985C.1.pep
GTRPRAAQFLNAIGELARGLEKLSIEPVWNRDFFPSPQTPPETALPPTPPTMPDYKLEPANIDMPMDRINSVKREFQLATGLNCSPFEIVAAACWTTRTKAIDQFEANTELKLVFFANCRHLLDPPLPNGFYGNCFFPVTITASCESLRNATIVGVVKLIKEAKAKL

SEQ ID NO: 270173 - protein, 64 aa, Glycine max
  Clone ID: PAT_MRT3847_85986C.1.pep
KLEPNKFSIGKYIIMYEPYHCNFDCLHLLLPLTHLLLHFSYIHVLRNRAIMFLLHTNSPIRFIP

SEQ ID NO: 270174 - protein, 257 aa, Glycine max
  Clone ID: PAT_MRT3847_85987C.1.pep
CLPTLGWSSNVKTEPIICALQNCKLPNFPDDISWLARGSKVGYEIENQRMQLENCLIQYLTHTSKTMGISLATKEASVTMQSCARLELRGSSYHVVPHWGMIFRRIFNWRLMGLSSRAISTAYISESHHVGLPNVSSETWLSYYPDASLDEIISVNCNSPLPVNDQPRPEAFQTPPHRDSNDVFHETVNVRDTESNLPIDKLPSMDTTGTYGLYSANSNSGALMNGKPAKEADKLSKLLEQCKLLQDGIDKKLFLYF

SEQ ID NO: 270175 - protein, 150 aa, Glycine max
  Clone ID: PAT_MRT3847_85988C.1.pep
MGSFSEDEECRFFDAQEDVVSIPDEGVSNGFDYEVWIRSPRSVRERRGKFMKRMGLSSVDLVALENENSVDVRSVECEEEVMDRVNVNSGAVTRNCVMEEEFCSSRTSMSCWHRENSSGEFGMVDSSPCHDGNLEGNVDEGLQCREMSEG

SEQ ID NO: 270176 - protein, 133 aa, Glycine max
  Clone ID: PAT_MRT3847_85989C.1.pep
TRRIMGSFSEDEECRFFDAQEDVVVSIADDEGVSNGFDYEMWIRSPRSVSERRGTFMKRMGLSSVDLVALENENSVDVCSVECKEEVMDRVNVNSGAVTRNCVMEEEFWSSRTSMACGSRENSSGGGWYRGVT

SEQ ID NO: 270177 - protein, 121 aa, Glycine max
  Clone ID: PAT_MRT3847_8598C.1.pep
LRHLRKFISIIEKSPSQWQTLWRSIGGVEEARRSVDCFEAPRMSADLRDTARQSPEQPEPLQFQGHKLSNVETEEKSRLFFDHVAGSQRNKENPDKSRKSVDVHFGRTRKSLDWLDKIRAR

SEQ ID NO: 270178 - protein, 45 aa, Glycine max
  Clone ID: PAT_MRT3847_85990C.1.pep
ETSGQAGLPAEFKHTKKKKKKKKKQAVYINDPSLRTHASDDISYI

SEQ ID NO: 270179 - protein, 40 aa, Glycine max
  Clone ID: PAT_MRT3847_85991C.1.pep
VGPRVRFVWAGAWARLEKASSTEAHLVAGLTVNYDMIGAG

SEQ ID NO: 270180 - protein, 76 aa, Glycine max
  Clone ID: PAT_MRT3847_85992C.1.pep
TNIHYTIMSLLMFVVTKANLKVARLVAVMSMIAVAINATPMAKVTFRCRQVDVHMISCASVSIRTEVNRLRTAAQV

SEQ ID NO: 270181 - protein, 68 aa, Glycine max
  Clone ID: PAT_MRT3847_85993C.1.pep
IPASTTITPCATAALQDQDALTAFLTCGGLPDDTAGPYRTLTTMQPKRKEINILRNHLNISVRTQRMI

SEQ ID NO: 270182 - protein, 254 aa, Glycine max
  Clone ID: PAT_MRT3847_85994C.1.pep
MVKPAMASVDSSSFSSCKNDSFSSNYSIDTCKMYKGVRKRKWGKWVSEIRLPNSRERIWLGSYDTQVKAARAFDVALYCLRGKSASFNFPDTPRHLEINMVLPCDIQQQPLSHPEIQEIASKFANNDHVPLEEESAFQEQEQDPSMESQSDESKSANTITEMSNFPNIYDGGTHTNVQVDQLQGDWDSMDWTFFNMLDDLNGSDFGLYLGPDKLHPGEFLCPTQAPMLFHEDEIEGDDDHDAFSNHSLLWSWNF

SEQ ID NO: 270183 - protein, 146 aa, Glycine max
  Clone ID: PAT_MRT3847_85995C.1.pep
THAYAHASAHASVRREKTTEGGETRARRLSYATAVTASTMATITAISTFSSASSSAIIAASASLDSTVFGVTDLNNPSASISTVSWSTRLLKRSSPYHSSYASFISQTLFSLFTAQGRVLHVAIFLLGFFIVSLFHVILLDLYILD

SEQ ID NO: 270184 - protein, 166 aa, Glycine max
  Clone ID: PAT_MRT3847_85996C.1.pep
ASPFEDEEDVVCTVAPHCPETLVTMSRLLACGNIRRFTRSVHKTGCLEVFYPMGPPYSRYNFFSHYRHVHKEQFLFMLFKSKVNFLMSSGARNLYTLPANNVKYHHGQVVWNRMCFHKGPALPPVGQIAHVVTLALVKSNFVVHGVIAFIIGEFAWTQRKWAETES

SEQ ID NO: 270185 - protein, 59 aa, Glycine max
  Clone ID: PAT_MRT3847_85997C.1.pep
LLINNNFKKYLIFLHIKLKLIFILKYNNLNRYHKNNNIINFTQFNSNYHLNHPSNNNNK

SEQ ID NO: 270186 - protein, 35 aa, Glycine max
  unsure (1)..(35): unsure at all Xaa locations
  Clone ID: PAT_MRT3847_85998C.1.pep
KVWXASQSKFSFIEFSNVESSCSHYILCIVKTQLP

SEQ ID NO: 270187 - protein, 93 aa, Glycine max
  Clone ID: PAT_MRT3847_85999C.1.pep
ANLLRNLSFHARRLRFSPTPSIFSPTATAPTSFSSRSHVPDKPHSLLEDISNEELKRRVAKLQEGDAEAIPSVFEAILQRYLAGKPIEADEEL

SEQ ID NO: 270188 - protein, 121 aa, Glycine max
  unsure (1)..(121): unsure at all Xaa locations
  Clone ID: PAT_MRT3847_8599C.1.pep
YGFPKGKRLVKAEVFLTLNPIPTPLTIGTLFWLGRKRGEMAQWGFGGEXXGKKIQKLGAKXXSLGTAQAPGWPAPSAPDLAGEIWAPTLAKQRRGGRYRFFFGGVSLGCWIWPWASFRVDL

SEQ ID NO: 270189 - protein, 74 aa, Glycine max
  Clone ID: PAT_MRT3847_859C.1.pep
TSTIMLNGGHHNDSSLRWCISYRQEHSNLDYSHEDHSRPLQCLQQLSLLISWRIMITIRDIHPPKLHNITPRKT

SEQ ID NO: 270190 - protein, 70 aa, Glycine max
  Clone ID: PAT_MRT3847_85C.1.pep
FHMLKFGTSLLYNRFILNSMSKGVLRRNHTREIVRGSWQFTFGTKIVGKKPIVNIVTMSWLTKGNQRGSG

SEQ ID NO: 270191 - protein, 46 aa, Glycine max
  Clone ID: PAT_MRT3847_86000C.1.pep
PSPPFPAFEKVRVVPPSKISKNGSRVKEIICPSLERWDPPLRHSSL

SEQ ID NO: 270192 - protein, 79 aa, Glycine max
  Clone ID: PAT_MRT3847_86001C.1.pep
SHVRSTHPLFFTTAFHHFPQWLSTGIITWHTTLMKYQRIQCHRSIHQYHDAISEHICHHCKTSKLPYPRRKKVVSRFKT

SEQ ID NO: 270193 - protein, 99 aa, Glycine max
  Clone ID: PAT_MRT3847_86002C.1.pep
SESDRQMLLIKSQDEELDELSLSVQRIGGVGLTIHEGLLAQEKIIDELGNEMDGTSNRLDFVQKKVAMVMKKASAKGQIMMILGLLAMFIFLFILVFFT

SEQ ID NO: 270194 - protein, 50 aa, Glycine max
  Clone ID: PAT_MRT3847_86003C.1.pep
RPLGDPNTFGNRIHILLNLGLISDVYTGEADADIPYTEDADAYTDCINID

SEQ ID NO: 270195 - protein, 92 aa, Glycine max
  Clone ID: PAT_MRT3847_86004C.1.pep
EILMEFVSTGSLGLMGMRMVQCASCSFSKMVCGVTQMKGSLGWNNKNIKGGVEPGDLKIAKKFLGDQQKPHPEFVKEDPGASKKGNGYNPYK

SEQ ID NO: 270196 - protein, 106 aa, Glycine max
  unsure (1)..(106): unsure at all Xaa locations
  Clone ID: PAT_MRT3847_86005C.1.pep
MXXXXSSEFXSXSSFCSXSXSXPXXXXXSXXXRSXXCLXKXXGSAXSXXXCXXXTXXKRXXXARXXGPGPSTMXPCPXXSTXXXXXXXXKXXXXSTXSXTTSAQKA

SEQ ID NO: 270197 - protein, 443 aa, Glycine max
  Clone ID: PAT_MRT3847_86006C.1.pep
TGVDDQRSKAKGKVKASGFGLDDNSSNTEEYLIGVISDMLKELGKGDSVSTFEFIGSGVVEALLNYFSCGYFSKDRISETNLPKLRQQALSRFKSFVAVALPLSIDNGAVAPMTVLVQKLQNALASLERFPVMLSNSSRSSSGSARLSSGLSALSQPIKLRLCRAQGEKSLRDYSSNVVLIDPLASLAAIEEFLWARVQRGESGQKSTVGTENSESGTTPAGAGVSSPSSYTPSTAHRHSTRTRSSVNIGDTPRKETSQDKGTSSSKSKGKAVLKPAQEEAQGPQTRNTVRRRAALDKDAQMKPANGDSTSEDEELDISPVEIDEALVIEDDDISDDEDEDREDVRRDYYLPVYLPDEVHDVKLGDSAEESTVAPATSDSQTNASSGSSSKAGTAGCDSADRSGYSSSSRGAMSFAAAAMAGLGYANSRGLGVAEIGMGACCW

SEQ ID NO: 270198 - protein, 46 aa, Glycine max
  Clone ID: PAT_MRT3847_86007C.1.pep
GCAGWVLGGLSAHALWGAEPCPGGWYEPTILLHSPSFHESNEVLPA

SEQ ID NO: 270199 - protein, 55 aa, Glycine max
  Clone ID: PAT_MRT3847_86008C.1.pep
IDFRCPYRKVMSWNAGVGKFGSFKRAAFFFFFFFFFWVLGQNENGKKLKLITLQP

SEQ ID NO: 270200 - protein, 96 aa, Glycine max
  unsure (1)..(96): unsure at all Xaa locations
  Clone ID: PAT_MRT3847_86009C.1.pep
SATXXXXXTRXXHQXXPXTXSXDXXTXSXXXXPXHXCXXXXHXSHXXXSTXXYXXPTXXXXXXMXXLXXHXXXLXHXXXRXXRSXNXXXXXTXXXX

SEQ ID NO: 270201 - protein, 105 aa, Glycine max
  Clone ID: PAT_MRT3847_8600C.1.pep
VLRAGLEKNHSVHSLYGSINFQRARFARHLNFQNPSQYEALLSSLRGRKGAFIPIARCSPHFPTLPHTQWYFFPQIYVQRNRDFMASMLHQKIVFPIVMSRVVKK

SEQ ID NO: 270202 - protein, 92 aa, Glycine max
  Clone ID: PAT_MRT3847_86010C.1.pep
MWKKTLLKAIIQKGSSRNDVVSGFLYDKLQKKVINLRKSCEIKDSSLQAKDKGIKMLIKKVGVLTKAMEVEWKKIKRKAAARREGGFINKVR

SEQ ID NO: 270203 - protein, 174 aa, Glycine max
  Clone ID: PAT_MRT3847_86011C.1.pep
MLTKGIWASRSKVADNGEKENEMQVNRDMTLNRCNDESEAPEIKTIVDVEEDPPESKKPKGSSRDDVVSGFLYDKLQKEVINLRKSCEIKDSSLQAKDEEIKMLIKKVGVLTKAMEVEWKKMKREAAAREKEASSTKSDDNRKNRSANSSKRFFSFTFCSAANNCQLSSFFSPF

SEQ ID NO: 270204 - protein, 85 aa, Glycine max
  Clone ID: PAT_MRT3847_86012C.1.pep
RPDAERERPECGNHRQSRSPALGTEGTDCRSCSQARMTRSAHGRRFRCRIRSQLRCPNRLVRFHAFHRCSFWTLLVLKFAARAAR

SEQ ID NO: 270205 - protein, 51 aa, Glycine max
  Clone ID: PAT_MRT3847_86013C.1.pep
FFYKKKPEYLMHFINNLRGKKAIRMCTFFFFILTSCQLRDCSQYFVEFIYI

SEQ ID NO: 270206 - protein, 143 aa, Glycine max
  unsure (1)..(143): unsure at all Xaa locations
  Clone ID: PAT_MRT3847_86014C.1.pep
THAGGSXLEXEXPEEAXTGXXRGXGKAXAXXXXKAXXKXXXNXARXXKEXEEXXKEKEEXXGQXXTGGGEDSFSFDXEXXXKXAXEAXGTXDAPTNXAGXTRXXPTXRRKKTQRQXXXXXXXXXXXXXTQXAXKKXXKKRKGR

SEQ ID NO: 270207 - protein, 65 aa, Glycine max
  Clone ID: PAT_MRT3847_86015C.1.pep
FLIELIPPLVLWFVDIFLNHQRAIPYSTSNQILHDKAIIFNSYTYIQIKFWLFPLLIPDKMFSLL

SEQ ID NO: 270208 - protein, 76 aa, Glycine max
  Clone ID: PAT_MRT3847_86016C.1.pep
VCELPKNYLHMYVGQISFCTHHEILQVISEFGVEQAHDDFGTQCLAMKLVDKREQILYGLPLSFSLFCTKGVVVQP

SEQ ID NO: 270209 - protein, 43 aa, Glycine max
  unsure (1)..(43): unsure at all Xaa locations
  Clone ID: PAT_MRT3847_86017C.1.pep
XKQARXRKHGIRXEPTXXENQXAXQXGXXQXXMRXGXLIEATL

SEQ ID NO: 270210 - protein, 99 aa, Glycine max
  unsure (1)..(99): unsure at all Xaa locations
  Clone ID: PAT_MRT3847_86018C.1.pep
XXXXXXTXXXXXLXXXCCXXXXAXXXFXXXXXLALXXXSXXXXHFXGXWFAFRXRXXIXSRXDEXXXXRXPXFFFXPFSFFTITXLEPNSELTYACXRL

SEQ ID NO: 270211 - protein, 113 aa, Glycine max
  unsure (1)..(113): unsure at all Xaa locations
  Clone ID: PAT_MRT3847_86019C.1.pep
TVIHGFGVAGDVKKAKXVFHEMVKEGVVPNVATYNALIQVLCKKDSVENAVVVFEEMAREGVCVPNVVTYNVVIRGLCHVGDMERALGFMERMGSRFRRCSNKTVEIVFCDFF

SEQ ID NO: 270212 - protein, 64 aa, Glycine max
  Clone ID: PAT_MRT3847_8601C.1.pep
TNLTFSSFPPYNPLHGGTIIHFCCHSCNIPWAGKTRVLPVLIALGQILISSYDLLMNGSCPVGL

SEQ ID NO: 270213 - protein, 50 aa, Glycine max
  Clone ID: PAT_MRT3847_86020C.1.pep
VKDIVISDQGQHRADVTINVHLMHAQLSHVIWLHAYQLLLELVGLLRAPN

SEQ ID NO: 270214 - protein, 211 aa, Glycine max
  unsure (1)..(211): unsure at all Xaa locations
  Clone ID: PAT_MRT3847_86021C.1.pep
MHMLVKNHNKGDGSKSLADTLAKWKEYNAWLESNNEAEKPVRKVPAKGSKKGCMKGKGGPENLRCNYRGVRQRTWGKWVAEIREPNRGSRLWLGXFPTAISAALAYDEAAMAMYGFCARLNFPNVQVSTFSEEPSRNSPAAAYQSRNSPSAKESGSALVILERSECMMLWNNSGGDAAEDDGMEDLSLSLSVKHEEGEDESGTSSSYLSLS

SEQ ID NO: 270215 - protein, 214 aa, Glycine max
  Clone ID: PAT_MRT3847_86022C.1.pep
MHMLVKNHNKGDGSKSLADTLAKWKEYNAWLESNNEAEKPARKVPAKGSKKGCMKGKGGPENSRCNYRGVRQRTWGKWVAEIREPNRGSRLWLGTFPTAISAALAYDEAARAMYGSCARLNFPHVQVSTLSEESSRNSPAAANRSRNSPAASQSGHALMILESSECMILPNNSGGDAAEDDDMEDLSLSLSVKRVKHEEGEDESGTSSSYLSLS

SEQ ID NO: 270216 - protein, 40 aa, Glycine max
  Clone ID: PAT_MRT3847_86023C.1.pep
FKGHHESATATTIYNLRNNIVSLTSDDLLTKQKKKYQKAF

SEQ ID NO: 270217 - protein, 116 aa, Glycine max
  Clone ID: PAT_MRT3847_86024C.1.pep
MSLNVDEDLVTEMEEAPTGAPSIPLENVQEMVRNDPFHVPIGYVTSQEELEKANYMPHLSSEIPVIDLALLSNGNKEELLKFDVACKEWGFFQIVNHGGQTELMQKMKDAASEFFN

SEQ ID NO: 270218 - protein, 72 aa, Glycine max
  Clone ID: PAT_MRT3847_86025C.1.pep
PHVRNKPKRSLGILRRPKGAKPEPQLDAKSSALTEPSGTYASKPITDAQGMNGAWEVQELYEHQPLDQRVRI

SEQ ID NO: 270219 - protein, 53 aa, Glycine max
  unsure (1)..(53): unsure at all Xaa locations
  Clone ID: PAT_MRT3847_86026C.1.pep
EGSDRRKAGVIDLKKEKYEKNAAVXGELAKGQSPKFMEFASTDSRESPSDVFD

SEQ ID NO: 270220 - protein, 49 aa, Glycine max
  unsure (1)..(49): unsure at all Xaa locations
  Clone ID: PAT_MRT3847_86027C.1.pep
PLDRPPLLWLFFKSQEMSFTIDRSQXSSGKYPLLAXHXSIFPKDQGQGN

SEQ ID NO: 270221 - protein, 195 aa, Glycine max
  unsure (1)..(195): unsure at all Xaa locations
  Clone ID: PAT_MRT3847_86028C.1.pep
MKMKVLXFFVAAXLGAWECHAYDMFPLRMNTGYGARTPEGKCASCRLAXGRDNIFXFXTIPEECGEATKGYIHGEQYRSDSKTGNQQAYFYARDLEVHPKXTFGFRIDGAGLSNIPYYKKHGCGVEKFNXTLCXEWVNKGDAPALAETLKNYNKAGGSWVQELYSWEGGTLGKQGRNRSKLKGRGGYHTWGKINS

SEQ ID NO: 270222 - protein, 226 aa, Glycine max
  unsure (1)..(226): unsure at all Xaa locations
  Clone ID: PAT_MRT3847_86029C.1.pep
MKMKVLGVFVATILGAWECHAYDMFPLRMNTGYGAHTPEVKCAXWRLGGGGDNIFGFXTIPEECVEATKEYIHGEQYRSXKTVNQQAYFYARDLEVHPKGTFGFSIDGTVLSNIPYYKKHGYGVEXKFNSTLYHEWGNKGNAPALAETLKNYNKVGGLLLQDYIPWAGRTLDKQXAVTEANLKRGGYHTWXEKLILKGPXQEPSTPKAXVSYQTAAERGTDKGGYN

SEQ ID NO: 270223 - protein, 35 aa, Glycine max
  Clone ID: PAT_MRT3847_8602C.1.pep
MKYKKVLVGSTGDGFFGFGTFTRLLEFVILEYDSQ

SEQ ID NO: 270224 - protein, 195 aa, Glycine max
  unsure (1)..(195): unsure at all Xaa locations
  Clone ID: PAT_MRT3847_86030C.1.pep
MKMKVLVFFLATILVAWRCHAYDMFPLRMNTGYGARTPEGKCASWRLAVGAHNIFSFETIPEEXGEATKEYIHGEQYXSDSKTGNQQAYFYARDLEVHPKXTFVVSIDGTGLSNIPYYKKHGCGXEKFNXTLDDEWGNKGNAPGLAETLKNYNKAGGVLGFKIIFLXGRTLDKQGXTEANLKKGGYHTWGKINSQ

SEQ ID NO: 270225 - protein, 226 aa, Glycine max
  unsure (1)..(226): unsure at all Xaa locations
  Clone ID: PAT_MRT3847_86031C.1.pep
MKMKVLVFFVATILGAWQCHAYDMFPLRMNTGYGARTPEVKCASWRLAVEAHNIFGFETIPEECVEATKEYIHGEQYRSDSKTVNQQAYFYARXLEVHPKDTCCVSVLDGDRDSLIXPLTTKNSGVWGVGEXFNSTLXMSEWVXQGGNATGTCPRTLKNYNKRGVVLASRLYFLXGRTLDKQGXTEANLKKAGYHTWXEKLILKEPXQDPSTPNXAVSYKTAAREK

SEQ ID NO: 270226 - protein, 26 aa, Glycine max
  Clone ID: PAT_MRT3847_86032C.1.pep
LVAIYKYYCVLLSFVDDAIKSMTLIN

SEQ ID NO: 270227 - protein, 134 aa, Glycine max
  Clone ID: PAT_MRT3847_86033C.1.pep
TNSRLKMYVLVFLAATILVGWQWHAYDMIRLRMNTGYGARTSEVKRASWRLAAEAHNISGFETIPEECVEATKEYMHGEQYRSDSKTDNQQAYFYAIDHQVHPKDTFVLSIDGTVLSNIPYYKKHGYGVEKLTR

SEQ ID NO: 270228 - protein, 184 aa, Glycine max
  unsure (1)..(184): unsure at all Xaa locations
  Clone ID: PAT_MRT3847_86034C.1.pep
KMNVLVFFVATILVAWQCHAYDMFPLRMNTGYGARTPEVKCASWRLAVEAHNIFGFETHSEECVEAPQEYIHGEQYRSDSTTGNQQAYFYARDLEVHPKDTFVVSIYGTALYNIPYYKKHGYGVEKFNSTLYDECANKGYAPALPDTLKRYNKLMSHWLMIIFLSXRTLDESAVADAYLRMAGY

SEQ ID NO: 270229 - protein, 90 aa, Glycine max
  unsure (1)..(90): unsure at all Xaa locations
  Clone ID: PAT_MRT3847_86035C.1.pep
MKMKVLVFFVATILVAWQCHAYDMFPLRMNTDYGARTPDVKCSSWRLAVEAQNIFVFETIPDXCVETTKEYIHGEHYRSDSKSVNQQAYF

SEQ ID NO: 270230 - protein, 196 aa, Glycine max
  unsure (1)..(196): unsure at all Xaa locations
  Clone ID: PAT_MRT3847_86036C.1.pep
MKMKVLVFFVATILVAWQCHAYDMFPLRMNTGYGARTXEVKCAXWRLAGEGHNIFGFETIPEERVEATKEYIHGEQYRSDSKTVNQQAYFYARTFEVHPKDTFXVFSIDGTGLSNIPYYKKHGCGXGRKFNSTLYEEXWVNKGNAPALPETLKNYNRRGALGFKIIXFLQGRTLGQQAGTESKLKXEAGYHTWGXN

SEQ ID NO: 270231 - protein, 122 aa, Glycine max
  unsure (1)..(122): unsure at all Xaa locations
  Clone ID: PAT_MRT3847_86037C.1.pep
NQGHEHKCPGGLFCYEGGAPWQCHPYYMFPLLMNTGYGARTPEVKCANWRLAVEAHXIFGFETIPEECVXATNEYIHGEQYISHSKTVNQQAYFYARDLEVHPKDTFVFSIDGTLLSNIPYY

SEQ ID NO: 270232 - protein, 200 aa, Glycine max
  unsure (1)..(200): unsure at all Xaa locations
  Clone ID: PAT_MRT3847_86038C.1.pep
MKMKVLVFFVAXILGAWECHAYDMFPLRMNTGYGARTPEGKCASWRLAVGGXNIFGFETIPEECVEATKEYIHGEQYRSDSKTVNQQAYFYARDLEVHPKEHIGWVSIDGDRDSLXIPXLQKXGYGGWEENLTRPLDDEMXVNKGNATGTWPRTLKNYNKXVSLGFKMYILXGRTLDKQGXTEANLKKAGYHTWGKINSQ

SEQ ID NO: 270233 - protein, 60 aa, Glycine max
  Clone ID: PAT_MRT3847_86039C.1.pep
ERTPGFSLYVPEVLEFGVTFTGGCFPEQHFRRNSPSFLHLILHRFASCLVKPFGPLIASF

SEQ ID NO: 270234 - protein, 76 aa, Glycine max
  unsure (1)..(76): unsure at all Xaa locations
  Clone ID: PAT_MRT3847_8603C.1.pep
SHNXNHXSSRINLIXXXQIXFXCXRYQHXICHILNSHGXSXLAIYQAXXQLCQEVSXLTNQXTHXLXTLVDTSVXK

SEQ ID NO: 270235 - protein, 43 aa, Glycine max
  Clone ID: PAT_MRT3847_86040C.1.pep
KARGSTSTGALKHKWTAEDEAALRAGVLTHAAGKWRTILTDPE

SEQ ID NO: 270236 - protein, 106 aa, Glycine max
  Clone ID: PAT_MRT3847_86041C.1.pep
MYMGTAECTAIDAFKHAGENMVFASGSPFENVDLGNGIVGHVNQANNMYLFPGIGLGTLLSGAHLITDGMLQAAAEWYDVNLENCFFFINQKPLELALMEVWQDVF

SEQ ID NO: 270237 - protein, 63 aa, Glycine max
  Clone ID: PAT_MRT3847_86042C.1.pep
SLWKNLLRLIQFAKGTTKKGIDWNRQLNLVINPSGNKPHIYFFSQIHLKNSFFFFNSNSYLVK

SEQ ID NO: 270238 - protein, 215 aa, Glycine max
  Clone ID: PAT_MRT3847_86043C.1.pep
GEAPDAREGHDAALVGKRLFMFGGCGRSADNINEVYYNDLYILNTELFVWNRATTSGTPPSPRDGHTCSSWRNKIIVIGGEDENDSYLSDVHILDTDTLIWSKLCTSGQLLPPRAGHSTVSFGMNLFVFGGFTDAHNLYNDLYMLNIETCVWTKVATTPNGPSARFSVAGDCLDPYMSGVLVFVGGCNRNLEALDDMYYLYTGIARENEQRTEKL

SEQ ID NO: 270239 - protein, 75 aa, Glycine max
  Clone ID: PAT_MRT3847_86044C.1.pep
IGENFMYYDPTKEIWDAVKETYSNIDNTSAIFEIKSLLHDLQQGEKSVTEFSNTLSRYWQRLDTYDEIEWKCPER

SEQ ID NO: 270240 - protein, 42 aa, Glycine max
  Clone ID: PAT_MRT3847_86045C.1.pep
LLTWDLYLYMCSLELIQQTRDLELRGTARSSTFNDSRTNSRG

SEQ ID NO: 270241 - protein, 74 aa, Glycine max
  Clone ID: PAT_MRT3847_86046C.1.pep
MAVHGDDDPVVMVDPNLSPPNTYEAVVNGGTFDRLHNGHRLLLTASAELARCRIVIGACDGPMLAKKTVSAHGN

SEQ ID NO: 270242 - protein, 215 aa, Glycine max
  Clone ID: PAT_MRT3847_86047C.1.pep
MVVKVYGPTYGSPKRVLVCLIEKEIEFETVHVDLFKGENKEPEFLKLQPFGSLPVIQDGDYTLYESRAIIRYLAEKYKDQGTDLLGKTIEEKGLVEQWLEVEAHNFHPPLYNLVINVLFAPLTGAPSDQKVIEESDKKIEKVLDVYEERLSKSKYLAGDFFSLADLSHLPFGHYLVNQTGRGNLVRDRKHVSAWWDDISNRPAWQKVLQLYKYPV

SEQ ID NO: 270243 - protein, 226 aa, Glycine max
  Clone ID: PAT_MRT3847_86048C.1.pep
MGGVAWTEEEDHLLKKCIQQYGEGKWHRVPLLAGLNRCRKSCRLRWLNYLRPNIKRGNFAEEEVEMIIKLHKLLGNRWSLIAGRLPGRTANDVKNYWNCHLSKKLNVIEAEDRPITRDVQVIRPQPRNIVGSSSVKRRGQNESPTDKGVQQESSMSSLTFDTADGQNHMLDSQQDNNIYACLDQQGIVSELSMDFQFEGFGAMMNGEGSSSQWDWGDLLLDMDLYK

SEQ ID NO: 270244 - protein, 220 aa, Glycine max
  Clone ID: PAT_MRT3847_86049C.1.pep
MLVKVYGPTYGAPKRVLVCLIEKEIEFETVHIDLFKGENKEPEFLKLQPFGSLPVIQDGDYTLYALIDVESRAIIRYFAEKYKDQGTDLLGKTIEEKGLVEQWLEVEAHNFHPPLYNLVINVLFAPLTGAPSDQKVIEESDKKIEKVLDVYEERLSKSKYLAGDFFSLADLSHLPFGHYLVNQTGRGNLVRERKHVSAWWDDISNRPAWQKVLQLYKYPV

SEQ ID NO: 270245 - protein, 71 aa, Glycine max
  Clone ID: PAT_MRT3847_8604C.1.pep
FYHYFDNTSVAVATFSLQPGRPYAILLHTATLPMTVVTCYPSLYPPVLIYLIRSLFGGLRQRLPQPLGDNI

SEQ ID NO: 270246 - protein, 181 aa, Glycine max
  Clone ID: PAT_MRT3847_86050C.1.pep
MAVHGDDDPVVMVVPNLSPPNTYEAVVNGGTFDRLHNGHRLFLTASAELARRRIVIGVCDGPMLAKKQFAELIQPIEERINNVKTFIKSIKPELEVQAVPITDPFGPSITDENLEAVIVSKETLPGGLAINRRRAERGLSQLKIEVVDLVSGESGEIKLSSSMLRKIEAEKAKQQNTISET

SEQ ID NO: 270247 - protein, 124 aa, Glycine max
  Clone ID: PAT_MRT3847_86051C.1.pep
MGKSTNNNRDWTQMYAIYGMEQWQTLIFLLCQAMLFSVLSVLYLLYFDLVCNFFERIFSGAGGGTARFAAGITGSVTALSALCLFFAAANFFYSSVPLHFDMAQRIVSAVHDWSSVKLALDLGC

SEQ ID NO: 270248 - protein, 46 aa, Glycine max
  Clone ID: PAT_MRT3847_86052C.1.pep
LSLVLNGFKKLICLHNLQIKPNRNRMIVGTLPGLNQIMNLPGAITL

SEQ ID NO: 270249 - protein, 132 aa, Glycine max
  unsure (1)..(132): unsure at all Xaa locations
  Clone ID: PAT_MRT3847_86053C.1.pep
AKDVEVQEQGGEYSAKDYHDPPPTPLFNPEELTQXSFYRALITKFIATLLFLYITILTIIIYKEQTNTTLDNTXYNKINILNITXTFNNIIFILIYYTTDISEKHINPTITFELFLRHEISLIXTLFYMISH

SEQ ID NO: 270250 - protein, 202 aa, Glycine max
  unsure (1)..(202): unsure at all Xaa locations
  Clone ID: PAT_MRT3847_86054C.1.pep
MKMKVLVFFVATILVAWQCHAYDMFPLRMNTGYGARTPEVKCASWRLAVEAHNIFGFETIPEECVEATKEYIHGEQYRSDSKTVNQQAYFYARDLEVHPKDXTFVFSIDGTVLSNIPYYKKHGCGXWEENLTRTLYDEMGLTRGQCDRRLPXXTLKNYNKAGVAXLGFKIIILWQGGTLXQTGAEQEANLKGRLGYHTWGKN

SEQ ID NO: 270251 - protein, 190 aa, Glycine max
  unsure (1)..(190): unsure at all Xaa locations
  Clone ID: PAT_MRT3847_86055C.1.pep
MRMRVPVFFVATILVAWQCHXAYTMFPSPXMSTGYGARTXPEVKCASWRLAVEAHNIFGFETIPEECVEATKEYIHGEQYRSDSKTVNQQAYFYARTFEVIPXDTFVFSIDGTVLSNIPYYKKHGXGWEKFNSTLYDEWVNKGNAPALPETLKNYSKLVSLGFKIIFLSGRTLDKQAVTEANLKKAGYHT

SEQ ID NO: 270252 - protein, 52 aa, Glycine max
  Clone ID: PAT_MRT3847_86056C.1.pep
LEPIRLESLSVIFTLLFSISARTTQIEPLNDNGVGTVPFLPLVTDDATRRHR

SEQ ID NO: 270253 - protein, 168 aa, Glycine max
  Clone ID: PAT_MRT3847_86057C.1.pep
MYSSASQFDGNAAFSGGGFMPSQTTQGPDSSFVPSKNRDAQSLLPLTVKQIYDASQSSDDKINLIIDGVDVTNVTLVGRVSNKAGRITDVTFVLDDGTGRIECNKWLHEAVDTNEAEAILEGMYARLHGQLKHFQGKRTLNVFSFRPVTDCNEIASHFTDCIYVHLYN

SEQ ID NO: 270254 - protein, 213 aa, Glycine max
  unsure (1)..(213): unsure at all Xaa locations
  Clone ID: PAT_MRT3847_86058C.1.pep
MKMKVLVFFVATILVAWQCHAYDMFPLRMNTGYGARTPEGKCASWRLAGGGHNIFGFETIPEEGVEATKEYIHGEQYRSDSKTVNQQAYFYARDLEVHPKGXXFVFSIRWXPYFSNXFHTYKKXWVMGVGRKFNXDLXMDEWGVTRGNGTGHLPGDSLRNYNKXGVLLAFKIIFLGQGRTTXDNRAVTEANLKEAGYHTWXEKLILKGPPRSF

SEQ ID NO: 270255 - protein, 164 aa, Glycine max
  unsure (1)..(164): unsure at all Xaa locations
  Clone ID: PAT_MRT3847_86059C.1.pep
KMKVLVFFVATILVAWQCHAYDLFPLRMNTGYGARTLEVKCSSWRLAVEAHNIFGFETIPEECVEATNKYIHGEQYISNSKTVNQQAYFYARDLEVHPKDTFVFIIYGSVLSIIPFYKIHGYGVEKFNLILFDXWIIKGYAPVLSYTLINYYNLVYSRFRYVIL

SEQ ID NO: 270256 - protein, 125 aa, Glycine max
  unsure (1)..(125): unsure at all Xaa locations
  Clone ID: PAT_MRT3847_8605C.1.pep
DPAAXPFWRXAXRGAANRXRKRRKEGTHXRAEARGRSXADXTXXPRATRAXKQGPTGRRRTXXXTGGNXTPFFVRXXXPSEXXSPGDEPSLAGGGPAGLKLPLNCRWPLLRASYLGGKTTKTNTG

SEQ ID NO: 270257 - protein, 121 aa, Glycine max
  Clone ID: PAT_MRT3847_86060C.1.pep
MKMKVLVFFVATILVAWQCHAYDMFPLRMNTGYGARTPKVNCPSWRLAWKPHNILVLRHNSEKSAEATKGYIHGEHYRSDSKTVDQQAYFYARDPEVHSKDTFLFSIDGTGLSNISYYKKH

SEQ ID NO: 270258 - protein, 39 aa, Glycine max
  Clone ID: PAT_MRT3847_86061C.1.pep
SVLTFSSSSKCFRACQGYLHLVSLFLFFLVKLVSLFPSV

SEQ ID NO: 270259 - protein, 57 aa, Glycine max
  Clone ID: PAT_MRT3847_86062C.1.pep
PPPRGNTPRGSPGAPPPHIANPPPPKRPHRGKRSPPPPSQGALQGKGGKQKKITFPP

SEQ ID NO: 270260 - protein, 35 aa, Glycine max
  Clone ID: PAT_MRT3847_86063C.1.pep
NFPKLIFYRKRKLLNVPLLNVVENLTSSKGNHYRA

SEQ ID NO: 270261 - protein, 131 aa, Glycine max
  unsure (1)..(131): unsure at all Xaa locations
  Clone ID: PAT_MRT3847_86064C.1.pep
AQVSLLIEITRSNVIKMEGLGFFGATNLVALQCHSYHMVPFSMDTCYGGRTSEVECAKLKLAVEAHNIFGFETIPEECVEATXEYIHGEQYRSDSKTVNQQAYFYARDLEVHPKDTFVFSLDGTLLSKYSY

SEQ ID NO: 270262 - protein, 102 aa, Glycine max
  unsure (1)..(102): unsure at all Xaa locations
  Clone ID: PAT_MRT3847_86065C.1.pep
MKMKGLGFLGATILGTRECQAYEKFPPPMNNGXGARYPEGKCPSLKASVETKNXLGFETILKNCVEAPKEYINGEQYKSDSKTVNQQAYFYARDLEVHPKDT

SEQ ID NO: 270263 - protein, 154 aa, Glycine max
  unsure (1)..(154): unsure at all Xaa locations
  Clone ID: PAT_MRT3847_86066C.1.pep
SLRWYILVAWQCHAYDMIPLRMNTGYGARTPEVNSASWRLAEEAHNIFHYETIPEERVDAPKEYIHAEQYRSDSTTANQQAHFYARDXLEVHPKDTFMVSIDGTVLSNTPYYKIHGYGVEXNLTSILNDXWLNKANAPALPETLTHYHKPGASW

SEQ ID NO: 270264 - protein, 221 aa, Glycine max
  unsure (1)..(221): unsure at all Xaa locations
  Clone ID: PAT_MRT3847_86067C.1.pep
MKMKVLVFFVATILVAWQCHAYDMFPLRMNTGYGARTPEGESPNWXRLAVEAHNIFGFENIPEECVEATKEYIHGEQYRSDSKTVNQQAYFYARDLEVHPKDTFLCVSIXDAPVLSNIPYYKKHGLGXVEKFNSTLDDEWXVTRGNAPALPETLKNYNKPXLFGFKIIILWQGRTLDKQAXVTEANLKXKAGYHTXWEKIILKXDPQDPSTPNASSYKKQR

SEQ ID NO: 270265 - protein, 58 aa, Glycine max
  Clone ID: PAT_MRT3847_86068C.1.pep
AWYSARAVYNRTFFSGTTTGARAADFNKWPWALLDDNSGCDYMWTNGKGTWTTLTKLP

SEQ ID NO: 270266 - protein, 58 aa, Glycine max
  Clone ID: PAT_MRT3847_86069C.1.pep
FSNILLNGYQILFSNILWKGNQSFISNLFYRQTFEGGHQKSHPTLLLGLGLHLQTVFA

SEQ ID NO: 270267 - protein, 85 aa, Glycine max
  Clone ID: PAT_MRT3847_8606C.1.pep
FLFDPYTSIHWSGPATATVWSKQRGRPGPMPEPPPLFCVENPYPTRKRARILSSPCKELLQPRPVGSDITPPPPLRANTRHLNFK

SEQ ID NO: 270268 - protein, 105 aa, Glycine max
  unsure (1)..(105): unsure at all Xaa locations
  Clone ID: PAT_MRT3847_86070C.1.pep
FWTSLHKAMSRKKGIDSAYHPXRNGHIEYTIQPLXYCRWECSIEQQGSXIACLSLIVLSYNYTYQASIGRAPFGAQYGRKXYTPLCWYDDENVARLELEMPLQIT

SEQ ID NO: 270269 - protein, 157 aa, Glycine max
  Clone ID: PAT_MRT3847_86071C.1.pep
PLNYRGGARLRPRVPSGCKKPPKGAPSNFVGGVTRNRGVKIKGPGFFRATILVAWQFHSYDIFPLRMNTGYCARTPEVKCASWRLAVEAHNIFGFETIPEECVEATKEYIHGEQYRSDSKTVNQQAYFYARDLEVHTKVTFVFSIHGTVLSYILFYI

SEQ ID NO: 270270 - protein, 100 aa, Glycine max
  Clone ID: PAT_MRT3847_86072C.1.pep
MALSKLLVASLLVSFVLFHLVDADDQSAYAQTQGSLVQQIDCNAACAARCRLASRQRMCHRACGTCCRRCNCVPPGTSGNQEVCPCYASLRTHGGRRKCP

SEQ ID NO: 270271 - protein, 147 aa, Glycine max
  Clone ID: PAT_MRT3847_86073C.1.pep
MIDPLMDKELLLSLSNSFKLLTSCNLLSVILEAALQYMQTDTLPKSAERKGCIVDKFVNILIWELSNMIERMLLHSPEHRSCAVGLLLPIILKALPANGSFEISIRGQKHGFSREYFFIKLWNCCRTLCSIGPLKKRAAYTILSLEF

SEQ ID NO: 270272 - protein, 164 aa, Glycine max
  Clone ID: PAT_MRT3847_86074C.1.pep
MNNYPFGSQAPKSFPAYPRTEFDLESGTAIKRTRKPKNSPFHLLRMIKSFGNRFHHFFKLHPLMGLFLALSFLLTLVMILSLYGTQYGVQSGGYVKSDMGFDDYPFSKLQNLVMVAGHSIYTSSSRGKMSRKILFFLRIKMRLLLTITSTNGFAIVACLEHISN

SEQ ID NO: 270273 - protein, 123 aa, Glycine max
  Clone ID: PAT_MRT3847_86075C.1.pep
PPWGGFYGPKGFRLLRKGFPPRFWDLFPGVYPPPRNNFSFGAPISGGPPLLRAGLGFVLQKWCFPPPFLIKKGVFPFQNFVFTRPDPPPLFFGFPQKGVSFFVGSSPFFFFSPPLKRGFLFFW

SEQ ID NO: 270274 - protein, 96 aa, Glycine max
  unsure (1)..(96): unsure at all Xaa locations
  Clone ID: PAT_MRT3847_86076C.1.pep
AFCFREKDGLKWVQEEFLTVWATXVRTTTTLLDDGCTILYAMVQDILHVTIACDFDIGVNVTTNNNLCVYGLNHGISGVQFLGAIXSAFSKQTVWN

SEQ ID NO: 270275 - protein, 89 aa, Glycine max
  Clone ID: PAT_MRT3847_86077C.1.pep
KEKILKHTFFKIQTNEFFGQVGNNGHGIFLYANVGGQRNKRGGGNKTKTTVLHNTKTFVSINYPCLKSKGKKNCLVNMTQFHESKVPWE

SEQ ID NO: 270276 - protein, 69 aa, Glycine max
  Clone ID: PAT_MRT3847_86078C.1.pep
KVKSSVLLNLIPSPEHRRFHSNMKHGLQIMVLRPQTTLSILNECSEASFGELLPYAWKIGRYVTRQLII

SEQ ID NO: 270277 - protein, 68 aa, Glycine max
  Clone ID: PAT_MRT3847_86079C.1.pep
GAEGQARDGGTRERVGGSKREAEQEGTRPRTTEEQRQQNGQKCKEQTSREATAASSPLQSSSSRAVAA

SEQ ID NO: 270278 - protein, 73 aa, Glycine max
  Clone ID: PAT_MRT3847_8607C.1.pep
AVTNTASGLVEQRLLSRPSDSYREELRGAWCNISTHPKVDQSPLGPNRFGCHTFYKLSNIRDHRKFMSPPTHE

SEQ ID NO: 270279 - protein, 68 aa, Glycine max
  Clone ID: PAT_MRT3847_86080C.1.pep
APHIFGFETIPEECVEATKEYIHGEQYRSDSKTVNQQAYFYARDLEVHPKDTFCVSIDGTVLSNIPYY

SEQ ID NO: 270280 - protein, 292 aa, Glycine max
  unsure (1)..(292): unsure at all Xaa locations
  Clone ID: PAT_MRT3847_86081C.1.pep
KALVSSVAKILEPWHCHAYKSFPLRMNTGYGARTPEVKCASWRLAVEAHNIFGFETIPEECVEATKEYIHGEQYRSDSKTVNQQAYFYARDLEVHPKDTFVFSIDGTVLSNIPYYKKHGYGVEKFNSTLYDEWVNKGNAPALPETLKNYNKLVSLGFKIIFLSGRTLDKQAVTEANLKKAGYHTWEKLILKDPQDPSTPNAVSYKTAAREKLIRQGYNIVGIIGDQWSDLLGGHRGESRTFKLPNXPCTTFSSSFTSQQSSLXPIYLYVIRCVQIGALASLYVVIAVCQQVM

SEQ ID NO: 270281 - protein, 382 aa, Glycine max
  unsure (1)..(382): unsure at all Xaa locations
  Clone ID: PAT_MRT3847_86082C.1.pep
MLPIKQDLWLHNWDHGIDRTFEVAQKVWAEVFFYLAENNVLFEGILLKPSMVTPGAESKDKASPQTVADYTLKLLHRRIPPAVPGIMFLSGGQSEVEATLNLNAMNQSPNPWHVSFSYARALQNTALKTWGGRPENVKAAQDALAFRAKSNSLAQLGKYTGYGARTPEVKCASWRLAVEAHNIFGFETIPEECVEATKEYIHGEQYRSDSKTVNQQAYFYARDLEVHPKDTFVFSIDGTVLSNIPYYKKHGYGVEKFNSTLYDEWVNKXGNAPALPETLKNYNKXLVSLGFKIIFLSGRTLDKQAVTEANLKKAGXYHTWEKLILKDPQDPSTPNAVSYKTAAREKLIRQGSTLFGINWRPWGAILLRRPQRAKAGPFKLSN

SEQ ID NO: 270282 - protein, 58 aa, Glycine max
  Clone ID: PAT_MRT3847_86083C.1.pep
PIGFLRYKGASIFVTRFCLFYVWLCWIPLLLVTPVLCLAVFLPPQLVLRVWLILACFV

SEQ ID NO: 270283 - protein, 58 aa, Glycine max
  Clone ID: PAT_MRT3847_86084C.1.pep
RSSETQSKALNLEGGQGFRNEMETGDVYKGNEEISTEYLQLNLIYILSEKPLYKIMQQ

SEQ ID NO: 270284 - protein, 54 aa, Glycine max
  Clone ID: PAT_MRT3847_86085C.1.pep
LDIIVYSLYFDLPKLQLATMGIHLDRLYSLLSEHTFSAPVSFTYDDICYSTLTF

SEQ ID NO: 270285 - protein, 40 aa, Glycine max
  Clone ID: PAT_MRT3847_86086C.1.pep
RNSSYTDGTTTETLDIGVAQAKTQLESADMGVPCENNGCR

SEQ ID NO: 270286 - protein, 49 aa, Glycine max
  Clone ID: PAT_MRT3847_86087C.1.pep
LGSFDSQNPGLMRILNAVFGFDIKEELLEKAFGLSFKELSKLKKRFFPS

SEQ ID NO: 270287 - protein, 107 aa, Glycine max
  Clone ID: PAT_MRT3847_86088C.1.pep
GSSNDAWSFLSIPAKKAMYDSELRLLTAPAPHHYSLPPQPQPTPRRNPRSRDNSAKLNPNPTPNRAESTRTVETDTGTSFWTSCPYCYVLYEYAKAHEECTLRCQSC

SEQ ID NO: 270288 - protein, 94 aa, Glycine max
  Clone ID: PAT_MRT3847_86089C.1.pep
MHATQINVEYSRLRNSQRFPPVDHRRLVTLPMVTKREAIPGKAALPPPLPPVTNGHHVFQVVVMRVSIHCQGCAGKVRMHMSKIEGEPSLDREL

SEQ ID NO: 270289 - protein, 29 aa, Glycine max
  Clone ID: PAT_MRT3847_8608C.1.pep
TIVSEFKGVGIGVIFNNLYLIINNIFYML

SEQ ID NO: 270290 - protein, 126 aa, Glycine max
  unsure (1)..(126): unsure at all Xaa locations
  Clone ID: PAT_MRT3847_86090C.1.pep
DDAKPPTPKQCVTLPTLPPPPLHSHTRPXKTTDFCRQLAHNLMVMVTTPEAGAAQDARTTDLLFWPNPKMAKTIHEARDKVEDQYALDSLAAAGVVAXVGSSGMILAFDKHLLMPTILDVRLIDYT

SEQ ID NO: 270291 - protein, 52 aa, Glycine max
  Clone ID: PAT_MRT3847_86091C.1.pep
KLKCLSVSDNIIYQSDKINSLQAILQCIFQAMETFTHETVRAYEELLQLSKQ

SEQ ID NO: 270292 - protein, 60 aa, Glycine max
  unsure (1)..(60): unsure at all Xaa locations
  Clone ID: PAT_MRT3847_86092C.1.pep
DSVIDSDDNRLTEKTMLTCKDKDMXAGYYTIPPQFRNMLPQDNRWHLDTLLTYILPPILT

SEQ ID NO: 270293 - protein, 54 aa, Glycine max
  Clone ID: PAT_MRT3847_86093C.1.pep
TIFSSASGGHTLLEIFLCLYISKYYLTLHPSLTVSMDIRHIKSAKRVKWLEWYI

SEQ ID NO: 270294 - protein, 364 aa, Glycine max
  unsure (1)..(364): unsure at all Xaa locations
  Clone ID: PAT_MRT3847_86094C.1.pep
SEQIVDSFHELVPDMALEFPFELDAFQKEAIYYLEKGESVFVAAHTSAGKTVVAEYAFALASKHCTRAVYTAPIKTISNQKYRDLCGKCPVGLLTGDVSLRPEASCLIMTTEILRSMLYRGADIIRDIEWVIFDEVHYVNDVERGVVWEEVIIMLPRHINIVLLSATVPNTIEFADWIGRTKQKEIRVTGTTKRPVPLEHCLFYSGELYKICESEKFLPQGLKAAKKEASRKKNLTAGGGSGPKPGISPGHDKARVQKRENTSHTKHHGANFYGTGRGYQNNGNGQSNWELRRADASMLLMLINKLSKKSLLPVVIFCXSKNRCDKSTDILTGTDLTSSSEKSEIRLFCDKSFSRLKGSYKNYH

SEQ ID NO: 270295 - protein, 74 aa, Glycine max
  unsure (1)..(74): unsure at all Xaa locations
  Clone ID: PAT_MRT3847_86095C.1.pep
LTCAYTISYLPSTTGQFVLDTDDDXYQNGGAYYMLPGMKGSDGGIRIGXSSAQEVCLLAVERSESDLDYEIGLF

SEQ ID NO: 270296 - protein, 156 aa, Glycine max
  unsure (1)..(156): unsure at all Xaa locations
  Clone ID: PAT_MRT3847_86096C.1.pep
IVEKILVTVRERYEASIIILQITKDLSKISLTEVIHVLQAQDXRRLMRKESRIEGVLSARYQNATKYKKNKNFDGMGSSSTSTNAKGNWKKFYPSCXHCRKKGHPPFRCXKRPDAKCSQCNQMGHEVVICKNRNQSHNEAAKVVDPKEEYLCYMFL

SEQ ID NO: 270297 - protein, 89 aa, Glycine max
  Clone ID: PAT_MRT3847_86097C.1.pep
YLHTQGKRFKAKKKKGKHCAGYGFYVPKVSMLTLSFYFENHHMLDSLSPASDHCGTVNWLVSLAGLFRKTLVYCSTNKLDSLVSFFSGL

SEQ ID NO: 270298 - protein, 67 aa, Glycine max
  unsure (1)..(67): unsure at all Xaa locations
  Clone ID: PAT_MRT3847_86098C.1.pep
LDPELEFDREVYPLGLLPNAGVXVVGVSQRMSFPASAEFPCFEPSPXQAQTILHCLPATLQCYIDLN

SEQ ID NO: 270299 - protein, 73 aa, Glycine max
  unsure (1)..(73): unsure at all Xaa locations
  Clone ID: PAT_MRT3847_86099C.1.pep
RGLCERSAXXYFLCELRMRXSMGSSIKKVIFCDEHINRAPYGFCXKMGKEEHRKWEGNLCMRKQGVRLVNIGV

SEQ ID NO: 270300 - protein, 44 aa, Glycine max
  Clone ID: PAT_MRT3847_8609C.1.pep
SLHSKPTLVAYNLFTLLHIQAYCSDTRFLPVSTFSQHSCRAGDA

SEQ ID NO: 270301 - protein, 42 aa, Glycine max
  unsure (1)..(42): unsure at all Xaa locations
  Clone ID: PAT_MRT3847_860C.1.pep
XYTXERRXLWLSPLESFXXMXIAPXSFTVVSSXYYILXGLYG

SEQ ID NO: 270302 - protein, 137 aa, Glycine max
  Clone ID: PAT_MRT3847_86100C.1.pep
GSRQYTLASPSRKLYFVTPPPLLCCLTTLAMEVSKKEARVRCSSSSASSSTPPSSSSSPLSPAWAHPRRPTHSSLEPGLPASAAQGLARAVFWSGSAAGGSESSSPTTRDELMLSPFKGDELMLSPFKGDELMLSPF

SEQ ID NO: 270303 - protein, 52 aa, Glycine max
  Clone ID: PAT_MRT3847_86101C.1.pep
VVCDRHMSHCPCSLSHIVCGKAAKLQPSLGNTGISHNNVRGDNEESIAHRAC

SEQ ID NO: 270304 - protein, 87 aa, Glycine max
  Clone ID: PAT_MRT3847_86102C.1.pep
AFNLSYSDCRSSSFMGIGHLRSSLRWYLSPVGGSPIGLICFRHSSRELWQGLFWLTLIHCGRRCCGRSCCLLPGFMAFLHMGTSLTI

SEQ ID NO: 270305 - protein, 59 aa, Glycine max
  unsure (1)..(59): unsure at all Xaa locations
  Clone ID: PAT_MRT3847_86103C.1.pep
SSHYPPQLTSSQPSLLPCFLVARLQVKMLFSISICVAXSTSLFVTWPHIYPGILKEVCK

SEQ ID NO: 270306 - protein, 76 aa, Glycine max
  Clone ID: PAT_MRT3847_86104C.1.pep
CCHNYHHCHNQHPSPLLLLPTIPFLSRLPKLSVLPTLSSPILLTNNTLLPQPLILSVSSRSLLDFKCYKISDRTKF

SEQ ID NO: 270307 - protein, 58 aa, Glycine max
  Clone ID: PAT_MRT3847_86105C.1.pep
SITNSTLSLTYQSTQNKYQSSLTLILLPSFYYITTSYTHKDTIIIPNLTIFNTYINSI

SEQ ID NO: 270308 - protein, 37 aa, Glycine max
  Clone ID: PAT_MRT3847_86106C.1.pep
GVAPVKVQLESAEMGVPNENEGCKCAPNCSSTPCTCK

SEQ ID NO: 270309 - protein, 337 aa, Glycine max
  Clone ID: PAT_MRT3847_86107C.1.pep
MASPSPPKSKFSVYQNPSFSAVLTSNSLQPSNSTILSILSFFSASAFVFLAAFFRENGFVHILCFGTLSPVTAYWLAKTLQAIVGFIFIGTVSALFNVVFLRRARYAGGGAAVAAKSLSDSNSVHRNEILLTKHQLGLLGVKPKVDLVQPDSAKKPPKSKPQLPSSGLLVPLHQPIPSPTRGSSSRIDADGSNSNRGGAARSIGTPSRSPGLASLYLSPGVVSPPRSLAGVDSVVSSPWSNRRVSSANKITSEEKLERFLAEVDERINESAGKMSTPPPTVPGFGIVSPSTVTGSANTSGTARRTPLRPVRMSPGSQKFNTPPKKGEGEFPAPMSME

SEQ ID NO: 270310 - protein, 63 aa, Glycine max
  Clone ID: PAT_MRT3847_86108C.1.pep
HALNRMMVFMRYSLGQYCKRVTYLARHHPFVAYIWLQLRLHPSALIEPDYAGVAPGKSVMVVE

SEQ ID NO: 270311 - protein, 84 aa, Glycine max
  Clone ID: PAT_MRT3847_86109C.1.pep
NFLDHLLYHWLCSCFRPDLTPFWHFLWVPDTLTDIKPPPDTTPYNTTTDAASNGSFDDYFDEHSTLRYKLRSSHNSSHNNAPKN

SEQ ID NO: 270312 - protein, 82 aa, Glycine max
  Clone ID: PAT_MRT3847_8610C.1.pep
PGNLFVAVNEGLWDNGAACGRRYRIRCVSGNNRPCKGGSIDVKVVDSCSRSPCPNTLLMSNDAFAAIARFPHVKINIEYTQI

SEQ ID NO: 270313 - protein, 50 aa, Glycine max
  Clone ID: PAT_MRT3847_86110C.1.pep
NMENNILILTSLWLYLICFKNDFIYSRLFFSCMKESFLYTIFSKSLENIH

SEQ ID NO: 270314 - protein, 49 aa, Glycine max
  Clone ID: PAT_MRT3847_86111C.1.pep
HLSYLASDLRRVDPDLCGCHAPTVVVRRLRARVAVAYKQRSRLKNMPRA

SEQ ID NO: 270315 - protein, 44 aa, Glycine max
  Clone ID: PAT_MRT3847_86112C.1.pep
IEDNVLLQKNESHKTAPSACVVLICPAKAMDIYAFGISHNPSLH

SEQ ID NO: 270316 - protein, 89 aa, Glycine max
  unsure (1)..(89): unsure at all Xaa locations
  Clone ID: PAT_MRT3847_86113C.1.pep
PVEKNIDQNIKGKIATEXRQVFIDIIIRCLKYELDDRPTMGEVEVQLEHALSMQEQADITNTNSNYTLFSTTTIHLGLELESNPEESDT

SEQ ID NO: 270317 - protein, 89 aa, Glycine max
  Clone ID: PAT_MRT3847_86114C.1.pep
MESATNLRVRDFIAKEVADWDDELIAVARFKAFSGQRCDWEPTFRFWKHFIIKIATHFGLLLIRPSQVKNDWFNRGGLTPLCLDDVLVT

SEQ ID NO: 270318 - protein, 45 aa, Glycine max
  Clone ID: PAT_MRT3847_86115C.1.pep
MTHYRVLKDKGVYVLVTYGAPLYRLRLLQESCSWTIKLHVIGNFC

SEQ ID NO: 270319 - protein, 250 aa, Glycine max
  Clone ID: PAT_MRT3847_86116C.1.pep
VHTIPRNPTADRRSGNVAGTPIISVVPLLPPTMPHAKTSQSQQNIKQRVLTCLTKLSDRDTQAAGATELESIARTIDPHSVPVFLSCIHSTDSSDKTPVRKQCVHLVATLSHAHGDALSPFLSKIIACLVRRLRDPDSSVRAACADSVGALSACVTRQPFAAAFLKPLAEALFTEQDPSSQAGAALCLASAVEAAPDPDPARLARLLPRLERLIKSKVFRAKPALLVLVGSVVEARGASSGVALKDLVPC

SEQ ID NO: 270320 - protein, 49 aa, Glycine max
  Clone ID: PAT_MRT3847_86117C.1.pep
MDINEGRKKEKGTQQERRKVPFLKLFSFADFYDCVLMAIGTVGACVHGA

SEQ ID NO: 270321 - protein, 500 aa, Glycine max
  Clone ID: PAT_MRT3847_86118C.1.pep
MYVGGVEVILYMLQSILEGVMLWEVLEALSHWCIFHRSKAELVVGTWNKQFHNSEKVQRVPLLYLANDILQNSRRKGNEFVTEFWKVLPSALKDVLEKGDDQENRAVFRLVDIWEERRVFGSQAKSLKNVILGEEAPPQLEFNKKRSRSVRIVKKDSRSIKTKLSIGGTAEKIVSAFHTVLNEHSNEDAEMSRCKSAVHRVRKMEKNVDIACAVVKDPKRKTLSKELVEEENILKECIENLKLVEASRTALESELENVRTQIQVAQAQVEEASYMRKRLDDEDSSYKASISTTSLTDVNTKSEAATKKSAAAIAAEVADKLTASTSSQLIMTSVLSTFAAEEAKSACLTSESMSKPEKSIPISDPNVFVSSQQLIATPNHSYPSVLVPQPTLQNPAAASQGQYQMLCNSSSQHYLQSTGGVISSYGYGSITPLPPGPLPPHMVGPVVPLTHQAMQITQQQPTPIAQHQPIKMTQQAPAPPSFRPLQPPGMVYYGNHQHSI

SEQ ID NO: 270322 - protein, 90 aa, Glycine max
  unsure (1)..(90): unsure at all Xaa locations
  Clone ID: PAT_MRT3847_86119C.1.pep
AHSLSXAKWYAFRCVRKXMCCPLEXQPGRVXETGXPLLLSIPILVTGVWAXTSKRXXXARXGWRSALIXLGXSXXWCPXQVFSGXVAASL

SEQ ID NO: 270323 - protein, 59 aa, Glycine max
  Clone ID: PAT_MRT3847_8611C.1.pep
KGWKKQAPYYDSCISYKIRDRQSRDYYHYRYMTILVDMTDLRAHRDSFQSRTQSLTAWS

SEQ ID NO: 270324 - protein, 509 aa, Glycine max
  Clone ID: PAT_MRT3847_86120C.1.pep
MFFSVSCDPYAKEMNNKAELVVGTWNKQFHNSEKVQRVPLLYLANDILQNSRRKGNEFVTEFWKVLPSALKDVLEKGDDQENRAVFRLVDIWEERRVFGSQAKSLKNVILGEEAPPQLEFNKKRSRSVRIVKKDSRSIKTVRLRVLVKLSIGGTAEKIVSAFHTVLNEHSNEDAEMSRCKSAVHRVRKMEKNVDIACAVVKDPKRKTLSKELVEEENILKECIENLKLVEASRTALSWCPLAIVCAFMYQESELENVRTQIQVAQAQVEEASYMRKRLDDEDSSYKASISTTSLTDVNTKSEAATKKSAAAIAAEVADKLTASTSSQLIMTSVLSTFAAEEAKSACLTSESMSKPEKSIPISDPNVFVSSQQLIATPNHSYPSVLVPQPTLQNPAAASQGQYQMLCNSSSQHYLQSTGGVISSYGYGSITPLPPGPLPPHMVGPVVPLTHQAMQITQQQPTPIAQHQPIKMTQQAPAPPSFRPLQPPGMVYYANSMLTGVELENAWTPG

SEQ ID NO: 270325 - protein, 109 aa, Glycine max
  unsure (1)..(109): unsure at all Xaa locations
  Clone ID: PAT_MRT3847_86121C.1.pep
PVDGDILIVGLETTSTSRLVSDXYLLNVYGYRTRPILLLIEIEVGQAYVXLLPFPFVKAVPMTNTDIDAHAVSVAAVVLVVILSLRLTVYGISYDSDRYTATALTLTLT

SEQ ID NO: 270326 - protein, 68 aa, Glycine max
  Clone ID: PAT_MRT3847_86122C.1.pep
TKKQCYLTLHIHIRHERYIFFSIISWTGPNYIIIDEGLRVNPSNMGQTYQTFAFGLGGFFKKKNWLKK

SEQ ID NO: 270327 - protein, 66 aa, Glycine max
  Clone ID: PAT_MRT3847_86123C.1.pep
LTDTLRTWLLNGPLHTGSVVVDRESVWDSQPQRRTQGSQPSYPHKHFQVREKQHQHKKNTRKTSPQ

SEQ ID NO: 270328 - protein, 72 aa, Glycine max
  Clone ID: PAT_MRT3847_86124C.1.pep
IPGFLNKVIFRDTNLTSLGIRSRFAPFFFHFKVAMGQTLFKKTKDFQNRCLMSPGLLAGFNKFISLYFFYTE

SEQ ID NO: 270329 - protein, 91 aa, Glycine max
  Clone ID: PAT_MRT3847_86125C.1.pep
MASFVSLLVLLLAALILMPHGLATYYKPIMKPPAFNPAAVHMPPVNKPPVYKPKPPLYKPKSPTYNPPYKKPPYEKPPYGKYPPDEDNTHA

SEQ ID NO: 270330 - protein, 68 aa, Glycine max
  unsure (1)..(68): unsure at all Xaa locations
  Clone ID: PAT_MRT3847_86126C.1.pep
EQSYPTVSAEYQKAVENAKKKLRGFIAEKRCAPLMLRLDWQSPGTXDVSSKTGGPFDTIRRPSELAHG

SEQ ID NO: 270331 - protein, 86 aa, Glycine max
  Clone ID: PAT_MRT3847_86127C.1.pep
HMGRQALGDEAGAALKPELSQYYLEQAGDAIKGQGRLRRLHRIGGIPEVLHPPSRRRSLRATRTRDKGSVLDSDQDALGMNNNNRP

SEQ ID NO: 270332 - protein, 85 aa, Glycine max
  Clone ID: PAT_MRT3847_86128C.1.pep
YVSPFSYFTFFKALYSLDLVIFSPNLSVSKIKRSKCATGSIDFYFENQGTDESYAQKWFISFVCTSYIFGYRVLCKNTFELTGSF

SEQ ID NO: 270333 - protein, 62 aa, Glycine max
  Clone ID: PAT_MRT3847_86129C.1.pep
GLALQGIPRGGEKFSSQILVIFFFLGAAFKPCQGRLKCNSQAIFLPEKPAPLVLYMHHFAFQ

SEQ ID NO: 270334 - protein, 55 aa, Glycine max
  Clone ID: PAT_MRT3847_8612C.1.pep
VLPKLASVLCFQQPGYAGTRAPILRRAPTWWGRSQLPGLLRTTPHGSGSLPAPAG

SEQ ID NO: 270335 - protein, 73 aa, Glycine max
  Clone ID: PAT_MRT3847_86130C.1.pep
KISKEGQLLDPNFIHELSFIDVLILANRKVLFDTNFYTRREIVRHFGQGCKKYPREGAKRSFQAIFWTLACPG

SEQ ID NO: 270336 - protein, 80 aa, Glycine max
  unsure (1)..(80): unsure at all Xaa locations
  Clone ID: PAT_MRT3847_86131C.1.pep
KPSMWLYLFPNLNLGTDATDNQGNSAETVSFQLGTSFVTEANQTMXPPRKTPIVHSLGNNYQLNKVDDNGTPKPRLLVGL

SEQ ID NO: 270337 - protein, 83 aa, Glycine max
  Clone ID: PAT_MRT3847_86132C.1.pep
SNCCKHRHCLVIPRRRRRRRRSQKKKQKGMRRGMFVLCVCVYGELFGKFNYNDHWLTQQLRDAQQLSRQPYLSKCAASYLNND

SEQ ID NO: 270338 - protein, 140 aa, Glycine max
  unsure (1)..(140): unsure at all Xaa locations
  Clone ID: PAT_MRT3847_86133C.1.pep
QNGKQPQETEGPAGKPPPETNPRPRAEKAPPTKAQTDGGKTPKHEXRGAGPHPAEEXPEKEDQEKPKKTDARRRQRKEPQHTEAQAQTETKPAKAAPEDAETPKGATAEPKNPQTKKAPPNNTGGGTHRRREPTAKPKTE

SEQ ID NO: 270339 - protein, 81 aa, Glycine max
  Clone ID: PAT_MRT3847_86134C.1.pep
ICVEMCKHSYKCQEALSKQRMVIESLQRETESKNHKLMEMEHKHSETLTSVRRLIVGLAENINCKERCLLHMECKHSESLN

SEQ ID NO: 270340 - protein, 83 aa, Glycine max
  Clone ID: PAT_MRT3847_86135C.1.pep
VKKASVFVEPPPPPKDSLSESEEPKDPPIILPSPPNLKISTSPPPSIEPPTTTTSFYRSPPMGGSPMVARLVVSGISTLWLIM

SEQ ID NO: 270341 - protein, 42 aa, Glycine max
  unsure (1)..(42): unsure at all Xaa locations
  Clone ID: PAT_MRT3847_86136C.1.pep
EGHSMMQLERINALYNEASGGRNXPRAVLMELEPGTMDRIRS

SEQ ID NO: 270342 - protein, 83 aa, Glycine max
  Clone ID: PAT_MRT3847_86137C.1.pep
LCSKTELHLFLHFRFIYTIIITQSFSSEIQLTLDFLRDRLAEAHTEHLDKGCRLKPKFCMRTKFNLTALYISCEGCDTFEVVI

SEQ ID NO: 270343 - protein, 43 aa, Glycine max
  Clone ID: PAT_MRT3847_86138C.1.pep
GIPPEQRGLIFIGKQLKDGRPLSVFNIQKELTPPLVFCMRCGQ

SEQ ID NO: 270344 - protein, 72 aa, Glycine max
  Clone ID: PAT_MRT3847_86139C.1.pep
PLTLEALRATYRAIQTPTMGHYFSVTVITQPQISTNPKQAPLRYNSATEAMHAMDTFEVDLTITLPVDTLSS

SEQ ID NO: 270345 - protein, 90 aa, Glycine max
  Clone ID: PAT_MRT3847_8613C.1.pep
SNQTVQRSPEAFYILYFFFYLLDLRKASITGKGTLFPSTIQTGILLFISPMHNYPLLPECTSLILVRLPSCGSCSTCNEHPNPCHMHMSP

SEQ ID NO: 270346 - protein, 128 aa, Glycine max
  Clone ID: PAT_MRT3847_86140C.1.pep
ERSRERENSSMQRVGLSTFPITDCRCTSIDTSEQKAQRTVTSHSTPTLFCLNSRANEKKEATTRCNPYAIPKKRITSAAKLMTTIPKTRRELVPKQFLIGHKPLPMVALMMNPNLRIMMRSLLLVAEK

SEQ ID NO: 270347 - protein, 99 aa, Glycine max
  Clone ID: PAT_MRT3847_86141C.1.pep
MSGRKETVLDLAKFVDKGVQVKLTGGRQVTGTLKGYDQLLNLVLDEAVEFLRDPDDPLKTTDQTRNLGLIVCRGTAVMLVSPTDGTDEIANPFIQPDGS

SEQ ID NO: 270348 - protein, 99 aa, Glycine max
  Clone ID: PAT_MRT3847_86142C.1.pep
MSGRKETVLDLAKFVDKGVQVKLTGGRQVTGTLKGYDQLLNLVLDEAVEFLRDPDDPLKTTDQTRNLGLIVCRGTAVMLVSPTDGTDEIANPFMQPDGS

SEQ ID NO: 270349 - protein, 34 aa, Glycine max
  unsure (1)..(34): unsure at all Xaa locations
  Clone ID: PAT_MRT3847_86143C.1.pep
VQHNWANDFFAVNEIXMQFVESMRKHITHELELH

SEQ ID NO: 270350 - protein, 132 aa, Glycine max
  unsure (1)..(132): unsure at all Xaa locations
  Clone ID: PAT_MRT3847_86144C.1.pep
PLNKARNHPRPSHIGYDVRAGVIISTASIYDPEVHKSRQVLYRGYISELFVPYQDPGEEWYYKTFFDAGEFGFGQSMVSLEPLHDCPPQAQFLDVYFAASDGSPQHLENAIXVFEQYGGYQLGVTLNQGIPQ

SEQ ID NO: 270351 - protein, 75 aa, Glycine max
  Clone ID: PAT_MRT3847_86145C.1.pep
TSGLILFLLGILCICPSALHHRRSFLALRAALAKSTWPHEGNKADIYYYPLPTMMSHRLLFTVCRKQVKLTGVAA

SEQ ID NO: 270352 - protein, 142 aa, Glycine max
  unsure (1)..(142): unsure at all Xaa locations
  Clone ID: PAT_MRT3847_86146C.1.pep
GPEGPGRPTRPFITKEKKPGHEGTKKKKPGEKPQREQERRDTPDAQRPATPGRRPRAPGTQPTGRAQKTPGPGGPKGKPHRGGGPTPARGKRRPTPKKAPTRTPPNRXRQKREKATPPGPGQKQPNREGQKDSPPGKRNRPR

SEQ ID NO: 270353 - protein, 60 aa, Glycine max
  Clone ID: PAT_MRT3847_86147C.1.pep
AFMNKVSLVSHPKRDYRVNGAQRAPQGPGCNKDHFQNRSGFFKIKKLLWTKVIGFKTPKE

SEQ ID NO: 270354 - protein, 53 aa, Glycine max
  unsure (1)..(53): unsure at all Xaa locations
  Clone ID: PAT_MRT3847_86148C.1.pep
XECASFGTSSKSRTSLATDDVTIVQSLSAYAEMIVIALDALNAADGSSTSAIS

SEQ ID NO: 270355 - protein, 340 aa, Glycine max
  Clone ID: PAT_MRT3847_86149C.1.pep
MTTSLETPPSPLDLHNNSQEGMRVMGYFSSPLFSPSSDKRFWSTLRSRIDALLDARQSETSTHSPTNEQGNNRLKEDSMLLMRGFDSVAHTLSLLSNNLDNALHGARELANPPTLTDIFHSKYDKVENKEDSGEKQKEEEESKQGMKRKFDPNDVSEENAVDSQKEENGKKMMDTNIKKAKNLAVSMATKAASLARELKSIKSDLCFMQERCGLLEEENRRLRDGFAKGVRPEEDDLVRLQLEALLAEKSRLANENANLVRENQCLHQLVEYHQLASQDLSDESYEHALQGMYLDFSSPPPTIPEETRDGDGDEDENGEPTHTRRNHICKFSASIDDGEE

SEQ ID NO: 270356 - protein, 99 aa, Glycine max
  Clone ID: PAT_MRT3847_8614C.1.pep
HEVIDLQESKSLKDIPVVIMSSENVPARINRCLEEGADEFFLKPVQQSDVNKLRPHLMKSKVKDGEDQQISNKRKETEESHSPDKTRTKMEPQKVVNFS

SEQ ID NO: 270357 - protein, 52 aa, Glycine max
  Clone ID: PAT_MRT3847_86150C.1.pep
TLGLDAPNIPTPTNIYFSTQFGFEKISMDLINYLLHSAIQDIEGGARYRSLG

SEQ ID NO: 270358 - protein, 112 aa, Glycine max
  Clone ID: PAT_MRT3847_86151C.1.pep
HASADAWVARELKSIKSDLCFMQERCSLLEEENRRLRDGFAKGVRPEEEDLVRLQLEALLAEKSRLANENANLVRENQCLHQLVEYHQLASQDLSDESYDEHAIQGMYLDFS

SEQ ID NO: 270359 - protein, 52 aa, Glycine max
  Clone ID: PAT_MRT3847_86152C.1.pep
PNPVGQFSFAFKPNLSSENFIFERSKIFPHTKSLLGLRSNCFSLNFKINLTV

SEQ ID NO: 270360 - protein, 39 aa, Glycine max
  Clone ID: PAT_MRT3847_86153C.1.pep
QGNKTRGYLFPRVKVFKLSIIEESRERNAAQQSTCCFNF

SEQ ID NO: 270361 - protein, 49 aa, Glycine max
  Clone ID: PAT_MRT3847_86154C.1.pep
SAKPLFKVTVVSRLFNRADGDVSYRHYVQLTLTSMIRSSEHRSLTEITL

SEQ ID NO: 270362 - protein, 72 aa, Glycine max
  Clone ID: PAT_MRT3847_86155C.1.pep
FPLIINIYLNMNINIIFSTFTYIHMPLFIMSYIHNICSNPSSCDSLTQQTHYGLASPTVSDVYSLPSFFLYI

SEQ ID NO: 270363 - protein, 54 aa, Glycine max
  Clone ID: PAT_MRT3847_86156C.1.pep
GIGMLLPAVVAYYYQKKFTLRLVPRICFGNGFSHGLDSIDCYTLCNHLTQDLLA

SEQ ID NO: 270364 - protein, 61 aa, Glycine max
  Clone ID: PAT_MRT3847_86157C.1.pep
PLHPKRGGGAMHMNLMNPKLQQVTGGEIMVFHLTALQVIKPPLEGHSSLYAVWIKTQGCLT

SEQ ID NO: 270365 - protein, 46 aa, Glycine max
  Clone ID: PAT_MRT3847_86158C.1.pep
NLKNKVVFIFKSSNTRQLGAATHALLNKFLMTSPIIFACCFLLSSS

SEQ ID NO: 270366 - protein, 90 aa, Glycine max
  Clone ID: PAT_MRT3847_86159C.1.pep
QCKNFSSLAAIVRAEKLLIHSLFLTDLISGLCKFMLLVFNLVPLDSTQVQLQRSNRFQFWCGDRKQNLKISRNIRQNSMRLWELFYMTTN

SEQ ID NO: 270367 - protein, 52 aa, Glycine max
  Clone ID: PAT_MRT3847_8615C.1.pep
NGIVAHIPTKKLTTFGMRLRTNGAMNTAAPWKSNLPLPIYLELQLVNGSRMT

SEQ ID NO: 270368 - protein, 63 aa, Glycine max
  Clone ID: PAT_MRT3847_86160C.1.pep
MANVDYLKIVRVSCMNIGFVSNDVGLDADNCKVLVNIEQQSPDIAQGVHGHLTKKPEEIGAGD

SEQ ID NO: 270369 - protein, 117 aa, Glycine max
  unsure (1)..(117): unsure at all Xaa locations
  Clone ID: PAT_MRT3847_86161C.1.pep
MKFGMIDDSFSDCQTSPKCHTKDLQGLAYKYLNSIPKFVKIVEVGPRDGLQNEKNIVPTAVKIELIHRLASTGLSVIEATSXXVSPKWVPQLADAXDVMQAVHNLRGIRLXPVLTPN

SEQ ID NO: 270370 - protein, 97 aa, Glycine max
  Clone ID: PAT_MRT3847_86162C.1.pep
VEMSVSFSSTSVSFSESSFAFQRPAPAHLCSNSLTVASNNFHSATGGGRLVLNVGGTCLCRKFRGLKLWLLERLSFQFQPPKQPRNRNHHFRINLEK

SEQ ID NO: 270371 - protein, 62 aa, Glycine max
  Clone ID: PAT_MRT3847_86163C.1.pep
LIVLKARRIVFDYIHSGNGFRTLFGDEQVYAIYLLLKFCPFIVGLNIRGLNLSVVVCSTFTW

SEQ ID NO: 270372 - protein, 39 aa, Glycine max
  Clone ID: PAT_MRT3847_86164C.1.pep
PLLVKFVLPTTFFLFTKLKHVTLLEGSESCLTNFHLRGT

SEQ ID NO: 270373 - protein, 101 aa, Glycine max
  Clone ID: PAT_MRT3847_86165C.1.pep
GWLSSCEENCGVSRWCNRGWGDGGNLSYFDFSMTYVEAGMMRSHLVNVSLLVGAAITWGIMWPLIKGLKGEWLPASIVESIIKSLNGYKVYISIALILDDG

SEQ ID NO: 270374 - protein, 71 aa, Glycine max
  Clone ID: PAT_MRT3847_86166C.1.pep
TKGEGTLKKTILKTSGKNYLKSGHRGGKEPLTPRNGEKLTFYKLHRGTNWSFLIWGKGGRPAMGEKNGYLT

SEQ ID NO: 270375 - protein, 118 aa, Glycine max
  Clone ID: PAT_MRT3847_86167C.1.pep
PSATPSEPGSCLQLQFHEPPNAVSLPTWAIHVSSVAEWIIAMALVWQYGEKSGYPAWKGLSWGMVPLLGGAFCACTWHFFYNSESLEVLVALQAALTVIGNATMCIAAYRIYKSSQGS

SEQ ID NO: 270376 - protein, 107 aa, Glycine max
  unsure (1)..(107): unsure at all Xaa locations
  Clone ID: PAT_MRT3847_86168C.1.pep
QPECRQHKMFEIIPLCTTRYTYLFLLVKIYTINXXXLVQTIHLKLPYIKSMNLLGIKFKKNEHLLACLSCHKKIKDNRKQKSGHMNSIFVTKIFWYASRHFSHSCSP

SEQ ID NO: 270377 - protein, 259 aa, Glycine max
  Clone ID: PAT_MRT3847_86169C.1.pep
LPIFFIFFPFNRQGDSYIINGTKWWTSGAMDPRCRILIVMGKTDFNAVKHKQQSMILVDVQTPGVHIKRPLTVFGFDDAPHGHAEVTFENVCVPAKNIILGEGRGFEIAQGRLGPGRLHHCMRLIGVAERGMHMMIQRAVGRRTFGKLIAQHGSFISDMAKCRIELESTRLLVLEAADQLDRHGNKKARGILAMAKVAAPNMALKVLDMAIQVHGAAGVSSDTVLAHLWAAARTLRIADGPDEVHLGTIAKLELQKAKL

SEQ ID NO: 270378 - protein, 518 aa, Glycine max
  Clone ID: PAT_MRT3847_8616C.1.pep
FLRIDLVKSHISYIRKRNNPPGSRFILDNESDRTTINPFFSIDLREKIQQSLSKNHGTIRMLLNRNEKCRSLIILSSSNCFQIRSFNHGKYYNGIKEGINQIQRDAMIPIKNSLGPLGIAPQVAHFDFYRLITHNQISIIKNGQLDKLKETFQVFQYYFLDENERIYKPDLCSNIILNPFYLNWHFLHHNYCEKTFTIMSLGQFICENVCIVQTKNAPHLKSGQILTVQMDSVGIRSANPYLATPGATVHGHYGEILSEGDILVTFIYEKSRSGDITQGLPKVEQVLEVRSIDSISMNLEKRVDTWNGRITKILGIPWGFLIGAELTIAQSRISLVNKIQKVYRSQGVHIHNRHIEIIVRQITSKVLVSEDGMSNVFLPGELIGLLRAERAGRSLEEAICYRVLLLGITKTSLNTQSFISEASFQETARVLSKAALRGRIDWLKGLKENVVLGGMIPVGTGFKRIMNRSKQRQYNKMTSETKKKNLFEGEMRDILFHHREFFFFVSKNLCDTSQQSSI

SEQ ID NO: 270379 - protein, 169 aa, Glycine max
  unsure (1)..(169): unsure at all Xaa locations
  Clone ID: PAT_MRT3847_86170C.1.pep
MAAATLYLAKPPSSFTPKIPFPRVRDSGIGTVKCQVKTQVKAGILGLGLGLFHFLNFVEPGSCLQLQFHEPPNALSLPTWAIHVSSVAEWIIAMALVWQYGEKSGYPAWKGLSWGMVPLLRWSRRAAAWYAXNTSSLEVLVTLQAALTVIANATMCSAAHRIYKPCLCS

SEQ ID NO: 270380 - protein, 79 aa, Glycine max
  unsure (1)..(79): unsure at all Xaa locations
  Clone ID: PAT_MRT3847_86171C.1.pep
HLVHICSDVAASLVIRHWGFANEPNHLLMHRNSPAFIWVGGVELELIAIPTGGIIVPMFQELFPQILGMAGMVREISXG

SEQ ID NO: 270381 - protein, 143 aa, Glycine max
  Clone ID: PAT_MRT3847_86172C.1.pep
AAYVSSEFGSSAERGMHMMVQRAVSRRTFGKLIAQHGSFISDMAKCRIELESTRLLVLEAADQLDRHGNKKARGILAMAKVATPNMALKVLDMAIQVHGAAGVSSDTVLAHLWAASRTLRIADGPDEVHLGTIAKLELQKAKL

SEQ ID NO: 270382 - protein, 88 aa, Glycine max
  Clone ID: PAT_MRT3847_86173C.1.pep
TNTETPIIITYKRFCLSFFLSPFPHRSDLNQSHILQFNFTRNSLIVISESGRQTLLPLYRSSQLCCSGEITNEISGGISPPLTTIDNR

SEQ ID NO: 270383 - protein, 81 aa, Glycine max
  Clone ID: PAT_MRT3847_86174C.1.pep
NNVTPKDLTSMIYYSQQSSSSRPSQEIPNLINSSSIKSLSQSAKTALMTISYRGQVIVFDEFPIDIAIEIMSYATKRIPQS

SEQ ID NO: 270384 - protein, 83 aa, Glycine max
  Clone ID: PAT_MRT3847_86175C.1.pep
QGQATCSKAQGVPQGPRKRILGPPGGYFGPRASPPCYPAAPLQGLKFVNMRCIVFKVNFGESMLSQNNTLAVYGHCTISIMLN

SEQ ID NO: 270385 - protein, 68 aa, Glycine max
  Clone ID: PAT_MRT3847_86176C.1.pep
HVKFHDALCQLQVNRPDYFFWRSNNMLKFAVGTFLGPCPKSILFGPYPFVLFSSPKKIINYKKYTKKY

SEQ ID NO: 270386 - protein, 207 aa, Glycine max
  unsure (1)..(207): unsure at all Xaa locations
  Clone ID: PAT_MRT3847_86177C.1.pep
AANLAEEIVKELFPLIRVYKDGSVERLLSSENVAASPEDPQTGVSSKDIVIADNPYVSARIFLPKSXTTLTTNSFFVHRYLNILASEANIIAISVDFRLLPHHPIPAAYEDGWTTLKWIASHANNTNTTNPEPWLLNHADFTKVYVGGETSGANIAHNLLLRARNECLPGDLEILGGLLCCPFFWGSNRQRMCQVCMNFQKPSMQYH

SEQ ID NO: 270387 - protein, 103 aa, Glycine max
  Clone ID: PAT_MRT3847_86178C.1.pep
SFIEHDIALPFRGTRHVHNASRARSTQHPIIYPLRATFQIPELTLTNNKPAHRIWLKHKSQLGSWEGKKSHPTHCTLLLYLEAVGNNSEGTVLNINSIKDTEG

SEQ ID NO: 270388 - protein, 72 aa, Glycine max
  unsure (1)..(72): unsure at all Xaa locations
  Clone ID: PAT_MRT3847_86179C.1.pep
LTSARVGPALSAERTLTSTPTSLPTGXPASSTLYANSAAHSSAAAAHHNTVISRGIFSTMCCGGGVGRPPNA

SEQ ID NO: 270389 - protein, 163 aa, Glycine max
  unsure (1)..(163): unsure at all Xaa locations
  Clone ID: PAT_MRT3847_8617C.1.pep
MNRKIHVWFGKRSXHFXNEWKESLLSLSDLLDNRKQKILRTIRNSEELREGAIEQLEKAQARLRKVETEADRFRVNGYSEIEREKLNLINSIYTTLEQLENYKNEAIHFEQQRVINQVRQRVLQQALQGALGTLKSCLNNELHLRTVSANIGMFGTMKEKITD

SEQ ID NO: 270390 - protein, 259 aa, Glycine max
  Clone ID: PAT_MRT3847_86180C.1.pep
GSRKGPTRPVALALAHLCSSDDQRIIFIDHYGLELLIGLLGSSSSKQQLDGAVALSKLANKALTLSPVDAAPPSPTPQVYLGEQYVNNATLSDVTFLVEGKRFYAHRICLLASSDAFRAMFDGGYTEKEARDIEIPNIRWEVFELMMRFVYCGSVDVTLDIALDLLRAANQYLLEGLKRLCEYTIAQDISPENVSSMYELSEAFNAISLRHACILFILEQFDKLSSRPGHSLLIQRIIPEIRNYFVKALTKANSHDNQL

SEQ ID NO: 270391 - protein, 246 aa, Glycine max
  Clone ID: PAT_MRT3847_86181C.1.pep
EFRLEQLYSSSLGDVFAITAAGDFVAHVLNAYTGEDVAGKILSFAQKGPRGICILSANGAISNVTIRQPGSSGGILTYEGRFEILSLSGSFTVVDNSGMKSRTGGLSVSLAGPDGRVIGGGVAGLLTAAGPIQIVVTRPMQNCCKTQKRKYQREQQIVAATPTSAGPEIVTAAIPISQANAADGENFLIPIPIYQIPDQNQRESISVSSDKQNLDATPDAAATWNGSEEYSDQRTSPDINISLPDE

SEQ ID NO: 270392 - protein, 77 aa, Glycine max
  Clone ID: PAT_MRT3847_86182C.1.pep
GAPSLATLACFKMLVTITGKDEFRDRDILFHHTVEQSGWQGELQLFDAGDEEHAFQLFKPETHLAKAMIKRLASFLV

SEQ ID NO: 270393 - protein, 81 aa, Glycine max
  unsure (1)..(81): unsure at all Xaa locations
  Clone ID: PAT_MRT3847_86183C.1.pep
RLCEYTIARIISLENVSSMXELTEAFNAISLRHACILFILEQFDKLSSRPGHSLLIQRITPEIRNYFVKALTKANSQNDRL

SEQ ID NO: 270394 - protein, 67 aa, Glycine max
  unsure (1)..(67): unsure at all Xaa locations
  Clone ID: PAT_MRT3847_86184C.1.pep
IPKDFFPLIKKAVSIRKHLXRNRKAKDSKFRLIFVESKIPRLARFYKKTKKLPPVWKYESTTGATLV

SEQ ID NO: 270395 - protein, 61 aa, Glycine max
  Clone ID: PAT_MRT3847_86185C.1.pep
CIWFVDGIIINFFCLPLYHQLGFWRIFLSFPPLFLRRRSNNEKEPLCLIDHVMKIYGDMIL

SEQ ID NO: 270396 - protein, 202 aa, Glycine max
  Clone ID: PAT_MRT3847_86186C.1.pep
MELQRRPDQCLPERKGQKRKLEEEFDDDPQISPPPTGDARDALLSDVKEQVSLLDSTFSWNEPDRAAAKRATHALADLAKNEEVVNVIVEGGAIPALVKHLQVPPLPLPETDRVPRPMPFEHEVEKGSAFALGLLAVKPEHQQLIVDSGALKHLGDLLKRHKNGLTSRPINSLIRRAADAITYLALKDRGISSDVAHNTRDP

SEQ ID NO: 270397 - protein, 80 aa, Glycine max
  Clone ID: PAT_MRT3847_86187C.1.pep
PSRALQQTLPRKNKIIQVSLSLRPMSYIDSPNLESFCWAQNCKAEGLGPSSSGLVNYAPTPPPQFFLFTQMKPADGSYHY

SEQ ID NO: 270398 - protein, 230 aa, Glycine max
  Clone ID: PAT_MRT3847_86188C.1.pep
MMMHVLCFSVFLAAAMQGTLAVEYSVTNNALSTPGGVRFRDAIGDEYAKQTLDSATQFIWGVFQQNAPADRKDIQKINLFVEDRVVPNGVVAYTSKDEIHVIAKYVNDYGGDVKTEITGVLYHEMVHVWQWNGNGQAPSGLIEGIADYVRLKANYAPSHWKKAGEGQKWDQGYDVTARFLDYCNTLKSGFVAQLNKQMRTGYSDQFFVQLLGKTVDQLWQDSKAKYGNIP

SEQ ID NO: 270399 - protein, 328 aa, Glycine max
  Clone ID: PAT_MRT3847_86189C.1.pep
MGGLQIRSRMAKEIVKELLPLIRVYKDGSVERLLSSENVAASPEDPQTGVSSKDIVIADNPYVSARIFLPKSHHTNNKLPIFLYFHGGAFCVESAFSFFVHRYLNILASEANIIAISVDFRLLPHHPIPAAYEDGWTTLKWIASHANNTNTTNPEPWLLNHADFTKVYVGGETSGANIAHNLLLRAGNESLPGDLKILGGLLCCPFFWGSKPIGSEAVEGHEQSLAMKVWNFACPDAPGGIDNPWINPCVPGAPSLATLACSKLLVTITGKDEFRDRDILYHHTVEQSGWQGELQLFDAGDEEHAFQLFKPETHLAKAMIKRLASFLV

SEQ ID NO: 270400 - protein, 479 aa, Glycine max
  Clone ID: PAT_MRT3847_8618C.1.pep
MAASIPFTGINSSRVLPIPREPHHPFSHLLSNMSKFASLRTPSSSSASSSSSSVSCSLTKDPYSVVPLEEHSKMDNGSVLLQRPDSFGRFGKFGGKYVPETLMHALTELEAAFYSLSADEEFQKELAGILKDYVGRESPLYFAERLTEHYKRPNGEGPHIYLKREDLNHTGAHKINNAVAQALLAKRLGKKRIIAETGAGQHGVATATVCARFGLECIIYMGAQDMERQALNVFRMRLLGAEVRPVHSGTATLKDATSEAIRDWVTNVETTHYILGSVAGPHPYPMMVREFHAVIGKETRKQALEKWGGKPDILIACVGGGSNAMGLFNEFVDDKDVRLIGVEAAGFGLDSGKHAATLTKGEVGVLHGAMSYLLQDDDGQIVEPHSISAGLDYPGVGPEHSFLKDLGRAEYHSITDEEALEAFKRVSRLEGIIPALETSHALAYLEKVCPTLPNGAKVVVNFSGRGDKDVQTAIKCLKL

SEQ ID NO: 270401 - protein, 61 aa, Glycine max
  Clone ID: PAT_MRT3847_86190C.1.pep
FILRFWGDIITSLGSVIQSVQWRQLLSQGQEHRNSVSPKPSLSPNPSYCAIDTKTTHLGRR

SEQ ID NO: 270402 - protein, 102 aa, Glycine max
  Clone ID: PAT_MRT3847_86191C.1.pep
ALSTTSSPPSCTRLRQSELLVIQYNMVFHRRPLILVIMWLFLFLFLLGHCHGSRATTTVFKFKPKSQHHGHFSGFLPKRMPIPYSTPSRKHNDIGLRSWRSP

SEQ ID NO: 270403 - protein, 171 aa, Glycine max
  unsure (1)..(171): unsure at all Xaa locations
  Clone ID: PAT_MRT3847_86192C.1.pep
MKPIKNNTMKYFRERFALVQNQLTQGHFILCIDAVGAAAEAYTHDLLTIAANDTTAVYMCSRYSLLSTPTREXRKTVSSLMVGSLTQAYSIGPWIREAIHIDPRLIFSAYVGTALDLECFLGAALVARRREYLYLAGXVAPGLDMLLWLHFAYSIFGGSTALFXIEMYFGL

SEQ ID NO: 270404 - protein, 96 aa, Glycine max
  Clone ID: PAT_MRT3847_86193C.1.pep
MARGSGRKNNDVTLLGLTALDLVMMALLFSANGAACAVGVIAQKGNSHVQWMKVCNVFDAYCRHVTAALVLSLFGSTVFLLLVLLSVLKLHYRTRS

SEQ ID NO: 270405 - protein, 180 aa, Glycine max
  Clone ID: PAT_MRT3847_86194C.1.pep
ARAELKLHPINSLPELMDYVQWIDEKNSLIEKDNVGGNRGGPTRSYSSSRTVTWEPRNKGTTTKTRETSLSLEPNSVKSTRAYRGRPFRRISDAEFQERAEKGLCYPGDGKFGPSHTCPNKQFRVLIMGKGQEEEDEKEEEARHEKQLQSIQLSLYIMSGLTSKKSIRLWDNIAENRVIV

SEQ ID NO: 270406 - protein, 218 aa, Glycine max
  unsure (1)..(218): unsure at all Xaa locations
  Clone ID: PAT_MRT3847_86195C.1.pep
IQSNIHMVXXEAXXISKXXIQRRSDVFMDDNGDIEGDESGWEXVSHVEDQGSSYSPEGSSRSLNRNHRESNVSGRSVLEWEETAGEETPITEISEVCSIPTKQAKKVSSITKLWRSTYPNNGDNYKIISVEGMNGRLSNGMLSNGVIMSPDHGSGKGGLSPQDLLYQLSPESGSPHAHQGMKGCIPRTAQKNSLKARLMEARMESQKVQLRHVLKQKI

SEQ ID NO: 270407 - protein, 74 aa, Glycine max
  Clone ID: PAT_MRT3847_86196C.1.pep
MEQLTKSDPWISLDMHNIILSGCHNFIWQDLSDHILQSADATNPHSPFFTFYITTFCLLFSLFALSPLFLFSVK

SEQ ID NO: 270408 - protein, 32 aa, Glycine max
  Clone ID: PAT_MRT3847_86197C.1.pep
WLLVGFYFFVNLQCFNCDMLLCKYKKKKMLVS

SEQ ID NO: 270409 - protein, 243 aa, Glycine max
  unsure (1)..(243): unsure at all Xaa locations
  Clone ID: PAT_MRT3847_86198C.1.pep
MAAATALLRSLXRRDLPSSSLSAFRSLTSGTKTSYVGNKWASLSRPFSSKPAGNDVIGIDLGTTNSCVSVMEGKNPKVIENSEGARTTPSVVAFNQKAELLVGTPAKRQAVTNPTNTLFGTKRLIGRRFDDSQTQKEMKMVPYKIVNATNGDAWVEANGQQYSPSQDGAFVLTKMKETAESYLGKSVSKAVITVPAYFNDAHCTATHEXAELLVFDVQKIINEPTAAALSYGMNNREGLIAVF

SEQ ID NO: 270410 - protein, 115 aa, Glycine max
  unsure (1)..(115): unsure at all Xaa locations
  Clone ID: PAT_MRT3847_86199C.1.pep
QPIGYRGVLGGHSKWALLGALGWTFPEILETNGVKFCEXVWIKAGAQIFSXGGLDYLGNPNLIHAQSILAIWAXRVSIMGFVEGYRIGGGPLGEXLEPIYTGGAFDPVGLADDPD

SEQ ID NO: 270411 - protein, 29 aa, Glycine max
  Clone ID: PAT_MRT3847_8619C.1.pep
FRRSGKGYGAGGRGCGWTADCKKKCIAYC

SEQ ID NO: 270412 - protein, 103 aa, Glycine max
  Clone ID: PAT_MRT3847_861C.1.pep
GIRHARLCHVPLIVEVVCCRLTPLQSNLYKHFIQSKNVKRAITEELKQSKILAYVTALKKLCNHPKVPINAAGLIRYNWCHPFFGKIIIHLMNMIIYSSLLQL

SEQ ID NO: 270413 - protein, 59 aa, Glycine max
  Clone ID: PAT_MRT3847_86200C.1.pep
NYDKRFILSIFISTSKFYQPKTDSHFFCYTILPKHQNKSPISIYHPKNNLKELKLRSTS

SEQ ID NO: 270414 - protein, 77 aa, Glycine max
  Clone ID: PAT_MRT3847_86201C.1.pep
MSMFSSIATILVSWQYYAYDMFPHRMTTGYGARTPDVKCSSWMHAVEAHIIFGSETIPDECLDATNEYIYGEQYILY

SEQ ID NO: 270415 - protein, 102 aa, Glycine max
  Clone ID: PAT_MRT3847_86202C.1.pep
MKISILLCVVLLGFLGVCQGGSLRKKFYRDSCPQAEDIIKTKTQQHVSANPDLPAKLLRMHFHDCFVRGCDASVLLNSTASNTAERDAIPNLSLAGFDVIDD

SEQ ID NO: 270416 - protein, 195 aa, Glycine max
  Clone ID: PAT_MRT3847_86203C.1.pep
MACLQPPWFSSLRVVSPAKLAAGPPPSTTYKPAKLLFWAVGPDNAESSEPASPDAPEPAAPVDSVELAFSKANVYKADYNNDENSAVERIVSDNTPQDLYEKLKSHPNPKVSKKARQFMYSFQAMEMMKMTTGSQFYLKNSDYQNYFDAFVENKSNYPGGDGPVQESAMNQVLPYILFLVSPIFVVLLIAVRKGI

SEQ ID NO: 270417 - protein, 135 aa, Glycine max
  Clone ID: PAT_MRT3847_86204C.1.pep
VNFVRSVSIFFQGLWLIVMGFMLWTPSLIPKGCYMNDEDGHMVVRCSSHEALHRAISLVNIEFSWFIIGVTVFAVSLYLVLVKVYGEKKVEYFSLGNEDEESNDDVESQKSGAFDHSSKSFIQVGKIFSQNDMER

SEQ ID NO: 270418 - protein, 65 aa, Glycine max
  unsure (1)..(65): unsure at all Xaa locations
  Clone ID: PAT_MRT3847_86205C.1.pep
KSCGVFFLLLLLVFASRVGEHREGTVCESQSHGLQGXCCRDHNCAGVCENEXFSGGRGKGLGRRR

SEQ ID NO: 270419 - protein, 361 aa, Glycine max
  Clone ID: PAT_MRT3847_86206C.1.pep
SSRSASNSYGTGYLPNQGSSFGGTSISNLNDRSFASLENSRRQGRPTASLCNCNGTLDILSEQNRGPRASKLKNQISTENNSVDSSKNSASTAKFQNESLNRSDFATDYKDAKFFVIKSYSEDNVHKSIKYGVWASTPNGNRKLDDAYLQAMEKQDACPIFLFFSVNASAQFCGVAEMVGPVNFDKSVDFWQQDKWSGQFPLKWHIIKDVPNSQFRHIVLENNDNKPVTNSRDTQEVKLGQGVEMLTIFKNYETDVSILDDFDFYEDRQKAMQERKARQQSSMVATGLVGENEHRSSANTTGDFMKQMSKSFALVVRLDENNKEVVVADRDSLVSHGHGPIGNVVKPDDGQSVTASSTQTS

SEQ ID NO: 270420 - protein, 56 aa, Glycine max
  Clone ID: PAT_MRT3847_86207C.1.pep
KLVHKLIVVVYEEQKIADLVIIYETIVIFVDDIVRPHDGRLVIKIGINIQQGYNEL

SEQ ID NO: 270421 - protein, 62 aa, Glycine max
  Clone ID: PAT_MRT3847_86208C.1.pep
GLTRLELSHIIVDRHGTRNLEVILLGCHVYLWGVGAKTYDPVATGGSWRIRGCTNGSSILHT

SEQ ID NO: 270422 - protein, 148 aa, Glycine max
  unsure (1)..(148): unsure at all Xaa locations
  Clone ID: PAT_MRT3847_86209C.1.pep
FLATQGKGGKGWIYLSIRDNGIGLTKEDVIKNLGTICXSGTSELEAKKQTRGDLTLIGQFGDGLYHVYLGADYVEGISKNNEDEQSGWDINADGAVASTKDAWKDPAVRGTDNGCHLTEEAGEYSKETKLKELVKRPSESIHLPIYIW

SEQ ID NO: 270423 - protein, 90 aa, Glycine max
  Clone ID: PAT_MRT3847_8620C.1.pep
GIAAGPRGDPKTTACLDIAANGMLNGSGDYKSTGQINKITITNDRGRLTKEDIDKMVLEACNYRPEDEEHSHRVRARSAVESYAYNMRNT

SEQ ID NO: 270424 - protein, 368 aa, Glycine max
  Clone ID: PAT_MRT3847_86210C.1.pep
MTTEGGPNTSLLVWFFPFIVFLLKVLKLFCYVFARGRERAMALEAVVFPQSQDPFGGSGYGSVNNKDFYNCTLLAATSPNSWGDYEQHININKEEEQGGASISTFQPESNYPYGNWTSSSSSMLPHFNNELQETTTTDPSNTLDSLNTRPKRRRAKSRKNKEEIENQRMTHIAVERNRRKQMNEYLSVLRSLMPDSYIQRGDQASIIGGAINFVKELEQRMHFLGAQKEGEGKSEAGGATNMPFSEFFTFPQYSTSGGGGCSDNSAAVGEDVGEVKCGIADIEVTMVESHANLKIRSKKRPKQLLKLVSGLHTMRLTILHLNVTTTGEVVLYSLSVKVEDDCKLGSVDDIAAAVYQMLDKIQQEAMLN

SEQ ID NO: 270425 - protein, 76 aa, Glycine max
  unsure (1)..(76): unsure at all Xaa locations
  Clone ID: PAT_MRT3847_86211C.1.pep
MSNVMWVAPADNASLWSQLYYVXCNNLEMQKPYFVNLRNVLLELTFHNAYEARQLRTKALSRIEWLXKANVPTIAQ

SEQ ID NO: 270426 - protein, 53 aa, Glycine max
  Clone ID: PAT_MRT3847_86212C.1.pep
SASLGAHYAPRQHLLQPLESAWIGLTGNRIGDWLGYLKKVNDPRFSENRLRIG

SEQ ID NO: 270427 - protein, 71 aa, Glycine max
  unsure (1)..(71): unsure at all Xaa locations
  Clone ID: PAT_MRT3847_86213C.1.pep
GXSAMXLSXXSIYNDLLIELXXTXXHXXPXNRANKGWXXXXTDSXNDIMVVWDDPWHEXCDVVXKHSDTIE

SEQ ID NO: 270428 - protein, 698 aa, Glycine max
  Clone ID: PAT_MRT3847_86214C.1.pep
AIPDFSSISKLTYLDLSWNQITGPIPSNKVADNMTTFDLSNNRLNGSIPHFFYPHLQKLSLANNLLSGSIPGSIWQNMSFSAKDKLTIDLQNNSFSDVLGNLTPPENVTLRLSGNPICKNSNIQSIGQYCGPEADNKAAQDSTNSTFCPVQSCPVDDFYEYAPSSPVPCFCAAPLRIGYRLKSPSFSYFAPYRSSFEDYITRSLDLDLYQLSIDSVAWEEGPRLRMYLKLFPSYNDSGSSMFNESEVHRIKGIYSSWHFPRTDFFGPYELLNFTLLGPYANLNVDSKKKKNNVGIKISAVIAAVACALAISAIIILLISKRNMKYQKKISRKRMSTNVSIKIDGMKAFTYKELAIATNKFNISTKVGQGGYGNVYKGILSDETFVAVKRAEEGSLQGQKEFLTEIELLSRLHHRNLVSLIGYCNEKEEQMLVYEFMPNGTLRDWISGKSRKTKGSLNFSMRLRIAMGAAKGILYLHTEANPPIFHRDIKASNILLDSKFTAKVADFGLSRLVPDLYEEGTGPKYVSTVVKGTPGYLDPEYLLTHKLTDKCDVYSLGIVYLELLTGMQPISHGKNIVREVNTARQSGTIYSIIDSRMGLYPSDCLDKFLTLALRCCQDNPEERPSMLDVVRELEDIITMLPEPETLLSDIVSLDSSGNIAPPSFASTSASNVTREEQHMSSYVSGSDLVSDVIPTIVPR

SEQ ID NO: 270429 - protein, 36 aa, Glycine max
  Clone ID: PAT_MRT3847_86215C.1.pep
INGPPQIRNGGLISLTKQKLCLKVRKFSPNYSMREK

SEQ ID NO: 270430 - protein, 66 aa, Glycine max
  Clone ID: PAT_MRT3847_86216C.1.pep
NLPPLRLLVSKRLGSSSGFPLCDKFFFVSPPPGVGFIPYPFRWHPKKGGWIFFLGLYIFFVPKIFL

SEQ ID NO: 270431 - protein, 164 aa, Glycine max
  Clone ID: PAT_MRT3847_86217C.1.pep
GRKTISRLKINDLLESHFKENCEESSDGVFFDSEDDENALTACETPRTAPSERKSQPKKPVFEKPRSCFAAIVPANIKLVYMKRSLVMDLLKDPETFETKVVGSFIRIRCDPNDYLQKNSHQLLQVTGTKKSSEVNGEIHLQVSGFIKDIRIQMLSDDNFSEEE

SEQ ID NO: 270432 - protein, 100 aa, Glycine max
  Clone ID: PAT_MRT3847_86218C.1.pep
NPHKFCCPYLTVVPRHCTCIETLTPGTMGMYTASCYNSHLLFMCCTPTDVTLWRTTACTPGLSLHCLHFTLLQARLSLISTTTRPPIRLVYGWCLESRSA

SEQ ID NO: 270433 - protein, 100 aa, Glycine max
  unsure (1)..(100): unsure at all Xaa locations
  Clone ID: PAT_MRT3847_86219C.1.pep
LKGYHSWKFNGHLRKTGIREDTSFHYHAXDLMIDVHVPQDSSNRPVLNTSWLSSPXRSLSSLCFAISPHHLIEASFRGLDQFHVLIVAHPQWLSVHTLFH

SEQ ID NO: 270434 - protein, 165 aa, Glycine max
  Clone ID: PAT_MRT3847_8621C.1.pep
IACVGGGSNAIGLFNEFVDDKDVRLIGVEAAGFGLDSGKHAATLTKGEVGVLHGAMSYLLQDDDGQIVEPHSISAGLDYPGVGPEHSFLKDLGRAEYHSITDEEALEAFKRVSRLEGIIPALETSHALAYLEKVCPTLANGAKVVVNFSGRGDKDVQTAIKYLKL

SEQ ID NO: 270435 - protein, 79 aa, Glycine max
  Clone ID: PAT_MRT3847_86220C.1.pep
GVPNYQKKKPGKVPPEGFGLNGPKIFSIQGPKRPLKPFKKGNKVFENKFPFLGSKDNNPVAFRKPLVLGNWKNPMQKGL

SEQ ID NO: 270436 - protein, 199 aa, Glycine max
  unsure (1)..(199): unsure at all Xaa locations
  Clone ID: PAT_MRT3847_86221C.1.pep
MMINKTLFLTYVYLFIYILLSSGVILYNKWVLSPKYFNFPLPITLTMIHMAFSGAVAFFLVRVFKIVTPVKMTFEIYATCVVPISAFFASSLWFGNTAYLHISVAFIQMLKALMPVATFIMAVFCGIDKARCDVFLNMLLVRXXVVISSYGEIHXNIXGTVYQVTGIFAEALRLVLTQVLLQKRGLTLNPITSLYYIAP

SEQ ID NO: 270437 - protein, 131 aa, Glycine max
  unsure (1)..(131): unsure at all Xaa locations
  Clone ID: PAT_MRT3847_86222C.1.pep
MITKMVRTPSRDTSGMKKGTXTPHEXLTLIAYATPSSCWNWSHLPKFARLARSRKSSRYXWINYLKPNLKRGNSTQEKGECIVSMHIILDTRWSAIAAELPVMTDTLIQKHWHTSLRKRSQQNTVTIEETR

SEQ ID NO: 270438 - protein, 90 aa, Glycine max
  Clone ID: PAT_MRT3847_86223C.1.pep
MASFARGAASLTRIGLSTSKTPLQLIHRRGLADHHGPPKVACWKDPMSPSKWKEEHFVIVSLTGWGLLIYGGYKLATGGKGKKEEELAKA

SEQ ID NO: 270439 - protein, 63 aa, Glycine max
  Clone ID: PAT_MRT3847_86224C.1.pep
RNQPKKKKTLWEIMKHLSFVLHLIWLITNSSCTVVLVNQLKPVKYYRLKKCNLLYSCIILLEP

SEQ ID NO: 270440 - protein, 106 aa, Glycine max
  Clone ID: PAT_MRT3847_86225C.1.pep
LVELECVFALENKIRGVVDDKKEGLPWVATVIEKEHFYCGQGGDQLGRRRNCDGLRDRRGHHRMCRDLRCSCCVHLSANGHGLCMHLFPFGLLLGRIGDIPTQTIK

SEQ ID NO: 270441 - protein, 185 aa, Glycine max
  Clone ID: PAT_MRT3847_86226C.1.pep
PLHKPGLPACSAPLDPSLLDGTASLQDMAGQEICTSQFIEQKYSHKPRNSSNGDCQLDLLDLTNISSLDFGQESSQMQNDCVAPSENHNIVNVPFQTSMGLGVATTMGPTSVKPEHMLMSDDECCRILFSEAISDECFSSGDYSKGVNMVNLSGCTSFLCQSSLPSVPSVVSSAGDRLTYTYTAE

SEQ ID NO: 270442 - protein, 73 aa, Glycine max
  unsure (1)..(73): unsure at all Xaa locations
  Clone ID: PAT_MRT3847_86227C.1.pep
NLKKAGFHTXILXIXKDPHIITSNATSYTXXLIENLSRXGYIIVVIIENQWSDLLGDPNAKAGPLSFLNPAFF

SEQ ID NO: 270443 - protein, 37 aa, Glycine max
  Clone ID: PAT_MRT3847_86228C.1.pep
SICPAQSGEIMSGIPLVLSRLHHLSQTLSINKTLEFS

SEQ ID NO: 270444 - protein, 73 aa, Glycine max
  Clone ID: PAT_MRT3847_86229C.1.pep
IRRQKGTNGDAVEDHKSERKKKKIEKRTLEQEMEVDDQAEDDGANGITSEKKEQLKRRIKRIVLEKHSKLVKC

SEQ ID NO: 270445 - protein, 77 aa, Glycine max
  Clone ID: PAT_MRT3847_8622C.1.pep
MAEDYLQEEKKRVRNPFVPIGALVTAGVLTAGLISFRQGNSQLGQKLMRARVVVQGATVALMVGTAFYYGENPWRSS

SEQ ID NO: 270446 - protein, 75 aa, Glycine max
  Clone ID: PAT_MRT3847_86230C.1.pep
TRAAPDGCENTQKGEILLFIINPEPPSAAAACKFNGFRVGTSRPNDGDKGAGTRTQTSTLAIVEIVLHSRQGVGA

SEQ ID NO: 270447 - protein, 51 aa, Glycine max
  Clone ID: PAT_MRT3847_86231C.1.pep
MGKTSSREWTRIYLIYGMDQWQTFVFLLCQAVLFSVLSILYLLYFNDISHT

SEQ ID NO: 270448 - protein, 132 aa, Glycine max
  Clone ID: PAT_MRT3847_86232C.1.pep
MGKTSSREWTRIYLIYGMDQWQTFVFLLCQAVLFSVLSILYLLYFNDISHTFQSLLSIASVPCSAARFAAGFMGSVTALSALCLFYAAANFFYSAVPLHSEMAQHIVDTVNDWPTVRQVLDLGCCGRGILLN

SEQ ID NO: 270449 - protein, 66 aa, Glycine max
  unsure (1)..(66): unsure at all Xaa locations
  Clone ID: PAT_MRT3847_86233C.1.pep
KFIWTRKPEGTTKEEKPXTTKSPTXDGEEQXXAKQPXEEGQKEXKATPPGPKRAPXDPXDTRKKPN

SEQ ID NO: 270450 - protein, 390 aa, Glycine max
  Clone ID: PAT_MRT3847_86234C.1.pep
MSQGNLSGARMGRGGLCFNHHLRRGLGLSLASPAAGSGCPSPGMSPPVRPVCRVSSSNAAANMPLSQQTSGGMQSAQSKFVKGWEGSLSGQRQGQPVFITKLEGYRNSSASETLAANWPPVMQIVRLISQDHMNNKQYVGKADFLVFRAMNPHGFLGQLQEKKLCAVIQLPSQTLLLSVSDKAFRLIGMLFPGDMVVFKPQLSSQQQQQMQQQHQQMQNQQQHLPQLQQQQQLPHMQQQQLPQLQQQQQQLPQLQQQQQQLPQLQQQQQQLPQLQQQQQQLPQLQQQQQQLPQLQQQQQQVQQQQLAQLQQQQLPQIQQQQQLPQLQQLPQLQQQQQLPQLQQLQPQQQQMVGSGMGQAYVQGPGRSQLVSQGQVSSQGATNIGGGGFMS

SEQ ID NO: 270451 - protein, 186 aa, Glycine max
  Clone ID: PAT_MRT3847_86235C.1.pep
QEKKLCAVIQLPSQTLLLSVSDKAFRLIGMLFPGDMVVFKPQLSSQQQQQHQQMQNQQQHLPQLQQQQQLPHMQQQQLPQLQQQQQLPQLQQQQQLPQLQQQQQLQQQQLPQLQQQQQLPQLQQLPQLQQQQQLPQLQQLQPQQQQMVGAGMGQAFGQGPGRSQLVSQGQVSSQGATNIGGGGFMS

SEQ ID NO: 270452 - protein, 318 aa, Glycine max
  Clone ID: PAT_MRT3847_86236C.1.pep
MWMLSQSKPLRSRTYLLHFTRRRCHCNSQNDAASAVTQVVELLQLPPDHWDHDKLHSILFNPSPLSSHHFLQITLQLSSIPKSLQFLKYLSAKAPQHHPHSLSSVFQGSLELASRHPNSQTHLLSLHRFRKSTHPTLPLTPKSASLLLQCLENARLVNDSLLLFNQLDPSSKSPQLCHGLLRVLLKSGRAGDALHVLDETPQANSGFSVTGDTAFGELVRSGRRSPDGEVVGLVAKLGERGVFPDGVQLTQSVGKLCGDQRNGVAWEVLHCVMRLGGAVDAASCNALLTWLGRGRDIKRMNELLAEMEKRKIRPSVVT

SEQ ID NO: 270453 - protein, 217 aa, Glycine max
  Clone ID: PAT_MRT3847_86237C.1.pep
MSGEPVSHAKSARRGLNFLDTEEIKGQDNGSQNTRAQVLPESERITKAETEILALKKVLAKLESEKEAGLLQYQYSLERLSNLESEMSHARENSQGLNERANKAEAEVQTLKEALTKLQAEREASLLQYQQCLEKIYNLEENISSAQKDVGELNERATRAETAAESLKQDLARVEAEKEAALVQYNQSLEMLSKLEERLIQAEENARRINEQANAAK

SEQ ID NO: 270454 - protein, 93 aa, Glycine max
  unsure (1)..(93): unsure at all Xaa locations
  Clone ID: PAT_MRT3847_86238C.1.pep
SLPLAMVKVNVACAAVGLTSSYTPTPLVEAGSQKDRGIIVESLGRTYYAAHNAHQPPEKDXLVEGNLFFDTKSSYKMEKVASXTKAQLGCGKT

SEQ ID NO: 270455 - protein, 203 aa, Glycine max
  Clone ID: PAT_MRT3847_86239C.1.pep
MWMHLRPFFREANLLNGLTSRVQARSYARRREPFPTKVSHYLHRAKLIDSIRLTLRSNTPNPSLPSLINHRLMDSFVATHALRSAPSADSALSFVRALEKSSHFSHTHHTLHSLATVLAKSGRSSELKSLVDDIRANRFGSVQISFMNLMQWHAAVRDLDTVLQVWEQYALENDHLCTESYNIVMTLYAQWERTLRLFEFFAR

SEQ ID NO: 270456 - protein, 53 aa, Glycine max
  Clone ID: PAT_MRT3847_8623C.1.pep
LLVMEQFAQLHLIYGSITNKERATVQIVLCILILPFGASFFSCQKYSDSVQRI

SEQ ID NO: 270457 - protein, 93 aa, Glycine max
  unsure (1)..(93): unsure at all Xaa locations
  Clone ID: PAT_MRT3847_86240C.1.pep
TLYRDMAASNQIETHEAAHEESRRELVHGDDSGLLXHSDTLCVYDGTGAQTLXGMTLCHHSTLLALGFLSLSNRGALMTAMPTLRVLMGLYGG

SEQ ID NO: 270458 - protein, 76 aa, Glycine max
  unsure (1)..(76): unsure at all Xaa locations
  Clone ID: PAT_MRT3847_86241C.1.pep
XXXSXTVSTLASFFXRGIXARXVGXHGRXALAWXPEGXXXXMVXPXXEXGXXXXLXLEGRAKXHCGSPWLPWSELG

SEQ ID NO: 270459 - protein, 42 aa, Glycine max
  Clone ID: PAT_MRT3847_86242C.1.pep
SMKRCLFYRSRVSLVFTFIRKKRSSLREYGEKIHLRTLPSPF

SEQ ID NO: 270460 - protein, 73 aa, Glycine max
  Clone ID: PAT_MRT3847_86243C.1.pep
ALLVALIIPISVGRDKPITPLLLIIETNRYLMNINRHQLLSVTCVGFLPRGHGMVAARLYPDAHTLKYRHLIL

SEQ ID NO: 270461 - protein, 162 aa, Glycine max
  Clone ID: PAT_MRT3847_86244C.1.pep
PLKLHSEDEFSVEPPETPGSFSLLLRPHNHHDKRVRETAILPIVMISKAKESQWLKKLFWRPKICERMRPKNLRNGMASGSCLSNSYAIENKSRGDRSTSFLRRKKKPATQCKDSVSQFETLTRQLSLAHSLTLSNLLLLLPPSASVFGYTENQTQSPFCRL

SEQ ID NO: 270462 - protein, 160 aa, Glycine max
  Clone ID: PAT_MRT3847_86245C.1.pep
NPLISQCEEHMQRLQDSAAISSISSSSSLSHKLTDCWDLHDCTYKLLQVPIKQQALARECSDKCVDDILEVSLRLLDICSTAKECQLISKESMQELHSVIQRRKGDETVFTKVGGKYLASRNKLKKTMKAIKSEFYTLSMLSVLTEAEEVTLRSLELEPK

SEQ ID NO: 270463 - protein, 156 aa, Glycine max
  Clone ID: PAT_MRT3847_86246C.1.pep
MGAGKGAVWFSNAVALVAIAVVACHAQPSATFKCSSANKPTCRPLISYSNPNTTTLGDIQKLFNVKHIMDIVGANNATKKIYGGPQRGCEDYNVSHPNSNQPTGLLGPLWSVQATSFPPQIPAIAQPAPIPCHRVVQEDQLVLIQERRGAPSKACF

SEQ ID NO: 270464 - protein, 144 aa, Glycine max
  Clone ID: PAT_MRT3847_86247C.1.pep
MVHWTIPCLSQMLLTNASNASVTPFVVHIFLLNMYLVCVFRLQCEPSQLKSTNWSSWPSLECSSNVIPSTDSCNRTTCAYTGYYTFRNISAEVVTENTTCAVPPSGSGGSTGSDSGASRSTFQGLLLSNLLIVIHFVLFLVYVL

SEQ ID NO: 270465 - protein, 46 aa, Glycine max
  Clone ID: PAT_MRT3847_86248C.1.pep
FLKNCHYFFVTPVLMIKKIIFLLIFVTNPLISRSVGICLLLYRNHT

SEQ ID NO: 270466 - protein, 57 aa, Glycine max
  Clone ID: PAT_MRT3847_86249C.1.pep
GRIRAALMVCRHMPRMNVVAWNAMLCGLAMHGMGNVEVDMFAGMLEDVNADAVTHIA

SEQ ID NO: 270467 - protein, 44 aa, Glycine max
  Clone ID: PAT_MRT3847_8624C.1.pep
PYPNSNPHKHQKPAVPSYYAGVAQTISFCTISIPYHNHCILSSM

SEQ ID NO: 270468 - protein, 108 aa, Glycine max
  Clone ID: PAT_MRT3847_86250C.1.pep
MGAGKGAVWFSNAVALVAIAVVACHAQPSATFKCSSANKPTCRPLISYSNPNTTTLGDIQKLFNVKHIMDIVGANNATKKIYGAATTRDIVTTTFAGLMKWPQIQMAN

SEQ ID NO: 270469 - protein, 70 aa, Glycine max
  Clone ID: PAT_MRT3847_86251C.1.pep
SLQRSIVLIMRSGNLVIIDTKDTCVMKVRVRRWFRVVSDAIAILLISGRGICQASDRLRFRSMAPSITIR

SEQ ID NO: 270470 - protein, 67 aa, Glycine max
  unsure (1)..(67): unsure at all Xaa locations
  Clone ID: PAT_MRT3847_86252C.1.pep
KCQQSIXGIVISYCINHLKAFTAQTANKGTVNTNLPSLYHRTNLTASSIGAEPTIRIHCINKFRSRY

SEQ ID NO: 270471 - protein, 407 aa, Glycine max
  unsure (1)..(407): unsure at all Xaa locations
  Clone ID: PAT_MRT3847_86253C.1.pep
RTLMGSRVLIENLPRGNFCTLLLVLWVCAVTASVTYDHKAIVVNGQRRILISGSIHYPRSTPEMWPDLIQKAKDGGLDVIQTYVFWNGHEPSPGKXYDLVKFIKLVQQAGLYVHLRIGPYICAEWNFXGXFPVWLKYVPGIAFRTDNEPFKAAMQKFTEKIVSIMKEEKLFQTQGGPIIMSQIENEYGPVEWEIGAPGKAYTKWFSRLEVGLDTGVPWIMCKQQDTPDPLIDTCNGYYCENFTPNKKYKPKMWTENWTGWYTEFGGAVPRRPAEDMAFSVARFVQNGGSFVNYYMYHGGTNFDRTSSGLFIATSYDYDGPIDEYGLLNEPKWGHLRDLHKAIKLCEPALVSVDPTVTWPGNNLEVHVFKTSGACAAFLANYDTKSSASVKXGNGQYDLPPWSISILP

SEQ ID NO: 270472 - protein, 97 aa, Glycine max
  Clone ID: PAT_MRT3847_86254C.1.pep
FQTSNSKKLFKTSRWAKSKPHSWELFFPIKVGGPNNGFQSESSEGGNPTSWQIGFYRGNPEQFSGFDIIWGILQNFEICGKIYKAGFFVPQGMSKFF

SEQ ID NO: 270473 - protein, 48 aa, Glycine max
  Clone ID: PAT_MRT3847_86255C.1.pep
MELGLCQGGQRNSAVALTSSWCYYGGECSRNIGLTMQWTFSKGPFWHF

SEQ ID NO: 270474 - protein, 59 aa, Glycine max
  unsure (1)..(59): unsure at all Xaa locations
  Clone ID: PAT_MRT3847_86256C.1.pep
IPTIPNTNSFPKNIILRKPSLLSLELQHISTKFSKAEFYKLFLSDGRCLILFFFXFFLP

SEQ ID NO: 270475 - protein, 139 aa, Glycine max
  unsure (1)..(139): unsure at all Xaa locations
  Clone ID: PAT_MRT3847_86257C.1.pep
MEVHENGGSPRQSQSLSELQIVTMMSVPPLKMTEPRAVRKVLVSEDNTRAIHGCYQVVMYYENLKEKEHGWCLAGLIVESLARVLLDHPLLAGRLQRREDTGFEIVANDSGIRLXEACYPTTLSHFLHLNEEQHHLVFW

SEQ ID NO: 270476 - protein, 75 aa, Glycine max
  Clone ID: PAT_MRT3847_86258C.1.pep
QGNFWPFLFFLIKLLYLFFLIRTIKNFLFKFIPYLKLKRWKKFEFLRIMALTNKLNFGSLMKKQSLTSIHEQGGS

SEQ ID NO: 270477 - protein, 71 aa, Glycine max
  Clone ID: PAT_MRT3847_86259C.1.pep
CAMHDLFSVQNLLTRGTIRLLCHKTPLSNFCWDAIFPSKTDFNFISKLVYPNLHVFSIKPSYLNATAMTHL

SEQ ID NO: 270478 - protein, 44 aa, Glycine max
  unsure (1)..(44): unsure at all Xaa locations
  Clone ID: PAT_MRT3847_8625C.1.pep
TEINNNRCYVWDVGYLPSSFIILVACIKKVTECLLMLYQXFGRN

SEQ ID NO: 270479 - protein, 64 aa, Glycine max
  unsure (1)..(64): unsure at all Xaa locations
  Clone ID: PAT_MRT3847_86260C.1.pep
LELNVXSPLSSFSATTTXLIKRSSPFTLPQPXPLLFKHCSLFYPNFLFHTLPQPYFITHNHQLP

SEQ ID NO: 270480 - protein, 60 aa, Glycine max
  Clone ID: PAT_MRT3847_86261C.1.pep
SFFSCKLFSVRVKFGLESHMFSTLFLFLFFSLYIEFKNRRIVCCFKERLYRLLLNNHSFK

SEQ ID NO: 270481 - protein, 52 aa, Glycine max
  Clone ID: PAT_MRT3847_86262C.1.pep
DLMLIKVPSFWRPPAGSPFPCHPRSQAYPQLGEDYRLPGVGKGSISVDQEAR

SEQ ID NO: 270482 - protein, 75 aa, Glycine max
  unsure (1)..(75): unsure at all Xaa locations
  Clone ID: PAT_MRT3847_86263C.1.pep
LVCHQCIIVVHDSSVXAVTGIFDIGVKLATIANMCAYGINPGISGARIMGAIPRSVSQQAVWNQMATVRTPFDSK

SEQ ID NO: 270483 - protein, 64 aa, Glycine max
  Clone ID: PAT_MRT3847_86264C.1.pep
TPSVINIIKRLVPYYRLRYYGSYHTEGRAYVTCCCCISTPSYDHRSIFFFLRRGGYGIVGGGEL

SEQ ID NO: 270484 - protein, 75 aa, Glycine max
  Clone ID: PAT_MRT3847_86265C.1.pep
SPSPCSFLVPKELWGQRKTHNYNKLFFVCCDFFLRTGPCFYTIKICLCPNFTECVPILPRKNRMIKNNLMENRKK

SEQ ID NO: 270485 - protein, 86 aa, Glycine max
  Clone ID: PAT_MRT3847_86266C.1.pep
LILGRRASSSRDCREPFNPWIYVFRAFGGVQKLLLCIIGREPSPGLFPFEEMLAPLFGEVPQIMSEYLLFPQKGENFWLVFLFFVS

SEQ ID NO: 270486 - protein, 188 aa, Glycine max
  Clone ID: PAT_MRT3847_86267C.1.pep
MKARHLSFFYLHIIVFTLSLSLPIQVNTAKGINNTITNESGNNRRILHQPLFPASSAPPPAGTASPPPSTPVVETPPSPDGGNNIPFFHEYPAAPPADQNQHAAPSSTVNSTIANPTATQPTKGTKKVAIAISVGIVTLGMLSALALFLYKHRAKHPVETQKLVAAGTSHNNNSRNSNEANTTSAPSS

SEQ ID NO: 270487 - protein, 55 aa, Glycine max
  Clone ID: PAT_MRT3847_86268C.1.pep
TMNFQRGLGPKCKIPLTKRLIESLCEAYVVTVLTYIVADLQYTFYYVKLHEFHVS

SEQ ID NO: 270488 - protein, 52 aa, Glycine max
  Clone ID: PAT_MRT3847_86269C.1.pep
YLIISIHSNITWSFLLNILSAEQSHQSSVLKFHYVLKQKFLITKYYSPVFES

SEQ ID NO: 270489 - protein, 62 aa, Glycine max
  Clone ID: PAT_MRT3847_8626C.1.pep
ALYFIIGQKLGLNNHLGSAPKRIRGTKPQDLFSCETAGLVSGLGHDESPPEIGAMHFFALAY

SEQ ID NO: 270490 - protein, 83 aa, Glycine max
  Clone ID: PAT_MRT3847_86270C.1.pep
TNSLRATRAVRARAIRATIGLSIMVRGGNIHGKRLEGAFLRFYFKTKVGFLGAISFVSATPSAPWVQNVWFWGNKQTPRKELY

SEQ ID NO: 270491 - protein, 133 aa, Glycine max
  Clone ID: PAT_MRT3847_86271C.1.pep
MLCLGRFGGVSYGWSWNRRRDNTINRPRWRLMAQESPSLDSDKTATAGFCIIEGPETVQDFAKMELQEIQDNIRSRRNKIFLHMEEVRRLRIQQRIKNAELGILSEEQENELSNFPSFIPFLTPLTSANLKQY

SEQ ID NO: 270492 - protein, 109 aa, Glycine max
  unsure (1)..(109): unsure at all Xaa locations
  Clone ID: PAT_MRT3847_86272C.1.pep
MAQESPSLDSDKTATAGSLSFPFLFSSLLFLSLFPFFILPFYSLRRFCIIEGPETVQDFAKMELQEIQDNIRSRRNKIFLHMEEVRRLRIQQRIKNAXLGIXSEEQENE

SEQ ID NO: 270493 - protein, 387 aa, Glycine max
  Clone ID: PAT_MRT3847_86273C.1.pep
MSSQRADLACRIFPEPDASEIDHFDRLPDSLLLLVFNKIGDVKALGRCCVVSRRFHSLVPQVENVVVRVDCVISDDDSSSSAAAFDKSRGPFWNLLRLVFGGIVKPIQTLGQFLGPKRPSSSSVTSPSSTTSSSTLAVGTDDDSDAGVTHHSPTQVLKNFNEIRLLRIELPSGELGIEDGVLLKWRADFGSTLDNCVILGATYGFHPKDNRTDPIPTTNCNGLDDSGSIPDSFYTNGGLKLRVVWTISSLIAAFDRHYLLQPIIYEHATLDNLVLTDADGQGVLYMNREQLEELRVKPLSASSASKRTLVPALNMRLWYAPHLELPTGVVLKGATLVAIRPSELSPNTAKKEASDLSWVSTAFEEPYRTAATMLVKRRTYCLEMNSF

SEQ ID NO: 270494 - protein, 84 aa, Glycine max
  unsure (1)..(84): unsure at all Xaa locations
  Clone ID: PAT_MRT3847_86274C.1.pep
ADKPSAMQRDEXCSWDERNSALRGSPFSQREFRGHHGSPELHYSDKSKLSDXNPEPSEXLWIGFPAQLKVDESIXRKAFXPSVR

SEQ ID NO: 270495 - protein, 171 aa, Glycine max
  Clone ID: PAT_MRT3847_86275C.1.pep
MVKICCIGAGYVGGPTMAVIALKCPSIEVAVVDISKSRIAAWNSDQLPIYEPGLDGVVKQCRGKNLFFSTDVEKHVYEADIVFVSVNTPTKTRGLGAGKAADLTYWESAARMIADVSKSDKIVVEKSTVPVKTAEAIEKILTHNGKGIKFQILSNPEFLAEGTAIQDLFNP

SEQ ID NO: 270496 - protein, 142 aa, Glycine max
  Clone ID: PAT_MRT3847_86276C.1.pep
QYSCLGSSPVHLHGNLKLENKNGVPFFEFKVKCPKYVFVANTWRTGNAFNWVYTFHSIDNRKNSNVNGLGSHDFDKDPSIVAQMLVSCNLCSELEDKEFDNSMVTEFVLSDFTQSRQSVSCEKKSLSELDGSKTPKAFHVGS

SEQ ID NO: 270497 - protein, 38 aa, Glycine max
  Clone ID: PAT_MRT3847_86277C.1.pep
MKEDLNWHSVISKIRVPIPAESYDVVGKSQRIVYMLEP

SEQ ID NO: 270498 - protein, 145 aa, Glycine max
  Clone ID: PAT_MRT3847_86278C.1.pep
MDSPHFPSFASLRVLLFGFCVITLFPEFVVSITRHYTFNVEYLNVTRLCHTRNILSVNGKFPGPRLVAREGDRVVVKVVNHVSNNVSIHWHGIRQITTGWADGPAYVTQCPIQTNQSYTYNFTHSWQCKSQFWHAHILSLRQCYM

SEQ ID NO: 270499 - protein, 49 aa, Glycine max
  Clone ID: PAT_MRT3847_86279C.1.pep
VCSKLQNKSLKLQNIIKAILWSNLSTTLNNLLNLFGFSFINMEPRSNRF

SEQ ID NO: 270500 - protein, 59 aa, Glycine max
  unsure (1)..(59): unsure at all Xaa locations
  Clone ID: PAT_MRT3847_8627C.1.pep
AISRKLAKRFYGPFQIIDQVGPIAYRLQLPKSARIXIHPVFHYSMLKQFHGTPDSANIA

SEQ ID NO: 270501 - protein, 73 aa, Glycine max
  Clone ID: PAT_MRT3847_86280C.1.pep
EVREMILGTSGHLGGAGLYVSPLTCVLQTPLEDLWALGNWSAGGNPSKTTFPARRQKVIYKVKTKAKTMAYDP

SEQ ID NO: 270502 - protein, 45 aa, Glycine max
  Clone ID: PAT_MRT3847_86281C.1.pep
NLYIISLNMINLKLNPLPSPFVDDKFISTLNKVKPHLLKKMLSPI

SEQ ID NO: 270503 - protein, 58 aa, Glycine max
  Clone ID: PAT_MRT3847_86282C.1.pep
VAVMSSSDAWHPMLVVIRYSVPSCHILVLADAYGLGSKCEMSLRFGVLINDNTSVLDR

SEQ ID NO: 270504 - protein, 63 aa, Glycine max
  Clone ID: PAT_MRT3847_86283C.1.pep
CSESAQTAARRRQKGDAHSICLIQGPKREREREWKQASSLIQLIHYTPLNTSFINGHSTGTFR

SEQ ID NO: 270505 - protein, 90 aa, Glycine max
  unsure (1)..(90): unsure at all Xaa locations
  Clone ID: PAT_MRT3847_86284C.1.pep
KLVVHLEFLCTKWSNPVIHKNSREANSSSSTTIGYLDWNSGLVVSTDENQSQGXSGSFMELPIIVIQGPPWMHLEGTPACAGYIPVPVIF

SEQ ID NO: 270506 - protein, 50 aa, Glycine max
  Clone ID: PAT_MRT3847_86285C.1.pep
PQIHNFIFPHHKKTHKGFTTIQTMKHNLGGGGKKKNLIWFKKKNQSFNKL

SEQ ID NO: 270507 - protein, 119 aa, Glycine max
  unsure (1)..(119): unsure at all Xaa locations
  Clone ID: PAT_MRT3847_86286C.1.pep
XXKKPKKKSLPLLLREAIPPNGAVSKNSLFKKPSPYKACLNPPPFFAPLSFGVPLFFLNKFFGPPPRANRVFPLFGFPPDSFFSTKNFFYIQYIGWLLSLRFPFHPSPPPVCRRAPFFL

SEQ ID NO: 270508 - protein, 69 aa, Glycine max
  Clone ID: PAT_MRT3847_86287C.1.pep
AGASDRSRNRVEERPCSVGRPSSFFFFFLFFFFFFFFFFFGIFFLFFFLKFFKVKTNNQTNNTQTKNKN

SEQ ID NO: 270509 - protein, 113 aa, Glycine max
  unsure (1)..(113): unsure at all Xaa locations
  Clone ID: PAT_MRT3847_86288C.1.pep
ILNTISLLFFVYTPILVNXLFFFIKFIFNHLHLFFLSVNFIHIFXINGFLLILFFXFXIVIYYNXIVVFIFSLIIFVSLIKVKNIIFXFVFYHCIFFFNIKYIFFLLLYLMFM

SEQ ID NO: 270510 - protein, 51 aa, Glycine max
  Clone ID: PAT_MRT3847_86289C.1.pep
LGNQLSFFCKPAPARKQKSFPGGKAKNIMGIVFWGSNTLSFFHDMIERNPC

SEQ ID NO: 270511 - protein, 51 aa, Glycine max
  Clone ID: PAT_MRT3847_8628C.1.pep
EHHARLALAGNESLSYSRWVRTVSIPSRHYPTPASTVHDTYLPRHEVSGHL

SEQ ID NO: 270512 - protein, 55 aa, Glycine max
  Clone ID: PAT_MRT3847_86290C.1.pep
SGGSSNRHLRTGTLHLGLRLSARVRKGFGLSLCGGQAGVNDQLPTVLRSFRCSLR

SEQ ID NO: 270513 - protein, 55 aa, Glycine max
  Clone ID: PAT_MRT3847_86291C.1.pep
CLTAYYAHLAAYRARFYMEPDVAEITKLRGTRLKEGPVRPLPALKEKVKNVMFYC

SEQ ID NO: 270514 - protein, 49 aa, Glycine max
  unsure (1)..(49): unsure at all Xaa locations
  Clone ID: PAT_MRT3847_86292C.1.pep
PXKPSXFLQSSFPGKPKEELPKKLGHPKGLTXXXLVXGRXVENGGFQFI

SEQ ID NO: 270515 - protein, 39 aa, Glycine max
  Clone ID: PAT_MRT3847_86293C.1.pep
LNNKIINDTFVIKNVQTTTQITIYYYSLFLMFIWNVIIC

SEQ ID NO: 270516 - protein, 105 aa, Glycine max
  Clone ID: PAT_MRT3847_86294C.1.pep
QNFMSTAILPSLQCILQHNGLQREEIIKLIKYAEQSSGKNTESVEAGTGDMLQAPPATTRERELHFQVIQLQQSIGSLVEELQRQKMKNVQLEKQLNSMANRVEK

SEQ ID NO: 270517 - protein, 77 aa, Glycine max
  Clone ID: PAT_MRT3847_86295C.1.pep
HTNDFCGNLDGIWFCYGGGFGYHGYGKAGWPRRARIILAELQKGKKSWMNVQRIMTWKRLDDEKMSKIDEQILWQSR

SEQ ID NO: 270518 - protein, 73 aa, Glycine max
  Clone ID: PAT_MRT3847_86296C.1.pep
LPCCCIQTMSTIILRVAGTYDALLKPSFRTPTWTKLHSSHLEVKGHSYLPESGGSCAIRSMLRGPVAVLELPL

SEQ ID NO: 270519 - protein, 83 aa, Glycine max
  unsure (1)..(83): unsure at all Xaa locations
  Clone ID: PAT_MRT3847_86297C.1.pep
GLEADQARERQXREEEEHLAWEAAEAERKHKEXEAARERXAQEAAEKQXXLAKIRXQEKAXXLGEEPEKGPXVTQVLVRFPTG

SEQ ID NO: 270520 - protein, 33 aa, Glycine max
  Clone ID: PAT_MRT3847_86298C.1.pep
RPSSKTQARLTPSVLVLPTDAPTMAVKGSSRLM

SEQ ID NO: 270521 - protein, 95 aa, Glycine max
  unsure (1)..(95): unsure at all Xaa locations
  Clone ID: PAT_MRT3847_86299C.1.pep
MDPVSVRRNTPLATAEPETHDLILKEKXRTRCRGIELIVYENFTTFVVIEGLGSAITNKYSEGMPGDRYYGGGGHIDRMENLCRXRALRAFHLDT

SEQ ID NO: 270522 - protein, 70 aa, Glycine max
  Clone ID: PAT_MRT3847_8629C.1.pep
FIMQIKDISIFKKILNSFLLISTFFYSIYISTYLIIDIYSYPKLNYLRRYILLSFFVSLIAFYYPTLFES

SEQ ID NO: 270523 - protein, 56 aa, Glycine max
  Clone ID: PAT_MRT3847_862C.1.pep
FPPSRCVNQFGFQDFGKNAIQWIIPPFKISSGLGLWDFFKFFFPPPTRINVGLLFF

SEQ ID NO: 270524 - protein, 149 aa, Glycine max
  unsure (1)..(149): unsure at all Xaa locations
  Clone ID: PAT_MRT3847_86300C.1.pep
SIGPGRRIQCQIGTKPEILSNICEXLCFCVLHHPYRIKCNFLLNNVIEKILLLIRRAERYLVVGAVRFIRTILSRHDEHLINYFVRNNVLKPIIDAFVSNGNRYNLLHSAVLELFEFIQKENLKLLLKYIVGSFWDQLMKFEYLASIHS

SEQ ID NO: 270525 - protein, 87 aa, Glycine max
  Clone ID: PAT_MRT3847_86301C.1.pep
LMQQWIRVSEVHQPRHKKIGTYPLGPTTIINPRYNTFQNITRVKELKKNNFGGFNLKGSDEWNKKLGRIVEEESLCLCDEKEERKKV

SEQ ID NO: 270526 - protein, 315 aa, Glycine max
  Clone ID: PAT_MRT3847_86302C.1.pep
QRDTIIDIFFERHLGQLIEVITASCPSENTADANGKSIGPGRRIQCQSGTKPEILSNICELLCFCVLHHPYRIKCNFLLNNVIEKILLLTRRAERYLVVGAVRFVRTILSRHDEHLINYFVRNNVLKPIIDVFVSNGNRYNLLHSAVLELFEFIRKENLKLLLRYIVDSFWDQLVKFENLASIHSLKVKYEQCLDNGGTNDDATAAVDLRRRNDERALEREEERYFNEDSDEEDSASASVPRNQKGHQQPNLSNGVAASYSQLSPRSLVDYEDDEDDEDYKPPPREQPETSEEDDGIMESLRLKRKLPSKDKEPE

SEQ ID NO: 270527 - protein, 90 aa, Glycine max
  Clone ID: PAT_MRT3847_86303C.1.pep
SAGGFFRIKSVVGRPGKDGLDREAMPTLLVTTKRRSQERKEGLEPSTSALARLCSTIKLFPPATVVAKHYGAINVSLDTDDFFFSAGPHS

SEQ ID NO: 270528 - protein, 132 aa, Glycine max
  unsure (1)..(132): unsure at all Xaa locations
  Clone ID: PAT_MRT3847_86304C.1.pep
QTXAQEAEXXQQAXKGXGXDDKAXXAXPGHRXXQQRQENRKAEEERNQEXHNKRXEAESPXDXERXXNRXRGQXADREXXXAKEARKXGTKDHQASAEKXXGQTAEEPKEGRRPHHRRNKRTTEEEGRANTT

SEQ ID NO: 270529 - protein, 88 aa, Glycine max
  Clone ID: PAT_MRT3847_86305C.1.pep
QTSNSTSYSFYLPRNLISISKVSSGCGESELERYTHGWCPAHRGIFLPFSHSAPTASEKFNNYCTQGIFTIGISSNDRQPVTTVDPDS

SEQ ID NO: 270530 - protein, 72 aa, Glycine max
  unsure (1)..(72): unsure at all Xaa locations
  Clone ID: PAT_MRT3847_86306C.1.pep
ICILLPNKTNPKIITKHNLSENHLKPEKTTISPQFSPETRYCALSLHTHVTETGFPIPKSLFSGPKSFLIRX

SEQ ID NO: 270531 - protein, 99 aa, Glycine max
  Clone ID: PAT_MRT3847_86307C.1.pep
SSGWVKQKKKMPPFVVTPSSSSSSVLTPKLCNPQVKRFVLQFAYPKRSRTFLEPSSSSSFSPMRKTKEEVVEERLYREEYVHPRNDNPLGDEKERDKRL

SEQ ID NO: 270532 - protein, 144 aa, Glycine max
  Clone ID: PAT_MRT3847_86308C.1.pep
QHLSLKFDQLEKAKQIAQNSAPKIQRVAHHLRDRKHFAKHYLPRLVSIGPIHHGAEKLQLGEKYKVMWAAMYLERTKQDAQTLYQKIASNIEQLKELFSEDVVRDFPDDEKLSWSWMLFVVGCSLLQILEKGKLHYPKEMNVKG

SEQ ID NO: 270533 - protein, 75 aa, Glycine max
  Clone ID: PAT_MRT3847_86309C.1.pep
LSLQHTLSYRQNLPLTIHNHGMLKHSYSLSFPSQNLQPLLKPKRVIPKALFLNLKFQATTKPRALRAILSQTCCQ

SEQ ID NO: 270534 - protein, 65 aa, Glycine max
  Clone ID: PAT_MRT3847_8630C.1.pep
PVSRVHVSKLAHAIYEFRIHIQCMFIERVKMLISERFYKLHYGMFLESEINVIIFLVVLLIITVH

SEQ ID NO: 270535 - protein, 114 aa, Glycine max
  Clone ID: PAT_MRT3847_86310C.1.pep
FVGKWFSRSRRVSFRVLERGGNKTWLPGLRLQLCITIQFRIGSPVLAVRTLVSLGNNSRSSISRVKKLGIVKPLGWNAYWPYEGSRVGPVVFLFQDSLPFFEKRGVFNDMISPP

SEQ ID NO: 270536 - protein, 99 aa, Glycine max
  Clone ID: PAT_MRT3847_86311C.1.pep
GYPNPLGFVGLTFLVWALFSFGVDGPFFPGLFMGPFVPPEKRFFFPHKKLSFFGAPFKFFFEKMTPFVIFVSKKIVPGVQGVLSPRCFSPPHAQVRAFV

SEQ ID NO: 270537 - protein, 119 aa, Glycine max
  unsure (1)..(119): unsure at all Xaa locations
  Clone ID: PAT_MRT3847_86312C.1.pep
MTMASRVPSPDLRSFYFLSLXTIASGNVFFEERVDDRTENLWVNSDXKKDENEAGEWNHTSGQWNGDANDRGXQTSEDYTFYAVSAEYPEFSNKGKTLVCQCYAKHXQKLDCGGCYIEE

SEQ ID NO: 270538 - protein, 89 aa, Glycine max
  Clone ID: PAT_MRT3847_86313C.1.pep
FQQGPDLGSLFGYLIFRTHGLFMYSFPLHILTLIFWNFFFFCIFNFLRVNGICSAIFTTMSIEFQSLCIVRIGFLGDFAFDTYIYIYNI

SEQ ID NO: 270539 - protein, 208 aa, Glycine max
  Clone ID: PAT_MRT3847_86314C.1.pep
GIRKYTPLGQATAQQVLIDKISAGPITLIAIGVQTNIAMFLMNNPHLKNNVQHIYIMGGAVRSTDPTSWCPKNASFSCIPGQCGDRGNVFTNYEANPYAEFNIFGDPFAAYQVIHSGIPVTLVPLDATNTIPINEEFFNEFEKSQDTYEAQYCFKSLKMAKMARDKLDNQFYTSYFMWDSFASGVAVSSMRNSNKKKKKGADAWAEAC

SEQ ID NO: 270540 - protein, 69 aa, Glycine max
  Clone ID: PAT_MRT3847_86315C.1.pep
IGLPRPILQGFIKLKDQICELNYRGTKSEIKDKVVNQFYNFAFLILNSPKTDEHSISLRNNARSIFKLK

SEQ ID NO: 270541 - protein, 172 aa, Glycine max
  unsure (1)..(172): unsure at all Xaa locations
  Clone ID: PAT_MRT3847_86316C.1.pep
FTGEAYMKHSKFVEAVNKAREIGCDPSKMVFMHAVRLLLTTSKTLWDSKFEVYKRSGWNHEMALRAFVKSPNFMMLSEETYTKKMTFLVKDMGLPSEDIAHYPQVITYSFEKRIIPRFSVITILCSKGLLKKDLHFSSFMCLPEGNFIKKXVIKFQDHLPLLSDVYKGLIKN

SEQ ID NO: 270542 - protein, 75 aa, Glycine max
  Clone ID: PAT_MRT3847_86317C.1.pep
MVTAFRCVHHVSSQRPYMNQVVQLLKGEETIMEPKKTLVAQKSLMLEACDLEEDYTCSSYLKDLNRPRQLIMELT

SEQ ID NO: 270543 - protein, 95 aa, Glycine max
  unsure (1)..(95): unsure at all Xaa locations
  Clone ID: PAT_MRT3847_86318C.1.pep
PFTVPSECAKDEPAVKHGGGKVVIVFANSSNKEPGLKPREYTXHRADYFEETSKSVKAKVXALETKGATKENTEKGSDRGDKTESSADKIENSYN

SEQ ID NO: 270544 - protein, 146 aa, Glycine max
  Clone ID: PAT_MRT3847_86319C.1.pep
MSKMSSPNGPEIEEKRVTKEEKFKSAKTEMGEVKEENERLKMMLERVEKDYHSLQLRFFDILHKDVSKKGLADSSTSLDHETAEPELVSLCLGRSPMEPKKELARIGYSNKPKEEDVGPNLTLGLDSKHLLSMEVVSDLSPTNSLK

SEQ ID NO: 270545 - protein, 125 aa, Glycine max
  Clone ID: PAT_MRT3847_8631C.1.pep
FLVCMVTPSESTIFLLSLLPWACLSSLWPPPLPSSWGVSVFSIPTSCLLVALCEHMCTSQPYLKEVTPSLLVPIWPSLCASLARGVPAGPMGGRLLRISATFLRLTPPTSPVCHTPSLWASALSL

SEQ ID NO: 270546 - protein, 82 aa, Glycine max
  Clone ID: PAT_MRT3847_86320C.1.pep
YIIFTWLLSNSGSGGINCRLCLSSAGPKEFVLRFTFTLLPPFLCPMFLSLTYIVIMVCIKILLLKITILRVYIDHKVQQWKI

SEQ ID NO: 270547 - protein, 43 aa, Glycine max
  unsure (1)..(43): unsure at all Xaa locations
  Clone ID: PAT_MRT3847_86321C.1.pep
MRRTRTNPVFSRRPWCGPYRVRYLCPVYVAPPSYLSXXLPAYY

SEQ ID NO: 270548 - protein, 76 aa, Glycine max
  Clone ID: PAT_MRT3847_86322C.1.pep
MIRFILLQNRQGKTRLAKYYVPLEDSEKHKVEYEVHRLVVNRDPKYTNFVEFRTHKIIYRRYAGLFFSICVDITDN

SEQ ID NO: 270549 - protein, 89 aa, Glycine max
  Clone ID: PAT_MRT3847_86323C.1.pep
NSRLEPLLTTLIHTTTRHTTFTHHTSDLRARQLSTACGSFFALTATNSPILILVFIIRSIHNYLLTNTFSTPHNSTFKFFSINFTIVIV

SEQ ID NO: 270550 - protein, 151 aa, Glycine max
  Clone ID: PAT_MRT3847_86324C.1.pep
NSFSSFPHSQIRFILLQNRQGKTRLAKYYVPLEDSEKHKVEYEVHRLVVNRDPKYTNFVEFRTHKIIYRRYAGLFFSLCVDITDNELAYLECIHLFVEILDHFFSNVCELDLVFNFHKVYLILDEFILAGELQETSKKAIIERMGELEKLE

SEQ ID NO: 270551 - protein, 56 aa, Glycine max
  Clone ID: PAT_MRT3847_86325C.1.pep
SKTCPNVFNTVKSVLKSAVAKEPRIGASIVRLFFHDCVVQSCDGSILHDDTPNFHG

SEQ ID NO: 270552 - protein, 61 aa, Glycine max
  Clone ID: PAT_MRT3847_86326C.1.pep
LPSVSYKHCNMVVFVSCTKSGLPLFSKGNDWPATRFPIHQETDDDDDDDDDDGGIDIAPAA

SEQ ID NO: 270553 - protein, 208 aa, Glycine max
  Clone ID: PAT_MRT3847_86327C.1.pep
MYGTKSKIDLAFEYQSQVAVLRPSIHSRRANLTVKFQDLYGFTVEGNVDDVNVLNEVREKVRQQGRVWWALEASKGANWYLQTTIGQGSALTSSLKFSAMANAITLKKLIRKGIPPVLRPKIWFSLSGAAKKKSTVPDSYYDDLTKAVEGKVTPATRQIDHDLPRTFPGHPWLDTPEGHAALRRVLVAYSFRDSDVGYCQGLNYVAAL

SEQ ID NO: 270554 - protein, 61 aa, Glycine max
  Clone ID: PAT_MRT3847_86328C.1.pep
IMIYALVCRVYVPMDSLESATMGLFQSLLSMPITLQGTTTNFSIVMRSRMRNHSSGIDTNQ

SEQ ID NO: 270555 - protein, 68 aa, Glycine max
  unsure (1)..(68): unsure at all Xaa locations
  Clone ID: PAT_MRT3847_86329C.1.pep
KNIKISPIYSTPTKPHSIKRQRPCSKKNGFSQIKSFFPSAPTTNHSFTSKKKKTKKKKKRPLYXIQTY

SEQ ID NO: 270556 - protein, 61 aa, Glycine max
  Clone ID: PAT_MRT3847_8632C.1.pep
GVLLHLPLLSFGCLSILCPLNPRRLPLLLFFSILLLSFLDLFKFPRSFHSLLKKKKKTPPP

SEQ ID NO: 270557 - protein, 104 aa, Glycine max
  unsure (1)..(104): unsure at all Xaa locations
  Clone ID: PAT_MRT3847_86330C.1.pep
PKRTLKDHLEEQITNRLVRCRTIXEALLGSDKDLIMPNYSHRIHLLWGENDXILNLELAHNMIDLLGDGAAFAAIQKAGHMVYXERPRVFSRRLRHVIRLLLGP

SEQ ID NO: 270558 - protein, 69 aa, Glycine max
  Clone ID: PAT_MRT3847_86331C.1.pep
YYIYSLFILKHYINISMNVILYFLITVTTNFIKHNLLYSQVLCELRILNTLKVARVIKLYFLYCPLADV

SEQ ID NO: 270559 - protein, 54 aa, Glycine max
  Clone ID: PAT_MRT3847_86332C.1.pep
VLGEIHTLKCLDHFVVSFSLTSSTCYHLDIGVGFSLIQYTSSIISDTFFFGRQN

SEQ ID NO: 270560 - protein, 50 aa, Glycine max
  Clone ID: PAT_MRT3847_86333C.1.pep
KKNGVRKGKIFPTISNKGGDPYFVEKNPHIPGPEDVFPGFGIKINPFPNR

SEQ ID NO: 270561 - protein, 51 aa, Glycine max
  unsure (1)..(51): unsure at all Xaa locations
  Clone ID: PAT_MRT3847_86334C.1.pep
PHFIHLLKQGHGFRNDXSFQMVAHMKPKFLRCPGGCYVEGHDLGNRFQWKD

SEQ ID NO: 270562 - protein, 98 aa, Glycine max
  unsure (1)..(98): unsure at all Xaa locations
  Clone ID: PAT_MRT3847_86335C.1.pep
GVPKKGELYLSLSDPKGRRCFFSCFFKGHRGSLEKKTNFAHETKNFRGDMAGGRPLPISKRGGGKKRTPRRSPKRDPMGGKGASTFGGLGTGIXREAT

SEQ ID NO: 270563 - protein, 103 aa, Glycine max
  Clone ID: PAT_MRT3847_86336C.1.pep
SIVDAIRSLVTPTPEGDWFSSGVYSNGNPYGIAEGIVFSMPCRSKGDGDYELVKDVIFDDYLRQRIAKTEAELLAEKRCVAHLTGEGIAVCDLPGDTMLPGEM

SEQ ID NO: 270564 - protein, 243 aa, Glycine max
  unsure (1)..(243): unsure at all Xaa locations
  Clone ID: PAT_MRT3847_86337C.1.pep
AEVPRVALGCGHDNEGLFVGAAGLLGLGRGGLSFPTQTGTRFNNKFSYCLTDRTASAKPSSVVFGDSAVSRTARFTPLVKNPKLDTFYYVELLGFSVGGAPVRGXSASLFRLDSTGNGGVIIDSGTSVTRLTRPGYVALRDAFRVGASHLKRASEFSLFDTCYDLSGLSEVKVPTVVLHFRGADVSLPASNYLIPVDNDGTFCFAFAGTMSGLSIVGNIHQQGFRVVFDLAGSRVGFAPRGCA

SEQ ID NO: 270565 - protein, 200 aa, Glycine max
  unsure (1)..(200): unsure at all Xaa locations
  Clone ID: PAT_MRT3847_86338C.1.pep
MGVTQLNPTCSKPRLHSSQLSFLSRTLPRHRHCTFAPLHRTQQARISCSVAPNEVQVPTVKTQDPKSKPECYGVFCLTYDLRAEEETRSWKKLINIAVSGAAGMIANHLLFKLASGEVFGPDQPIALKLLGSERSIQALEGVAMELEDSLFPLLREVSIGIDPYEVFQDAEWAXLIGAKPRGPGMERADLLDINGQIYAA

SEQ ID NO: 270566 - protein, 46 aa, Glycine max
  Clone ID: PAT_MRT3847_86339C.1.pep
KFRLIFPSSYRNFFIENLYPVKIRYEILWLTLVFFKTSPFNNNKNL

SEQ ID NO: 270567 - protein, 60 aa, Glycine max
  Clone ID: PAT_MRT3847_8633C.1.pep
IHCTNLKSKKQDSWAQNLTGKFMASLPDIFSTDPWSLNDSISNYWTSGLILHNSTEADYV

SEQ ID NO: 270568 - protein, 436 aa, Glycine max
  Clone ID: PAT_MRT3847_86340C.1.pep
MAVTQFNPTCSKTHLHSSQLPFLSRTLPRHRHCTIAPLHRTQQARICCSVAPNEVQVPAVKTSDPKSKPECYGVFCLTYDLRAEEETRSWKKLINIAVSGAAGMIANHLLFKLASGEVFGPDQPIALKLLGSERSIQALEGVAMELEDSLFPLLREVSIGIDPYEVFQDAEWALLIGAKPRGPGMERADLLDINGQIYAAQGRALNAVASRNVKVIVVGNPCNTNALICLKNAPNIPAKNFHALTRLDENRAKCQLALKAGVFYDKVSNVTIWGNHSTTQVPDFLNARIDGLPVKEVVKDQKWLEEEFTEKVQKRGGALIQKWGRSSAASTSVSIVDAIRSLVTPTPEGDWFSSGVYSDGNPYGIAEGIVFSMPCRSKGDGDYELVKDVIFDDYLQQRIAKTEAELLAEKRCVAHLTGEGIAVCDLPGDTMLPGEM

SEQ ID NO: 270569 - protein, 68 aa, Glycine max
  Clone ID: PAT_MRT3847_86341C.1.pep
IVFSMPCRSKGDGDYELVKDVIFDDYLRQRIAKTEAELLAEKKCVAHLTGEGIAVCDLPGDTMLPGEM

SEQ ID NO: 270570 - protein, 46 aa, Glycine max
  unsure (1)..(46): unsure at all Xaa locations
  Clone ID: PAT_MRT3847_86342C.1.pep
IFVALFRGGRYIRVVTFPLTIVFXXXXXSSRFQILSTTLSGDFDEG

SEQ ID NO: 270571 - protein, 78 aa, Glycine max
  Clone ID: PAT_MRT3847_86343C.1.pep
PCAELTVLIVVPLRVVCLSQPMLLGLGSVHQIISIVRCARRPGTCTNVVLSPPSSTSVAFIELCARRVNRVPCVCGLL

SEQ ID NO: 270572 - protein, 79 aa, Glycine max
  Clone ID: PAT_MRT3847_86344C.1.pep
VLLLRCFGVSASLFLAFPSCSYLVLSRLCLVICLPAMWSLCTSLCQVVPVPCELLALAAEVVVSSLSLPFPPSRPRACP

SEQ ID NO: 270573 - protein, 71 aa, Glycine max
  Clone ID: PAT_MRT3847_86345C.1.pep
LLLLTKSRSSRARIKPHYHVLPSECISANHLHASLHALPPCLDFIPLAEFPLTSTGSCHPSFCIFSQSSTR

SEQ ID NO: 270574 - protein, 60 aa, Glycine max
  Clone ID: PAT_MRT3847_86346C.1.pep
SAYRYEIVHTLIVAIVLDEHVKKAMNEITAGMFPTVLCTCFNLSYSYFLFKHANKINARI

SEQ ID NO: 270575 - protein, 49 aa, Glycine max
  unsure (1)..(49): unsure at all Xaa locations
  Clone ID: PAT_MRT3847_86347C.1.pep
LSXLRAAPKPANTXNQYXXVXXXXRSKXPLXQXPQFPXSLSKPXXTTXG

SEQ ID NO: 270576 - protein, 67 aa, Glycine max
  Clone ID: PAT_MRT3847_86348C.1.pep
GSRAKLPSRFLSYSYINQGPLYDTIAKHGILRTAWWLQFIQMLAYENAFTGFYRIKTLLLVTWLPLI

SEQ ID NO: 270577 - protein, 129 aa, Glycine max
  unsure (1)..(129): unsure at all Xaa locations
  Clone ID: PAT_MRT3847_86349C.1.pep
PSSSQTVXLKVGMSCQGCAGAVNRALAKLEGVQSFDIDLNDQTVTVNGNVEPDELLQACLQYDKKTAFWVHEAPHSRYKPLXSAPVASXNNPSXAATVALAEPENKPSEAAIVDSPEPEDTPSDTAVET

SEQ ID NO: 270578 - protein, 138 aa, Glycine max
  unsure (1)..(138): unsure at all Xaa locations
  Clone ID: PAT_MRT3847_8634C.1.pep
ASLYALERSTEKLSLMKVATVIVSCAGSGATILELRGKLVDQMEWLPVSIGKLSDVTEMDLSENRLMALPXTIVGSSALTKLDLTSTNLLNFPPSFXEMIKLGYLELPAHKLNYLPATFGKFAKLPDLGFESNGVPNL

SEQ ID NO: 270579 - protein, 52 aa, Glycine max
  Clone ID: PAT_MRT3847_86350C.1.pep
RGIHVYVSLDPLEQPLYWLFTLTYILCILTDRHKGSFMIILSTQGKKTKQIE

SEQ ID NO: 270580 - protein, 85 aa, Glycine max
  Clone ID: PAT_MRT3847_86351C.1.pep
DFSATSLSVTVGLMNLIGSWFGAMPSCHGAGGLAGQYKFGGRSGGCVALLGVAKLVLGLVLGTSLAHILKQFPVGILGVLLLFAG

SEQ ID NO: 270581 - protein, 74 aa, Glycine max
  Clone ID: PAT_MRT3847_86352C.1.pep
INLQGIWVPFGSFPTSKRFLKLFGDPLSIFNLVVRLLCQFLLCHSLLGVFLIIRNPRLLRELAFSNELFVCLSQ

SEQ ID NO: 270582 - protein, 124 aa, Glycine max
  Clone ID: PAT_MRT3847_86353C.1.pep
MAMATAVVCPQNITGAIVSSPSKTKKRVVHVRGINSFGGLKASNGVVSLGIPMSTEKCFAKVVSSVKAATSNGKGKGGALSSTCNAAGEIFTIAAIINGLVLVGVAVGFVLLRVEAWVEESEAE

SEQ ID NO: 270583 - protein, 65 aa, Glycine max
  Clone ID: PAT_MRT3847_86354C.1.pep
YCHDCHMFAHGMNSGHGARTLDVICARWRHAVQVYSILGFETIPEQCVAFIKDYIHGEQYTSDSK

SEQ ID NO: 270584 - protein, 125 aa, Glycine max
  unsure (1)..(125): unsure at all Xaa locations
  Clone ID: PAT_MRT3847_86355C.1.pep
AGRRALKRRPSWLSDENRCLKPRREVNSSVSFDLNEPAADATEDDSGDGFLNSSDFTEEHEDNYHDVRGSLXPIPHELLDSADHAIVFKPLNCDLLRRNFSTCIVHRFYWVDVNRVSIDAQRQAL

SEQ ID NO: 270585 - protein, 43 aa, Glycine max
  Clone ID: PAT_MRT3847_86356C.1.pep
QQYPFYLSNSTRKHAGLSTHVPYLIVIFSNIINITSFFYAQTY

SEQ ID NO: 270586 - protein, 102 aa, Glycine max
  Clone ID: PAT_MRT3847_86357C.1.pep
RFPRGFSRPGFFTHRPVNSLSDTCCMVYAFACTRVSAPDSAAGPAGATPWISAHPVRSSTVLPLQSGSLSGFPRGVSFWLFPFPLLLGFLLYFVYSLFFYSI

SEQ ID NO: 270587 - protein, 52 aa, Glycine max
  Clone ID: PAT_MRT3847_86358C.1.pep
FPLLQKGGTYFFCYNHKPPFLKKKKKKKKKKTPPPKKKKKKKKKKKKKKKKN

SEQ ID NO: 270588 - protein, 25 aa, Glycine max
  Clone ID: PAT_MRT3847_86359C.1.pep
YAGIPATTPLTAARPCHYEFNVISH

SEQ ID NO: 270589 - protein, 106 aa, Glycine max
  unsure (1)..(106): unsure at all Xaa locations
  Clone ID: PAT_MRT3847_8635C.1.pep
XXGDXXXXXXVXEXXYXXXYMSXXFXXXXXXXXLSXKXXSXXSXXAHETXXVPXXPXHXXXXXXXFXPXXAXXGSXXXXXGDPDXDLIXPXXARXXPXXXXCXSDT

SEQ ID NO: 270590 - protein, 405 aa, Glycine max
  Clone ID: PAT_MRT3847_86360C.1.pep
MFFNFKESAVKTIKLSFKYHFLHIQRYSYVNVYMKWKKDSYYDSIEHIHYSVQLKPIIALKNCIVRDPNGCIPISAVSKRGLELDVPMKVARFMRQYPSIFEEFTGPEYNLPWFRLTPEVAEIDRDEKRVYEECREDLRSRLRKMILMTREHVLPLKIIQGMQWYLGLPSDLLQHPEQILDESFRFVEMEDGLKGLALESGEKIYSVMERNAMKSGFYSGGPMEAIEFPFFPSKGLRLRRKIENWLNEFQKLPYISPYDDFSNLDPNSDIADKRLVGVLHELLSLFVEHSAERKKLFCLKKYFGLPQKVHRAFERHPHMFYLSFRNKTCTVILKEAYSNKSAIEKHPLLRVRKKYIKLMKKSEVILRNRRVNNRFSNSNAKLDIDSNDIDEKGHEMASCSLEQVA

SEQ ID NO: 270591 - protein, 108 aa, Glycine max
  Clone ID: PAT_MRT3847_86361C.1.pep
RGTETTNCKTGLLEIGQSGQAVSIIGGPLAAALSSPLRMVTTNVYGMAATAVGVYCASRYMADIGMRPNAVKVPVEKLTSRLATGLLQVVEPQIPTNIARQSPQLVTQ

SEQ ID NO: 270592 - protein, 74 aa, Glycine max
  Clone ID: PAT_MRT3847_86362C.1.pep
KKKLLIGGSISTFYYHYTESSHLVNFMKPAPKFLKKNKCGVKACIAEKLSLRLKALLLVCNPVCGMLQKIWQCA

SEQ ID NO: 270593 - protein, 51 aa, Glycine max
  Clone ID: PAT_MRT3847_86363C.1.pep
FFFFFFYFFFFFFIFFFFFFFLYMFYFFLYIVCMVFLFVVFKVILFFITGG

SEQ ID NO: 270594 - protein, 276 aa, Glycine max
  Clone ID: PAT_MRT3847_86364C.1.pep
EDLLVQGDRLRDVLQQLQDAVYLTKTGSRRYNEEAIKKMNGSTHILAESSRSQLLDSSPGDVSANKMKKSSESLSLSAAVQDIEMPLPPLALAPLQHGIRSCNVSEVLADLVDSVRPLAQGQKRVVELSELSSSPLLAAVEEPALRQAFSNLIEGALLRTHVGGKVEIVSTAAPAGGTLVLIDDDGPDMHYMTQMHSLTPYGQELLSDNMIEDNMTWNFVAGLTVAREILESYGCVVRIVSPRIKDAPLGAGGTRVELWLPSSIVQSDLSSHAQEV

SEQ ID NO: 270595 - protein, 65 aa, Glycine max
  Clone ID: PAT_MRT3847_86365C.1.pep
LARQKVTHLHLWEADLKRREKDIKRREEAVSRAGVPDDDKNWPPFIPIIHHDMAYEIPDDAHRLQ

SEQ ID NO: 270596 - protein, 57 aa, Glycine max
  Clone ID: PAT_MRT3847_86366C.1.pep
EALDHIMSERNKRQELTSKFIALAAAIPGLKKMDKAHVLREAINYVKQLQERIEDLE

SEQ ID NO: 270597 - protein, 71 aa, Glycine max
  unsure (1)..(71): unsure at all Xaa locations
  Clone ID: PAT_MRT3847_86367C.1.pep
MISPPTVVTRDDGLNNLSSTGSCDSKQSLNHFSQNGAALTERNYLGLSDRSSVDSTGLYCPXSLCDDKKEN

SEQ ID NO: 270598 - protein, 58 aa, Glycine max
  Clone ID: PAT_MRT3847_86368C.1.pep
VFLTITAIRDIGIPRYRKLFLHSISCSLEIHRSVSSYFKPTTTTKCLDLVLELLNHID

SEQ ID NO: 270599 - protein, 337 aa, Glycine max
  unsure (1)..(337): unsure at all Xaa locations
  Clone ID: PAT_MRT3847_86369C.1.pep
LIDGTVVHQENLKKDIRQEVPTGQFKIYARGMVGAELQGGLKHKKLKRQTVSSGLFNFGNKQKFNSFISIYNKSDYNKNNKKIKLDDDEIAISTSVSLFKKMKTLNIFGKTYRVKYIESTNINNLLYANGITLIXELTTNWWDRIVNEYRNHNDENLIITPNQVQTAVEXNVLKEKDKLNHRIKKIGVQHDIEFQVKKQNLLMWKQVNSSLIFVGSVVSLVLLIGIFLMMYYKQVSEGHEDRDAYITMKQLGLDEILIKKTINKQVIWVFLIPVIVAIIHTLAAFRIIYSVLGIVGQYDLGLYATSYVGVIVVFIIFYSMMYWITSRIYYTMINDKH

SEQ ID NO: 270600 - protein, 75 aa, Glycine max
  Clone ID: PAT_MRT3847_8636C.1.pep
SFSLADTVNTKRRYWQQTKAQNHNTLLLACSPTTLLSHPTRGSRTGNITLPNCKTTLSASIAPPRSSVETGTLLQ

SEQ ID NO: 270601 - protein, 89 aa, Glycine max
  Clone ID: PAT_MRT3847_86370C.1.pep
VPKYGWPLMQSRRSGMSFGAIRLHMCLRVRYAAVFSKRPHGPPTWCVPQISAPEPLRVFVPPIGIALHPTATALLCLMSDRTLDSSIEK

SEQ ID NO: 270602 - protein, 91 aa, Glycine max
  unsure (1)..(91): unsure at all Xaa locations
  Clone ID: PAT_MRT3847_86371C.1.pep
FAWAVAWTFPSKSVFDDKLVSANTHQCFDGHVAADCWLPILGNXLYAASQLPSQAVFENVTCGSGRXGPPTTAWISSSATKGSSYISRRML

SEQ ID NO: 270603 - protein, 94 aa, Glycine max
  unsure (1)..(94): unsure at all Xaa locations
  Clone ID: PAT_MRT3847_86372C.1.pep
FAESYHTNPEKARRSIFGAPIRGGRPIRAATFANTSVQSEPDMNSRMXLMSTTTNGDLDHGKDLAVVKETXARAGAGWTSRYTPTPLGGGCVGK

SEQ ID NO: 270604 - protein, 360 aa, Glycine max
  unsure (1)..(360): unsure at all Xaa locations
  Clone ID: PAT_MRT3847_86373C.1.pep
MAATRARVSSFSRNVSTVTSQNPGLKHGPNGTMFISSGIPDLDKILGGGFSLGSLVMVMEDPEAPHHMLLLRNFMSQGLVQKQPLLYASASRDPKSFLGTLPSPASPKGDNXSDLGHEKDLRIAWQYKKYFGEPQLNLNTNNGGQHDYCNDFDLRKPLDRHFFSGNNVDCVSIKDSPNLTALQDCCAGFLAKFSRNEGSISSAGRIAIQSFCSPQCKYSNEEWHMLSFIRSLKGMARSSNAVIVVTFPPSLLPPSCSKRLQHMADTLLSVKAIPDEDKELAKLLTGYQDMIGLLNVHKVARLNTQVPVILDATTFSIKLQRRRFLVLECLNQAPVDGSSGSSYGTSGGCSGSTKAGSLDF

SEQ ID NO: 270605 - protein, 76 aa, Glycine max
  unsure (1)..(76): unsure at all Xaa locations
  Clone ID: PAT_MRT3847_86374C.1.pep
HKVILHDIQLGIINKFNMPDDHYILHTADAQNITLPFDCMHGCCTSCAVRMKNGKIMQPEALRIXAELRDNGYSLI

SEQ ID NO: 270606 - protein, 164 aa, Glycine max
  Clone ID: PAT_MRT3847_86375C.1.pep
MTPHNDSQETTEASSSTIGSNLNEIMADRAETSNQQNAMAKSSNDETLDEEVESYQKYAETSYEETVEEASNHNCGDGMEEEVEEIEQNCYETNYDWISEISRPRSYWEERRQAWYREMLETGSQNEDIRRLLERRTVSSFLSSDFRDRMDRLMESHRGTQTHL

SEQ ID NO: 270607 - protein, 77 aa, Glycine max
  Clone ID: PAT_MRT3847_86376C.1.pep
FQAWVPIKTAASLIWNLVLDINICKLSTSGTLLILLILLLSKKKKKHSVRIQNQQHRLSSCIYIGKTTQQSTLNENK

SEQ ID NO: 270608 - protein, 149 aa, Glycine max
  unsure (1)..(149): unsure at all Xaa locations
  Clone ID: PAT_MRT3847_86377C.1.pep
RFKVVVQQYAFASEGVSLDVQVCDKGKWFVSCKDVPMSLRNVVFPSMFPNGGNYQDVVDSNCNISNGDDIIIDDVNGNSEDDVXAAENPVMHEFTEEVSDFPHEPRXGXLPHDQNTGAFFIAILQKVSPLPAIQVKPRKEVAKHVDKAY

SEQ ID NO: 270609 - protein, 64 aa, Glycine max
  unsure (1)..(64): unsure at all Xaa locations
  Clone ID: PAT_MRT3847_86378C.1.pep
SCILYSKPXXFFFFFFFFXTQQQHTTLYLKNIFHNFNNPQANPNIKTSKIYYKSPLPIIYLTPY

SEQ ID NO: 270610 - protein, 100 aa, Glycine max
  Clone ID: PAT_MRT3847_86379C.1.pep
EFGPKLQCVFLAMAHNFPRTLEALVLHVLSPVGAEVLTRKFDEMDQQTLEEDRNRFYEVFYSAFDDQSAVFNSILKGKEVFTEQAFKNVLDKFVGVNLES

SEQ ID NO: 270611 - protein, 69 aa, Glycine max
  Clone ID: PAT_MRT3847_8637C.1.pep
GQSQTLITTGVVIIILQHFTDVLYFQLQQNSSTPAALIMPKQTTPALIREQPIQTSGLTLLQSSILFPI

SEQ ID NO: 270612 - protein, 157 aa, Glycine max
  Clone ID: PAT_MRT3847_86380C.1.pep
MGHHSCCNQQKVKRGLWSPEEDEKLIRYITTHGYGCWSEVPEKAGLQRCGKSCRLRWINYLRPDIRRGRFTPEEEKLIISLHGVVGNRWAHIASHLPGRTDNEIKNYWNSWIKKKIRKTSSVSSTTIAQSIDHNSSDQFNYNSNLILYHFPNHDNNL

SEQ ID NO: 270613 - protein, 55 aa, Glycine max
  Clone ID: PAT_MRT3847_86381C.1.pep
WQMVTRRSQVAIEKCLPAVFVRSSVCRFDHSNPYAFNLERLRSTKEFGIRIIILR

SEQ ID NO: 270614 - protein, 172 aa, Glycine max
  unsure (1)..(172): unsure at all Xaa locations
  Clone ID: PAT_MRT3847_86382C.1.pep
AADDIEFMXSXXWETIEAEAILSLSRRSTPSRIPSRIRWRQIMFQKRIFSDDSFEIDKSKENSLTMDEQNNLFEENKMRFAQLQDEYVKTEASLEASNQHKQLLCEQVSDLKTMLDEKQNQLKCCELETLKIETRLGDLKRRMLETHFTLKERVEQTEEARKQSEERQAKLQ

SEQ ID NO: 270615 - protein, 93 aa, Glycine max
  Clone ID: PAT_MRT3847_86383C.1.pep
PEDSRATKRTTEQGFSSTFHPKTSPVSFRCLLLAHSTVNLAGVKVRGASQQCGCLVVVEVVLSRRPEERSASQLKISKSPFSNILFPFQSFRL

SEQ ID NO: 270616 - protein, 132 aa, Glycine max
  Clone ID: PAT_MRT3847_86384C.1.pep
HTTTTTFRGPTSSTLSFFSTQVCISLFRTNVNFSQPNISLRTTTFSRFIKDLICLTIYTSPYALRCYSLLLLLPMLPSQGFLTRKLLHLLTAWTVSYPRCPSFPRHTYPDLYPCPLHYYAILILPSIPPISY

SEQ ID NO: 270617 - protein, 381 aa, Glycine max
  Clone ID: PAT_MRT3847_86385C.1.pep
MSFNYDGNGSITKCNISYSSYCQENALDKALVKGKFLLCDNIPYPSIVGFAQGAVGVIIRSNVSLAVSDVFPLPAAHITHNDGAQIYSYLKSTSNPTATIFKSYEGKDPLAPYIDSFSGRGPNKITPNILKPDLAAPGVNILAAWSPIAPISGVKGDKRISKYNILYGTSMACPHVTAAAVYIKSFHPNWSPAVIKSALMTTATPMRDILNHGNAEFGYGAGQINPMKAVKPGLVYDATEIDYVKFLCGDGYSGFMDKITGDNKTTCTPANTGSVLDLNLPSFALSTTRSKYISATFSRTVTNVGSAKSIYKATVTTPPSSSSLNIKVVPDVLVFSSLEEKMSFTLKIEGSINNANIVSSSLVWDDGTFQVRSPVVVYVPP

SEQ ID NO: 270618 - protein, 79 aa, Glycine max
  unsure (1)..(79): unsure at all Xaa locations
  Clone ID: PAT_MRT3847_86386C.1.pep
NSDASXGSRFSKVXEYYRLLXXVMAKAXLQDXRLLDLPXSVAXYKLVLGQDXDLHXILXIDAEIGXTLQEFMPFVGNIY

SEQ ID NO: 270619 - protein, 109 aa, Glycine max
  unsure (1)..(109): unsure at all Xaa locations
  Clone ID: PAT_MRT3847_86387C.1.pep
SPPAPFLKINVPGFRKEAIKVQIGDGNFFPLKGEVWKKDPQPKEKDPFWHVVKKGPGKGGFSREIXLPKNVKVVQIKAQVENGVLPIVGPKDAPPQTPKVRTFTLPSGL

SEQ ID NO: 270620 - protein, 72 aa, Glycine max
  Clone ID: PAT_MRT3847_86388C.1.pep
KRERVSLKNNFIYLYCHELTIYSIYVTIRQLTPWINRNQYIVGTNRTVYSVQCLYCELLHLTCTSRGLGFDA

SEQ ID NO: 270621 - protein, 65 aa, Glycine max
  unsure (1)..(65): unsure at all Xaa locations
  Clone ID: PAT_MRT3847_86389C.1.pep
XLFHLLTTTLQTLPNLQHHMTPTHNSLSYDAQSSQLKITIKLTTQSHLNQPNLNTAHPSYRLNSY

SEQ ID NO: 270622 - protein, 53 aa, Glycine max
  Clone ID: PAT_MRT3847_8638C.1.pep
LKLDHIPHACSGHQGHRLMTAAIYQCSYHSPRIGDPRAGLRVGPLQMYRVKRS

SEQ ID NO: 270623 - protein, 134 aa, Glycine max
  unsure (1)..(134): unsure at all Xaa locations
  Clone ID: PAT_MRT3847_86390C.1.pep
NAGPAFPLAHACHDGNLNPVHTSHTLYTGHCRSNGELCVDTLPACXSAIEDGANVIATDLLSSNYGDLVXIHDVTLDYTADIAYRTEFADRTXTYEXQGENMTGLFTVDLTFKELKSLMVKQRCSLRDQRFNGN

SEQ ID NO: 270624 - protein, 90 aa, Glycine max
  Clone ID: PAT_MRT3847_86391C.1.pep
HASDLFIFIPRCFEKPVLEFSPSDVSSGMGAVYGITKSSVGVASMGHAGAGLILCLVSCTFLAVRLLQFSPFPFINSFIEYVCTIVNNTK

SEQ ID NO: 270625 - protein, 34 aa, Glycine max
  Clone ID: PAT_MRT3847_86392C.1.pep
MLICAMGDAHLHLQVLIQTNIHLEPIRLEVEPNT

SEQ ID NO: 270626 - protein, 44 aa, Glycine max
  Clone ID: PAT_MRT3847_86393C.1.pep
EGCVECDLFVVLDRKAEHCLHTCPCSWKQIMIESWSLDQRSLPL

SEQ ID NO: 270627 - protein, 115 aa, Glycine max
  Clone ID: PAT_MRT3847_86394C.1.pep
MRIIAAYLLSVLGGNDKPDAAAVKKILDSVGVTADDAELTKLLSELDGKDINEVIAEGNKKLATVPTGGSGGGAAPAAGGAAPAGGAAAAKKEEEPAKKEKSEESEADMGFSLFD

SEQ ID NO: 270628 - protein, 58 aa, Glycine max
  Clone ID: PAT_MRT3847_86395C.1.pep
MVSPIPDSRVSAHIPTFTSMHLKSTDCPDKYSHAVSICHAVRYQLRKCSPNHLTILNK

SEQ ID NO: 270629 - protein, 161 aa, Glycine max
  Clone ID: PAT_MRT3847_86396C.1.pep
MSHCAARCATRSATRLLNLTRALSTEARGQKIERIATELLDLNRFERHDFTVLWRLKMGLHRYGAPVAGMTMPSVGAAARAEAGAAAVAEKMAFDLKLEKYDAAAKIKIIKEVRSFTDLGLKEAKDLVEKVPCVLKKGLTKEEANPIMEKLKELGAAVVLE

SEQ ID NO: 270630 - protein, 47 aa, Glycine max
  Clone ID: PAT_MRT3847_86397C.1.pep
TKRLVAARLKKKTSICGLKSLHVSQWDVKKAFHKRLSKEKCSSKFAP

SEQ ID NO: 270631 - protein, 53 aa, Glycine max
  Clone ID: PAT_MRT3847_86398C.1.pep
LQLFLPSSSHKITTSEKLMVSCCKQLYISKRSPCYCPQSVESLLKTHSSHSHW

SEQ ID NO: 270632 - protein, 79 aa, Glycine max
  Clone ID: PAT_MRT3847_86399C.1.pep
IFKPKGGPNNKPRPRGGPRPPPGFAGGGEPPTGVSGGFSNPEWADLGPARNIYAGHPRAGPLLPHLRGPLPPKKEFNGP

SEQ ID NO: 270633 - protein, 88 aa, Glycine max
  Clone ID: PAT_MRT3847_8639C.1.pep
KIHKVKQKKGTRLRNGETPEVVPSHVKLHQLLLQERIENACGDRARLVKLKKKQLNGSAVEAKTWKSYMEKILESPPLIIKWFVKFNS

SEQ ID NO: 270634 - protein, 96 aa, Glycine max
  unsure (1)..(96): unsure at all Xaa locations
  Clone ID: PAT_MRT3847_863C.1.pep
LMSDSLGGNAKPLMFVNXSPVKSSLDXTHTSLMYASRVRSIVNDPTKNVFSKKIARLKKLIGFWKDHPARKGEDXVFKEIQEESPPKKRVDGRPFM

SEQ ID NO: 270635 - protein, 59 aa, Glycine max
  Clone ID: PAT_MRT3847_86400C.1.pep
MDMKKVTCAVLIAAASMSAALAATEVPAPAPGPSSGASAAAAVGSLVGASVLSFFALFH

SEQ ID NO: 270636 - protein, 111 aa, Glycine max
  Clone ID: PAT_MRT3847_86401C.1.pep
LVVQLSVLDGLTAYDLAPNDPHLIDILTMNGVNICVVEGEFLNSLFNIISDWLFPLLVLHGLYLLFRRAQGGPGGPRRLGRPMDFGRNKYKFQEASQTCVSFADLTCADQA

SEQ ID NO: 270637 - protein, 79 aa, Glycine max
  Clone ID: PAT_MRT3847_86402C.1.pep
KGKEYDDEGDLIICRLSDKRRVTIQDFRGKTLVSIREYYKKDGKELPTSKGISLTEEQWSTFKKNVPAIEKAIKKMESS

SEQ ID NO: 270638 - protein, 71 aa, Glycine max
  Clone ID: PAT_MRT3847_86403C.1.pep
MSQFWKPGTERPQGRVVDVEEGGVLFLSGSHHSSSSSRYGHVSIEKQRRQRLPVFKYRTAILYLVETHATT

SEQ ID NO: 270639 - protein, 49 aa, Glycine max
  Clone ID: PAT_MRT3847_86404C.1.pep
KSLLAISQHFISATCLHSCSWFLIHLQDADYDELVDNSLKCTNCLITYL

SEQ ID NO: 270640 - protein, 55 aa, Glycine max
  Clone ID: PAT_MRT3847_86405C.1.pep
ISVINFFITTSNFLQAGKVLWTPQNEDDTLSKRRLLEDYPQLAKGMANFLVKKRE

SEQ ID NO: 270641 - protein, 126 aa, Glycine max
  Clone ID: PAT_MRT3847_86406C.1.pep
EGIKSLILNHFYNRIWGSFVSQQGGGALGKKATGFLAKKGVKKHLLLVYPTARFPEKVFVQKHEKNPPAFFKLFKKETNGTIFICFFIQKGTQGYTFPNYNWGDYKLGVYTITGFLKIKNWGSGFT

SEQ ID NO: 270642 - protein, 124 aa, Glycine max
  unsure (1)..(124): unsure at all Xaa locations
  Clone ID: PAT_MRT3847_86407C.1.pep
MDQISARFTQRLIRMSRCYSYGMSITSNIXNSLLWKQNKNAXPTSYAKFTVLSINSDNSIIYLLKGLLTLYITPFTDMIITEYIMIGCTGIDMRMXSITIXMPVKHSFELPNWNYDGSSTRHSP

SEQ ID NO: 270643 - protein, 73 aa, Glycine max
  Clone ID: PAT_MRT3847_86408C.1.pep
WISAEFGLSSGNNAFYAGTFIPEIRILRQSLTMFYISLPGSQLHCWTYDVLSIDGVPTKSLMPQWYPNYYRIM

SEQ ID NO: 270644 - protein, 49 aa, Glycine max
  unsure (1)..(49): unsure at all Xaa locations
  Clone ID: PAT_MRT3847_86409C.1.pep
GAPPKIVKAAQNALFFRAKSNSLAPLGKSPGWGEFXEPKKEFFFKGSSL

SEQ ID NO: 270645 - protein, 132 aa, Glycine max
  Clone ID: PAT_MRT3847_8640C.1.pep
AQQKCLKHFPRGPSRGAGRWRKKLLVIFVSLGIIGSFWLFWHLNTGIMRRREETLANVCDERARMLQDQFNVSMNHVHALAILVSTFHHGKHPFAIDQVIYSMSFSSLIGIFPLPSYANLFMASDSKYFACS

SEQ ID NO: 270646 - protein, 117 aa, Glycine max
  unsure (1)..(117): unsure at all Xaa locations
  Clone ID: PAT_MRT3847_86410C.1.pep
IVSTSSHGDSRNTAQQHAVNLITKSVPVAISASAADASSSDLGSSANASENHLSRALSEDTLDYEAMILDMAGQNLVRPMGPSSNDLSRALVDRFSTVDLKLKLQLYKVRFXLLTRN

SEQ ID NO: 270647 - protein, 115 aa, Glycine max
  Clone ID: PAT_MRT3847_86411C.1.pep
IGLYNSLKPVLLTGSLTISFFASFLLGWGITIGAGLASYPLDTVRRRIMMTSGEAVKYRSSAHAFSEIVKKEGVKSLFKGAGANILRTVAGAGVLAGYDKLQVLVFGKTYGADGG

SEQ ID NO: 270648 - protein, 71 aa, Glycine max
  Clone ID: PAT_MRT3847_86412C.1.pep
SLLLRLTLNHTQHVPQSHSYKKLFFFLQYLHSYIIFSILEQNESKLMPLPFPIPLLVTFLPLLVPDLYPNI

SEQ ID NO: 270649 - protein, 83 aa, Glycine max
  Clone ID: PAT_MRT3847_86413C.1.pep
KYMKYNVSSHMKLHILPKFHSIFQSSLGQRDLTNELGLRNSLGSGLASRLKEHIQRLPTNKVFTSATRIKLMPFWDMNLFFTN

SEQ ID NO: 270650 - protein, 56 aa, Glycine max
  Clone ID: PAT_MRT3847_86414C.1.pep
MTDDWHTICQNLPLTMKIFRPAFNLLNDLAELMNNYYDVLLTATNFSTNYTTMLSH

SEQ ID NO: 270651 - protein, 195 aa, Glycine max
  Clone ID: PAT_MRT3847_86415C.1.pep
NAMDKNNSNNSSSSSVCTKIRQALTSNPAFRAVQRITSFNQQEPTNKPFTKGPNSQSSITNIIIQNKPHHPHHKAHTEGSGSGSIPIKFDNGNYSAVSSTVANGKQHVPMQQGKQQEGNNKKQMDINDHFKDFIQNTREKMMRSVTNIGWTHQSNHAAAPEHGEAQNKNESHFSEFIQRARKKLRTTTTVRKNNN

SEQ ID NO: 270652 - protein, 133 aa, Glycine max
  Clone ID: PAT_MRT3847_86416C.1.pep
TKIGGVPLIPLLYALWSPPLNLLKIFKMGFRPPITPISNLSLGNKGVFFALFFWAINKKIFCPPPIFFFPHNLPFSPKFGPRIFPKKGPSPCLVRPHIFFFFWGLKVKKNFFGCFLRELNKIFFFFFLAPQNS

SEQ ID NO: 270653 - protein, 29 aa, Glycine max
  Clone ID: PAT_MRT3847_86417C.1.pep
MEYYAPAKKKPPSITCNCWPKWWCLCCGY

SEQ ID NO: 270654 - protein, 86 aa, Glycine max
  Clone ID: PAT_MRT3847_86418C.1.pep
VGEYVTEFHPKLIELTGSPDEVKNVARAYRVYYMKTAEEDSDYLVDHSIWRYLMSPEMEFVKFFGKNNDVDSLADGVIKEVTQHKK

SEQ ID NO: 270655 - protein, 148 aa, Glycine max
  Clone ID: PAT_MRT3847_86419C.1.pep
MASKRILKELKDLQKDPPTSCSAGPVAEDMFHWQATIMGPADSPYAGGVFLVSIHFPPDYPFKPPKVAFRTKVFHPNINSNGSICLDILKEQWSPALTISKVLLSICSLLTDPNPDDPLVPEIAHMYKTDRAKYEATARSWTQKYAMG

SEQ ID NO: 270656 - protein, 104 aa, Glycine max
  Clone ID: PAT_MRT3847_8641C.1.pep
DNARRYVKQLPQYPKQNFSARFPDMSPGAVDLLEKMLIFDPNRRITVDEALSHPYMAPLHDINEEPVCTRPFSFDFEQPSFTEEDIKELIWRESVKFNPVPPVY

SEQ ID NO: 270657 - protein, 63 aa, Glycine max
  Clone ID: PAT_MRT3847_86420C.1.pep
MAERGCGYRGNDRGGFRPRFGGRRRRCYKGPSRRLSPRREEKEKWVPMTKLGPLVKGGKIPNL

SEQ ID NO: 270658 - protein, 57 aa, Glycine max
  Clone ID: PAT_MRT3847_86421C.1.pep
RTYVQGHIRIIVLQRSENYLTNHSHSLNTVYVSVNVSSLDTRGLVRTLCIEWIDHTC

SEQ ID NO: 270659 - protein, 489 aa, Glycine max
  Clone ID: PAT_MRT3847_86422C.1.pep
MMVAPFYPGTPATKEIGSAMSLVKLDCSNNQLTELPSSLGRCLELSDLKGSNNLITSLPEDLANCSKLSKLDMEGNKLTVISENLISSWTMLTEFNASKNLLNGISSNVDAVSCLIRFDVHLYRISSIPLSLIGCHSLTELYLGNNNISTLPVEIGALSRLGTLDLHSNQLKDYPVEACKLSLLVLDLSNNSLSGLPPEMGKMTTLRKLLLSGNPMRTLRSSLVSGPTPALLKFLRSRLSEDEDSEAVTTTKEVIAMATRLSISSKELSMEELGLSAVPSEVWESGEVIKLNLSRNSIQELPVELSSCVSLQTLILSKNQIKDWPGSILKSLSSLSCLKLDNNPLRQIPSDGFEMVPKLQILDLSGNAASLLDGPAFSSLPYLQELYLRRMRLSEVPSDIVGLHQLRILDLSQNSLQSIPVGLKALTSLQELDLSNNNIAVLPPELGLLEPSLQALRLDGNPLRSIRRTVLDKGTKAVLQYLKDKLPEQ

SEQ ID NO: 270660 - protein, 44 aa, Glycine max
  Clone ID: PAT_MRT3847_86423C.1.pep
LLEPSLQALRLDGNPLRSIRRTVLDRGTKAVLQYLKDKLPEQEQ

SEQ ID NO: 270661 - protein, 61 aa, Glycine max
  unsure (1)..(61): unsure at all Xaa locations
  Clone ID: PAT_MRT3847_86424C.1.pep
SPPARSPVVWFRAAVSGPSXCGXXARVSGPLPFLXGAGXRGVVLLLETVCGWVXXWARKAG

SEQ ID NO: 270662 - protein, 80 aa, Glycine max
  unsure (1)..(80): unsure at all Xaa locations
  Clone ID: PAT_MRT3847_86425C.1.pep
HRTWXSLFPXISSIGVLXHGFETVRXSLRFSHRNXWLEFREGKEPERLLXXKXXXXVEXSGXKGLXXRFATDVXXXTNXT

SEQ ID NO: 270663 - protein, 78 aa, Glycine max
  Clone ID: PAT_MRT3847_86426C.1.pep
ARTSRSDVWVSHTQFEVVLDGHRTVHIRMYEGEWIQNIRYVQDNDQGHSQTKHEPSIRTNPGEREEPSLNMEAVDANT

SEQ ID NO: 270664 - protein, 43 aa, Glycine max
  unsure (1)..(43): unsure at all Xaa locations
  Clone ID: PAT_MRT3847_86427C.1.pep
PHIRIIEDARHPAKYKRWVGMVDVIFTDVAXPDEARIYALNAS

SEQ ID NO: 270665 - protein, 150 aa, Glycine max
  unsure (1)..(150): unsure at all Xaa locations
  Clone ID: PAT_MRT3847_86428C.1.pep
MAAASFMGLSCPSLSDKAGKLXPMNPRFTLAYLEEHRHKQAFSGYPWNGPXRLKYLCPFSGXPPPYLTGEMPGDYGWDTXNFLTEPNTFIRLRHLXAIHYQRALLETLVCXDPNWRDTPVTSHEESVMVKDATQIIIEGGLDYLRNPRLG

SEQ ID NO: 270666 - protein, 66 aa, Glycine max
  unsure (1)..(66): unsure at all Xaa locations
  Clone ID: PAT_MRT3847_86429C.1.pep
IQVSEGRREXQCWAXATXXSFPGXYXVDAXILXLEEATAAVXXRXDXLRXKXXREEXHDLYSXHYC

SEQ ID NO: 270667 - protein, 95 aa, Glycine max
  unsure (1)..(95): unsure at all Xaa locations
  Clone ID: PAT_MRT3847_8642C.1.pep
GLRCTVVVPRNVTLLRELETRVKGIEDGTGRYRTDDVDDVYVQSWTGTIMVPDGDAYDWLYLPRXLSCGTDSTDSAATWMXQTRINMTRVNQQTG

SEQ ID NO: 270668 - protein, 60 aa, Glycine max
  Clone ID: PAT_MRT3847_86430C.1.pep
LFLRVSLPIFLGFLLEELNLPPTHPCGVETHAPISSTPLPQIPHQHQHPREFCFELKKLP

SEQ ID NO: 270669 - protein, 172 aa, Glycine max
  Clone ID: PAT_MRT3847_86431C.1.pep
KKAEFGKDLHWYSPSPNNVRSMLSTTRESHSRVRRIFSHAFSDKALRDQEPLIQRYIDLLVQRLRERAEQGVDVDVVRYYNFTTFDVIADLTFGESFGCLESDDYHALVRGAFASIQALSFKLALRYYKPIEKAYYWWNKNKPMGNVIFFNFTAGKVERRLGMETARPDVVT

SEQ ID NO: 270670 - protein, 219 aa, Glycine max
  unsure (1)..(219): unsure at all Xaa locations
  Clone ID: PAT_MRT3847_86432C.1.pep
MTTEFVPNPKMLYRNLGNTGLRVPVFSYGGWLTVGNTQKGDIVKDLMKTAFDNGINMFDNAEAYSGGESEREMGRVIEELGWDRRDIVVTTKIFFGTGRKETQNTRGLSRKHIVEGLNQSLKNLRLDYVDIVFAHRPDRTTPLEETVRAFNHVIDQGKAFYWGTSEWSAXEIAQANEIARRLTLVGPVVEQPHYSMLHRERXENEYRPAVQGNSDTERL

SEQ ID NO: 270671 - protein, 95 aa, Glycine max
  Clone ID: PAT_MRT3847_86433C.1.pep
RYSASSDELAGEMGEAKSRTISHLKGTEAAWIGIPTSVATTMMQVSNVFFETNQTRFYMSILMPRCEQCCISNSAAQPFVAIFRLDTPCLPRREN

SEQ ID NO: 270672 - protein, 538 aa, Glycine max
  unsure (1)..(538): unsure at all Xaa locations
  Clone ID: PAT_MRT3847_86434C.1.pep
MWGWMVGEARRAACNWNWVSLRSMGGGPRTFPGGVNKWKWKRMHEKLARDKQNRLIQQEKQLYPARIRSHIRSSLSPDHRSAAAATHRPLSPNDHFKALADRFVKDGAEDLWNNHDGPLTPNPTTPNLDFCPKHTRGYRAVPEVGNSRVGAHKYRFWRKGSDDSSSGESESEIEVELSMKKRGSSASLGEYDVKRERRVVPKTSPARTGMIXEFISYWLSLIDMXEWRLTPDGHESILSNTRFDECGISPLTVKALSLVGYVQMTRIQEASLPICLEGMDALVKAKTGTGKSVAFLLPAIETVLKAMSSNTSQRVPPIYVLILCPTRELASQIAAVAKVLLKYHETIGVQTLVGGIRFKVDQKRLESDPCQILVATPGRLLDHIENKSGISLRLMGLRMLVLDEADHLLDLGFRGDVEKIVDCLPRQQQSLLFSATIPKEVRCVSQLVLKREHKYVDTVGMGCVETPVKVKQSYLIAPHESHFQLVHHILKEHILQTPDYKVIVFCITGMMILFXLCKLLREMKTNARHIHYPKPQVY

SEQ ID NO: 270673 - protein, 155 aa, Glycine max
  unsure (1)..(155): unsure at all Xaa locations
  Clone ID: PAT_MRT3847_86435C.1.pep
SGVKPDIITWNSLLSGHPLQGSYENVLTNSGSLXSAGFKPDSCSITSALQAVIGLGCFNLGKEIHGYIMRSKLEYDVYVCTSLVDKYIKNDCLDKAEVVFXHXEDKNICAWNSLISGYTYKGLFDNAEKLLNQMKEEGIKPDLVTWNSLVSGYSM

SEQ ID NO: 270674 - protein, 48 aa, Glycine max
  Clone ID: PAT_MRT3847_86436C.1.pep
RSFFTKKKKTKTRKRSRQLTDFEFSFLLGFTGKLFRREIYELGDVTPG

SEQ ID NO: 270675 - protein, 24 aa, Glycine max
  Clone ID: PAT_MRT3847_86437C.1.pep
EKHFKKGFNKFQVNLVGKKLHFLP

SEQ ID NO: 270676 - protein, 566 aa, Glycine max
  unsure (1)..(566): unsure at all Xaa locations
  Clone ID: PAT_MRT3847_86438C.1.pep
MEIDGNVLAAKSLVRFGVQHMFGVVGIPVTSLANRAVSLGVRFIAFHNEQSAGYAASAYGYLTGRPGVFLTVSGPGCVHGLAGLSNASVNTWPTVMISGSCDQNDVGRGDFQELNQIEATKPFTKLSVKASHISEIPARVAQVLDWAQSARPGGCYLDLPTDVLHQKXSESEAEKLLSEAVNNRPISNPRHGFQHWWCKIEQPXTPLRHAERPLIVFGKGAAYARAEHVLTKLVNSTGIPFLPTPMGKGILPDNHELAATAARSLAIGKCDVALVVGARLNWLLHFGEPPKWSKDVKFILVDVSEEEIELRKPHLGLIGDAKHVIEVLNKEIKDDPFCLGSTHPWVEAISNKAKDNVAKMEVQLKKDIVPFNFLTPMRIIRDAIAGLGSPAPIVVSEGANTMDVGRSVLVQTEPRTRLDAGTWGTMGVGLGYCIAAAVAEPGRLVVAVEGDSGFGFSAMEVETLVRYQLPVVVIVFNNGGVYGGDRRHPEEIDGPHKDDPAPTDFVPNAGYHALIEAFGGKGYLVGTPDELKSALSESFSARKPAVVNVVIDPYAGSESGRMQHKN

SEQ ID NO: 270677 - protein, 150 aa, Glycine max
  Clone ID: PAT_MRT3847_86439C.1.pep
PTRPVSLLRHAERPLIVFGKGAAYARAEHVLTKLVNSTGIPFLPTPMGKGILPDTHALAATAARSLAIGKCDVALVVGARLNWLLHFGEPPKWSKDVKFILVDVSEEEIELRKPHLGLIGDAKHVIEVLNKEIKDDPFCLGSTHPWVEAI

SEQ ID NO: 270678 - protein, 141 aa, Glycine max
  Clone ID: PAT_MRT3847_86440C.1.pep
GCSSLKEFSVTSEKMTKLNLSYTNISELSSSIGHLVSLEKLYLRGTNVESLPANIKNLSMLTSLRLDGCRKLMSLPELPPSLRLLDINGCKKLMSPSQRHNIKLKKIYKYVLKKISILFSILFYVVLCCFMYNYVISFYSN

SEQ ID NO: 270679 - protein, 81 aa, Glycine max
  Clone ID: PAT_MRT3847_86441C.1.pep
RLRKDKPIGLLDVYPYNLIAILIPLRTNKARGIRYTKSARTPINPIPLPKELTRRVLVTFSIPTPFPPTTRSDRIRNCITI

SEQ ID NO: 270680 - protein, 84 aa, Glycine max
  Clone ID: PAT_MRT3847_86442C.1.pep
NFSPLRSTFLDLSTGSHSYLRAFSSAPVISFAIERGWTESSSANVRGLPALPLRLPQLDERLRAGYKSTTAGKFTEALKAFTSI

SEQ ID NO: 270681 - protein, 88 aa, Glycine max
  Clone ID: PAT_MRT3847_86443C.1.pep
SHFRSLQRPLPLIETIMVLKLDKGSDNEPQDVQPDVQPLGQAIAQHNITPSIPLSEPHQGFHLGSHLTTHRTPPPPHRLCHPLSSPKR

SEQ ID NO: 270682 - protein, 116 aa, Glycine max
  Clone ID: PAT_MRT3847_86444C.1.pep
TPGGAPVAPLPPLFWGLFFNSLPRLFFSLGKKESPPPPQLAGGPSLWAARFFNFFVPPVFLGGKRAVNPSPPKGVWPLFCPPLFYSFFLRNVFFWRCGRDIFLAGPPVVHIFTQLY

SEQ ID NO: 270683 - protein, 145 aa, Glycine max
  Clone ID: PAT_MRT3847_86445C.1.pep
MYATQPLFKSIGSYIIDNELIKIYIVATWCDTQVGILRMFQQYALFEQYQQRLSAEVGATQTQRIVNGALFLMTLGGNDFVNNYFLTPVSARSRQFTVPQYCRYLITEYRKILMVIQISIKSFFFFLFQGKTNRKLIVSFISITL

SEQ ID NO: 270684 - protein, 88 aa, Glycine max
  unsure (1)..(88): unsure at all Xaa locations
  Clone ID: PAT_MRT3847_86446C.1.pep
GYXXXPQXIVYCCXXSLLXLHCXKPXVFAXXLNHPHXXPSILGTXKXXPXFKSPXXNSQLCTDXPSYXPGXXXIKPEXCSIXLMPXLX

SEQ ID NO: 270685 - protein, 114 aa, Glycine max
  Clone ID: PAT_MRT3847_86447C.1.pep
NACGVEDIHDGTNYSRTACVIAVAKARDTFESFLHQLGSRLLYILKRLLPISVFLLQKDCEYLSGHEVFLRRAASAFNNFAESTEKSCREKLTTTCPHLLQICFYMANEFYNEK

SEQ ID NO: 270686 - protein, 73 aa, Glycine max
  Clone ID: PAT_MRT3847_86448C.1.pep
SFEPFVFYIISLTSVNGTICVLQRRRMPVCEGFRPPVREHMQNQMHRLDYADRRVFLRRRSKRKQKPLRRGRY

SEQ ID NO: 270687 - protein, 512 aa, Glycine max
  unsure (1)..(512): unsure at all Xaa locations
  Clone ID: PAT_MRT3847_86449C.1.pep
CHRDGCILGDSPFFASVPSGGVGCGSGYRYSSNDEFKQFAXREIEDVASLEEKLGRALSKQERSRIGVSKLRLFLEELLQKRYISXIILIIPLLEHEYWTVTRKLSDINQELSTLDEAKLKEKGRAFHDMFLTKLSLLLKGTVVAPPDKFGETLQDERINGGAFIGADGVQFPHKLIPNAGMRLYGGAQYHRAMAEFRFLVGGIKCPPITREEIVNACGVEDIHDGTNYSRTACVIAVAKARDTFEPFLHQLGSRLLYILKRLLPISVFLLQKDSEYLSGHEVFLRRVASAFNNFAESTEKSCREKCMEDLVSTTRYVSWSLHNKSRAGLRQFLDSFGGTEHSNACNNPTATVLSQTSAHEKEDTKSQPDVKLSHVASGTDSSSSIQTTETKLADLLDSTLWNRRLAPSSERIVYGLVQQIFHGIREYFLVSTELKFNCFLLMPIVDKLPALLREDLESAFQDDLDNVFDITNLQHSFGQQKRETEIELKRIKRLKEKFRMIHEQLIQNQTM

SEQ ID NO: 270688 - protein, 265 aa, Glycine max
  unsure (1)..(265): unsure at all Xaa locations
  Clone ID: PAT_MRT3847_8644C.1.pep
LRIIKPCNHVLSLSFPIRRDDGSWEVIEGYRAQHSQHRTPCKGGIRYSTDVSVDEVKALASLMTYKCAVVDVPFGGAKAGVKINPKNYTDNELEKITRRFTMELAKKGFIGPGIDVPAPDMSTGEREMSWIADTYASTIGHYDINAHACVTGKPISQGGIHGRISATGRGVFHGIENFINEASYMSILGMTPGFGDKTFVVQGFGNVGLHSMRYLHRFGAKCVGVGESDGSIWNPDGIDPKELEDFKLQHGSILGFPKXQVYEGS

SEQ ID NO: 270689 - protein, 185 aa, Glycine max
  unsure (1)..(185): unsure at all Xaa locations
  Clone ID: PAT_MRT3847_86450C.1.pep
XXVXXXVLSCTLKHKIXXXXXLQTXXXKXQTTVKAVLVASLYREYGDXLKRMYRKNPTLSGEVIKVYQPSHEEHQKYNDNKHNMKAWIDMYLLSLSDELVTTSLSTFGYVAQGLGNLKPWLLYKLVNNETHFPPCERDFSSEPCYHFPPKHYCNGEPLKDIVSSFPYLRPCKDFRVGLKMVKDSI

SEQ ID NO: 270690 - protein, 88 aa, Glycine max
  Clone ID: PAT_MRT3847_86451C.1.pep
KVMDQKGLSVMVFSTNESTNKAVVCAGVPEKGGQGKLDVADWLSNALGPLKGRCGKGKGGLATGQGTEASHVNEAMDLAEKFASMKLS

SEQ ID NO: 270691 - protein, 593 aa, Glycine max
  Clone ID: PAT_MRT3847_86452C.1.pep
MRKICCLYWLCIWSDRCRPEELRILRENTNYWKVKKINSTEQRIGGFCPLTPKEVGIFLHALGYPPSTPIYIAAGVIYGGNTHLSELSSRFPSIIFKESLATPEKLTDGAIVMDADATSALHKRGIVPTNDSFKYAWFKDHESVVKAIYTGSEFVDTVNTGDDIGVVLESTSFYAEQGGQIFDTGSLEGPHALFEVRNVQVYGGFVLHIGNGTGVSVGDKVVCKVDYGRRALIAPNHTCTHMLNFALREVLGDHVDQKGSIVLAEKLRFDFSHGKPIEADNLRRIESIVNEQIKAELDVSAKEATLAEAKGINGLRAVFGEVYPDPVRVVSIGQKVEDLLADPKNEKWLSISSELCGGTHISNTREAKAFALLSEEGIAKGIRRITAVTTDRAYDAMKVADEFEQQVDDAAKLVGTLLEEKVSSLKSNIETLSIPAAKKADIKIKIVRLQDQVRKAQKQVAEENKRKAVMITAEKAELAVSNGKTFCISLVDVGLDVAAVREAVTKVMDQKGLSVMVFSTDESTNKAVVCAGVPEKGGKGNLDVADWLSNALGPLKGRCGKGKGGLATGQGTEASHVNEAIDLAEKFASMKLS

SEQ ID NO: 270692 - protein, 97 aa, Glycine max
  Clone ID: PAT_MRT3847_86453C.1.pep
KTKGGPLDPKKEPRPFHPQKGGGGKKKGGLGVFYRKTKMGGGARALKTGPPKGSPKQTTRLGLSSENAPPPLRGTAPPGGISVCPKRGEPKKHLWGG

SEQ ID NO: 270693 - protein, 83 aa, Glycine max
  Clone ID: PAT_MRT3847_86454C.1.pep
QASPGPSFSFSSSSLLHSPIPKKPLSHSKVLISKGRIQSSPLSVLPSITDPLGVNDSLRCKLFLTSGISTVNIGATLIRTMIP

SEQ ID NO: 270694 - protein, 163 aa, Glycine max
  unsure (1)..(163): unsure at all Xaa locations
  Clone ID: PAT_MRT3847_86455C.1.pep
VIWLLCIQIPFDETLALHATXEPRHSKYCHRFPWQHYAKVRTVLQELGYTAVPLHGCLRTEIQTPRSXKAMFKDPCIQLAAXVSKVLIELYNTIRIRRNCSTKLLLDHLXKPVQDLNTAIKSHPSTLVRPQTLAHPNHQHAHNTCPNSWNRTDMERPPFQVSK

SEQ ID NO: 270695 - protein, 60 aa, Glycine max
  Clone ID: PAT_MRT3847_86456C.1.pep
KIKTQGLGSFTGPMVGSIRAFGKMETPLERGVPFPPKEWSRKGYGMREKSSIGFKGGIFF

SEQ ID NO: 270696 - protein, 33 aa, Glycine max
  Clone ID: PAT_MRT3847_86457C.1.pep
LGGCKKGPGKYLDDLAALPFNREAAKQMGAKKV

SEQ ID NO: 270697 - protein, 41 aa, Glycine max
  Clone ID: PAT_MRT3847_86458C.1.pep
ARHIEENLVALELARSKVAFSTSPLQSHRVKFADLVNFANA

SEQ ID NO: 270698 - protein, 89 aa, Glycine max
  unsure (1)..(89): unsure at all Xaa locations
  Clone ID: PAT_MRT3847_86459C.1.pep
MASLPSGXXNGGSNGFDLGSGDILYSYDEEDYTNHDSSNGTHIDPTKDSHASRMGRTSIVPATAYSPSEDSLSQDVIATVEKSMKTHAD

SEQ ID NO: 270699 - protein, 124 aa, Glycine max
  unsure (1)..(124): unsure at all Xaa locations
  Clone ID: PAT_MRT3847_8645C.1.pep
LISPASSTGENVQHNATTTSKAASSDSENFAESVIKGPKQASGEHKNKRKIKVTFSSGQEQQNAPSQAVRKCLHCEITKTPQWRAGPMGPKTLCNACGVRYKSGRLFPESRPAASPTXCAAVHS

SEQ ID NO: 270700 - protein, 54 aa, Glycine max
  Clone ID: PAT_MRT3847_86460C.1.pep
MHKSTQSMSTKLSVERLNLICKYLQDNIIIKDTKTQPLHLAKLILHYRYHKQAP

SEQ ID NO: 270701 - protein, 68 aa, Glycine max
  Clone ID: PAT_MRT3847_86461C.1.pep
TQTPQMDIFLTNLLTDLPLSNRSSLRDSPWPCASRREACTIHPLSIPLNTHRSSMVQHYPSLVYVADP

SEQ ID NO: 270702 - protein, 108 aa, Glycine max
  Clone ID: PAT_MRT3847_86462C.1.pep
TQRVAPPDLRSPLVAFSHTRTLVAFSHTHTLVAFSHNRTLVAFSHTHTLVAFSHTRTLVSFSRKHTLVAFSHTRTLVAFSHTHTLVASSHTHTLVAFSQTHTLVSFSH

SEQ ID NO: 270703 - protein, 58 aa, Glycine max
  Clone ID: PAT_MRT3847_86463C.1.pep
MFASVVDGACEGSGVSGPILIPRRFVWPYGGTTVFLTGSFTRWSNHIAMSPMEGCPAV

SEQ ID NO: 270704 - protein, 68 aa, Glycine max
  Clone ID: PAT_MRT3847_86464C.1.pep
TPHLCRSRLPRLNSRMPVIKTQFSQRENQKKVLDVPGSSRRLKIREKAVLSEVFSKYGLKATLASKDN

SEQ ID NO: 270705 - protein, 184 aa, Glycine max
  unsure (1)..(184): unsure at all Xaa locations
  Clone ID: PAT_MRT3847_86465C.1.pep
CIIRRSHPESQIIGDPTYRVQTRLSLKTQGHTALIFEMKPKHIDEAIKDDNXMKAMQEELDQFQKNNVXKLVKLPKRKKVVGVKWIFCNKLDEDGKVVRYKARLVAKGYSQQEGIDYPKTFALVARLEVICILLSFATYSNMKLYQMDVKSAFLNGLIQKEVYVEQPPGFENETLHQHVFKLNK

SEQ ID NO: 270706 - protein, 84 aa, Glycine max
  Clone ID: PAT_MRT3847_86466C.1.pep
VAHTVSILPSPLLPPSPSTRGDVEETRSPATAVLVVVAEDPARRIAIFAITCVSWFWHGFSSFFVSALCSWRTRGPDGGRAGIG

SEQ ID NO: 270707 - protein, 354 aa, Glycine max
  unsure (1)..(354): unsure at all Xaa locations
  Clone ID: PAT_MRT3847_86467C.1.pep
MEPSQILSLRTTTTDPDHVKVIQWDDFQHDLARLASLSSALHEANEKKRNLQYKLEPLIQVNAESLGRLNELEEMRQKLESKKMVMENMSIRSRLAKEEASKQEEQLSGAVQSLLVAGGALSVTSRNLQESNRLLSEENGYVHLRKLQKMLRKRQQYMTSQISMLYPVKIVVGPAQEQELEAYPLGSLTGTSAGLKPINQGSLTIHGLHLNVLSFRKMSXXTXDKREIQXSATALGYVAHAVSLIASYLQVPLRYPLRLGTSHSYIIDNAPSTELTSSEASSNANINAKHVEFPLFLEGQDTTRAAYAVFLLNKDLEQLLNFIDAKSLGPRHVLANLRELLRTILSSAFIDNLI

SEQ ID NO: 270708 - protein, 129 aa, Glycine max
  Clone ID: PAT_MRT3847_86468C.1.pep
MEQTPKDVSRDHRTRVPQIVSWLETQLRALGQMTAKDVNKVETTEWCARVPQLVGWPETPECHGLASNAVESSGLDAPNDIVQGDFVFDAIAVAIHVTPGTTVSCDMAGFHGAAHRHDTLQHHYSSAIA

SEQ ID NO: 270709 - protein, 476 aa, Glycine max
  Clone ID: PAT_MRT3847_86469C.1.pep
MYSLSRYSSDLVVMKSVMSMGCSMEACHVATHRRAWSDMNCDCYCIKDEIPLNNSSQLHCWPNHGTLEFPANPQAVELWHTILWSLPCSHPLQSVLFTSKGVASSLFDVNHLTQSSQLCFQPTNNLWNSCSVVSTHILWGLFHSIQRGVNAESLGRLNELEEMRQKLESKKMLMENMSICSRLAKEEASKQEEQLSGAVQSLLVSGGALSVTSRNLQESSRLLSEENGYVHLRKLQKMLRKRQQYMTSQISMLYPVKILVGPAQEQELEAYPLGSLAGTSAGLKPINQGSLTIHGLHLNVLSFRKMSFFTDKKEIQNSATALGYVAHAVSLIASYLQVPLRYPLRLGASHSYIIDNAPSTELTSSEASSNANINAKHVKFPLFLEGQDTTRAAYAVFLLNKVPAVFALLQVILFPKLSSKINTYIDRLLVLHWCWLDLEQLLNFIDAKTLGPRHVLANLRELLRTIQSSAFIDNLI

SEQ ID NO: 270710 - protein, 41 aa, Glycine max
  unsure (1)..(41): unsure at all Xaa locations
  Clone ID: PAT_MRT3847_8646C.1.pep
RIQNTKLQHVYNRMIRNTXRSDRRVLTWSVVHPCDNIALST

SEQ ID NO: 270711 - protein, 75 aa, Glycine max
  unsure (1)..(75): unsure at all Xaa locations
  Clone ID: PAT_MRT3847_86470C.1.pep
XXXSXWXXXXCAXXTAXXXLXGXXPCXXXXGXXXXXXAXXIXSXXLXXLXXVXXXSXXISPRAEFXAYXRXXXCX

SEQ ID NO: 270712 - protein, 121 aa, Glycine max
  Clone ID: PAT_MRT3847_86471C.1.pep
NRLSINVPAAIDHVNRIRHSILDKSATIARSCVRPSVAGIVRVRDVDDVSLLCHRGLFCSSYSNNVVRQDNLCGSSLMFVTRMKAGFDLHVDIMVWCRTCAYLLRRPHSALAEVSTYRHSG

SEQ ID NO: 270713 - protein, 59 aa, Glycine max
  Clone ID: PAT_MRT3847_86472C.1.pep
HSSLQVQAPFLSLTCSSLGPKVFKYTLVRSMNQPISSSIVTGLHAAKGPTKPMDSLGLN

SEQ ID NO: 270714 - protein, 109 aa, Glycine max
  Clone ID: PAT_MRT3847_86473C.1.pep
SGIIVLFLCVLPLFHWEFSLCCVSSPFLGLGIFFSLCVFSHSWIGNFPSLCVFFRGQGLTFSPWVKVYGKLGFWLKACRTIGHDICQGLASGSGIKGMSYIISMIHMQQ

SEQ ID NO: 270715 - protein, 248 aa, Glycine max
  Clone ID: PAT_MRT3847_86474C.1.pep
MDTHAVHLALAAIVGASVVAVSAYYMHRKTLAQLLEFARTVEREADGGGGSDTEPPTAHLKKRLGSSRRRGNGGYRRGSASLPDVTAISGGFDGEEKRNGPVHVDGIPVGLPRLHTLREGKSSQSGSFKRSLLRPTSPKSPVASASAFESVEGSDDEDNMTGEVKLDTTYLHTNGTVVPEGKIPFETLPNHVNANGEQMAITPSMIRSHSVSGDLHGVQPDPIAADILRKEPEHETFTRLRITPLEAP

SEQ ID NO: 270716 - protein, 84 aa, Glycine max
  Clone ID: PAT_MRT3847_86475C.1.pep
KLLWLDFFFLATSCYWLCSGGCFFSLVIIYTVKDLIFKVRNRSFCLKYKRVFSIVFLNTLLCLSGLWALCLKLFGLYIAHMNIY

SEQ ID NO: 270717 - protein, 92 aa, Glycine max
  Clone ID: PAT_MRT3847_86476C.1.pep
GHATERKILFTRNVTKIKGNLQFYDQPIPCTYGRGKRTCCMLHKEKRKYSYMLAKSPHPPYLTLNMRKLNKTKTLINLPFPHKELPLNPIME

SEQ ID NO: 270718 - protein, 74 aa, Glycine max
  Clone ID: PAT_MRT3847_86477C.1.pep
ARAITILFFFFFHFQTYLHPGTVTISWHQKQMLPTPTVGSMLSTLATLSLMTPPTGVRLLKLCLGATYSRSRSC

SEQ ID NO: 270719 - protein, 74 aa, Glycine max
  Clone ID: PAT_MRT3847_86478C.1.pep
PFAIRAVHCCLFRSVRASSTITPAERQLNVVQADLVRSRHCFPSPNVVNLRPVILNLGRTIARASTLHACIRTL

SEQ ID NO: 270720 - protein, 44 aa, Glycine max
  Clone ID: PAT_MRT3847_86479C.1.pep
KLLYPPSRHRRTRFRPPSPPSFHVTHKVVINEVRVLENLSATKA

SEQ ID NO: 270721 - protein, 40 aa, Glycine max
  Clone ID: PAT_MRT3847_8647C.1.pep
MEIAIEAIDSWIENRKRVWLVLPQSPKDGFQKGVLPSGVI

SEQ ID NO: 270722 - protein, 435 aa, Glycine max
  Clone ID: PAT_MRT3847_86480C.1.pep
PRVRFGTGEDPWPIFKLQKEFNAPGKSPPLSAEFYTGWLTHWGEKNAQTDADFTAAALEKILQKNGSAVLYMAHGGTNFGFYNGANTGVDEADYKPDLTSYDYDAPIRESGDVDNSKFNAIRRVIARYSSVPLPSIPSNNEKARYGPIHLQREAFVFDMFDFTNSTNVFKSETPMSMEYVGQLFGFVLHVTEYKAKRGGRILFIPKLHDRAQVFISCPSEESGARPTYIGTIERWLNNKVTLPDIKCHSKINLFILVENMGRVNYGSFIFDRKGILSSVYLDKEQVKGWKMFPIPLHNLNEMSTYNPITQVAYSAFSGISSFRKKLIYKNGNTSKEPAFYSGHFLIDKSSQVKDTFISFNNWGKGIVFVNDFNIGRYWPLRGPQCNLYVPAPLLKQGDNFLVILELESPDPELVVHTVDEPDFTCGSSGTSLHQL

SEQ ID NO: 270723 - protein, 56 aa, Glycine max
  Clone ID: PAT_MRT3847_86481C.1.pep
GFPSTKMIVVKIVSGYQDSRAPFKKKSRAKFFSLSLITKSKKDAKRSPGFSSSIIT

SEQ ID NO: 270724 - protein, 57 aa, Glycine max
  Clone ID: PAT_MRT3847_86482C.1.pep
AMVTIIPGLVQCLGLLGHLQRIRQTYFLMVEDLQPNQMNRNNTSLRKICNAQSRLTT

SEQ ID NO: 270725 - protein, 82 aa, Glycine max
  Clone ID: PAT_MRT3847_86483C.1.pep
NLKQNQGTAQRALVRIYLKSANGSTRFQAVDASDASGKVRQAETSHRGESETEKDHGKRIIEFRWMPSKSQQLFFETERARG

SEQ ID NO: 270726 - protein, 141 aa, Glycine max
  unsure (1)..(141): unsure at all Xaa locations
  Clone ID: PAT_MRT3847_86484C.1.pep
GVLKVSLGIFDGDIAPGRASAAGNFLTATLDGMTFASDGPSAQAVVFGALMGGHWLIEGFWLGAILSLFYQKTSNPPKGPLPNKELEEFWNKGVPNPLIPLVIXEVPDEPPMPGRAAGPHTLINGEEGGNFALTNYLGVIG

SEQ ID NO: 270727 - protein, 43 aa, Glycine max
  Clone ID: PAT_MRT3847_86485C.1.pep
VGGGGFYLMITIMGELLINRHMCLHNSIMIMTFINTCLKIYMI

SEQ ID NO: 270728 - protein, 110 aa, Glycine max
  Clone ID: PAT_MRT3847_86486C.1.pep
MYMITMRPSSDHPSRPDALRSNRRNGGDRSPFNPAIVLRGGAATAEDESRGIELYYDDSPFSGHRPTPPSMKEFLLETGLDRHLEQLSYIEINHIEQKKHPPAPTPPLDP

SEQ ID NO: 270729 - protein, 108 aa, Glycine max
  unsure (1)..(108): unsure at all Xaa locations
  Clone ID: PAT_MRT3847_86487C.1.pep
SSPEGLTHSLPPPPCPNQNISPSAQVRKIRALPWVRKRTMNKFQGFQALAGNIFSYTCAFLLERVSGECVYKKPAGEAPKKYCFFLKKKKKKKKRPXAPSLEDPSLFF

SEQ ID NO: 270730 - protein, 146 aa, Glycine max
  Clone ID: PAT_MRT3847_86488C.1.pep
PPLGLYTPPGFPPQKFPKKIMGPPPLFFVQILVPPPLFLSFDYGFGPVAPSETLPVFPFCPPVKFPLPDFFFFQPPPLPKNGFFLGPPSFPPPIFPPPPLMGAPDGSFPPCFCFFSPFCPGGGGFSLPVLPGVGLIPLLFPGFLGI

SEQ ID NO: 270731 - protein, 60 aa, Glycine max
  Clone ID: PAT_MRT3847_86489C.1.pep
KKGRVFLMGFLGIGSLKGPVLAFGAPKKTVHWAPKNSTILFSWLNKIFFNGELDEKAFGR

SEQ ID NO: 270732 - protein, 92 aa, Glycine max
  Clone ID: PAT_MRT3847_8648C.1.pep
MRMSCNGCRVLRKGCSEDCSIRPCLQWIKNPESQANATVFLAKFYGRAGLMNLINAGPENLRPAIFRSLLYEACGRIVNPIYGSGLFSRLHV

SEQ ID NO: 270733 - protein, 543 aa, Glycine max
  Clone ID: PAT_MRT3847_86490C.1.pep
MVERRVFDLVRDLFGRGVERGYDELLQIAEYKETCHKSLAKASGTSDLKELIITAFNATAEEIAKQIKNSTLYHELATDDMTKQAMDICKEVLGYAVDDMHQSVRKLEEFELNKLNDYAYDLKVWIAGTLAHQQTCLDGFENTTNEAGKTMARVLNTSLELSNNALDIVNGVSNLFKGLNLSSFSNNNNRKLLSEVDGFPTWVSEGQRRLLQAADAKADVVVAQDGSGQVKTIHEALKLVPKKNKKPFVIYVKAGVYQEYIMINKHLTHVTMIGDGPTKTRITGSKNYVDGIKTYNTATFGVNAANFMAMNIGFENTAGAEKHQAVALRVTADKAVFYNCNMDGFQDTLYTQSQRQFYRDCTVTGTIDFVFGDVAWMVSDCKDTGRNSMENQQCMVTAGGRTKIDSPSALVFQSCIFTGEPDVFALSPKIAYLGRPWRVYAKVVIMDSQIDDIFVPEGYMPWMGSAFKDTSTYYEFNNRGFGANTQGRITWPGFKVITPIEATDYYPGKFFEIANSTERDSWIVGSGVPYSLGPIIALPLPTA

SEQ ID NO: 270734 - protein, 72 aa, Glycine max
  Clone ID: PAT_MRT3847_86491C.1.pep
QIAIKHTNMEETCSRAGFGKKFTKAKPYLLTGGLQFGFAGGYIFFVASLNHGMRAYVFGGYTMPLLHWPLLF

SEQ ID NO: 270735 - protein, 57 aa, Glycine max
  unsure (1)..(57): unsure at all Xaa locations
  Clone ID: PAT_MRT3847_86492C.1.pep
YQYIXDVLIALAYYSITTLLMNFKHMAARFPYRWMLIQFVAMIALSRATHFINLSTF

SEQ ID NO: 270736 - protein, 57 aa, Glycine max
  Clone ID: PAT_MRT3847_86493C.1.pep
VFDQRWQNCFGGPVFQCVASVGGPLQHYCLAQQVSASFGGLFLWFNTTQPSISTVPF

SEQ ID NO: 270737 - protein, 48 aa, Glycine max
  Clone ID: PAT_MRT3847_86494C.1.pep
NGHRTCSWQSSGDSDKRHIDSTLPNMTYNSMIYYKTVIDKKINNMKKR

SEQ ID NO: 270738 - protein, 76 aa, Glycine max
  Clone ID: PAT_MRT3847_86495C.1.pep
TPSQKLCPDQDLGGGGKTQGVPEGPRLTPPHLLSKMGAPFLYRALTKGGKREKQLLRGGYKKPPRSGERRGVAPGK

SEQ ID NO: 270739 - protein, 92 aa, Glycine max
  unsure (1)..(92): unsure at all Xaa locations
  Clone ID: PAT_MRT3847_86496C.1.pep
MFCVRVCNFSDLKMSCCGENCGCRSCXQCRNGXDXCNMLPDLSYTXVTTTETLVMGVAPVKAQIEGSEMGVPTENDGCTCGPDXYCNPCTSK

SEQ ID NO: 270740 - protein, 80 aa, Glycine max
  Clone ID: PAT_MRT3847_86497C.1.pep
VKGCARLNHSPAMNCCFLRRFGRFGTVWTAAFGSTLSCSNDSALFRASVASSVPEPLHKSLWLTCPVLRDVSPQSSPFLD

SEQ ID NO: 270741 - protein, 233 aa, Glycine max
  unsure (1)..(233): unsure at all Xaa locations
  Clone ID: PAT_MRT3847_86498C.1.pep
MNRWSGGRGRKPRRRAWCCSFAIPPSSPEVNTIPHSKSRHKNKTESFSKPSVVSVPNSPQSAKSGFPIVGRIDPRRILSPGRVSPIDSDPAPAASQLRSHSFRDSSPPPPESAAALDVKLKLRGRSGGSMVVEVESEVLGANSEVFAGLIADCKRGVGGATMEVENLGVFRDTIELMFEDDDRITKTLINVGVSRSIDILEVSAGNXLLKGVRCCLKYLXAVPLTEGGEEKLR

SEQ ID NO: 270742 - protein, 60 aa, Glycine max
  Clone ID: PAT_MRT3847_86499C.1.pep
DAQWLDDHPMLTIKPPVDHWLGLPRSQSLSSIQRDFTPLDDGLCALGLCSFRTALLRCCF

SEQ ID NO: 270743 - protein, 85 aa, Glycine max
  Clone ID: PAT_MRT3847_8649C.1.pep
MGKDDRYTKRLIYGQGECKVEALDRYIRTDNLGFCGLSYDVVAVVGRHRRGTSTLMNHLLHAPSRKLDKLRGRPETHKDIVIDNA

SEQ ID NO: 270744 - protein, 72 aa, Glycine max
  unsure (1)..(72): unsure at all Xaa locations
  Clone ID: PAT_MRT3847_864C.1.pep
MKVKLSTPPPYKYPCSPPPPKKPYKYPSSPPPIYKYKIRGGPXKYKNXSPPPPPYNSFFLWTPKLQDMAGIL

SEQ ID NO: 270745 - protein, 65 aa, Glycine max
  Clone ID: PAT_MRT3847_86500C.1.pep
ISFPLYLTFHFYTHQKTHPFAFSTIEEGAFSIPPSFSSNLNTPITLPIPLFGSPFYSFETYLSFF

SEQ ID NO: 270746 - protein, 76 aa, Glycine max
  Clone ID: PAT_MRT3847_86501C.1.pep
MCILVGVKRVIDFAVKVRVKKDGTGVAKDGVNHSMNPFCEIVLEEAVRIKERKENDGGGPVGDFTFLFWHTKSTGN

SEQ ID NO: 270747 - protein, 215 aa, Glycine max
  unsure (1)..(215): unsure at all Xaa locations
  Clone ID: PAT_MRT3847_86502C.1.pep
MATKEGKAIGIDLGTTYSCVGVWQNDRVEIIPNDQGNRTTPSYVAFTDTERLIGDAAKNQVAMNPQNTVFDAKRLIGRRFSDSPVQNDMKLWPFKVVAGPGDKPMIVVNYKGEEKXFSAEEISSMVFVKMREVAEAFLGHAVKNAVITVPAYFNDSQRQATKDAGAISGLNALRIINEPTVAAIAYGLDKKASRKGEQNVLIFDLGGGTFDVSIL

SEQ ID NO: 270748 - protein, 48 aa, Glycine max
  Clone ID: PAT_MRT3847_86503C.1.pep
HIKLFQLLSKSNSIKKHLNFYQQVFSLLMNLISLSETLDSKSCTIIIV

SEQ ID NO: 270749 - protein, 243 aa, Glycine max
  Clone ID: PAT_MRT3847_86504C.1.pep
MATKEGKAIGIDLGTTYSCVGVWQNDRVEIIPNDQGNRTTPSYVAFTDTERLIGDAAKNQVAMNPQNTVFDAKRLIGRRFSDSSVQNDMKLWPFKVVAGPGDKPMIVVNYKGEEKKFSAEEISSMVLVKMREVAEAFLGHAVKNAVVTVPAYFNDSQRQATKDAGAISGLNVLRIINEPTAAAIAYGLDKKASRKGEQNVLIFDLGGGTFDVSILTIEEGIFEVKATAGDTHLGGEDFDNRMV

SEQ ID NO: 270750 - protein, 269 aa, Glycine max
  Clone ID: PAT_MRT3847_86505C.1.pep
MTMMSSSNNNVGEFGDTTLTKVFVGGLAWETPKDALKDHFEKYGQILEAVIISDKHTGKSKGYGFVTFKEAEAAKKACENSTTLIINGRRANCNLAFLGARRPRSSSNVSPPPPQAQGGSNGGIVKNVNNASGPPPAINHVQPYYYPVRTTALPFHNHTLPFYGYAPTYIVTDVNYNYNQNQKLCYGSGGAYMNGQHVYPRQAIVGGNTLMPMYPLYQYHHPTETIGVPAHHNFYQTAPWVPMTIMSKPSSIVPHTGTVGTGECFKRVV

SEQ ID NO: 270751 - protein, 42 aa, Glycine max
  Clone ID: PAT_MRT3847_86506C.1.pep
EVLVKHIRSPCYINLCHHVFFATQVQKLSLVILHFKLAFWTG

SEQ ID NO: 270752 - protein, 39 aa, Glycine max
  Clone ID: PAT_MRT3847_86507C.1.pep
HVEQITILPIKLFYIITSYWSLSDTFFDPHLRLEYLSYL

SEQ ID NO: 270753 - protein, 63 aa, Glycine max
  Clone ID: PAT_MRT3847_86508C.1.pep
SGGGPDSKRGGEQQLNRPQQHTNHKHVSMNPPLGLGGAGLSNGVLGGEGGSITYYYTIYKRVT

SEQ ID NO: 270754 - protein, 50 aa, Glycine max
  Clone ID: PAT_MRT3847_86509C.1.pep
LLLKLRFYFSFEKNKKQIRRGLQKKWVCQIAKTNSTDASLRSYKTHIFLP

SEQ ID NO: 270755 - protein, 35 aa, Glycine max
  Clone ID: PAT_MRT3847_8650C.1.pep
APFFFFFFFGYQTQLSFIPFNKFLDMILLHRFLVR

SEQ ID NO: 270756 - protein, 361 aa, Glycine max
  Clone ID: PAT_MRT3847_86510C.1.pep
MEVKKVFFVALSFALVLRVAESFEFNEKDLESEEGLWDLYERWRSHHTVSRSLDEKHNRFNVFKGNVMHVHSSNKMDKPYKLKLNRFADMTNHEFRSIYAGSKVNHHRMFRGTPRGNGTFMYQNVDRVPSSVDWRKKGAVTDVKDQGQCGSCWAFSTIVAVEGINQIKTHKLVPLSEQELVDCDTTQNQGCNGGLMESAFEFIKQYGITTASNYPYEAKDGTCDASKVNEPAVSIDGHENVPVNNEAALLKAVAHQPVSVAIEAGGIDFQFYSEGVFTGNCGTALDHGVAIVGYGTTQDGTKYWTVKNSWGSEWGEKGYIRMKRSISVKKGLCGIAMEASYPIKKSSSKPREHSSYPKDEL

SEQ ID NO: 270757 - protein, 262 aa, Glycine max
  unsure (1)..(262): unsure at all Xaa locations
  Clone ID: PAT_MRT3847_86511C.1.pep
RKSLSLDQFVVPQTVFALTDKPVCSFLGHLHDVLDLSWSKTQHLLSSSMDKTVRLWHLSSKSCLKIFSHSDYVTCIQFNPVDDRYFIXGSLDAKVRIWSIPDRQVHASADLHEMVTAACYTPDGQGALVGSYKGSCHLYNTSENKLQQKSQINLQNKKKKSHHKKITGFQFAPGSSSEVLITSADSRIRVVDGVDLVHKFKGFRNATSPISASLTANGKYVVAASEDSHVFIWKNEADCRPNRSKGVTVTRSYEHFHCKDVS

SEQ ID NO: 270758 - protein, 146 aa, Glycine max
  Clone ID: PAT_MRT3847_86512C.1.pep
RSRVLLETMMEEVINSIRRACVLAQNLEQDLPNLANQPAMMSLSIDQITEAFSGAKEKMLQFSRQNQTWDESPPTLVHETTQLQPQMDATLMQEWLRSSHALTMDQLFQMHQFHAARSTLQIGEMGGRDGKIILRETRDLKKWQES

SEQ ID NO: 270759 - protein, 78 aa, Glycine max
  Clone ID: PAT_MRT3847_86513C.1.pep
SVKKEQTNHGHAKAKNTAAITSYHNYIQRNDDKGNSSCHYLIHAITLPEGACNKQRSRGLKNKIKIHQLSPKYGHGFQ

SEQ ID NO: 270760 - protein, 75 aa, Glycine max
  unsure (1)..(75): unsure at all Xaa locations
  Clone ID: PAT_MRT3847_86514C.1.pep
GXVCLXTTDAYQAXQLXKLXCWDRXXXGAVKLFTFSFLXLRKEAFVLPKSDPXXVXXXCGRWQQLXWQRKHTRKP

SEQ ID NO: 270761 - protein, 63 aa, Glycine max
  Clone ID: PAT_MRT3847_86515C.1.pep
ARVASSPDSDLEAFSHNPTHGSSRHWLSQARTLCITSSRLVILLRHVIIGNYARANHQSMWES

SEQ ID NO: 270762 - protein, 63 aa, Glycine max
  Clone ID: PAT_MRT3847_86516C.1.pep
WGRILWVFNWNLKSICTGLKHKIGPNFIRENQMVYFKMQTLLPTKTLTLMLQPLKGCFCSELV

SEQ ID NO: 270763 - protein, 153 aa, Glycine max
  Clone ID: PAT_MRT3847_86517C.1.pep
FTETWARTPMPTLRKMAKPLVFTSGRGLHAYNSKVLHAMLYGMTLQEMTNGEEHIYFSLILAWVAVALSFWNAFHTGTTLHDGRIGGALIRQGVYARLHLVRYSLTRSVTGFDSYQATRIDTSWCDCLLGWRCVLYMMRILHQRWCFIEHPGA

SEQ ID NO: 270764 - protein, 53 aa, Glycine max
  Clone ID: PAT_MRT3847_86518C.1.pep
GGFFFFFFFLGNNFVNISTGRFELGVPIQRVNPRISYIFLNTGFRLRKIFKCR

SEQ ID NO: 270765 - protein, 52 aa, Glycine max
  Clone ID: PAT_MRT3847_86519C.1.pep
RGRFLFFLSFFLVKLKQQPGPSTRADASSLNRGERELDHFKGQNPDFSNKIR

SEQ ID NO: 270766 - protein, 168 aa, Glycine max
  Clone ID: PAT_MRT3847_8651C.1.pep
PTAKVRFRPLASLWRGKFVFDAVLSHPCVLVVQKKDYSWLGIPLSQGGIQRRLSTNEGLDHRTKVRRVAREEAAAKHVRDRDDAAREAAEMGYFVSEKNCGPSKGDDNLKEIATHSVGGTNSKGFFCMKKVEQHGHRCVDTGVDYDMKHADLEESFRVKFPEKGLKFW

SEQ ID NO: 270767 - protein, 93 aa, Glycine max
  Clone ID: PAT_MRT3847_86520C.1.pep
PNFLEGSQLMPQKHFTGSSTKMKVWSLLAALAFTLLLVVSSTEVNYSLTFRVKSSSHQALKDLRGHRKDPSKHVVESCFRAIPPSKSNPTQNK

SEQ ID NO: 270768 - protein, 66 aa, Glycine max
  unsure (1)..(66): unsure at all Xaa locations
  Clone ID: PAT_MRT3847_86521C.1.pep
LXLXXFXFPLXXCPSAVGXCXPXXFXLPSPSPGPFFWAPXSXPXCCCWLVXXXXXIXLVXXXXRVG

SEQ ID NO: 270769 - protein, 41 aa, Glycine max
  unsure (1)..(41): unsure at all Xaa locations
  Clone ID: PAT_MRT3847_86522C.1.pep
SPSSLQVLESKCKLFSLASQKNETHLXQTKRKCKXNSGYXR

SEQ ID NO: 270770 - protein, 54 aa, Glycine max
  Clone ID: PAT_MRT3847_86523C.1.pep
SLNRSHYSFSHSFTLCCPFCLFSNSSHRRGTPEVLQKVSRIHAGPREQTSLCLI

SEQ ID NO: 270771 - protein, 827 aa, Glycine max
  unsure (1)..(827): unsure at all Xaa locations
  Clone ID: PAT_MRT3847_86524C.1.pep
MPQSSPISPMPQSTTVNTKALGVSGNGFSSNSVLGNDFFSAASLTPKQEPAGLSYSVSNVSSAIVPVSTAPQPAIKQNSLDSLQSAYSSMLPANSQFQRAQSAPNISQQISPPASSSPNTPSGLGNANSDNSQLSWPKMKPTDVQKYTKVFMEVDTDRDGKITGEQARSLFLSWRLPIDVLKKVWDLSDQDNDSMLSLKEFCFALYLMERYREGRPLPQSLPSNVMFDETLMSMTGQPKSAYGNAAWGIGQGFRQQQGIPGARPVAPTAGLRPSVHGSFARADGTQQPNQQKSGTPVLXESFLNRAENGEQNILNSKPQEATTAEKKFEETQNVILDSKEKLELYRNKMQELVLYKSRCDNRLNEITERASADKREAESLGKKYEEKYKQVAXVSKLTVEEAKFRDIQDRKVELQQAIVKMRLEGSADGILQVRAERIQSDLEELFKALAERCKKHGLDVKSITMVQLPAGWQPGIPEGAALWDEDWDKFEDEGFANDLTYTSSKPKSAFIDGEQNLSDDNSVHGSPVNANGKQENSANGDYTVEDESYAHSEDDLARIPHSLAGRSTVESPSQDFSNSHFGKSFEADAETHRSFDESTWGAFDNNDDVDSVWGFNTKTKDSDFEQRDFFKSDDFGINPVRTGSTHTDGTFQTKSPFAFDDSVPATPVSKFAFDDSVPATPVSKFENSPRYSEAGDHFFDMSRFDSFRHESGYSPQPERLTRFDSISSSKDFGYNNHKFTRFDSISSSKDFGSNPETLTRFDSMSSSNDFGFGRQGHARFDSISSTKDFGHSGPFSYDDSDPFGSSGPFKVSSENHSPKKARRKAGR

SEQ ID NO: 270772 - protein, 102 aa, Glycine max
  unsure (1)..(102): unsure at all Xaa locations
  Clone ID: PAT_MRT3847_86525C.1.pep
GVAYTEKDVKAMAAEIEVVDGPNDEGKMFTHPDKLSDRFPHPYANEAAAKFANGRSYPPDLSLVTKSHHNGQNYIFSLLTNYHNPPTNVSIREXLHYNPYFP

SEQ ID NO: 270773 - protein, 527 aa, Glycine max
  unsure (1)..(527): unsure at all Xaa locations
  Clone ID: PAT_MRT3847_86526C.1.pep
LEPNRLEQNVILDSKEKLELYRNKMQELVLYKSRCDNRLNEITERASADKREAESLGKKYEEKYKQVAEIVSKLTTRXVEEAKFRDIQDRKXLQQAIVKMVQGGSADGILQVRAERIQSDLEELFKALAERCKKHGLDVKSITMVQLPVGWQPGIPEGAALWDEEWDKFEDEGFANDLTFASSKPNPAFIDGEQNLSDDNSVHGSPVNANGKQENSANGDYTVEDDPXAHSEKDVKITGEQARSLFLSWRLPIDVLKKVWDLSDQDNDSMLSLKEFCFALYLMERYREGRPLQSLFQAMFSVSGQGGLCKADDFGINPVRTGSTHTDGTFQTKSPFAFDDSVPATPVSKFAFDDSVPATPVSKFEHTPRSTEAGDHFFDMSRFDSFRHESGYSPQPERLTRFDSISSSSKDFGYNNDKFTRFDSISSSKDFGYNNDKFTRFDSISSSKDFGYNPETLTRFDSMSSSTDLGFGRQGHARFDSISSTKDFGHSGPFSFDDSDPFGSSGPFKVSSENHSPKKGSDNWSAF

SEQ ID NO: 270774 - protein, 420 aa, Glycine max
  Clone ID: PAT_MRT3847_86527C.1.pep
DRKVELQQAIVKMVQGGSADGILQVRAERIQSDLEELFKALAERCKKHGIDVKSITMVQLPAGWQPGIPEGAALWDEEWDKFEDEGFANDLTFASSKPNPAFIDGEQNLSDDNSVHGSPVNANGKQENSANGDYTVEDESYAHSEDDLARSPHSLAGRSTLGSPSRDFSNAHFGKSFEADAETHRSFDESTWGAFDNNEDVDSVWGFNTKTKDSDFEQGDFFKSDDFGINPVRTGSTHTDGTFQSKSPFAFDDSVPATPVSKFAFDDSVPATPVSMFGNSSRYSEAGDHFFDMSRFDSFRHESGYSPQPERLTRFDSISSSKDFGYNNHKFTRFDSISSSKDFGSNPETLTRFDSMSSSNDFGFGRQGHARFDSISSTKDFGHSGPFSFDDSDPFGSSGPFKVSSENHSPKKGSDNWSAF

SEQ ID NO: 270775 - protein, 48 aa, Glycine max
  Clone ID: PAT_MRT3847_86528C.1.pep
LSYVSLYLSFFININWSFLLYHEFLIYVNYNIVDCDHFCSFIVEIKFH

SEQ ID NO: 270776 - protein, 57 aa, Glycine max
  unsure (1)..(57): unsure at all Xaa locations
  Clone ID: PAT_MRT3847_86529C.1.pep
IPQFRTLITAWXIQTDSVCAVPALXRSSAXXIXNCATXXTSXINYEVLXSXTIDSPX

SEQ ID NO: 270777 - protein, 236 aa, Glycine max
  Clone ID: PAT_MRT3847_8652C.1.pep
MAIENQDTAVREIKPKNRRIMGAGGPDDEDNRWPPWLKPLLKESFFVQCKLHADSHKSECNMYCLDCMNGPLCSLCLAHHKDHRAIQIRRSSYHDVIRVSEIQKVLDITGVQTYIINSARVVFLNERPQPRPGKGVTNTCEVCERSLLDSFRFCSLGCKIVGTSKNFQKRKKQSMAMSSDSEDSYSSNSVHGLKKNCKVQSFTPSTPPPTSVNYRTAKRRKGIPHRAPMVGLIIEY

SEQ ID NO: 270778 - protein, 42 aa, Glycine max
  Clone ID: PAT_MRT3847_86530C.1.pep
KYSTEARILKKDAAQYLRYCKSLKKARPLCNSMINTDQDSLS

SEQ ID NO: 270779 - protein, 59 aa, Glycine max
  Clone ID: PAT_MRT3847_86531C.1.pep
KRVFLGSRLRSCLFGILKGKKGYKTTFPDFVTMHTLKEKEEYAGFVVVLVINIEVLVVF

SEQ ID NO: 270780 - protein, 120 aa, Glycine max
  unsure (1)..(120): unsure at all Xaa locations
  Clone ID: PAT_MRT3847_86532C.1.pep
APDDDKTASILKILDPPIRLIKDTASEEKIKDLXSRDIMLEHYSIHSYSLKSGXNVQYCEGPHQXDGFCDYPKRQRGPASTDLLSADQSTADVEENTIPLYPIFPKLSGEEGHCFSALAE

SEQ ID NO: 270781 - protein, 51 aa, Glycine max
  Clone ID: PAT_MRT3847_86533C.1.pep
YMNVLKRVSCFCIKKGQNGSRPLVTVKVLIDLSKAFFHISCVCKTNEKIIK

SEQ ID NO: 270782 - protein, 47 aa, Glycine max
  Clone ID: PAT_MRT3847_86534C.1.pep
TPIAACEIRNIPDFFAHQTKNQYSSKPPSIENCPRPTKTLVWKVPAT

SEQ ID NO: 270783 - protein, 49 aa, Glycine max
  Clone ID: PAT_MRT3847_86535C.1.pep
NSGWIEGKTLRTSMIIKIENPLVGFYSGGKSKAFSLNLSLIFHVRMEPF

SEQ ID NO: 270784 - protein, 59 aa, Glycine max
  unsure (1)..(59): unsure at all Xaa locations
  Clone ID: PAT_MRT3847_86536C.1.pep
TNIQYTHTHHSSLIIXIYYTPLLLIILTLTIFFILIHIIKKNHFNSLHDKLPRTKNVIF

SEQ ID NO: 270785 - protein, 114 aa, Glycine max
  Clone ID: PAT_MRT3847_86537C.1.pep
HIPTDPKSKTPHFLYSLMNHPLLAREKNPFLVIMILTKVGEQLMKQRPIFSEIKEVNNAVSNLLVASDEVRHDAAKELQTKLSVLEKLSDDIRKEVDNLFANVMTQTLYFCGCF

SEQ ID NO: 270786 - protein, 115 aa, Glycine max
  Clone ID: PAT_MRT3847_86538C.1.pep
EVPIQWHNSTHYYFISTSGGTHTHTSAACGLPTPTPYRLVEPVQVIEVSSSEEDLEEDPEELPLEPDMDNLDLPEDDEDPLPDVDYPEDIMSASEADSTEESGPGGIANSDDSSS

SEQ ID NO: 270787 - protein, 54 aa, Glycine max
  Clone ID: PAT_MRT3847_86539C.1.pep
ILVHRGVGCGGYSCVLLEQNSMMQKQEGSMTWKKLRLMPKPTKGNSNTIAQASS

SEQ ID NO: 270788 - protein, 154 aa, Glycine max
  Clone ID: PAT_MRT3847_8653C.1.pep
NSRRPTRPVLARDLAQIDVNDRELIALKAVIKCIEDHKLDDQYPLDPLQKRATQLEKAKADKKRVTEATKPQPKRPRANGVGYGPRVTNILSDKTSYARVADRYPQYVYDRPYMYPAPTDNHCPPLMGSATYNISPNPGNYFGNGYQYQATYLH

SEQ ID NO: 270789 - protein, 65 aa, Glycine max
  Clone ID: PAT_MRT3847_86540C.1.pep
FHESLNYYLLFCVPFLKGKKITLCAGHRLRESFSFTFVVDLLYTLLFDKGTYVTFKPCTVSFSDL

SEQ ID NO: 270790 - protein, 147 aa, Glycine max
  unsure (1)..(147): unsure at all Xaa locations
  Clone ID: PAT_MRT3847_86541C.1.pep
YLQLQERHTQQFLGLFLLYAKLFTNQFLWLHTLAILLWSTPAHAGFMSGISGIXAIPDPQLSPNDFLKQLNEQNQXRYAENDERIKXNPLMKELLEKSKLNKEKYRKESKNKYXISGSRWGIGFNPTAXRSTDEREKFLIKLRKKAE

SEQ ID NO: 270791 - protein, 66 aa, Glycine max
  Clone ID: PAT_MRT3847_86542C.1.pep
GPSCTESVSYTARLEGVPETFIHRASLLREACQGQFRLSLVNKKICEQFGRCTMDVRERNLKVDLL

SEQ ID NO: 270792 - protein, 78 aa, Glycine max
  Clone ID: PAT_MRT3847_86543C.1.pep
QTLFVNLLPLTNIHCSTTQVALACPYALPLLSSLSAFFRSCYLSLSRWLDSLSLFFSLHCPSFAAVVLLFFSMLTLFY

SEQ ID NO: 270793 - protein, 60 aa, Glycine max
  unsure (1)..(60): unsure at all Xaa locations
  Clone ID: PAT_MRT3847_86544C.1.pep
MSCGGGNCGCXSSCKYCDCIGGCKMXAELSYIESTIXETVVMGVDTDKAQIDGADMGVSA

SEQ ID NO: 270794 - protein, 93 aa, Glycine max
  Clone ID: PAT_MRT3847_86545C.1.pep
KRRFCSQGRKPSKNSFKGFWRPSLLKNCHPMSKKVFFFLLQPPFFLGSQLGFPPPRCCRFVLPPPEGVDPPWLGPRLLFFPEMGVPPNWAPVN

SEQ ID NO: 270795 - protein, 75 aa, Glycine max
  unsure (1)..(75): unsure at all Xaa locations
  Clone ID: PAT_MRT3847_86546C.1.pep
MPCSGGNCGCGISCSXGYGCRGCMILPDLSYRESTMTETLVMRVAPFKAQFESAEMGVPADNDGCICGSNCTCNT

SEQ ID NO: 270796 - protein, 55 aa, Glycine max
  unsure (1)..(55): unsure at all Xaa locations
  Clone ID: PAT_MRT3847_86547C.1.pep
KRXVGXTHXVGEMEAKDERTRXEKMXXDXXXXIVVKMEVXXXILSPMXMLPCIVX

SEQ ID NO: 270797 - protein, 98 aa, Glycine max
  Clone ID: PAT_MRT3847_86548C.1.pep
FIEEIVSSTEEGDESDENEIIFQQLNCLELEGLRKLRRFYKGSLSFPSLEEFTVLFCERMEGLCAGTVKTDKLLQVTFKWNEDAIPLETDLNSAMQNR

SEQ ID NO: 270798 - protein, 172 aa, Glycine max
  Clone ID: PAT_MRT3847_86549C.1.pep
SRVRGRVGLETLQVISCFNSINLVPCTVSFSNLTYLKVYSCKSLLYLFTSSTARSLGQLKTMEIGWCDSIEEIVSSTEEGDESDENEIIFQQLNCLKLEYLFKLRRFYKGSLSFPSLEEFTVLYCERMKSLCAGTVKTDKLLQVTFEWRHDIQLEGYFIPLETDLNSAMQNR

SEQ ID NO: 270799 - protein, 91 aa, Glycine max
  Clone ID: PAT_MRT3847_8654C.1.pep
MARWCILVVLALVVVASARNMPNDAGLEDQKNFLGYGFSGVGNNGLPFGGVGSGFDGNMGGPSGLGGFGGFGGPSGLGGLGNGEGPNLPLP

SEQ ID NO: 270800 - protein, 137 aa, Glycine max
  Clone ID: PAT_MRT3847_86550C.1.pep
SSSNLTYLKVESCKSLLYLFTSSTARSLGQLKTVKIKRCDSIEEIVSSTEEGDESDENEIIFKQLNCLKLKYLGKLRRFYKGSLSFPSLEEFTVKYCKRMESLCAGTVKTDKLLEVIFEWRDHIPLETDLNSAMQIR

SEQ ID NO: 270801 - protein, 170 aa, Glycine max
  Clone ID: PAT_MRT3847_86551C.1.pep
LEPIRLEARTVGVAVDFSPTSKLALRWAVDNLINKGDQIILITVQPPQAHHTRKELFEDTGSPLVPLEELRELNFTKQYGIARDPEVIGILDTASKTKGAKAVAKVYWGDPREKLCNAVEDLHLDSLVVGSRGLGPIKRVLLGSVSKHVMTNASCPVTVVKGKQSSNSRH

SEQ ID NO: 270802 - protein, 106 aa, Glycine max
  Clone ID: PAT_MRT3847_86552C.1.pep
ARNSARGDSIEEIVSSTEEGDESDENEIIFQQLNCLVLEHLGKLRRFYKGSLSFPSLEEFTVKYCKRMESLCAGKVKTDKLLQVTFHWSEGVIPLETDLNSAMQKR

SEQ ID NO: 270803 - protein, 897 aa, Glycine max
  Clone ID: PAT_MRT3847_86553C.1.pep
MHRLKELNLYYVNDDERLCQILYRMPNLEKLYLSGAKYLLKESSESRLGTVLQLKELDLWWSEIKDIGFEREPVLQRLELLSLHWCHKLRNLAPPSVSLAYLTNLKVEYCKGLRNLMASSTAKSLVQLKSMKIRKCYELEEIVTNKGNEEAEQIVFGKLITIELEWLIKLKSFCSYKKCEFKFPSLEVLIVRECPWMERFTEGGASAPKLQNIVSANEEGKEEAKWQWEGDLNATIQKGFNKLLESASTESSLSLIDSPLQVIWLDSGRIPKSCFSNLNSLTVDGCQFLTDVVIPFYLLPFLTNLEELQVRKCGSVESIFDVKTAMGLGAAAFPRPLPFSLKKLTLEWLPKLENVWNEDPHGILTMQLLQHVKVKNCKCLTSVFPASLAKDLEKLVVKDCEGLIEIVAEDNADPREANLELTFPCPCVSSLKLQGLPKFKYFYYCSLQCDMFQTPTEDEMPTSNLQCLSLGEIGLEMIKRGEFQTNFLHKLQVLTLCFHIGSNVFPYEILQLAPNIEKLVVYDGSFKEIFCFDSLNVDEAGLLLQLKVLCLESLPELVSIGLENSWIQPLLGNLETLEVIRCSSLKDLVPSTVSFSNLTHLQVQDCNSMLYLFTSSTARSLGQLKRMEIKRCGSIEEIVVSKEGGESHEEEIIFPQLNCLKLEYLSKLRSFYKGSLLSFPSLEELSVMECEWMETLCPGTLKADKLLQVQLNRDLYELEESSDAIKLENDLNSTMREAFGKNSINLVPCTVSFSNLTYLKVESCKSLLYLFTSSTARSLGQLKTMEISWCDSIEEIVSSTEEGDESDENEIIFQQLNCLKLEVLRKLRRFYKGSLSFPSLEEFTVWRCERMESLCAGTVKTDKLLQVNLVAPLLNFGDDIPLETDLNSAMQNRSLYF

SEQ ID NO: 270804 - protein, 187 aa, Glycine max
  Clone ID: PAT_MRT3847_86554C.1.pep
GISWAPRRIEMLLSMSLVMVLWGVTLAQSDQSSSCTNVFISLAPCLDYVTGNASIRSSSCCSQLAFVVRSQPLCLCEVVNGGASSIAASFNINQTRALALPTACNVQTPPITSCSASASSSQGVSVSYFPNSPSGIGSSTVSSTIGGSRSVGASYHGNSSSTKLPCSLLVIMFFLATTLTFTFKTMT

SEQ ID NO: 270805 - protein, 45 aa, Glycine max
  Clone ID: PAT_MRT3847_86555C.1.pep
NILNIHRETGESMSCVNHCSSHDGNYTVEKVTKVHNLIFMDHRFK

SEQ ID NO: 270806 - protein, 122 aa, Glycine max
  unsure (1)..(122): unsure at all Xaa locations
  Clone ID: PAT_MRT3847_86556C.1.pep
APSLISTAAVTTVNRAGARMDAPFTGLKSMAGYPTRKTNHDITSIASNRGRVQCMQVWPPLGKKKMETLSYLPHLDDAQLATDVEYLLRNGGIPCXEFQLQHGIEYREHNRSPAYYNGRYWT

SEQ ID NO: 270807 - protein, 57 aa, Glycine max
  Clone ID: PAT_MRT3847_86557C.1.pep
EYHPQLLKDYMNGTEGTHFLYPSAVDQFRKHFAYLEENHGKSGPVIPPERKHVSLPR

SEQ ID NO: 270808 - protein, 130 aa, Glycine max
  Clone ID: PAT_MRT3847_86558C.1.pep
IIIFGNFPFKSLAHCCVQIVLLFENMGFDKETIGRILARCPEIFAASINKTLQRKIEFLGRVGVSKTFLPGVIRKYPELLVSDIDKTLLQRYCSDSSFLYFADDRRGIIFVYSFPINGSIQYFVYSSIIK

SEQ ID NO: 270809 - protein, 166 aa, Glycine max
  Clone ID: PAT_MRT3847_86559C.1.pep
KTLSPATPFDMGSGFVNATAALNPGLLFDSSYDDYMSFLCGINGSTPTVLNYTGQNCWTYNSTLYGPDLNLPSITIARLNQSRVVQRIIQNIAGNETYNVGWSAPYGTSMKVSPNYFSLASGERLVLSVIFNVTNNSSAASYGRIGLYGNQGHVVNIPVAVIFKIL

SEQ ID NO: 270810 - protein, 71 aa, Glycine max
  Clone ID: PAT_MRT3847_8655C.1.pep
GMSCTVGHLEFSFMIIEWLVQCCTILVIARFIFPSIFVEYFLFFLFLSSFSGQCLAVELQSSGVVWIILHP

SEQ ID NO: 270811 - protein, 91 aa, Glycine max
  Clone ID: PAT_MRT3847_86560C.1.pep
EITSGEKCLNIAILQFWTMYMNEWSNGLGHRSVYGFLEPQSIHNAKDRRGQCEEYIEKWLKESQRQLYIGAYLNDAHWQMVVLCPKDNVVV

SEQ ID NO: 270812 - protein, 111 aa, Glycine max
  Clone ID: PAT_MRT3847_86561C.1.pep
SVSTHLASCWQPTFDLEVSGLFCIINKYLRLLFDTHRVFIPPSQFIFEQSDIFSFLSRQSILHTLVVPPYFLLLILHLLSVCSKNFCVRFVAIKRYLNLLFDTKLMFRTAY

SEQ ID NO: 270813 - protein, 46 aa, Glycine max
  Clone ID: PAT_MRT3847_86562C.1.pep
KSGPCFNRSISMSALATIHGDDKLFRIHMTGSEIRWGLPDVGCYIL

SEQ ID NO: 270814 - protein, 62 aa, Glycine max
  Clone ID: PAT_MRT3847_86563C.1.pep
GKHWTTSLFFFHHNHMELSLFSNSHYNHMVCKTQTLRSILMVREIKGINTLLALPCLVISWD

SEQ ID NO: 270815 - protein, 54 aa, Glycine max
  Clone ID: PAT_MRT3847_86564C.1.pep
LRKIAFMTYIMVGHVLINDHKSHDYIYLRPLKFKPRTTISSCEFNGFNLLWDAN

SEQ ID NO: 270816 - protein, 52 aa, Glycine max
  Clone ID: PAT_MRT3847_86565C.1.pep
NIFSATAIIKGSVKASENFRLSYIYHVCHEGVYFFSSFVLFKLSMKIYWQCV

SEQ ID NO: 270817 - protein, 50 aa, Glycine max
  Clone ID: PAT_MRT3847_86566C.1.pep
PHQRKDELHSNKDWLTKMDKPVLIALYLCIHSTIPNIERDNDLCPTRNML

SEQ ID NO: 270818 - protein, 54 aa, Glycine max
  Clone ID: PAT_MRT3847_86567C.1.pep
NSDRFRLTKWPYTARDVMFLRGNLRHTYASNDMAKKLWRLLNNHQSYGTVSKTF

SEQ ID NO: 270819 - protein, 144 aa, Glycine max
  unsure (1)..(144): unsure at all Xaa locations
  Clone ID: PAT_MRT3847_86568C.1.pep
MKLLSTICTLAGFLALLEPARAYTNPITIKNYKMYDAKTGEYFGVKGVDYYPRPNAGELNENNLDLFTDDYEAIWTPDLAQLAALGANAVRLYAVDPSKSHSKFMCALRSYGXYPLXDIGASCEXCSITKENIRLVYSSTLTGE

SEQ ID NO: 270820 - protein, 205 aa, Glycine max
  unsure (1)..(205): unsure at all Xaa locations
  Clone ID: PAT_MRT3847_86569C.1.pep
RAGMVLKEMGLAKTASSAVKLLIDIGYFPVHINLDLLKLGIPTDHSDEIISAAQSLLLDSSDPDEIDRKNLTDLKVYAIDVDEADELDDALSATKLQDGRIKVWIHVADPTRYVQPGSIVDREAMRRRTSVFLPTATYSMFPENLAMXGMSLRQGELCNAVTVSVVLHNDGSIAEYSVFNSVIKPTYMLTYXSASELLHLNLXEE

SEQ ID NO: 270821 - protein, 53 aa, Glycine max
  Clone ID: PAT_MRT3847_8656C.1.pep
VPRPLYMLKIFNSFHSALEIERPRAGNTFRFISNHIYQIIKISTLACFITLIA

SEQ ID NO: 270822 - protein, 64 aa, Glycine max
  Clone ID: PAT_MRT3847_86570C.1.pep
VLTAVYFLPLLNCVRVYAFELKARLKELKDKRRNLDLNQPKFELHVCPLLPFKIFWAFLSPKLI

SEQ ID NO: 270823 - protein, 60 aa, Glycine max
  Clone ID: PAT_MRT3847_86571C.1.pep
PVFSRACCIVSLHTAITGAIIIAARQQLILVLRQCHTIVRSAYLLQHHIISRTCSHFSPQ

SEQ ID NO: 270824 - protein, 71 aa, Glycine max
  Clone ID: PAT_MRT3847_86572C.1.pep
SWEPKKRRQAVPFRRQGISRNIIFSPTHFGMPPVWGGEYGVQPVFGVPFPRYQPRRNIIPPCTLTLGDFNI

SEQ ID NO: 270825 - protein, 54 aa, Glycine max
  Clone ID: PAT_MRT3847_86573C.1.pep
CVQASSLIKGQQNQRFQSRNYPSSTLCPSYRVLIKGDTANMNINPRILIHVLDL

SEQ ID NO: 270826 - protein, 67 aa, Glycine max
  Clone ID: PAT_MRT3847_86574C.1.pep
KIKRSSNFMVLIFNSEALKNAKCDNGHLFKRISVSSLHSSWLKMLHLSATLPLSSAERTNVLGFTIM

SEQ ID NO: 270827 - protein, 341 aa, Glycine max
  unsure (1)..(341): unsure at all Xaa locations
  Clone ID: PAT_MRT3847_86575C.1.pep
MGIFEPYRAIGCITSSVPFSVQRLGTETFLTVSVGKAFQVFNCAKLNLVLVGPQLPKKISALASYREYTFAAYGNNIAVFKRAHQVATWSSHNAKVKLLLLFGDHIVSVDARGNMFLWPFKGIDENLFPFGHIMLDEKFSPSCIMHPDTYLNKVLVGSEQGPMQLWNISTKKKIFEFKGWNSPISCCVSSPALDVVAIGCTDGRIHVHNIRYDEELVTFTHSTRGXVTALSFSTDGQPLLASGGSSGVISIWNLEKKRLQSVVREAHDSVITSLHFFANEPVLMSSSADNSIKMWIFDTSDGDPRLLRFRSGHSAPPLCIKXYANGRHILSASQDRAFRLF

SEQ ID NO: 270828 - protein, 62 aa, Glycine max
  unsure (1)..(62): unsure at all Xaa locations
  Clone ID: PAT_MRT3847_86576C.1.pep
FFTLLSPLFLSFLSFFCNKNHWSGRPAFVKPGQPKDELGREXXMDEDLPAVLLMGGGEGLGA

SEQ ID NO: 270829 - protein, 91 aa, Glycine max
  Clone ID: PAT_MRT3847_86577C.1.pep
AILHELHSPPEMGKDSQWLYCWPMCVNLIEITSGLSSTLAMAWCEVVKEVLESLSHHHLLDIVGLNLMHGRAKAAFTSTSLWAHKTVIEAG

SEQ ID NO: 270830 - protein, 56 aa, Glycine max
  Clone ID: PAT_MRT3847_86578C.1.pep
SLTFSSNSLYILSLTNFLHSSCYVVIAIFPPNLEESKNFIFKTTQHIKKKKNPFSP

SEQ ID NO: 270831 - protein, 81 aa, Glycine max
  Clone ID: PAT_MRT3847_86579C.1.pep
EPPGLGASEEVKAQKHKGVPPRGQPLSKVHAEGKPIKASEFGPSEPKEKEKEKPAGELKKVRHCLGIEGIGFKKECPIELE

SEQ ID NO: 270832 - protein, 79 aa, Glycine max
  Clone ID: PAT_MRT3847_8657C.1.pep
GLFYCKLLGRLIRIWITLLHYFGKRRCRTLPNSFVFRKSTTLLNHLGKTKKYLSFNERTYSFWDSFYCRLCLANLSPSI

SEQ ID NO: 270833 - protein, 65 aa, Glycine max
  Clone ID: PAT_MRT3847_86580C.1.pep
MPLPWAYPLKITILLLLLAAVIIACFTLPNHKMMKDFLLWFDHHLVPWGPTVLADANIPLTALPV

SEQ ID NO: 270834 - protein, 63 aa, Glycine max
  Clone ID: PAT_MRT3847_86581C.1.pep
PRKNKHIRGGLFKQSHSNKIPNMSISHIHIGQAVPRFIVGNLLSYRQAPKECLFRMQCLYQML

SEQ ID NO: 270835 - protein, 55 aa, Glycine max
  Clone ID: PAT_MRT3847_86582C.1.pep
EEEMMSQPKAGKTLELKEHLYRYLHLSHPKKTMWIQTSNLSDGRLCGCVARAKFR

SEQ ID NO: 270836 - protein, 35 aa, Glycine max
  Clone ID: PAT_MRT3847_86583C.1.pep
FAVAAVMVSTKSGFREAPPTQNPSASGCSAQLLEF

SEQ ID NO: 270837 - protein, 68 aa, Glycine max
  Clone ID: PAT_MRT3847_86584C.1.pep
LQIIFVNYVRAVKCISLLFILFIMPSFNLYGKSYYSFLQIHRLLISSRFLRFANLPGLYFFLIGFHCR

SEQ ID NO: 270838 - protein, 53 aa, Glycine max
  Clone ID: PAT_MRT3847_86585C.1.pep
AQPQRKRGPIVLRTPPSYHLRHLLLLAKQRPCMNFYIKLSNSLAEDGLNHKVS

SEQ ID NO: 270839 - protein, 96 aa, Glycine max
  Clone ID: PAT_MRT3847_86586C.1.pep
PVQQAVTSFLQTVPRLECLPRLKSESPLCLDQLFIFLDNSIICWHIVISVFALSINVRITVHYIYDTLAVHKHGRGSYGGFSIMKAWDLNLKKIIT

SEQ ID NO: 270840 - protein, 117 aa, Glycine max
  unsure (1)..(117): unsure at all Xaa locations
  Clone ID: PAT_MRT3847_86587C.1.pep
VFCHLLFAQQYHDMYQREERMRMSREERARTPYVDYLRPIIADGDTGFGGPTTTVKLCTLYEERGAGGIHIEDQSSATKKCGHIYPKXLDAISEHINRLDAGRLQFDGMXAETVLAA

SEQ ID NO: 270841 - protein, 197 aa, Glycine max
  Clone ID: PAT_MRT3847_86588C.1.pep
MANAGNLISPRNFNPIIFNPYHYATKLKTLRLLSRFHSYNNNATVTASKRKDDLQSPLIGKNTSRAPRRLITISPGDGKYHGDWTCDYRVSLHDLELQDLIEDDNNSRKDAQVFINLSIQKHASFGLSVDGRVTTSFTRKCSTCSSPYCRQIDAKFNVWVLIARRDDRKIPLPDIGGDPNVIYVRPGYEVDLDSLVL

SEQ ID NO: 270842 - protein, 96 aa, Glycine max
  Clone ID: PAT_MRT3847_86589C.1.pep
QPESEAAQVQVAPVCCLPITYDRVCGPADVHAVDQLFEASVEYSSDDKAFTHVGQYGCKFMFVEELGRMRKEFTRCCDECRILLSRYSRYSGTMTH

SEQ ID NO: 270843 - protein, 135 aa, Glycine max
  unsure (1)..(135): unsure at all Xaa locations
  Clone ID: PAT_MRT3847_8658C.1.pep
KRAGSPPWGKLIFKEPQDPSPPKAVLFEPPPREKLIRRGSPLVGTFGVQWRVFLGGPKGENRPFEFXFPCSTFSGSFPSPPXEVGPIHLYEIKCVQIGAPGSLLVVSPCGSPSLGKSLSLCCFFFRGFYKLWPLV

SEQ ID NO: 270844 - protein, 47 aa, Glycine max
  Clone ID: PAT_MRT3847_86590C.1.pep
MMEYCKDVLSCLDSDTSLKIFMCLDDLADLVRVTCVSRSWRHFGELY

SEQ ID NO: 270845 - protein, 47 aa, Glycine max
  Clone ID: PAT_MRT3847_86592C.1.pep
DKNKPFLLPELGNFNNRKTFIFFCPQRRNEKQKKKRPVELGSVSDGW

SEQ ID NO: 270846 - protein, 175 aa, Glycine max
  Clone ID: PAT_MRT3847_86593C.1.pep
TRPDKTVKLWDITTGTCLKTFSHTDYVTCIQFNPVDDNFFISGSLDEKVRIWSVRDRKIEDWNDLHEMVTAACYSPDGQVAMVGSHKGCCHIFDTSEKKLLYKSQIDLRIRKKKSGQKKITGFQFAPGSSSEVLITSADSRIRVVNGDEFVHKFKGLRNTSSQISASVAPNGKTS

SEQ ID NO: 270847 - protein, 71 aa, Glycine max
  Clone ID: PAT_MRT3847_86594C.1.pep
RSIGGLLGIQVYVHGCRDGSSRAGHCCCYIYLDLDFSHQVVVAVNSNVGAEFLFSKFKLWLTLVLFIPSAG

SEQ ID NO: 270848 - protein, 53 aa, Glycine max
  Clone ID: PAT_MRT3847_86595C.1.pep
SIKDGAVDGSCFVRVGGATMLLVCPYYFEVSLDRTRPSSLVEVVLSQHWQICN

SEQ ID NO: 270849 - protein, 75 aa, Glycine max
  Clone ID: PAT_MRT3847_86596C.1.pep
MSNLIATKRVDLLAPYLLLDQGSRVQAEYIWIDGDGGLPCKTMTLDKAPAFVFELKEWNFDGSSTNQAPGDNSDV

SEQ ID NO: 270850 - protein, 31 aa, Glycine max
  Clone ID: PAT_MRT3847_86597C.1.pep
YIPLNYFLHFIHSLSFKISLSYIIGGHIYYH

SEQ ID NO: 270851 - protein, 60 aa, Glycine max
  Clone ID: PAT_MRT3847_86598C.1.pep
LAIYLLVQAFNLRPTVSGKSNDTTGSTANVKVTAILEKANAIRQVVASDDGEDDDNWSDT

SEQ ID NO: 270852 - protein, 60 aa, Glycine max
  Clone ID: PAT_MRT3847_86599C.1.pep
RVVGHPAVGSMRFLHRNRASRYMGEVNVFPKDEPSSAPVLTAFLGYQAGMTAMPREVEKL

SEQ ID NO: 270853 - protein, 56 aa, Glycine max
  unsure (1)..(56): unsure at all Xaa locations
  Clone ID: PAT_MRT3847_8659C.1.pep
GPGCCVIPPPNIFNVTAIHPYYLHSMSLAFSLSACWIVPVSFXHPGFPNYAFPDFF

SEQ ID NO: 270854 - protein, 162 aa, Glycine max
  unsure (1)..(162): unsure at all Xaa locations
  Clone ID: PAT_MRT3847_865C.1.pep
MAPATVSVPKPXALQANGKGLSEFSGLRSSSSFLPFSRESHEDLHSGIXFHTYAAGSTGGPNNGATEAKLRGGINGLARIGRNCLRCWHGRKDSPLDVIAINDTGGVKXASHLLTYESSLGTLDADVKPGDSDIICVDGKXTRVVSDRNPANLAWKDLRIYL

SEQ ID NO: 270855 - protein, 43 aa, Glycine max
  Clone ID: PAT_MRT3847_86600C.1.pep
MASKGVPVFVLPIMLFAMNCTCPSVGHIPSTKEEGPVFQESKP

SEQ ID NO: 270856 - protein, 68 aa, Glycine max
  Clone ID: PAT_MRT3847_86601C.1.pep
LSYFTSWSTGIITCFILESEYIICMTFPCYQISRKEDIIDCEINHTHTRNHHQTDVTCAPICHFLAAT

SEQ ID NO: 270857 - protein, 101 aa, Glycine max
  Clone ID: PAT_MRT3847_86602C.1.pep
MAPKTADTKQTASKAPAKAPASKAPAKAPAKKPASGDKKKSKKRVESYTSYIFKVLKQVHPDTGVSNKAMSIMNSFVNDIFERVADEASRLAAYNKRSTIS

SEQ ID NO: 270858 - protein, 70 aa, Glycine max
  Clone ID: PAT_MRT3847_86603C.1.pep
SKFTWPPQYKDMVRHNFEKRGSAKMTQLMQDVRKNLNEKPTWMEDDVWAQLKAHWEISSFKNKSEINKRN

SEQ ID NO: 270859 - protein, 182 aa, Glycine max
  unsure (1)..(182): unsure at all Xaa locations
  Clone ID: PAT_MRT3847_86604C.1.pep
MTVKTPGTPASNIDRTPVSTPGGARAKEEKIVVTVRLRPLNRREQLAKDQVAWDCINDYTIVYKPPAHERASQPASFTFDKVFGPASVTEAVYEEGVKKIALSALTGINATVFAYGQTSSGKTYTMRGITEKAVNDIYEHIMNSPGRDFTIKISGLEIYNENVRDLLNSKSGXRSLKLLDDP

SEQ ID NO: 270860 - protein, 115 aa, Glycine max
  Clone ID: PAT_MRT3847_86605C.1.pep
SSNKFRISRSDAKSILTESNFTRRNIRNIINCARNKIEERCTIKLSTVFRTMRFPTKISSLSPNLACIGTSSFSRFSRVQLEFTGHLSLSRSLSPPSIIFSRPCKHINQPKGSKP

SEQ ID NO: 270861 - protein, 111 aa, Glycine max
  Clone ID: PAT_MRT3847_86606C.1.pep
KSESSCLFFIQTPNREEENDTMSSPYNRCKANHQLLKQSLIFCMHTCAHTHKYREKVIQRLIWCFTGRSRSCSQQRLKSFDYNAHVWSEISFILHTQCSNSGHLSNSFGWV

SEQ ID NO: 270862 - protein, 116 aa, Glycine max
  Clone ID: PAT_MRT3847_86607C.1.pep
MFRCWHSLHGIEIQTAACSVGGRQAVVGIKRTTTRVGSGINSTGRPMIPPGRGGLRNDSFRGRGNYGGGRGYGRNDYVSRGEFSGRGRGHGHGEGYHQGRGRGGRSSGQKQNAVSN

SEQ ID NO: 270863 - protein, 79 aa, Glycine max
  Clone ID: PAT_MRT3847_86608C.1.pep
VGRGINGTGRPRIPSGRGGLRNDSFRGRGNYVGGRGYGRNDYVSRGGFSGRGRGHGEGYHQGRGRGGRSSGQKQNAVSN

SEQ ID NO: 270864 - protein, 118 aa, Glycine max
  Clone ID: PAT_MRT3847_86609C.1.pep
QIFKGLGFGGPLAQGGFTFGTPGYICFFFFVAPPMGLILGMGFFSRAGFFDPTPKAFLMEGFLGSVSSGKLIFMALVALKAVCFFYTKLFTSNLALKKVFFFALAFGFASKSVLALWA

SEQ ID NO: 270865 - protein, 44 aa, Glycine max
  Clone ID: PAT_MRT3847_8660C.1.pep
MAQRLQSSMLSLGNNVCSIFVRISCCSCIYVHIFKCGNSCSLAC

SEQ ID NO: 270866 - protein, 63 aa, Glycine max
  Clone ID: PAT_MRT3847_86610C.1.pep
HNSTVQCCPCYRILSVRVSARLHVFLGFTNRKIYQSFCMTTEFLKTNFQINYYRCPFFCIFLN

SEQ ID NO: 270867 - protein, 90 aa, Glycine max
  Clone ID: PAT_MRT3847_86611C.1.pep
AFTVFPFKHFRILFVKWYAPCIAILTPPFVVISPRVTAFLPTALPLVFLASYPSFLSIFSVFFCQVLNVFLLLGYQVGPFKGFNSKFFDK

SEQ ID NO: 270868 - protein, 83 aa, Glycine max
  unsure (1)..(83): unsure at all Xaa locations
  Clone ID: PAT_MRT3847_86612C.1.pep
NPMVIGAPSLAELGCFKILVCVAEKVLIKDRGVGXNKVVKKSGWQGKPELFKVEGEVHVFHIPNPQTQNAMKMINPLWDFFPP

SEQ ID NO: 270869 - protein, 55 aa, Glycine max
  Clone ID: PAT_MRT3847_86613C.1.pep
GFHIVGGGTNGGFACNMTDIRKIEKRLRPEFVEWKDCDAPTIVTLRIYSCARPYF

SEQ ID NO: 270870 - protein, 503 aa, Glycine max
  Clone ID: PAT_MRT3847_86614C.1.pep
ELQSQNNPFSIHLITFFLFLLFLLFKLVKKSSSNNTSKLPPGPKTLPLIGNLHQLVGSKSHHCFKKLADKYGPLMHLKLGEVSNIIVTSKELAQEIMRTQDLNFADRPNLVSTKIVSYNATSISFAPHGDYWRQLRKLCTVELLTSKRVQSFRSIREDEVSELVQKIRAGASEEGSVFNLSQHIYPMTYAIAARASFGKKSKYQEMFISLIKEQLSLIGGFSLADLYPSIGLLQIMAKAKVEKVHREVDRVLQDIIDQHKNRKSTDREAVEDLVDVLLKFRSENELQYPLTDDNLKAVIQDMFIGGGETSSSTVEWSMSEMVRNPWAMEKAQAEVRKVFDSKGYVNEAELHQLTYLKCIIREAMRLHPPVPLLIPRVNRERCKINGYEIPAKTRVFINAWAIGRDPKYWTEAESFKPERFLNSSIDFKGTNYEFIPFGAGRRICPGISFATPNIELPLAHLLYHFDWKLPNNMKNEELDMTESYGATARRAKDLCLIPITVRP

SEQ ID NO: 270871 - protein, 75 aa, Glycine max
  Clone ID: PAT_MRT3847_86615C.1.pep
EFTFPITPLENKGGLIGKENTIARHGIHGLYWLFSIDVQGTLLVQGNNTIFLTQTRDTSPLIGIMYDYIRLEYKR

SEQ ID NO: 270872 - protein, 36 aa, Glycine max
  unsure (1)..(36): unsure at all Xaa locations
  Clone ID: PAT_MRT3847_86616C.1.pep
SIKILXRADIESANFHSCRITIFFFRRNVNLSIYFS

SEQ ID NO: 270873 - protein, 155 aa, Glycine max
  Clone ID: PAT_MRT3847_86617C.1.pep
GEDGPTHQPIETLAHFRALPNMMVWRPADGNETSAAYYVALTSEKTPSILALTRQNLPQLEGSTIENGIKGGYVAVEAEGAQITLVSTGSEVSLCLEAAKYLKDNKGVTARVVSMPCMEVFDAQPKDYKLKVIPDGIPSLSVEVMSTLGWEKYSH

SEQ ID NO: 270874 - protein, 68 aa, Glycine max
  Clone ID: PAT_MRT3847_86618C.1.pep
VGGSHLIRLFAVFSMDISPDLINSTWQSHFHSIISLCSSTNIYRHYVNTWGSPLMCSQFPPPPCSHVS

SEQ ID NO: 270875 - protein, 61 aa, Glycine max
  Clone ID: PAT_MRT3847_86619C.1.pep
THTIDGDQKKRYFQETLPSILRWLKHKTKDLKQAKRKKKIRFNIYNPFKVSSHTPERNNFN

SEQ ID NO: 270876 - protein, 57 aa, Glycine max
  Clone ID: PAT_MRT3847_8661C.1.pep
FLSQNTKTKGPKTSFLTTSKYIFFPKIKKHLVKQTSWLKNNKPILSTKYISFHLQPL

SEQ ID NO: 270877 - protein, 85 aa, Glycine max
  unsure (1)..(85): unsure at all Xaa locations
  Clone ID: PAT_MRT3847_86620C.1.pep
APGHISLTMIESRPHRNRQIRLVDDTXVGSAKHFEXWLNVXVQAPMAQVRAQNALAEGQQFTSVLRVLWSYPMDMTPWTPSSRGY

SEQ ID NO: 270878 - protein, 120 aa, Glycine max
  unsure (1)..(120): unsure at all Xaa locations
  Clone ID: PAT_MRT3847_86621C.1.pep
RFVQIEPDMNSRVQLVSTTTNGDFVQGKDIALDKVECACAADGLTSSYTHNFIXESGLHKDRGLIGVIFGRMIHIVDYAHQTYEKDWWGGNGSYDIQWHSRWGNGYSRKAQCDRGKSLKY

SEQ ID NO: 270879 - protein, 48 aa, Glycine max
  unsure (1)..(48): unsure at all Xaa locations
  Clone ID: PAT_MRT3847_86622C.1.pep
ISRTLTXPNEDDPIPTXPGXCCRXPSPXVXAMLDDDGYYYSCTETEPP

SEQ ID NO: 270880 - protein, 74 aa, Glycine max
  Clone ID: PAT_MRT3847_86623C.1.pep
DCERCYNKWSWPKRCGWPSLAVCWANITPVPRLIAGFRKKLIMCGSGFQLPNALAVIMVHFATIPKTGQGNKNY

SEQ ID NO: 270881 - protein, 51 aa, Glycine max
  Clone ID: PAT_MRT3847_86624C.1.pep
FCSSSQTDIYPLSFIQRNKPLFIIIDPFLINTIYSSNFVMPKTSFNLHHPL

SEQ ID NO: 270882 - protein, 386 aa, Glycine max
  unsure (1)..(386): unsure at all Xaa locations
  Clone ID: PAT_MRT3847_86625C.1.pep
IKSLPPEYKFANNPNPVLVEKHGDVKFRRNNPIGSNGLENGAQVGEVSEEVNGRAGGMDLSDEDSPYGAKGRSLKDRPSNADEDSVSVSLPPLPLLTSSRESRWNDTNPYGSKKKLQAGLLPPNRGWVLAGRPTPAGVLPVISLPNGKVFKVKEESLVPANPDILDGLDHLMHLSYLHEPSVLFNSAIYXYNHNMIYTKAGPVPVAVNPFKKVPLHGNDYIEAYKCKSIESPHVYAITDTAIREMIRDEVNQSIIISGESGAGKTETAKIAMQYLAALGGGSGIENEILKTNPILEAFGNGKTLRNDNSXRFGKLIEIHFSETGKISGANIQTFLLEKSRVVQCNEGERSYHIFYQLCAGAPSSLREKLNLLSAEDYKYLRQSNWY

SEQ ID NO: 270883 - protein, 120 aa, Glycine max
  Clone ID: PAT_MRT3847_86626C.1.pep
KGKIFPKRGNLFYKTGPPNWKNPQLGKKKNRPDPEKGPKKNLFWGPLISRYKGGPPPWEKILKTRGGGPQVFFKPGDVLRKRETRGPKKPPKRGKNCLAKKTSPGEIPTQIRPEKKKNPI

SEQ ID NO: 270884 - protein, 92 aa, Glycine max
  Clone ID: PAT_MRT3847_86627C.1.pep
PCNYPPGIITPQKFNEVEEKIRYDPPPDNPTGCTICHQETRIRIKPLSALAPMAEKVEQRCAEKFLQNSVKGREVMDRICKYLEAESSSLAL

SEQ ID NO: 270885 - protein, 36 aa, Glycine max
  Clone ID: PAT_MRT3847_86628C.1.pep
RLKLRSFQIRTPLQRVQPSDFSVGERLRKMCEEEGS

SEQ ID NO: 270886 - protein, 113 aa, Glycine max
  unsure (1)..(113): unsure at all Xaa locations
  Clone ID: PAT_MRT3847_86629C.1.pep
FGGNQAPFSEAAEASFEMGNFXSRYIPKXGLLGIFKKKRLARYPFYFYGGPPQPPTRARGAMAQIRGAALSGVTPNLFGVEGNISPPPENFEGPPPKNVIQNRLFFLGRGPPP

SEQ ID NO: 270887 - protein, 65 aa, Glycine max
  Clone ID: PAT_MRT3847_8662C.1.pep
MDLDRGIVQNSDKRKESWKTVLTLAYQSLGVVYGEISTSPLYVYRNTFAEDIGHSENNEEIYGVL

SEQ ID NO: 270888 - protein, 248 aa, Glycine max
  Clone ID: PAT_MRT3847_86630C.1.pep
MMTPNLNLEPEGGLKVLSQVGFDKSIQETSHDLTKDSTATSSCLTKADPDPGSVSLDLSLNFNPNDEELKGTSDTNCEVGPETHASASAIPRVFSCNGSRRKFFSSQALGGHQNAHKRERTMAKRAMRMGMFAERYTSLASLPLHGSAFRSLGLEAHAAMHQGHVHHSMRAPDMSAAAKFGKDYFRTPIFVEDDDVGLFWPGSFRQIDERGYVNLRHGEHAHNSNTSFVVATAPQAQTSVSPDLTLRL

SEQ ID NO: 270889 - protein, 113 aa, Glycine max
  Clone ID: PAT_MRT3847_86631C.1.pep
SMFYKSAGTGGVSEDHPNFQAGARNRPRGVNGIPKPTGTNCKSPSNLSSITAKTLCVKPGGRKTTPCLFHPEMIECLCCNFRNRTCLAVLTTLPNLEQEGSLRFGPPGDVFFS

SEQ ID NO: 270890 - protein, 68 aa, Glycine max
  unsure (1)..(68): unsure at all Xaa locations
  Clone ID: PAT_MRT3847_86632C.1.pep
MVVLEKLWDDVVAGPQPERGLGKLSKLTILKTSDEGWSSQLQQTLWMPWTPTTPMYSXTPTTPGWDRK

SEQ ID NO: 270891 - protein, 127 aa, Glycine max
  Clone ID: PAT_MRT3847_86633C.1.pep
MFAAILNCIAEVVVGSAAWLGRGLSCVCVQRRDSDASNTFDLTLAQEECLQRIQRRIDVPYDSSIIEHQDALRALWNAAFPEEELHGLISEQWKEMGWQGKDPSTDFRGGGFISLENFLFFARNFPV

SEQ ID NO: 270892 - protein, 98 aa, Glycine max
  Clone ID: PAT_MRT3847_86634C.1.pep
NASNGCKKTTEGQPRSGNVRSSRATENSSVQPEVLIRKICTFIQQRGGSSDSASIVQYFKARIPSKDLALFKNLLKEIATLHKGSNGSYWVLKPDYQF

SEQ ID NO: 270893 - protein, 95 aa, Glycine max
  Clone ID: PAT_MRT3847_86635C.1.pep
SFFGFSNVFLQINIGGDSRAFSFLEDALLLFASPSRQRVGCNRWRLHWGLVKESSHSINVQCFIVTSSLFMFLFLFYPLFFPYLYITFAMLLCWV

SEQ ID NO: 270894 - protein, 101 aa, Glycine max
  Clone ID: PAT_MRT3847_86636C.1.pep
YDVITHMNSFRQYKKSSSPMSAVFTGQQVLMLNNEQVSELNQDKNAGVYDIYVKLYFRIRFRLGDVISNDYKPKVKCHLKVPFSKNGTFTLFPTTKCDVDF

SEQ ID NO: 270895 - protein, 169 aa, Glycine max
  Clone ID: PAT_MRT3847_86637C.1.pep
QSHSLASNEFSKLCTCGGKRDSNQHNVNYSANHVEIIDAQQKELEKLKYFYEEMRLEVKHIQSKWDQELRRLENHIKSLEEASSSYHKVLEENRSLYNQVQDLKGAIRVYCRVRPFLPGQSNGQSTVDYIGENGNIMIMNPLKEGKDARRVFSFNKVFATSATQGILIF

SEQ ID NO: 270896 - protein, 112 aa, Glycine max
  Clone ID: PAT_MRT3847_86638C.1.pep
TIVSTCFMRKQPITTKSVKTFPNALFGLKGGRGGRVTCMASYKVKLITPEGEAEFECPDDGFIGDNAEEKSIELPYSCRADSCVLCVGKIVKRDFYPHQMVSSLLMNKLHVD

SEQ ID NO: 270897 - protein, 41 aa, Glycine max
  Clone ID: PAT_MRT3847_86639C.1.pep
ILLESFGWVIFNHNRPSKNLSHYAVSSSITGSQYTIATAHT

SEQ ID NO: 270898 - protein, 140 aa, Glycine max
  unsure (1)..(140): unsure at all Xaa locations
  Clone ID: PAT_MRT3847_8663C.1.pep
MSQSQKHCDSLSLTNYTDLDTSSSDDIDQNSTGGGLKDNDSMEKRRKRVSGRSWKVKIKDFIDSQMRKLVEKHEEWLDKLTKTLEQKETERVLREEEWKRHEAARLEREHTFWCQEKAWIAARDAAXMEALHKLTGNGII

SEQ ID NO: 270899 - protein, 119 aa, Glycine max
  unsure (1)..(119): unsure at all Xaa locations
  Clone ID: PAT_MRT3847_86640C.1.pep
SGSMLGTGGGGNTEWGLLMASISEGTWXGETPLQGRLNGGATFIGIGGLTGAGIGLIVLLARYFSGLLNPDGXVQFTGGKTKGGDAMEGAIKIITGAGTIGVGAGPGGLPLAGTLTLGY

SEQ ID NO: 270900 - protein, 88 aa, Glycine max
  Clone ID: PAT_MRT3847_86641C.1.pep
KRGDFPANKKKSPKWDKAGNQRGGNKVEGATPGQFNEQRPQEVFEKGGFPKGPVGTLNPLSPVAGTCLVFALVMREASAPPFMTVGNR

SEQ ID NO: 270901 - protein, 82 aa, Glycine max
  unsure (1)..(82): unsure at all Xaa locations
  Clone ID: PAT_MRT3847_86642C.1.pep
AWPCHGSGYQTVPTEMKTGYWEQCLDRKXACSRLAATAHTIPAFKTIAEECVXPSKDYINGXQSRSDSKTANQHAFFYASER

SEQ ID NO: 270902 - protein, 28 aa, Glycine max
  unsure (1)..(28): unsure at all Xaa locations
  Clone ID: PAT_MRT3847_86643C.1.pep
RSRXRFPQIQXXWXSKIRSQFTXLRLTS

SEQ ID NO: 270903 - protein, 80 aa, Glycine max
  unsure (1)..(80): unsure at all Xaa locations
  Clone ID: PAT_MRT3847_86644C.1.pep
ADXXXXXXSGRGTLCQAVTXXRASSXXXXTSTSHVLLNSPNHGLIXTLRGFLLRGDVMACWDXPITRSXTNHSIHXMXPL

SEQ ID NO: 270904 - protein, 74 aa, Glycine max
  Clone ID: PAT_MRT3847_86645C.1.pep
EPSFPVLSHQMWLKLTLPQAQHRASLGKLCSQSTLPQAQHRASLGKLCSQLPRKVCLFVAYTVLGFQSFQVPRL

SEQ ID NO: 270905 - protein, 98 aa, Glycine max
  Clone ID: PAT_MRT3847_86646C.1.pep
RDNPGSLFLCGGDMLDGRTCVGPRLLSGTCQADNECAYMKSLLELDTKNGQRHMAIDDDDFRHIQTSSASFHNSLFNIKPQAWRKSLYYYSPLFYLAI

SEQ ID NO: 270906 - protein, 84 aa, Glycine max
  unsure (1)..(84): unsure at all Xaa locations
  Clone ID: PAT_MRT3847_86647C.1.pep
TTGIIACGMTVLIIXTEEAPWCHTAGLGDDLRCLQASLQGCEDPVMNIGLLCDHIKDAWNTGIVVEVLVGKRAKKVHCFHCYNT

SEQ ID NO: 270907 - protein, 41 aa, Glycine max
  Clone ID: PAT_MRT3847_86648C.1.pep
ISTGHFWPTPLPFPLKKFGSSPTFWPWHFLPLKPIKSIPLS

SEQ ID NO: 270908 - protein, 64 aa, Glycine max
  Clone ID: PAT_MRT3847_86649C.1.pep
RQPRASPIFNYSGTLKGGEGRKRGGTKVVFLWVSIHSEERNICHWNRHMHLPFLFVSDRSVWIH

SEQ ID NO: 270909 - protein, 266 aa, Glycine max
  unsure (1)..(266): unsure at all Xaa locations
  Clone ID: PAT_MRT3847_8664C.1.pep
PENALLPAGFRQKNQTSKSATGPFDRERLLSYLEKQALEHKDRDDYVPYTGEKKGKIFIPKQKPAQTLTEETISLDPELEEALTSASDTELCDLAAILGMHNLIADTPFCDVLGSSNGVNQERFPNVVKGEKILPVFDEPPNPTNVEESLKRIRENDARLVEVNLNNIKNIPIPTLKDFAKTLEANTHVKHFSLAATRSNDPVAVAFADMLKVNKTLKSLNMESNFITGAXGVLALIDALRDNETLMELKIDNQRQQLGTSVELEM

SEQ ID NO: 270910 - protein, 82 aa, Glycine max
  Clone ID: PAT_MRT3847_86650C.1.pep
YTHNNDDSEILCKISHACTHVDTQASSFYGHVTLGLRIHFSYSSQPNVSKTYSFVNSCIHPSPFWVFEKLFTTFPSVVFSQP

SEQ ID NO: 270911 - protein, 85 aa, Glycine max
  unsure (1)..(85): unsure at all Xaa locations
  Clone ID: PAT_MRT3847_86651C.1.pep
TVSAKFTNGFLQXIVPRRRNVGVRTPSSPPLXLRLRALPLPLTPCRRHSSSVFSPPEPLLEFGSTLPDLSVLHGILFVDFSRSRD

SEQ ID NO: 270912 - protein, 85 aa, Glycine max
  Clone ID: PAT_MRT3847_86652C.1.pep
GIIQISQVIPLPKSLTRGPFLEDVIGTIFFPPITRDFHNWGKATLVFYKKGGPLLGAPRVSFLKTKKKKKKKKKKKKKKKKNQNP

SEQ ID NO: 270913 - protein, 101 aa, Glycine max
  Clone ID: PAT_MRT3847_86653C.1.pep
KQNPFIHRSFRGFFTFPGAPLPWVFLGFSGPVGARAWGDPLGKIAGQANYFFENVYPRMAGGRPLKTPSFFKALFADDPVVVARPANVKFAPPPGEELPPD

SEQ ID NO: 270914 - protein, 53 aa, Glycine max
  Clone ID: PAT_MRT3847_86654C.1.pep
GGECIQTFPNGNMSSEIKWRTEHQAYYMPRMDSYPPLHRTSFFSLSKYYKSII

SEQ ID NO: 270915 - protein, 96 aa, Glycine max
  unsure (1)..(96): unsure at all Xaa locations
  Clone ID: PAT_MRT3847_86655C.1.pep
XXFXDXXXXFXXLXXVXXXFDSXYTXXXLVXLSFXXTCXXXXXXXXXXXXXVXXXXAXPHFXXXXPXXCXYVXWXGXXASSSRIPSLRTRXCXXLV

SEQ ID NO: 270916 - protein, 83 aa, Glycine max
  Clone ID: PAT_MRT3847_86656C.1.pep
GNSGSGDASGSVSANRVDQNKTSQREAALTKFRQKRKERRERCFHKKVRYQSRKRLAEQRPRFRGQFVRQSSNENASEARLES

SEQ ID NO: 270917 - protein, 746 aa, Glycine max
  Clone ID: PAT_MRT3847_86657C.1.pep
VLIADSKELKELNQRLRDGKKIAGGEHGLCEEVKCNGIAEEVKVEQGGTVESSSVQQHIPQPQGAIICWERFLHIRSLKVLLVEIDDSTRHVVTALLRNCSYEVIEAANGLQAWKILEDLTNHIDLVLTEVAMPGLSGIGLLYKIMGHKTRKNIPVVMMSSHDSMGLVFKCLSKGAVDFLVKPIRKNELKNLWQHVWRRCHSSSGSGSESGTQTQKSIKSKSLEKSDNNSGSNDEDDNESIGLNNVDGSDNGSGTQSSWTKRAVEVDSHKPVSQWDQIAECPDSTCAQVVHSNAEMGGNKVVPLAAKDCAEQNEQLVKTAGSQHSNAPDVGPSKFSEQINRGQLDLNCENQSSKLRCKGLSLSDAITSTCDSQMHSGEFEALNKKPKSSDIENKGTNNDEELPSLELSLKRLRGVEDADITIQDDRNVLRRSDQSAFSRYNAASNTKKSPTGCVGSNSPYNNSLEVTKKDSSRDIQSHSCGNPPNQNSNGASNNIDMGSTTNNAYAKSAVMSEPAGASTTKCLYQTSAFQPVKNSLVCTSQQVVLNNTEDMSATILAPPKLDRHKDSAALDFHLHCENHNCIADNMKHQLPPDHDAESIKKMATAAPHCGSSNVEEVLVEGNVGNHSINRSVSGSNNGSNGQNGSSTAVNAGGTNTESNNGLTGNSGSGDASGSGSANRVDQNKTSQREVALTKFRQKRKERRERCFHKKVRYQSRKRLAEQRPRFRGQFVRQTSNENASEATTDS

SEQ ID NO: 270918 - protein, 79 aa, Glycine max
  unsure (1)..(79): unsure at all Xaa locations
  Clone ID: PAT_MRT3847_86658C.1.pep
VSLFAALGFLLYGGRLFLMLQRFPVESKGRRKKLQEVFGYVTTICFSCFLIRCVMMCFKAFDKSXDLDVLDHSILNFIY

SEQ ID NO: 270919 - protein, 66 aa, Glycine max
  unsure (1)..(66): unsure at all Xaa locations
  Clone ID: PAT_MRT3847_86659C.1.pep
NREYLKNVFFELHVQEPXFSQLNDGLKPIEGRCASGKYNRIKSGSLILFNKSVVFEVHVMLCVVNN

SEQ ID NO: 270920 - protein, 65 aa, Glycine max
  unsure (1)..(65): unsure at all Xaa locations
  Clone ID: PAT_MRT3847_8665C.1.pep
NPPVLNPPVFNPPVKNPPVFNPPVINPPVFNPPVENPPFFNPPVXNPPVFNPPYGKPPPPKYPPS

SEQ ID NO: 270921 - protein, 94 aa, Glycine max
  unsure (1)..(94): unsure at all Xaa locations
  Clone ID: PAT_MRT3847_86660C.1.pep
PCSAQEDPILTGLYQRYGQRXWPLISLYLIGMYCXSCRLRWNNQLTLKEDHRSFSSXDDYTIISDHAQYGNRWATIDPIVTGQNELTPINSHWN

SEQ ID NO: 270922 - protein, 49 aa, Glycine max
  Clone ID: PAT_MRT3847_86661C.1.pep
WLLLESSNMKGSFSLFKNTWKNMRHISNIRTIVPGYILQHLAVNLLKPK

SEQ ID NO: 270923 - protein, 120 aa, Glycine max
  Clone ID: PAT_MRT3847_86662C.1.pep
GGGAFSFPVFPAGPRVCLGREMAFFPMKRLVAGVFQSFQVLSEVAEPEFAGVFPFFLVGGFPVRVQNRSLRCRPLFFFFGRLFFLDYFFPFKKKNFFFFCHWACCFCRLDVFFFMLGFVC

SEQ ID NO: 270924 - protein, 48 aa, Glycine max
  Clone ID: PAT_MRT3847_86663C.1.pep
VIHPAKVSRSSSQNAASVAGMVLTTQAIVVENPNPKAPVSGSPHGLTA

SEQ ID NO: 270925 - protein, 42 aa, Glycine max
  unsure (1)..(42): unsure at all Xaa locations
  Clone ID: PAT_MRT3847_86664C.1.pep
IVAFTLSMVSEDXHLKGXGLTGQSFHARSXSLXGARIGTMXX

SEQ ID NO: 270926 - protein, 134 aa, Glycine max
  Clone ID: PAT_MRT3847_86665C.1.pep
MDLEGKTVKLQIVSILRKFEIPSMSHLRLSMNESSKPSFKWRRVLLKVSGEALAGDHSQNIDPKITMAIAREVAAVTRLGIERKIQLKKRLKLKPLKHKHFLAKNGEEEKAVRQLMTRHNPQKEQLMIRAQAGK

SEQ ID NO: 270927 - protein, 83 aa, Glycine max
  Clone ID: PAT_MRT3847_86666C.1.pep
FKQPRAHNRVPCQSSPVHLNRGDLGHSRSSNSSGCGHGDLVSPSVTRSLGSRSISKFGPTTGRINPPPVDSRVAPTSERRNTS

SEQ ID NO: 270928 - protein, 46 aa, Glycine max
  Clone ID: PAT_MRT3847_86667C.1.pep
VKMERRQVLVRNVLMVLIATQSEAAPLLGFGPRILQRGVKKKHFFL

SEQ ID NO: 270929 - protein, 109 aa, Glycine max
  Clone ID: PAT_MRT3847_86668C.1.pep
KWCSTWFLRTPVIVIARRGCCMSHVVKRLLLGLGVNPAVYEAAREDEEGVATQLEATIRSDDGNTQQGKVQFPTVFIGGKLFGGLDRIMATHISGELVPILKKAGALWL

SEQ ID NO: 270930 - protein, 161 aa, Glycine max
  Clone ID: PAT_MRT3847_86669C.1.pep
EFELGTRGSSRVDLQVRSATLDTWLPEQVAFIQSMGNEKANSYWEAELPQHYDRVGIENFIRAKYEEKRWAARNEKPKSPSSFREEKSPSHWQKPEETKKIQPSNAIPATRISVPAPPKGPELVNSLSLSLSLAYGKRVEKCHVALWQCYNDYLTFGFHVL

SEQ ID NO: 270931 - protein, 123 aa, Glycine max
  unsure (1)..(123): unsure at all Xaa locations
  Clone ID: PAT_MRT3847_8666C.1.pep
MLFLPPSLFLLLFLLHRPFANALGCMSAVCAAGGPSPSSHAVNRIIRCASDSFCGHFRALRRNDQFVEAVDLSCPEFAVVRAPFDGEISAYRPMGGSRAQEGTKGECVPDXGVRIDGRGQWQG

SEQ ID NO: 270932 - protein, 312 aa, Glycine max
  Clone ID: PAT_MRT3847_86670C.1.pep
MGTAIDMYNSSNIVADFLDPYSEELMKALKPFMKSDYFSASSSSSLESQPCSFSSNSLPTSYPSSNQIKLNQLTPDQIVQIQAQIHIQQQQQHVAQTQTHLGPKRVPMKHAGTAAKPTKLYRGVRQRHWGKWVAEIRLPKNRTRLWLGTFDTAEEAALAYDNAAFKLRGEFARLNFPHLRHHGAFVFGEFGDYKPLPSSVDSKLQAICESLAKQEEKPCCSVEDVKPVIHAAELAEVESDVAKSNAEYVYPEFEDFKVEHENPMFSGESSSPESSVTFLDFSDFSDSNNQWDEMENFGLEKFPSVEIDWEAI

SEQ ID NO: 270933 - protein, 55 aa, Glycine max
  Clone ID: PAT_MRT3847_86671C.1.pep
LNSPHIISFKIEKIQNLSQSRHIHSELHYCVFVRYPTCLYYRNETNTAIPTHDLG

SEQ ID NO: 270934 - protein, 64 aa, Glycine max
  Clone ID: PAT_MRT3847_86672C.1.pep
RILDWVGLLKSCGFKVVLGLKKGLFFGAFFYGGGVVFFPPPFNGLKNPKKFKKNKKKKKKKKKK

SEQ ID NO: 270935 - protein, 59 aa, Glycine max
  Clone ID: PAT_MRT3847_86673C.1.pep
PGSPPPEPLVMGVAPVKAQFEGAEMGGPPETHGSKCGPNCSCNPCPCKWGVGRPSFHQR

SEQ ID NO: 270936 - protein, 144 aa, Glycine max
  unsure (1)..(144): unsure at all Xaa locations
  Clone ID: PAT_MRT3847_86674C.1.pep
FLFFFFCLSFSSTISPHRFFLFLLLSQFSPHCLLSLLFQLSKSVHVRVYHFLYVYVLSLYIFSPLFYYLRFIYAACISPSSYRLGFFLFAVFTPSXFSMSFLLAPYDLSLHIHLSPFYVLYWSCSFDHLPASCDWSSSCVFSPL

SEQ ID NO: 270937 - protein, 337 aa, Glycine max
  unsure (1)..(337): unsure at all Xaa locations
  Clone ID: PAT_MRT3847_86675C.1.pep
MVGETAATGKSVGLGLGCDPVVGSLACSKKREYRVTNRLQEGKRPLYAVIFNFIDSRYFNVFATVGGNRVTVYQCLEFIFYSPCDVXFVGHGDSVNEIRTQTLKPSLVISASKDESVRLWNVHTGICILIFAGAGGHRNEVLSVDFHPSDIYRIASCGMDNTVKIWSMKEFWTYVEKSFTWTDLPSKFPTKYVQFPVYNASVHLNYVDCNRWLGDFILSKSVDNEIILWEPKVKEQTPGXGAIFILQKYPVLESDIWFIXFLFAVKGGLAAVGNREGKILEWELQSSPPVLVARLSHPQSKSPIRQTATSFDGSTILSCCEDXGTIWRWDDVTNSPD

SEQ ID NO: 270938 - protein, 123 aa, Glycine max
  unsure (1)..(123): unsure at all Xaa locations
  Clone ID: PAT_MRT3847_86676C.1.pep
VFFXVFFVYFFFFFSFFLFFFFLKEKILKPPFFKIQTNEFFGQVGNNGPGIFLFPKGGGQKKKRGGGNQTKTTGLPKKKTFVSLNYPCLKSRGKKNWLVNMTQFYESQGPWEKINLGAPPKNN

SEQ ID NO: 270939 - protein, 34 aa, Glycine max
  Clone ID: PAT_MRT3847_86677C.1.pep
YLAEEKVLLARNIRIRKTSLQLSAVDIANNLPEI

SEQ ID NO: 270940 - protein, 52 aa, Glycine max
  unsure (1)..(52): unsure at all Xaa locations
  Clone ID: PAT_MRT3847_86678C.1.pep
HHLSSRLQHHHHYSRTHHIHXVHQQHYKSQNHHRCKIEHHHLLCQFHKHVHP

SEQ ID NO: 270941 - protein, 74 aa, Glycine max
  unsure (1)..(74): unsure at all Xaa locations
  Clone ID: PAT_MRT3847_86679C.1.pep
VAXHLIXXHXIRLPRQFLFPKFTXTYIKGXVIYRQAHRVAKYLKLKWNDPSIEHRELVYLEKLCSIIRHFVDRK

SEQ ID NO: 270942 - protein, 70 aa, Glycine max
  Clone ID: PAT_MRT3847_8667C.1.pep
PLGNPGPPPGPRPGFPGRPPRPWFSCPLGFCVYPPSLELRGPRLPLGRVKCFGPVGGGVSPRGGPFFFFF

SEQ ID NO: 270943 - protein, 368 aa, Glycine max
  unsure (1)..(368): unsure at all Xaa locations
  Clone ID: PAT_MRT3847_86680C.1.pep
MVFPLLSIFALLNLAVVATHAETLPPEVYWKSKLPTTPMPKAITDILHPDLAEDKSTSVAVGKGGVNVNAGKTKPGGTSVNVGKGGVNVNTGKGKPNKGTSVNVGKGGVNVNTGPKKGKPVHVGVGPHSPFDYNYAASETQWHDDPNVALFFLEKDLHYGTKLNLHFTRYFTSSVDASFLPRSVADSIPFSSNKVNEVLNKFSIKEGSDEAQTVKNTIXECVSXPGIKGEEKRCVTSLESMVDFATTKLGSNXVDAVSTEVTKKDNELQQYTMAPGVKRLGEDKASVVCHKENYPYAVFYCHKSETTKAYSVPLEGADGSRVKAVAVCHTDTSKWNPKHLAFQVLKVHPGTVPICHFLPQDHVVFVPK

SEQ ID NO: 270944 - protein, 51 aa, Glycine max
  Clone ID: PAT_MRT3847_86681C.1.pep
QSRRAGGMKFYTGPYPHKKEMRLQGPDWPNGGDTRKLETTCKVKEVTRFKE

SEQ ID NO: 270945 - protein, 94 aa, Glycine max
  unsure (1)..(94): unsure at all Xaa locations
  Clone ID: PAT_MRT3847_86682C.1.pep
MYNQVNRGSNFGQSSVPPVLPPPPPPQYQLAPPHFHQFPPPTRPPSNTGGPPLPPPPTNIGGPPPPPTPTHNVYLPGPPPXPTSYCAGPLNLAV

SEQ ID NO: 270946 - protein, 60 aa, Glycine max
  Clone ID: PAT_MRT3847_86683C.1.pep
FTLPQCALGRSFHPEDCNNILVRSCKIHIKFRGSHIWHRFLIISMREANEVSTVVSAYSV

SEQ ID NO: 270947 - protein, 57 aa, Glycine max
  Clone ID: PAT_MRT3847_86684C.1.pep
LQTHLTVTTFSHNNDDHLFAFVDASSYKLPLSYLYNQQSTPMCYQTLPTVYISTLSS

SEQ ID NO: 270948 - protein, 40 aa, Glycine max
  Clone ID: PAT_MRT3847_86685C.1.pep
LLMVTLGHMKLYCIHNHIYLIYSLPTTKTMELVLKTFLKI

SEQ ID NO: 270949 - protein, 44 aa, Glycine max
  Clone ID: PAT_MRT3847_86686C.1.pep
SVYASMSSADWERLEENFLQHVHSLVHNSDSDFRRNGRIRFIQA

SEQ ID NO: 270950 - protein, 91 aa, Glycine max
  unsure (1)..(91): unsure at all Xaa locations
  Clone ID: PAT_MRT3847_86687C.1.pep
RKANWTGRREAKAKRERNGKGRIRCLSXSLLDXFASNASISSSALSTLLLLRQSWCKERMMIVVLVALSQRTRFXPFPFSXDXFXXCXSHL

SEQ ID NO: 270951 - protein, 52 aa, Glycine max; identical to SEQ ID NO: 229817
  Clone ID: PAT_MRT3847_86688C.1.pep

SEQ ID NO: 270952 - protein, 130 aa, Glycine max
  Clone ID: PAT_MRT3847_86689C.1.pep
KTLETTPVMSGLKEGMDRLKARLSKYSPGFSLSNIKDREYKQDESRQTPLEEKLFSLTPDSNVHKGLVDSNDHGIQSFKNICKSSQNEETVDAKIDEKNLSLISAHVSYNDENPKVVEMGASPSQMTHLM

SEQ ID NO: 270953 - protein, 71 aa, Glycine max
  Clone ID: PAT_MRT3847_8668C.1.pep
TAARRRQKGQKKKKKKKKKKKKKKKKKKKKKKKKHNKKKKRKKKKKKKKKKGAFLKVQTLHPRAWNKLVFF

SEQ ID NO: 270954 - protein, 135 aa, Glycine max
  Clone ID: PAT_MRT3847_86690C.1.pep
VIIIIRPSTTPTLACWTRTTSQARPATTTATTITWLKFEKLFRQGNQPVENFNHMVNSQASTNIGDQGFSLSSMNKGLEHMVMPRIEEWESGEPEIMQKQQLRSSTSNATEEHLTKDFMGIGPVINLQSQFRGHY

SEQ ID NO: 270955 - protein, 88 aa, Glycine max
  unsure (1)..(88): unsure at all Xaa locations
  Clone ID: PAT_MRT3847_86691C.1.pep
MAAQMSKIRKFVAVRLFTAELYXDLTHELSADVHCGVYIRVTTMRTKIMIRANISQTGLGEKGRXIRELTLLVHKRFIIHLNNILLYA

SEQ ID NO: 270956 - protein, 72 aa, Glycine max
  Clone ID: PAT_MRT3847_86692C.1.pep
PLIKNFPPKAPFWKKRVLQKGAANLLKKAPIFCNLPTQKNTFSKELPHYKGPQGLKLENPTGGPFFSPWKTN

SEQ ID NO: 270957 - protein, 51 aa, Glycine max
  Clone ID: PAT_MRT3847_86693C.1.pep
HDPTVRKSHKEPPKEHNRYHMHNLSYEQRKHKLTARVAAINSAVDSHQDYQ

SEQ ID NO: 270958 - protein, 57 aa, Glycine max
  Clone ID: PAT_MRT3847_86694C.1.pep
YWSGNTQADARVAHKTTERGRWTSIRHEPGRDKGTDRLQLLKPTTCILCMLKDYSNL

SEQ ID NO: 270959 - protein, 74 aa, Glycine max
  Clone ID: PAT_MRT3847_86695C.1.pep
GGYLWPLVWQRFNELFLTRELGRGSVNLRSKNARSASQSIEARRRSCFISQSRKTPFTPSSVPRHSPHHLFRQG

SEQ ID NO: 270960 - protein, 80 aa, Glycine max
  Clone ID: PAT_MRT3847_86696C.1.pep
KVTLARPRVGFPPPFCVIFALHIPPPKIPKKFSPPLGEGKKIFFFLKGGPFPGSFWGFFFGGKKKIFGFSPPSPMFRGFF

SEQ ID NO: 270961 - protein, 87 aa, Glycine max
  Clone ID: PAT_MRT3847_86697C.1.pep
TLFSRGGGFFPVIFSNLCFKGVKTLGWALPGAIWFFPPLAGGYFFFLCLKSCPPSFGLSCFYPPFLTTPKKKSPTETLTLVFLCTPP

SEQ ID NO: 270962 - protein, 56 aa, Glycine max
  Clone ID: PAT_MRT3847_86698C.1.pep
GRFLCWPSSYLVARYSIGLVISACLYEIKPEESPMCVSKTMIYGFKQCRTRSVRLT

SEQ ID NO: 270963 - protein, 64 aa, Glycine max
  unsure (1)..(64): unsure at all Xaa locations
  Clone ID: PAT_MRT3847_86699C.1.pep
FGFTENTGIAXGCAMNSAXRGRANSDIVTSCSKNCXLWNSASTKAMTMTFNPNPSYDAWSMGIL

SEQ ID NO: 270964 - protein, 185 aa, Glycine max
  Clone ID: PAT_MRT3847_8669C.1.pep
TPHFSLHVAEAPETDPEFWKTLLPGSCAHTLAHVAGTVSMSKVAVSFTHIIKSGEPAFSVLGSRFLLGESFPVPVYLSLIPIIGGCALAAVTELNFHMIGFMGAMISNLAFVFRNIFSKKGMKGKSVSGMNYYACLSILSLAILTPFAIAVEGPQMWAAGWQTAMSQIGPQFIWRNNRVGELRFL

SEQ ID NO: 270965 - protein, 167 aa, Glycine max
  unsure (1)..(167): unsure at all Xaa locations
  Clone ID: PAT_MRT3847_866C.1.pep
GAFRQASWSPFGSQSCFGQNNSSSNPFALKPFGSTTPFGSPIDFGGSSTGVAQLSSPFASNTAFSSSSXTSFSSSVPSFWSSSTPDFGSSSSSFGGSSVFGQQPAFGGSESTSTQTGPFGATQPSQLAFGNSIFGFSTSFGASSQPAFGASRTXAFGTSSTPFGTSS

SEQ ID NO: 270966 - protein, 71 aa, Glycine max
  Clone ID: PAT_MRT3847_86700C.1.pep
AGLYLIRYLGYISHSHGKERHVGMGSVHRTRPACKRKNSFPPSRGSIKRKIFIFICGKIRQRILAYMVSST

SEQ ID NO: 270967 - protein, 69 aa, Glycine max
  Clone ID: PAT_MRT3847_86701C.1.pep
ASVRMNQIEYGNNEYIGDHFAICADPIYPSNIRFTQSHKKENKKTNKATFSKLFSFYKGDPFCRLLAAV

SEQ ID NO: 270968 - protein, 70 aa, Glycine max
  Clone ID: PAT_MRT3847_86702C.1.pep
SKHSTSLPFCPEHVYIIYIYNIVLIFLLPFFVLHRQPYGKETIATWNSVSDMVDDDKRNNNLRQLLVICL

SEQ ID NO: 270969 - protein, 55 aa, Glycine max
  Clone ID: PAT_MRT3847_86703C.1.pep
IKAGIYEMYKPTVIIQLCIMKFYIIFKHVIYFYVNYIILKYIFNYYWLNFNFISS

SEQ ID NO: 270970 - protein, 165 aa, Glycine max
  unsure (1)..(165): unsure at all Xaa locations
  Clone ID: PAT_MRT3847_86704C.1.pep
FDNELQLASKFIDQIHASSLNINLKDTWTWRAEANGEFTTKSTYQVLQSELDDQGQYEGFQQLCNIKIPPKALSFAWRLLXDRLPTKDNLVKRQIQVENDLCPFCHNQPETASHLFFKCDKIMPMWWEFFSWIKEDKVIHCRPMGNFLQHYSAAASKASNKRWKM

SEQ ID NO: 270971 - protein, 93 aa, Glycine max
  Clone ID: PAT_MRT3847_86705C.1.pep
ANHNPLKKNVTGFNQQKWRKWTVNKITRLFDWGISIFKVQSLRINKLTMINKIKTISSNEKATISNAFYALLCTKTAKSKHNINHFFQKWMKL

SEQ ID NO: 270972 - protein, 30 aa, Glycine max
  Clone ID: PAT_MRT3847_86706C.1.pep
GSPSSLGAGRTSCFAIALKIKPPLFFCGER

SEQ ID NO: 270973 - protein, 99 aa, Glycine max
  Clone ID: PAT_MRT3847_86707C.1.pep
TFLPPYFLMNVELEFPEEFRSHFLWLQDKPNNKSYNSNSYMKIFASIFHENVQLGFPEELRSQFLWLQDTPNNNTNNSNSYMNIFDSLSLENVQLEFHD

SEQ ID NO: 270974 - protein, 111 aa, Glycine max
  Clone ID: PAT_MRT3847_86708C.1.pep
RGLLRLPLGLGVLGCFVWGPSLCVAVSAWRLWVFWWGLGLLPLPVVPSLGCLARVLGGSGCACSVVAVLLLLFWAGGFLPPFFLCFAPGLGRCGRLFTRAWVGPGGSGPVP

SEQ ID NO: 270975 - protein, 48 aa, Glycine max
  Clone ID: PAT_MRT3847_86709C.1.pep
GVISCHIMALEEGFAWVIHQPILRYTLIKLPPGGNFFDITQLWFCQPP

SEQ ID NO: 270976 - protein, 395 aa, Glycine max
  Clone ID: PAT_MRT3847_8670C.1.pep
MISSLRQPVVGISGSDLLLRQRHATLIKARSFLPSLSREKGQRSLVSVQKPLHIAASLGVGNFVSVKSDDDKRGDLVKCEAYEADRSEVEGASTPSEAAKKVKIGIYFATWWALNVVFNIYNKKVLNAYPYPWLTSTLSLACGSLMMLISWATGIAEAPKTDPEFWKSLFPVAVAHTIGHVAATVSMSKVAVSFTHIIKSGEPAFSVLVSRFLLGESFPVPVYLSLIPIIGGCALAAVTELNFNMIGFMGAMISNLAFVFRNIFSKKGMKGKSVSGMNYYACLSILSLAILTPFAIAVEGPQMWAAGWQTAMSQIGPQFIWWLAAQSVFYHLYNQVSYMSLDQISPLTFSIGNTMKRISVIVSSIIIFHTPVQPINALGAAIAILGTFLYSQAKL

SEQ ID NO: 270977 - protein, 55 aa, Glycine max
  Clone ID: PAT_MRT3847_86710C.1.pep
QCNHSQLTPFLIDSPKACHLNKFFHNRKTKIKYVQNFRFIYPIALFPPPQKKRLP

SEQ ID NO: 270978 - protein, 91 aa, Glycine max
  Clone ID: PAT_MRT3847_86711C.1.pep
EASHGWFSSSKETPSSDKTHTTNEGNFRGSSAEFSIESFNDHKGVKLIENAKKKMISSNSCWQNAYQHLFAGCSEILAVDEERSRLAWHLS

SEQ ID NO: 270979 - protein, 40 aa, Glycine max
  Clone ID: PAT_MRT3847_86712C.1.pep
GLCPENSGLPTLIIRRDEDDRRGAFLKTYSRHKPLQTNEW

SEQ ID NO: 270980 - protein, 54 aa, Glycine max
  unsure (1)..(54): unsure at all Xaa locations
  Clone ID: PAT_MRT3847_86713C.1.pep
MGEQVTDDQIAECKEAFSLFDKDGDGXITTKELGTVMRGLGQNPTEAELRDMIN

SEQ ID NO: 270981 - protein, 194 aa, Glycine max
  unsure (1)..(194): unsure at all Xaa locations
  Clone ID: PAT_MRT3847_86714C.1.pep
DVRGDGIVPDEGGIQILARMPVKSLLRVKTVCKLWYRLVXDKFFXSTLQVSTKNPMILVEITHSFXSVTNLICNGHLTGLCQFSPDFLNDXVTVGPSCYGLVSCSSIPDKGCFYVCPAGTRDSMMLPTSKERHVTRFXPDGDCSLXNLPYDXSPSQSNVHLANYHRMFGHRPDETFICGGFDIELNNGMNFDQI

SEQ ID NO: 270982 - protein, 71 aa, Glycine max
  Clone ID: PAT_MRT3847_86715C.1.pep
PTPLYSTTPWGGMPDPCLRKAPSKVVSIPVHFVGSERTRTNSDSATEIQRVLRGFLVTNTLRKIAAMTVEL

SEQ ID NO: 270983 - protein, 158 aa, Glycine max
  unsure (1)..(158): unsure at all Xaa locations
  Clone ID: PAT_MRT3847_86716C.1.pep
MIKQVLLLVLLFLASGLALSVSESESVSLLPHAADSFNVSYIQMKNAGTCSYSVVITTSCSSPRYTRDQISISFGDAYGNQIYAPRLDDPASGTFESCSSDTFQITXPVTFYYNTYIPRDTWYGFNLCNGASSSSSYQVSMQKWLIFMVLGFVLSCWL

SEQ ID NO: 270984 - protein, 65 aa, Glycine max
  Clone ID: PAT_MRT3847_86717C.1.pep
NELWPSFGNLMNSSSSTRECRPQPRGDPVQPPYPYGTPLLKGFPVLTPPKAKDRIPRGFPLDIGF

SEQ ID NO: 270985 - protein, 188 aa, Glycine max
  Clone ID: PAT_MRT3847_86718C.1.pep
MIKQVLLVLLFLASGLTLSVSETESVSLLPHAAESFNVSYIQMKNAGTCSYLVVISTSCSSPRYTRDQISISFGDAYGNQIYAPRLDDPASGTFESCSSDTFQITGPCAYQICYVYLYRSGLDGWKPESVKINSYNGRAVTFYYNTYIPRDTWYGFNLCNGASSSSYQVSMQKWLIFMVLGFVLSCWL

SEQ ID NO: 270986 - protein, 151 aa, Glycine max
  unsure (1)..(151): unsure at all Xaa locations
  Clone ID: PAT_MRT3847_86719C.1.pep
DICGILPRILIVSRRTVRKNKFVDFVGEYHLDLIVSYGGVPVIVPRVSGVHTLLNSFEPIHGEDIEACWYDHNDDHDSDGLDLSQEELEEIRRLXASDTFIDKEKDSIELSLAKLCLERNIPYLGICRGSQVLNVACGGTLYQDIGKELSK

SEQ ID NO: 270987 - protein, 154 aa, Glycine max
  unsure (1)..(154): unsure at all Xaa locations
  Clone ID: PAT_MRT3847_8671C.1.pep
MISSLRQPVVGISGSDLLLRQRHATPIKARSFLPSLSREKGQGSLVSVQKPLHIGASLGVGNFVSVKSDAKRGDLVKCEAYEADRSEVEGASTPSEAAKKVKIGIYFATWWALNVVFNIYNKKVLNAYPYPLLTSTLSLACGSLMXLISWGTGI

SEQ ID NO: 270988 - protein, 190 aa, Glycine max
  unsure (1)..(190): unsure at all Xaa locations
  Clone ID: PAT_MRT3847_86720C.1.pep
MIKQVLLLVLLFLASGLALSVSESESVSLLPHAADSFNVSYIQMKNAGTCSYSVVITTSCSSPRYTRDQISISFGDAYGNQIYAPRLDDPASGTFESCSSXTFQITGPCAYQICYVYLYRSGLDGWKPESVKINGYNGRPVTFYYNTYIPRDTWYGFNLCNGASSSSSYQVSMQKWLIFMVLGFVLSCWL

SEQ ID NO: 270989 - protein, 211 aa, Glycine max
  unsure (1)..(211): unsure at all Xaa locations
  Clone ID: PAT_MRT3847_86721C.1.pep
SNIVWTMSPTESNTRKSITEEEFLKDVNYALDYGHGPHXTSSLSGTRDVFSWFKTDATLSTNEFFEIPPKVTRLASERMVFPLSLRHANSYALKRVVLIGDAAHTVHPLAGQGVNLGFGDAFSLSRIIAEGIALGTDIGEVNMLKKYEAERKTANIMMMAILDGVQKAYSIDFGPFNILRAAAFHGANYISPLKRSIISYASGEHKLPIFF

SEQ ID NO: 270990 - protein, 126 aa, Glycine max
  Clone ID: PAT_MRT3847_86722C.1.pep
ATVTGEKNAVKGLPSLQKNSCSFRVVDSGGKTIKTDKPDGINGGTAVREGGDACGRKGMGKDDHQVVHQHRANADGNRPIYDTKDWAANGDDYAGVTTDEDIRAVTLLDAHDGGALLGYSTSAEDQ

SEQ ID NO: 270991 - protein, 79 aa, Glycine max
  Clone ID: PAT_MRT3847_86723C.1.pep
PYFSLFKFGLNLRISLLTNLQKMHSSGKHKGAATAREADTIIGENGSNVDTTRDADTNIPATDVPDSGETGNLSKLEEN

SEQ ID NO: 270992 - protein, 120 aa, Glycine max
  unsure (1)..(120): unsure at all Xaa locations
  Clone ID: PAT_MRT3847_86724C.1.pep
LEHLAFKGSFPFQIESLGGSFDAYTTREHSAFLVQTFNNNVAQTVDILSEAVQNPNLSAIDEAREAILKQQQKAANNGEQIVFDHLHATAXFQGESLGRSIAGTPESCQAIFCDDLFNFI

SEQ ID NO: 270993 - protein, 154 aa, Glycine max
  Clone ID: PAT_MRT3847_86725C.1.pep
MRCMMCGKVSGKVMRFTDPKVVGFIIPDDGGEELLVHPSPIKSHRYRMLPAGDYAPFAMESQSDRPALADDATGADEGQTPMNQTLRCWMAKIYLYTRWGHTGNGSSVEATCGTSKLWSLKGIRLLSSILWLQLLLLFKRIMTLLCRLEGRMSW

SEQ ID NO: 270994 - protein, 71 aa, Glycine max
  Clone ID: PAT_MRT3847_86726C.1.pep
QYKTAFKTKQNRKTHNFRWRKSSAREMESVGRAGMRSRTCRPRIQVSPSSYVATCSLRTGQAEVVLSGTGG

SEQ ID NO: 270995 - protein, 72 aa, Glycine max
  Clone ID: PAT_MRT3847_86727C.1.pep
TSETADTHKDEDASAIDDKERLKKVASMKKKKSIKDMDAAARAAANEAAARNALLPASKTNENARYNQQPMQ

SEQ ID NO: 270996 - protein, 146 aa, Glycine max
  Clone ID: PAT_MRT3847_86728C.1.pep
GMYSPMHSSNKKKSLAMFQHDSNCMALLMDGSAALGLDLSFVTHVFLMEPIWDRSMEEQVISRAHRMGASRPIHVATLAMRRTMVEQMLGFLQDADNFRRSPIKDVTESDDDSGGRGYRSLHDFAESSYLLKLRSVYTNLERPEGV

SEQ ID NO: 270997 - protein, 55 aa, Glycine max
  Clone ID: PAT_MRT3847_86729C.1.pep
LFPPSQQWVASVSHPWPEWIQLMKCLFSKGILCHEEEKMFRNAGDFLDKGGYFNK

SEQ ID NO: 270998 - protein, 45 aa, Glycine max
  unsure (1)..(45): unsure at all Xaa locations
  Clone ID: PAT_MRT3847_8672C.1.pep
PTPHKPLSTHYIYILKLSITSQXNPPRNYTHTILNLQLKPYNKTY

SEQ ID NO: 270999 - protein, 66 aa, Glycine max
  Clone ID: PAT_MRT3847_86730C.1.pep
KRGHPGGAHTLAHLQNRGVGGSCPSLNLQSFISGILKTLSNTAITVVNPVHSPLRDLPFTLALKNF

SEQ ID NO: 271000 - protein, 56 aa, Glycine max
  Clone ID: PAT_MRT3847_86731C.1.pep
YKKKKKKKKRRGKKKKTKAKKTKKKKKKKKKNQQKRERKTKREKKKQQHKKHGTQD

SEQ ID NO: 271001 - protein, 79 aa, Glycine max
  Clone ID: PAT_MRT3847_86732C.1.pep
FFFFFFFFFFFFFFFFFFSGKTYFVLVLGVQRFNPWVTFFFNKTPGEVGGVLYFPNQLLKGPPKGLGAKIFKMGWDPKT

SEQ ID NO: 271002 - protein, 222 aa, Glycine max
  unsure (1)..(222): unsure at all Xaa locations
  Clone ID: PAT_MRT3847_86733C.1.pep
LVGKDRLEKYISEMSVVGGWSQNAIQTTNSWLREGLKPRCITRDLKWGVPVPHEKYSDKVFYVWFDAPIGYVSITSCYTHEWEKWWKNPENVELYQFMGKDNVPFHTVMFPSTLLGTSENWTLMKTISVTEYLNYEAGKFSKSKGIXVFGNDAKDTNIPVEVWRYYLLTNRPEVSDTLFTWPDLQAKLNSWSNSFIILVKLFITVFGTWQGYDSIIPSVPDN

SEQ ID NO: 271003 - protein, 93 aa, Glycine max
  Clone ID: PAT_MRT3847_86734C.1.pep
MNETVKQGILALCLRRRRKKKGLWRDDCAWRAVRVKASCRKKRKTKTQNKINRQKKKRKETTRKSKKKKSSKERKKESSRISPKKKKKESKRK

SEQ ID NO: 271004 - protein, 101 aa, Glycine max
  Clone ID: PAT_MRT3847_86735C.1.pep
KPIKNPGKGGQKLPVLKPHRLKGKPDQKGKKPNNGPNPKGAQKKIKGQAKTLGQKQLTLKKTRNDKSPTRPRFKTNKTKVEPHNFPPQIYRDFFLGPKGVP

SEQ ID NO: 271005 - protein, 57 aa, Glycine max
  Clone ID: PAT_MRT3847_86736C.1.pep
MTLPNWHLMSVHSPIFYNILTEKSQVLPNLDTVHHIRLSQSGVIVKRPTTLYLPNIC

SEQ ID NO: 271006 - protein, 50 aa, Glycine max
  Clone ID: PAT_MRT3847_86737C.1.pep
EAITPSSTSSSLCECYRETSASSSATSLGMMIPSPTKYSRDPKWMHDERL

SEQ ID NO: 271007 - protein, 69 aa, Glycine max
  Clone ID: PAT_MRT3847_86738C.1.pep
YTVLFLLLIYLLVFGQFCSEGKVYLSMLEDTGFWLESKILSFIQDQEEDYLKLHRVIYQQIIQTYLTVC

SEQ ID NO: 271008 - protein, 49 aa, Glycine max
  Clone ID: PAT_MRT3847_86739C.1.pep
KINPWRLKQAAQNVSYDPLKGERFLSPRISTPAWLVTIIFKNHTISVLK

SEQ ID NO: 271009 - protein, 95 aa, Glycine max
  Clone ID: PAT_MRT3847_8673C.1.pep
MFSTKERSGFCVWPDARQLCLGKGLLYGFMRLFSIPLKTLRGASRSLRVNQFCSVGNLSASLQIELVPCLRDNYAYLLHDVDTGTVGVDDPFEAA

SEQ ID NO: 271010 - protein, 67 aa, Glycine max
  Clone ID: PAT_MRT3847_86740C.1.pep
ARNDRLVPHIHINFNLNDIHILSLYILSGFWASLGSSEGYTKKFVYVLNAITIIKCISSFKNHIFYH

SEQ ID NO: 271011 - protein, 166 aa, Glycine max
  Clone ID: PAT_MRT3847_86741C.1.pep
MNSYSYYGYQEKNTLTSCEETNMESVICPKPRRLGLINHSSINTQIRPSRHPIISFQSEVEDSGVGAALLDMLLPKENCYLERSGGQVVASSPPFFSGSPPSRASNPLIQDEQFGNGNFSPFTEASSSSARGCVPKKFGHTPAAVRIEGFDCLNRDRRSCSISAVA

SEQ ID NO: 271012 - protein, 165 aa, Glycine max
  Clone ID: PAT_MRT3847_86742C.1.pep
MNSYSYYGYQEKNTLTSCEETRMESVICPKPRRLGLINHSSINTEVGPSRHPIIRKFSVEDSGVGAALLDMLLPKENCYLERSGDQEVASSPPFFSGSPPSRASNPLIQDEQFGNGNFIPFTEASSSSARGCVPKKFGHTPAAVRIEGFDCLNRDRRSCSISAVA

SEQ ID NO: 271013 - protein, 81 aa, Glycine max
  unsure (1)..(81): unsure at all Xaa locations
  Clone ID: PAT_MRT3847_86743C.1.pep
KCSSILNGTTRRVVKVDISYSDIYGNIFENFSQLTELTHLDISWNSLSGGIPEDLTRSQGVXQRNLAHNTLKGELNLKGLT

SEQ ID NO: 271014 - protein, 69 aa, Glycine max
  unsure (1)..(69): unsure at all Xaa locations
  Clone ID: PAT_MRT3847_86744C.1.pep
PSARHALVGNWKPSKNDTMENRLPGLGTTTNILHGDGDSGPGDVESMNKIAPHYQKYLFFLXXXREQGG

SEQ ID NO: 271015 - protein, 26 aa, Glycine max
  Clone ID: PAT_MRT3847_86745C.1.pep
PKRCTISWSEHLLSKLLVAPKNMFYC

SEQ ID NO: 271016 - protein, 176 aa, Glycine max
  Clone ID: PAT_MRT3847_86746C.1.pep
MKMVHGALFLLAAVATLHVSSEAAAAPPPATALSAAAREFLEAHNQARAAVGVEPLRWSEQVANVTSKLARYQRVKTGCQFANLTAGKYGANQLLARGSAAVTPRMAVEEWVKQKQFYNHADNSCAPNHRCGVYTQVVWRKSVELGCAQATCVKEQASLTICFYNPPGNYVGESPY

SEQ ID NO: 271017 - protein, 35 aa, Glycine max
  Clone ID: PAT_MRT3847_86747C.1.pep
FFGDMNARDARWSNAHTFIHKAPPRIPVLRGYEQP

SEQ ID NO: 271018 - protein, 60 aa, Glycine max
  Clone ID: PAT_MRT3847_86748C.1.pep
QEYRPPYSTLASIISIYGYILLLLYTNYDLRSWCSISTGNRYVPIGTEEFSTAQSGSRGS

SEQ ID NO: 271019 - protein, 281 aa, Glycine max
  unsure (1)..(281): unsure at all Xaa locations
  Clone ID: PAT_MRT3847_86749C.1.pep
MKNTELLSRVNADDIIHRIREWRKGNGLQSGTVHTAQQVHDHNTSSTVLASLPFYRTYKPKPGSGGSSGAFAAKGPAEGASYDPWIGRKVWTRGSSASKEHQTEVQAQNRGVQIARKAKRVITRPSHLSDYGLHALVYDMNSANETWEWVNLKEISPEDIRWEGQDPGISGKGGRPGPGRGLKKSMPHGGAVTGSGRGRGMMKVQPKKDFTLSQKGAGXKATNDIEILHTDTLIKEEDEQALVNAITRLGDVSEGESARCRTSLFARPVNGSGKTLEETTV

SEQ ID NO: 271020 - protein, 73 aa, Glycine max
  Clone ID: PAT_MRT3847_8674C.1.pep
YRCWGAFYILLGTRRTGPKKFFFSTRFIKYTPLKNAHFCAPQRKKNLASPQRGGFLFKAPKKPFFFWGGGPPL

SEQ ID NO: 271021 - protein, 54 aa, Glycine max
  Clone ID: PAT_MRT3847_86750C.1.pep
AHLISMRLLACSWLPVCQLVDHDVGTHKELTSLDVQVAPPQAGEVRVHMVFTAV

SEQ ID NO: 271022 - protein, 380 aa, Glycine max
  unsure (1)..(380): unsure at all Xaa locations
  Clone ID: PAT_MRT3847_86751C.1.pep
MKNTELLSRVNADDIIHRIREWRKGNGLQSGTVHTAQQVHDHNTSSTVLASRKKKKTSQSVASLSLGAPSPAVHPSMQPSSSALKHEPPSGTKTTKQKSFPSTGLTXKPGSGGSSGAFAAKGPAEGASYDPWIGRKVWTRWPEDHHFYEAAKRVITRPSHLSDYSHKLVPLTTMLLRDWHIVNVLLLSWIIIRIEDIRWEGQDPGISGKGGRPGPGRGLKKSMPHGGAVTGSGRGRGMMKVQPKKDFTLSQKGAGXKATNDIEILHTDTLIKENGTKTXVEKVFTASHPDPMEMEKAKKMLKEDEQALVNAITRLGDVSEGESDVEPPFSQDQSMDQEKHWKKQQYNSSGVRVPDGSNGDKLPRETSAPSEYPHEVGNKA

SEQ ID NO: 271023 - protein, 55 aa, Glycine max
  Clone ID: PAT_MRT3847_86752C.1.pep
IVKRSFSALSTTKESGKASISRSRPKREINALSAAVVLSQAQRTTVAKLKSTYSR

SEQ ID NO: 271024 - protein, 276 aa, Glycine max
  unsure (1)..(276): unsure at all Xaa locations
  Clone ID: PAT_MRT3847_86753C.1.pep
MPATPPSSDLILHRLTSSDCEIKLKAIREVKNQIIGNRTKKLSYIKLGAVPALAAALAQADADSASGSTLIVQSAAALGSFXCGVDAGVRAVLDAGAFPHLIRLLSAGSSNVVDAAARSLRMIYQSNLAPKYDFFKEQDMQFLLSLLKSGNENLTGLGASIVIHSCEKRDEQNMLCCAGALETLISLLDGSLSQRDSSLESLAAILKNNPEVVYKFVDLQNGRVLSSVIELTKDRYSRTRLLACLCLICVKNSSSCYLQDIGIKAKLIHILLELLD

SEQ ID NO: 271025 - protein, 65 aa, Glycine max
  Clone ID: PAT_MRT3847_86754C.1.pep
FITFLHHLTRSFGSMSFVLGESTDANQLGHYFKNQNGNDNNQINKGINFANAGCCKLHEAQELDL

SEQ ID NO: 271026 - protein, 47 aa, Glycine max
  Clone ID: PAT_MRT3847_86755C.1.pep
FFVTKLTLLFWSSSSLLPKKCFSFIKTVHFAFHLTLWSVNMQDEHLI

SEQ ID NO: 271027 - protein, 40 aa, Glycine max
  unsure (1)..(40): unsure at all Xaa locations
  Clone ID: PAT_MRT3847_86756C.1.pep
IFNLXIGRKCXQGXTFEVXFLSNDDVXRSXQHHXLCLLEN

SEQ ID NO: 271028 - protein, 50 aa, Glycine max
  unsure (1)..(50): unsure at all Xaa locations
  Clone ID: PAT_MRT3847_86757C.1.pep
VVVFFLXFVXFLLXXPXVXXXAXXXLPPXXXCXSLXAXXXLSIYXSXLML

SEQ ID NO: 271029 - protein, 66 aa, Glycine max
  Clone ID: PAT_MRT3847_86758C.1.pep
RKSQLKNKDTASTQISFRWLEQRCYNQSIVIIFRKKNHLFFSKRKKNSELNELPKAILIRGLFISV

SEQ ID NO: 271030 - protein, 65 aa, Glycine max
  unsure (1)..(65): unsure at all Xaa locations
  Clone ID: PAT_MRT3847_86759C.1.pep
PQDIDVSPNSVLITLTVLIGASDDDSEIKNIDAAYGEIANVFGXPKTDSDSDDYDGDGFRMSIPS

SEQ ID NO: 271031 - protein, 265 aa, Glycine max
  Clone ID: PAT_MRT3847_8675C.1.pep
MEREKKRRLVLVHGACHGAWCWYKVAALLKSNGHQVTALDMAASGIHPKQVHDLNSISEYFEPLMYFLGSLPTEERVILVGHSFGGACISVAMEMFPTKIAAAVFVAAWMPSPDLSFSTLLQEFQYSRIMESDLHSKIMFDENTSNHRNGSRMFGPQFLASKLYQLSPPEDLTLAMSLLRPTRIYGDVELLRENTRLTKDNYGTVAKAYIVCEQDNVLRKDFQLSMIERNPPNEVKVIVGADHMPMFSKPQELFSYLQEIANTYY

SEQ ID NO: 271032 - protein, 42 aa, Glycine max
  Clone ID: PAT_MRT3847_86760C.1.pep
SSLNKSSNGEKVCFNNLHSPHPYKLTFRIRPYIQNSYQTLTT

SEQ ID NO: 271033 - protein, 59 aa, Glycine max
  Clone ID: PAT_MRT3847_86761C.1.pep
LLQPIGAIFPIIKGAIDLRKLENQKENSHFFCHCFFFLLYLFFVYFCADAEVGELGWRL

SEQ ID NO: 271034 - protein, 48 aa, Glycine max
  unsure (1)..(48): unsure at all Xaa locations
  Clone ID: PAT_MRT3847_86762C.1.pep
XXXTNXPPMAASXXXSTSLXVCFNYXYHRRPSISALSCHSNXIXXTNL

SEQ ID NO: 271035 - protein, 410 aa, Glycine max
  Clone ID: PAT_MRT3847_86763C.1.pep
MFGRAPKKSDNTRYYEILGVSKNASQDDLKKAYKKAAIKNHPDKGGDPEKFKELAQAYEVLSDPEKREIYDQYGEDALKEGMGGGGGHDPFDIFSSFFGGGSSRGRRQRRGEDVVHPLKVSLEDLYLGTSKKLSLSRNVICSKCTGKGSKSGASMKCAGCQGTGMKVSIRHLGPSMIQQMQHACNECKGTGETINDRDRCPQCKGEKVVQEKKVLEVIVEKGMQNGQKITFPGEADEAPDTITGDIVFVLQQKEHPKFKRKAEDLFVEHILSLTEALCGFQFVLTHLDGRQLLIKSNPGEVVKPDSYKAINDEGMPMYQRSFMKGKLYIHFTVEFPDSLNPDQVKALEAVLPPKPSSQLTDMELDECEETTLHDVNMEEETRRKQQQAQEAYDEDDDMPGGAQRVQCAQQ

SEQ ID NO: 271036 - protein, 217 aa, Glycine max
  Clone ID: PAT_MRT3847_86764C.1.pep
MFGRAPKKSDNTRYYEILGVSKNASQDDLKKAYKKAAIKNHPDKGGDPEKFKELAQAYEVLSDPEKREIYDQYGEDALKEGMGGGGGHDPFDIFSSFFGGGSPFGSGGSSRGRRQRRGEDVVHPLKVSLEDLYLGTSKKLSLSRNVICSKCTGKGSKSGASMKCAGCQGTGMKVSIRHLGPSMIQQMQHACNECKGTGETINDRDRCPQCKGEKVVQ

SEQ ID NO: 271037 - protein, 417 aa, Glycine max
  Clone ID: PAT_MRT3847_86765C.1.pep
MFGRAPKKSDNTRYYEILGVSKNASQDDLKKAYKKAAIKNHPDKGGDPEKFKELAQAYEVLSDPEKREIYDQYGEDALKEGMGGGGGHDPFDIFSSFFGGGSPFGSGGSSRGRRQRRGEDVVHPLKVSLEDLYLGTSKKLSLSRNVICSKCSGKGSKSGASMKCAGCQGTGMKVSIRHLGPSMIQQMQHACNECKGTGETINDRDRCPQCKGEKVVQEKKVLEVIVEKGMQNGQKITFPGEADEAPDTITGDIVFVLQQKEHPKFKRKAEDLFVEHTLSLTEALCGFQFVLTHLDSRQLLIKSNPGEVVKPDSYKAINDEGMPMYQRPFMKGKLYIHFTVEFPDSLNPDQVKALEAVLPPKPSSQLTDMELDECEETTLHDVNMEEETRRKQQQAQEAYDEDDDMPGGAQRVQCAQQ

SEQ ID NO: 271038 - protein, 301 aa, Glycine max
  Clone ID: PAT_MRT3847_86766C.1.pep
MAAPAPFSLSSDPFASKSATSTIFGPAALKKGNFEQTHFGIFTALRRNQGFTLKASMGPPGFTEKLNNNKLKTLADAEDGCDIFNDLKDRFLSFKKNKYLKNIEHFENLAIQPTPKFMVIACADSRVCPSNVLGFQPGEAFMIRNVANLVPTFESGPTETNAALEFAVNSLLVENILVIGHSCCGGIRALMGMQDDDVEKSFIKSWVIAGKNARKKAKAAASNLSFDEQCKHCEKESINHSLLNLLTYPWIEEKVANGELSIHGGYYDFTDCSFEKWTLDYRGTKLEENGKIAAKNKIFWC

SEQ ID NO: 271039 - protein, 69 aa, Glycine max
  Clone ID: PAT_MRT3847_86767C.1.pep
MKDKLERDASVIYEHEKDDLELPMFEWSTITCATNNFSPDNKLGEGGFGSVYKGILDDVGEIAVKRLSK

SEQ ID NO: 271040 - protein, 68 aa, Glycine max
  Clone ID: PAT_MRT3847_86768C.1.pep
NCLLSPLMDANINIVGFCGGGRRYPPHYEGVFFFCGGKSLFYIGGGTWRVWFYILRLSKLSLSHISIN

SEQ ID NO: 271041 - protein, 26 aa, Glycine max
  Clone ID: PAT_MRT3847_86769C.1.pep
SATRRLQNTGAGRLQQEYTTIIILHN

SEQ ID NO: 271042 - protein, 192 aa, Glycine max
  unsure (1)..(192): unsure at all Xaa locations
  Clone ID: PAT_MRT3847_8676C.1.pep
MCGGAIISDFIGVKRGRNLAAQELWSELDPFSDFLGFDTTNSKNQPPLQKIPDKKVVSSCEKKKKSVVGAEKKKSDSGRARKNVYRGIRQRPWGKWAAEIRDPHKGVRVWLGTFPTAEEAAQAYDDAAIRIRGDKAKLNFPATXFPPPPLRHLPKSNAASALTPSLNKAAAAAHNPPLDPPANAAGGKTNST

SEQ ID NO: 271043 - protein, 322 aa, Glycine max
  Clone ID: PAT_MRT3847_86770C.1.pep
MATFNGFVDGTPSESALIFLGTGCSSMVPNLMCLLQPSDPPCPVCVQSLSIPPERNPNYRCNTSLLIDYGAAAANGGDRKYILIDVGKTFRETVLRWFVAHRIPRIDSIILTHEHADAVLGLDDIRAVQAFSPTNDIDPTPIYLSQHSMDSIAEKFPYLVQKKSLECAEIRRVAQIDWNIIADDCNKHFLASGLKFTPLPVMHGEDYICLGYLFGDKNRINSMRNISWENRFIFCIVKKCFFRVLHLFVLDSLYGTGSHNVHLCFPQTLETVKRLCPKQTLLIGMTHEFDHHKDNEFLMEWSRREGIPVKLAHDGLRVPINL

SEQ ID NO: 271044 - protein, 158 aa, Glycine max
  Clone ID: PAT_MRT3847_86771C.1.pep
MLMVRRTPSYSLVTFYVRRSIAQFRNLTSETKNGDHEHPTKALDAKDCNFVYEICRITRTKPRWEDTLLSQYPSFNFKDPSFFLLYLKHQNNAFLSLRFFHWLCSSCGFSPDQSSCNVLFQVLVDAGAGKLAKSLLDSPGFTPEPASLGGYIQCLNGA

SEQ ID NO: 271045 - protein, 98 aa, Glycine max
  Clone ID: PAT_MRT3847_86772C.1.pep
PIMYFVSENNNKYILKSNCAIMLLQVKACDNVYRILLILIRLGWSINILYKISSTSAVVKSHIFARGCISAVVKSHIILMEIPILLIELVKACIRIIL

SEQ ID NO: 271046 - protein, 136 aa, Glycine max
  Clone ID: PAT_MRT3847_86773C.1.pep
MATSNGFVDGTSPESALIFLGSGCSSMVPNVMCLLQPSDPPCPVCVQSLSIPPERNPNYRSSFLFFHFFSLSRNFLKISICRCNTSLLIDYCGDANAGDRKYILIDVGKTFRETVLRWFVAHRIPRVDSVSSLFLI

SEQ ID NO: 271047 - protein, 74 aa, Glycine max
  Clone ID: PAT_MRT3847_86774C.1.pep
DARADALGSFKHIRLEERPAHGNRRQCPATTRRTGRRKSALSIKLRSQLSQCNKEKGTYGDPTRETTTTAKDKR

SEQ ID NO: 271048 - protein, 101 aa, Glycine max
  Clone ID: PAT_MRT3847_86775C.1.pep
SNQWCATILRLVTLVKLFYPLSTQVLKIINSCVFLIPSLPLLGKFFIVTGKDKGEGENQSQYYMLIFRHQLFPRPQCVQRLTFQLFIYEYKLFVLKFRALL

SEQ ID NO: 271049 - protein, 129 aa, Glycine max
  Clone ID: PAT_MRT3847_86776C.1.pep
KRGGQPRVESPKKWAKELAYPPKGGFGNIQGAPNWGVSFSPGKKKRPKQNYNFGKKSPFRKKGPKKKDFRTKKLKARKKLGGRGAGGQGKNPWVYHLQPKGGDPQKKEHGPNLKTGKGFKKKNQKRPSR

SEQ ID NO: 271050 - protein, 44 aa, Glycine max
  unsure (1)..(44): unsure at all Xaa locations
  Clone ID: PAT_MRT3847_86777C.1.pep
GRVCSHEILFYCLMYHPLYLFSTFVLISKTKRVRRTXXXSTXGN

SEQ ID NO: 271051 - protein, 545 aa, Glycine max
  Clone ID: PAT_MRT3847_86778C.1.pep
MELQRRQDQSLSQRKGQKRKLDEEQHHEDRQILPAPPTADERAALLSDVAEQVSILESTFTWNEADRSAAKRATHALADLAKNEDVVNVIVEGGAIPALVKHLQAPPLSDLVQHPLPFEHEVEKGSAFALGLLAVKPEHQQLIVDSSALTHLVDLLKRHRNGLTSRAINSLIRRAADAITNLAHENSNIKTRVRMEGGIPPLAHLLDFADAKVQRAAAGALRTLAFKNDENKNQIGECNALTTLILMLRSEDAGVHYEAVGVIGNLVHSSPNIKKEVLLAGALQPVIGLLSSCCSESQREAALLLGQFAATDSDCKVHIVQRGAVQPLIEMLQSPDVQLGEMSAFALGRLAQDPHNQAGIAHNGGLVPLLKLLDSKNGSLQHNAAFALYGLADNEDNACVRPRVRGVQRLQDGEFIVQATKDCVAKTLKRLEEKIHGRVLNHLLYLMRVSEKGCQRRVALALAHLCSSDDQRIIFIDHYGLELLIGLLGSSSSKQQLDGAVALCKLADKASTLSPVDAAPPSPTPQVYLGEQYVNNATLSDVTFL

SEQ ID NO: 271052 - protein, 86 aa, Glycine max
  unsure (1)..(86): unsure at all Xaa locations
  Clone ID: PAT_MRT3847_86779C.1.pep
XRKNVCTTIESNLHSKNSWTLFYVSLDTSTQINRQKKAYSLIVLHSIGYETIKHLKQSLICFAHLANESTNSKILVFLLAQNVPSF

SEQ ID NO: 271053 - protein, 91 aa, Glycine max
  Clone ID: PAT_MRT3847_8677C.1.pep
KLIFPVTDRPPAKKRVCFSLDATAEQSSSSQSPTGSAGSRPSTAFYGGVDELDLKQLDRFLGLDIMGDEWDNMDDLWMLNDVVVPIRHLIY

SEQ ID NO: 271054 - protein, 80 aa, Glycine max
  Clone ID: PAT_MRT3847_86780C.1.pep
PAGPGTAPRPFLPGQLAEVDGNPPPPAPQAPAASPSTASPAPAAPGDLRQAHFDRLIRRSKLWCYAKGFALDSPSLPRGP

SEQ ID NO: 271055 - protein, 84 aa, Glycine max
  unsure (1)..(84): unsure at all Xaa locations
  Clone ID: PAT_MRT3847_86781C.1.pep
EEGSPFVLCLPEFKFXISITKAFGIAFAMTIFSEFDVPVSWPILLWYWAVLFSLTMKRQIFNMIKYKHLPFASRKQGYDGKRAP

SEQ ID NO: 271056 - protein, 88 aa, Glycine max
  Clone ID: PAT_MRT3847_86782C.1.pep
LSACISKQLYSYSSNWLFFNSILFLPLCQRFFNPHKCYLDTAFSFCILFLVLSKSLFRPFSFASANLPWLVSPPPPPKKVVLQQCSTA

SEQ ID NO: 271057 - protein, 57 aa, Glycine max
  Clone ID: PAT_MRT3847_86783C.1.pep
LTVGLGLECWYPSTETHAMAEWIHKIRHLALQAPYADIEDSSEAPYWAKIPDGHFSN

SEQ ID NO: 271058 - protein, 198 aa, Glycine max
  unsure (1)..(198): unsure at all Xaa locations
  Clone ID: PAT_MRT3847_86784C.1.pep
XGSFMVXRXXXIAXACIEDXXEYSQXFHKDFQACDVKMXPNNILENIFYFRVCSYTEQIALINYLDKFITENKDVKILIVDSVTFHFRQDFDDMALRTRLLSEMALKLMKLAKKFRLAVVMFNQVTTKHIEGSFQLTLALGDSWSHSCTNRIILFWNGNERHAFIDKSPSLKSASAPYSVTTRGIRNSTSSCKRIKMM

SEQ ID NO: 271059 - protein, 52 aa, Glycine max
  Clone ID: PAT_MRT3847_86785C.1.pep
KSLRFWSRPLRIHDWDHFVSTTETCLSRVARWIVLTWTAHSLSNIPCTTMKP

SEQ ID NO: 271060 - protein, 101 aa, Glycine max
  Clone ID: PAT_MRT3847_86786C.1.pep
LSCAPPPGTCPPQGAPRSRPLRTTYTRPAPRFYRHFPPLPYVDDSDGYEAIAQRLERVLTLRIVPAGTELYAIMQDCFPIARGGPTPDGTVRARQRPRRAH

SEQ ID NO: 271061 - protein, 61 aa, Glycine max
  unsure (1)..(61): unsure at all Xaa locations
  Clone ID: PAT_MRT3847_86787C.1.pep
GEYGDMGKGGIIDPFKVIRTALVYSTSGLSFMATTEGGGFXLPNDDKDTPTMAGGMGGIGY

SEQ ID NO: 271062 - protein, 62 aa, Glycine max
  Clone ID: PAT_MRT3847_86788C.1.pep
KGQCFQGMEPKSVRVALSRAHNTMKFNYFSSLVFVKELHALVGGHITFWIGKSGTHFEGVET

SEQ ID NO: 271063 - protein, 84 aa, Glycine max
  Clone ID: PAT_MRT3847_86789C.1.pep
EELELSLGLSMNGTSAVEATSKKMGRTTYVPEFVRDEEMGYAAAMGSTASLERTCSLSTDTDEVWRKRKELPTLPWVEARTKLC

SEQ ID NO: 271064 - protein, 88 aa, Glycine max
  Clone ID: PAT_MRT3847_8678C.1.pep
WHVELICIDTPNQTTVFDIHLGNIPMIHETCWEYYDASCVLHTGYCQICMKMRNPLLICNLMNFTCAQLDNAIHEIKHDPFVTCAQSM

SEQ ID NO: 271065 - protein, 115 aa, Glycine max
  Clone ID: PAT_MRT3847_86790C.1.pep
NLYIARFPVAYITHPKTQLDTKPAPFMAAFSSKGPNTIVPEILKPDITAPGVSVTAAYTEAQGPTNQVFDKRRIPFNSVSGTSMSCPHVSGIVGLLRALYPTWSPSVVFSQPYTR

SEQ ID NO: 271066 - protein, 61 aa, Glycine max
  Clone ID: PAT_MRT3847_86791C.1.pep
NTKKEVPSHTLSHPMAPRANDQFIKVRRVAKLVLDIQRAHTLIKFKTLTMMSDVIIYRTRG

SEQ ID NO: 271067 - protein, 55 aa, Glycine max
  Clone ID: PAT_MRT3847_86792C.1.pep
DMCIIETVFRDNYNLKEIMIFKRLILTKSKQNFLFEIRYKSILSILAVTIMQDKE

SEQ ID NO: 271068 - protein, 469 aa, Glycine max
  unsure (1)..(469): unsure at all Xaa locations
  Clone ID: PAT_MRT3847_86793C.1.pep
YSAREPLRGYVLVARETSFDASVLESPALEKPLNYSLIWSLDSHDECVYFWLPNPPTGYKAMGIVVTSSPKEPEVEEVRCVRDDLTETCETSDLLLTVKSKYAKDSFQVWNTQPCDRGMLARGVDVGTFFCGSTYFDSEQVVDIMCLKNLDSLLXHRMPKKNQIHALIQHYGPTVYFHPDEKYLPSSVQWFFKNGAVLHAAGNKKGIAIDYQGSNLPSGGTNDGAFWIDLPTDGDARNNLKKGNIESAELYVHVKPALGGAFTDIVMWVFCPFNGPATLKVALMNIEMSKIGEHVGDWEHFTLRISNFTGELWSVYFSQHSGGGWIHAFDLEFNKGNKPIVYSSKDGHASFPHPGTYLQGSSKLGIGVRNDAAQSKFIVDSSVKYQIVAAEYLGEGVITEPCWLQYMREWGPTVVYDSRSEIEKIINLLPLFVRFSVENLFELFPTELYGEEGPTGPKEKDNWLGDEYC

SEQ ID NO: 271069 - protein, 80 aa, Glycine max
  unsure (1)..(80): unsure at all Xaa locations
  Clone ID: PAT_MRT3847_86794C.1.pep
RRSAASARTTKAHSREAQETXXXTXEXXNEGHPDKRXDQSXEAEPDAXQEQDPDSKGAXETSTKTNXXXXXGENTTKANX

SEQ ID NO: 271070 - protein, 44 aa, Glycine max
  Clone ID: PAT_MRT3847_86795C.1.pep
IVMVCKLVVILVFLLNYGLKQRFNWVGVIETGEGEKEIQYAFAI

SEQ ID NO: 271071 - protein, 203 aa, Glycine max
  unsure (1)..(203): unsure at all Xaa locations
  Clone ID: PAT_MRT3847_86796C.1.pep
SVEKNEKSVIDEEPKINYRGWKVMPFIIGNETFEKLGTIGTLANLLVYLTTVFNLSSLTATNIINIFTGSASLSTLLGAFLCDTYFGRYKTLGFCTIASFLGLLVIQLTAWIKKMHPPHCGSESITCTGXMVSLSLIVYIQSNVSWAIGLGIPAALMLISCTLYYTGSNYYVKVKATGPAPLTSLAQAVXVVAIKKRGLNLSE

SEQ ID NO: 271072 - protein, 50 aa, Glycine max
  Clone ID: PAT_MRT3847_86797C.1.pep
LQKLMVKLCILFVYSKYQPFFMKSNSPSLSLPFYYITNKNILHNIPQLQT

SEQ ID NO: 271073 - protein, 597 aa, Glycine max
  unsure (1)..(597): unsure at all Xaa locations
  Clone ID: PAT_MRT3847_86798C.1.pep
MTGVEAMEKNEKSVTDEEPKINYRGWKVMPFIIGNETFEKLGTIGTLANLLVYLTTVFNLSSLAAXNIVNIFNGSASLSTLLGAFLCDTYFGRYKTLGFSTMASFLGLLVIQLTAWIKKMHPPHCGRDSITCIGPTTGQMGFLLAGFGLLIVGAAGIRPCNLAFGVDQFNPNTESGKKGINSFFNWYFFTFTFAQMVSLSLIVYIQSNVSWAIGLGIPAALMLISCTLYYTGSNYYVKVKATGPAPLTSLAQAVVVAIKKRRLNLSEYPLDSSLFAYVSPQSINSKLLHTSQFRFLDKAAIITPQDGINPDGSASDPWSLCSMQQVEELKCLLRVIPIWFAGIFFYIAIVQQNTMLVFQALQSDRRILSTNFKILAASYTIFQMLSLTIWLPIYDRILVPSLQRVTKKEGGITVLQRIGFGMFLSILCTMVSGVVEERRRTLALTNPIGLEPRKGAISSMSGLWLVPQLTLAGLSDAFAIVGQVEFFYKQFPENMKSLAASLFFCGLAGSSYLSSLLISIIHRATAKSSTGNWLPQDLNKGRLDRLYYIITALEVVNFGYFILCAKWYKYKGTGSSSSGDLQLDQVSKPSERTVNTV

SEQ ID NO: 271074 - protein, 601 aa, Glycine max
  unsure (1)..(601): unsure at all Xaa locations
  Clone ID: PAT_MRT3847_86799C.1.pep
MTGVETMGKNENQSVEKNEKSVIDEEPKINYRGWKVMPFIIGNETFEKLGTIGTLANLLVYLTTVFNLSSLTATNIINIFTGSASLSTLLGAFLCDTYFGRYKTLGFCTIASFLGLLVIQLTAWIKKMHPPHCGSESITCTGPTTGQMTFLLAGFGLLIVGAAGIRPCNLAFGVDQFNPNTESGKKGINSFFNWYFFTYTFAQMVSLSLIVYIQSNVSWAIGLGIPAALMLISCTLYYTGSNYYVKVKATGPAPLTSLAQAVVVAIKKRRLNLSEYPLDSSLFAYVSPQSINSKLLHTSQFRFLDKAAIITPQDGINPDGSASDPWSLCSMQQVEELKCLLRVIPIWFAGIFFYIAIVQQNTMXVFQALQSDRRILSTNFKILAAYYTIFXQSSSLTIWLPIYDRILVPSRQRVTKKEGGXIAIHQSIGLGMFLSILCTIVSGVVEERRRTLXLSNPYPTNGIAMSKAAKKMVIESSRRPRLSNIVKRAGHVPKKKRDKNMHAMAPPLLSTIYIFNPVVHKMLSDSEGAKEQRPENSLEAIDHKGRLDYFYYIITALEVVNFGYFILCAKWYKYKGTGSSSSGDLQLDQVSKPSERTVNTV

SEQ ID NO: 271075 - protein, 223 aa, Glycine max
  Clone ID: PAT_MRT3847_8679C.1.pep
MCGGAIISDFIGVKRGRNLAAQELWSELDPFSDLLGFDTTTTTTNQPPLPDKKVVSSCEKKKKKSVSAEKKSGGRARKNVYRGIRQRPWGKWAAEIRDPHKGVRVWLGTFPTAEEAARAYDDAAKRIRGDKAKLNFPATAPPPSKKQRCLSPDTTTEQSSSSQSTTGSTGSPPSAAFHGGGDELDLKQLERFLGLDNMGAEWDNMDDLWMLDDVVVPNRHLIY

SEQ ID NO: 271076 - protein, 54 aa, Glycine max
  Clone ID: PAT_MRT3847_867C.1.pep
TPSIYIIICLQNTNILLSNTLFLLLTKYLNLLKKSHFISLTILPFHFNEYIHPL

SEQ ID NO: 271077 - protein, 427 aa, Glycine max
  unsure (1)..(427): unsure at all Xaa locations
  Clone ID: PAT_MRT3847_86800C.1.pep
MASKEFSGLCSLAPSLSESILCTTGLKMYMLESKGGAIACMFLSLFFLGTWPALLTMLERRGRLPQHTYLDYSITNFLAALLIAFTLGGIGKGTHDQPNFLVQLAQDNWPSVLFAMGGGLFLSLGNLSCQYAFAFVGLSVTEVITASITVVIGTTLNYFLDDKINKAEILFPGVGCFLIAVFLGSAVHSSNAADNKAKLNNFTGDYKNXRHSLKDGDIVKSKDLEGGSSSADNVEAGTAVFLMELEEKRAIKVFGKSTLIGLFLTFFAGLCFSMFSPAFNIATNDQWNTLRKGVPHLTVYTAFFYFSVSCFVIAMILNITFLYHPVLNLPKSSFKAYLADSDGRVWAFLAGLLCGFGNGLQFMGGQAAGYAAADAVQALPLVSTFWGIVLFGEYRKSSRRTYVLLGSMLLMFVAAVAVLMASSGHRK

SEQ ID NO: 271078 - protein, 440 aa, Glycine max
  unsure (1)..(440): unsure at all Xaa locations
  Clone ID: PAT_MRT3847_86801C.1.pep
MYMLESKGGAIACMFLSLFFLGTWPALLTMLERRASVASEMYVVESKVGAIGCMLVSLFFLGTWPAVMTLLERRGRLPQHTYLDYTLTNLMAAVIIAFTFGQIGNAQPNFLSQLSQDNWPSVLFAMGGGVVLSVGNLSTQYAWAFVGLSVVEVITSSITVVIGTTLNYFLDDKINKAEILFPGVGCFLIAVCLGSAVHSSNTVDNKAKLSDYKDAAKSTSVTTFKETSEVESKDLVDGTHKAKAGTAAFLIELEKKRSIKVLGKSTFIGLAITFFAGVCFSLFSPAFNLATNDQWHTLKKGVHHLSVYTAFFYFSVSCFVIAILXNITFLYHPVLNLPKSSFKAYLADSDGRVWAMLAGLLCGFGNGLQFMGGQAAGYAAADAVQALPLVSTFWGVVLFGEYRKSSRRTYILLGSMLFMFIVAVAVLMASSGQRTSTAKE

SEQ ID NO: 271079 - protein, 41 aa, Glycine max
  Clone ID: PAT_MRT3847_86802C.1.pep
PQSILGIGQVQTHHIIQSSDNQEKQLKCSFFTSRFFQYGII

SEQ ID NO: 271080 - protein, 34 aa, Glycine max
  Clone ID: PAT_MRT3847_86803C.1.pep
DIAQEKILNILYFKNIKYMIIFLIQYFSHENLKH

SEQ ID NO: 271081 - protein, 244 aa, Glycine max
  Clone ID: PAT_MRT3847_86804C.1.pep
QVKCILVIRECGTHGKLHKPDTVPSKDFEINLFKDKDRVRESTTNFQNQAFNTFVAEFDTTNLNSGLSNKPEREQALEAEVEKLKEKLKEANLEKAEITSKYEKLSAICRSQRQELQDLKQALAARTPSPSREGLKISPAVTSSASASASSNKSWQAFPEEPQQQKSLSAENTSKSVRVKNGQQNKQPVPLATDFDSWGFGSDSFSAVPAGSPHMQRPSSAGTKSQAFGEANKSTSQPAGWAGF

SEQ ID NO: 271082 - protein, 118 aa, Glycine max
  Clone ID: PAT_MRT3847_86805C.1.pep
VRESTTNFQNQAFNTFVAEFDATKLNPGLNNKPEREQALEAEVEILKEKLKEANLEKAEITSKYEKLSAICRSQRQELQDLKQALAARTPSPSREGLKISPAVTSSASASASSVISIL

SEQ ID NO: 271083 - protein, 98 aa, Glycine max
  unsure (1)..(98): unsure at all Xaa locations
  Clone ID: PAT_MRT3847_86806C.1.pep
MYNSIIDFPFLKNFXVPIHPNXAPTVKPVTWSPLCGWIKCNSDGAARGAPGNVACGGILGDYRGSISWHIGSTTALFAELLAAMKSIEIAASCGWCNL

SEQ ID NO: 271084 - protein, 82 aa, Glycine max
  Clone ID: PAT_MRT3847_86807C.1.pep
MNGGKEKERRRFGAFALLGWAGISTIYFGFSERLSISIVYEYGEFSLLCQIHSTSTFTSTTAFVFHGSFGFWSEGRRGGHQF

SEQ ID NO: 271085 - protein, 60 aa, Glycine max
  Clone ID: PAT_MRT3847_86808C.1.pep
PDHSTMSPGLSIDVLRFAYNVQHTYISPATQCNQTHCRLCVISRLRVPLCQLFFLFALND

SEQ ID NO: 271086 - protein, 93 aa, Glycine max
  Clone ID: PAT_MRT3847_8680C.1.pep
SLRLLYNAGLFFFMYWEGSPPSSVKIPSIWTESYCSHSFKILPFLAGHSHDGLLMFFSLRIWGPLFGSKGHSSNVAGFSIYLAWAREKKKIIL

SEQ ID NO: 271087 - protein, 62 aa, Glycine max
  Clone ID: PAT_MRT3847_86810C.1.pep
ASAMFIEQSVGLDSRGIACKSSGAHSVQSPAGFAIVGDAQPLLVSHRERTEWSVKVYSCVKR

SEQ ID NO: 271088 - protein, 35 aa, Glycine max
  Clone ID: PAT_MRT3847_86811C.1.pep
RPVQCNEDIMQPMILMLSFYNHCSTTKEIMWSICR

SEQ ID NO: 271089 - protein, 231 aa, Glycine max
  Clone ID: PAT_MRT3847_86812C.1.pep
HSLHACSISYNRLPTASLTIGVLYTVLFKQPPDYSFFKTFGCSCYCFLRPYNKHKLEFRSHECLFLGYSTSHKGYKCLSPTGRLFIDVVFNEFKFLYTELFLLSPKPNTSPPFPLSILPQYPLCHLYRFHKLYPHRSLPPVLTLPMIHLSCSSFPFGISVSNFGTCHLLLCILLLLFLLSVVLFLNLQQLLVLFLSLPPNLTQTPLLIALTFILCKPDLNLVFLKTESIPL

SEQ ID NO: 271090 - protein, 186 aa, Glycine max
  Clone ID: PAT_MRT3847_86813C.1.pep
MAGDDLAGDHTPELLCLVHEIAGMCSAGSSSGADAMFRKDCTDLVRRISLLTHLFEEIKELKNNNDVGGSASSSSSYSSSSSSASSKWSSDLVLALHSARRLLSVARNFRSYCSSDGAAKTIVFQFQCVTWKLEKLLSNLPYDDLDISEEVKEQVDLVRTQLRRATDKYGFMISKMPSHELSQPLA

SEQ ID NO: 271091 - protein, 84 aa, Glycine max
  Clone ID: PAT_MRT3847_86814C.1.pep
IYRARSLIRFSRVSSYGRPVGGSPWSLSWSRLRSFLSCFIPWLLCSLSGGFIPVFRRGTSPVSAPFYHLLTTMQAHKSAQRFQA

SEQ ID NO: 271092 - protein, 560 aa, Glycine max
  unsure (1)..(560): unsure at all Xaa locations
  Clone ID: PAT_MRT3847_86815C.1.pep
MAGEELAGDHTPELLCLVHDIAGMCSALSSSAGSAGAMFRKDCTDLVRRISLLTHLFEEIKELSNNVVGGSSSSPSPSSSASSKWSSDLVLALHSARRLLSVARNFRSNCSSDGAAKTIVFQFQCVTWKLEKLLSNLPYDDLDISEEVKEQVDLVRTQLRRATDKYGFMISKMPSHELSQPLAEEISQVLGKFDRNLTDNISTXREMLPRQSCQLLLGENMQQQSFSLVTCNENKIIIEHTDFSGISQWCIEHNIEQPTGLTNGKLKKSDGSFRDVTGDIAAIEALVRKLSXRSVEERRAAVTELRSLSKRSTDNRILIAEAGAIPVLVNLLTSEDVLTQDNAVTSILNLSIYENNKGLIMLAGAIPSMVLLLRPVPAWHXSAARPFSARPCSCARVVDLLQNGSPRGKKDAATALFNLCIYQGNKGRAIRAGIITALLKMLTDSSKSMLKMLTDSSKSMVDEALTIMSVLASHQEAKVAIVKASTIPVLIDLLRTGLPRNKENAAAILLALCKRDADNLACISRLGVVIPLSELARNGTERAKRKATSLLEHIRKLQQL

SEQ ID NO: 271093 - protein, 62 aa, Glycine max
  Clone ID: PAT_MRT3847_86816C.1.pep
YADSLGLPYLLPHHFPSVTALLMDFPSPSNLPIESAPSYAPAPASIFLYNQVTKRILDICSL

SEQ ID NO: 271094 - protein, 178 aa, Glycine max
  unsure (1)..(178): unsure at all Xaa locations
  Clone ID: PAT_MRT3847_86817C.1.pep
WATPKTRRVRKSLDSQTFIKTFEEKLPPGGENCVVIYTTTLRGIRKTFEECNKVRSIVESYCVHVVERDVSMDSGFKEELRKLMGTKQVKVPVVFVKGRLVGGAEEIVKLEEEGKLGVLFEGIPHKALGECEGCGGVRFVMCVECNGSCKVLDHENHKXTLRCGQCNENGLIQCPMCR

SEQ ID NO: 271095 - protein, 61 aa, Glycine max
  Clone ID: PAT_MRT3847_86818C.1.pep
PSRYPQRSMYHAWLQRHSARVTVQVAHVKGPLALRACLPGCCCSMQNTSVSTHIVQHREQY

SEQ ID NO: 271096 - protein, 89 aa, Glycine max
  Clone ID: PAT_MRT3847_86819C.1.pep
TETPTSSNTSSSALVVSSLSLVHGQREPCQQRLSSICAHLSILQNLFPFGAFANKNGRHLCSVRSIPTMRQFIVLCQRISTVSSHEPNS

SEQ ID NO: 271097 - protein, 193 aa, Glycine max
  unsure (1)..(193): unsure at all Xaa locations
  Clone ID: PAT_MRT3847_8681C.1.pep
MCGGAIISDFIGVKRGRNLAAQELWSELDPFSDFLGFDTTNSKNQPPLQKIPDKKVVSSCEKKKKSVVGAEKKKSDSGRARKNVYRGIRQRPWGKWAAEIRDPHKGVRVWLGTFPTAEEAAQAYDDAAIRIRGDKAKLNFPATXFPPPPPFRHPPKSNAASALTSSLKKAAAAAHIPPLDPPAKAAEETTNST

SEQ ID NO: 271098 - protein, 61 aa, Glycine max
  Clone ID: PAT_MRT3847_86820C.1.pep
SILNTYELLLIFFSHIIYLFLTIFFLIFKPFFILSLIIFSYHTLSHFILIYPNNIFYSFNY

SEQ ID NO: 271099 - protein, 55 aa, Glycine max
  Clone ID: PAT_MRT3847_86821C.1.pep
GNSFKHFSKNNNNKSNETRYAKFSPGAARSFAGICGARVCMLEGQGNSYQKARAE

SEQ ID NO: 271100 - protein, 53 aa, Glycine max
  Clone ID: PAT_MRT3847_86822C.1.pep
GLSIYHDGSKSSDSDITVECSLEDYAVGVVHAAHCVCDRKCAKHPFVCCERGR

SEQ ID NO: 271101 - protein, 196 aa, Glycine max
  Clone ID: PAT_MRT3847_86823C.1.pep
KKLLEDEVEMPDFNGGEVVANSTDEENNSADGDNTVLSTRQLQKYGPRSVRNEQVRNRKRISEALLHSKESASASHATCSKANTSGIWKAKPRFSLASVLRKSGDIGHSISNIESLPEIVKAVDPRASANLDGNHLEDDDRIEINSDIAPAETEAFPHGFNLAPMADLFYNLQDKADQETVINSEDSPEPVDSGSS

SEQ ID NO: 271102 - protein, 192 aa, Glycine max
  unsure (1)..(192): unsure at all Xaa locations
  Clone ID: PAT_MRT3847_86824C.1.pep
IMLLSLLFVAIRSCLKMRLKCLTSTGERWLPIRRMKKTILQMGITLYYQPDSSKSTVQDLSEMNKLEIEKEFLKHCYIPKKVPQHPMLHAPKQIHLXIWKAKPRFSLASVLRKSGDIGHSISNIESLPEIVKAVDPRASANLDGNHLEDDDRIEINSDIAPAETEAFPHGFNLAPMADLFYNLQDKADQVGG

SEQ ID NO: 271103 - protein, 64 aa, Glycine max
  Clone ID: PAT_MRT3847_86825C.1.pep
SSFVLIAPTHFLAETYCFSLFPRPRSEQFGNPNCSYQRHHHSLRSTTFFVALSHGWNCTRGITV

SEQ ID NO: 271104 - protein, 45 aa, Glycine max
  Clone ID: PAT_MRT3847_86826C.1.pep
VRLLMKLSMPLEMFQSHRKLRYHVSNAILLQLGVHSVTNTSSSHV

SEQ ID NO: 271105 - protein, 39 aa, Glycine max
  Clone ID: PAT_MRT3847_86827C.1.pep
RLALTSFSSDSDNATLVAKPNKQNMSKAEKDYYIVNKNL

SEQ ID NO: 271106 - protein, 198 aa, Glycine max
  Clone ID: PAT_MRT3847_86828C.1.pep
MRRRMRIRKTRQAYGKNEDNEDWISEREVDGETEDDGDMISERKRNIREVDAENEDNGDRIGKRKRNIREVDAENEHNGDRISERKKNIAREVDGENEDHRPDRISALPDSLLFHMINFMDTKSAVQTCVLSKRWNDLSKCLTNLTFNSDLPSEGLDRSFKKFESWVLSSRDDSYPLLNLTIESWIDADVQDRVIKYA

SEQ ID NO: 271107 - protein, 83 aa, Glycine max
  unsure (1)..(83): unsure at all Xaa locations
  Clone ID: PAT_MRT3847_86829C.1.pep
FXXGYNFXQGXXXXXXSPSXYXXXFXGXXXXXRXRXXXXXXXXXXXCRXPRLFFFFFFPDKLMTILFTKKLEPNSELTYACXR

SEQ ID NO: 271108 - protein, 507 aa, Glycine max
  Clone ID: PAT_MRT3847_8682C.1.pep
MASNDSDSQMKIVHGDAGYILEDVPHFADYIPNLPTYPNPLRSNPAYSVVKQYFVHMDDTVPQKVVVHKDSPRGVHFRRAGPRQKVYFKSDEVHACIVTCGGLCPGLNTVIREIVCGLSYMYGVNKVLGIDGGYRGFYSKNTITLTPKVVNDIHKRGGTILGTSRGGHDTGKIVDSIQDRGINQVYIIGGDGTQRGATVIYEEVRRRGLKVAIAGIPKTIDNDIPVIDKSFGFDTAVEEAQRAINAAHVEAESIENGIGVVKLMGRYSGFIAMYATLASRDVDCCLIPESPFYLEGKGGLFEFIEKRLKENGHMVIVIAEGAGQDLLTESMQAMDQKDASGNKLLQDVGLWISHKIKDHFARKDKMPINLKYIDPTYMIRAIPSNASDNVYCTLLAQSAVHGAMAGYTGFTVGLVNGRQTYIPFIRINERQNKVVITDRMWARLLSSTNQPSFLSPKDLEEAKKAESPTQLLEENNCNDVGDAEKEQPPKDEQESGNHTDNGIKTQN

SEQ ID NO: 271109 - protein, 70 aa, Glycine max
  unsure (1)..(70): unsure at all Xaa locations
  Clone ID: PAT_MRT3847_86830C.1.pep
IRFHPRIKGEGWRTELRSFARRQRVLHLSLKNNPLFXPLTFSLNNPPKRLLYKGGSFHMAPFLHLKNNLF

SEQ ID NO: 271110 - protein, 110 aa, Glycine max
  unsure (1)..(110): unsure at all Xaa locations
  Clone ID: PAT_MRT3847_86831C.1.pep
SHIHCRTPLQYIDTIPLRVLSTLGHHMCYELGNLVYVYRYXIHHLHIYIYKLATFNILQCIVTLPDRRTYMRKWRAWENETNTIEYQFYNETDMVRIAMDTTLRRMHLNY

SEQ ID NO: 271111 - protein, 171 aa, Glycine max
  Clone ID: PAT_MRT3847_86832C.1.pep
GKQDRDIMRVLVECCCQEKVFTKYYTVLASKLCEHDKNHKFTLQFCLWDQFKDLESMPLMRSMHLAKFVAEMVSSFTLSLSVLKTVDLNDITLLTPKRIMHFRILFESILEYPENLVWNIFTRAAVTPELESFRQGLEFFIKEYIVKTNKDLSQKFKLAKRALNNVEGILM

SEQ ID NO: 271112 - protein, 187 aa, Glycine max
  Clone ID: PAT_MRT3847_86833C.1.pep
MRQQCTAVMDHTRSGEPLVIGLVLRSHLLVILQSKVDFQHSPLPSDPRGGGRSIRHDSGEFAKPVSSKGICIDDIHLSSDDLEMYIDLAPFLNPSPYIVPEDMSLTKVYNLFRQLGLRHLFVVPRPSCVVGLITRKDLLIEDKENVNTLELQSTSVRIPQQNKRLMTRNIDVERPLLNGLLQNQIPD

SEQ ID NO: 271113 - protein, 179 aa, Glycine max
  unsure (1)..(179): unsure at all Xaa locations
  Clone ID: PAT_MRT3847_86834C.1.pep
SLVPPRVVKVSDVVSILRSNKHNGFPVIDHTRSGEPLVIGLVLRSHLLVILQSKVDFQHSPLPSDPRGGGRSIRHDFGEFAKPVSSKGICIDDIHLSSDDLEMXIDLAPFLNPSPYIVPEDMSLTKVYNLFRQLGLRHLFVVPRPSCVVGLITRKDLLIEDKENVNTLELQSTSNSATE

SEQ ID NO: 271114 - protein, 68 aa, Glycine max
  unsure (1)..(68): unsure at all Xaa locations
  Clone ID: PAT_MRT3847_86835C.1.pep
AMLDQHILCNFLIIKWIFFSLYGEVCWMWYSYGFNVXYGWMLQSHYVLLLCSFKNNCSSMSGSMQWKQ

SEQ ID NO: 271115 - protein, 191 aa, Glycine max
  unsure (1)..(191): unsure at all Xaa locations
  Clone ID: PAT_MRT3847_86836C.1.pep
TSSDELSEPEQDLKNLKEQLNEDFPVGPLIKKCCTLDQGKAVVTFLDVILDKTLRSTVALLAARGRGKSAALGLSVAGAIAVGYSNIFVTAPSPENLKTLFDFICKGYDALNYKEHIDDDVVKSANPEFKRGTVRINMYKHHRQTIQYILPHEHDKLSRIELMVVDEAAAIAVPMVKXLLRRYLVFLCCTV

SEQ ID NO: 271116 - protein, 286 aa, Glycine max
  Clone ID: PAT_MRT3847_86837C.1.pep
IKPLILFNHTSILCSAWKGSGTTVFSGGCDKQVKMWPLMSGGQPMTVAMHDAPVKDIAWIPEMNLLATGSWDKTLKYWDTRQSNPVHTQQLPDRCYAITVKHPLMVVGTADRNLIVFNLQNPQTEYKRIVSPLKYQTRSVAAFPDQQGFLVGSIEGRVGVHHLDDAQQNKNFTFKCHRENNEIYSVNSLNFHPVHHTFATAGSDGAFNFWDKDSKQRLKAMQRCSQPIPCSTFNNDGSIFAYAVCYDWSKGAENHNPATAKNYIYLHLPQESEVKGKPRAGATGRK

SEQ ID NO: 271117 - protein, 152 aa, Glycine max
  Clone ID: PAT_MRT3847_86838C.1.pep
MSTFGAAANTNPNKSYEVAQPPSDSISSLCFSPKANFLVATSWDNQVRCWEITRNGTVVNSTPKASISHEQPVLCSAWKDDGTTVFSGGCDKQVKMWPLTSGGQPMTVAMHDAPVKDIAWIPEMNLLASGSWDKTLEKGFSKGRGLGTKRDY

SEQ ID NO: 271118 - protein, 45 aa, Glycine max
  Clone ID: PAT_MRT3847_86839C.1.pep
SHIKINEYRDRILLNPINPYGKAKNLTVDIILDFTNQRSNQTWLS

SEQ ID NO: 271119 - protein, 130 aa, Glycine max
  unsure (1)..(130): unsure at all Xaa locations
  Clone ID: PAT_MRT3847_8683C.1.pep
MASNDSDSQMKIVHGDAGYILEDVPHFADYIPNLPTYPNPLRSNPAYSVVKQYFVHMDDTVPQXGPRQKVYFKSDEVHACIVTCGGLCPGLNTVIREIVCGLSYMYGVNKVLGIDGGYRGFYSKNTITLT

SEQ ID NO: 271120 - protein, 85 aa, Glycine max
  Clone ID: PAT_MRT3847_86840C.1.pep
KKKIETCEGITSLFFHLHKAPTIKREAGSCLHLIAGREFYHDLLPSHQPIYVNKENMAPFNLTPPKIASNRRIHLRRRNAQPYKW

SEQ ID NO: 271121 - protein, 103 aa, Glycine max
  unsure (1)..(103): unsure at all Xaa locations
  Clone ID: PAT_MRT3847_86841C.1.pep
GGFVGLYIFPQQKKQTQTTNPFHSPQKTTKEAIMXTIYTHTHGITQRQKVFGGGGKSKKPHTQERHPMGAGPYKNRGPSPCLKRDGPAAHSGDTQQQGPLQGK

SEQ ID NO: 271122 - protein, 247 aa, Glycine max
  unsure (1)..(247): unsure at all Xaa locations
  Clone ID: PAT_MRT3847_86842C.1.pep
MALFWPHVLQFRSQPSLGHANCVFFSDLTESRSVELSCTDSFTLVRRCKISGPAPAALKPVKCLGRSTGEKQWSDAETAVSDTDEVADEPNDRNQTSVPTNGRVESQRIATTSSGDSLSLGIREPVYEVVEVRSNGKVSTRKINRRQLLKSSGLRPRDIRSVDPSLFMTNSMPALLVREYAILLNLGSLRAIAMQDCVLIFDNNRIGGKAFLETLLPRLNPKNXNGGPSMPFELEVVEAALLSRIQR

SEQ ID NO: 271123 - protein, 59 aa, Glycine max
  Clone ID: PAT_MRT3847_86843C.1.pep
FVNLKKAYKMKLSIKRFKKDMTASITCDTTSKDLTSNTYEIGFQELQRKIFKEIMAKNI

SEQ ID NO: 271124 - protein, 48 aa, Glycine max
  Clone ID: PAT_MRT3847_86844C.1.pep
QENKAWCILRVLTENFIFIYKHSGPRDPHRRHRRLRLVHPKDVVCRRV

SEQ ID NO: 271125 - protein, 247 aa, Glycine max
  unsure (1)..(247): unsure at all Xaa locations
  Clone ID: PAT_MRT3847_86845C.1.pep
NEIVQMLRLPDSHEGNHHNIPMKGGQALRREPYSRTLDERFIRILKIFKWGPDAEKAXEILKIGVEVSVKVQFFKWAGKRRNFEHDSTTYMALIRCLDEHRMFGEVWKTIQDMVNRALSVFYQVKGRKGRPTVSTYNSVMQEGHHEKVHELYNEMCSEGHCFPDTVTYSALTSAFAKLNRDDSAIRLFAEMKENGLQPTAKVYTTLMEIYFKVGCRVEEAFGLVEEMRAWRCLPTVFTHTEFIGGMG

SEQ ID NO: 271126 - protein, 574 aa, Glycine max
  Clone ID: PAT_MRT3847_86846C.1.pep
MGGNSPERKPGCGLMTAVFGRNNPWSRKSVSAGSSPVANNFEKPPNIQDSKRRHRGSNDFVSIRESSYNNDVTNYSSCYSVSNPQKPTHVVSQRKPQNRNETMGRGPSPSPTQGYVNQGKRVPKEAVGISGELESMINEHLKSKGSSTLGNLGNLRQGAGPNYNAYSEMDYCVSNNVASGGYTNQTMGREYDKISYGKEAKPSKEQSGSLCRAVSTRMDPEQLKIMGNEDYKNGRFAEALALYDAAIAIDPNKASYRSNRSAALTALGRLLEAVFECREAIRIESHYQRAHHRLGNLHLRLGETDKALYHYKQAGPDADPDEIAKAKTLQVYLNKCTEARRFGDWITLITTTNNAISSGADSAPQIYALQAEALLKLRRHQDADKVMSRCPKFDVDECTKFFGPIGNANLLVTQAQVDLVAGRFEDALEAAQKATRLDSNSKEANKVMRKARAVTSARAKGNELFKASKFHEACIAYGEGLDYDPYNSVLLCNRAACRSKLGQFDKAIDDCNTALNLRPSYSKARLRRADCNAKLERWEASIQDYEILLKETPEDEEVKRALLEAQAQLQKQAT

SEQ ID NO: 271127 - protein, 38 aa, Glycine max
  Clone ID: PAT_MRT3847_86847C.1.pep
EKVMSQPPPQASHARRQQSHPQLPSSPKMHEEWPMIII

SEQ ID NO: 271128 - protein, 176 aa, Glycine max
  Clone ID: PAT_MRT3847_86848C.1.pep
NGQGYNNMINGLCKKKMVDEAMSLFEEMKHKNMIPDIVTYTSLIDGLCENHHLERAIALCKKMKEQGIQPNVYSYTILLDALCKGGRLENAKQFFQHLLVKGYHLNVRTYNVMINGLCKAGLFGDVMDLKSKMEGKGCMPNAITFKTIICALLEKDENDKAEKFLREMIARGLLKV

SEQ ID NO: 271129 - protein, 472 aa, Glycine max
  Clone ID: PAT_MRT3847_86849C.1.pep
MRAINEDTKVHRYHEEVGHFKSEREEGELSPNGGDFEEDNCEVYGHAGLEAVHKGKDGTICRQYQNRHGEEVRGEAGGENDADDEGEESPHRSMEDSENASENGDVSGTESADGEECSREHEENGDHEHDNKAESEGEAEGMTDANDVEGDGASLPYSERFLVTVKPLAKHVPPVLHDKQRTVRVFYGNDSFYVLFRLHQTLYERIQSAKVNSSSAEKKWRASNDTGSSDQYGRFMDALYNLLDGSSDSTKFEDECRAIIGTQSYVLFTLDKLIYKLVKQLQVVATEEMDNKLLQLYTYENSRKPGRFVDLVYHENARVLLHDENIYRIECSPAPTQLSSIQLMDYGYDKPEMTAVSMDPNFSAYLHNDFLSVVPDKKEKSGIYLKRNKRKYAISDEYSSQTLDGLQIINGLECKIACSSSKVSYVLDTEDFLHQTRRKRRTLYQSSSCHGQEKSPIICSSRAQRSCKLFSI

SEQ ID NO: 271130 - protein, 100 aa, Glycine max
  Clone ID: PAT_MRT3847_8684C.1.pep
MASNDSDSQMKIVHGDAGYILEDVPHFADYIPNLPTYPNPLRSNPAYSVVKQYFVHMDDTVPQKVLCVSTYASDLFVYLVLQFINLKRFCYVFFCVYPIY

SEQ ID NO: 271131 - protein, 176 aa, Glycine max
  Clone ID: PAT_MRT3847_86850C.1.pep
ENSRKPGRFVDLVYHENARVLLHDENIYRIECSPAPTQLSSIQLMDYGYDKPELTAVSMDPNFSAYLHNDFLSVVPDKMEKSGIYLKRNKRKYAISDEYSSQTLDGLEIINGLECKIIACSSSKVSYVLDTEDFLFRIRRKRRALRLKSSGAHEQAQSSNICSSRVQRFRNLFSIT

SEQ ID NO: 271132 - protein, 111 aa, Glycine max
  Clone ID: PAT_MRT3847_86851C.1.pep
DTVLPAYKLLNKHCVPSLDLDKNTIGRSSSRLKDNVSTTNVHKKYEEFGIKYCADTMDTTDSQSETFKSYCAKSQVVSFIWAVSRSILPSELLGTPPTSRIIYGNIRKSLH

SEQ ID NO: 271133 - protein, 81 aa, Glycine max
  Clone ID: PAT_MRT3847_86852C.1.pep
FTKQHHHLNTYSQTTSQRVNHFNTALSNIIKQHIHILIPSLIIHQTFNYLHTHYSFFQRTIYNKKYTIICSYDDNFSYPKK

SEQ ID NO: 271134 - protein, 212 aa, Glycine max
  Clone ID: PAT_MRT3847_86853C.1.pep
MSDENGEEPRENRPVPRLNERILSSLSRRSVAAHPWHDLEIGPGAPMIFNCVVEITKGSKVKYELDKKTGLIKVDRILYSSVVYPHNYGFIPRTLCEDNDPIDVLVLMQEPVLPGCFLRARAIGLMPMIDQGEKDDKIIAVCADDPEFKHYTDLTELPPHRLMEIRRFFEDYKKNENKEVAVNDFLPASTAVESIQYSMDLYAEYILHTLRR

SEQ ID NO: 271135 - protein, 98 aa, Glycine max
  Clone ID: PAT_MRT3847_86854C.1.pep
ENLDANILYIVKSGYCAEYCSMYYRACINEDSARTHFIYYDTKERIVDTQKCVREYIATFCQKKIIVFPLKLLCKNRLKVIKYPLNANMRRLREIECK

SEQ ID NO: 271136 - protein, 44 aa, Glycine max
  Clone ID: PAT_MRT3847_86855C.1.pep
RRDSQQILTAKIYGGTSILRNIKKQHETHGLFYYRGWYHHNSTS

SEQ ID NO: 271137 - protein, 85 aa, Glycine max
  Clone ID: PAT_MRT3847_86856C.1.pep
TQGSTPSRVPFCFSHKIFNLGSKRPLGKSSNEGNFGVLLKAVPNPIYLFPPRVLEGGSIFLGGLELGFGFWYPRVSPLFSFRLGP

SEQ ID NO: 271138 - protein, 78 aa, Glycine max
  Clone ID: PAT_MRT3847_86857C.1.pep
SYGTVIFSHVRQKKKKKKKKKKKKKKKKKKKKKKKKKKKKRGGAFKRTKFYSPGWEKKKFFKGAPKKKSLAILLQINL

SEQ ID NO: 271139 - protein, 30 aa, Glycine max
  Clone ID: PAT_MRT3847_86858C.1.pep
KKKDIDSFVASDFKLIGYVPHQKIEMKMAV

SEQ ID NO: 271140 - protein, 106 aa, Glycine max
  Clone ID: PAT_MRT3847_86859C.1.pep
ERKRSYAVDGRDRRPKSPARKPEIPARSRPLRGRESDHVRRHSGEGTVRQSRSPSRGGRSQLRPPGGISRRVPPAKAKGVVEENDTVSVKESLENPHVSLECFIFL

SEQ ID NO: 271141 - protein, 106 aa, Glycine max
  unsure (1)..(106): unsure at all Xaa locations
  Clone ID: PAT_MRT3847_8685C.1.pep
MVCIFPRSELFFTIENLCSNFDTQRINERQNKVVITDRMWARLLSSTXQPSFLSPKDLEEAKKAESPTQLLEENNCNDVGDAEKEQPPKDDQESGNHTDNGIKTQN

SEQ ID NO: 271142 - protein, 83 aa, Glycine max
  Clone ID: PAT_MRT3847_86860C.1.pep
QKTLSLSCSYPSHCKSSTITTPTFYPFFHKYARMQQHVHHHLLVLHIILIIFLTQMTLSSSLYSYGWSPWHMVGKAMEDADTD

SEQ ID NO: 271143 - protein, 90 aa, Glycine max
  Clone ID: PAT_MRT3847_86861C.1.pep
GTTYESRDSTVDHVPRDKLPELLRSVTPVWERTISHHLSFSYTETEEKECCDTYCVEKKLVLLFILPLKKMWFYRNIFNNRLPWSIQPKY

SEQ ID NO: 271144 - protein, 61 aa, Glycine max
  Clone ID: PAT_MRT3847_86862C.1.pep
QGLKRFLRPSKSFSPKKTVFPFRIKCPRKLLGAPKSSPPLFWGNKIKLKPFFKGILERGFC

SEQ ID NO: 271145 - protein, 85 aa, Glycine max
  Clone ID: PAT_MRT3847_86863C.1.pep
SVSSLGKIKASLHLLKVLPTLVSANRGDPVPKIISFPITGGFIRYSEWIKDSSIAYLHQLLPREWVPEFRWKFVPELVFVIQSTM

SEQ ID NO: 271146 - protein, 79 aa, Glycine max
  Clone ID: PAT_MRT3847_86864C.1.pep
TTILVCVQFERFRRIVHHSRDLVLLGLKERKIMSTLFVEEVQCFGFLHHLFSKFFSQRVCIRGSRPEEEEIFQLTMVHV

SEQ ID NO: 271147 - protein, 46 aa, Glycine max
  Clone ID: PAT_MRT3847_86865C.1.pep
IRKQMQLILDFKNFSIISYILCVRIVKENENHVSCAWPYTFVELFY

SEQ ID NO: 271148 - protein, 82 aa, Glycine max
  Clone ID: PAT_MRT3847_86866C.1.pep
SHGRRFCGLGLNKVSSSYTSAQMGALISNGWDHSSFFLKGFTREIPPPFICTISECSLVQLLTFHFNPGARLPIRFVFIPPM

SEQ ID NO: 271149 - protein, 207 aa, Glycine max
  Clone ID: PAT_MRT3847_86867C.1.pep
RSQHQIKNILVEKARKEIVKKLDEWKASSASNNLDKSKNTDTEIREKGKEREGNVVKPGAQVVDSETVNKKCFSADLEPELPGSLSMNVPDPDFHDFDGDRTENAFGENQVWAAYDNDDGMPRYYCLIHDVISKNPLNMRISWLNAKSNDELAPIEWVSSGFPKTSGDFRIGKRVSYSTLNSFSHRVKWTKGSRGVVHIYPKKGDVW

SEQ ID NO: 271150 - protein, 81 aa, Glycine max
  Clone ID: PAT_MRT3847_86868C.1.pep
QSLFVFVTAIITSPHNNNPPLFSFNHINPFYIYHYPKIFPHHNFTIMTILSKIIISLVRPKYYRKYLHEVIKENTLDILFH

SEQ ID NO: 271151 - protein, 233 aa, Glycine max
  Clone ID: PAT_MRT3847_86869C.1.pep
PSLLDEFVPKITESFITSRFNSVQAGLPDDLSENPLDNAELLQDQLDCFPYLCRFQYESSSLFIINIMEPVLQIYTERARLHVPDNSDLIVIEDKLAWIVHIIAAILKIKQCTGCSVESQEELDAELSARVLQWINVTDSGIHSQRYGEISQQRLDRAIITFFQHFRKSYVGDQAIHSSKLYSRLSELLGLHDHLLLVNVIIGEIVTNLKCYTESEEVIDHALSLFFELASGY

SEQ ID NO: 271152 - protein, 135 aa, Glycine max
  unsure (1)..(135): unsure at all Xaa locations
  Clone ID: PAT_MRT3847_8686C.1.pep
PREKKKRPWDQNPPPGGKTHRGPFFFEPGFFFERIRKKRVSIPPGWGSFPGPPHGVGPPAPPXGKRPLGGGPPMAPNFTTNLKVRGPXPGPPPPLIWGGEPPGGWPPCFTPPPLPPQGGFFFSRALGGPPKPRKL

SEQ ID NO: 271153 - protein, 135 aa, Glycine max
  Clone ID: PAT_MRT3847_86870C.1.pep
TYIKSSFWLSPLSIPSVVFKLTCQTHDYYLFTQFASYCFIEVLSSLRSACNMTVLQFYMGELCYIIFYRKMVCFFAILSCYLLYGGSISNDSPLHIYVAEFTWMNVHLTGSLIIILDNVMGLIVLLMRTVNPYYF

SEQ ID NO: 271154 - protein, 116 aa, Glycine max
  Clone ID: PAT_MRT3847_86871C.1.pep
FKFMRVNMRVWCLYIVFLENLVHSVLVGGTLESYHGKKKPFYAVSSFWSCNKCILCNYCSCSVEDSCILLVVPDNSLYTQIWMIQSSKMMERFRRCKEVGGTKRVMDEKTSGGIKR

SEQ ID NO: 271155 - protein, 44 aa, Glycine max
  Clone ID: PAT_MRT3847_86872C.1.pep
NGTAPRTRHTGTAAIRRHNAYAARIRHHGTATRRLHQGTAAIIR

SEQ ID NO: 271156 - protein, 123 aa, Glycine max
  Clone ID: PAT_MRT3847_86873C.1.pep
KITESFITSRFNSVQAGLPDDLSENPLDNAELLQDQLDCFPYLCRFQYESSSLFIINIMEPVLQIYTERARLHVPDNSDLIVIEDKLAWIVHIIAAILKIKQCTGCSVESQEVLDAELSARVL

SEQ ID NO: 271157 - protein, 709 aa, Glycine max
  Clone ID: PAT_MRT3847_86874C.1.pep
MVQKNNRKTKDVIIQRWWSPCKIMSLTAKDCMKYTLPQIWPSYQSIRTLGVQIDETNLYRRYGEISKQRLDRAILTFFQHFRKSYVGDQAIHSSKVCIGRYKHAIVACHPFRNCLWWLAKNLTCHSAMVAPFNNIGYIETIPPHPTPHHNKFARYPGIANAYLYAQLYSRLSELLGLHDHLLLLNVIIGKIVTNLKCYTESEEVIDHALSLFLELASGYMTGKLLLKLDTVKFIVANHTKEHFPFLEAKRCTRSRTTFYYTIGWLIFMEDSPVKFKSSMDPLQQIMQDQLLKKANLFRDLFLVTCYFLNSLYNFKKVFRTDAVRYALVGLMRDLRGIAMATNSRRTYGFLFDWLYPAHMPLLLKGISHWTDTPEVTTPLLKFMAEFVLNKAQRLTFDSSSPNGILLFREVSKLIVAYGSRVLSLPSAADIYTYKYKGIWICLTILSRALSGNYVNFGVFELYGDRALSDALDAALKMTLSIPMSDILAYRKGDSNPQPIPPYLYHQPNLVSLATQHVFCQFAKYIKLTRAYFAFLEVLFNSHITFVLNLDTNTFMHMVGSLESGLKGLDTSISSQCASAVDNLAAFYFNNITMGEAPNLPASVNLARHIGECPNLFPEILKTLFEIILFEDCGNQWSLSRPMLSLILINEQIFSDLKAQILSSQPMDQHQRLSSCFDKLMADVTLSIDSKNRDKFTQNLTIFRHEFRAK

SEQ ID NO: 271158 - protein, 48 aa, Glycine max
  Clone ID: PAT_MRT3847_86875C.1.pep
YDFYLPLHTTDQNADLFTNSLHPKHSQKFVSKLRLVDIYQLAHRTNIS

SEQ ID NO: 271159 - protein, 137 aa, Glycine max
  Clone ID: PAT_MRT3847_86876C.1.pep
KKLFPLLGKGVFLPSFPKTRGFFFPPLKGLFFRAPFVGLGGNPIPKPPPPKTGPKGTKNKPFPKNFWGLGLFFPLKTSTILGRGGGLNPSHKNQPPTLGKGRPQSFKQNWVFFFFNSLGKKNPYFSPPFKFGFGYEI

SEQ ID NO: 271160 - protein, 401 aa, Glycine max
  unsure (1)..(401): unsure at all Xaa locations
  Clone ID: PAT_MRT3847_86877C.1.pep
MLLYFITCISFFLFLKSLLLKPLPSWASEMWLFPLLFSQEFSMSTISKLFRNRFWIGFLCQIPIGMSLVRKSLTSRVENVEESLDMSVLDLPELALDCILERLPPSSLCRIAAVCRTLRERCVSDHLWEKHMRKKWGRVSWPCCLLGXGNGMHVASKRNVGGLKHGRKVXEIXCLFIGLSYQWIRPKVDAIIIITQQGSSLPVDSVMNWYLALESGNFLSLHHVYNRENGHVGMLSCYDAELSYDPRTDTFQARYPPQHGRRAGARECGIPWERLRAPPIDTSPHDLHFSDCLNDLYPGDHIEIQWRRNKEFPYGWWYGVVGHLESCNGSENYCRCHSSDTVVLEFNHYTPGSQWRQTTISRKDHREEGNEADGFYGGIRKIKSEAEITTWKHLWPLEVLE

SEQ ID NO: 271161 - protein, 64 aa, Glycine max
  Clone ID: PAT_MRT3847_86878C.1.pep
TLSSRGGVRGHSLTSKAISYSERFNLRFRGLRPAPFFPTLFCFNLTSELDSRLSSKQKDLRIED

SEQ ID NO: 271162 - protein, 144 aa, Glycine max
  Clone ID: PAT_MRT3847_86879C.1.pep
SHGRRADARECGIPWERLRAPPIDTSPHDLHVSDCLNDLYPGDHIEIQWRRNKEFPYGWWYGVVGHLESCNGSENYCRCHSSDTVVLEFNHYTPGSRWRLTTVSRKDHREEGNEADGFYGGIRKITSEAEIATWKCLWPSEVLD

SEQ ID NO: 271163 - protein, 387 aa, Glycine max
  unsure (1)..(387): unsure at all Xaa locations
  Clone ID: PAT_MRT3847_8687C.1.pep
MASNDSDSQMKIVHGDAGYILEDVPHFADYIPNLPTYPNPLRSNPAYSVVKQYFVHMDDTVPPTRPVHKDSPRGVHFRRAGPRQKVYFKSDEVHACIVTCGGLCPGLNTVIREIVCGLSYMYGVNKGLGIDGGYRGFYSKNTITLTPKVVNDIHKRGGTILGTSRGGHDTGKIVDSIQDRGINQVYIIGGDGTQRLETVAFEDLDLFLFFLSYXMNTMTAGFIAMYATLASRDVDCCLIPESPFYLEGKGGLFEFIQKRLKENGHMVIVIAEGAGQDLLTESMQAMDQKDASGNKLLQDVGLWISHKIKDHFARKEKIPINLKYIWADSLTAFSSFLTHLFLGLSFLFRISXDPTYMIRAIQSNASDNVYCTLLAQSAVHGAMAGYT

SEQ ID NO: 271164 - protein, 86 aa, Glycine max
  Clone ID: PAT_MRT3847_86880C.1.pep
GSSTAARRRQKGIHNFNPSFALPNSIFQFKTLTPFEAPNRDGTKGREEASRKKPVEEKKSTVGDKAPADKKPRAEKSLPKREAAAE

SEQ ID NO: 271165 - protein, 88 aa, Glycine max
  Clone ID: PAT_MRT3847_86881C.1.pep
ALHVQQSPLPTSYYFCTVSTCSWNHSYHHTAPAHPLTYIYTCIHIFFVLWQGAKCSIELKNSTPAGDGYPHATHNEQQACTLQPILVN

SEQ ID NO: 271166 - protein, 40 aa, Glycine max
  Clone ID: PAT_MRT3847_86882C.1.pep
SHILSLVDSRRVYHRTVRIIACRTGSLANIALDSTSSDSH

SEQ ID NO: 271167 - protein, 67 aa, Glycine max
  Clone ID: PAT_MRT3847_86883C.1.pep
KPRLLPKLFRFTKKKKGWPLLPKGLTSFFPFLGPFTTSKKAIPFHFGHPRNFSCPMTLMHHLLFLSN

SEQ ID NO: 271168 - protein, 76 aa, Glycine max
  Clone ID: PAT_MRT3847_86884C.1.pep
DRVVSSFILGPPPWYWIEVESLGSNVIVPGAHLWNINDPSFKYPQLSPRKMFFYEDKIQRQHEIPKKKKKKKKKKK

SEQ ID NO: 271169 - protein, 57 aa, Glycine max
  Clone ID: PAT_MRT3847_86885C.1.pep
FIHNPYESLKQHILYIWRRHPPRENGLSFYTPNEDSLLIFLGHSIYGRKDACFKEGD

SEQ ID NO: 271170 - protein, 167 aa, Glycine max
  Clone ID: PAT_MRT3847_86886C.1.pep
MSNTEEEEEATPSNPNNHSQHSTNNDVEPRDDEDIEEDDDDVVQEPNRGIPQSAASKLREQRFKVESLSRRLSSELVPIRVHDVVINGNTKTKDWVIEAELKDIENATSMQELMQASQIAVARLQGLEIFDSCKVRLEAGPRELQNTGSVIVGFLHGSPRGWTTSAV

SEQ ID NO: 271171 - protein, 104 aa, Glycine max
  Clone ID: PAT_MRT3847_86887C.1.pep
SFHACVHATDPGGFLMFDNMASCLYSKATGGDIPQAAWDLFCCDTCKPLPHILNEERVSGESNSGTGQYYAPRARTNGWVGRLPIYIGAGNLVAYDEVSIAQVA

SEQ ID NO: 271172 - protein, 49 aa, Glycine max
  Clone ID: PAT_MRT3847_86888C.1.pep
GSPTTAYRLLNKLSNIIISLFISRPKPTALIEARLLFNSDTGGIEIHCI

SEQ ID NO: 271173 - protein, 108 aa, Glycine max
  Clone ID: PAT_MRT3847_86889C.1.pep
RMRPGHRLTWIQCWGIPLIAWDMQQIKKIVAGIGEMVEVDDNVEGQWKMDMARILLKTPWKPLIQHTVRVNIQGEIFQVHITEEGGTSPHVCMCRREMEYNSSDEIQS

SEQ ID NO: 271174 - protein, 76 aa, Glycine max
  Clone ID: PAT_MRT3847_8688C.1.pep
TSKTRNFAYPLMLIPYGPRCVPDVWLLSRANCTLNVGDMCKLVTCRVFGVTRDYHLSVQRLIRPTDRPPGSLLDFV

SEQ ID NO: 271175 - protein, 216 aa, Glycine max
  Clone ID: PAT_MRT3847_86890C.1.pep
EKEAEEKLQEIQVAAGSANADKYEPKAVWKEILCPTPPVRRMLITGCGIQCFQQITGIDTTVYYSPTIFKNAGITGNSELLAATVAVGFTKTLFILIAIFLIDKLGRKPLLYASTIGMTVCLFSLSLSLAFLSHAKVGIALAILAVCGNVASFSVGLGPICWVLSSEIFPLRLRAQASSLGAVGSRVSSGAISMSILSVSRAITVAGTFSVFGIAS

SEQ ID NO: 271176 - protein, 50 aa, Glycine max
  Clone ID: PAT_MRT3847_86891C.1.pep
EIQELIGPVPEGFNDYFASRFPRLLIEVYKVIYKSCKDDECFQRYFRYIN

SEQ ID NO: 271177 - protein, 54 aa, Glycine max
  Clone ID: PAT_MRT3847_86892C.1.pep
LEPLLVNHIWLQKQDTMLYKYHCLMNIAIDCFRLQKIYINHVPVEKLSAGLQTV

SEQ ID NO: 271178 - protein, 139 aa, Glycine max
  Clone ID: PAT_MRT3847_86893C.1.pep
MNCGLNKLHTHQLVRATNLSRLEVLNLAENEIQAPFLDAFQNMNSIAEIDLSSNNLNSTPFWLGTCTNLVHLFLDSNALYGSLPSALENLTSLVSLDLSKNNFDSVPSWLGELKGLQYLYLSDNDLKHIEGSLASTDAW

SEQ ID NO: 271179 - protein, 65 aa, Glycine max
  Clone ID: PAT_MRT3847_86894C.1.pep
VGTIQKMVAEVPGVQYLLTISVKLSLLFLHQWMVSIESSEPNTRNFLYNICTWYKLTCCLLMFFF

SEQ ID NO: 271180 - protein, 76 aa, Glycine max
  Clone ID: PAT_MRT3847_86895C.1.pep
TLKQTCFHVCFYQWLHHISGILYQENNINLSSFQTHILEYDCYETIFFSGALGLILKQSTLNTSPVLWVHITTCFP

SEQ ID NO: 271181 - protein, 210 aa, Glycine max
  Clone ID: PAT_MRT3847_86896C.1.pep
MVSVLPKRIILMRHGESQGNLNTAAYTTTPDHSIQLTAQGMTQARHAGEQLRRVMGGDGCSPDWRVQFYVSPYGRTRSTLRELGRHFSRKRIIGVREESRVREQDFGNFQVEERMKVIKETRERFGRFFYRFPEGESAADVFDRVSSFFESLWRDIDMNRLRHDPSNDLNFVIVSHGLTSRIFLMKWFKWTVEQFEHLKQFGTASSALCS

SEQ ID NO: 271182 - protein, 96 aa, Glycine max
  Clone ID: PAT_MRT3847_86897C.1.pep
SMALSSPSLEFKAEELGPSAPEVGRVSMRKTVTKQVSSRSPWYGPYRVKYLGPFSGEPPSYLTGEFLIDDGWHTAGLSGYPETVAKTANLERASPR

SEQ ID NO: 271183 - protein, 35 aa, Glycine max
  Clone ID: PAT_MRT3847_86898C.1.pep
VTCDAPVPNIEEPFSLLYHIAYSIKMPNIPCFLSK

SEQ ID NO: 271184 - protein, 147 aa, Glycine max
  unsure (1)..(147): unsure at all Xaa locations
  Clone ID: PAT_MRT3847_86899C.1.pep
MILTKQYRCIHSASCQCTKGHLSEDVIFLVFHNLNWNPKLIATLSCVCKWFDDLAKRVLWKEFCRTRAPKMLCDLQSNGSHIVDGNWRALGKLLIYCSGCTXGGLFNSIQIPGHFVYQTRFSRTSGKSFLLPQCXTDVLYVCDPCEH

SEQ ID NO: 271185 - protein, 62 aa, Glycine max
  Clone ID: PAT_MRT3847_8689C.1.pep
GATHTSEAKRTNKGGGGTRKTPIPNLNLKSSPFPFDQGSFFPRELNHFPNSFQIQKISQTPL

SEQ ID NO: 271186 - protein, 284 aa, Glycine max
  Clone ID: PAT_MRT3847_868C.1.pep
MASFTIPCPKCVVVPFAHLGLNSQTQQRNALGLKKSLSFGSLSSDSAPNGIQCLNKKQSSVWKLQAQPKEAVTVENSAPVQVNGPKIAPPEEKDDHNGKPSGPSTSADASSISAFMNQVSDLVKLVDSKDIMELQLKQANCELVIRKKEALLPPPATFVAPVSQPFPYPTNSLPAAPPPVATSTPASSPSSKAAPALPPAKASKSSHPALKCPMAGTFYRSPAPGEPPFVKVGDKVQKGQVICIIEAMKLMNEIEADQSGTVAEVVAEDGKPVSVDTPLFVIVP

SEQ ID NO: 271187 - protein, 98 aa, Glycine max
  unsure (1)..(98): unsure at all Xaa locations
  Clone ID: PAT_MRT3847_86900C.1.pep
FXFXCLSSAXFPLVXXXPCLGRSFXXXPRFPFLCSVSLFFLPXCXXAXACXLXXVLALVSGPXGSGLXXALGAAPCWPSLXVLSSLPXRSAELEPXPA

SEQ ID NO: 271188 - protein, 86 aa, Glycine max
  Clone ID: PAT_MRT3847_86901C.1.pep
LITNGSLTQKDPLHGFSDSFVHPHHFCCFSGIWGSLQAIVLALSMVMGLWASHAITSKRTGATVNGRSNSSLSPFEMDQRIFTYIL

SEQ ID NO: 271189 - protein, 54 aa, Glycine max
  Clone ID: PAT_MRT3847_86902C.1.pep
PVEKYKPLACLCGGLSFFPSLGLLAVWNNKPPKTPFAPKVFPFALLRVGLGGDP

SEQ ID NO: 271190 - protein, 90 aa, Glycine max
  Clone ID: PAT_MRT3847_86903C.1.pep
QIAEVEDAHLREVEIGLAKRRGKEIRHSFIVFFTLTAGYLSKTLLLDEGIEQRNFTKCIPIHCHKSSEPLLKIFHTLSCKGVTTRPLREQ

SEQ ID NO: 271191 - protein, 208 aa, Glycine max
  Clone ID: PAT_MRT3847_86904C.1.pep
MTEGNGDKTLRKIADAFNDLANVFTDSQSAEAEVKVAPFSHACSLVSPLFGCLGVAFKFAEMDYVAKVHDLAEASKSIQNLQSLIELDVQANTVRKGGSHTRNLLRVKRGLDMVRVLFEQILVTEGNSLRDPASKAYEQVFAPHHGWAIRKAVSAGMYALPTKEQLLKKLNEDEASAKDHMQSYVTASAPLIQYIDKLFVSRDLGIDW

SEQ ID NO: 271192 - protein, 66 aa, Glycine max
  Clone ID: PAT_MRT3847_86905C.1.pep
LFKNWPSMNAQLTRGYSSYLPKILYFFFFTKIPFMTNFCCVFDTWILISISVKGIFHTKRLQNYEN

SEQ ID NO: 271193 - protein, 81 aa, Glycine max
  Clone ID: PAT_MRT3847_86906C.1.pep
SLRNPASKAYEQVFAPHHGWAIRKAVSVGMYVLPTKEQLLKKLNEDEASAKGHMQSYVTASAPLIQYIDKLFVSRDLGIDW

SEQ ID NO: 271194 - protein, 51 aa, Glycine max
  Clone ID: PAT_MRT3847_86907C.1.pep
KGFALIPKFPPPPIFCEFFGSPPPPPPPPPPPPPPPPPPPPPPPPPPPPPP

SEQ ID NO: 271195 - protein, 75 aa, Glycine max
  Clone ID: PAT_MRT3847_86908C.1.pep
PTFIPSQFHHHLCPQQLHLFRFHGSIQQLRFLSRCLLAHFFGPLQAVLAYPPSLLRVKTVWAQNMWSFQKDEMGA

SEQ ID NO: 271196 - protein, 45 aa, Glycine max
  Clone ID: PAT_MRT3847_86909C.1.pep
KRSRCKSSSSSTHLLRSYRGTNPQSIHLMGQKTCEIYFNPRCCGI

SEQ ID NO: 271197 - protein, 107 aa, Glycine max
  unsure (1)..(107): unsure at all Xaa locations
  Clone ID: PAT_MRT3847_8690C.1.pep
VXVGXRVFVIAEYGDAPVRVYDEEQDTWRYVKGGSFPRDVIKSPFLATGLDNRIYVASYNLNVAIGKMKSDRIQGKGDFEVSVTWEVVEAPSAFREFSPCTCQVLYA

SEQ ID NO: 271198 - protein, 45 aa, Glycine max
  Clone ID: PAT_MRT3847_86910C.1.pep
FGWTQLTALIVIHFFYLNSSFNVVILYLLVHGAGVWLNSFKSYYL

SEQ ID NO: 271199 - protein, 246 aa, Glycine max
  Clone ID: PAT_MRT3847_86911C.1.pep
KHAIDFLLSITDEGVSRNYNEERSEWSSYVPSLFSALQAVKMVIMYAPEPELRKKSFTVLKGVLADIPNSQRFDIMKALITNTDSSSMIAIFIDLVRKEMHTAICSSRSIVKDAPQIDNKAFPDTSFWNPGILELVELVLRPPQGGPPSLPEQSDAVLSALNLYRFVLMTESAEKTNITGVLSRNNLLKAYNEWLLPLRTLVTGIMAESHSDYDEFAVDTVCTLNPLELVLYRCIELVDEKLKQST

SEQ ID NO: 271200 - protein, 117 aa, Glycine max
  unsure (1)..(117): unsure at all Xaa locations
  Clone ID: PAT_MRT3847_86912C.1.pep
XXLXXXXXHFXXXPXXSSXXPNYSXFXXLXXXXLXXPLXXXSLLSLXSFXLXLXPYFSXXXXXXYXXXALTLXXPXFXLXLXXPXXSFLXXXFXTXTXFLSXLXPXXXXXYAXXXXX

SEQ ID NO: 271201 - protein, 129 aa, Glycine max
  Clone ID: PAT_MRT3847_86913C.1.pep
RSCLINLSGITMETQQFDDDTFYAEIKRQILQLTSEDDELLERKSFNQAAIIGDDGSTRLAYKSTSPLANEFCSWETHSSGSPEWLVNLRKSGRGTGVFIPQVVTGKKHQRPGTMNSRKQIYRPVANKY

SEQ ID NO: 271202 - protein, 347 aa, Glycine max
  Clone ID: PAT_MRT3847_86914C.1.pep
MAEVAKPSSVPPSSHRIGSGPLKSGSLVRKKTPSELRGELLKRASNVDLTDESQSTLADPTKTTEVDNGFKKTRLWKPPRYTDTRVDEVFAAKKPRFKIASGKENAKENPSLGQTSNLKNLSVFSTFEAKGHQGNTCLENSVTSSEVSKASVLQSCQTFEKWSQGKFRSVAELSSAVDTSCGTATIDLGKALRGLAALEPSNPNDTAADLSEGQDLTAVKGNFLSEFHLPGKKVLLDLTLKTSMRIVSSSSVNWSLVCGTMPQLTSQHSYFKSLNMRGSKGFKVLHSWMYPQSTRPLSLIRFLYLGSSNFSTSDFVFLKNVQYCFSFFFSFPHSEKFNFSRMPYFAG

SEQ ID NO: 271203 - protein, 84 aa, Glycine max
  unsure (1)..(84): unsure at all Xaa locations
  Clone ID: PAT_MRT3847_86915C.1.pep
LKLLTDGKLYEGKHIPVSNISAGENHGVLIPLVAQEEILSSSASDVRTAMVIKNRXPQATAMHVGAIXITPGSFASPDCNIAGA

SEQ ID NO: 271204 - protein, 157 aa, Glycine max
  Clone ID: PAT_MRT3847_86916C.1.pep
HVLNSFYIFCTAKKKKKKKKKKKKKKKKKKKKKKKKKKKKKKKKKKKKKKKKKKKGGGPFKETKFNSPCLARKNFFIGDPKIKFRGRFLKTGDGKNPGVTQIKALGKKPPFPNLGKNKKAPTESPSQKFANPKGKREPPFNGPINPGGGGVSPRGAP

SEQ ID NO: 271205 - protein, 111 aa, Glycine max
  Clone ID: PAT_MRT3847_86917C.1.pep
DIEVKKLVDSDSKEAMKRAKVPPLSAVDAVLEQIKKKQKLSVLDKPKKDWGEFKEEKRLKEKLDAYKKSSNQYLDKVSFLQRADYREFERERDARLALQSRKRPDNMQEDD

SEQ ID NO: 271206 - protein, 52 aa, Glycine max
  Clone ID: PAT_MRT3847_86918C.1.pep
HGQGQEAVQMFEQMLQEGVTPTHVTFLAVLSACSYSGLSQTGWEIFFFFKRE

SEQ ID NO: 271207 - protein, 116 aa, Glycine max
  Clone ID: PAT_MRT3847_86919C.1.pep
FDIHFLISTALTTLSYKLLHWHATPCSTFTTILNSDSTAEGDFSTSDPSFDASNIALGLTTDMRGKVALLLNLRTELLLQAYPTILYVRRWRTLVLNLLRSNLYAIDALARSAIPS

SEQ ID NO: 271208 - protein, 69 aa, Glycine max
  Clone ID: PAT_MRT3847_8691C.1.pep
DQIKPLNHSHDLPPPGKKGRPYICSCMIFLRPTNGAKLILRKWIEELQIQPWSKTVKSNDQPAFNWALM

SEQ ID NO: 271209 - protein, 58 aa, Glycine max
  unsure (1)..(58): unsure at all Xaa locations
  Clone ID: PAT_MRT3847_86920C.1.pep
AILSVPEHGAAAIQTANVLAEPITNGRAVYTRTSSAIHRSWPDFIQXDTKGSIFETSI

SEQ ID NO: 271210 - protein, 58 aa, Glycine max
  unsure (1)..(58): unsure at all Xaa locations
  Clone ID: PAT_MRT3847_86921C.1.pep
XPGLGKLMWAQHKCLYYALYFSPVFENPLISGIHFLFPYIIYLNHMLFPPSTYAGNFF

SEQ ID NO: 271211 - protein, 163 aa, Glycine max
  unsure (1)..(163): unsure at all Xaa locations
  Clone ID: PAT_MRT3847_86922C.1.pep
GPCGTEKNFTNGMVNGHMPSLPGSPFTGYIIAGHRKMMRTELYFLSSQKNRPSLFGMPLIDPCTVHTRKKDLYDAVWIQVSRLASPLPPHEASNHAQDCDDSMGYQYPFTLRVVQKDGNSCAWCPWYRFCRGCKIDCGEDRXFIAHAYIAVDWDPTALHLRYQ

SEQ ID NO: 271212 - protein, 109 aa, Glycine max
  unsure (1)..(109): unsure at all Xaa locations
  Clone ID: PAT_MRT3847_86923C.1.pep
LFGKPXRIIPKWXPPSGRNPEXXGIKXXPXVXXKSXXSKXLXFXXPTGFXRXREVLQGXRXFXXLXPXXGKHXXPAWXSPSXXHPGXSIXXXASIXLXVRLRXLDDSXY

SEQ ID NO: 271213 - protein, 148 aa, Glycine max
  Clone ID: PAT_MRT3847_86924C.1.pep
MAKRKSTPRTRSGCRTCKVRRVKCDDQRPSCRRCLDTGRACDGYGIWGQPKSTRLLPSPVYPLRTLPGLAEEERRCLDRFRVLLTDKLTRPFGSHFWSSLVLQLSVSEPAVLHASIALTSAYDSFALAQIRENVAMVAPAPFVLGRTT

SEQ ID NO: 271214 - protein, 109 aa, Glycine max
  unsure (1)..(109): unsure at all Xaa locations
  Clone ID: PAT_MRT3847_86925C.1.pep
TITTEVESTNTINNVKANIQHYEWMPTNQQSLILHKKQLEDGHTLTNXNIHKEXTRKLELHHRDDDKNHEMKTYTEPEIQQHKHRNVKISTNQTYKEHDNGKIHKINTE

SEQ ID NO: 271215 - protein, 110 aa, Glycine max
  Clone ID: PAT_MRT3847_86926C.1.pep
VCDDNDDEDVFHVDVGCPCGHCWCPFSPKIYPQSTIELIGKRSFISMSYEEHKRLMRLTSSSINGMEALSLYLTYIEKNVKSSLEKWANMGQIEFLTEIRKLTFKIIMHI

SEQ ID NO: 271216 - protein, 140 aa, Glycine max
  Clone ID: PAT_MRT3847_86927C.1.pep
HQWKSRKNSKVLHTFSYDQQGQYTSPYLSFTMIHSNNFECNVLKNNSNSFSPAEASFDVPSIPKEHSFEMSESDSCSEEVGDATDDEEVMSLDELLNDGKAKKKIEQLAALVGVHTTEPAIVLTVVVRILKHLNHYYSTT

SEQ ID NO: 271217 - protein, 359 aa, Glycine max
  Clone ID: PAT_MRT3847_86928C.1.pep
MSYEEHKRLRRLTSSSINGMESLSLYLTYIEENVKNSLEKWANMGQIEFLTEIRKLTFKIIMHIFLSSESEPVMEALEREYTALNHGVRAMCINIPGFAYHKAFKARKNLVAIFQSIVDERRNLRKGYLPGKAKDMMDALIDVEDDDGRKLSDEDIIDIMLMYLNAGHESSGHITMWATFFLQKHPEYLQKAKAEQEEIIRRRPPTQKGLTLKEVREMDFLYKVIDETLRVITFSLVVFREAKSDVNINGYTIPKGWKALVWFRSVHLDPEIYPNPKEFNPYRWNKEHKAGEFLPFGGGSRLCPGNDLAKMEIAVFLHHFLLNYRFEQHNPNCPVRYLPHTRPMDNCLGRVRKCSSTTT

SEQ ID NO: 271218 - protein, 215 aa, Glycine max
  Clone ID: PAT_MRT3847_86929C.1.pep
MMEMDSMCMWVVLVAIAGALLVLRSMLKNVNWWLYESKLGVKQYSLPPGDMGWPFIGNMWSFLRAFKSKDPDSFISSFVSRYGRTGMYKTLMFGNPSVIVTTPETCKRVLTDDDKFTTGWPQSTIELIGKRSFISMSYEEHKRLKRLTSSSINGMESLSLYLTYIEEDVKNSLEKWANMGQIEFLTEIRKLTFKIIMHMFLSSESEPCYGGLWRG

SEQ ID NO: 271219 - protein, 92 aa, Glycine max
  Clone ID: PAT_MRT3847_8692C.1.pep
MGTFDFAEEVARAYDAAARTLRGPKPKQKSLSDLFATTPPSILSSTRVSPLTLKSATAAATLHLSSMTTTLFLIFFCLIVLILLFVTNNLSF

SEQ ID NO: 271220 - protein, 69 aa, Glycine max
  Clone ID: PAT_MRT3847_86930C.1.pep
TRRIDIIGETPEGTHFVLFANPQYTVAVFDKNIETPQGADGDPAAQQMLIYAGKGLKKATTLEENNGGL

SEQ ID NO: 271221 - protein, 496 aa, Glycine max
  Clone ID: PAT_MRT3847_86931C.1.pep
MIMMMMMCSMWMWVVLVAIAGALLVLRSILKNVNWWLYESKLGVKQYSLPPGDMGWPFIGNMWSFLSAFKSKDPDSFISSFVSRFGRTGMYKTMMFGNPSIIVTTPEICKRVLTDDDKFTPGWPQSTIELIGKRSFISMSYEEHKRLRRLTSSSINGMEALSLYLTYIEKNVKSSLEKWANMGQIEFLTEIRKLTFKIIMHIFLSSESEHVMEALEREYTALNHGVRAMCINIPGFAYHKAFKARKNLVAIFQSIVDERRNLRKGYLPGKAKDMMDALIDLEDDERKLSDEDIIDIMLMYLNAGHESSGHITMWATFFLQKHPEYLQKAKAEQEEIIRRRPSTQKGLTLKEVREMDFLYKVIDETLRVITFSLVVFREAKTDVNINGYTVPKGWKVLVWFRSVHLDPEIFPDPKEFNPNRWNKEHKAGEFLPFGGGSRLCPGNDLAKMEIAVFLHHFLLNYRFEQHNPNCPVRYLPHTRPMDNCLGRVRKCPSTTT

SEQ ID NO: 271222 - protein, 136 aa, Glycine max
  unsure (1)..(136): unsure at all Xaa locations
  Clone ID: PAT_MRT3847_86932C.1.pep
MKVTAMCKGLGPTIFDKQGALLLAVAFLVVXRTWVSYRFAXLNGPTVKXISEQDKAFFIWLIGLTVFQNAGFSFIAPFIIHLTAMLALGGPSHLAHHVLANYLINNAFYXVFHMVXQNIDADQRITHDLEKVTTDL

SEQ ID NO: 271223 - protein, 36 aa, Glycine max
  unsure (1)..(36): unsure at all Xaa locations
  Clone ID: PAT_MRT3847_86933C.1.pep
MYDGYGYALPPGHDPSIYAAAYGAYPLYGGHHNXVS

SEQ ID NO: 271224 - protein, 61 aa, Glycine max
  Clone ID: PAT_MRT3847_86934C.1.pep
VVLMGFVEGYRVGGGPLGERLDPIYPGSAFDPLNLADNPNTFTKLKIKKLNNCHLTVFSIF

SEQ ID NO: 271225 - protein, 38 aa, Glycine max
  unsure (1)..(38): unsure at all Xaa locations
  Clone ID: PAT_MRT3847_86935C.1.pep
IEFTXDKXRXNTQLXSSXLXXXFFSISNXXXMKYHCXF

SEQ ID NO: 271226 - protein, 115 aa, Glycine max
  unsure (1)..(115): unsure at all Xaa locations
  Clone ID: PAT_MRT3847_86936C.1.pep
XFFFXGXXPPXXXXNXKXXPGGPRYCPXRKXASFRVIXCMQPGXCHQHGXFFQXGLXMQCXYLLEIGQSFSXWXXNXXGFXQRXXGLSXKPXXXXEXRISXESLTLXAVXQCVAF

SEQ ID NO: 271227 - protein, 119 aa, Glycine max
  Clone ID: PAT_MRT3847_86937C.1.pep
VPSCQALPLFITVFSFFWGRCAVSVALRKIYQAKGDRGLYSGLEAEVLKGFLNHSLTMEMKDRVHVADIQLYYALLKVTNKWTVELEMVHAEATHCVYPAKDKVQASAVHAFEEVKEHA

SEQ ID NO: 271228 - protein, 93 aa, Glycine max
  Clone ID: PAT_MRT3847_86938C.1.pep
AEMVLQVVLSNDCDQCYNHRGGQCRLDANKKFYCKEGPKNKSSKSLKLILGLVTGLSVILSAILIIGYIVFRRKYTPSHPQSQSRNTYVDVIG

SEQ ID NO: 271229 - protein, 53 aa, Glycine max
  Clone ID: PAT_MRT3847_86939C.1.pep
MDTSLYLCYIYYIIHISTPAFNSHNATIRQIQEPTGLYAPAVLAGRKNPPFMH

SEQ ID NO: 271230 - protein, 93 aa, Glycine max
  Clone ID: PAT_MRT3847_8693C.1.pep
MLNRLNRRFFCTVAPRPWLFVGLGNPGEKFKGTRHNVGFEMIDAFAESQGIPMDTVHSKAISGKGFVGEVPVFLAKPQTYMNLSGESTGPLAA

SEQ ID NO: 271231 - protein, 180 aa, Glycine max
  Clone ID: PAT_MRT3847_86940C.1.pep
MAGIVVIFDFDSTIIECDSDNWVLDETGLTEKFYQLLPSTHWNPLMDKMMNELHSQGKTIQDIVQILSRTPMHPRIVPAIEAAYSLGCDLKIVSDANIFFIETILKHHGVWNCFSDVIANPIHVNEGRLNICPYHDYLKSSHGCNLCPPNMCKAIIALIPKIYLLMAKQLILIFILVIYS

SEQ ID NO: 271232 - protein, 152 aa, Glycine max
  unsure (1)..(152): unsure at all Xaa locations
  Clone ID: PAT_MRT3847_86941C.1.pep
ARNSAREQDATHTFFDFTAYTGKTGGLGETIMLRNLHHPNFDNLIGYCACGNQRLLKHEFMPSRSQQDHLHDLAPHKDPFNWNIKMKITADAAKGXEYLDDKADPPGIHGDFRALYILREXSYHPKLSNSAHAKLRPPLDKTHDSTHIKETQ

SEQ ID NO: 271233 - protein, 276 aa, Glycine max
  Clone ID: PAT_MRT3847_86942C.1.pep
MAGIVVIFDFDSTIIECDSDNWVLDETGLTEKFYQLLPSMAWNPLMDKMMNELHSQGKTIQDIVQILNRTPMHPRIVPAIEAAYSLGCDLKIVSDANIFFIETILKHHGVWNCFSDVIANPSHVNEGRLNICPYHDYLKSSHGCNLCPPNMCKGLVIERIQNSLAAAGKKKIIYLGDGNGDFCPSLRLKDSDYLMPRKDFPLCDLVSKNSNKIKAEVHGWRDGKELDHVLLHVINKAIGEGNKNIISTPIVSVDCKLGSISIEAHKPLPKAIPVPQ

SEQ ID NO: 271234 - protein, 81 aa, Glycine max
  Clone ID: PAT_MRT3847_86943C.1.pep
SPAVSCTKPAKSGFAGLAAMAAEVRRNNYEQSHPGNQQIMRRRRHRSLFENQGLLILFFFKSNTCTQWWVGTHCLQVLRRA

SEQ ID NO: 271235 - protein, 64 aa, Glycine max
  unsure (1)..(64): unsure at all Xaa locations
  Clone ID: PAT_MRT3847_86944C.1.pep
LPIXXRXWYPATPXVTXXIVFXSHPTXLSASTSXLSFIRYCXMMXXLRDRRLTPTXLRHXXLEN

SEQ ID NO: 271236 - protein, 133 aa, Glycine max
  unsure (1)..(133): unsure at all Xaa locations
  Clone ID: PAT_MRT3847_86945C.1.pep
ARIRTSLKQDAHSILYFSMLETTSSCGCTSSSPSLANSPSNRGHEAEDHNELGSEEHFAQIGGGAGRNHTSSGGXVELCNAPTSPTTVIASLADEAGPNGRGTVADEEHNMRVTFGGERSEHGVAEGYRKPTT

SEQ ID NO: 271237 - protein, 137 aa, Glycine max
  unsure (1)..(137): unsure at all Xaa locations
  Clone ID: PAT_MRT3847_86946C.1.pep
TFLRRCQTINHQCKPNCAIYNIFINGFGKAGNVDIACDLFKRMVKEGIRPDLKSYTILVECLFMTGRVDDAVHYFEELKLTGLXPDTVSYNLMINGLGKSCRLEVALSFLSEMKNWGISPDLYTYIALIIHFGNAGM

SEQ ID NO: 271238 - protein, 183 aa, Glycine max
  Clone ID: PAT_MRT3847_86947C.1.pep
SANPTATIDFKGTVVGIRPAPVVASFSARGPNGLSLEILKPDLTAPGVNILAAWTGGVGPSGLDSDTRRTEFNILSGTSMACPHVSGAAALLKSAHPDWSPAAIRSAMMTTATVFDNTNALMIDQATGNASTPYDFGAGHLNLALAMDPGLVYNITPHDYVTFLCAIGYGPKLIQVNYRIAAQ

SEQ ID NO: 271239 - protein, 54 aa, Glycine max
  Clone ID: PAT_MRT3847_86948C.1.pep
GTEHEGYDPFFGGIHNYATPMMPLDEEILSKAAQDMVEEWFDCVAQEDSFGEAS

SEQ ID NO: 271240 - protein, 78 aa, Glycine max
  Clone ID: PAT_MRT3847_86949C.1.pep
TLIPIQSCSTFHWISDTCFTLSKLLLHAQLYVPSRHSVLPFEVFHCTHFPICAHSSQMLVSVRTDSAYSASSTSSTLS

SEQ ID NO: 271241 - protein, 34 aa, Glycine max
  unsure (1)..(34): unsure at all Xaa locations
  Clone ID: PAT_MRT3847_8694C.1.pep
LKRFTXVLXLCLIVKISIXHYNPYXIILXVSYLR

SEQ ID NO: 271242 - protein, 327 aa, Glycine max
  Clone ID: PAT_MRT3847_86950C.1.pep
MAPPAPPKSSQGQVMNNARIHFFSILLALQYGAQPLISKRFIRREVIVTSSVLTCELAKVICAVFFMAKDGSLRKLYKEWTLVGALTASGLPAAIYALQNSLLQISYKNLDSLTFSMLNQTKIFFTALFAYFILRQKQSIEQIGALFLLIVAAVLLSVGEGSTKGSAIGNADQILFYGIIPVLVASVLSGLASSLCQWASQVKKHSSYLMTIEMSIVGSLCLLASTLKSPDGEAMRQHGFFYGWTPLTLIPVIFNALGGILVGLVTSHAGGVRKGFVIVSALLITALLQFIFDGKTPSLYCLLALPLVVTSISIYQKYPYQVKKKES

SEQ ID NO: 271243 - protein, 88 aa, Glycine max
  unsure (1)..(88): unsure at all Xaa locations
  Clone ID: PAT_MRT3847_86951C.1.pep
MALTTDLSRFSGAMIYPRIGIRFVRRDAHVYPYANXNLTRXFHKHLKPSLLTXTAIYTALYKKDIAQDTVQKTIRTTKNPYSKSNARS

SEQ ID NO: 271244 - protein, 78 aa, Glycine max
  Clone ID: PAT_MRT3847_86952C.1.pep
MASEKVETVVAGNYLEMEREKEGSKSTSGKLSRLFWHGGSVYDAWFSCASNQVAQVLLTLPYSFLQLGILSGIIFQLF

SEQ ID NO: 271245 - protein, 55 aa, Glycine max
  Clone ID: PAT_MRT3847_86953C.1.pep
AINLWGSGLDGGGCMNNARQSFHGALESMMEDAQTALGNQFVGLRTRWWRMHEQC

SEQ ID NO: 271246 - protein, 44 aa, Glycine max
  unsure (1)..(44): unsure at all Xaa locations
  Clone ID: PAT_MRT3847_86954C.1.pep
FVSXLCVMKGLDRGHSKDRESEKTEEGTYHGPSTNKPTMTMTMG

SEQ ID NO: 271247 - protein, 57 aa, Glycine max
  Clone ID: PAT_MRT3847_86955C.1.pep
FYLFLDFKQNGHTVTLLKMDIQRQVDYTGYTLPLDTHCDSPRQTSFTGLLTTTNSTH

SEQ ID NO: 271248 - protein, 77 aa, Glycine max
  unsure (1)..(77): unsure at all Xaa locations
  Clone ID: PAT_MRT3847_86956C.1.pep
SPVYKPPVYKPAVYRPPVYKPPVEKPPVYKPPVYKPPVXKPPVYKHHVYKPPVEKPPVYQPPVCKSLVHKPLCTSHS

SEQ ID NO: 271249 - protein, 52 aa, Glycine max
  Clone ID: PAT_MRT3847_86957C.1.pep
TELFCKLSFIEPNCLSENSSVHVFANCFDSFKKKNKTTELLIHVLLYVSITS

SEQ ID NO: 271250 - protein, 103 aa, Glycine max
  Clone ID: PAT_MRT3847_86958C.1.pep
SLSVLSRDFPLQQRHSLYHAGGTTELTTGGRRFLLRFPVRSEVSLRSSVFSLPFPALSEAVSLLSPFSDEVTTVCAFSGEVLSVIFAFCARFLCILSVMYFEV

SEQ ID NO: 271251 - protein, 98 aa, Glycine max
  unsure (1)..(98): unsure at all Xaa locations
  Clone ID: PAT_MRT3847_86959C.1.pep
MMMKSAMCALVLVALVVVEVGPMADAAVTCNPPQLTPCHPALHSRPAPSSACCQNLNESXPRLCRYLTLPSIEQSLNSPTGSLLSRPCFINIAHHFKH

SEQ ID NO: 271252 - protein, 74 aa, Glycine max
  Clone ID: PAT_MRT3847_8695C.1.pep
NLNKSLISGKGIEDNKKPSINCTTSYSIYSVVTVSSGYLSHPSSPPATPPLIHQSHQVPLRSSLSLQGSLDRSR

SEQ ID NO: 271253 - protein, 196 aa, Glycine max
  Clone ID: PAT_MRT3847_86960C.1.pep
LKALLAEGRIFCDMPALANRDSVLMKDTCLQNSFICQPQQRNIHGRIFGGFLMRRAFELAFSTAYAFAGAAPHFLEVDHVDFFKPVDVGNFLRLKSCVLYTELDNIAEPLVNVEVVAHVTKPEHRSSEVSNRFYFTFGVDPVAIKNGLRLLHVVPATEEEARKVLERMDAENLSLVKKDGNLNVVKENKCTEKTNL

SEQ ID NO: 271254 - protein, 46 aa, Glycine max
  Clone ID: PAT_MRT3847_86961C.1.pep
EVENHNNSIYFRSFTIYLTKGKWSSGPFPYYCSRLKMKETGLPYNR

SEQ ID NO: 271255 - protein, 59 aa, Glycine max
  unsure (1)..(59): unsure at all Xaa locations
  Clone ID: PAT_MRT3847_86962C.1.pep
AXPXPXXPPLLXLXFSXXLSPILAQXXXLXGXLXXXXXXXLXXEHPFLSCASSXRSXLL

SEQ ID NO: 271256 - protein, 51 aa, Glycine max
  Clone ID: PAT_MRT3847_86963C.1.pep
GPPQWPLRFFKKKKTLFFCPTSLKSPPVKGKSYYQVWAFSKISSKFPKLLI

SEQ ID NO: 271257 - protein, 58 aa, Glycine max
  Clone ID: PAT_MRT3847_86964C.1.pep
KEFGEQLISHVDTFSKDLFVSLKGDAVQQASPAFEYLENALGKFDDGPFLLGQFSLVS

SEQ ID NO: 271258 - protein, 35 aa, Glycine max
  Clone ID: PAT_MRT3847_86965C.1.pep
RRVNYMSYSPMKRRREISLEEVFTRDLMVNNISEA

SEQ ID NO: 271259 - protein, 141 aa, Glycine max
  Clone ID: PAT_MRT3847_86966C.1.pep
RQKKTPNKKFWLNPRENPKPRGNMGAGGGKTPQGPFWAPPTRGQKPLKKTRGHWGPLPIQGGKTWAPWGPFSWGPRGAGSTPGGEKKGVPTRGGGKKGGERVFLERLNPSPIFLKRGPHKQGKKKGGTPGLKMGPKIPPDF

SEQ ID NO: 271260 - protein, 144 aa, Glycine max
  unsure (1)..(144): unsure at all Xaa locations
  Clone ID: PAT_MRT3847_86967C.1.pep
LKVLRPDKVLNHGLFILNDRKHRSSGGSDEWTLSEQAADAAMDRQCLDAAMDCSKVLXMTSPASKRVGWLHAMLLEANRSWDLADXAYTGLPEVIPIDQPIHARMEDLLMAHSYIRVSIDRLNKYLATYMEHHDACRALTGCYI

SEQ ID NO: 271261 - protein, 64 aa, Glycine max
  Clone ID: PAT_MRT3847_86968C.1.pep
CWVVSGGVAFAILGVLMFEMSVGLALFDISPAGGSGMLGQAIKVGYVRVFPVLDVVKRGSVCSI

SEQ ID NO: 271262 - protein, 49 aa, Glycine max
  Clone ID: PAT_MRT3847_86969C.1.pep
NDNSFIILQACNEDSSTIAKILFVDFFSRFENITKKQANNAMVYYYNSE

SEQ ID NO: 271263 - protein, 170 aa, Glycine max
  Clone ID: PAT_MRT3847_8696C.1.pep
MVMGRRTLLLLVLCLCLWIPFEVVGRKEPFFSPTSVNSTVSSRPKVVKFGALFTMDSVIGRSALPAIMAAVKDVNSSTSILPGIDLQVILRDTNCSAFLGTMEALQLMENDVVAVVGPLSSGIAHVISHVVNELHVPLLSFGATDPTLSSLQYPYFVRTTQNDYFQMYAI

SEQ ID NO: 271264 - protein, 111 aa, Glycine max
  unsure (1)..(111): unsure at all Xaa locations
  Clone ID: PAT_MRT3847_86970C.1.pep
XXSFXXXXXPXXSXXXXPXXXSFXXNXXNXXXXLLXFXPPFXXXISLLXIXLSPXXXXXXXXXXXXXXIXLEFLXQFSEDXXXSXXXXXSFXXXSVXPXSXIXXFSXACXI

SEQ ID NO: 271265 - protein, 50 aa, Glycine max
  Clone ID: PAT_MRT3847_86971C.1.pep
CLVPQGKYEIKAQSRKIATKLVLFIILGCIWKWLLSVTQLHHIQPSSDTC

SEQ ID NO: 271266 - protein, 198 aa, Glycine max
  unsure (1)..(198): unsure at all Xaa locations
  Clone ID: PAT_MRT3847_86972C.1.pep
MEDRKANTISVISVIALIILIIVARVSLKLSRAFFLICGASIAVILAVFSCALIRHRYNHRRRLLESQLKTEGRELRIEYSFLRKVAGVPTKYRFKELEEATDGFQALLGKGSSASVFKGILNDGTSVAVKRIDGEERGEKEFRSEVAAIASVHHVNLVRMFGYCNAPTAPKYLXDEYIPXGSLDCWIFSLKEKYTRK

SEQ ID NO: 271267 - protein, 480 aa, Glycine max
  unsure (1)..(480): unsure at all Xaa locations
  Clone ID: PAT_MRT3847_86973C.1.pep
NVFATTLPTSRRGPRLPLSLTPVLARLKDRRKTVPREKKSVHSNVLIMHPGNYVKLLLSMHKQLWEDKISVTSHSSLSVLRRILGEHQLSCMDLWHVNTDGIFFTXHNDEAPVVLSKKSYPAWXGLFLFSPPDFASASEXLEIAVSRLKGQETMSRKPSQSLKNLAKDEFESNFISAVVPPGEIGVKFDDIGALEDVKKALNELVILPMRRPELFSRGNLLRPCKGILLFGPPGTGKTLLAKALATEAGANFISITGSTLTSKWFGDAEKLTKALFSFASKLAPVIVFVDEVDSLLGARGGAFEHEATRRMRNEFMAAWDGLRSKENQRILILGATNRPFDLDDAVIRRLPRRIYVDLPDAENRMKILRIFLAQENLNSDFQFDKLANLTDGYSGSDLKNLCIAAAYRPVQELLEEEKKGASNDTTSILRPLNLDDFIQAKSKVGPSVAYDATSMNELRKWNEMYGEGGSRTKAPFGFGT

SEQ ID NO: 271268 - protein, 83 aa, Glycine max
  Clone ID: PAT_MRT3847_86974C.1.pep
GSYDGDQGIARCDIITAEEKKLISWKLTEDVFREIPRKKFYSVVVTTTAEDSFFRGLICFIIFSFKIILNVILVNFICNLCET

SEQ ID NO: 271269 - protein, 65 aa, Glycine max
  Clone ID: PAT_MRT3847_86975C.1.pep
LCATPDTSKTIVFMEEASGAPHFCLVSRLCCMNAESHSSRQKLDSKICELYHGRCSWGVEDPRKT

SEQ ID NO: 271270 - protein, 108 aa, Glycine max
  unsure (1)..(108): unsure at all Xaa locations
  Clone ID: PAT_MRT3847_86976C.1.pep
TRIPXSSWSWLELXXXGWALFQKSLTRMMTMPMYTLXMKEHXXXXLGEMLPLPKLKXWPRXMAPXITSPHPXQTATXHFXNXTXIEXKSAMKXXXLRXQPXXXXXXXS

SEQ ID NO: 271271 - protein, 62 aa, Glycine max
  Clone ID: PAT_MRT3847_86977C.1.pep
SLRDFFSQEDSLTAWSTQVRTAATMMADGRPYLYAMEHDTAGKTFQGDHVTGAKMQHMTICG

SEQ ID NO: 271272 - protein, 54 aa, Glycine max
  Clone ID: PAT_MRT3847_86978C.1.pep
MLFFTVKACYPYPSPLPLINNPVLPVTWAVSYSPPPPPPPPPPPPPPPPPPPPK

SEQ ID NO: 271273 - protein, 62 aa, Glycine max
  unsure (1)..(62): unsure at all Xaa locations
  Clone ID: PAT_MRT3847_86979C.1.pep
GAHNAFLMNMPNAGPPMWRYYGGELAXKFVRXTGSHIKCTKPLLIQLGKPAVHTVNCYAISH

SEQ ID NO: 271274 - protein, 94 aa, Glycine max
  Clone ID: PAT_MRT3847_8697C.1.pep
PTRPETFRHYLVVPVAHIPTVKYLQRKTDDYSLVSHMLEVGKTLLNRDAPQSQQYRYFSCLQLTWAMLIIFVCRVSCEIRLLTHDVGFNCICCP

SEQ ID NO: 271275 - protein, 192 aa, Glycine max
  Clone ID: PAT_MRT3847_86980C.1.pep
ILNGKSMGSTKKNTRNDVGVLSRKEQSTDALTMEELVSKTMKLPLLSSSYSFGDDLLKAVDGQCDSSKEANKVMVREKTFSDQGQREQVESTSTEVNGSAEKAKGSSGRKVVGDKVSLDDYPVKENPQGDKNFNSMIVESNVSKVRTEPNTEELPKKANQRGNLSEPDGIEHPFPGGKKKPKGSHGPMVMER

SEQ ID NO: 271276 - protein, 96 aa, Glycine max
  Clone ID: PAT_MRT3847_86981C.1.pep
AVLWLWLWGLNLRVICLWLSLARPSQCIQWLVYGCRLGSLFELWLLSSCSSMLFMGLVGGLRCGSGTGPSRDTIFIYNICIFLHPMLVSSEKPKRG

SEQ ID NO: 271277 - protein, 81 aa, Glycine max
  unsure (1)..(81): unsure at all Xaa locations
  Clone ID: PAT_MRT3847_86982C.1.pep
XRTAARTIKKKRGXIYKRXIPGFKPTFSLENGKQKSDLGDQTRGRRTQGGTNKNTPKGPTQNHETPNPSKARKDKVLTKPK

SEQ ID NO: 271278 - protein, 129 aa, Glycine max
  unsure (1)..(129): unsure at all Xaa locations
  Clone ID: PAT_MRT3847_86983C.1.pep
MEVLVEWEVAVSKLPLQGVGGSRNTSPMSRAGSRNTSPSRQKVVKTNLRVWDEETLATFGKVVHADIQMEDNIWAMLPEDLLHEILLRVPPFLIFRLRLVCXXWNSLLQDXSFLKFHXPVSHHMGPCLL

SEQ ID NO: 271279 - protein, 92 aa, Glycine max
  Clone ID: PAT_MRT3847_86984C.1.pep
WVLCLDPLFVGWSLLGAPGVFFFFFRLVFFCGSFSGYPFSPGIIFFLLYALFFFGLLLGKLFPLRGPVPYFRVVPRVRLNKNDKILGHVITC

SEQ ID NO: 271280 - protein, 115 aa, Glycine max
  Clone ID: PAT_MRT3847_86985C.1.pep
PRVRKVNQIQPEREKQTLTRTLSGCSFFQSSFISDSQFVKLYQWELHASKIRGNCLSSPPHHSYTLPFYALCFKKIIFFHSVIYMFIRGFEIFIILDLDLGIRIFISGGIGVCNN

SEQ ID NO: 271281 - protein, 89 aa, Glycine max
  Clone ID: PAT_MRT3847_86986C.1.pep
SSMILFHLDISDSNPNFMFGETYKLLSFFFLLNFMLIFYLKFSFIFLFNLKTFLFSLLSGQILVFNLMFLHAYNKHNNQSLNCHCYIIL

SEQ ID NO: 271282 - protein, 66 aa, Glycine max
  Clone ID: PAT_MRT3847_86987C.1.pep
PEGCSTHGESIKAVMKLPRLPNIIMHYADHSAGHLIHLLQALFLYDPCERLTAKDALTHSFFTRYR

SEQ ID NO: 271283 - protein, 275 aa, Glycine max
  unsure (1)..(275): unsure at all Xaa locations
  Clone ID: PAT_MRT3847_86988C.1.pep
LCKDRKLIDAEIVLADMIGRGVSPNAERYNMLIEASCSLSKLKDAFRFXDEMIQSGIDATLVTHNTLINGLGRNGRVKEAEDLFLQMAGKGCNPDVITYHSLISGYAKSVNTQKCLELYDKMKMLGIKPTVGTFHPLIYACRKEGVVTMDKMFQEMLQMDLVPDQFVYNEMIYSYAEDGNVMKAMSLHQQMVDQGVDCDKVTYNSLILAYLRDRRVSEIKHLVDDMKAKGLVPKVDTYNILIKGLCDLXDLMXAYFWYREMVERGLLLNVSMCYQ

SEQ ID NO: 271284 - protein, 97 aa, Glycine max
  unsure (1)..(97): unsure at all Xaa locations
  Clone ID: PAT_MRT3847_86989C.1.pep
VSVPLVSALMTEGTFSVMEFLRGKDTEVPAXYEHDFCLRFKWSRPFKLSSXSKAPIEXRIPSACNSWCSRIRPFGAAKGLLGSIPHLTGSSRALVVA

SEQ ID NO: 271285 - protein, 142 aa, Glycine max
  unsure (1)..(142): unsure at all Xaa locations
  Clone ID: PAT_MRT3847_8698C.1.pep
AEYISTYISLFVDXGAIIAYNKLTXDCSATHYRLISVCIAHALALFICVSDGANIYGRHVNPAVTLSAFVHGYITLLRGIVYVIAQLLGSIVACLLLASDTDSPVPAYELYTGVXIGNAMVVEILITFVWVXTSYATDVDPK

SEQ ID NO: 271286 - protein, 72 aa, Glycine max
  Clone ID: PAT_MRT3847_86990C.1.pep
VKCSHTICSPLRFFQSPCQAPPHLTIATDDVQVYYSRYATRLTTTRPLSMLGHGITDMEIHFLDVKFHSVGA

SEQ ID NO: 271287 - protein, 90 aa, Glycine max
  Clone ID: PAT_MRT3847_86991C.1.pep
VLHSLILSLFFPQQTLKSTPHMYFMCNKANNRFRHSLSSLKIRFRNLTSSWNLRKLRTFGEYLRESIPVLWWNVEAVNVGNWRRRSNVDP

SEQ ID NO: 271288 - protein, 54 aa, Glycine max
  Clone ID: PAT_MRT3847_86992C.1.pep
PPTALNLYGRNRSGLAIPTFMRRHLIQQSGSSHKTVRAPWPRGNVFPPFLGTVG

SEQ ID NO: 271289 - protein, 56 aa, Glycine max
  unsure (1)..(56): unsure at all Xaa locations
  Clone ID: PAT_MRT3847_86993C.1.pep
ENIXTNKMNLIKPFILLRFLKGGILMGAVVADEPSNDEEKGSYGIYEEFSGCEDVH

SEQ ID NO: 271290 - protein, 138 aa, Glycine max
  Clone ID: PAT_MRT3847_86994C.1.pep
QDNKMAYPYEFQGQKGKIVGWAPQQKVLSHPAIACFFSHCGWNSTIEGLSSGVPFLCWPYFADQIYNKTYICDELKVGLGLNSNESGFVSRLEIRNKLDQLLSDENIRSRSLKLKEELMNNKGLSSDNLNKFVKWLKE

SEQ ID NO: 271291 - protein, 159 aa, Glycine max
  Clone ID: PAT_MRT3847_86995C.1.pep
MVVKDINKPISPEHSLKLSNRKAKQRFDAKIGVDTSLSSWLVESSETTPISINNTSSVGEQTPKGRRGSPWSREDRPILGALTVEEIRMFSLSASSRRSRSRSPDETPIIGTVGSYWSHTEQTMDLEFNKSGKDVKPKRSSTALQTRLERAFEASAAEV

SEQ ID NO: 271292 - protein, 111 aa, Glycine max
  unsure (1)..(111): unsure at all Xaa locations
  Clone ID: PAT_MRT3847_86996C.1.pep
XXXWSPXXXKTXRXEXXGVSXXKAXXLPXXGXXGXXXCDPWXXGRIXXXVDGXMXXXGQKXKXRLGGRRVCNLDLRIXCNXXFGFLIHQXXLLLXIQLSTXDPPXSHKNXS

SEQ ID NO: 271293 - protein, 75 aa, Glycine max
  unsure (1)..(75): unsure at all Xaa locations
  Clone ID: PAT_MRT3847_86997C.1.pep
MPNRAANFGPQPPMAVPPIQQMSPIYHQVPPSVGXAPHPAYGQPAQENPAPGYPPTGYPPAAYPPPGYPPFGSPK

SEQ ID NO: 271294 - protein, 107 aa, Glycine max
  Clone ID: PAT_MRT3847_86998C.1.pep
MSTDIQNLKSFDPFAEAEDAGGEVKVSNQQNYIHIRIQQRNGRKTLTTVQGLPKKFDQKKILKVIKKQFACNGTIVADTEMGEVIQLQGDQRKDIQDFLTNKKEGLG

SEQ ID NO: 271295 - protein, 113 aa, Glycine max
  Clone ID: PAT_MRT3847_86999C.1.pep
GFSVGLPLFFIDIALSWGVGPLDVPGNLPFLVWDREGQFTNRGPCVSVKMLVQGNVGGPYSQVPPPLFFGGPRVKNSPFFFPPLLLQGISLWSFFPGVVRFVHLFGPVSPVCK

SEQ ID NO: 271296 - protein, 75 aa, Glycine max
  Clone ID: PAT_MRT3847_8699C.1.pep
HASAHASGRKESTLRMVASRSIWDCIARMVTNIDYQESVRQINLDFMLTARISCLYRHQHRLQILQMSVYPLSYQ

SEQ ID NO: 271297 - protein, 70 aa, Glycine max
  Clone ID: PAT_MRT3847_869C.1.pep
MDAGEALSDDPNRPNSAADAAPATAGARYKLMSPAKLPISRSPCVTIPPGLSPTSFLESPVLLSNMKVST

SEQ ID NO: 271298 - protein, 98 aa, Glycine max
  Clone ID: PAT_MRT3847_86C.1.pep
ETVSYNFHISYIFFLFLNGFLFLNKLETKEVMDFKQPQSFFRYSMGLDPVHYNIFYDFFSSQQYIIRELRICFTLDHDKTAKAEGPSYQITESYSLEL

SEQ ID NO: 271299 - protein, 64 aa, Glycine max
  Clone ID: PAT_MRT3847_87000C.1.pep
MRPTLGTELGIRVVRVTKMIQVELNDLLRNKVRLNGIDYDTIRDLNNLLAAQTGTRAIKIRMQK

SEQ ID NO: 271300 - protein, 59 aa, Glycine max
  Clone ID: PAT_MRT3847_87001C.1.pep
SAFVPILSKLLRSCIKKNSTLYNHTLVANSGKQFKPKIPKLYVSRNPNDVATKAIASHH

SEQ ID NO: 271301 - protein, 89 aa, Glycine max
  Clone ID: PAT_MRT3847_87002C.1.pep
SLPPCSTQLFAMNELTHLLVGLKAAGSTSIVSHLILGLIAHNVPTITYNGSTDDCNIIFQSVCNGGGLDKSPALRWHHFHNAQGHISVI

SEQ ID NO: 271302 - protein, 124 aa, Glycine max
  Clone ID: PAT_MRT3847_87003C.1.pep
MYKYFLFTIHEFVNEIIMKIHNSWSLKAIVSFTCALRRRRSNFIPSCSVSYLKFVEFALDETKRHTHLIPSPLQEKFSFMNSKDVKGSLSMLSFEATKIRLLRRLIIETETMQVVFFNAHQLSN

SEQ ID NO: 271303 - protein, 57 aa, Glycine max
  Clone ID: PAT_MRT3847_87004C.1.pep
NGGELHDPLGPILRLESSILAFITPTDDIIGLLPHNQKPRQSYHWGLQTIHLHARTQ

SEQ ID NO: 271304 - protein, 53 aa, Glycine max
  Clone ID: PAT_MRT3847_87005C.1.pep
HDDRVLTYSIHPLLLQLQMVLHIPTNMYKLHHSTYTFLIPKSHKMNPSTLLLI

SEQ ID NO: 271305 - protein, 139 aa, Glycine max
  Clone ID: PAT_MRT3847_87006C.1.pep
GGQECWGSNWICLSSAPWQILILDEATAAMDTETDLLIQETIREAFADCTMLTIAHRLHTVLGSDRIMVLAQGQVLRSSGALTRHGAWCGRKGSWGGATCHLHVPGHSPSSHSNLVLVCDDLYIPMPQGCSYSPVAHEQ

SEQ ID NO: 271306 - protein, 105 aa, Glycine max
  unsure (1)..(105): unsure at all Xaa locations
  Clone ID: PAT_MRT3847_87007C.1.pep
KNIFFFFFLRGGAQXPPKTGVVEPLRPGVRGPARSAERAGALTRGRVVKAGMRRAPXANRERGAGILRGNAHHSRLSLGEGXMASLRHGKDSPPEHGAATKKTNN

SEQ ID NO: 271307 - protein, 172 aa, Glycine max
  unsure (1)..(172): unsure at all Xaa locations
  Clone ID: PAT_MRT3847_87008C.1.pep
TFTVRSKFERKKPXXVSIGTIGHVDHGKTILTATXTMDHATLSNNAPKKYDEIVAXPEERARGITINTATVEYEMENHHYGHADYVKNMITGAAQMDGAILVVSDADGPMPQTKEHILLAKQVGVPNMAVFLNKQDQVDDEELLQLVELEVQDLLSSYEFPADEYPHCRGSV

SEQ ID NO: 271308 - protein, 59 aa, Glycine max
  Clone ID: PAT_MRT3847_87009C.1.pep
MTSQRKDGHSSIYYLGPNAGPAPPHRQDCSHWCLPGVPDTWNELLYALLLKHETSHTWT

SEQ ID NO: 271309 - protein, 480 aa, Glycine max
  Clone ID: PAT_MRT3847_8700C.1.pep
MWITYRSSSSSGSRQPSSMESFGVCIISLILLLMLTKNLSSNALGDSIKDEEGLKEDQNEMENSLSNNDEMRGMKDDDWQMVQKKGNQFVVNDKPFYVNGFNTYWLMVFAADESTRGKVTEVFKQASSVGMTVCRTWAFNDGQWRALQKSPSVYDEEVFKALDFVVSEAKKYKIRLILSLANNWEAYGGKAQYVKWGNAAGLNLTSDDDFFSHPTLRSYYKAHVKTVLNRVNTFTNITYKEDPTIFAWELMNEPRCTSDPTGDKLQDWIQEMAFHVKKIDPKHLVEVGVEGFYGPSTPQRTQFNPNTYATQVGTDFIRNHQVLGVDFASVHIYADSWISQSVADSHLPFIKTWMEAHIEDAEKYLGMPVVFAEFGVSAKAPGYNSTYRDNLINTVYKTILNSTKKGGSGAGSLVWQLFPDGTDYMDDGYAIVLSKSPSTSSIISLQSTRLALFNSLCSKKCRWGCKKRNVLEKVLYHDEL

SEQ ID NO: 271310 - protein, 201 aa, Glycine max
  Clone ID: PAT_MRT3847_87010C.1.pep
MASSFDRWEKDPFFNAAEEVQESADRMESTYRTWIHAMRDASSPWNCDELRRDLETTLGTAKWQLEEFERAARSSYSRVSSEDARNRHRDFIHAIGDKIQKVEHSLQESVHSGSKASLPWTRLDEGERDELASFLSGIPVLIKCVGRDNESLQANCSSNLHVSSGWGSSEAALEKSRGHRRAASADADIGTKITSDDVQQS

SEQ ID NO: 271311 - protein, 97 aa, Glycine max
  Clone ID: PAT_MRT3847_87011C.1.pep
MASSFDRWEKDPFFNAAEEVQESADRMESTYRTWIHAMRDASSPWNCDELRRDLQTTLGTAKWQVISIRKCTFTFLYHRNEHVVAFGWIMQLEEFGT

SEQ ID NO: 271312 - protein, 33 aa, Glycine max
  Clone ID: PAT_MRT3847_87012C.1.pep
QGKVSILAKPGVKQEIPDGAVITNKEINGPEDL

SEQ ID NO: 271313 - protein, 41 aa, Glycine max
  Clone ID: PAT_MRT3847_87013C.1.pep
VVYNLAIEFKYLAQFLYVFDSIQQCEPIHLRLEQYTNFHKY

SEQ ID NO: 271314 - protein, 108 aa, Glycine max
  Clone ID: PAT_MRT3847_87014C.1.pep
LTGFNALWYSQHLFVTVYGVSIVHGYYLDLAKKWHKKTTSTYLAIAMILYACERSLRAFRSGYKSVKTLKVAVYPGNVLALHMSKPQGFKYSSGQYIFLSYPDVSPFQ

SEQ ID NO: 271315 - protein, 339 aa, Glycine max
  Clone ID: PAT_MRT3847_87015C.1.pep
MASSFDRWEKDPFFNAAEEVQESADRMESTYRTWIHAMRDASSPWNCDELRRDLQTTLGTAKWQLEEFERAARSSYSKVSSEDARNRHRDFIHAIGGKIKKVEHSLQESVHSGSKASLPWMRLDEGERDELASFLSGIPAAGGKGLIECVGRDCESLQTNYSSNLLVSSGWGSSEAAPEKSHGHRRAASADADIGNWKITVSDDVQQSSSSNGSSGPTPMHKVASLSGFFGSMETISKLKWPKNGYRKLKAVNPCEEVDKALLAPAGLNGGIKAYYERSKSCLDNGDECYDKQLQGWYGALHRQLQRSQYQMQYNRPVQMAVWAVILLCFIVLIAFCTM

SEQ ID NO: 271316 - protein, 87 aa, Glycine max
  Clone ID: PAT_MRT3847_87016C.1.pep
SNRRDKRIRARHLCSTASSWRMMLPCLSMFDSPHYPKTFFFLDNNLVETGVLLFGIFCVHPRDRETLNLVPNAYVPKSSFSLTQKQG

SEQ ID NO: 271317 - protein, 147 aa, Glycine max
  Clone ID: PAT_MRT3847_87017C.1.pep
VKKNEGKKGFKVISLIEKFNCRARDLFEILMDENRWRGFTQSNARISKEVGGEFSIFDGSVTGKNLELDEGKLIVQGWRFGSWPDGIESMVRIVFEEPEDGVPVVKLPHSDVPEEDRYGNATVVENPERGWRDLIFQRIRTAFGFGI

SEQ ID NO: 271318 - protein, 97 aa, Glycine max
  Clone ID: PAT_MRT3847_87018C.1.pep
MASSTFTAMSAEELSSCAGISSFPTHRRTNAVLLSRRSRAARVSAMAKELHFNKDGTAIRKLQSGVNKLADLVGVTLGPKGRNVVLESKYRSPKIGN

SEQ ID NO: 271319 - protein, 193 aa, Glycine max
  unsure (1)..(193): unsure at all Xaa locations
  Clone ID: PAT_MRT3847_87019C.1.pep
LFSPSPAKLKSPLPPRPPSSNPLKRKLTAADALTDNSLPAPSDSGVKVIVRMRPLTPDKDNVDPTVQKVSNDSLSINGHNFTFDSVADMAATQLDIFEHIGVPLVEHCLAGFNSSVFAYGQTGSGKTYTMWGPANCLFEENDQQGLAPRVFQRLFARISEEHTKHSGNQLXYQCHWSFLXIYNEQIMDLLDPI

SEQ ID NO: 271320 - protein, 158 aa, Glycine max
  Clone ID: PAT_MRT3847_8701C.1.pep
FQRLTEGLSHMQRWEILVFGGLTWIYLTARPGVLVGAIDAYLLAPLQLGLDNLSGRRNLKRSDFVVGDKLGEGSFGVVYSGILVPKNVDLDVVQKRGRGKTTQVDAKSKDKVILKKVKVGIQGAEEFGDYEEWFNYRLSRAAPETCADFLGTFVADQT

SEQ ID NO: 271321 - protein, 100 aa, Glycine max
  Clone ID: PAT_MRT3847_87020C.1.pep
EAQTDPFLGNQKKNVLQKNVLARGGQKFNLGKDYNPRGRKQILVFGPQGSRVSFKKKTHGEIRSGPCPLPFKNITNLLFNQGNRMWPKPLPEKTFGVASI

SEQ ID NO: 271322 - protein, 463 aa, Glycine max
  Clone ID: PAT_MRT3847_87021C.1.pep
MEKAINRQKILLHHLNPSSSTHPNESSSLYASACVAGDSAAYQRTSTFRDDVVIVAAYRTAHCKGKRGGFKDTLPDDLLAPVLKAVIEKTNVNPSEVGDIVVGSVLAPGAQRASECRMAAFYAGFPETVPVRTVNRQCSSGLQAVADVAAAIRAGFYDIGIGAGLESMTTNPMGWDGSVNPKVKMFEQAQNCLLPMGITSENVAQRFGVSRKEQDQAAVESHRRAAAATAAGKFKDEIVPVTTKIVDPKTGEEKSVTISVDDGIRPGTTVSDLGRLKPVFKKDGSTTAGNSSQVTDGASAVLLMKRSVALQKGLPILGVFRTFAAVGVDPAIMGVGPAAAIPVAVKAAGLELDDIDLFEINEAFASQFVYCRNKLGLDPEKINVNGGAMAIGHPLGSTGARCVATLLHEMKKRGRDCRFGVISMCIGTGMGAAAVFESGDCADELCNARKVDDLLLSKDARLK

SEQ ID NO: 271323 - protein, 67 aa, Glycine max
  Clone ID: PAT_MRT3847_87022C.1.pep
GSSDYTVNSYADPATSHCLHCLSLLDTKATSKMHGTTAPALNIAEVQNQHPMPCPMNKTHQRADPRS

SEQ ID NO: 271324 - protein, 337 aa, Glycine max
  unsure (1)..(337): unsure at all Xaa locations
  Clone ID: PAT_MRT3847_87023C.1.pep
MPYLPMKCLLLGAGTLGCQVARMLMAWGVRKITLVDNGRVAMSNPLRQSLYTLDDCRGSGGFKAXVESFKRIFPAVEAEGIVMAIPMPGHPVQSQEQDSVLDDCKRLCDLIDAHDSVFLLTDTRESRWLPTLLCANTNKITVTAALGFDSFLVMRHGAGPLSADMPVNNANGKHRLGCYFCNDVVAPTDSTSNRTLDQQCTVTRPGLAPIASALAVELLVGILHHPQGIFAEGDINNSVTGATEQPLGILPHQIRGSLSQFSQMTLIGYSSSSCTACSHTXVSEYRNQGMEFILQAINYPTFLEDVTGLTELMKSATSLSLDWDKEIDEEEDCVEIQ

SEQ ID NO: 271325 - protein, 78 aa, Glycine max
  Clone ID: PAT_MRT3847_87024C.1.pep
GRNELSLLGHRDAPSHNFFSFFIHSFFLFFCLFLFQSQTHSFSLSINLLFLCQFCQQKISIKGHKIRFSYLPINRVTD

SEQ ID NO: 271326 - protein, 110 aa, Glycine max
  unsure (1)..(110): unsure at all Xaa locations
  Clone ID: PAT_MRT3847_87025C.1.pep
AASAVEHPATRRSCAPPPDHLERSYPVAMIDTLMAIGMVVQVEFNVVNGQTGAIARRIHDKLPAASDXMRCITHDSYIFDKLRYVSYTYFCHANEILWMLIPFSYMEDIQ

SEQ ID NO: 271327 - protein, 37 aa, Glycine max
  Clone ID: PAT_MRT3847_87026C.1.pep
ISKKEERVVLRKLVECTGFLFWGIKPRNHVIKCRFRL

SEQ ID NO: 271328 - protein, 65 aa, Glycine max
  Clone ID: PAT_MRT3847_87027C.1.pep
LFGFPKAITGTSNPPEITPSLGMLLKQALTLPLVARVEQYKKNLLCPYPAFGKFPFFLNPTFRVF

SEQ ID NO: 271329 - protein, 91 aa, Glycine max
  Clone ID: PAT_MRT3847_87028C.1.pep
KNPFKKNIFHHLKGLFKKGKTIVYRIPLGSKFLGPQHLFWDPIFFWNWKGIKLAILPRPKYLKKFLGLHFLTGAMIFKPLKSAKRGKIFFP

SEQ ID NO: 271330 - protein, 140 aa, Glycine max
  unsure (1)..(140): unsure at all Xaa locations
  Clone ID: PAT_MRT3847_87029C.1.pep
VPAVISKKLIKIYTGTSDFTNEINEPKDGSTDVLFVGVNGVGKTTTIGKMAHKFXSEGKSVLLAAGDTFRDGAIEQLXVSGDRVGVEVIKQGSGSDPAAVMYDAVQAAKARKVDVLLCDTAGRLQNKVNLMKELDKVKRV

SEQ ID NO: 271331 - protein, 81 aa, Glycine max
  unsure (1)..(81): unsure at all Xaa locations
  Clone ID: PAT_MRT3847_8702C.1.pep
PTSSXXTCFAATHGNRFINGWHSXQXRQQQSVSTGLLQXXWDXVXWAKXXHQQXXXXXGSEHXLKIVXLRXCKXFXVACSS

SEQ ID NO: 271332 - protein, 54 aa, Glycine max
  Clone ID: PAT_MRT3847_87030C.1.pep
SATLPPTLPFTSINKGTIGADFIPGMENSPGFGVSTSHAIFYILPLIVFLICAT

SEQ ID NO: 271333 - protein, 39 aa, Glycine max
  Clone ID: PAT_MRT3847_87031C.1.pep
SGRFVTPKLFSISAAVYLTNQDAAGGPLPVLLTSGLTRG

SEQ ID NO: 271334 - protein, 65 aa, Glycine max
  unsure (1)..(65): unsure at all Xaa locations
  Clone ID: PAT_MRT3847_87032C.1.pep
VAXMXIXLEXRXTXIRXVXLPEXGISHFSDSDQSDVVXSYNGSIPXXMXXHRXXAXLXPQXPSSS

SEQ ID NO: 271335 - protein, 106 aa, Glycine max
  unsure (1)..(106): unsure at all Xaa locations
  Clone ID: PAT_MRT3847_87033C.1.pep
SLEPRSLHSPFGFSRKASFFVKAAATPLVKLGPYXPLWFASKQCLSYYDGSLSGDYGSDPLELSDPKRTVGFIDPKLLAYGEIIYGRDTMLGCSVMHFVGVILEPV

SEQ ID NO: 271336 - protein, 43 aa, Glycine max
  unsure (1)..(43): unsure at all Xaa locations
  Clone ID: PAT_MRT3847_87034C.1.pep
LAKGKSRAXIRKLXMKLEKRRASSMDXIMTXLRLAQKKXQEMX

SEQ ID NO: 271337 - protein, 76 aa, Glycine max
  Clone ID: PAT_MRT3847_87035C.1.pep
EREREREREREFFKEGNSMAYRVVVVMKGVRSRRDFSCRVFYYASRSSFIPKSCNLFVCCYGPGSCHVCLIYTTCK

SEQ ID NO: 271338 - protein, 40 aa, Glycine max
  Clone ID: PAT_MRT3847_87036C.1.pep
MRSFSSNGFSSFSAFLTLNEPTSPFGNFLPNFIITWAKWE

SEQ ID NO: 271339 - protein, 106 aa, Glycine max
  Clone ID: PAT_MRT3847_87037C.1.pep
PFPARFRANDPLVPPRSPTSSFKGCPSSPICPKNAPVPGTLPTCVIALLEFELLYQFSLNTRSSFLNSPCKGVLASIHEFVIPFTSQDRGQSIFYINNVKGCLFSS

SEQ ID NO: 271340 - protein, 358 aa, Glycine max
  unsure (1)..(358): unsure at all Xaa locations
  Clone ID: PAT_MRT3847_87038C.1.pep
MATTSASFARFSVISRPSSSNPQFILFNAAPRTGTPHSRTGSARFRCLAGQTGFFTKLGRLIKEKAKSDVEKLFSGFSKTRSNLAVIDELLLYWNLADTDRVLDELEEALLVSDFGPRITIKIVENLREDIFSGKLKSGNEIKEALKRNVLELLTLQGETELQLGYRKPAXIMIVGGNGGGKTTSLXLMAAGDTFRAAASDQLEIWAERTGCEIVVAESEKAKASSVLSQAVKKGKELGFDIVLCDTSGRLHTNYSLMEELISCKKSVAKVVPGAPNEILLVLDGTTGLNMLPQAREFNDVVGVTGLVLTKLDGSARGGCVVSVVDELGIPVKFVGVGEGVEDLQPFDAEAFVNAIFM

SEQ ID NO: 271341 - protein, 55 aa, Glycine max
  unsure (1)..(55): unsure at all Xaa locations
  Clone ID: PAT_MRT3847_87039C.1.pep
SPQQQPQPSXXDXVFQPVXRAQTAKSNXXPEHQAQSRIXXXKLIQIINSSIVTEP

SEQ ID NO: 271342 - protein, 174 aa, Glycine max
  unsure (1)..(174): unsure at all Xaa locations
  Clone ID: PAT_MRT3847_8703C.1.pep
HEQFRHKINSSQFIDLLRGILRSCIPLHNKKWVAXCLVKLSSLSGSITSLYPINVEVTXXETIPRLLEQIKTSFSPEAQETAVVELNRIISEGVVDYTEAIISDEAIYSLVNLIEEGSDRAVEASLAILYNLSMDSENHSALVAAGAVQVLKRSVLANRPHWERALLLLRILQP

SEQ ID NO: 271343 - protein, 70 aa, Glycine max
  Clone ID: PAT_MRT3847_87040C.1.pep
GRDDFGRLNCRTAVTIRVRRTRNFLRLKRLFVDRLVHPYSNCRLIERPTLSSLGHALCPPRTSSHDHAST

SEQ ID NO: 271344 - protein, 106 aa, Glycine max
  Clone ID: PAT_MRT3847_87041C.1.pep
NVWAICRDPKYWTDAERFVPERFEDSSIDFKGNNFEYLPFGAGRRICPGISFGLASIMLPLAQLLLHFNWELPDGMKPESIDMTERFGLAIGRKHDLCLIPFVDNL

SEQ ID NO: 271345 - protein, 68 aa, Glycine max
  Clone ID: PAT_MRT3847_87042C.1.pep
FIQDDCFFSRENLLESLKRENENEIGSSSTEMPRHIGKVETKPNHMEEIWSWSHLLNNVGVFREMSKG

SEQ ID NO: 271346 - protein, 88 aa, Glycine max
  unsure (1)..(88): unsure at all Xaa locations
  Clone ID: PAT_MRT3847_87043C.1.pep
YSLIPKSLSFSELXKTKNPLFFSSVFGTQILRREDPIKPLHPKKRRPKRKTPIEVSARLAGSAHEPNWKANQAKTTLIGTIRYPYSII

SEQ ID NO: 271347 - protein, 47 aa, Glycine max
  Clone ID: PAT_MRT3847_87044C.1.pep
ELAALAGSDAARVADEILEAPDQLHMYYISGIRAAHRAVVHCYLRFP

SEQ ID NO: 271348 - protein, 338 aa, Glycine max
  Clone ID: PAT_MRT3847_87045C.1.pep
MDDMAAYYSQPQPSGLLPYQYYQQPPPPPPPPMMAVVPPPPGAVVPPAHHLHPPYVAQHQQQAVFGSYGAPQSSTHEVRTLFVAGLPEDVKPREIYNLFREFPGYESSHLRSPSNSSQPFAFAVFASQKSAILAMHALNGLVFDLEKGSTLYIDLAKSNSRSKRTRIDDERVGADKKARGLTPSWSTPDSGVGSIHMPGMGNPAFNTNTFGYPSAQSLGNADGSAMSDSLFANLKKSSTPYIPQNSTPCATLFVANLGPSCNEQELIQVFSRYPGFLKLKMQSTYGAPVAFVDFQDVGSSTDALNSLQGTILHSSQSGEGMRLEYAKSRMGMRRKPNR

SEQ ID NO: 271349 - protein, 44 aa, Glycine max
  Clone ID: PAT_MRT3847_87046C.1.pep
RDVLTTPAEKSNESQDRKGTNSLHINQVWNWFQNNPYAIRAKSS

SEQ ID NO: 271350 - protein, 67 aa, Glycine max
  Clone ID: PAT_MRT3847_87047C.1.pep
AHIARVLHSSALAGVGSIHMPGMGNPAFNTNTFGYPSAQRSSALLNHSFIMWKLIASNSDKAHFPNL

SEQ ID NO: 271351 - protein, 105 aa, Glycine max
  Clone ID: PAT_MRT3847_87048C.1.pep
QKKSSTPYVPQNSTPCATLFVANLGSSCNEQELIQVFSRYPGFLKLKMQSTYGAPVAFVDFQDVGSSTDALNSLQGTILHSSQSGEGMRVEYAKSRMGMRKKPNR

SEQ ID NO: 271352 - protein, 109 aa, Glycine max
  unsure (1)..(109): unsure at all Xaa locations
  Clone ID: PAT_MRT3847_87049C.1.pep
MGAPEKSQPNTNSMQPVKVYRLNDDGKWDDQGTGHVSVDYLERSEELGLFVYDEEDNENILLHRISSDDIYRKQEDTIISWRDPEYATELALXCQEPSGCSYIWGHICN

SEQ ID NO: 271353 - protein, 23 aa, Glycine max
  Clone ID: PAT_MRT3847_8704C.1.pep
LFHVVKFSYAIVGSPHTVSTFPC

SEQ ID NO: 271354 - protein, 68 aa, Glycine max
  Clone ID: PAT_MRT3847_87050C.1.pep
LLDLARTLLYLIQVQRPTQLEALQDLFSSPDQLHQSILQIAGVSSCFTSCLLLFYCNCDEYYCIPYAS

SEQ ID NO: 271355 - protein, 88 aa, Glycine max
  Clone ID: PAT_MRT3847_87051C.1.pep
RIARFVWKSRFKHDSSPMQRFNHDSGTKTRQAPIHIGSCWNRIQSCDAYGESYDTNYHGGYYFIIMQFLNLHFVPCFTEVLPMGSSNY

SEQ ID NO: 271356 - protein, 96 aa, Glycine max
  unsure (1)..(96): unsure at all Xaa locations
  Clone ID: PAT_MRT3847_87052C.1.pep
NSLAEPAQCSEDITASLAAYXYHYTDYYSKHLTEWNAPKSTILWIACHPHTXSVKSNMIYARFKDRHEKQLYGIXSKMXATDPTEIGTDVFKSRAD

SEQ ID NO: 271357 - protein, 117 aa, Glycine max
  Clone ID: PAT_MRT3847_87053C.1.pep
SFFIFLFISSNFFFGFLFFPPNLNPLNPRGPNPVLKIFLRAHPRFKTRPRTLARFNGPKNRKKKGKTGLTRKTGNLCFQSFHPLSWGKAPKETNGNSPLKYKKLGPKTRAMTCNPPR

SEQ ID NO: 271358 - protein, 58 aa, Glycine max
  Clone ID: PAT_MRT3847_87054C.1.pep
NVADREHPGENQLNTQAIHPASDSWRTSEQARTERPNKQSRKLNGKRNAQCNAPLSAA

SEQ ID NO: 271359 - protein, 117 aa, Glycine max
  Clone ID: PAT_MRT3847_87055C.1.pep
FMVDLLGLIINFKGINVRCMTAVQILADEHLCLDHGVHFIKGASFIIDHLQHLIQVLQFQVCVIGNKLLIQLLCVCVHVNLLVGNVCTVHSVSSRIIRPLSALYSTRTDLLILEGWQ

SEQ ID NO: 271360 - protein, 55 aa, Glycine max
  unsure (1)..(55): unsure at all Xaa locations
  Clone ID: PAT_MRT3847_87056C.1.pep
LFYAFTXNKTLQRRLVSETSSGSLVFNDAILQVLICCLSLSSYLISLRHFFKISH

SEQ ID NO: 271361 - protein, 96 aa, Glycine max
  unsure (1)..(96): unsure at all Xaa locations
  Clone ID: PAT_MRT3847_87057C.1.pep
DAKDFPLYSGAIXDAEGWSSPYGTILFVLLAGXGSADGADXGRKKNSWGXDWGKHGYMWIQRNSGNLLGVCGIKSLASYPSIEESQALVSCSRWRS

SEQ ID NO: 271362 - protein, 71 aa, Glycine max
  Clone ID: PAT_MRT3847_87058C.1.pep
RKSTTSRVPRGIQHLVKLENLTLWGVPTEVKQSIDPNGGQEHWMIQHVPSVAIADSFMVQRLEEFLEEERM

SEQ ID NO: 271363 - protein, 57 aa, Glycine max
  Clone ID: PAT_MRT3847_87059C.1.pep
KFQTNIQPEKIKIKKFCSLKIKITHINLLTLNPPFKTKKTTFPFSIKNSKTHPYNST

SEQ ID NO: 271364 - protein, 46 aa, Glycine max
  Clone ID: PAT_MRT3847_8705C.1.pep
HVSKAETIFFSNLGSPLVIPLKPKGTSLAFVTLTLGCIHLVTKFNH

SEQ ID NO: 271365 - protein, 72 aa, Glycine max
  unsure (1)..(72): unsure at all Xaa locations
  Clone ID: PAT_MRT3847_87060C.1.pep
MASLKVAFLAAVLCMVVVSAPMAHAAITCAQVISSLPNCIGYLQKGRRSVVGMLQPDGKSLMAGDKTTXEXQ

SEQ ID NO: 271366 - protein, 98 aa, Glycine max
  Clone ID: PAT_MRT3847_87061C.1.pep
QDRYTCCDIIACNGYGTRMFPTYEERKTPSALNQLISFLGNRSICCLINNFTFASSIKLCVTLPYIYAALTAHKMSRSTFGDCHLIKIWQLNLSKMRT

SEQ ID NO: 271367 - protein, 76 aa, Glycine max
  unsure (1)..(76): unsure at all Xaa locations
  Clone ID: PAT_MRT3847_87062C.1.pep
MAAASSMALSSPSLAGKAEKLGPSAPEVVRVRMCLTVPYLVSXRSPWFRPDRVTYSCLCNSERNSYIPALFKGACR

SEQ ID NO: 271368 - protein, 38 aa, Glycine max
  Clone ID: PAT_MRT3847_87063C.1.pep
NCNCDNDDIILYMLHHYLPDKYYWWVTRYEKKYYMYQH

SEQ ID NO: 271369 - protein, 33 aa, Glycine max
  Clone ID: PAT_MRT3847_87064C.1.pep
PFRLVSRDRPPPMYHISHLGCVKRTENALNSRE

SEQ ID NO: 271370 - protein, 44 aa, Glycine max
  Clone ID: PAT_MRT3847_87065C.1.pep
FIFSTPSIVFLWFATCFCVSLFGISYVFFRVCVCVDHCLFVCVS

SEQ ID NO: 271371 - protein, 221 aa, Glycine max
  Clone ID: PAT_MRT3847_87066C.1.pep
MIMMMMMGSNTKPLVHLSLLILVLFSSSTESLRFELQSGHTKCISEDIKSNSMTVGKYQIVNSNEGQPLPDSHRVTVRVTSSYGNNYHYGDRVQTGHFAFAAVEAGDYMTCFWAVDHNPVETLTVDFDWKTGVAAKDWSNVAKKGQVDVMELELKKLQDTVSSIHEEMFYLREKEEEMQELNRTTSSRMFWLSLLSLFVCLSVAGMQIWHLKTFFEKKKLI

SEQ ID NO: 271372 - protein, 93 aa, Glycine max
  unsure (1)..(93): unsure at all Xaa locations
  Clone ID: PAT_MRT3847_87067C.1.pep
VFGPYQCPEKGGLPDGGPPSPAGLLGQVFSPLGLKAQEIFGFFGAPPLGRFSPDPRGWGKPYLXFPPHGPGAPGGPFWPGPGFKFSPFFFRAP

SEQ ID NO: 271373 - protein, 68 aa, Glycine max
  Clone ID: PAT_MRT3847_87068C.1.pep
RSLGLVHYLCASGLFSSRGVLRGCFWFLPVLFPCVLILVLLQGNAPLCVLCWLALVSNPNGCREKKKI

SEQ ID NO: 271374 - protein, 109 aa, Glycine max
  Clone ID: PAT_MRT3847_87069C.1.pep
CFAVVFLVVWSMRSLRKITEGEPAAAMKFSLIKRFNLVVIGYLFFTRFVMFAFKTVLSYEYQWVSNLVEETATLVFCIAMFYVFGLLEKDEYSVIGDEEEQVSEIVVKE

SEQ ID NO: 271375 - protein, 55 aa, Glycine max
  Clone ID: PAT_MRT3847_8706C.1.pep
NKLNQICVHQASTYPVKKTFSGRFPPKGIPFEIYEIKIFFELIPKLGSSKIFYDF

SEQ ID NO: 271376 - protein, 121 aa, Glycine max
  Clone ID: PAT_MRT3847_87070C.1.pep
MEKDGAGAGAGVVDIDKITATLEPEKPTSGGLYVPGKDRMVYVPQERKSRLGLDALASAKRSQHDAGFKVPKERTISIAASAEDEDKSELSVSEESGHDGIVNRRRHTNRRYRDTTNETSH

SEQ ID NO: 271377 - protein, 300 aa, Glycine max
  Clone ID: PAT_MRT3847_87071C.1.pep
SWINRTSFGNGFFWWFLLSAFVCFWLLIFCWLFLFCFCLVRGEKKKSLAHGILVGNQREKTILGHGSLSFFFRSFGDNSVLFRYCLVKRPFCTFLLVSLIKNFLSFLFFTFSYSLVGNFLSFLFAFSHSLIGNFLSFLFAFSHSLIGNFLSFLFAFSLIGNFPSFLFASEGKDYGESGFWLKVCRMARHDTCRGLVWLKDKRDAPHYFHDTKCKNDDLETLCKTGRACTYADTQVSNFYGHVMLGLRIHFLYFKSTQCFQNMFFYQFVHSSESISGVWENLHSIHPSGVYTFFSKTSYDQ

SEQ ID NO: 271378 - protein, 190 aa, Glycine max
  unsure (1)..(190): unsure at all Xaa locations
  Clone ID: PAT_MRT3847_87072C.1.pep
HKCKNDDLEILCKTGYACTYADTQVSNFYGHVMLGLRIHFLYFRSTQYFQNMFFYQFVHSSESILGVRENFHSIHPSGVYTFFQKLVMINEFFFFFKEKLEIISFQKHCRFLARELIFSFSTFFFFLSLSFVYFFFLVGFFXFFLFFFHEVFCYLNMCIFLVRDFFAIYMHIPRYLCHLNLQIYILEGNF

SEQ ID NO: 271379 - protein, 196 aa, Glycine max
  Clone ID: PAT_MRT3847_87073C.1.pep
PLLCISISLTEVSVAQESVEPIQRSIVPGPSPSAKSGETALVEKDELSAIKAGIRKVMILTEFVSSKKSKKGCREEEGSEGRCSRSEDGEYNYPLDSESIDDSEEGETDEGKEDSSIRKSFSYGTLASANAGGFFHSNMRVNCNDEDWVYYSHRKSDVGCSRMEDSTTSSSDPYLQSSKRSILPWRKRKLSFRSSK

SEQ ID NO: 271380 - protein, 134 aa, Glycine max
  Clone ID: PAT_MRT3847_87074C.1.pep
MGDVVTVCDICGDQGFEEYLAICNKCPDGAEHIYCNDEKLEKVPDGDWWTCEDCRKSPGNELPTLGSQTEIEHAQCSPLLNSEFNGQLTNREVEKNVAIHDTRKRKNLGLLSKSVSFDNASSAKLNGKCSEVIA

SEQ ID NO: 271381 - protein, 357 aa, Glycine max
  unsure (1)..(357): unsure at all Xaa locations
  Clone ID: PAT_MRT3847_87075C.1.pep
FPCEVGLLESVDGLVEPKNYTNFTWFSLEYVDREDRTSKIDLFEPRFGGHQTLEERETSFYAKNQTLHCGFVKGPPGHPSTGFDINEKDKAYMYRCKVAVSSCIFGSSDFLRRPTSRLMSQYSKDNVCFVMFLDDQTLSKLSSEGSSPDERGYIGLWKIVVVKNLPYEDMRRTGKVPKFLSHRLFPHSRYSIWLDSKMRLNSDPMLIIEXFLWRRKAEYAISNHYDRHNVWEEVLQNKRLNKYNHTAIDEQFNFYQSDGLPKGDPSKPNDPLPSYVPEGSFIIRAHTPMSNLFSCLWFNEVDRFTSRDQLSFAYTYLKLRRMNPERPIQLYMFKDCERRALLKLFRHRELPSPRETA

SEQ ID NO: 271382 - protein, 136 aa, Glycine max
  Clone ID: PAT_MRT3847_87076C.1.pep
SFWLPGAYGTSVLRVTISLHLWKVGFPWFENRGPIFPKTVGQSGRPKKHHGLALFGGRKKFGLMPMQEKLDVTPPPHSSGFASLGVVSPFASFFSVSAPFSRLTVFQLVKFQSLQSLNICNQKCVCFFEKNPKNIL

SEQ ID NO: 271383 - protein, 58 aa, Glycine max
  Clone ID: PAT_MRT3847_87077C.1.pep
RSKSTPHENSCLNMKKSTKLLPSNQTNTDHFATMLKLREAHNDPHECANEKPICGIKA

SEQ ID NO: 271384 - protein, 102 aa, Glycine max
  Clone ID: PAT_MRT3847_87078C.1.pep
HAVRKKKKKKKKKKKKKKKKKKKKKKKKKKKKKKKKKKKKGGAVFWGSNFFSGGSLVFGFFLGSPNFLFLPVFLLAHIWETLGVPNFSAFGGNPLSPPLCIL

SEQ ID NO: 271385 - protein, 100 aa, Glycine max
  unsure (1)..(100): unsure at all Xaa locations
  Clone ID: PAT_MRT3847_87079C.1.pep
MVKIARVTLHDYISALSLKANFAEFHTTLIMRSAGVGSAIAYNELTKDAALXPTTLEAAAGAHAYALEGGVYDTGYILRGHIDPAXHFDWALGGHNSHYW

SEQ ID NO: 271386 - protein, 38 aa, Glycine max
  Clone ID: PAT_MRT3847_8707C.1.pep
AEVDLESGLVLTDYESKDVSTQWHTKQGEIILTQRSRG

SEQ ID NO: 271387 - protein, 87 aa, Glycine max
  unsure (1)..(87): unsure at all Xaa locations
  Clone ID: PAT_MRT3847_87080C.1.pep
IHTGTNGCGDSXETGPVLKCFAETPAYSDTNIPGSKEIICATKTWSGEAEVLWKEAMQEHTELSVLHEHVEKNRLIIECLYDNTLKY

SEQ ID NO: 271388 - protein, 200 aa, Glycine max
  Clone ID: PAT_MRT3847_87081C.1.pep
MAKGRKFPTTTGSERFLGLGMGTTTTTYSSQGSAAADRSEFWEEDVWSTAEHRDGDVNACPGEWEACAPPRRRNNRENCNVGGLSLAFEDGSGGGTRIVHHQYRAQHDAVSRQRQMATSAPVNVPDWSKILRADSVESLHGMDDGFDENNESEMVPPHEYLARSRKMAANSVFEGVGRTLKGRDMRRVRDAVWSQTGFDG

SEQ ID NO: 271389 - protein, 46 aa, Glycine max
  Clone ID: PAT_MRT3847_87082C.1.pep
SNVLMCVGEWSMDFSSTAKETHHTFRHLRAPKKKNRCSSRFTDTSS

SEQ ID NO: 271390 - protein, 76 aa, Glycine max
  Clone ID: PAT_MRT3847_87083C.1.pep
LEGSRTPECTLLGSIKESTVYGLQVTRSLSHGPHFNHNQCHKHQCTHSRLHHHSPSLKFPTTTTQLTQVHNTTQRI

SEQ ID NO: 271391 - protein, 56 aa, Glycine max
  Clone ID: PAT_MRT3847_87084C.1.pep
LIGLELSLTYILYLGFISSQCRTWVFPNKHTHGLQELKKVVMNLQPKLHFPNTLDD

SEQ ID NO: 271392 - protein, 106 aa, Glycine max
  Clone ID: PAT_MRT3847_87085C.1.pep
WYSPSLLNVEVNFPQVFLFLISYTRKHYSTHIMIQTKVLCRTSLPKLISMNTTHIHCKITTDSALSGLASITILQFYTHYTPVLIKSPKLQLRMIIGYIDFHSILY

SEQ ID NO: 271393 - protein, 61 aa, Glycine max
  Clone ID: PAT_MRT3847_87086C.1.pep
KRRTCRRCLCTSLLNPPSIPRLRVPNQVQNVEVPHEHLAISTHLVRHESLVVVGSILVTVR

SEQ ID NO: 271394 - protein, 132 aa, Glycine max
  unsure (1)..(132): unsure at all Xaa locations
  Clone ID: PAT_MRT3847_87087C.1.pep
MGTSAIQQSAFTGETALKQRNEVVRKTGGAGEGGTNMRRTVKRTPXXIWCGPDRAKDLGPFSEQIPSYLTGEFPGDYGWDTGGXXADPETFARDREVEGIHXXWAMVGALGXAFPEILGKNGGKFGEGLGGQ

SEQ ID NO: 271395 - protein, 63 aa, Glycine max
  Clone ID: PAT_MRT3847_87088C.1.pep
LSANLSPSSLSSRYVLRNLPKFLFPISMKISAGSRDFQPKFWIIIFRAKGNYMEDILSPKVGC

SEQ ID NO: 271396 - protein, 53 aa, Glycine max
  Clone ID: PAT_MRT3847_87089C.1.pep
LRNRNDGGGGSDVKEEGGLTFSREVSYSNGKFDCLKNIFFLLRWFLAQKIILK

SEQ ID NO: 271397 - protein, 996 aa, Glycine max
  Clone ID: PAT_MRT3847_8708C.1.pep
MSQGQAVPFAGKWHRFTVRNDGEKVVPEPQGDAEHTEIWESEVMIPFAVERTVYAFGGPLPDQESLSSSMNKVFPCYPTCEPRIFDSEPYNFNCLSKPHKLFRSAPSIAHKDYLPWLDRVEQAYEDFWKTYGIFDLIQFSRFGPEYRPEMLIAAMHFFESSTNTFQFKCGMMTPTLLDVAALTGLRPSGETYDPTKSSDNIKLVYKENTFSKYIAEHKGSVEEEVSDEEHVAFLTLWLSHYVFCTKSLQVAKRFIPMAIQIHEGQNFGFGRLLLAVLYESLGEACDDLKKSKDGSSFLVSGPMWLLQLWLNATFEQEMGLIIPQDYAEEVANRSIEGQRALRLTPKTFDQNPQKLFLKYMKIFLSFDKFLPQHAPFISREVGPAWFTDYFPVVDPDNEEEVNEIWSFYLNPQILSCRTGVQSNYLGLVGYQPNLVSRQFGLSQIRPKSLFEDPRDVIRGANLSEKTFKKFLKISLDENYNLHPFEFNHSHFCTIGFVTWWEKYYSGRSVGDTTIMISRLESGFTQPTVENIRSNLQARGKTIMSKKIAETSRADVRPKKPTGVKIQEWKQEEKEEEERPLIRKRKSPETSTKSADQTEAGNSQAQMPKKKKKVKQVEPEPSVTVEGGEPARKKKKKTKSSKEQGENQPVDVQPPSTDVDGTEAETTPSIAEMGNPVEQPDLPQEQPTVEVQNVSVEEIPSCARTSPAPETDAVNVEEQGEGQGIRSSSPHGSSQKSSSEEHFSDEEAIQEAEAGGSDIFPASSTSKLSASIGIAEDTFIQMQDEDPAAALRLLLNTSQANTSSEKIPGASSSSDADITSSVRQDCLLLKLSMEYARADKLHNPLTSDEILGKVIQIEAIIDQFASAVQKKRENDARLDAQKQAHILLLEKARAAQQEVERLTKEAKERSSDVKACDDNISSWEATITNLLSQVDDLRQKIVTEQAKRKELQEKDANSIQKLVAEKGREGLKAFSASQAVADEARAMESADQDNLPN

SEQ ID NO: 271398 - protein, 120 aa, Glycine max
  Clone ID: PAT_MRT3847_87090C.1.pep
MVAPTMFLYMEHPNGKVARASHSVFMAFMTMGKDSEKNDEVSLKEQLVFHYMQRSLLGYPGITPFEGMASGVVGMVQHLPAGSPALFYCVHSLVEKANQLCSEVFTNEADAWKKWQGEPE

SEQ ID NO: 271399 - protein, 61 aa, Glycine max
  Clone ID: PAT_MRT3847_87091C.1.pep
KTYTISKIQNNKKIKEQFTLNHINHTWAACQVGIRGHGVHKRSTSILRLNTRNHLGNGLHI

SEQ ID NO: 271400 - protein, 127 aa, Glycine max
  Clone ID: PAT_MRT3847_87092C.1.pep
MAGALTDDQIAEFHEAFCLIDKDSDGFITVDELATIIRSLEGNPTKEEIQDMISEVDIDGNGSIDFEEFLNIMGRKMKETLAEELREAFKVFDRDQNGYISATELRHVMMNLGERLTDEEAEQMIRE

SEQ ID NO: 271401 - protein, 37 aa, Glycine max
  unsure (1)..(37): unsure at all Xaa locations
  Clone ID: PAT_MRT3847_87093C.1.pep
VERFRWXMSYNERDLNLLNSFVEVTLHGLVLRRTMAA

SEQ ID NO: 271402 - protein, 92 aa, Glycine max
  Clone ID: PAT_MRT3847_87094C.1.pep
EAFSLIDKDSDGFITVDELTTIIRSLEGNPTKEEIQNMISEVDIDGNGSIDFEEFLNIMGRKMKETLAEELKEAFKVFDRDQNGYISATEVN

SEQ ID NO: 271403 - protein, 54 aa, Glycine max
  Clone ID: PAT_MRT3847_87095C.1.pep
RFYQGTGIIAANFIEMASWATDSRLQSQLIQCNIIYNITRLMPQDCGSIDNEIS

SEQ ID NO: 271404 - protein, 87 aa, Glycine max
  unsure (1)..(87): unsure at all Xaa locations
  Clone ID: PAT_MRT3847_87096C.1.pep
SLITTLLVDNIIVLSQPSLNQFFLLKTFKYTPLLAGITVVDLTDPDAKTHIVNAXRDFRFFKLVNQGVHLQFMANLENETLGLFKKP

SEQ ID NO: 271405 - protein, 40 aa, Glycine max
  Clone ID: PAT_MRT3847_87097C.1.pep
EVLLDDHPGYCDPFNSKHRLTGRTIVTCSSMSAEGTSKLS

SEQ ID NO: 271406 - protein, 121 aa, Glycine max
  unsure (1)..(121): unsure at all Xaa locations
  Clone ID: PAT_MRT3847_87098C.1.pep
MPLSQSVTLYLVSNECDTVEPGYKIPIMSQGHAAATHVDPSETIYGKDAPXRPKMLAKRIKPPIVKTAPAQQKTNTPPAILNSTTEPQXLTPKERQKLVTMTRLRKLVVSRVKDSLNTLAC

SEQ ID NO: 271407 - protein, 109 aa, Glycine max
  Clone ID: PAT_MRT3847_87099C.1.pep
IQDRGLYSGPFFVDLPCYLLVELLGDYIWDTAGLAPNPETFVEIRELEAIHSMWAMLRALGCLFLELLSRNGLKFGKSLWIHASSSIFIDVCAGLSGVPLRPSRPVLSL

SEQ ID NO: 271408 - protein, 1073 aa, Glycine max
  Clone ID: PAT_MRT3847_8709C.1.pep
MSQGQAVPFAGKWHRFTVRNDGEKVVPEPQGDAEHTEIWESEVMIPFAVERTVYAFGGPLPDQESLSSSMNKVFPCYPTCEPRIFDSEPYNFNCLSKPHKLFRSAPSIAHKDYLPWLDRVEQAYEDFWKTYGIFDLIQFSRFGPEYRPEMLIAAMHFFESSTNTFQFKCGMMTPTLLDVAALTGLRPSGETYDPTKSSDNIKLVYKENTFSKYIAEHKGSVEEEVSDEEHVAFLTLWLSHYVFCTKSLQVAKRFIPMAIQIHEGQNFGFGRLLLAVLYESLGEACDDLKKSKDGSSFLVSGPMWLLQLWLNATFEQEMGLIIPQDYAEEVANRSIEGQRALRLTPKTFDQNPQKLFLKYMKIFLSFDKFLPQHAPFISREVGPAWFTDYFPVVDPDNEEEVNEIWSFYLNPQILSCRTGVQSNYLGLVGYQPNLVSRQFGLSQIRPKSLFEDPRDVIRGANLSEKTFKKFLKISLDENYNLHPFEFNHSHFCTIGFVTWWEKYYSGRSVGDTTIMISRLESGFTQPTVENIRSNLQARGKTIMSKKIAETSRADVRPKKPTGVKIQEWKQEEKSKKKDDSTETTTTSKRSKRVVIEFDEEKDASFISNVNIITLFQEEEERPLIRKRKSPETSTKSADQTEAGNSQAQMPKKKKKVKQVEPEPSVTVEGGEPARKKKKKTKSSKEQGENQPVDVQPPSTDVDGTEAETTPSIAEMGNPVEQPDLPQEQPTVEVQNVSVEEIPSCARTSPAPETDAVNVEEQGEGQGIRSSSPHGSSQKSSSEEHFSDEEAIQEAEAGGSDIFPASSTSKLSASIGIAEDTFIQMQDEDPAAALRLLLNTSQANTSSEKIPGASSSSDADITSSVRQDCLLLKLSMEYARADVLKSIEENPSAAFGHLNFLKKLHNPLTSDEILGKVIQIEAIIDQFASAVQKKRENDARLDAQKQAHILLLEKARAAQQEVERLTKEAKERSSDVKACDDNISSWEATITNLLSQVDDLRQKIVTEQAKRKELQEKDANSIQKLVAEKGREGLKAFSASQAVADEARAMESADQVLSKEMATLKKLYEDLVMH

SEQ ID NO: 271409 - protein, 358 aa, Glycine max
  Clone ID: PAT_MRT3847_870C.1.pep
MVKISLGGYDDGEGPSNRTHKRRRGEREREREREREREMVKISLGGYDDGEGPSNRTHKRRREEDDDDEEEEQQQQRSFEMVDPSIGTQEQEDHAAPPHDGSNSNANGAGTSSRDRSVPIFVSDPDVLDCCICYEPLASPVFQCENGHIACSTCCVRLSNKCPMCLMPIGYNRCRAIEKVLECIKMSCPNANYGCKETFSYSRKNNHEKECIYLPCSCPLTGCDFVASSKELFLHFSHRHVGMGTRFAYDKFFTVFLSINQRTIVLQEKNDGNLFIVHNNHEHLGNIVRISCIGPKSMAEFQYEVLARHQGNALILQSFTKIVQGQYADAPSSTFLLIPSCLFGSPQLKLDIRIKSHH

SEQ ID NO: 271410 - protein, 93 aa, Glycine max
  Clone ID: PAT_MRT3847_87100C.1.pep
CQGSCGTNHSRAHRREVVKMRSDLTYELLKRMELDLELSPITRRGGLIWCAFLPYESYHLQLLNMHFLITLSSHWLLGPLPCNWSQLRATEWI

SEQ ID NO: 271411 - protein, 67 aa, Glycine max
  Clone ID: PAT_MRT3847_87101C.1.pep
EINSGLLGCELIESAILRMDGGDSDDLLEGNYCSPLRPLSRGRTHNKPQHGDERSDYFNEDGTTSFG

SEQ ID NO: 271412 - protein, 121 aa, Glycine max
  unsure (1)..(121): unsure at all Xaa locations
  Clone ID: PAT_MRT3847_87102C.1.pep
FRFLQAINEIPDITXGLKRLKXRTLIFVGGGSPFHSXALHITSKLDTTYTPXLELHRFPSIDTQEXPHAMLVPMEYFLMGYRFYRPCHFIHIPRTPLTPSYISPYLISPEIMASNLNPIKT

SEQ ID NO: 271413 - protein, 81 aa, Glycine max
  Clone ID: PAT_MRT3847_87103C.1.pep
MPELSIRILSRLLPSCMIHYIPIKSIPCKVVAVSTSKTGKHAHPKQSLCCMKHIDLWDKSFEDIGPSSHICDGPHVIRTDY

SEQ ID NO: 271414 - protein, 66 aa, Glycine max
  Clone ID: PAT_MRT3847_87104C.1.pep
MESSSGIESTGGRAPLSGVVADCVKRWFKDTLKEAKAGDVNMQVLVGQMYYHGYGVPRDAQKLSGV

SEQ ID NO: 271415 - protein, 44 aa, Glycine max
  Clone ID: PAT_MRT3847_87105C.1.pep
LSSKANYVVMTLIPNCTNPIDRKIDKGLSRPKGLSRTFRYYTLH

SEQ ID NO: 271416 - protein, 100 aa, Glycine max
  Clone ID: PAT_MRT3847_87106C.1.pep
MESSSGIESTGGRAPLSGVVADCVKRWFKDTLKEAKAGDVNMQVLVGQMYYHGYGVPRDAQKGRIWLTKASRVRSSVWRVGGKRPGYNASDSESDEEEDS

SEQ ID NO: 271417 - protein, 66 aa, Glycine max
  Clone ID: PAT_MRT3847_87107C.1.pep
TSNPYVLLVVGISGSCSSISVFLISVVGFSLPRDLPFEERLLLLLFFDLFYDEMEHHCLSLPKLHL

SEQ ID NO: 271418 - protein, 59 aa, Glycine max
  Clone ID: PAT_MRT3847_87108C.1.pep
ITYGSGPFNRAPQKHLCCWSQSTAICIVLIIQFPTEATITILRNPYMFKLIQDDRPNAD

SEQ ID NO: 271419 - protein, 67 aa, Glycine max
  Clone ID: PAT_MRT3847_87109C.1.pep
SMSKNMIVLRFKKKKRRDLIIIHSIGHQRVGARSVEHSTFTFLHLPPFSSTSFAPYFIYKSFMTMRC

SEQ ID NO: 271420 - protein, 56 aa, Glycine max
  unsure (1)..(56): unsure at all Xaa locations
  Clone ID: PAT_MRT3847_8710C.1.pep
XKGRFDIFLNVYLYFFAIKGAWSGYILHFSNWELSKDAGIYRFSRVSCAASSVVGA

SEQ ID NO: 271421 - protein, 168 aa, Glycine max
  Clone ID: PAT_MRT3847_87110C.1.pep
IQNEKTRKRVSCIAKELKKIHREAVQNTINSVTVVAVLFGSIAFMALFSLPGQYRKKQPEAGKANIADDAAFSAFCLLNATALFLSLAVVVAQITLVAWDTRSQRQVVSVINKLMWAACACTCGAFLAISFVVVGDETWLAISVTVLGAPILLGTLAYLCYFVFRRRF

SEQ ID NO: 271422 - protein, 50 aa, Glycine max
  Clone ID: PAT_MRT3847_87111C.1.pep
HRLHNTQNGMKYESLTFKYVKFYVVSSRLKCVFHTCVFHTCNISPFQFTT

SEQ ID NO: 271423 - protein, 59 aa, Glycine max
  Clone ID: PAT_MRT3847_87112C.1.pep
FIYNIDIVCFYILNVYRFFMPCIMHRSVVFGCTQTISILYINYYKMNVSAFLLKFIYNI

SEQ ID NO: 271424 - protein, 157 aa, Glycine max
  unsure (1)..(157): unsure at all Xaa locations
  Clone ID: PAT_MRT3847_87113C.1.pep
LRLHSKHKSWYLAGRELTTLEIRDALIPYLESLFEEHGDILVDVVENYPNPPGKDKSAVLVPPSNPVXTKKLKAVSRVSETDPDGGNLRPHIVYLMELGMDIEQIRSITRRFPSFAYYSLEGKINPAVEFFLELGVPKENIPTILTKRPQLCGISLS

SEQ ID NO: 271425 - protein, 102 aa, Glycine max
  Clone ID: PAT_MRT3847_87114C.1.pep
LDLYETAEAVEEGINKDLDATRIGKFADIKTSTRETILLAMIGLVDHKKLKPGDLIGVNKDSDLVLDTLPVEYDSRVKAMEVDEKPTEKYTDVRRLDKQIEE

SEQ ID NO: 271426 - protein, 103 aa, Glycine max
  unsure (1)..(103): unsure at all Xaa locations
  Clone ID: PAT_MRT3847_87115C.1.pep
PXXXXXXFFXXPFXXXFEXIXXXXXXXXXXXXPQXXXXXXXGKXXTXXGTXXEXXPXXTSXLIGXPXFFFXXXFLNXGDFHLLIFTKRTQXRAEFRAXVRVXR

SEQ ID NO: 271427 - protein, 62 aa, Glycine max
  unsure (1)..(62): unsure at all Xaa locations
  Clone ID: PAT_MRT3847_87116C.1.pep
GQAXPALFPILSLISLLFPFHYVLIEKGVKEGSTERRNLNHGIRKARKRSWIILHLFGRVEE

SEQ ID NO: 271428 - protein, 91 aa, Glycine max
  Clone ID: PAT_MRT3847_87117C.1.pep
SLLQSSSPTFRIPAPSVSFESASICRRNKSELSPGIGTRVTGPSNKLPRVHNKSTSSAARIFPAQFLPSPSQLLSQTSKQSYATMSADTVG

SEQ ID NO: 271429 - protein, 92 aa, Glycine max
  Clone ID: PAT_MRT3847_87118C.1.pep
KIRMKPRDPRRILHTNNTIQKSGILGNEQFKVIVSPVSNNQGTGDNVNAQNLEGRVDSKLVPTQPSAQPDIARQFRRNLKNIADIMSVSQES

SEQ ID NO: 271430 - protein, 37 aa, Glycine max
  Clone ID: PAT_MRT3847_87119C.1.pep
NGWSNVTPSYMWIMSCLAGNDTYSLISRLQFNNMLVT

SEQ ID NO: 271431 - protein, 107 aa, Glycine max
  Clone ID: PAT_MRT3847_8711C.1.pep
VVFFRNCQHVVVEVWSCNSAWTTDSQQYVLKSCTIAKRVFYPGTRTLFFCTAGPIPETFSFIVNLLFKLCFSHLKKICLWHNLPQIHSKLYICFPIKKLQFTQKTEK

SEQ ID NO: 271432 - protein, 85 aa, Glycine max
  Clone ID: PAT_MRT3847_87120C.1.pep
LTAALLVLSRSAEHDHRVQHRVVHGVAESTAEALPCRLRGGNLFYESAVAARAIDVVLFPYVNKARTAVAAIGSNVKIHFCTPEV

SEQ ID NO: 271433 - protein, 74 aa, Glycine max
  Clone ID: PAT_MRT3847_87121C.1.pep
WDSYLESHIKALRLLEVLSPDRGPGLGSNPHSFCDGSLFNCSHPWVHSLLLPRLSLFCGPPTDPSLLKFFPSVF

SEQ ID NO: 271434 - protein, 61 aa, Glycine max
  Clone ID: PAT_MRT3847_87122C.1.pep
RPFVRENWHTRTERALLLLPLIFRRKIKACPMDAFKFLTSYLSTFLGDDLHVFDVNFNCGG

SEQ ID NO: 271435 - protein, 87 aa, Glycine max
  Clone ID: PAT_MRT3847_87123C.1.pep
NLNFDTFTIHWEDPYYRYNYVCLIGRENGWFNIWNVRIKLHQCRYKYVEGVSSYGLVDILRGATWFPIHECVLVSTHYIHRGTDSHE

SEQ ID NO: 271436 - protein, 37 aa, Glycine max
  unsure (1)..(37): unsure at all Xaa locations
  Clone ID: PAT_MRT3847_87124C.1.pep
LXKKKLYRKNNEEPQFNHSXTQSVYCTLLTXNXCXXK

SEQ ID NO: 271437 - protein, 69 aa, Glycine max
  Clone ID: PAT_MRT3847_87125C.1.pep
VYTGVFRQPVLYSGPFKACMFFRFMLRSCVFVVSAACVICVYAFICTFKPCSFYCVTVFCKLSISVFFF

SEQ ID NO: 271438 - protein, 69 aa, Glycine max
  Clone ID: PAT_MRT3847_87126C.1.pep
VCYRQWCMCVVYGYKMKFDSFSSPEKKMCVFSFQNIQIGNPYVLNFFNYNLFRIFYTLIYLQNLIIKQI

SEQ ID NO: 271439 - protein, 178 aa, Glycine max
  Clone ID: PAT_MRT3847_87127C.1.pep
MKKVRRKIGKYEVGRTIGEGTFAKVKFARNSETGESVAIKVMAKTTILQHRMVEQIKREISIMKIVRHPNIVRLHEVLASQTKIYIILEFVMGGELYDKIVQLGKLSENESRHYFQQLIDAVDHCHRKGVYHRDLKPENLLLDAYGNLKVSDFGLSALTKQGADLLHTTCGTPNYVGP

SEQ ID NO: 271440 - protein, 80 aa, Glycine max
  Clone ID: PAT_MRT3847_87128C.1.pep
ETRKELSYFWEAQTSGGKNPIVLYPIRTLKEGTTNDWVIKRMLFFFFFHLGLNGTLVTPPLWCHPLEPKAGKKEKKGGGL

SEQ ID NO: 271441 - protein, 80 aa, Glycine max
  Clone ID: PAT_MRT3847_87129C.1.pep
SISLDLDPQCYRARATQPLGFIDVCAGTQSTLRTPPAMLHLLIPPYAVCTNDSQLSLFVADYRPYRRRAALRLPSAWQSI

SEQ ID NO: 271442 - protein, 102 aa, Glycine max
  Clone ID: PAT_MRT3847_8712C.1.pep
MEGDIKLLDGDDTHKKKESSLVKIKVLFFARARDLTGLSELPLEVSSGSTTHDCLKKLFVKFPSLEEIRGCMVLALNEEYTTESTIVKDTDELAIIPPISGG

SEQ ID NO: 271443 - protein, 46 aa, Glycine max
  Clone ID: PAT_MRT3847_87130C.1.pep
LTFYPISLPDSRSLFQLLCDYFCKILKEKIPFNLRHPLPPFCRLLA

SEQ ID NO: 271444 - protein, 136 aa, Glycine max
  Clone ID: PAT_MRT3847_87131C.1.pep
GTLGYTAPEYALHGQLSEKADTYSYGIVVLEIISGRKSTNVNVVDDDIEDDYLLRQSWTLYESGKHLELVDKTLNPNKYDPEEVKKVIGIALLCTQASPAMRPAMSEVVVQLSSTDLLEHMRPSMPIFFESNLRAP

SEQ ID NO: 271445 - protein, 82 aa, Glycine max
  Clone ID: PAT_MRT3847_87132C.1.pep
PSSLSKSAPQPTSPFNSSNPNSPPSTSPSSAAGSAAPSPSTPSPSSSRSSPESAPLAPPSTPPPPRHAPRRRLRAHALLWEA

SEQ ID NO: 271446 - protein, 47 aa, Glycine max
  Clone ID: PAT_MRT3847_87133C.1.pep
SASMSGYIYIYIYLLVSLKAYIYLFPFSSSDESMSESYSVEFHVVSN

SEQ ID NO: 271447 - protein, 134 aa, Glycine max
  unsure (1)..(134): unsure at all Xaa locations
  Clone ID: PAT_MRT3847_87134C.1.pep
RNPAPAISPRAGQSLSFLLQDPPPAFEXLPQRRRHSCRGSSSGXVSFLRLXLXLLRPPFLTLVXXSPESKMGGRAASXGGVLRFGVFXGFPHPSKEGVEKSSXSLNRTTRNSEHDDIKKTAIKEKRRVVRKXGV

SEQ ID NO: 271448 - protein, 87 aa, Glycine max
  Clone ID: PAT_MRT3847_87135C.1.pep
DRPRGFCKRGHLKNAGTQWTRAGNRRAGIIGVRHIGLKQPDRTTRLTQTKNTAKPPWEAREATTSTRLGRTVTTKPATLSRGIRCLV

SEQ ID NO: 271449 - protein, 49 aa, Glycine max
  Clone ID: PAT_MRT3847_87136C.1.pep
YNYQGTTQLHLVGARRPFIIFLVFSFFSKTIDTTSRLSLRTIKRRSSLI

SEQ ID NO: 271450 - protein, 53 aa, Glycine max
  Clone ID: PAT_MRT3847_87137C.1.pep
GNILKTTQPFSTAQRTKTFLQNPVPHFKASTGSLQKGHGKNPPKKFFPTNFFP

SEQ ID NO: 271451 - protein, 100 aa, Glycine max
  unsure (1)..(100): unsure at all Xaa locations
  Clone ID: PAT_MRT3847_87138C.1.pep
MYLDLLLLLWCACACFGSHLKLSCCGGHCCCRSSCPCRNGSXGCTLHPHFSYPDRTTTDTSVMVVAPVNAQFHGAETGVPAENDGCHCGPYCICNTCTSN

SEQ ID NO: 271452 - protein, 37 aa, Glycine max
  Clone ID: PAT_MRT3847_87139C.1.pep
TDFNLELDYMKLINVKARLTSTYTLISSIIILHILST

SEQ ID NO: 271453 - protein, 103 aa, Glycine max
  unsure (1)..(103): unsure at all Xaa locations
  Clone ID: PAT_MRT3847_8713C.1.pep
SKSKGQTHRSCYLESENMMLRSSSTPVLGSLLSSFTDSPNNNIHSETCHALKHFPPTTVPQHYHKLTFHQTGSSACXSSPISPSMVKLKAKQGLIRRVPSDGN

SEQ ID NO: 271454 - protein, 52 aa, Glycine max
  Clone ID: PAT_MRT3847_87140C.1.pep
SLVTLSKRLANYVLVFVLAFLVTMWFCTIFSFNFHYTIGFYLFILFLLNNFS

SEQ ID NO: 271455 - protein, 40 aa, Glycine max
  Clone ID: PAT_MRT3847_87141C.1.pep
GVGIGKQAPALACHSNPGTGATKALTSLHHYSHTIKFSKL

SEQ ID NO: 271456 - protein, 168 aa, Glycine max
  unsure (1)..(168): unsure at all Xaa locations
  Clone ID: PAT_MRT3847_87142C.1.pep
VAGEPGRAEADFGRFDVKSVIRNIYTLFSGSEIPIAGDNQEXIMDLYDPTTPLPPWXFSEEELATYASLYEKSGFKFALQVPYRTLGVDSGISDPKITVPAPADQLGEEKTIVFKCFGMEDXIRSGAMKHFVPDLEIIYIPKRSHFVHEQFPEKVNQLIIEFLNKQSI

SEQ ID NO: 271457 - protein, 113 aa, Glycine max
  unsure (1)..(113): unsure at all Xaa locations
  Clone ID: PAT_MRT3847_87143C.1.pep
ISIXXRKIXNDEXFHKXXQFFDEXQSXYIEIEELHNXXADEIETNSEEVINAIIHDVDTDKDGRISYEEFAAMMKAGTDWRKASRQYSRERFSSLSQKLIKDGSLKLNNDDGR

SEQ ID NO: 271458 - protein, 72 aa, Glycine max
  Clone ID: PAT_MRT3847_87144C.1.pep
LGSSTFLPPPSFFHMSLFLFMRRSYITLCHQLLRLLYHTTKLLILAHQISLVTDEDMDKALRSLEPASFVNL

SEQ ID NO: 271459 - protein, 154 aa, Glycine max
  Clone ID: PAT_MRT3847_87145C.1.pep
PSPSQSPPALKPYLAPCLPPLLGQHTCPCVPLYHPASTLGHCCTSQPISPHQTGMPLFRFNIHVVYLSVSRPICFFMHLLPLLTSWLLYSFWFGFFSFFLTVAYYYCCFIPFVWLYLRIRIHFRLPTTYSCLVLPPPPPKEGGRHTVMTGNLPG

SEQ ID NO: 271460 - protein, 101 aa, Glycine max
  unsure (1)..(101): unsure at all Xaa locations
  Clone ID: PAT_MRT3847_87146C.1.pep
MAGSSSPGSGPPPKCLPCGVPKTPPWREGPLGPQTLCNACGVXYRSGPLFFXFRPAASPPFVASLPPNCPKKVVGIRNKVFPGPVWGFLLASPPPPGNFVG

SEQ ID NO: 271461 - protein, 88 aa, Glycine max
  Clone ID: PAT_MRT3847_87147C.1.pep
VNIEVLQHPISQTLYIHISHRSKQAQHHLLPSLSLQIQHLSRFRVLLHQGSSILILYTSPPTSPYICAEVCRPSSELYDVDHASHIGE

SEQ ID NO: 271462 - protein, 202 aa, Glycine max
  Clone ID: PAT_MRT3847_87148C.1.pep
MKQSKDPFEAAFEESPPESPTATETEAETQNPTPPPPPPPPPSSFSGVAVVALNPQQPQNQKVKNKDNEEEEEEEDNMDVELAKLPSTGDPHKMAKMQAILSQFTEEQMSRYESFRRAGFQKANMKRLLASITGTQKISVPMTIVVSGIAKMFVGEVVETARIVMKERKESGPIRPCHLREAYRRLKLEGKVFKRSSSRLFR

SEQ ID NO: 271463 - protein, 35 aa, Glycine max
  Clone ID: PAT_MRT3847_87149C.1.pep
ETHAIIISNNVSDNLIYGFSNLCHFCLRIATCKLV

SEQ ID NO: 271464 - protein, 373 aa, Glycine max
  Clone ID: PAT_MRT3847_8714C.1.pep
MERMFPPKKPSTMNSHDRPMCVQGDSGLVLTTDPKPRLRWTVELHERFVDAVTQLGGPDKATPKTIMRVMGVKGLTLYHLKSHLQKFRLGKQPHKDFNDHSIKDGMRASALELQRNTGSSSAMIGRNMNEMQIEVQRRLHEQLEVQKHLQLRIEAQGKYMQSILEKAYHTLAGENMASAATNLKSAIVPHHQGIPDMGVVMKEFGSPLGFSSFQDLENIYGGNQIDLQQNMEKPSLDHGFMPINESLCLGKKRSNNPYSGSGKNPLIWSDDLRLQDLGGPASSCLGPQDDPFKGDQIQIAPPGSLDRGASTDIDPMSEIYDSKPVLQSEEKKFDASSMKLERPSPRRAPLQPERMSPMISTGTMAQGRGSPFG

SEQ ID NO: 271465 - protein, 58 aa, Glycine max
  Clone ID: PAT_MRT3847_87150C.1.pep
FGISYLRPRNISNKITSFLDKLEKTLLFTSSLYRLDKTLITRFLDNLRKPSQLQVFWT

SEQ ID NO: 271466 - protein, 80 aa, Glycine max
  Clone ID: PAT_MRT3847_87151C.1.pep
MPLCPSFMAVVSFLIVQIAQKKCQVCGGSGLVTKNDYYVRCQKCGKKSPTMAYLWRIKRDNGCLPQVVFFRGSLGEDSSR

SEQ ID NO: 271467 - protein, 40 aa, Glycine max
  unsure (1)..(40): unsure at all Xaa locations
  Clone ID: PAT_MRT3847_87152C.1.pep
VTXXXGKIEIKRIENTTNRQVTFCKRRNGLLKKAYELSVL

SEQ ID NO: 271468 - protein, 119 aa, Glycine max
  Clone ID: PAT_MRT3847_87153C.1.pep
LNPRLGINVHLHAPSPICDTPNLPDPIQNSHRTPWQSSIETKTDNSRQEEPEIGLTYSHLKGNNNNETMVDGHNNSGGLDSSPLSRSSEAMLDLEFTLGRPNWQKDHPESSRELTLLKC

SEQ ID NO: 271469 - protein, 444 aa, Glycine max
  Clone ID: PAT_MRT3847_87154C.1.pep
MGIPHFLVIPYPVLGHVNPLMQLSEALTKHGCKITFLNTEFSHKRANNAGAELDNLKESGIKFVTLPDGLEPEDDRSDHEKVFLSIQSNMPSLLPKLIEDINALDAENSITCIVATMNMCWALEVGHKLGIEGAFLWTASATSLAACYCIPRLIDDGIIDSEGVATKKQEFQLSLNMPMMDPADLSGGGLLEPFFPQIVKEMKILELGEWWLCNTTCDLEPGALAISPRFLPIGPLMESDTNKNSFWEEDITCLDWLDQQPPQSVVYVSFGSLAIVEPNQFKELALGLDLLNMPFLWVVRSDNNNKVNSAYPDEFHGSKGKIVNWVPQRKILNHPAIACFISHCGWNSTIEGVCSGIPFLCWPFFSDQFVNRSYICDVWKVGLKLDKDGNGLILKGEIRKKVDQLLGNEDIKARSLKLKELTVNNSVNGDQSSKNLEKFINWAK

SEQ ID NO: 271470 - protein, 43 aa, Glycine max
  Clone ID: PAT_MRT3847_87155C.1.pep
VWINQIISTYHRVQETVCTRHNGIYMRENKLDQFTKIDRTSGR

SEQ ID NO: 271471 - protein, 60 aa, Glycine max
  Clone ID: PAT_MRT3847_87156C.1.pep
KKKKQNKQKKKKKKKKKKKKKKKNKKKKKKKHKKKKKHYPTVIPLKNIPLSPAGSKAKIP

SEQ ID NO: 271472 - protein, 73 aa, Glycine max
  Clone ID: PAT_MRT3847_87157C.1.pep
KFLSCFPTMDVKINVITALHTLLQCLLFSARLGLSFSTQPLNAKKLSSYNHHRLSFSSVFKVQAKDYPLVPYT

SEQ ID NO: 271473 - protein, 65 aa, Glycine max
  unsure (1)..(65): unsure at all Xaa locations
  Clone ID: PAT_MRT3847_87158C.1.pep
DALNVLWRKLLSFMMEVEECDTLPGSVSRVMLQLHPKIKTFWRKLITKVLDMTXRVLEEAPEEST

SEQ ID NO: 271474 - protein, 66 aa, Glycine max
  unsure (1)..(66): unsure at all Xaa locations
  Clone ID: PAT_MRT3847_87159C.1.pep
GGGLSKCIGHDVAVXTAKVALSMFIQRFSFELSTTYNGAPTWVMTLGPQHGAHLILHKVEICSNNY

SEQ ID NO: 271475 - protein, 63 aa, Glycine max
  Clone ID: PAT_MRT3847_8715C.1.pep
DNFILTGYIAPQLGQVYATYGGGVNKSSQQCNIIEPQHINIKSLTSDKVRDYSRSEPLKMDKP

SEQ ID NO: 271476 - protein, 56 aa, Glycine max
  Clone ID: PAT_MRT3847_87160C.1.pep
ILKKVHHSHIGNLQQNKEWYCKNKHEFNCKPDMAKAYAIVLLPSKYGLRCTAGASF

SEQ ID NO: 271477 - protein, 70 aa, Glycine max
  Clone ID: PAT_MRT3847_87161C.1.pep
LKIVHIHGFSRSDNGPRMHDIHIDQEHIKRHDQIIDFHILRVTPNRGPADHFQTKNPPREPKTRRRGASL

SEQ ID NO: 271478 - protein, 226 aa, Glycine max
  Clone ID: PAT_MRT3847_87162C.1.pep
MVMASKSNSLTFGAACFTTCPFSRTKTCCIHFLAIPNAKSRATFSLGPTLSKRMSLGILSSPIETTPTHLITPISALNSGLEASITDSNDISAILANAKIVVDSEDENKIQLRVDLTGDQTQKVFDRILTNLGRTAPPVPGFRMQKGGKSSKIPKDFLVQMLGEERVTKFSIQEILNSTMADYVKKENLDVKDRKISTTQTQEQLKKSFKPGNEFGFNVIIEPENS

SEQ ID NO: 271479 - protein, 54 aa, Glycine max
  unsure (1)..(54): unsure at all Xaa locations
  Clone ID: PAT_MRT3847_87163C.1.pep
RRRXGXKLKXXXAYXRXQSRFRIQNHYVSXFSFRSXHECRGXTASDFSXRVTXH

SEQ ID NO: 271480 - protein, 222 aa, Glycine max
  Clone ID: PAT_MRT3847_87164C.1.pep
MIQLLFTVIFSEASMIALLLFKTPLRKLVIMGLDRLKRGRGPLMVKTVAGTVLVVLLSSVYSMLKIQKRGIQEGAVVNPTDQVLMAKHLLEATLMVAVLFLALMIDRLHHYIRELRIRRKGMEAVKKQTRGTEDGKVANSEEIKSVEEERARLRAELSRLESELQSKTKDVDGAEANIAALRKQSEGFLLEYDRLLEENQNLRNQLQSLDRKLSHSGSKKNM

SEQ ID NO: 271481 - protein, 82 aa, Glycine max
  unsure (1)..(82): unsure at all Xaa locations
  Clone ID: PAT_MRT3847_87165C.1.pep
APKLLDDILRGYSQDEAIXXAFNYLKEKKGLGGGTGNERFELSQHFLGRGAKGPFPFNTGKEGVKFSAWVEGRGKDLTEGGR

SEQ ID NO: 271482 - protein, 81 aa, Glycine max
  Clone ID: PAT_MRT3847_87166C.1.pep
LVQCIQNKPLYFADRLYDSMKAKGTRDKDLIRIIVYRSEVDMLKIRSEFMRKYGKSLYYYIQQDTSGDYQKALLYLCGGDD

SEQ ID NO: 271483 - protein, 78 aa, Glycine max
  Clone ID: PAT_MRT3847_87167C.1.pep
RPPKLNLLMPFGWGTLIFRYLIPGAKFGRPKNGLMGNLLFFQTLLGGKIHGPTKKLEPFFGVPPGNKNQGRGKEPNSI

SEQ ID NO: 271484 - protein, 131 aa, Glycine max
  unsure (1)..(131): unsure at all Xaa locations
  Clone ID: PAT_MRT3847_87168C.1.pep
MDLPRDVDDYIKQTLDDTLGIPTRNSPSLKSKLRASQDSQWRLRERLLSLLPQLKQKDQLIDRLMSEAGMNARALKXFVEENXRLATECERLLARCHQLENECXLYDKDREALMXELGNDADERAREAQTR

SEQ ID NO: 271485 - protein, 139 aa, Glycine max
  unsure (1)..(139): unsure at all Xaa locations
  Clone ID: PAT_MRT3847_87169C.1.pep
VRTLAIALEYGAGDGYPSHHGITKDAHAALDHHFQRSDIDTSTIHAFVRPLGGAXGAVLTDDIPDKVAALILENTYTYIXGIARVFLPSLTWSIGRSATTGPKELXCVVPSTRTSIESGWHSLQPILNVCGAQDQMAPP

SEQ ID NO: 271486 - protein, 291 aa, Glycine max
  unsure (1)..(291): unsure at all Xaa locations
  Clone ID: PAT_MRT3847_8716C.1.pep
MNFNNVNAPKVPGGGVAALLKVGIIGGLVVYGAANSLYNVEGAXGHRAIVFNRVVGVKDKVYPEGTHIMIPLFERPVIYDVRARPHLVESTSGSRDLQMVKIGLRVLTRPVPDQLPTVYRTLGENYNERVLPSIIHETLKAVVAQYNASQLITQRENVSREIRKILTQRASQFNIALDDVSITSLTFGKEFTAAIEAKQVAAQEAERAKFVVEKAEQDKRSAVIRAQGEAKSAQLIGEAIANNPAFITLRKIEAAREIAHTISNSANKVYLNSDDLLLNLQELNLEPSGKR

SEQ ID NO: 271487 - protein, 264 aa, Glycine max
  Clone ID: PAT_MRT3847_87170C.1.pep
MAHHSSQRRNLAAPESNPTTPNSNPDLIQTYKPSFLVKHLTNLNLSQTHKTRPPHKHSPLIDTHLQAKAMATSAIQEKESTVPVKRTHKEKPQRHCLELERRKLGDPNDKGMVEDAKVVKGKPRNPHLEKHDVVVAAAERMSVSLAPGGGGGRRRSFCGTQADLRDVFAINGAKMVSVDMPPFMQIHAVDCARKAIDSMEKFTSKTLALSLKKEFDGVYGPAWHCIVGTSFGSFVTHSVGGFLYFSMDKKLYILLFKTAVHKAA

SEQ ID NO: 271488 - protein, 63 aa, Glycine max
  Clone ID: PAT_MRT3847_87171C.1.pep
LIIENLKLYICDLFIILGRFMDKAATIKETEEHSPKNPWRLCTVTQVEEAKCVLRMLPVWLCT

SEQ ID NO: 271489 - protein, 73 aa, Glycine max
  Clone ID: PAT_MRT3847_87172C.1.pep
SKFLINFCVRFTHKLVISLFLTFFFSFSVKTLFVTFDFEFRFRFLCLVLLKPMTPRLVSFWLRYGISFGQQHC

SEQ ID NO: 271490 - protein, 176 aa, Glycine max
  Clone ID: PAT_MRT3847_87173C.1.pep
RAVLLLVVCALAIEAVYGACSLSSPCASNLCCSQYGYCGSTNDYCGTGCVFGPCAGKVSPTSAPSNAWPFGPLKALYVDANMNWNDPPSTFKAIADAGYNLVVISFLVPAAADGAQLWGSMSAATQNATVNYIHSRNAKIIVSAGGATYKGYTLNTGAQFGTTVATARNNKLDGVF

SEQ ID NO: 271491 - protein, 129 aa, Glycine max
  unsure (1)..(129): unsure at all Xaa locations
  Clone ID: PAT_MRT3847_87174C.1.pep
SFLLPCVAAIWIQNGFLSSYILXGSVAISRLGLWMFDLSVLQQMQDLVSESDRLIVGGVQNSLQSLMDLLAYVMGIIISDPRDFWKLTTISFLAVTLAAFLYCIHTYHARKHLFHFDQVLWGKCFVRAS

SEQ ID NO: 271492 - protein, 65 aa, Glycine max
  Clone ID: PAT_MRT3847_87175C.1.pep
TPNLRYLPISSFCCSGTSSTSPFSGLQQFLGTSYKVHSSNSSMLPGPICSIPCISPLGLAPVGIN

SEQ ID NO: 271493 - protein, 81 aa, Glycine max
  Clone ID: PAT_MRT3847_87176C.1.pep
KSFFKKPNIRFPIGKKPFVPPPKRYFLKTGKGLPKVPPRGVKAFKVPPPKGPLGIFGEVFIRGNPPVFVYGNFQVGFSKTV

SEQ ID NO: 271494 - protein, 143 aa, Glycine max
  unsure (1)..(143): unsure at all Xaa locations
  Clone ID: PAT_MRT3847_87177C.1.pep
IALASPGAIDGYFREVALIFQFSTHVTRIVSKKLDKALFEDFNLLNISDYNFIFWIAYSGGFXILDXLSXKLGFKLEKMKVTRDVLSEYGNMLSACVLFILDEMRRKFXENGYKIIGEGLEWGVLFGFGPGFIIETVVLHSVA

SEQ ID NO: 271495 - protein, 86 aa, Glycine max
  unsure (1)..(86): unsure at all Xaa locations
  Clone ID: PAT_MRT3847_87178C.1.pep
LGILLHLSSAGFIGMRDSNTSWYSWCHYGRAPDKCFDSSVCFWSRPCYWLGVPRHRXASDPLGADASADAHSINILSGHSDACPPT

SEQ ID NO: 271496 - protein, 61 aa, Glycine max
  Clone ID: PAT_MRT3847_87179C.1.pep
IAFAANYTVKFQTFHQNITPHQTSKSIHKKKTLASSKAKLGICILYVLMFLKKRDTLRYRS

SEQ ID NO: 271497 - protein, 102 aa, Glycine max
  unsure (1)..(102): unsure at all Xaa locations
  Clone ID: PAT_MRT3847_8717C.1.pep
LLFFYIHQYAHESLNWLCSELSDILEKDALAGECDLETIPPCAMAANLPKSRLHNGAEPVRVSTWVHKYIHGILTIYTTCXAXESVTGRDETIADCSIDNAH

SEQ ID NO: 271498 - protein, 50 aa, Glycine max
  Clone ID: PAT_MRT3847_87180C.1.pep
SKICLIFSQAWKIRFQVTGQVVLGGVYISFQLWAHFQKPVFCFKFANFLD

SEQ ID NO: 271499 - protein, 76 aa, Glycine max
  Clone ID: PAT_MRT3847_87181C.1.pep
SPGFLSDIPPMAANELGHLLSELSLLLIRPALVQADPHCKMVLCHSSWSIRIWLSSSEQLCACRRCVILASWCLRS

SEQ ID NO: 271500 - protein, 49 aa, Glycine max
  Clone ID: PAT_MRT3847_87182C.1.pep
IVYPHFYTLLGKHKLSKPTGEVLNGDFLEDQKAEGSSEIGRDTDRTKDH

SEQ ID NO: 271501 - protein, 47 aa, Glycine max
  Clone ID: PAT_MRT3847_87183C.1.pep
FPYTQFPLFNNKNISFHLLLINKYYHPSKKNYFLYFLPKILIFFFFT

SEQ ID NO: 271502 - protein, 100 aa, Glycine max
  Clone ID: PAT_MRT3847_87184C.1.pep
APRVRPRVRSERLTCVKRMLIIVDHMRSAYFRGETGDMEGGHLESDRARVTQEGTEKDTGDGGEHFSDSLATVKGKRSKFLAPIFTTDPYCVTHARTHYE

SEQ ID NO: 271503 - protein, 207 aa, Glycine max
  Clone ID: PAT_MRT3847_87185C.1.pep
TNEAVYEKIPSGELLRLMAVLKKSYHFAKRFNANRDLRSRLFREGFMKQPPNLLKQESGSASVYVSILFRMYHDTSNDRAASRADTEAALIPLCEDIIASYVDLDEETQQRNIVTWRPVVVTVLDGYTGLPDTDFEKNIDLFAPLVVGLLGTEMAPDVQRSVQALVGRIFERKLGMEKQPLMPAISRSPRGSFVGSPSQRRASKSGR

SEQ ID NO: 271504 - protein, 144 aa, Glycine max
  unsure (1)..(144): unsure at all Xaa locations
  Clone ID: PAT_MRT3847_87186C.1.pep
EQVEELESIVQQHPVVAEQVEDLEXIVQQRPGVRGVRQQAPAKPXAAXEPQVEEPPSPTSSTSSSQLQREVEEELGSSPQVPKAPTSVTGLSNQKTPVAGVSTQKSAGASLSTQKSTGASLSTQKSNVAPETTNQSAPAEAEPK

SEQ ID NO: 271505 - protein, 88 aa, Glycine max
  Clone ID: PAT_MRT3847_87187C.1.pep
WVSSSCMFSQTPMTSSALRLGMSKYVLNIGHPSTISNLTSQAIGRILSLIPAASTRFAYVPQNLITSLINNQSGRNERRLVTTCIDIL

SEQ ID NO: 271506 - protein, 61 aa, Glycine max
  Clone ID: PAT_MRT3847_87188C.1.pep
YICVNLRVTRDRTSISVGKTQTRPFGFSVKMGTFSSTGSSPPPCLHSLNKTCKIKFLRTRG

SEQ ID NO: 271507 - protein, 64 aa, Glycine max
  Clone ID: PAT_MRT3847_87189C.1.pep
MGFIKLFSVASFPVIKVLLITALGLFLALDNISILGEDARKKVNQLVFYVFNPSLVGSNLAKTI

SEQ ID NO: 271508 - protein, 45 aa, Glycine max
  Clone ID: PAT_MRT3847_8718C.1.pep
NKKGFEFCWGVTEQSACDRPNGRGRNGAHANELEALFLLEPLRLE

SEQ ID NO: 271509 - protein, 134 aa, Glycine max
  unsure (1)..(134): unsure at all Xaa locations
  Clone ID: PAT_MRT3847_87190C.1.pep
MVTILCGALTGFWSPTYFETSSXCLVTLVFDGQILLKFIAMGKTYDAINKLVELTCATAILLATDKGRXIVKEREMDSLLIHNDDTLNVLRGTNIPGDGIDTRGSCYENDSLVTGESILESNDANASGIGGTIN

SEQ ID NO: 271510 - protein, 75 aa, Glycine max
  Clone ID: PAT_MRT3847_87191C.1.pep
PTNIIEMSPPKRGAIIFEIESSYKEPPLLYPKIQCKERSPPLFLYSGNRLHLREKRPGRNRNLIVEKKSLERERY

SEQ ID NO: 271511 - protein, 58 aa, Glycine max
  Clone ID: PAT_MRT3847_87192C.1.pep
QAQMEAAPPFFLLVLYNPDNFFISLAFFIHYDANVHLIYGCGFFCFKEKKSNLYLLSF

SEQ ID NO: 271512 - protein, 142 aa, Glycine max
  Clone ID: PAT_MRT3847_87193C.1.pep
GLHIGEGNKENYADWNNNNLNIMNNNNSNNKELQEISEESPTSVIENNNVVEVERFSLPKSISVRSNGYLKTAQSAALAPNNINATRNKCATRPRAFATPPEPVQKVYVRGGQIEEEPLEMIVYNQGMFKTELCNKWQETGT

SEQ ID NO: 271513 - protein, 87 aa, Glycine max
  Clone ID: PAT_MRT3847_87194C.1.pep
TCQPYPFIANLDQNEWPSSNVANMANHAYHSSHFSKQLSLSLATSTTAGMCSEVSCSNVTPCMNGTMSGLEQASCSSSRELSMNLGG

SEQ ID NO: 271514 - protein, 75 aa, Glycine max
  unsure (1)..(75): unsure at all Xaa locations
  Clone ID: PAT_MRT3847_87195C.1.pep
QIFKRETLARGXELLKRTHKGDLHWKEESDVVNRMNKDILKMNSRHGAGTITKKKKNVVLEENKDEPDWTGSHLI

SEQ ID NO: 271515 - protein, 163 aa, Glycine max
  unsure (1)..(163): unsure at all Xaa locations
  Clone ID: PAT_MRT3847_87196C.1.pep
MGDYKSFSFSKMMGCCGCFGFVQKPRPRRAKRSISNLLSQGLLLDGETEGEETYSGDVTSNCTSGDDNEVQAVRNRSEDILNFRAENGMVCRPFPVKETCKLDRSEDENGNVMINEYVREYKIGNGSYGKVALYRSSVDGKHYAIKSLHKSHLPKLXRVAPSE

SEQ ID NO: 271516 - protein, 114 aa, Glycine max
  Clone ID: PAT_MRT3847_87197C.1.pep
LQFITTVAGSAHNSPPKNSLTPLSLFFLGEHDKMEEPYLCGSESLKFQDESTAFRSKTRNRNPKSKIQSRKLQLPQKQAEGNENPIAIVIVNAVGWVIGMQKNPRRKKSIGRVE

SEQ ID NO: 271517 - protein, 103 aa, Glycine max
  unsure (1)..(103): unsure at all Xaa locations
  Clone ID: PAT_MRT3847_87198C.1.pep
XGTVGMQFLLGPGINEKWRWCYSSLSSAEPTCSEQPCDQSSPISQDEKQGAMNEENVASHSSRCDKGTQMSLGEAENDSHSSPXSCATSVVEQQEWHSPKLEV

SEQ ID NO: 271518 - protein, 70 aa, Glycine max
  Clone ID: PAT_MRT3847_87199C.1.pep
TKKNLSFILFLINFHKSHYLPLYMLSLIIHWPHYLDYRIINENALKVIIVHKTHPYLWTLVTALAQMRRI

SEQ ID NO: 271519 - protein, 36 aa, Glycine max
  Clone ID: PAT_MRT3847_8719C.1.pep
SIYVLKIPVEILCLHKIRSLSYKCLCLFMYTIDKFF

SEQ ID NO: 271520 - protein, 74 aa, Glycine max
  Clone ID: PAT_MRT3847_871C.1.pep
TYTFINGITVLAHSRIERGLNSHSDPVYVHFLHPASRIGNNGLALPPRRDFIKPKPHNADKSCFPPEIANHRGT

SEQ ID NO: 271521 - protein, 92 aa, Glycine max
  Clone ID: PAT_MRT3847_87200C.1.pep
PRVRRPWRVPQVSSAMLKMGIRGVTVSDVKGFGSQGGSKERQGGSEFSEDNFVAKVKMEIVVRKDQVEAVIDKIIEEARTGEIGDGKIFCKT

SEQ ID NO: 271522 - protein, 108 aa, Glycine max
  unsure (1)..(108): unsure at all Xaa locations
  Clone ID: PAT_MRT3847_87201C.1.pep
MGRNVPVVASRTQPPSSSRQHSQRKTPHEYLTRHTIFSEKGKRAKTHAPEATPHDSTGGNRQRKTTNRQCSAQKKRALTQSILYAQTPLTPRITGTDHTHSXTNPPLT

SEQ ID NO: 271523 - protein, 139 aa, Glycine max
  Clone ID: PAT_MRT3847_87202C.1.pep
VHHLNAGTILRKSMIAHAIIWATQTNVLPKMVRALALPKMVMSAVVWAFGMIIRGVRALWVPEACAFVIMSLRPVFLVHSLGDPSCVLQGISPTVRLGVIVWGFWSNWSCFLFCSPFSFCEGVVPRGPCVPFVSLYVYM

SEQ ID NO: 271524 - protein, 131 aa, Glycine max
  unsure (1)..(131): unsure at all Xaa locations
  Clone ID: PAT_MRT3847_87203C.1.pep
TGGEITEPPARGVPEATGFGAPSMRGEVLPEGPEQSVQHEGRAQGLSGLASLEARGRERLSTRAFRRGRYAASPHRTXGRNPVQGTLREMPFAAGPGVFRLAKGYASAKSPPQISAQEHFGVENHVGVYHP

SEQ ID NO: 271525 - protein, 50 aa, Glycine max
  Clone ID: PAT_MRT3847_87204C.1.pep
LRLVFGRWLVSSGWWDSFPSGPISLRDLRVVTRRVSWRRYMDLDIPRPCC

SEQ ID NO: 271526 - protein, 302 aa, Glycine max
  Clone ID: PAT_MRT3847_87206C.1.pep
MPLLTSSLFNMVPLFSLLLFSLMIRYSTSQDPPSPGYYPSSKISPVSFGEGFRNLWGPQHQKLDQDSLTIWLDSYSGSGFKSLHSYRSGYFGAAIKLQPGYTAGVITSLYLSNNQDYPGHHDEIDIEFLGTTPDKPYVLQTNVYVRGSGDGNIIGREMRIHLWFDPTQDFHNYAILWEPSEIIFLVDDVPIRSYPRKSDATFPSREMYVYGSIWDASSWATEGGKYKADYNYQPFFGRYKNFKIQGCTTEASTSCQPPSPSPPGYGSLSPQQLSAMQWVQNNYLVYDYCHDPGRDHTLTPEC

SEQ ID NO: 271527 - protein, 239 aa, Glycine max
  Clone ID: PAT_MRT3847_87207C.1.pep
NVGISTSLNFRIQNHNLLLVETEGHYTTQTNFTSFDIHAGQSYSFLLSTDQNASTDYYIVASARFVNESLWEKVTGVAILHYSNSKGPATGPLPPPPSDFYDKTASMNQARSVRQNTSASGARPNPQGSFHYGSINITDTYVFKVTSLVPINGTNRATINGISFLKPEVPFRLADKHQLRGTYKLDFPSKPMNRTPVIDRSMINATYKGFIEIILQNNDSSIQNFHLDGYSFFVVGMDY

SEQ ID NO: 271528 - protein, 56 aa, Glycine max
  Clone ID: PAT_MRT3847_87208C.1.pep
CSLAHLFSIWSTKTVLLKLVPSPSIFIILGEFLLMFKIAPSASHVQQLGLTNFPRF

SEQ ID NO: 271529 - protein, 31 aa, Glycine max
  Clone ID: PAT_MRT3847_87209C.1.pep
LLICRLLSKVYGWGTVEVGIVATLLIIEGEE

SEQ ID NO: 271530 - protein, 265 aa, Glycine max
  Clone ID: PAT_MRT3847_8720C.1.pep
NSFEELEPEYAKGYKKARNGRVWCIGPVSLSNKDELDKAERGNKASIDEHFCLKWLDSQKPKGVIYVCLGSMCNITSLQLIELGLALEASKRPFIWVIREGNQLGELEKWIKEEGFEERTKDRSLVIHGWAPQVLILSHPSIGGFLTHCGWNSTLEAVCAGVPLITWPLFGDQFFNEKLVVQILRVGVKVGVEVPVEWGEEDENGLLVKKEDVGRAINELMDESRDSEEMRGRVNGLAEMAKRAVEKGGSSHSNVTLLYQDVMQQ

SEQ ID NO: 271531 - protein, 102 aa, Glycine max
  Clone ID: PAT_MRT3847_87210C.1.pep
LCWVFIMSGAPKRSHEESVHSSSKHSNEDSGTYSKLVSLPVSNEYHMPYDISQDSRVAKVPRTEFRDADRRSPLNPVYRMSSPLNDSRADNPIGPENRIESR

SEQ ID NO: 271532 - protein, 51 aa, Glycine max
  Clone ID: PAT_MRT3847_87211C.1.pep
VQRSRHTIRCSRQILMTEALNSCDMIPLKESATSLSAILASTRLFKIQTVG

SEQ ID NO: 271533 - protein, 57 aa, Glycine max
  Clone ID: PAT_MRT3847_87212C.1.pep
DTLSGALAPVARSHYIKRPEGKFPQDGPDSLIRGQRFQNIVYIIFLKEKPPQHPGEL

SEQ ID NO: 271534 - protein, 65 aa, Glycine max
  Clone ID: PAT_MRT3847_87213C.1.pep
IMPTRGDLLATFLIVGHTLNNPHSSSTCAWRERGAQSFFLLGGGESTNVCTLVLLSPDPSNMERS

SEQ ID NO: 271535 - protein, 65 aa, Glycine max
  Clone ID: PAT_MRT3847_87214C.1.pep
LKRIISDRRRKNSPWKPYSTGICPQYSPTRDSDYSGNFGDSDETNSEISHTDEVITTLERNGISF

SEQ ID NO: 271536 - protein, 105 aa, Glycine max
  Clone ID: PAT_MRT3847_87215C.1.pep
NGFDKSSWHENFILLSASPLPQPNQRNYSSKGDQKQKISSQSKIASNSFFSLAPRSSNRLLAYEGENFMPYPLQSGQDETLFCWKCCLDKLIPIFITQNRTVIFC

SEQ ID NO: 271537 - protein, 96 aa, Glycine max
  unsure (1)..(96): unsure at all Xaa locations
  Clone ID: PAT_MRT3847_87216C.1.pep
DHPLFFNRTXNARRLVFFKNIVCRILTQIANKQHISAQSHQKKETTNNQPTLAPNTKPEKKNSNKECNHNLNPTPNSSKEQNHNTSTSSNKQSKRK

SEQ ID NO: 271538 - protein, 83 aa, Glycine max
  Clone ID: PAT_MRT3847_87217C.1.pep
LDVKFLNNHSLVKDAQEKANAALLDHTLCQYPPCGDNFPQLLLCLVEVRALSMQAKEYLYHKHLGNEMPRNNLLIEMLQAKQT

SEQ ID NO: 271539 - protein, 35 aa, Glycine max
  unsure (1)..(35): unsure at all Xaa locations
  Clone ID: PAT_MRT3847_87218C.1.pep
RSFHNLQRLVERKLNLWQKXRNWLVMAKSLCSPKE

SEQ ID NO: 271540 - protein, 125 aa, Glycine max
  Clone ID: PAT_MRT3847_87219C.1.pep
KKKWGPVFLSFRKHSSPWPKSPPFFKFYKKTPPRSKKRGGDFCFLRARSLTFFFGAIGFFPKQPALFFCKPHAFFFQVILNLKPFVVYFPGGAPGPHLKFFNPPPFIIINPPPFFSFGSYHRQNF

SEQ ID NO: 271541 - protein, 181 aa, Glycine max
  unsure (1)..(181): unsure at all Xaa locations
  Clone ID: PAT_MRT3847_8721C.1.pep
MKQSLLLRGESSDQSYQSRGIFRRSDAIAYGSNYEKAAAFIDLAEDGVGLPEEILDSPNFQNYIRXYFIFTKCNLIWSLSYFALIVLNFLEKPLWCKKLTTNSCNDREYFXLXQLPYLTDAECLIYEGITLVLLIIHTFFPLSYEGSRIYWKNTINQXKVFSLLVLXADVMLYALFLSHWL

SEQ ID NO: 271542 - protein, 100 aa, Glycine max
  Clone ID: PAT_MRT3847_87220C.1.pep
DPKKKGFPFELNQKGPENERGTPTMKKKKNVYTEAQGMPGNGIPKPPTPKGESKPKTNLQAQREGALSPSPSRRHHDCEGKGLILGHLNQNNGPGLKNVR

SEQ ID NO: 271543 - protein, 39 aa, Glycine max
  unsure (1)..(39): unsure at all Xaa locations
  Clone ID: PAT_MRT3847_87221C.1.pep
FXITXGHSFVXLKTSTTXKXEXSGRTRXXSXYAMLXCVL

SEQ ID NO: 271544 - protein, 45 aa, Glycine max
  Clone ID: PAT_MRT3847_87222C.1.pep
GSGGGQGGGVGYGGDHGAGYGGGGGGGPGYGGTLHHRNAGGFRHS

SEQ ID NO: 271545 - protein, 121 aa, Glycine max
  Clone ID: PAT_MRT3847_87223C.1.pep
KPRGDPRGPPRPKPEKKKRGPKRKTKFPKGKRKNARDKKEQKSPKEKKETPAKLQTKKKPKNKEAHPGGPKEGKTHRKARRSNRPPPKKKNREPRATKKKPQPPGKGAKKRAPNGLSLTKE

SEQ ID NO: 271546 - protein, 87 aa, Glycine max
  Clone ID: PAT_MRT3847_87224C.1.pep
HFPFPSRNLEILCVGGLFSSCAFGTACKVFLALSMQAVFVKCGLRVWFWLVTGLKLPYEGGSGNSVYGLGNLNWFSLGDILKLGILY

SEQ ID NO: 271547 - protein, 59 aa, Glycine max
  unsure (1)..(59): unsure at all Xaa locations
  Clone ID: PAT_MRT3847_87225C.1.pep
FLYTVDLSIKDKIXAIANSYXASCVYYSQHAEKHIEIFTKQRFSGLSICIANTQYSFLY

SEQ ID NO: 271548 - protein, 66 aa, Glycine max
  unsure (1)..(66): unsure at all Xaa locations
  Clone ID: PAT_MRT3847_87226C.1.pep
PPPRPRGAQNGGPDRRRQNRGTPPGXQAERGPEPPRAHRTAQRDPGPRRAAPPRPTKGQXPKRGGQ

SEQ ID NO: 271549 - protein, 83 aa, Glycine max
  unsure (1)..(83): unsure at all Xaa locations
  Clone ID: PAT_MRT3847_87227C.1.pep
MAVYSCVSTLVFSFNXQILSLVPELVNLFALVVVSPVETPEVKAVVGRAFSHLISLYGQQIQPLLSNLPPAHANALSAFAQRS

SEQ ID NO: 271550 - protein, 360 aa, Glycine max
  unsure (1)..(360): unsure at all Xaa locations
  Clone ID: PAT_MRT3847_87228C.1.pep
SHSHLLFDFNTTIDTGFVFQEGAAKAKELLDTVMNIYIKTMVEDDDKEVVAQACTSVADIIRDFGYATLEPYLSQLVDATSLLLQEKSSCQQIESDSEIDDVDSAHDEVLMDAGSDLLPAFAKTIGAQFAPIFAQLFEPLMKFAKSSRPPQDRTMVVACLAVAXQNMGFPIASYVDRVMPLVLKELASSEATNRRNAAFCVGELCKNGHEPALKYYDNILRGLYPLFGESEPDDAVRDNAAGAVARMIMVHPESIPLNQVLPVFLRVLPLKEDHEESMAVYSCVFSLVFSSNPQILSLVPELVNLFAQVVVSPVETPEVKAVVGRAFSHLISLYGQQMQPLLSNLPPAHANALSAFAQRS

SEQ ID NO: 271551 - protein, 129 aa, Glycine max
  Clone ID: PAT_MRT3847_87229C.1.pep
NSARGQGEANDGNVFPLNTKRIVYIKPKTNQLVATSNSYDVSVSTDDNLQTAFSDGYYKRRKNQLVRTTIESHINQTVAMPNNTANSDGQGTSNALCNRRFSKKRTHKGMHEQLIMLPNLSIFLGYLCI

SEQ ID NO: 271552 - protein, 36 aa, Glycine max
  Clone ID: PAT_MRT3847_8722C.1.pep
LFSTKAVIFFITLSINLGYFHFHISSSFILNFFPSN

SEQ ID NO: 271553 - protein, 44 aa, Glycine max
  Clone ID: PAT_MRT3847_87230C.1.pep
RPRVRGADRDQHYAEFTHYFSLATFLCSASIFRLGRRICEGLCS

SEQ ID NO: 271554 - protein, 65 aa, Glycine max
  Clone ID: PAT_MRT3847_87231C.1.pep
CAVFIFFSWQCFLNPYDFHLLGYTFTFLLQTIFLCYITLCIVKKKLADFLNRNCSLTCVQRMGKG

SEQ ID NO: 271555 - protein, 61 aa, Glycine max
  Clone ID: PAT_MRT3847_87232C.1.pep
LVLLYFLKIKIYVKYVSKIVENDFYINYIPARELQIFTLGFMNFLTLLYEQHHPMALCLAI

SEQ ID NO: 271556 - protein, 48 aa, Glycine max
  Clone ID: PAT_MRT3847_87233C.1.pep
EILTVSYTEVYCQVQNLGMCHLMIWFVHVIIYYDLISNYHLNYVKIVI

SEQ ID NO: 271557 - protein, 84 aa, Glycine max
  unsure (1)..(84): unsure at all Xaa locations
  Clone ID: PAT_MRT3847_87234C.1.pep
GGLDPFDIFSSLFGGRPFGSGGSNKGLMHTRGEDVVHLLNVSQKDLFLLTSKKLSLSRKVGGSXCVGNYSXSGASMTXXGYQNT

SEQ ID NO: 271558 - protein, 87 aa, Glycine max
  Clone ID: PAT_MRT3847_87235C.1.pep
MREFCSQILSNGKYKSVVHRAVVNTKGIRFSVGIAHGPELDTIVGPAPELVGDDDPAAYRAIKYRDYMQLQQNHELDGKSCLDRIRI

SEQ ID NO: 271559 - protein, 41 aa, Glycine max
  Clone ID: PAT_MRT3847_87236C.1.pep
IIILLPRILNSVLLGFSNIYFMLPLSYSKSSLDKFIFGYHA

SEQ ID NO: 271560 - protein, 266 aa, Glycine max
  Clone ID: PAT_MRT3847_87238C.1.pep
KELEQQCEGSGSGVVVSFGEIEVFVGEDVDVDVVRFVVSGLTRLLEIRGEKVSLLGVAETSHAYSKFLGLFPNVENDWDLHLLTVTSATPSMEGLYSTYSLMGSFVPFGGFFSTPEIRSPVSCTNAPFTRCDTCNKKCEQEVADLLKVGPSSSNSTSSPWLQKVVNVETHRGSDAAKTNEENTSLNDKILGFQKKWNDICQRLHHTSSLPQFDISQTRSQAPTLEVSRFGLAFRKAAVKTHHTVNSNILVKFPTCPKSCIVFFLRS

SEQ ID NO: 271561 - protein, 86 aa, Glycine max
  Clone ID: PAT_MRT3847_87239C.1.pep
NQGFFFGFTVNVLLKLDPRNNKVPRKKKKPLGPPYAKKNLRGQRAFFVSGEGNLPVVGGGNFLDFSRHPFNFGGWSNQKYFFLKFL

SEQ ID NO: 271562 - protein, 80 aa, Glycine max
  unsure (1)..(80): unsure at all Xaa locations
  Clone ID: PAT_MRT3847_8723C.1.pep
SHAIAVDVFSPIXXSIXNCQSXPASTXKTHFGRXMELGXLNGMNEFVESLMGCMAKXVSVFSRXFLPLSRKRKDDSLSSF

SEQ ID NO: 271563 - protein, 92 aa, Glycine max
  Clone ID: PAT_MRT3847_87240C.1.pep
ESTSIHLEFCSSTTVPRYTTASMDSDSMNSVIRRVWIPVSFISLRTRDHQIGCNLYGMTDPQNQTRTSVKVYKLRSVGLSLDISRINNYHEL

SEQ ID NO: 271564 - protein, 48 aa, Glycine max
  Clone ID: PAT_MRT3847_87241C.1.pep
VKFRNISCSIKSLHNTIVIKTLKKSVEICTSIDRSCQDKTVFSLSVPK

SEQ ID NO: 271565 - protein, 54 aa, Glycine max
  unsure (1)..(54): unsure at all Xaa locations
  Clone ID: PAT_MRT3847_87242C.1.pep
PTSFKIFLADIDKKIALVDIIKKIXTQKTSANVSEKQLMSISTVKTLVTRSCEY

SEQ ID NO: 271566 - protein, 58 aa, Glycine max
  Clone ID: PAT_MRT3847_87243C.1.pep
LKKAAHLYPAIQHITNFYANPEMHCIVTFEPRHSTTNSNHFLQICYVISVICKLFYHL

SEQ ID NO: 271567 - protein, 205 aa, Glycine max
  Clone ID: PAT_MRT3847_87244C.1.pep
PRAESARGSPNNQSAYKPSPYPTPLKLFDEMQTPGTVYPASLEELHTGRAQVRSQFVYPTNKPGDNVLRCKILKERDFNPEEDSSELSDLVEKAQNGTPTPEKGSKRFSNENDEIKSNLSSRISPVSTIEEHSPMSFKWWYDNGIPNSTTKYKEDQKVKWHATPFEERLDKALSEENFISQRKLVCGKPVEFDEIEESDTASSQL

SEQ ID NO: 271568 - protein, 227 aa, Glycine max
  unsure (1)..(227): unsure at all Xaa locations
  Clone ID: PAT_MRT3847_87245C.1.pep
LFSPNPWSSGAFENWTVIKDMLNVPVVYIIGACSPATMIAVLYYFDHSVASQLAQQKEFNLRKPPSFHYDLLLLGFMVIICGLIGIPPSNGVIPQSPVHTKSLATLKHQXRSSMKKLESLGQVYGSMQDSYWQMQTPLVHQEPSAKGLKELKESTIHLASSMGSINAPVDESVFDIVKEIDDLLPVEVKEERVSNLLQXFLMVGGCVAAMPFLKIIPTSVLWGYFAL

SEQ ID NO: 271569 - protein, 86 aa, Glycine max
  Clone ID: PAT_MRT3847_87246C.1.pep
PSIGLHALLDGMIYWGEPVCQENGWIVTYWSLLTTKRKSIQNSTKPINPTRLQGGIECVWSSYMGQNRRALSVLNHDLVQEGRPYP

SEQ ID NO: 271570 - protein, 42 aa, Glycine max
  Clone ID: PAT_MRT3847_87247C.1.pep
NMTPLDMFYMKTMGTCKSAFLFGNFRLKMLFLGSLPGVIFSN

SEQ ID NO: 271571 - protein, 61 aa, Glycine max
  unsure (1)..(61): unsure at all Xaa locations
  Clone ID: PAT_MRT3847_87248C.1.pep
XFFFFFFFFFFFFFFFFFFFFFXXRNNHNVIIHDYDNHKDLTTNVEKILRLGTNYEFRYFI

SEQ ID NO: 271572 - protein, 189 aa, Glycine max
  unsure (1)..(189): unsure at all Xaa locations
  Clone ID: PAT_MRT3847_87249C.1.pep
METRSRKRAEASSAAPSSSSSTTTTTASRSAKCSRLSSSSSSIPNTTTANTRSRSARNNNNNSVSPMDPTNESSGSRRDRRGKNFDRDNSDKGKEKEHDVRIRDAERERALALNLEAEDVGDDDDDNDSEGGVGILHQNLISASTXRGLLRKLGAGLDDLLPATAXAXSVPSSHQTGGLKQILSXLRAD

SEQ ID NO: 271573 - protein, 62 aa, Glycine max
  Clone ID: PAT_MRT3847_8724C.1.pep
KFGVYVTVPIILMYTFANNPSNLRKFMGHRSYIEYPPEAEKPPSPEELREMAREMARKRNSS

SEQ ID NO: 271574 - protein, 175 aa, Glycine max
  Clone ID: PAT_MRT3847_87250C.1.pep
PKSPITLDLPLPCPTTVPPPRRKTLSIITTPPLPTSSSASSSTLPLRSIPPPPTPFPTPTSTSTSIPTSSAAPNTSPPSSPTGGSATSTRRSTHPPPTAISSASTSAWLPPPARSSCISSSWSFSTRTTSPPRWTARRRRWICYRWHWNSSSRSACAGAWISSRRCRGRRRKRSE

SEQ ID NO: 271575 - protein, 178 aa, Glycine max
  unsure (1)..(178): unsure at all Xaa locations
  Clone ID: PAT_MRT3847_87251C.1.pep
SGNEASKLASLLIXRGRLVRMHGGILCLAFLLLFSGVHVGSPMLSLLAPFSPLDRSEGSSYKIGSRYCLYAKIMFHPATNHCIWNWNKPSCESSPHCPCQMLKNCCSAASAFQPEMLKIVLIWSLHSTPGSAVRPDPSNHILSLINDMSVLFGSRVVKYCSYVNTMFRKFNFVHINRN

SEQ ID NO: 271576 - protein, 70 aa, Glycine max
  Clone ID: PAT_MRT3847_87252C.1.pep
KYVYAHTYVHANEIRAFFPGSYISLWKHIDLIPNYYNDKYDHILLIYTLTPHTHVTIIILEASLAQYLGH

SEQ ID NO: 271577 - protein, 80 aa, Glycine max
  Clone ID: PAT_MRT3847_87253C.1.pep
SSDLTLEEALDVIFNTKISFSSTDNGRSNGNEMVLTDICLGIANDRMLQINAICGLSWIGKGLLLSGHEKIKDIIMIFLE

SEQ ID NO: 271578 - protein, 52 aa, Glycine max
  Clone ID: PAT_MRT3847_87254C.1.pep
GFNKKAPFQKITPALPGMETISSPKQKNMGDVNVKPKNASDPCHPQSSEGPC

SEQ ID NO: 271579 - protein, 381 aa, Glycine max
  Clone ID: PAT_MRT3847_87255C.1.pep
MEKVRRIALYLDQDVDRFFPSHLKRHHHLRSLLCYHEKAVRLSEWGLMKSFFNKCRLLRVLNLEGIQCQGGKLPKEIGLLIHLRLLSLRNTKIDELPPSIGNLKCLMTLDLLTGNSTVLIPNVIGNMHRMRHLHLPESCGDSIERWQLDNLKNLQTLVNFPAEKCDVSDLMNVTNLRKLVIDDPKFGDIFKYPNVTFSHLESLFFVSSEDISIVHVALGCPNLYKLHIEGPIKIFPEPHQLSSKLVKLKFKGSGLLVDPMPTLEKLPNLRFLELQLDSFMGKKLFCSSNGFPQLKSLVIYDLPNLEEWKLGKGAMPSLRKLEIANCTKLERVPDGLRFVATLQDLEIRSMFAVFRTKLEKGGEDYYKIQHVPPVVFCYCDY

SEQ ID NO: 271580 - protein, 650 aa, Glycine max
  unsure (1)..(650): unsure at all Xaa locations
  Clone ID: PAT_MRT3847_87256C.1.pep
MSSAEKPSSKGQAWFCTTGLPSDIVVEVDDMTFHLHKFPLMSKSRKLHLLITQQEAASNSTVPQQQQQQQETEDEDEIVEEQCHVTFTGFPGGSEAFEMAAKFCYGVKIDLTPSNVAALRCAGEFLEMTEDYSEDNLVSKTEGFLSQHVLKNLKDSVKTLKSCDSLMPMAENLGLGQRCVDSVVSRASSADPALFGWPVSDATSGSQHVLCGARVGRGARKVGAGAGESWFXEDLALLRLPLFKRLIVAVRSAELSPEIIETCLMYYAKKYIPGVSRSNRKPLPSSSSSSSSVATEAEQKELLETSSSSSSSEATEAEEKEILELFVSNLPLEKSSKAAACRDALEKKIGLQLEEATLDDLLVPSYSYLNETLYDVDCVERILSHFLEGMEARTATKTEDAAATRSPALMLVGKLIDGYLSEIASDANLKPEKFYNFAISLPDEARLFDDGLYRAVDVYLKAHPWVLEEEREKICGLLDCQKLTLEACTHAAQNERLPLRAVVQVLFFEQLQLRQAIAGTLMAAEAAAEPGRQSAALEREAEDGRGEGLGLEHVQERNGTWRVAVRENQVLRLDMDSMRTRVHQLERECSSMKRVISKFDKFAASGGGWRASLGRKFGCKFKTQVCDSHESTAVDTRKGRHHQQHHPHHD

SEQ ID NO: 271581 - protein, 73 aa, Glycine max
  unsure (1)..(73): unsure at all Xaa locations
  Clone ID: PAT_MRT3847_87257C.1.pep
ADVEYLNVSSNFSDMTELPETLGDLVNLRELELRNNQIXALPYSFGRLEKLTKLNLDQNPIIVPPIEGVNQRA

SEQ ID NO: 271582 - protein, 52 aa, Glycine max
  unsure (1)..(52): unsure at all Xaa locations
  Clone ID: PAT_MRT3847_87258C.1.pep
KCGILCMIWNLCFLSLVRSFNSIKENRQSILNKRXEPYFLKPIRGADKRTLT

SEQ ID NO: 271583 - protein, 81 aa, Glycine max
  Clone ID: PAT_MRT3847_87259C.1.pep
AYNLGTPNVKGALFSETYDRPRSKIYLPVVKKNRMFYSNVCIIAGKGGCMLFLSVYRSWSKMVRKIVSFGQYSREKKGSSK

SEQ ID NO: 271584 - protein, 105 aa, Glycine max
  Clone ID: PAT_MRT3847_8725C.1.pep
IKQLKHHKKLYEGYVPMEYKSYLKKMKKSGEWGDHVTLQAAADRFDAKVCLVTSFRDTCYVEILPADKSPTRELWLSFWSEVHYNSLYTTGDVPSRVPRKKFWLF

SEQ ID NO: 271585 - protein, 140 aa, Glycine max
  Clone ID: PAT_MRT3847_87260C.1.pep
KFLFSGGPPGIVAVNVGRVGFSTWSFFGGNPGAVWGPIGGPQGPLPFWLVGPPGFFGPWFWAKKVLLFFWKNGVFFFFGLQISPLAQGGCSPFFFGTCFFAEKYLPFSHRLWAPLFFFLYFWFSMPLFIFFRILGLAFLF

SEQ ID NO: 271586 - protein, 48 aa, Glycine max
  Clone ID: PAT_MRT3847_87261C.1.pep
KKGKALGGIMRGNPRVGPNLGPQKRGFPRGDHKNFWDLGFKLTNLLLV

SEQ ID NO: 271587 - protein, 197 aa, Glycine max
  Clone ID: PAT_MRT3847_87262C.1.pep
YLRLYHNMFGYRRRRPILGAAVIAGTATMAARSGARRQADAESDRQFQAQQAAELRRLEEERDQARNQRAIDQAVAEAHAKQQQQQQQQGEQSRSPVPQRPDLVGNQQYADTPPVYTGADVYASPNVGQPMYLQPPNATGGISPQRRQSPGAVDPDVCFCASCGARANVQFKFCAACGQPMLAAASELQRGPEKHPM

SEQ ID NO: 271588 - protein, 57 aa, Glycine max
  Clone ID: PAT_MRT3847_87263C.1.pep
VRASVLNDALKSMYNAEKRGKQHVMIRPFLEAIIKFLLVTLMHGHVAERDHPAYHRG

SEQ ID NO: 271589 - protein, 57 aa, Glycine max
  Clone ID: PAT_MRT3847_87264C.1.pep
TAARRRQKGCLPLFIFSKTILVFHRDFKCLPYFARLQGLVLIYHMPLMLFLLTGFAD

SEQ ID NO: 271590 - protein, 159 aa, Glycine max
  unsure (1)..(159): unsure at all Xaa locations
  Clone ID: PAT_MRT3847_87265C.1.pep
MGTAIGMYSNNNIVPDFLDPYSEELMKALMPFMKSDYFSASSSSSSRESHPSPLIPSNSLPSSNQIRLNQLTQDQILQIQAQIHIQQQHVAQGQAHLGPKRVPMKHAGTAAKAAKLYRGVRQRHWGKWVAEIRLPXNRTRLWLGTFDTAEEATLAYDNA

SEQ ID NO: 271591 - protein, 256 aa, Glycine max
  unsure (1)..(256): unsure at all Xaa locations
  Clone ID: PAT_MRT3847_87266C.1.pep
MASRYELELKLASARGLKNVNWRHGPNRPYAVVWVDPRNKCSTRVDEDGDTEATWDQTLLIPLPPEPLENLTLYVDAVHAGSEEDTEPLIGAAQLKLVDILDEVGVAXSVNRTLSLKRPSGRPQGKVDVNVVIREFGYRAHGGYYAPSYGVRERDYSAPVQDGYNSAPRTASYGQGYAGPQTASYGQGSGYGYGYDQEEKKSNKFGGMGTGLAVGAVAGVLEGIALVEGAEYVEDKITDDVAERVEDDLGYDEDDF

SEQ ID NO: 271592 - protein, 79 aa, Glycine max
  Clone ID: PAT_MRT3847_87267C.1.pep
RLELEPNTLAQNYSLSVQILFHNYCDDVDTYATAHTTYHSPDTLHDPYEHHTSYYAQVVKEDSALTEWRLPLDCHLVDP

SEQ ID NO: 271593 - protein, 259 aa, Glycine max
  Clone ID: PAT_MRT3847_87268C.1.pep
MAPKRGGKAPALAAKKKPEKVTNPLFEKRPKQFGIGGALPPKRDLTRFVKWPKNVQIQRKKRILKQRLKVPPALNQFTKTLDKNLATSLFKLLLKYRPEDKAEKKERLLKRAQAEAEGKTVEAKKPIVVKYGLNHVTYLIEQNKAQLVVIAHDVDPIELVVWLPALCRKMEIPYCIVKGKARLGTVVHKKTASVLCLTTVKNEDKLEFSRVLEAIKANFNDKYDEYRKKWGGGIMGSKSQAKTRAKEKLLAKEAAQRMT

SEQ ID NO: 271594 - protein, 65 aa, Glycine max
  Clone ID: PAT_MRT3847_87269C.1.pep
LSPFKLYPGAYQESSCRSNARNAFCIRSFNMLIVRAFPYNEYFSCDNMGYFFLTYMFFGIQIVRP

SEQ ID NO: 271595 - protein, 47 aa, Glycine max
  Clone ID: PAT_MRT3847_8726C.1.pep
GRWSWNHIKRGWPIGQGLQTDSQICHVGQNRPIWNDSKRGANRFKGS

SEQ ID NO: 271596 - protein, 78 aa, Glycine max
  Clone ID: PAT_MRT3847_87270C.1.pep
SCQPRLNLTVSKNNSNNHSSSNLYFVIIADCNIPIHLWTSKPFKPSSTTITNKTHNNNKLIDDEETISNLFVNFIQAI

SEQ ID NO: 271597 - protein, 50 aa, Glycine max
  Clone ID: PAT_MRT3847_87271C.1.pep
FFRGLSNYIEFHILFFGRFLFPFLRNSKIFFCLFSLTARGFLFFKVSLQP

SEQ ID NO: 271598 - protein, 89 aa, Glycine max
  Clone ID: PAT_MRT3847_87272C.1.pep
PIRNITIGRPEEATYPDTLKAVLAEFICTLILPFVGSGSVFVYNKFTVNGTHSPIYLISLSIVHAHTLSTYLSIHTHLYSSHYYPTSIF

SEQ ID NO: 271599 - protein, 126 aa, Glycine max
  unsure (1)..(126): unsure at all Xaa locations
  Clone ID: PAT_MRT3847_87273C.1.pep
GQGLVASLFQAPQEAGAHYAHLISYTCLRTGLRLFLHIXMDGIYIVPTLMDGLGVHISNSFMTLPDIKDPLILGVGGGKGQGTSDQWELDFAKMGIVPRLMSAGELESVNAREPARLICRDTVKML

SEQ ID NO: 271600 - protein, 80 aa, Glycine max
  Clone ID: PAT_MRT3847_87274C.1.pep
KGNKKKPALLLPYPLNPTLIANTRKAPTKSPLPLKPFTAPLGFADEWLLVDPDSEGVEGEGFDGVVGGVPLGVVGRYPLA

SEQ ID NO: 271601 - protein, 126 aa, Glycine max
  Clone ID: PAT_MRT3847_87275C.1.pep
IESRAGSEAAAADVPAGSEELVAPVHAVDTSGSGCASQVHVQSCLSRSDVESLPIIGRYLRFGYGAFIAICPKQGPGHMIRLDAFGFSSDHTNTDADSRPASLLRISFRDDAINNLQTQTMIPLEP

SEQ ID NO: 271602 - protein, 341 aa, Glycine max
  Clone ID: PAT_MRT3847_87276C.1.pep
MEYRLLPIFTLLNIALVATHAALPPEVYWKSVLPTTPMPKAITDILYSDWVEEKSSSVHVGGGGVNVHTGKGGGSGTTVNVGGKGGGGVNVHAGHKGKPVHVSVGSKSPFDYVYAATETQLHDDPNVALFFLEKDLHSGTKLDLHFTRSTSNQATFLSRQVADSIPFSSNKVDFIFNKFSVKPGSEEAQIMKNTISECEEGGIKGEEKYCATSLESMVDFSTSKLGNNVEVVSTEVDKETGLQKYTVAPGVKKLSGDKAVVCHKQNYPYAVFYCHKTETTRAYSVPLEGTNGVRVKAVAVCHTDTSEWNPKHLAFQVLKVKPGTIPVCHFLPEDHVVWVPK

SEQ ID NO: 271603 - protein, 165 aa, Glycine max
  Clone ID: PAT_MRT3847_87277C.1.pep
FPVKPGSEEAQIMKNTLSQRVRGGIKGEEKYCATSLESMIDFSTSKLGKNVEVVSTEVVEDKETGLQKYTVAPGVNKLSGDKAVVCHKQNYPYAVFYCHKTETTRAYSVPLEGANGVRVKAVAVCHTHTSEWNPKHLAFQVLKVKPGTVPVCHFLPEDHVVWVPK

SEQ ID NO: 271604 - protein, 66 aa, Glycine max
  Clone ID: PAT_MRT3847_87278C.1.pep
STPLWHPQSAQECISANKQHFVAYGINFVRNPLLCLAKFSASFIPLRASGEHCGSHVKYPSLWRYV

SEQ ID NO: 271605 - protein, 66 aa, Glycine max
  Clone ID: PAT_MRT3847_87279C.1.pep
LIFYYYLNTDNGHKDFIVDCCSFSCPQTKLYKGHVLFIQNIVIYSGSIFNNWFGGTPRGFQTLIRV

SEQ ID NO: 271606 - protein, 43 aa, Glycine max
  Clone ID: PAT_MRT3847_8727C.1.pep
TKKPNPHVCGIWFHFIKITRLPLSSFDILKALAFCVRTATMKF

SEQ ID NO: 271607 - protein, 89 aa, Glycine max
  Clone ID: PAT_MRT3847_87280C.1.pep
KPKNKNLGAGPQILIPKKGGMGLRLKIFGTGDPGEPQRFPKKKNPRIKKKGFLKKQHPYPLVPKKRAPQKTLQSKSQNRGKMGPNPWPF

SEQ ID NO: 271608 - protein, 53 aa, Glycine max
  Clone ID: PAT_MRT3847_87281C.1.pep
FFRRIFYLLNPGRSNKIWSTPFNLAGYKAQQGLLWKTKSSSNSGGGDPNLSIL

SEQ ID NO: 271609 - protein, 86 aa, Glycine max
  Clone ID: PAT_MRT3847_87282C.1.pep
FTDVTTWPVTLLGLLADSAVSSSSRPIFGRMHFSNVCLKLHVSPWFNLLIGPYPFRSLCSRVPSVLLMCDCQVSCAVHHDFSAVSP

SEQ ID NO: 271610 - protein, 379 aa, Glycine max
  Clone ID: PAT_MRT3847_87283C.1.pep
MKDTTAGAAVETAAGYGIKPSSSDGSHLLVRRAMQFTMFVVGFAVLWMFLYNTASPFGFHGFSHYFIDESAKAGYDPKLQSVLRNASMKDKTVIITTLNDAWAEPGSIFDLFLESFHLGNQTKMFLNHLVVITWDQKAHARCLALHKHCYQVETKGDNFTGEAFFMTADYLHMMWRRIEFLGTVLDMGYNFVFTDTDIMWLRDPFKLFYKDADFQIACDFFNGNTYDLNNSPNGGFNYVKSNKRTISFYKYWFNSRNAYPKLHDQDVLNKIKKNSFISNMKLKIRFLSTSYFGGFCQHAKDFNKVSTMHANCCVGLDNKVNDLKILLEDWKKYVALPENEKNQSHPSWSVSCRTSFGRAKQRKQKNKGWLRRRALAVTV

SEQ ID NO: 271611 - protein, 118 aa, Glycine max
  unsure (1)..(118): unsure at all Xaa locations
  Clone ID: PAT_MRT3847_87284C.1.pep
WVTGSDRLRERHQTATAAHNQDYGLDYQEPAPPPLGDPTEATTRCFYRSRIAXVXPTVLELDTTVLTVMGXSCAKSKCTTDGIQGTAWAFGGMIFALVYCTAGISGGHINPAGTFGLI

SEQ ID NO: 271612 - protein, 127 aa, Glycine max
  unsure (1)..(127): unsure at all Xaa locations
  Clone ID: PAT_MRT3847_87285C.1.pep
GGLGSLGSPSLVLARGPLAFWAPPVFLMGVFAGFGFFGGPPGGVRVPISPGGGFGPLGLFVGPGAFFGLXGGGLPPGGLALFSLLGFFVRAFVPGGGPLGALVAPLGAPVPPHAWAFAPPFPPGGWA

SEQ ID NO: 271613 - protein, 64 aa, Glycine max
  Clone ID: PAT_MRT3847_87286C.1.pep
SFHSRDGMQSAVKMSVGVYLPELQDSLKSIITFIFQACLFDVIIMFMSQFGSLINMLMTYKKKH

SEQ ID NO: 271614 - protein, 528 aa, Glycine max
  unsure (1)..(528): unsure at all Xaa locations
  Clone ID: PAT_MRT3847_87287C.1.pep
LSNTRMEFLQRVPDSTVSIFTIGSTSLAALLYDALDHFDRRSACXDENLRLIRFXLSEAVEACVDAAGHEFDLACXKTLLSIASYASPFCSNFQREAIQEMCKILRVLNAVRSPEIGVPLSIQQYKLLTPSVLIGRLINAHQHLLALKISEYLGMNQEVVIMHWACSKITASLAIPDATLLEILLDKLKLCKGISYAAVAAHADKNGRRKLSALLVEHEPRSSKQVPLLLSIGEEDIALMKATECGDTDLVYLVLFHIWQKRQPLEFFGTIQARPLARDLFITYARFYKHEFLKDFFLSTGQLQDVAFLLWKESWELGKNPMASKGSPLHGPRIKLIEKAHGLFAETKEHTFESKAAEEHAKLLRIQHELEVTTKQAIFVDSSISDTIRTCIVLGNNRAAMKVKTEFKVSEKRWYWLKVFALATIKDWVALEKFSKEKKPPIGYRPFVEACIEADEKGEAIKYIPKLADPRERAESYARIGMAKEAADAASQAKDGELLGRLKLTFAQNAAASSIFDTLRDRLSFQGA

SEQ ID NO: 271615 - protein, 107 aa, Glycine max
  unsure (1)..(107): unsure at all Xaa locations
  Clone ID: PAT_MRT3847_87288C.1.pep
FCYNTLIEMLIAFSLKNYCPRPKXPSVFGHSLKNFVTLXQFGEDNLIRGHEAVRTLIXGSKPKSSVARATVTRSAGVEKTIASPLPRAVPNRELLTRDRKLTAKVMR

SEQ ID NO: 271616 - protein, 58 aa, Glycine max
  Clone ID: PAT_MRT3847_87289C.1.pep
EIEFEVVNFNFLGDFHSLSHFGNSLMSLLVHGLVSLVTLVMPFCRLLAAVLEKDSRMC

SEQ ID NO: 271617 - protein, 118 aa, Glycine max
  Clone ID: PAT_MRT3847_8728C.1.pep
PPKPVHIGTLNPRPPHIPAHELLPPLVAEVTRPLPLYLPHNNSWEAPTETQAGSDIAGCPRLWAEHPYHHPHTKRKDTSLPKTRRNRTFRTGPHTKKKNNPPTKKPKTKQKKKGWFSP

SEQ ID NO: 271618 - protein, 78 aa, Glycine max
  unsure (1)..(78): unsure at all Xaa locations
  Clone ID: PAT_MRT3847_87290C.1.pep
AVKVYGLHCASIKRVLVCLVEKDVEFDVVPDDVSKGEQMXSEYFKLXVIWSCPVINDGDYILYESRAIMMYYADKYRS

SEQ ID NO: 271619 - protein, 46 aa, Glycine max
  Clone ID: PAT_MRT3847_87291C.1.pep
VQSGGFILRSSFTIDNVPLESSYVVRSLSVCSVACELLMVQVQAFS

SEQ ID NO: 271620 - protein, 48 aa, Glycine max
  Clone ID: PAT_MRT3847_87292C.1.pep
NNLTMPHYNDKCGNTRLSVLHLSITTRSKSLERAFSRYGRDRGDDIKQ

SEQ ID NO: 271621 - protein, 100 aa, Glycine max
  Clone ID: PAT_MRT3847_87293C.1.pep
SYYPEALVGLRVLEASHQRSRVGVRCIDRLVMYLTASVGPHRVCVVSSNSPRRYNAFFHQYTQRCRCRRTSSRPFTDAGGCIGSWAISAEVKSSPISFML

SEQ ID NO: 271622 - protein, 50 aa, Glycine max
  Clone ID: PAT_MRT3847_87294C.1.pep
LMSYTYNITTINSAIPQKFDMLERIIIVKCLTYITSSPDVKRKKLTLYFL

SEQ ID NO: 271623 - protein, 56 aa, Glycine max
  Clone ID: PAT_MRT3847_87295C.1.pep
MMSSSLKGNDSFVEVHTKGQLCCLSPAKERFKSQFLWGILPQLKSPSHWKHFFELY

SEQ ID NO: 271624 - protein, 134 aa, Glycine max
  Clone ID: PAT_MRT3847_87296C.1.pep
KSLPFLARPFFPSFFQDPGPMGKPFLRVFLGGKKIKGGSLVVIKGGPPPPPFFFLGGFLICPQKLGPEKTLFPCGFWAGAGFWGTAPPVPFINGGRDFPCFLTRVFFPLGEGDPPVNFLFNFGLPRPALFWPPV

SEQ ID NO: 271625 - protein, 47 aa, Glycine max
  Clone ID: PAT_MRT3847_87297C.1.pep
KNIIYSLMSTRGTITVHTLEMQFVAGSLADLVITQTDKYYSQVIKQN

SEQ ID NO: 271626 - protein, 63 aa, Glycine max
  Clone ID: PAT_MRT3847_87298C.1.pep
NQSKIKRKRNRNRIRKTTKEKHKEDKKAASWTTVNPAGALDDKQRPGETNPMTKGRNHHTNRN

SEQ ID NO: 271627 - protein, 70 aa, Glycine max
  Clone ID: PAT_MRT3847_87299C.1.pep
LCHPHNHGNAFPTLLLPRATHHYSIAHILPVALLRWRLQHGLAWRFGQAKAQLYPTSWPFQSNHVIGSSS

SEQ ID NO: 271628 - protein, 84 aa, Glycine max
  unsure (1)..(84): unsure at all Xaa locations
  Clone ID: PAT_MRT3847_8729C.1.pep
CRGVLYRMKAGRPIPIPSSGLQITQLGHXVKDLATAFIQVLGNEKASQEVFNISGEKYVTFDGLTRAXCAMAGGFPESEIIYYH

SEQ ID NO: 271629 - protein, 221 aa, Glycine max
  Clone ID: PAT_MRT3847_872C.1.pep
MWTNLAKRASSTLRNTFRVSSLYPRFCKPQTSKTINPYPFQAFPKAGVSRSKFLFYEGFSSVAEAIESTDTEDDYDEVQKLLQQMAKAEHKVDNSSSSSSYKYKLLKRRQIKSETEAWAEAAREYEELLEDMREQKLAPNLPYMKSLFLGWFEPLRNAILADQELCKDSKCRMSHAPYFNDLPADMMAVVTMHKLMALLMTNTNGVGTAPVIQAACQIGEA

SEQ ID NO: 271630 - protein, 88 aa, Glycine max
  Clone ID: PAT_MRT3847_87300C.1.pep
SIIIFDRPMNTELYCLKGAITNAVSMFFKNNCVHAGISKDFFHAYNYQFHEYFSKGARSILEGFSEGTFGILNFCDAKVFLQSFDFCL

SEQ ID NO: 271631 - protein, 113 aa, Glycine max
  Clone ID: PAT_MRT3847_87301C.1.pep
SLFSSVKSSLKDIDLINDPKLEENCVFVNDSELYAVSCRAQKLRSYKKRILDAFSSKKRLSKEYEQLAIWYGDTDIEPKQGFSQTSLPFISRTYMDSKNVQVQRASETEWELL

SEQ ID NO: 271632 - protein, 46 aa, Glycine max
  Clone ID: PAT_MRT3847_87302C.1.pep
MGGGLLHIPKKEKRAGYMMQANVRVHSTSIATLLGWPMISQWSLDM

SEQ ID NO: 271633 - protein, 39 aa, Glycine max
  Clone ID: PAT_MRT3847_87303C.1.pep
WCRFVWVRQKYSIYMFCVVARRYPHISRPECKRGRDIYV

SEQ ID NO: 271634 - protein, 78 aa, Glycine max
  unsure (1)..(78): unsure at all Xaa locations
  Clone ID: PAT_MRT3847_87304C.1.pep
RNKHTTVEVNGIKMHVAKKGEGPVVLFLHGFPELLYLWGHQILSFSFLGXRAGASDLRGYRDTQTPPLINNYHWFHIR

SEQ ID NO: 271635 - protein, 139 aa, Glycine max
  unsure (1)..(139): unsure at all Xaa locations
  Clone ID: PAT_MRT3847_87305C.1.pep
MNNHTGISCSRRDYVITCAAGDSHTEVIGLAANSGCETSTFMMRLTSVFERAXIPPMGVFPDSNTLMSVTTTXIYALDDYHSTDKTGEKENGVTALDPITNEXALMYEQDXALTDGTAVEXPIYYHVTGVLDPPQRIKP

SEQ ID NO: 271636 - protein, 45 aa, Glycine max
  Clone ID: PAT_MRT3847_87306C.1.pep
HTVHNTHNEIECESLTFKYVKFYVASFIIECNICFCFFLISFGMI

SEQ ID NO: 271637 - protein, 110 aa, Glycine max
  Clone ID: PAT_MRT3847_87307C.1.pep
GSSIHSPIKMEKRSACLTLKLASITPWGADLQESLDERMALPEDVETHIDKHTGEILGLHSVSNALSSTACEDEHDLCLKRLNEYQTQFRTLDMETTDRVQKVLHCVNEV

SEQ ID NO: 271638 - protein, 61 aa, Glycine max
  Clone ID: PAT_MRT3847_87308C.1.pep
QQKFDLILIFWVCFCRNKAAIVKVGSVEKMLKLIESPDGLDSSVSEAIVANFLGLSALDSN

SEQ ID NO: 271639 - protein, 119 aa, Glycine max
  Clone ID: PAT_MRT3847_87309C.1.pep
FRGKGIRKMAKISFVFMLLALPLCLVLGQEDWEDLLGQGGFSQDALNKAQAALGAASAQAAVNDYFGLDDSSPEAVHGEQSFLADFLDADNSTSNDKGALPTGLTTVEAPEDSPVDDVD

SEQ ID NO: 271640 - protein, 48 aa, Glycine max
  Clone ID: PAT_MRT3847_8730C.1.pep
SRSTDAWGILPAARWELRFKASRRANPPHEGHQRHVPLGGQRLMILLP

SEQ ID NO: 271641 - protein, 60 aa, Glycine max
  Clone ID: PAT_MRT3847_87310C.1.pep
KQPHRLSQNMQFPRYVWAQFFQGEVWPCVILSSGKWWCPLHHPFVKRLSTPIQNPVMLYG

SEQ ID NO: 271642 - protein, 86 aa, Glycine max
  Clone ID: PAT_MRT3847_87311C.1.pep
HRIISLLTQNKGLHRMGMRAVQPNILVPQPLPLPPTMETANHHPHVILIQHPTLYSRPTRHYSDRNFEKMAYNDSACETTMNSRCP

SEQ ID NO: 271643 - protein, 207 aa, Glycine max
  unsure (1)..(207): unsure at all Xaa locations
  Clone ID: PAT_MRT3847_87312C.1.pep
MESSKIYAYLFLCMLFLSSATPILGCGYCGKPPKKHKPGKTPKTPTVPVVKPPVTIPPIVNPPVTIPPIVNPPVTVPPVVLPPIVKPPGFLPPILNPPSTPTPSPGKGGNTPCPPPKSPAQATCPIDTLKLGACVDLLGGLVHIGLGDPVANQCCPVLQGLVELEAAVCLCTTLKLKLLNLNIYVPLALQLLVXCGKSPPPGYTCSL

SEQ ID NO: 271644 - protein, 217 aa, Glycine max
  unsure (1)..(217): unsure at all Xaa locations
  Clone ID: PAT_MRT3847_87313C.1.pep
MESSKIYAYLFLCMLFLSSATPILGCGYCGKPPKKHKPGKTPKTPTVPVVKPPVTIPPIVKPPVTIPPIVNPPVTIPPIVNPPVTVPPVVLPPIVKPPGFLPPILNPPSTPTPSPGKGGNTPCPPPKSPAQATCPIDTLKLGACVDLLGGLVHIGLGDPVANQCCPVLQGLVELEAAVCLCTTXKLKLLNLNIYVPLALQLLVACGKSPPPGYTCSL

SEQ ID NO: 271645 - protein, 40 aa, Glycine max
  Clone ID: PAT_MRT3847_87314C.1.pep
RPVSAVVHTSLRASAKQDWHIDSGCSRHMTGVKEFLLYIE

SEQ ID NO: 271646 - protein, 237 aa, Glycine max
  Clone ID: PAT_MRT3847_87315C.1.pep
MESSKIYAYLFLCMLFLSSATPILGCGYCGKPPKKHKPGKTPKTPTVPVVKPPVTIPPIVKPPVTIPPIVNPPVTIPPIVNPPVTIPPIVNPPVTIPPIVNPPVTVPPVVLPPIVKPPGFLPPILNPPSTPTPSPGKGGNTPCPPPKSPAQATCPIDTLKLGACVDLLGGLVHIGLGDPVANQCCPVLQGLVELEAAVCLCTTLKLKLLNLNIYVPLALQLLVACGKSPPPGYTCSL

SEQ ID NO: 271647 - protein, 190 aa, Glycine max
  Clone ID: PAT_MRT3847_87316C.1.pep
MESSKIYAYLFLCMIFLSSATPILGCGYCGKPPKKHKPGKTPKTPKTPVVKPPVTIPPINVPPVVLPPIVKPPGILPPIPIINPPTTPGKGGNTPCPPPKSPAQATCPIDTLKLGACVDLLGGLVHIGLGDPVANQCCPVLQGLVEVEAAVCLCTTLKLKLLNLNIYVPLALQLLVTCGKSPPPGYTCSL

SEQ ID NO: 271648 - protein, 43 aa, Glycine max
  Clone ID: PAT_MRT3847_87317C.1.pep
MNLNLTDRNLQKIKIFKNITIPCSCYKAYNEYEPHTQVTISIL

SEQ ID NO: 271649 - protein, 89 aa, Glycine max
  Clone ID: PAT_MRT3847_87318C.1.pep
GGISGVVWILLLLILAVSGLLTPTTTYRATIYEDLRAQGLPRLLLAAGIVNDYMISTSCEIEEYFIEPIHANFHNEVHYDSDINRVLGY

SEQ ID NO: 271650 - protein, 75 aa, Glycine max
  Clone ID: PAT_MRT3847_87319C.1.pep
ASDASVCTTVLSSVFAKRTFPTSAANLFKVSVLCASRGIGQPLFLFLKNNTLVTDLSLYHNVNSPRVSPDFIHIN

SEQ ID NO: 271651 - protein, 126 aa, Glycine max
  unsure (1)..(126): unsure at all Xaa locations
  Clone ID: PAT_MRT3847_8731C.1.pep
PNPSKGFWFKVQNWGEVKNIPVPEEETWKIGMESRPVFEVAGPLAILVKVKGPKFKEIVNIRLEKGTTRVGQALEVDGEKAXVKAFKGPFGIDIKFTTGQFTGEVLKTPSSLAMLGRFLNGSGKPI

SEQ ID NO: 271652 - protein, 115 aa, Glycine max
  Clone ID: PAT_MRT3847_87320C.1.pep
ATRITHRAQGIVAIATRWHMLVTEASSESKQCKARVALARAGDSDSDDSSNIHVSVTPPQLSSFQTRQTLVTYLQHNHGGITVYGYSLDRGLLHTLFAFEFSLVLWILSKVVVLS

SEQ ID NO: 271653 - protein, 66 aa, Glycine max
  unsure (1)..(66): unsure at all Xaa locations
  Clone ID: PAT_MRT3847_87321C.1.pep
VIMLAHTPGGKERTDNEFEALDEGSGFQGFRVLCXAFNSYVMEFLKKAQVLWRGFINCIGALTMTL

SEQ ID NO: 271654 - protein, 104 aa, Glycine max
  unsure (1)..(104): unsure at all Xaa locations
  Clone ID: PAT_MRT3847_87322C.1.pep
ATATAPATSSFMGTRLLKAHSGAGQMHAPFRFGNKKAPAQNKASTGSGLNTNRPLWYTGTKTPKYLXXLLYETTGSILFDYIHPLXYLQLQLHSLNQNLTNNII

SEQ ID NO: 271655 - protein, 164 aa, Glycine max
  Clone ID: PAT_MRT3847_87323C.1.pep
APARELGIRLEQDAKYLNKMVVAMGQYSKKDWDIVAYFSLFPQCGELDAERLIDLWKAERFFDSSSIGGPGCLSQLGGISMALDEKKDDFGQVRSCKMHRLMHDIAKSKVSNEENITNPNRDQVLSKVQRASIDLSKIDLSKSRVRDQLYQAKQLKSIFFNKSE

SEQ ID NO: 271656 - protein, 76 aa, Glycine max
  Clone ID: PAT_MRT3847_87324C.1.pep
GFSSSVSFASTSSVSAGTCLASFGATSEGVFLLFLLVPRWSLPMVLRWLNVGQEPQRGAVLLQEHQVLAVMVQEPQ

SEQ ID NO: 271657 - protein, 155 aa, Glycine max
  Clone ID: PAT_MRT3847_87325C.1.pep
MPPIRIRRLRLDSDSDGEEQDPLQPQSEPQTHFPVEISDDEDFLDVLDSLPPPSPACPVTDFLRRLGLSPKRDWLTSCLGNFHPSVPAFEHLDVAAKAKRCFEQFLYADMNFCGSGLLLPNVNAMHLNVLPGPYVLQVDEIINMTCPLRGRYEKA

SEQ ID NO: 271658 - protein, 75 aa, Glycine max
  Clone ID: PAT_MRT3847_87326C.1.pep
HASGDAWLTSPPSLTATRDLLYLKSLTNAQTRTMPLDQPVWLIYARCTTLITSLRYCASRTWIYWCCKPWKREDY

SEQ ID NO: 271659 - protein, 165 aa, Glycine max
  unsure (1)..(165): unsure at all Xaa locations
  Clone ID: PAT_MRT3847_87327C.1.pep
MALKGFRPCSMESSSSKRFRNLLVCFIAVVMVLLGACFLFTKLRQNKFEKQLKTTSWNVKQYHVLRFNENEIVDGIKAENLIGKGGSGNVYRVVLKSGAEFAVKHIWTSNLSERGSCRSTSSMLRRSSRSPEFDAEVATLXLIRHVNVVKLYCSITSEDSSLLVM

SEQ ID NO: 271660 - protein, 66 aa, Glycine max
  Clone ID: PAT_MRT3847_87328C.1.pep
TQLNITNMNSFSNFIIIFLIISTTCKLLILNYYTKTYPKCDIIYSNSLNHSTPMNKTFPSSILPIH

SEQ ID NO: 271661 - protein, 107 aa, Glycine max
  Clone ID: PAT_MRT3847_87329C.1.pep
FSSSVIEESVMLFSPPPVSPRVILWIPISISASVTVFTLNDPSRCTIHIALFVVTRVKPPIDITFAFGPLQINQAASVTSREEIKSHSSGFCTNRITQYRSLQMEVV

SEQ ID NO: 271662 - protein, 63 aa, Glycine max
  Clone ID: PAT_MRT3847_8732C.1.pep
TLSFPQKDFVAPPSTLLFLEPRLPSPAPHGSSGCSYNGKFRIVGAPACEPMSLTQGVSTRVPP

SEQ ID NO: 271663 - protein, 67 aa, Glycine max
  Clone ID: PAT_MRT3847_87330C.1.pep
NSPVRFRVILAGAFSSHCSLGQKLSIHVTAGSSSLAPLSPPLFFFFFFFFFFFFFFLFNRTQIIIYT

SEQ ID NO: 271664 - protein, 75 aa, Glycine max
  Clone ID: PAT_MRT3847_87331C.1.pep
FPQHHLLDESPQKRCSCKSSLCLVYKLDMWSCFLGSIFGFRSLFYYLDIQTPNKLMGLLKLRRGNTVALGGAQSA

SEQ ID NO: 271665 - protein, 83 aa, Glycine max
  Clone ID: PAT_MRT3847_87332C.1.pep
NLQLTPCILSCPFRDPLSEPQSLEQQNLQAKPGKQAQHNPEVASASVPMAFSLSSVINNNKPSSEAFFRPLPLRQPKRTLFTT

SEQ ID NO: 271666 - protein, 170 aa, Glycine max
  Clone ID: PAT_MRT3847_87333C.1.pep
MGSGAGNFLKVLLKNFDVLAGPVISLVYPLYASIRAIESKSPIDDQQWLTYWVLYSLITLFELTFAKVLEWIPIWPYAKLIATCWLVLPYFSGAAYVYEHYVRPFYVNPQTINIWYVPRKKDALGKRDDILTAAEKYIQENGTEAFENIINRADKSRRGDGYYTMYDETY

SEQ ID NO: 271667 - protein, 242 aa, Glycine max
  Clone ID: PAT_MRT3847_87334C.1.pep
TSKGVLPDKSVVAVKKIGNIGIQGKKDFCTEIAVIGNIHHVNLVKLKGFCAQGRHRLLVYEYMNRGSLDRNLFGGEPVLEWQERFDVALGTARGLAYLHSGCVQKIIHCDIKPENILLQDQFQAKISDFGLSKLLSAEQSGLFTTMRGTRGYLAPEWLTNSAITEKTDVYSFGMVLLELVSGRKNCYYRSRSHSMDDSNSGGGNSSTSSTTGLVYFPLFALEMHEQRSYLELADSSLRTCHM

SEQ ID NO: 271668 - protein, 83 aa, Glycine max
  Clone ID: PAT_MRT3847_87335C.1.pep
DAGISFCFSVSFLFISAVSSVSFSGDFTSSLIFSVSSASGCLSSRLLSATVSFPIDASSCVGCRDLSLCTPSVCVFGISTSVD

SEQ ID NO: 271669 - protein, 81 aa, Glycine max
  Clone ID: PAT_MRT3847_87336C.1.pep
IGLWLGFYKNNIFFFFRVECPTFCKFLFYLNSFPWAKGPFFSLCCEKKNPAFFGVKVYFPVPNFKMGFPFGFFEKIFGGGF

SEQ ID NO: 271670 - protein, 75 aa, Glycine max
  Clone ID: PAT_MRT3847_87337C.1.pep
MGVFTFEDEINSPVATATLYKGLITYPDNFIPKGCLIPEKVLKTVKGIGAPGPIRTTTSLGVVKTSLVLPKLEGF

SEQ ID NO: 271671 - protein, 49 aa, Glycine max
  Clone ID: PAT_MRT3847_87338C.1.pep
YDMTHTRAITAKFKIIRHKLLYDNEKMYHVLLIIATWSQRPKNLTSVVF

SEQ ID NO: 271672 - protein, 50 aa, Glycine max
  Clone ID: PAT_MRT3847_87339C.1.pep
HACKITGKITITRQQIPSVLMKLVTHLMHKNDFTDSGNTQHSYLVYPTQI

SEQ ID NO: 271673 - protein, 68 aa, Glycine max
  Clone ID: PAT_MRT3847_8733C.1.pep
SAERTRQKGTTCQITKTYRVLSQETRYTIQCVIARLTVACVALMCTELCTECTQGWGKPCHAMMSLRT

SEQ ID NO: 271674 - protein, 72 aa, Glycine max
  Clone ID: PAT_MRT3847_87340C.1.pep
LTSSYTPTPSMESGLPIDRRIIVEYFGRMSYLVHNVTHPQEKDLLDGNFSFDITSRSTLDKVHCPKAQFVLG

SEQ ID NO: 271675 - protein, 72 aa, Glycine max
  unsure (1)..(72): unsure at all Xaa locations
  Clone ID: PAT_MRT3847_87341C.1.pep
ADVSLEVIAXRXXXXXXADLVESXNEXAILAXRRGXXXISSKXXDDSIDRNXAGMEGXGXTDXXSXXXVGIA

SEQ ID NO: 271676 - protein, 57 aa, Glycine max
  Clone ID: PAT_MRT3847_87342C.1.pep
ILSPRKVGRIKHKKGYGARWPWNITIYHDKGNNKPVLPMNYEDLSAANSAGGFYNST

SEQ ID NO: 271677 - protein, 426 aa, Glycine max
  Clone ID: PAT_MRT3847_87343C.1.pep
MVYNMIIQYSSNWSCNLSMMARLALCLLVMLSNNASSSSARLLFNRTRGGFTIMPKEVHRRNLLDNGLGHTPPMGWNSWNHFACNIKEDLIRETADAMVSTGLAALGYQYINIDDCWGELNRDSKGNLVPKASTFPSGMKALADYVHKNGLKLGIYSDAGNQTCSKTMPGSLGHEEQDAKTFASWGIDYLKYDNCENNNISPKERYPPMSEALANTGRPIFFSLCEWGSEDPATWAKSVGNSWRTTGDIQDKWDSMISRADLNDKWASYAGPGGWNDPDMLEVGNGGMTTEEYRAHFSIWSLAKAPLLIGCDIRALDATTKELLSNKEVIAVNQDKLGVQGKKVKSTNDLEVWAGPLSNNKVAVILWNRSSSKAKVTASWSDIGLKPGTSVEARDLWAHSTQSSVSGEISAELDSHACKMYVVTPN

SEQ ID NO: 271678 - protein, 167 aa, Glycine max
  Clone ID: PAT_MRT3847_87344C.1.pep
FYTEQVHPDLSKADKKRLCGILDCQRLSPEVRAHAVKNELLPLRTVVQLLYFEQDKGSKATTSHKLPKPHEILLGAKHRPATATTKEEFNREEIRERDHHKTKRSDGKLLALDLEKKMAIRGEDIEETQSEKARGVKDASSSSGKVDLDPKKIIRRARSKSEHGVKK

SEQ ID NO: 271679 - protein, 162 aa, Glycine max
  unsure (1)..(162): unsure at all Xaa locations
  Clone ID: PAT_MRT3847_87345C.1.pep
RGLSGGGVITVENNNISPKXRYPPMSEALANTGRPIFFSLCEWGSEDPATWAKXCGGGGRTTGDIQDKWDSMISRADLNDKWASYAGPGGWNDPDMLEVGNGGMTTEEYRAHFSIWSLAKAPLLIGCDIRALDATTKELLSNKEVIAGNQDKLGVQGKKVKS

SEQ ID NO: 271680 - protein, 87 aa, Glycine max
  Clone ID: PAT_MRT3847_87346C.1.pep
PRVRGRVGGRVGLSTTPSCSPSFFMLYHKYPKLDITKLFHTTLIPNTQFVHIHLSPSYHFYDHLSDSFEWHNLTPFYEILLTTDILL

SEQ ID NO: 271681 - protein, 72 aa, Glycine max
  unsure (1)..(72): unsure at all Xaa locations
  Clone ID: PAT_MRT3847_87347C.1.pep
KGILAADESTWTICKRLVSIDVEYVFSNRRGLRDYXFTDRCALKYHSGGILSVDTLYQCTVAGTLYSSDYPH

SEQ ID NO: 271682 - protein, 130 aa, Glycine max
  unsure (1)..(130): unsure at all Xaa locations
  Clone ID: PAT_MRT3847_87348C.1.pep
ANRRSGCGIVQLPCSLAMMPELSSFYTDYCNRWQWIELEEGEEKLGSIISSKAQLFCATNCNLCDDFFLAGFKRFAHVXYLNLSGNNFTILPEFFKELQFLRTLDVSDCEHLQEIRGLPPILEXFGARNC

SEQ ID NO: 271683 - protein, 80 aa, Glycine max
  Clone ID: PAT_MRT3847_87349C.1.pep
MKESEPKNAFERKMQYQQHQQQFTTTTTTNSNSQAIDPSCKSDDLFRLCIYQDSVPADFQPDVLGGKRCLSMVANNTFFL

SEQ ID NO: 271684 - protein, 54 aa, Glycine max
  Clone ID: PAT_MRT3847_8734C.1.pep
EGKIGNNGLAYKSQNPNLLLQQLREIVWDTGRVAKTGKEKTASLLSWTRNHSRS

SEQ ID NO: 271685 - protein, 93 aa, Glycine max
  unsure (1)..(93): unsure at all Xaa locations
  Clone ID: PAT_MRT3847_87350C.1.pep
XFDTDVNILTRFVMEEGRKDRCTGELTQLLNSLCTAVKAISSAVRKAGIAHLYGIAGSTNVTGDQVKKLDVLSNALVMNMLKSSFATCVLVSE

SEQ ID NO: 271686 - protein, 34 aa, Glycine max
  Clone ID: PAT_MRT3847_87351C.1.pep
PGIWHCGALYLRVSSPGIGRLYSCLLHIQVFFPP

SEQ ID NO: 271687 - protein, 67 aa, Glycine max
  Clone ID: PAT_MRT3847_87352C.1.pep
LHNSAGKENLINKTMALKTLSTLLSPISLTNTKFPQFHNTKHYLILCYFPHSHKSHFLSHYSKCTIT

SEQ ID NO: 271688 - protein, 65 aa, Glycine max
  Clone ID: PAT_MRT3847_87353C.1.pep
PFEIITVMVKKAMFVYSSGEFVNHVVVGFPQINNNPVPNKKCSSRHCAFPQVVLQENIGCGHAII

SEQ ID NO: 271689 - protein, 39 aa, Glycine max
  Clone ID: PAT_MRT3847_87354C.1.pep
QKKAYILEIHVDGGTIAQNVDFAYSFFEKQVPIDAMFHK

SEQ ID NO: 271690 - protein, 47 aa, Glycine max
  unsure (1)..(47): unsure at all Xaa locations
  Clone ID: PAT_MRT3847_87355C.1.pep
XXXFFFFFFLEIKKKFFFFFFLIKFILFFPSLPKNSSSISMEPGFFY

SEQ ID NO: 271691 - protein, 87 aa, Glycine max
  unsure (1)..(87): unsure at all Xaa locations
  Clone ID: PAT_MRT3847_87356C.1.pep
KGDEFCSSGFQSSGWVSNGTSLGILGLLLNFNCLLLPFFISIGLWATSKVTEADIVEFEANYRGSDTEKXLIGLYKKCKGNMNRLHC

SEQ ID NO: 271692 - protein, 104 aa, Glycine max
  Clone ID: PAT_MRT3847_87357C.1.pep
MGAWWKLSRATTNGDFVEGTYLATVKVEVACACAGKTSTGTTTTWMERAMRKDRGLIVLKIGRMSYGAKDVKDPAKGDWGQGNTSLGQRTRYRWEKAPDTWAQT

SEQ ID NO: 271693 - protein, 95 aa, Glycine max
  Clone ID: PAT_MRT3847_87358C.1.pep
VNDATGSEVSCTCSSKEEGRQQQQRLNLVGYGSKGHKIHHSGPLLVPSSNHDQMLKDHDRQIQEVVRRARLDKAKMRRLQTEGNQITNSLFVSGR

SEQ ID NO: 271694 - protein, 648 aa, Glycine max
  Clone ID: PAT_MRT3847_87359C.1.pep
MPGFGSARVRGPSLARPRANRVVALAHRPPVRWLPAALDGAPVAAGWPACLPAVPGAAIPGWPPRRAVAPVQLVFIRRGSPCNVYRARDLEQRKVVALKKVRFDNLEPESVRFMAREIHILRRLLLPIVPALRGTAASALNSEFFSTMPLPCDPSSLPKSPPSLEFAAALRDEEARRQGAAGSKGQRHDLERRGARESRLLIDNNGILKIADFGLASFFDPNQAQPLTSRVVTLWYRPPELLLGATYYGTAVDLWSTGCILAELYAGKPIMPGRTEVEQLHKIFKLCGSPSEDYWRKSKLPHATIFKPQQPYRRCVSETFKEFPAPAIELIEILLSIDPADRGTSASALNSEFFSTKPLPCDPSSLPKYPPSKEFDAKVRDEEARRQGAAGSKGQRHDIERRGARESRAIPAPDANAELVLSIQKRQGQANSQSKSEKFNPHPEEVASGFPIDPPRPSQAAGLIADPPVHQHKRASHSGPLTQKSVRHGITGKNQDDAPKISMGGDLSTVSGLVAARRSMLSDDRREWSGSSQAEAPKLISRFPGSFKEASESMMQQDQKHHAHAPQKEEGRGSRNKDSNLVGYGSKGHKIHYSGPLLVPSSNHDQMLKDHDRQIQEAVRRARLDKAKMRRLQAEGSQISNSLFVSGR

SEQ ID NO: 271695 - protein, 80 aa, Glycine max
  unsure (1)..(80): unsure at all Xaa locations
  Clone ID: PAT_MRT3847_8735C.1.pep
DTLLYLPHLDDALWSEEEFFLPREGRITCLEFEXRHGSVYREHNRSTRYYQGLYWTMWKVPILGCTDANHELKELQEAKT

SEQ ID NO: 271696 - protein, 52 aa, Glycine max
  Clone ID: PAT_MRT3847_87360C.1.pep
IPYCVVGLSPLKMRISSYECDGRSWPQNDSYRVSFVCNRYISRAADIQTSYV

SEQ ID NO: 271697 - protein, 50 aa, Glycine max
  Clone ID: PAT_MRT3847_87361C.1.pep
HNAEYAFKSMTFDVKNHHVQWKNYPCAISKLHHEIVPDKCNVADNPKMAI

SEQ ID NO: 271698 - protein, 81 aa, Glycine max
  unsure (1)..(81): unsure at all Xaa locations
  Clone ID: PAT_MRT3847_87362C.1.pep
ITSQNMDRALMCLELMLNAVNMNFVXTFSDFFDNSQLKGEIFCIFVIAIAAAEAAIGLAIVSSIYRNRKSIRINQSTLLNK

SEQ ID NO: 271699 - protein, 278 aa, Glycine max
  Clone ID: PAT_MRT3847_87363C.1.pep
MGPNAAAAKQAEKLRIDGNTYFKKDRFGAAIDAYTEAITLCPNVPVYWTNRALCHLKRNDWERVEEDSRKAIQLDSNSVKAHYMLGLALLQRQESAKGIKELEKALDLGRGANPKGYMVEEIWQELAKAKYLEWERSSSKRSWELQSLKEACESALKEKHFLDYSQMEGFVDDATTSHSEQLEALERVFNTAAEADIPTEVPDYLCCRITLDIFHDPVITPSGLTYERAVILEHLQKVGKFDPITREPLDPSQLVPNLAIKEAVEAFLDKHGWAYKID

SEQ ID NO: 271700 - protein, 55 aa, Glycine max
  Clone ID: PAT_MRT3847_87364C.1.pep
ILESGTLLNSHDWLRIYDTTLPYLIIKKCTFLLLRKFHSHQTLYTKKKREVHCLS

SEQ ID NO: 271701 - protein, 78 aa, Glycine max
  Clone ID: PAT_MRT3847_87365C.1.pep
MGPNAAAAKQAEKLRIDGNTYFKKDRFGAAIYAYTEAITLCPNVPVYWTNRALCHLKRNDWERVEEDSRKAIQLDSNS

SEQ ID NO: 271702 - protein, 42 aa, Glycine max
  Clone ID: PAT_MRT3847_87366C.1.pep
GSSNSIFWIVIGDGPAILDQFVAQLRLKPEKMDASNCAHWLV

SEQ ID NO: 271703 - protein, 127 aa, Glycine max
  Clone ID: PAT_MRT3847_87367C.1.pep
APQCSSRYISGGRKNKSSLLHYLANQIEIASQCHTNIFIALKTNTEITAPANTKIRTSCTLSAPSLSILCQSHSEITLILSNFIILYYLTSSSITKDNISAHFLQTLIPARTNLGPTEIANILSPQF

SEQ ID NO: 271704 - protein, 118 aa, Glycine max
  Clone ID: PAT_MRT3847_87368C.1.pep
FCLRGPSFASGAPPAPRPPPGAPPPGSGPPPGLGSPRSGACAPPGGCGGASAPARASVGAPPRWPAGLPCVLLALGLRLLSERGQVTTRPLPPQQTMQKTTNKSKENEQHRAAAAERA

SEQ ID NO: 271705 - protein, 53 aa, Glycine max
  unsure (1)..(53): unsure at all Xaa locations
  Clone ID: PAT_MRT3847_87369C.1.pep
LAVFPESQIRHLTTVYRGFYKIRCPWPPWTLVFMVTDAYIEFKLNQYSXXXXK

SEQ ID NO: 271706 - protein, 45 aa, Glycine max
  Clone ID: PAT_MRT3847_8736C.1.pep
QATNLRIPPGPRQAFSEARDINFYSSSFHTVSGLSSLLNNTIKLN

SEQ ID NO: 271707 - protein, 243 aa, Glycine max
  Clone ID: PAT_MRT3847_87370C.1.pep
IRLELEPIRLERLEFLHIRFLTPPSPHFSHHQHKMFLHIVFLLFLLSSTSHATVQDFCVADLKGADTPAGYPCKPPANVTSDDFVYTGLAEAANVTNIINAAVTPAFVAQFPGLNGLELSAARLDLGPSGVIPLHTHPGANELLIVLQGHILAGFISSGNIVYQKVLKKGELMVFPQGLLHFQIAVGKRKALAFPVFSSANPGLQILDFALFASNFSTPLVTQTTFLDPDLVKKLKGVLGGSG

SEQ ID NO: 271708 - protein, 55 aa, Glycine max
  Clone ID: PAT_MRT3847_87371C.1.pep
LSRWFCVVVLRVVRIRCWTAMALRASGCRYLLCCICPLLLVHSPPVWCGQRSGAY

SEQ ID NO: 271709 - protein, 178 aa, Glycine max
  unsure (1)..(178): unsure at all Xaa locations
  Clone ID: PAT_MRT3847_87372C.1.pep
DTLSGYPCKPPXNVTSDDFVYTGLAEAANVTNITNAVYTKSSEVTFAGLNGLDLSAARLDLGPGGVIPLHTHPGANELLIVLQGHILAGFISSGNIVYQKVLKKGELMVFPQGLLHFQIAVGKRKALAFPVFSSAFPGLQILDFALFASNFSTPLVTQTTFLDPAIVKKLKGVLGGSG

SEQ ID NO: 271710 - protein, 88 aa, Glycine max
  unsure (1)..(88): unsure at all Xaa locations
  Clone ID: PAT_MRT3847_87373C.1.pep
LIEAHVDVKTTDNYMLRLFCIGFTKRRPNQVKRTCYAQVIPDXQIRRKMVEIMINQASTCDLKELVSKLIPEVIGKEIEKSTSSIFPL

SEQ ID NO: 271711 - protein, 99 aa, Glycine max
  Clone ID: PAT_MRT3847_87374C.1.pep
GAPPNPKFFLTGGSFFFKTRQLFLESFTNIHEASDFATRGKNKNRKPRRENPALQKHKGGFAKNTFKSFRINIRLTKPGGFYRAKPSFFAHGPIHGIAF

SEQ ID NO: 271712 - protein, 95 aa, Glycine max
  Clone ID: PAT_MRT3847_87375C.1.pep
RLCSEFGSSTNVAVNMLFTFAIAQVFLAMLCHLKFGLFFFFAAFVLIMTLFIALLLPETKNIPIEEMHLVWRSHWFWSKIVPQVDNDRKPTTAQS

SEQ ID NO: 271713 - protein, 53 aa, Glycine max
  Clone ID: PAT_MRT3847_87376C.1.pep
YMPTSMMWTPRMHPCFQIRRINRCHPENKLPSIASCNYSYSQRRVIMILLLLH

SEQ ID NO: 271714 - protein, 77 aa, Glycine max
  Clone ID: PAT_MRT3847_87377C.1.pep
FTDLSLEFGQYMKDSIDQIVKFFESNTAVSQTIALETAAAVQVLFDFTSLLFGNMLIVKDSKLELYINYDTRSQYIN

SEQ ID NO: 271715 - protein, 143 aa, Glycine max
  Clone ID: PAT_MRT3847_87378C.1.pep
FGPTCAIGYGPRLIQVITGSPPNCPRRRPLPENLNYPSFVAVLPVSSSLLSKTFFRTVTNVGPPSAVYRVRVETQAEGVAVTVRPSQLVFSEAVKKRSFVVTVTADGRNLELGQAGAVFGSLSWTDGKHVVRSPMVVTQAQPL

SEQ ID NO: 271716 - protein, 75 aa, Glycine max
  Clone ID: PAT_MRT3847_87379C.1.pep
FPWQVMSPSYVSGRNLVIHGGYTDVDAEIHRVWAVSVVFVAVSSKLPPYCWCLQCLCFEGPVVHELVLLACVKKK

SEQ ID NO: 271717 - protein, 52 aa, Glycine max
  unsure (1)..(52): unsure at all Xaa locations
  Clone ID: PAT_MRT3847_8737C.1.pep
IRVDKNSNNRKALSGLGPLSEQSFXYDVHTASNGGWGRYFYYVGPGNHPNCL

SEQ ID NO: 271718 - protein, 62 aa, Glycine max
  Clone ID: PAT_MRT3847_87380C.1.pep
TTSWAVLSCVRSQDFNSNPLHVPLRHLPLSGYSTHRILIAKDESRLTLLSATISPHSTTGKT

SEQ ID NO: 271719 - protein, 82 aa, Glycine max
  unsure (1)..(82): unsure at all Xaa locations
  Clone ID: PAT_MRT3847_87381C.1.pep
EKTTEGGIHIALLLIMAGGTLSATGRFRGXVTVPQGLNFAVGHVLATFGVRSSPTDAYNTEIHVNKFSIDQYQSXEVSQFHT

SEQ ID NO: 271720 - protein, 101 aa, Glycine max
  Clone ID: PAT_MRT3847_87382C.1.pep
GAKARENPTTQKGFLAVCFFMSPKGKFLLKSKKKKNFGKTKKSFRGPIKFLEKGMGANFTPIWGGEWAFFSLPPYGPLGFYYGVGKPSRGQGKPKIFKFGG

SEQ ID NO: 271721 - protein, 68 aa, Glycine max
  Clone ID: PAT_MRT3847_87383C.1.pep
LGLIVLLQENFLQGQHHESTPESPQFYKEVFFNEEKIKENFKKHFKEFFFCISLLQNLRLNNTLFKKY

SEQ ID NO: 271722 - protein, 41 aa, Glycine max
  unsure (1)..(41): unsure at all Xaa locations
  Clone ID: PAT_MRT3847_87384C.1.pep
NKIYIMNVLXFIFIHMFNLNFDIFLAKLNFSFKLVCFYITL

SEQ ID NO: 271723 - protein, 90 aa, Glycine max
  Clone ID: PAT_MRT3847_87385C.1.pep
LDGHGRESIIEALSRITRTALRAFHCNMLISKYTILLGLLEISVKSGKRNSIQQLTLYFCTLWQYFMLNKVTYIIDHFIRSVESGRKIIM

SEQ ID NO: 271724 - protein, 314 aa, Glycine max
  unsure (1)..(314): unsure at all Xaa locations
  Clone ID: PAT_MRT3847_87386C.1.pep
MVLTQKLHEAFKGTVERITGPRTVSAFKEKGVLSVSEFVTAGDNLVAKCPTWSWESGDPGKRKPYLPPEKQFLITRNVPCLRRAASVEEEYEAAGGEVLXDDEDNDGWLATHGKPKETKSDEDENLPSMESLEISKKNSIKKIPSYMGAEEEEDIPDMAEFDDTSNVIENDPATLQSTYLVAHEPDDDNILRTRTYDVSITYDKYYQTPRVWLTGYDESRMLLQPELVLEDVSQDHAHKTVTIEDHPHLPGKHASIHPCRHGAVMKKIIDVLMSHGVEPEVDKYLFLFLKFMASVIPTIEYDYTMDFDLGSSSH

SEQ ID NO: 271725 - protein, 99 aa, Glycine max
  unsure (1)..(99): unsure at all Xaa locations
  Clone ID: PAT_MRT3847_87387C.1.pep
GRKSGQKGVSLQRETGIAPAVKGNMRGMPNSRLPASTHPTPGALPMGVCQNMRYTLTGGGTTGALTDIVXLRNLLRPLLDLRDAHALRKAHEPFFTSAK

SEQ ID NO: 271726 - protein, 149 aa, Glycine max
  unsure (1)..(149): unsure at all Xaa locations
  Clone ID: PAT_MRT3847_87388C.1.pep
HNTVPSFSLSFPEAMGSFARGAPSLTGVGLSTSKTPLQLIHRRGLAGQPWPPKXXLGEEPMSPSKWREEHFXSVSLTGGGVLIDGGDKCGHRRGGGXXKRSXGXRNSEGXGVLKIQSVLXDNAAXAXTFPRFSNSGLCEGEQIVXVXIH

SEQ ID NO: 271727 - protein, 89 aa, Glycine max
  Clone ID: PAT_MRT3847_87389C.1.pep
SSIGSPVRRTMGPFFFLPTTKIILFKFFDTPFGLAPSGYQKWSAVKAPFFQLPAIISRFLFTPQWKTCSLKSVCFGVFAQRSKNTWSDT

SEQ ID NO: 271728 - protein, 279 aa, Glycine max
  Clone ID: PAT_MRT3847_8738C.1.pep
MESRNLVFSVFVLFSLALAGESHARAWLSDENYWQAVWPNTPIPDSLQDLLKPGQSGVENVNRLPMMKIEDTQYPTNFFFNKELYPGKTMNVEFSKHPLTQPYGVLFWVHGRDVKDIEKEGYTPEQLCLREGPKGEDKYCAESLETLMNFVISKLGKNVQAFSSSFLSKQEEYTVEGVHNLGGKAVMCHRLNFQKAVFYCHEVHETTAFMVPLLAGDGTKTQALAVCHFDTSVLNFELFRQIMKVDPGTNPLCHFLGNKSILWVPNLATEGASQTKIVV

SEQ ID NO: 271729 - protein, 116 aa, Glycine max
  unsure (1)..(116): unsure at all Xaa locations
  Clone ID: PAT_MRT3847_87390C.1.pep
ASLKVAFLAAVLCMVVVSAPMAHAAITCRQVTNSLINYIIYLQNRRTPPSECCNRVKILNAATKTTTNHHTAYNYLKSTTSQISSFKSNNATSLPNKXQFSIPYKIXTSTNYATIN

SEQ ID NO: 271730 - protein, 422 aa, Glycine max
  Clone ID: PAT_MRT3847_87391C.1.pep
GKLGHHFFHKGLLLQAFVHPSYNKLGGGCYQRLEFLGDAVLDYLITSYLFSAYPKLKPGQLTDLRSLSVNNKAFACLAVDRSFDKFLLCDSSGLSEAIKKYVDYIRRPVSDNSIKEGPKCPKALGDLVESCVGAILLDSGFNLNKVWKIMTSFLDSIMKFSSSLQLSPVRDLRELCQSHNMELEFLPVPSKLTKRFSVEAKVSGNGVCETASATGQNKKEACRIASLLLFSKFKAQGWKAKSKTLEEVLESTSKMEPKLIGYDETPIDVTDTNKHIVVNADPYNKSNPEIRPMQETDEICSPCVKPFGQRLQSSAKGKLSQIFENRDCSSDLSGTGTARSRLYELCASYCWKPPSFECCKAEGPDHLKQFTCKVTLEIEEAQNLILEFVGEPLSKKKDAAESAAEGAFWYLQHEGYLPSSGN

SEQ ID NO: 271731 - protein, 67 aa, Glycine max
  Clone ID: PAT_MRT3847_87392C.1.pep
HDNCCAICQLPILGKKPSCCRYHNAPSAALSGASFFFDRGSPTNSKIKFWASSISKVTLQVNLKMEQ

SEQ ID NO: 271732 - protein, 65 aa, Glycine max
  Clone ID: PAT_MRT3847_87393C.1.pep
PIEGANLLPTQWSLCVSFSSFAMFFEGTYFTSVEIINRCISEWNGCIHHSHLKQPVQIATVPSRF

SEQ ID NO: 271733 - protein, 59 aa, Glycine max
  Clone ID: PAT_MRT3847_87394C.1.pep
YKNHSIFIDSVSLLILNIVSYFLYKGTARSRLYELCASYCWKPPSFECCKAEGPDHLKQ

SEQ ID NO: 271734 - protein, 58 aa, Glycine max
  Clone ID: PAT_MRT3847_87395C.1.pep
VYKNLNLRGFNTVFCVLSHFSVDLLSLSLSEKCVGSRFWRFFFSYPSAPKLLITTTFL

SEQ ID NO: 271735 - protein, 260 aa, Glycine max
  Clone ID: PAT_MRT3847_87396C.1.pep
FINGIQCACKAGDLPRMPRACQLARVTPAVQEPAVLSALGGRAEHLAQWSYSVAFLELSFIPLVRLRSFCKSTKVERFRKEMRQLIRQIEASSDYVNGKRLSISFFPNDPAAASFLEDEKKSASSALSKYVMTLRQRAEQKNNSLMESSVLVGEESSKFGNEISESDEEDARKNVDGAVVFSSSWLPGNDSKIKQPTETKRKRKKQRKEKAIDDDVVEDLVLSSDEDVPPSHSPSARKNDDTDDSPPKQKRKQRSTGLKG

SEQ ID NO: 271736 - protein, 368 aa, Glycine max
  Clone ID: PAT_MRT3847_87397C.1.pep
MHALFDLLGRKLTMVAMMNGGMIEDIAIIGGLIGVQFVYAGNAVLLSYLMSVGPRARTLVIFTSFATFLILLPLAFYYERYKWPTRVSFKLLIQLLLLSLGGVTLFQSLFLKGINLTSPAMGTAMPNLAPGLIFIIAWIFRLEKVDLSCTYSRVKIIGTFLCVLGALTMSILQSISTTPITAKEGTIQLLSPPNVTFDRHKIIGCLYLLVAILILSSNIVLQAFTLGDFPAPMSLCAITSFFGTFMTAAVQLVEGPLVKTGWPIVGVGDMIAYSLLAGAVNGICLSVNGWALEKRGPVLISMFSPIGTVCSVIFSVVTLGQTINIGSFAGMFLMFTGLYFVLWAKGKEGFAKGGGLESEYDAEKPLLS

SEQ ID NO: 271737 - protein, 109 aa, Glycine max
  unsure (1)..(109): unsure at all Xaa locations
  Clone ID: PAT_MRT3847_87398C.1.pep
MKPTLLLSLTFLPLFALMALSEDGAQVADITGLPILPGGTYYIMPSTRGAAAGGLKLGRTGNSNCPNTRHARIXAIVRGTAAKLSRPGIRPGTIXTGTALGIEFAEKPV

SEQ ID NO: 271738 - protein, 129 aa, Glycine max
  unsure (1)..(129): unsure at all Xaa locations
  Clone ID: PAT_MRT3847_87399C.1.pep
WASDPPTEPDWPLGIFTYCQERFGDMIVPNISVPITASLLELRNVGDVMDSPSMLTLAGDNPEAVNHTMGNCVMDXSKTLDGITQLCTQAPCSPINIVGYDPXTDGADANTAEPGRIYHFYAYPRADKA

SEQ ID NO: 271739 - protein, 161 aa, Glycine max
  Clone ID: PAT_MRT3847_8739C.1.pep
DTALSQIVQLVQAAQLAKAPVQKLADHISRVFVPIVVVVALITWLGWFIPGEAGIYPKHWIPKAMDAFELALQFAISVLVVACPCALGLATPTAVMVASGMGASQGVLIKGGDALEKAHKVKIVVFDKTGTLTVGKPEVVSAVLFSEFSMEELCDMTIAVE

SEQ ID NO: 271740 - protein, 34 aa, Glycine max
  Clone ID: PAT_MRT3847_873C.1.pep
VTNYNFLYRPYLSVSFRICIIPWFFFLICGLMTD

SEQ ID NO: 271741 - protein, 80 aa, Glycine max
  Clone ID: PAT_MRT3847_87400C.1.pep
KSYTIFLFHNPRPSYQEASAQAHINLHENLIFPMYHTLEFDLDSTLSMFQSHAIFLASRNYKMSYNRNLEVNCQKGNLVH

SEQ ID NO: 271742 - protein, 55 aa, Glycine max
  Clone ID: PAT_MRT3847_87401C.1.pep
KGNINSCPPILCLQFIELFMIIASHPKTQPSNHLKSGLILECKLVKVLVIWIAIH

SEQ ID NO: 271743 - protein, 162 aa, Glycine max
  unsure (1)..(162): unsure at all Xaa locations
  Clone ID: PAT_MRT3847_87402C.1.pep
FSFLFLFCGFTEAVSKLEEALAVNPKKHDTLWCLGNAHTSXAFLIPDQDEAKVYFDKAAEYFQQAVDEDLSNELYRKSLEVAAKAPELHVEIHKHGFGQQQQQQAAATAGSSTSASTNTQKKKKSSDLKYDIFGWIILAVGIVAWVGFAKSNLPPPPPPPPR

SEQ ID NO: 271744 - protein, 35 aa, Glycine max
  Clone ID: PAT_MRT3847_87403C.1.pep
DLEPYAYAHVCVRVGLTAASPGTGPTCAQLTHSES

SEQ ID NO: 271745 - protein, 202 aa, Glycine max
  Clone ID: PAT_MRT3847_87404C.1.pep
VVRNRSYSVCLVVEGLCDFGNVSATFRSADALGVQSVHVVSCDANKRYKDNRHVSMGAEKWLDIELWNSTKECFKMLKSRGYRIATTHVGMDAVSIHDLDWSCPTAIVVGNENRGISDEALELSDLHCSIPMAGMVDSFNVSVAAGILMHHSVCDRISRMGRHGDLTVEECQILLAEFSLRHSKSSISIVEDYAMGKAATLT

SEQ ID NO: 271746 - protein, 71 aa, Glycine max
  Clone ID: PAT_MRT3847_87405C.1.pep
IAPDIPMLLSCFDLSMRESRMCFHYFLDFCYWYPNQTICHQSSDPRNSTTQLRKRCIEFCPPANWNRNQRR

SEQ ID NO: 271747 - protein, 220 aa, Glycine max
  Clone ID: PAT_MRT3847_87406C.1.pep
RPTRPRNSLSGEIPGVVEAFHLTDLDLSENKLSGKIPDDLGRLNNLKYLNLYSNQLSGKVPESIARLRALTDFVVFINNLSGTLPLDFGLFSKLETFQVASNSFTGRLPENLCYHGSLVGLTAYDNNLSGELPESLGSCSSLQILRVENNNLSGNIPSGLWTSMNLTKIMINENKFTGQLAERFHCDLSVLCISYNQVSGIIPLGVTYLKNVVILNARNN

SEQ ID NO: 271748 - protein, 68 aa, Glycine max
  Clone ID: PAT_MRT3847_87407C.1.pep
LELRPFIDTIDQLNSHDPTGALWLTRAHIYSLSISISMCSQGWFKIDYASSTVLRGDTKRTVFPLPLY

SEQ ID NO: 271749 - protein, 61 aa, Glycine max
  Clone ID: PAT_MRT3847_87408C.1.pep
IWSPGGRAITDGHTNSFEDCARYYPAHPYSMTIILCADPGGPSMYRETCEGIPQYIEMPSL

SEQ ID NO: 271750 - protein, 34 aa, Glycine max
  Clone ID: PAT_MRT3847_87409C.1.pep
RTNANKGKEGGGYEFTDEGLNAVWPSALSRLPSA

SEQ ID NO: 271751 - protein, 44 aa, Glycine max
  Clone ID: PAT_MRT3847_8740C.1.pep
IFEPFTALAELKVYNIPEICDRTQESILGVTINSSYMMGPNSFF

SEQ ID NO: 271752 - protein, 76 aa, Glycine max
  unsure (1)..(76): unsure at all Xaa locations
  Clone ID: PAT_MRT3847_87410C.1.pep
DPRVXSSINYSSVYCKTTXQXKKPPFYPSHYLNSTFLYIYSILKFQLLHYPSLNYFDYPSHFFYLILYYISSLIKL

SEQ ID NO: 271753 - protein, 120 aa, Glycine max
  Clone ID: PAT_MRT3847_87411C.1.pep
ICLIAVALCGFASGLLYRYDASFIFLILALVIAAGASAALVFRQGYADAPGFSCPGVPLLPNICIFFNMFLFAQLHHEAWVRFVILCVVMVGVYAIYGQYHANPSAEENVYQRAPEEEAL

SEQ ID NO: 271754 - protein, 81 aa, Glycine max
  Clone ID: PAT_MRT3847_87412C.1.pep
MERKMLKGDEYLERNAKRILRNVKDFAFVQHTVYLLVIIKPLCGKILEKQSPLVTPLKHLQLEGRMLTTVDTLRISNQVNC

SEQ ID NO: 271755 - protein, 66 aa, Glycine max
  Clone ID: PAT_MRT3847_87413C.1.pep
ETILTVMFFLIALTEMFTFSFFIDGKLKGEIIRYNLGYTNQKNIKIRIPVHWTTDNRDVQNTNIIS

SEQ ID NO: 271756 - protein, 56 aa, Glycine max
  Clone ID: PAT_MRT3847_87414C.1.pep
LLLICDHMRREKRERKQTLLAPHDQQIVSTLIQRNSIGSLKSEGSFSYHGRRNIVT

SEQ ID NO: 271757 - protein, 32 aa, Glycine max
  Clone ID: PAT_MRT3847_87415C.1.pep
PLYSFCFLFFLFCFLFLVFFVYITFEYISLIF

SEQ ID NO: 271758 - protein, 57 aa, Glycine max
  Clone ID: PAT_MRT3847_87416C.1.pep
PRVRRLRETTEGYGCEKTTEGGLEFFIKEYIVKTNKDLTQKFKLAKRALNNVEGILT

SEQ ID NO: 271759 - protein, 340 aa, Glycine max
  Clone ID: PAT_MRT3847_87417C.1.pep
AKQSSCPWGPGLSQSSPFASCPSGSRASSSASHILVYDRKSQRLVEEIIDKKIVLSMRAIYQSKIGLGLMDIGVKELLQSISEKQGARMDSPESSADIPKFIESFKDQINLAEVKYPLEHFKTFNEFFIRELKPGSRPLASAERNDVAVCAADCRLTAFKSVDDSTRFWIKGRKFSVQGLLGKEMCSSAFVDGPMVIFRLAPQDYHRFHFPVSGIIEQSVDIPGCLYTVNPIAVNSKYCNVFTENKRVVSIVSTVDFGKVAFVAIGATMVGSITFTKKKGDYVKKGDEFGYFSFGGSTVICVFEENSIAIDEDLLANSARSLETLVSVGMRLGVSTRKLS

SEQ ID NO: 271760 - protein, 82 aa, Glycine max
  Clone ID: PAT_MRT3847_87418C.1.pep
MEARMRKYRQVSPERAKVWTEKPPKYHQNRKVPVLYYLCRNRQLEHPHFMEVQLSSPNGLYLRDVIDRLNALRGRGMASLYS

SEQ ID NO: 271761 - protein, 109 aa, Glycine max
  unsure (1)..(109): unsure at all Xaa locations
  Clone ID: PAT_MRT3847_87419C.1.pep
MEARMRKYRQVSPERAKVWTEKPPKYHQNRKVPVLYYLCRNRQLEHPHFMEVQLSSPNGLYLRDVIDRLNALRGRGMASLYSXWSCKRSYKNGFVWHDLCEDDIILPAH

SEQ ID NO: 271762 - protein, 62 aa, Glycine max
  Clone ID: PAT_MRT3847_8741C.1.pep
ITEIETTKTNHQSNNEKTIVKWLWNQQKPAAQLDSHHQYQPLIPLPTRFQHKGQQQSATVIG

SEQ ID NO: 271763 - protein, 203 aa, Glycine max
  unsure (1)..(203): unsure at all Xaa locations
  Clone ID: PAT_MRT3847_87420C.1.pep
MAASSRGFSTTQFDFKLRVTRLNAALLPKSPVLELGPRKRRKLCFDADRVRLGNGAIRCCCSDSVTPIRRTSGPGKGGDKNEERRFDTKKPPHIHRVRVQASPAAMPFASPPSFLKQEKFFPRCTPRNSGPQSRDTPPKRDTGIANEKDWGISLLNENVNESGTNEDGSTWYRQSGGEPGENGYPCTWXTMGGLSHDGPLMEI

SEQ ID NO: 271764 - protein, 87 aa, Glycine max
  Clone ID: PAT_MRT3847_87421C.1.pep
WAQYPKTGNPSNQFSHAHHCLGIKGGQQGYIPQFHTATLTPSTKFKIFHHYVRGPIPFRFSQHTNPLTGSCQEAFLGLTLMGTEPQL

SEQ ID NO: 271765 - protein, 143 aa, Glycine max
  Clone ID: PAT_MRT3847_87422C.1.pep
SSLVVMSKGTQYLQQSYKVSDSFPFKWITKKWREGFYVTAMATSGSRWGVVMSRGAGFSDQVVELDFLYPSEGIHKRWDCGYRITATAATWDQAAFVLSVPRRKPLDETQETLRTSAFPSTHVKEKWAKNLYIASICYGRTVS

SEQ ID NO: 271766 - protein, 799 aa, Glycine max
  unsure (1)..(799): unsure at all Xaa locations
  Clone ID: PAT_MRT3847_87423C.1.pep
DLKDERCRYCVAERARAGQQRNSNNKNNNNSNKSSSSSSIVPWWRERLLRRGLRRRRAAAAAAAAVPESNNINNNNNTNNQQQQPEQVAVVNENVAIAVREEENNRVAEEGVVGGGGAEREGVAEKEMGGCDSGGPSNDKANAAGEDDANAPQVPEKIQVGNSPWYKVERKLGKGGFGQVYVGRRTGGNLNERTGSGAVEVALKLEHRTSKGCTYGPPYEWQVYNTLGGSHGVPQVHYKGLVVMSKGTQYLQQSYKVSDSFPFKWIXQTVEGGLLLDCNGHLILEKMHSSCLVVRDFRIRWLNXIFLYPSEGIHKRWDCGYRITATAATWDQAAFVLSVPRRKPLDETQETLRTSSFXAHMSRRSGQRTSTLLIFLLRGRLPWQGFQNCWSLTLFSQGENKGYLICKKKIVTSPVTQCCCSPLPFQQFLEHDVDLKFDEEPNYAKYISLFDGIVGPNPDIRPINTEGAQKLIRHKRGQFAKEEEDDDQPKKKIRIGLPASQWISVYNARRPMKQRHKRGRLAMEEEDDDQPKKKIRIGLPASQWISVYNARRPMKHRYHYNVSDTRLSQHIEKGNEDGLYISGVASCQNLWALIMDAGTGFTAQVYELSPFFLHKKTCLLHTFQPTYNSPNNEEENGSXLVVMSYDTQYMPQAVNGSSLVVMSKGTQYLQQSYKVSDSFPFKWINKKWREGFYVTSMATSGSRWGVVMSRGAGFSDQVVELDFLYPSEGIHKRWDCGYRITATAATWDQAAFVLSVPRRKPLDETQETLRTSAFPSTHVKEKWAKNLYIASICYGRTVS

SEQ ID NO: 271767 - protein, 80 aa, Glycine max
  unsure (1)..(80): unsure at all Xaa locations
  Clone ID: PAT_MRT3847_87424C.1.pep
QAPQATPSGCVPISGFEGDNMIERSTHHKXSXGXTLLDVLDHISELKRLSDNPLRLPLQDVYKIGGIGAVPVGRVETGVL

SEQ ID NO: 271768 - protein, 35 aa, Glycine max
  Clone ID: PAT_MRT3847_87425C.1.pep
LEFIVLYYTQLMFTAAVFYFYLLSYNTHVTPLLLL

SEQ ID NO: 271769 - protein, 66 aa, Glycine max
  Clone ID: PAT_MRT3847_87426C.1.pep
IDLSSSIPSSCFLPPLCMCLCAVGSTPSFASSETNGCHVSRLLSSFYKLLTSYIEEMKMSQFFLSI

SEQ ID NO: 271770 - protein, 110 aa, Glycine max
  Clone ID: PAT_MRT3847_87427C.1.pep
MYISCILILCFSNSIYISDFSFSLLLIFHFCYSYCFDYFCYIFDNYFYFCTFIYYLLFFFFFFFYSLFFIFCFLLFLFFFFFYFFFYFFVFFFIFFLFFFLYFFFYFFFF

SEQ ID NO: 271771 - protein, 153 aa, Glycine max
  unsure (1)..(153): unsure at all Xaa locations
  Clone ID: PAT_MRT3847_87428C.1.pep
LEVDDKYQYSCENKVNTVHGWISVDAADAPPVGFWMITPTGQFRNAGPIKQDLTSHDGPITLSMFVSTHYAGKEVTMASQEGEIYKKVPGPVFAYVNNASDEDDTLSLWSDAVQQQSXKIRSWPYDFPKSVDFIPPDQRGIVLGRLLVQDRYF

SEQ ID NO: 271772 - protein, 76 aa, Glycine max
  Clone ID: PAT_MRT3847_87429C.1.pep
EIFWAIDKILYTKMVLREANRVKNKQVYSQVELIMWEENLQQQILLLVKYSIFISNLFRLWCLQIRYCMYNEVDRY

SEQ ID NO: 271773 - protein, 281 aa, Glycine max
  unsure (1)..(281): unsure at all Xaa locations
  Clone ID: PAT_MRT3847_8742C.1.pep
MSHFGRSGPPDISDTYSLLVLNITFRTTADDLFPLFDKYGKVVDIFIPKDRRTGESRGFAFVRYKYADEAQKAVERLDGRMVDGREITVQFAKYGPNAERIHKGRIIETSPRSRRSRSRSPRKRHRDDYRDRDYRRRSRSRSYDRYERDRHRGRDKDYRRRSRSRSASLDYKGRGRGRYDDERNSRSRSRSVDSRSPARRSPSPRRSPSPQRSTSPQRSTCPPXSQGATPQRSVAPRKSPRGESPANRNGDGRSPTPRSVSPRGRPHASQSPSPRYSKGYE

SEQ ID NO: 271774 - protein, 213 aa, Glycine max
  unsure (1)..(213): unsure at all Xaa locations
  Clone ID: PAT_MRT3847_87430C.1.pep
MQLHRVSAASKLSLTCFSFALKFVLLYAAEAQLQHRGPDLHWYPGTATWYGDPEGDGSTGGACGYGTMVDVKPFRARVGAVGPLLFMKGEGCGACYKVKCLDKSICSRRAVTVIITDECPGCPSDQTHFDLSGAAFGRMAIAGENGPLRDRGQIPVIYRRTLCKYPGRKIAFHVNEGSTXXWLSLLVEFEDAEGDIGSMHIREAGSTEWLQMN

SEQ ID NO: 271775 - protein, 130 aa, Glycine max
  Clone ID: PAT_MRT3847_87431C.1.pep
QLKEEIAVSVARNDICRLECEVQTLKPSTQIQSFGWFRIRLQPNSQHMDSVLLHLHLHTLPPLSSATHRPLCHPLAASSASFHRSSPPLPRFRFSPLLAANTLTANNISPRSGLYTVGDFMTTERGFTCG

SEQ ID NO: 271776 - protein, 114 aa, Glycine max
  Clone ID: PAT_MRT3847_87432C.1.pep
FILWVSHTHMMDANLATIIILTFSVLWLITVNGINSCASHAAYSYLNVIPIYNKCSSFNAPKSNTSWEITLIYIASLYHSDPYTCPTYWAKITISQYHTLSTRSSTSLSTSSRS

SEQ ID NO: 271777 - protein, 316 aa, Glycine max
  unsure (1)..(316): unsure at all Xaa locations
  Clone ID: PAT_MRT3847_87433C.1.pep
FFISGLAGDDIILNRVLEALYRRILQAHKDQKDFRVIIVMPLLPGFQGGLDDGGAATVRALTHWQYRTISRENHSILDNLEAILGPKTQDYISFYGLRSHGRLYENGPVATSQVYVHSKLMIIDDRIAFIGSSNINDRSLLGLRDSEIGVLIEDKEYVDSLMNGKPWKAGKFSYSLRCSLWSEHLGLHAGEISKISDPVADTTYKDLWSATAKENTRIYXEVFACIPNNQIHSRAALRQSMVHWKEKLGHTTIDMGIAPDKLVCHENGEIKIIDPIDRLKSVKGHLVSFPLEFMREEDLRPAVIESEFYVAPQVYH

SEQ ID NO: 271778 - protein, 63 aa, Glycine max
  Clone ID: PAT_MRT3847_87434C.1.pep
MKFMKLGTRPDTFYSEQATRSLVSDIPADLVIKIYDTTYLLHKSSLLPKCGLLQRLCSNSNGS

SEQ ID NO: 271779 - protein, 63 aa, Glycine max
  Clone ID: PAT_MRT3847_87435C.1.pep
PIHMHNRRYYVITAARACTADALFFASPLCRFLPFRFFMHRIDHENNNSHASTYGENRKGPPM

SEQ ID NO: 271780 - protein, 42 aa, Glycine max
  Clone ID: PAT_MRT3847_87436C.1.pep
SPGRPSTRSNLIKSPTAKTQLANSQYTLNLKQRVTSNLPQGD

SEQ ID NO: 271781 - protein, 102 aa, Glycine max
  Clone ID: PAT_MRT3847_87437C.1.pep
FLNLTPAIMLFVSLDTWFSFHRSDGSIFFLFSFSYSFLPVFPCLPLFFSSAQHSFSPPQTTSGHLPEFFLLSQHRSNDSHRNTKEKTQRRNHSSMIQLNVIK

SEQ ID NO: 271782 - protein, 77 aa, Glycine max
  Clone ID: PAT_MRT3847_87438C.1.pep
RNNKSWKDELEVKLLRSRQEDPNLVHKLHTKKIIDLLLSRTKIFISSPSFSKVFRKTPVTPHFKKKYRGNIHNTSHH

SEQ ID NO: 271783 - protein, 66 aa, Glycine max
  Clone ID: PAT_MRT3847_87439C.1.pep
NLYVFHHSSFLSVTDTWKFLNIEFNEIQGYIQSNATSVKLFKKSKRKKNYKFNLAGQKNGTKILEK

SEQ ID NO: 271784 - protein, 104 aa, Glycine max
  Clone ID: PAT_MRT3847_8743C.1.pep
DSTKTNHQSNNEKTIVKWLWNQQKPAAQLDSHHQYQPLIPLPTRFQHKGQQQSATVNWLVLQIIHEHMHFILKMHQLPPHSYSVMEQCATTNIFTTLVQMYNLE

SEQ ID NO: 271785 - protein, 106 aa, Glycine max
  unsure (1)..(106): unsure at all Xaa locations
  Clone ID: PAT_MRT3847_87440C.1.pep
MSLNLTANAIPAIIGGDVNAKPLVQVLDVALVSNSNNSQQQQQRYRLLLSDAVFSHHAMLATQVNDRVXTGRVQKGSVVQLLDYICTPLKNRKIIVIXNMETIMDE

SEQ ID NO: 271786 - protein, 54 aa, Glycine max
  Clone ID: PAT_MRT3847_87441C.1.pep
HYHPLPDYYLRHPLALRQMERGIYAIHYDAFSLMTTRKGDNYSSYSHWAIFLTP

SEQ ID NO: 271787 - protein, 62 aa, Glycine max
  unsure (1)..(62): unsure at all Xaa locations
  Clone ID: PAT_MRT3847_87442C.1.pep
APGPLLPFHFLCLCSIYDPSISLSVPHHTTPTQSGPHKQNAVISGRXLRINPRKAHHGAVPP

SEQ ID NO: 271788 - protein, 61 aa, Glycine max
  Clone ID: PAT_MRT3847_87443C.1.pep
LPQHESFSYEFSAEKFEITPGHGQVSASGMCSVCRSSCVTCWMLSDSRADTQETRISVVRP

SEQ ID NO: 271789 - protein, 58 aa, Glycine max
  unsure (1)..(58): unsure at all Xaa locations
  Clone ID: PAT_MRT3847_87444C.1.pep
LIYVMRLTPHYYXCCFEFKFLLLYETTMAEYLKPLLCLVLTLAVEYGXVKQMLDPALV

SEQ ID NO: 271790 - protein, 134 aa, Glycine max
  unsure (1)..(134): unsure at all Xaa locations
  Clone ID: PAT_MRT3847_87445C.1.pep
MGSDVLTELNTGPRAKGGKNLXGFSPTIMAVKGLSLPAALGTEKEKDTTRTILQCDQCNNADMSEEYTEAKRIRITAYREDDLHTCIWYTVCASTENGNKNLDAAYXEAQSKPDRTRVFLXYVDNTSGTLVELA

SEQ ID NO: 271791 - protein, 64 aa, Glycine max
  Clone ID: PAT_MRT3847_87446C.1.pep
CCDATQNRCCCCTPGKPPAYFGLHGLWPYYKHGLYLCNCDSNNRSQASQIFHLTFSLQRNWPTL

SEQ ID NO: 271792 - protein, 79 aa, Glycine max
  unsure (1)..(79): unsure at all Xaa locations
  Clone ID: PAT_MRT3847_87447C.1.pep
PCLCLAYGHGVLRQTDPKYTCGREFAFKHSANDPYFQLRSKTKDGDASVFTKLGKVKNPLPNVDAHSXMLLNLYGLTLE

SEQ ID NO: 271793 - protein, 71 aa, Glycine max
  Clone ID: PAT_MRT3847_87448C.1.pep
GGVIFSPQKKGGIQKPHFKTRAWVFFSFLGKKPKGRGFLNKKKSFFAQIIFPKGKFFFPKLLKTQVLFKVF

SEQ ID NO: 271794 - protein, 81 aa, Glycine max
  Clone ID: PAT_MRT3847_87449C.1.pep
CGVAPPLGPPGFSHLIFGFFFFVYFFENQFFPQKQPFSLVSPIFFLPLNRKNGSPPGTGPEFMGGARGVPPVRVDFFWAHN

SEQ ID NO: 271795 - protein, 180 aa, Glycine max
  Clone ID: PAT_MRT3847_8744C.1.pep
SRVDPRVRPNAERIHKGRIIETSPRSRRSRSRSPRKRHRDDYKDRDYRRRSRSRSYDRYERDRHRGRDKDYRRRSRSRSASLDYKGRGRGRYDDERNSRSRSRSVDSGSPARRSPSPRRSPSPQRSTSPQRSPSPRKSPRGESPANRSRDGRSPTPRSVSPRGRPDASRSPSPRNSNGDE

SEQ ID NO: 271796 - protein, 246 aa, Glycine max
  Clone ID: PAT_MRT3847_87450C.1.pep
AFGLCFHLCAIFSLIFRFQNFWLLFVLQTPSYRKLWGPVKRLESLYPDSNPRGYYADPVSETNGFIFVRIQGGFHEIRNSICDVVVVARLLNATLAMPEIQSTTSSKGISSQFKSFAYLYNEEQFVLSLAKDVTVVRTLPKDLKGARRKKEIPVFKVPYSASPFYYFHHVLPVLKKHSVVELVVSEGGCLKATLPPNFEAHQRLRCRDSFHALQFRQEVQELSAKILQRLRAPGRPFIAFDPGMTR

SEQ ID NO: 271797 - protein, 116 aa, Glycine max
  unsure (1)..(116): unsure at all Xaa locations
  Clone ID: PAT_MRT3847_87451C.1.pep
KSLMSLTQIQLNNLSXANNSGKSYILLTDLSSDKFPTWSILLIGSLQSLISYXIHWLRDSHRIQPLRYWHMIVLLIIDGNITTWMNTVVLLTCIRIFRRNRGPVFDILKSFVGFST

SEQ ID NO: 271798 - protein, 422 aa, Glycine max
  Clone ID: PAT_MRT3847_87452C.1.pep
KGVRKQLICLLLSNAIWFIIEAGIPHLKWFGVEGDYNVMAIDLLGPSLEDLFNYCNRKLTLKTVLMLADQLINRVEYMHSRGFLHRDIKPDNFLMGLGRKANQVYIIDYGLAKKYRDLQTHRHIPYRENKNLTGTARYASVNTHLGIEQSRRDDLESLGYVLMYFLRGSLPWQGLKAGTKKQKYDKISEKKMSTSIEVLCKSYPSEFVSYFNYCRTLRFEDKPDYSYLKRLFRDLFIREGYQFDYVFDWTILKYPQIGGSSSRGRHESGKAAMHAGPSVQKPEKVSVGKEIREKFSGAVEAFSRRNPTSPSPRGDHSKHRSFEEVAVHKDVYRDQEKGRNSSRYGSSSRRPIISSSTRPSSSGDHTDSRTGRLTSSGNRSSASHRNIQPMYETKQPTYMRSGSTRGNRDDPLRSFELLSIRK

SEQ ID NO: 271799 - protein, 52 aa, Glycine max
  Clone ID: PAT_MRT3847_87453C.1.pep
LKHLRSLTSMPPLWIWKNSDQPLQSLTFCTYSRKVGHYKLPDVESLTLSSDK

SEQ ID NO: 271800 - protein, 64 aa, Glycine max
  Clone ID: PAT_MRT3847_87454C.1.pep
SISMLVEPHTRVILTHTTWLYKYVCHTILLQLHMDATHKIITHSSLRTFQGSHKIKCFRAFLIH

SEQ ID NO: 271801 - protein, 65 aa, Glycine max
  Clone ID: PAT_MRT3847_87455C.1.pep
RGLRTLHPYIKQHGAISPVDYLTSPLHNIWTQFLQPALWTLFAVTFNLRVHLYLDWSSELLSAIP

SEQ ID NO: 271802 - protein, 91 aa, Glycine max
  Clone ID: PAT_MRT3847_87456C.1.pep
MSSRRSRQQSASTRISDDQIIDLVSKLRQLVPEIRDRRSDKVSASKVLQETCNYIRSLHREVDDLSERLSQLLATIDADSPEAAIIRSLIN

SEQ ID NO: 271803 - protein, 196 aa, Glycine max
  Clone ID: PAT_MRT3847_87457C.1.pep
MDESEQYPKEYYPNDQTLPRRVSSSSSSSTTSVHVTALDGLVNVNSLFTIAVFVGLSLTTPGQRSLENRSSCDADVDVAKKLLVFEVVSVSFFLFSSLVAQGLKLALNLLNSKDADEAFRAHINLRALRLGMLGSAIGSVMGCLFLVLSMVNVIEIRLGMLSCGSKAPAHAVAAMVVLVSSALVLYISTAIYAFTP

SEQ ID NO: 271804 - protein, 119 aa, Glycine max
  Clone ID: PAT_MRT3847_87458C.1.pep
DSGVIFSTPDFTGDWCKAIGSLVRGAVASSSFDDFHKRSADIIHSAVFGKGQDKLIFSGNNLVVTNIDVQSVEPVDQRTLDSLQKSVQLAIEITTKSQEAAARQEAERLEQEARGRLER

SEQ ID NO: 271805 - protein, 109 aa, Glycine max
  Clone ID: PAT_MRT3847_87459C.1.pep
HRSEQYPKEYYPNDQTLPRRVSSSSSSSTTSVHVTALDGLVNVNSLFTIAVFVGLSLTTPGQRSLENRSSCDADVDVAKRLLVFEVVSFSFFLFSALEAQGLKLALNLL

SEQ ID NO: 271806 - protein, 63 aa, Glycine max
  Clone ID: PAT_MRT3847_8745C.1.pep
NISIFINLSLLNSYPPKGVMGHTMTPPTHISRNRRPPLNQNSNSPVAFLKRMALLFMCLMPSF

SEQ ID NO: 271807 - protein, 109 aa, Glycine max
  unsure (1)..(109): unsure at all Xaa locations
  Clone ID: PAT_MRT3847_87460C.1.pep
MKMKVLVVFVAGIVVAWQCQAYEMFPLRFNTGYGARTPEVTCAGWRLAVEPHIIFGFDTIPEDCVEASHEYIHDEQYRXDSISVKQEAXFYARDLEIHPKDPFVYSIDG

SEQ ID NO: 271808 - protein, 70 aa, Glycine max
  Clone ID: PAT_MRT3847_87461C.1.pep
FLFIFWPLTKIYSDKKVSGSFHFIAIGYSIPKFSIGENIKSTLLCYCCCCCYCVVGSTVVNYPTTIFTYS

SEQ ID NO: 271809 - protein, 176 aa, Glycine max
  unsure (1)..(176): unsure at all Xaa locations
  Clone ID: PAT_MRT3847_87462C.1.pep
MILCGCSIAYSLCDSDAISSSGDWNTYTRXIYTNCAAQTDWYVMTYLKKPVESAHCGXVIVDFMLHGLGSSYVRPXMQSNASFYSYWANCASSDSTATQATTCFFYSSLTSSALYDELMLTDLVTCKGHEYYXHSIKESYGTKIPSPYIYVQALDTFYIGQNDLLPRLLPLVVLME

SEQ ID NO: 271810 - protein, 199 aa, Glycine max
  Clone ID: PAT_MRT3847_87463C.1.pep
MMAEDLGVEAKEAAVREVAKLLPLPELLQSISSIKADYISRQQANDAQLSTMVAEQVEQSQAGLKSLSFSERTINQLRENFVSIENLCQECQTLIDNHDQIKILSNARNNLNTTLKDVEGMMSISDEAAEARDSLSDDKEIVNTYERLTALDGKRRFALAAAGSHKEEIGRLREYFEDVDRTWETFEKHYGATFSNFYK

SEQ ID NO: 271811 - protein, 90 aa, Glycine max
  unsure (1)..(90): unsure at all Xaa locations
  Clone ID: PAT_MRT3847_87464C.1.pep
IRIFSLYFRIFTRHIITKTSNPLSSLLLNSNLXSYLHIIFSHIPXPISTLTKXSPSPSLXYSXLXSFIXYHYIYKFNIYXXNYLIYNNNV

SEQ ID NO: 271812 - protein, 63 aa, Glycine max
  Clone ID: PAT_MRT3847_87465C.1.pep
YPQSTRRVPSFLTAASALATELTHSSLPLPYTTHSLFSTSMTIPLCKPRPDHSPVLLLSSAVR

SEQ ID NO: 271813 - protein, 151 aa, Glycine max
  unsure (1)..(151): unsure at all Xaa locations
  Clone ID: PAT_MRT3847_87466C.1.pep
HHSSSESSSLIAMAAALECWSRRATTTDHEDHALLMQRPEQDTTPRDSSSSSSSSLVHKKLQKLTRNVSEAIASLKNFLNSTINVESCILDGPRRLVWTTVXRNLTHLYPGSQLPEKLICNIRKHYHSLPLSYSHAEIDVKDVCLHMKLME

SEQ ID NO: 271814 - protein, 98 aa, Glycine max
  Clone ID: PAT_MRT3847_87467C.1.pep
WEKKKAGKIGVPHKHWEVNVPGPQKAGPMLIGQVNKVLGVGQIPPLLFFFFFWIWGNCFCFKSRFYGLDPLWGGLPPGLFFSVKRGGPQMVGPLRDRG

SEQ ID NO: 271815 - protein, 65 aa, Glycine max
  Clone ID: PAT_MRT3847_87468C.1.pep
EKVPCFYFCSALGSQGCQKNPSFKEGGIPPLVGFFQNPFVLVKVKAETLLGFFRESKHEASCSRP

SEQ ID NO: 271816 - protein, 60 aa, Glycine max
  Clone ID: PAT_MRT3847_87469C.1.pep
GSEKKKNTPSSWTRASSLDSSLTPSSSTQASSTRAFHHMHTLDCSEHFSSLFISSLYLFI

SEQ ID NO: 271817 - protein, 170 aa, Glycine max
  Clone ID: PAT_MRT3847_8746C.1.pep
LRCVFVQVSISFAKILIQSIRPGIEVLGRVPRTEAFCDVSQYPMATSTPGMLVIRISSGSLCFANANFVRERILKWVAEEENELAKGRVQAVILDMSNLMNVDTSGILILEELHKRLLSRGVQLAMVNPRWLVIHKLKVAHFVDKIGRQWVFLTVAEAVDACLSSKFPDP

SEQ ID NO: 271818 - protein, 147 aa, Glycine max
  Clone ID: PAT_MRT3847_87470C.1.pep
CQCTHHNCRLWEKRGMLMLMPIKRSAYTYDPLASETCLVWSGTNSLLFGVPMATTTCGSTSLLLAATSSCCESDMTTTSSLVVLVSTAKPPLMLVVLFIIGARGRFPSNISCSSSIFFLIPLLLLGWVVSEKVHGAIEIATPLQNKT

SEQ ID NO: 271819 - protein, 46 aa, Glycine max
  Clone ID: PAT_MRT3847_87471C.1.pep
FTHDKIFLPFHYNGGKQKWKEKFPGKCVQETTLLHILRASLNQPLR

SEQ ID NO: 271820 - protein, 99 aa, Glycine max
  Clone ID: PAT_MRT3847_87472C.1.pep
APHPLGGRRPWVGGPHLDYAGSKGKPPGLSQLEAFFSTRNKIVQCSLGGGGEKVGGGVGGLGPLGGVEGSLPPEKKIKSRGNLGHGVLGWLRGVPPQLK

SEQ ID NO: 271821 - protein, 131 aa, Glycine max
  unsure (1)..(131): unsure at all Xaa locations
  Clone ID: PAT_MRT3847_87473C.1.pep
ISVRRFPAELSLSSLICXAAPLQSSVVALIADPPPRAWAIGLYFSLYGPXFSGILSSEIXFFKQGLGMHFFGPVFVTSFFPLCIIIVAALGSLLLVFLLYLEKVSFFFIALDLVQKFINNEKLYNQNLNYF

SEQ ID NO: 271822 - protein, 46 aa, Glycine max
  Clone ID: PAT_MRT3847_87474C.1.pep
YLWSWQKGVPLAHSSCDVLLVVSDIIGNTLRSGQVGGMGLINLGHL

SEQ ID NO: 271823 - protein, 86 aa, Glycine max
  Clone ID: PAT_MRT3847_87475C.1.pep
TLRAFFPLFFPWSQFPFATSLKGARPILGLLSQAKMQPTKAPSPCSSSLADQAYLVTSFNDNDQSRSLRIHLFKWMEIWLKEMTLT

SEQ ID NO: 271824 - protein, 542 aa, Glycine max
  unsure (1)..(542): unsure at all Xaa locations
  Clone ID: PAT_MRT3847_87476C.1.pep
FGSRFLYSPDLRKPQQLGGGLESWCGFYQSIRPTQMGLSLNIDMSSMAFIEPLPVIDFVAQILGKDVLSKPLSDADRVKIKKALRGVKVEVTHRGSFRRKYRITGLTSQPTRELNFPVDEKMNMKSVVDYFQEMYGYTIIYSHLPCLQVGSQKKVNYLPMEACKIVGGQRYTKGLNEKQITSLLKVSCQRPREQETDILQTIHQNDYEYNPYAKEFGISIDSKLASVEARVLPAPXLKYHETGREKEYLPQVGPMDMMNKKGINGSNVNHRYCIELCGSSQACTSFEPCLQFDHKCIFSGMEFSQDPVIPIYSAKPDLVKKALKYVHSAVLDKLGGKELELLIAILPDNNGSLYGDLKRICETDLGLISQCXKPVFNPEINRQYLANVALKIVVQTANVKMGGRNTVLLDALSWRIPLVSDIPTIIFGADVTHPESGEDPCPSIAAVVASQDWPEVTKYARLVCAQPHREELIQDLFKCWKDPHHGIVYGGMIRELLLSFKKATGQKPLRIIFYRDXXVSEGQFYQXLLYELDAIRRACASL

SEQ ID NO: 271825 - protein, 84 aa, Glycine max
  Clone ID: PAT_MRT3847_87477C.1.pep
CFRQAIYIGFIDHVISAGLESHIKTPFLFRGVSLYLFIPHGQLSEPRFFMLGCRQVFMVACFVHQAFTRKRDPINVRKRFSFYI

SEQ ID NO: 271826 - protein, 120 aa, Glycine max
  unsure (1)..(120): unsure at all Xaa locations
  Clone ID: PAT_MRT3847_87478C.1.pep
XRNXXXPXXGPXXNXXKPPSXQKXXXXGLHDTXRTXXXHXXTXXAXAXSXXXXXXQHSTQXQXRXXXXQRQGQQQXXXDXTEXXXXAXXXXXXXDXXXXQXXGXXXXQSXXXXXXXXXXN

SEQ ID NO: 271827 - protein, 343 aa, Glycine max
  unsure (1)..(343): unsure at all Xaa locations
  Clone ID: PAT_MRT3847_87479C.1.pep
MSSSAFIPNTISLSLFLSASFNSMASKEIARELPPLLRVYNDGTVERFLGSPHVPPSLLDPETLVSSKDIVISENPSISARXYLPPKLNNSHQQKLPIFVYFHGGAFCLESAFSFLHHRYLNLIASEAKVLVVSVEYRLAPENPLPAAYEDSWEALKWVTSHFNSNKSEXWLVEHGDFNRFYKGGDTAGANVAHNAVLRXGVESEHLWGVKIAGVVLAFPLFWSSEPVLSEMVEGFEESSAMQVWKFVYPDAPGGIDNPLINPLASGAPSLASLGCHKVLIFVAGKDDLRDRGIWYYDAVKKSGWEGDVELVRVEGEEHCFQIYHPETENSKGVISRIASFLV

SEQ ID NO: 271828 - protein, 154 aa, Glycine max
  Clone ID: PAT_MRT3847_8747C.1.pep
MFSAYSFSPFSPKHNRFSFFFSFLCFQKRKKLGGNSPCASCKLLRRRCTKDCTFAPYFPSDDPQKFAIVHKVFGANNVSNRLQALFPYRIQVPALHVQHAVAPAGLLCFLIDLGPVVPAASGIQLGLSSCVLQNDLSQFLGFDTSSNVMQQFCP

SEQ ID NO: 271829 - protein, 330 aa, Glycine max
  Clone ID: PAT_MRT3847_87480C.1.pep
TIKCCQLLPLLSFQVADSRIPLRNFYGLSLPQTHNCSKGKESNNRARYNSNLNQNHRHLLFLQFFPDSDTEDSNNQNPRTRNHCQHQVDEQREFKENKEARLLFSNMWWVDVKAALGQRINLEGILCSTMVILKDPKLAMPHISVPDIRYVDWAELRRKGFKGVVFDKDNTITAPYSLKSWPPLESSLECCKSEFGHDIAVFSNSAGLHEYDHDGSKARMLEGAIGIKVIRHRVKKPAGTAEEIEKHFGCEASQLIMVGDRPFTDIVYGNRNGFLTILTEPLSLAEEPFIVKQVRKLETSFVSFWSRRGLDPLSQKLLSDPKPCVKEPYH

SEQ ID NO: 271830 - protein, 66 aa, Glycine max
  Clone ID: PAT_MRT3847_87481C.1.pep
KLCVDLLVWCCLIAKDMGEFYSKKTLHIQNKINQLTKSSLSTHSPATRRFSCVNSSTMLLMLWMGV

SEQ ID NO: 271831 - protein, 82 aa, Glycine max
  Clone ID: PAT_MRT3847_87482C.1.pep
INYKMLSTTAAAQLPSCWYLIPSHLNVHHHAQQKRKLTTLSLANADSRIPLRNFYGPKSSSNPLIAAKGKKAINRARLPFQF

SEQ ID NO: 271832 - protein, 57 aa, Glycine max
  Clone ID: PAT_MRT3847_87483C.1.pep
AFPPGSSSREAPFLERKPLHGILNIFKDQNVSPLPVLVLLWRLLKLNSFICSPVGHH

SEQ ID NO: 271833 - protein, 65 aa, Glycine max
  Clone ID: PAT_MRT3847_87484C.1.pep
IFLDGLEDYPNTICWLNLYFRISHFLLLVLFVSCVSGFIWVCLINFSVDCVDARLNDLMESKGGK

SEQ ID NO: 271834 - protein, 200 aa, Glycine max
  unsure (1)..(200): unsure at all Xaa locations
  Clone ID: PAT_MRT3847_87485C.1.pep
MDLEEKFLAKVSGVQSLSSSVQSTPDKNGHSDGASKSSELLQQFLKCGPKKELLQLCFDKDKKSISSKGRMSETKSTSKITKKQDTKKVSSFSHQPPRKQPRKGENPTRIIPPLDQSSDFGHSNTWICKNAACRAVLSMDDTFCRRCSCCICHLFDDNKDPSLWLVCTSESAQGDSXXGLSCHIKCALHMXRWGVXIMGN

SEQ ID NO: 271835 - protein, 103 aa, Glycine max
  unsure (1)..(103): unsure at all Xaa locations
  Clone ID: PAT_MRT3847_87486C.1.pep
SHCHVHQEGGVQKLALCTSIAIILCCNSYLLGMCPVCECCCLIRACVXSVCVLLLLCSSGRCPLSGACSCLGLLSCVSLFRFAGSLVFIVPLPLVLGLVGNQI

SEQ ID NO: 271836 - protein, 434 aa, Glycine max
  unsure (1)..(434): unsure at all Xaa locations
  Clone ID: PAT_MRT3847_87487C.1.pep
NVVQRRNFFKCVLTRTIKHFFKKQNDLKISQPVRSLRNKRQKKFLVSAISPLESNLGKGENPTRLIPPPDQSSDFGHSNTWICKNAACSGXVLSMDDTFCRRCSCCICHLFDDNKDPSLWLVCTSESAQGGDSCGLSCHIECALQHEKVGVIDHGQLMQLDGGYCCASCGKVTGILGCWKKQLNIAKDARRVDVLCYRIYLSYRLLDGTSKFKDLHQTVQEAKAKLETEVGPVNGVSSKMARGIVSRLHIASDIQKLCSLAIEKADSWLATVPNVNSDSTEGSFPAACKFVFEEVTTSSAKIILIEMSSICSEEIKGYKLWYYKSWDESPTKDPVSVFPKSQRRILISNLKPCTEYTFRIISYTDTRDLGHSEAKCFTKSIEIIKNNPSSSVAMNNEKENLLTRGNSSASKIGPNATMEGYGFKVRDLGKFLRL

SEQ ID NO: 271837 - protein, 137 aa, Glycine max
  Clone ID: PAT_MRT3847_87488C.1.pep
DSANPDSTPTPPSLKRKYNDDHRPTGFSDGPDPGGPPPPSYNNVPPPCCGGGDFELAKQRAQEGAARLLSGAGALDPTKRPKHDNNGCSFDSIDVKGAYSGPGISPAAGAYSYQGGGASNKIDIPNGRGGGFIGKGG

SEQ ID NO: 271838 - protein, 80 aa, Glycine max
  Clone ID: PAT_MRT3847_87489C.1.pep
EYFQRFFLCFCFLFRTASMIVYTSQTITRYGKDKLEVTSCRNYKVDLIIKKKNRGQEFKFFLINILTRLMINICLDKKKK

SEQ ID NO: 271839 - protein, 215 aa, Glycine max
  Clone ID: PAT_MRT3847_8748C.1.pep
MSAFPNGSNSSLDNLLLQTMMGRLQLRAPINNPLVTQSLEDFLFNDLGDDDDDGGDNEDSEKAFEGKSELAREEAKLEREVIKIVLSGNGESVLKPNSGQAVSVRDHHICVGFQDEEDSGYRVWEWHGHIMSFDEEFGYNPEYIYGNYFQWFKARPSSVAAVADAVVEKEEEEEEDEEKQENQGLRELIDNKDSADARILHRNINAACPSLTGTR

SEQ ID NO: 271840 - protein, 145 aa, Glycine max
  unsure (1)..(145): unsure at all Xaa locations
  Clone ID: PAT_MRT3847_87490C.1.pep
AHAYGHLYTLLNYILPSDITAEIKYRRNLSNIHIYGLXYDGRYIFLSKHDKNVAVTKEENTEVXRNRGFPADGVAXRAHEFENHGAHESLTDQDTRRDKLYSTQANRFAKIMNLIQSVDGDPKHLTDGKLYQGPHIPVSNISAGE

SEQ ID NO: 271841 - protein, 147 aa, Glycine max
  Clone ID: PAT_MRT3847_87491C.1.pep
MATTKPKTEYVQTFGRKKNALAVATCKPGNGLIRVNGAPIDVLEPSTLRIKVYEPVLLLGAKTFSNLDIRVRVRGGGYTSQVYSIRQAIAKAIVAYHQKYVDENSKRELKERLLQYDRTLLVADPRRCEPKKAGGRGARAKKQKSYR

SEQ ID NO: 271842 - protein, 51 aa, Glycine max
  unsure (1)..(51): unsure at all Xaa locations
  Clone ID: PAT_MRT3847_87492C.1.pep
KGGAQLYVPSXTWLTGSFNLTNHLTLFLERGATIIASQVSFHLSLPRLVPS

SEQ ID NO: 271843 - protein, 86 aa, Glycine max
  Clone ID: PAT_MRT3847_87493C.1.pep
VLQFSLFLPRVGKKVIWWGPGRVLREWPKNWSKVGKFKILGVFVGAWALFRGGMVKNKFFLFLIRRGGILSFEKKEQIPSFFDSRF

SEQ ID NO: 271844 - protein, 85 aa, Glycine max
  Clone ID: PAT_MRT3847_87494C.1.pep
TPLFSLSHFHFHFRLISLSKGVLVSASDAGSLLLDDGTDLVELSLNSEFRHRPWKLGMYVMVVGGYAARPRKLPMIKVHKNCDLS

SEQ ID NO: 271845 - protein, 32 aa, Glycine max
  Clone ID: PAT_MRT3847_87495C.1.pep
VMLLPNQNGTYFGGGEYELPPRIFVDVTYRLL

SEQ ID NO: 271846 - protein, 85 aa, Glycine max
  Clone ID: PAT_MRT3847_87496C.1.pep
MADTSGGDAVRPVVICDNKCGCTVPCTGGSTCRCTSVGMTTGGGDHVTCSCGEYCGCNPCSCPKTAASGTGCRCGTDCSCASCRT

SEQ ID NO: 271847 - protein, 44 aa, Glycine max
  Clone ID: PAT_MRT3847_87497C.1.pep
YSRIKQCHINIFYIYILQHKHNKKYFILNFLQMIFWFRNLMVRI

SEQ ID NO: 271848 - protein, 78 aa, Glycine max
  unsure (1)..(78): unsure at all Xaa locations
  Clone ID: PAT_MRT3847_87498C.1.pep
SVSHHPPVKAIYFRXLFSGWXTHSPNEGRPSLPGVQNVFCTSFLSFKSLYFLFSHCSTGQFINIVVVTFKKKAKKNKP

SEQ ID NO: 271849 - protein, 344 aa, Glycine max
  Clone ID: PAT_MRT3847_87499C.1.pep
METVVSRAVLVLCTPHPTTTHPFTKPNKLLRSSLSRGAASLSATSKWAERLIADFQFLGDAAASTSTSTLSPSSVPPRLDPPERYVSIPLDLYRILGAEPHFLGDGIRRAYEAKFSKPPQYAFSNDALISRRQILQAACETLADPTSRREYNQSLVDDEEAAILTQIPFDKVPGALCVLQEAGETELVLEIGQGLLRERLPKTFKQDVVLAMALAFVDVSRDAMALSPPDFIAACEMLERALKLLQEEGATSLAPDLQAQIDETLEEITPRCVLELLALPLDDEHRARREEGLLGVRNILWAVGGGGAATIARGFTREDFMNEAFLHMTAAEQVELFVATPSTI

SEQ ID NO: 271850 - protein, 87 aa, Glycine max
  Clone ID: PAT_MRT3847_8749C.1.pep
IFMERSHHMLVLVNLFSHISVIIWIPDKDLGNSLQGPCTPHMFSRKKSHKGLNNLVRRQTKTSHLILFPRRAPPLPQKNAKWLLCAL

SEQ ID NO: 271851 - protein, 91 aa, Glycine max
  Clone ID: PAT_MRT3847_874C.1.pep
KTHRFKVSLKKGSQYSHSPQNSLVSLCHRSLNQHYQQTILMVKLSGPNFPLENRLKAACQISDYEFNLFAFEITGTFSFPSDPEHSLMVRN

SEQ ID NO: 271852 - protein, 70 aa, Glycine max
  Clone ID: PAT_MRT3847_87500C.1.pep
SGFGSGLDKCVPGSPAMCLCWVSFVCCFVEGVSLASLVVASLASGWRRLPLLCGNKWYANSNPTPWWLGL

SEQ ID NO: 271853 - protein, 59 aa, Glycine max
  Clone ID: PAT_MRT3847_87501C.1.pep
VLLEPPVPFPCPIRISSLVRRFSSHVTSQNWFPNIRCNSSSQWLWSVSHHYLIFNNFRV

SEQ ID NO: 271854 - protein, 72 aa, Glycine max
  Clone ID: PAT_MRT3847_87502C.1.pep
PTGKDGGLNYLQGWSGGTSPVWVPSDTNRFTPCTVVRKAAEDIVQLQHCSTEKASLLLKLHSFASLNLWNIW

SEQ ID NO: 271855 - protein, 115 aa, Glycine max
  unsure (1)..(115): unsure at all Xaa locations
  Clone ID: PAT_MRT3847_87503C.1.pep
KKKHKQKRIKKKKQIKAYGGYEYNGYXNGQLNVARXALGDXHMRXMKSRDGGPLTADPELMTTKLTADDEFLIIDCDGIWYVFRSQNALDFARLMLHEHNDPSMCSQDLVDEALK

SEQ ID NO: 271856 - protein, 152 aa, Glycine max
  unsure (1)..(152): unsure at all Xaa locations
  Clone ID: PAT_MRT3847_87504C.1.pep
QNGFLQERKRQVKQCLYXVKGSPLDSTWQAIRTLVGDYFMDMTSGSFWFVLWMKLMGAKVDMEHAVYVDSMGALLNPEMVKIERGGCVGREALLFGHVYEGEGGMVKFGEIKIGEYGFAGSRAVAMPGVQIESEGNLSALSLAMKEEIIRSR

SEQ ID NO: 271857 - protein, 68 aa, Glycine max
  unsure (1)..(68): unsure at all Xaa locations
  Clone ID: PAT_MRT3847_87505C.1.pep
VVRXTLIXYXNXXXXNMQIXHLHXHYITIKNXLRFNLFIXCSGXXHGSFXXXISSVLNQQXXPRXFXX

SEQ ID NO: 271858 - protein, 336 aa, Glycine max
  Clone ID: PAT_MRT3847_87506C.1.pep
MSSGATHWCYACRQPIVLDGRDPVCPYCDGGFVQELDELRGIAPNHNHTFSSQSGDFHQMPDIFDAIHAFMGQRGSDQRFGLMDAVDNFMRHRMAGRNSNFDVRGRSGSLPVPEQSWGVYSSGPYLIFHGQVPGFTLSAGSPRGGPRRVDFGDYFMGPGLEELIEQLTMNDQRGPAPAARSSIDAMPTIKITQAHLRSDSHCPVCKEKFELGTEAREMPCNHIYHSDCIVPWLVQHNSCPVCRVELPPQGQASSRGTRSWGGRNASNSSSSGSNDSSRGRENSHQNHGRRNPFSFLWPFRSSNSNNNHYSETGGSSSSTTPDQNNGTSYSGWPFDR

SEQ ID NO: 271859 - protein, 63 aa, Glycine max
  Clone ID: PAT_MRT3847_87507C.1.pep
VGFFYITSEFTGWGTGEYSCLTTTIHLTLKSVNLAFCMVLCRHLNDTARTCCLLGIKRGKPYF

SEQ ID NO: 271860 - protein, 72 aa, Glycine max
  Clone ID: PAT_MRT3847_87508C.1.pep
APPLRDPCSIPHCDAEVHLEECLSVERQSDTMTMLSWVFIIASLFLSLCYGNVYTCTMHDRHSETVRKWSHS

SEQ ID NO: 271861 - protein, 65 aa, Glycine max
  Clone ID: PAT_MRT3847_87509C.1.pep
HSNIILQISPQDPCRKDSPNKVTLFSYNFPKEVSTFSAVLEAFQKPNFLFAYNHHKKKKKKGRPL

SEQ ID NO: 271862 - protein, 78 aa, Glycine max
  Clone ID: PAT_MRT3847_8750C.1.pep
QLVQSALDGYKVCIFAYGQTGSGETYTMMGRPDAPDLKGLIPRSLEQIFEISQSLKDQRWTFKMQASVLEIYNETIRD

SEQ ID NO: 271863 - protein, 73 aa, Glycine max
  unsure (1)..(73): unsure at all Xaa locations
  Clone ID: PAT_MRT3847_87510C.1.pep
NEETXEPTEKXAKXXEAEEPTXEERXXXXXXNKNXXXARRXXXRNXXPXEQKEESRGXEDHXAXXKEXRGKXE

SEQ ID NO: 271864 - protein, 166 aa, Glycine max
  unsure (1)..(166): unsure at all Xaa locations
  Clone ID: PAT_MRT3847_87511C.1.pep
MAINLSSTASLHSKPSFLTHKHNNLIKFYHPFSSLLTTCAQTHGTDTGVTQKDDASAGSLSSSRAQLDLLEQLTSTSSPNSGYESDGSSRKLTIREQLVQLFGERDDDFTIPPSKKREISGXQAYLNEVSQRNDSVFFATIGAFVILPPFIILGIAILTGYVQLFP

SEQ ID NO: 271865 - protein, 42 aa, Glycine max
  Clone ID: PAT_MRT3847_87512C.1.pep
PSHKTFRIKKKLAKKIKQNKPIPYWIHIKTDNTIEYNTKHRH

SEQ ID NO: 271866 - protein, 90 aa, Glycine max
  unsure (1)..(90): unsure at all Xaa locations
  Clone ID: PAT_MRT3847_87513C.1.pep
MTVILLLLGLLSYTGVLSTVALSADASYGRNGNNVPAYQALTDLSKSVRIGDIRXYYADEXALYALRGSILSESLGEPNDQLLSITNAGA

SEQ ID NO: 271867 - protein, 250 aa, Glycine max
  unsure (1)..(250): unsure at all Xaa locations
  Clone ID: PAT_MRT3847_87514C.1.pep
MATLSNPSFLLYLSLIITAMCFAVSQPFIGVNYGQVADNLPAPEASAELLKSTTVGKVRLYGADPAIIKSLANSGIGIVIGAANGDIPSLASDPDSATQWVNANVLPYYPESNITMIAVGNEVMSSGDESLVSQLLPAMQNVQNALNSAPKIKVSTVHSMAVLTHSDPPSSGSFDPALVNTLQQLLAFQKDNESPFAFNPYPFFSYQSDPRPEXLAXCLXQPNRGRXDTGSGEVYSNMFDAQVDAVHAAL

SEQ ID NO: 271868 - protein, 145 aa, Glycine max
  unsure (1)..(145): unsure at all Xaa locations
  Clone ID: PAT_MRT3847_87515C.1.pep
MIKCKKKVHINVDIIVHVIAHEPSTTAHMIFYLVCMHKRVDXRFIKEPAEMTDKTIKYAWALDXLMAKLKAGLTSDIALDIAXTTKYSSTIYDTPVHTPFLRNMITDTITATCTAVSTDLTTDGTDAGFSTDVLTDEHARVHSIL

SEQ ID NO: 271869 - protein, 114 aa, Glycine max
  unsure (1)..(114): unsure at all Xaa locations
  Clone ID: PAT_MRT3847_87516C.1.pep
LTGWAFKVRPTSSPLADGGPYLYAMVHDSSLSTIPGDFRIGVKLTTINNMCAFGLNPGISGSSLLGTISYSISQYTVWNQXMATVRTPLNFDSSKXAFCQFFIDLLGGGIFSGQ

SEQ ID NO: 271870 - protein, 83 aa, Glycine max
  Clone ID: PAT_MRT3847_87517C.1.pep
ESFLKTIEKHILMCLIKKVFHITFLISTLSTVVKIVIIHKQFIKQISDIALSVVIFFPFFFSRFVQVMHTNMGVCYLTFYFLV

SEQ ID NO: 271871 - protein, 54 aa, Glycine max
  Clone ID: PAT_MRT3847_87518C.1.pep
NIIRKDDETKNYIFEGVHYHIADPVGENSKDNGGILRFGQVSGLGVSPSSIFWG

SEQ ID NO: 271872 - protein, 131 aa, Glycine max
  unsure (1)..(131): unsure at all Xaa locations
  Clone ID: PAT_MRT3847_87519C.1.pep
CFAAYERKGVQYRYPNARIKDWDEGIKVTSPCPLLNTQSAQGMDCWTTFCREENSVCPAGNIIPDLNVLVYQNRWREALARLLETYNPPEVTEGACPAPCEGPCVLXLIENTRSIKCIEGASLHNTFEEGM

SEQ ID NO: 271873 - protein, 243 aa, Glycine max
  Clone ID: PAT_MRT3847_8751C.1.pep
MSNTKLSPPMKKAKSIDSKNDDAVLKSPAAASDDPNAPALVAANLSRKKATPPHPPKKLLIKFHKGIPTLPPNFEEDTWAKLKSAIGAIFLKQPVSCDLENLYQAVNDLCLYKMGGNLYQRIEKECEAHISAALQSLVGQSPDLIVFLSLVERCWQDLCDQMLMIRGIALFLDRTYVKQTTNVQSLWDMGLQLFCKYLSLSPEVEHKTVTGLLRMIGSERSGESVDRTLLNHLLKMFTALGIY

SEQ ID NO: 271874 - protein, 96 aa, Glycine max
  Clone ID: PAT_MRT3847_87520C.1.pep
SRWSLHSEPGRLRFLPCSVSTLSIFVAMGVTVMSRLRLSHMVVSTSALRRPLRRRISFLVKSRVQRLANLSPIFYVHKEWKLRQRNEDIITLPGKI

SEQ ID NO: 271875 - protein, 46 aa, Glycine max
  Clone ID: PAT_MRT3847_87521C.1.pep
VDLINKSFKLLFKGFASTSLLIILSLHEKGFIPENKWYNQVTLVSN

SEQ ID NO: 271876 - protein, 55 aa, Glycine max
  unsure (1)..(55): unsure at all Xaa locations
  Clone ID: PAT_MRT3847_87522C.1.pep
APGTSWFSAPPTRRGRPVLACHSFAFTVFHVSLPKSRAIXDSTNSNSIEEETQQK

SEQ ID NO: 271877 - protein, 54 aa, Glycine max
  Clone ID: PAT_MRT3847_87523C.1.pep
WLEVTSVNPYFSFFDIIFSSMLMLSFLAFLTFSFKSSVSIMNSMIEKPIMIFFQ

SEQ ID NO: 271878 - protein, 64 aa, Glycine max
  Clone ID: PAT_MRT3847_87524C.1.pep
DAWVNLYPIQRSHSSKSYGGSYANGLWISPVLNLPTPCISKGSGTSLFGLGSFLRVGKAKKSNK

SEQ ID NO: 271879 - protein, 65 aa, Glycine max
  Clone ID: PAT_MRT3847_87525C.1.pep
VIQGFISPYPFPISAAREPVAWFYSRRTVSSNLREPGLSSRDIFLGVPSHSPHLQYPSSDYLDFS

SEQ ID NO: 271880 - protein, 79 aa, Glycine max
  Clone ID: PAT_MRT3847_87526C.1.pep
MRLGPFSPPPGMVGREPPLKFPRVKKVPPSGPLSPPEPPLGGPPPPSKLPGPLSGGVGPPISKPRGSRFSGFPFRPDFF

SEQ ID NO: 271881 - protein, 55 aa, Glycine max
  Clone ID: PAT_MRT3847_87527C.1.pep
FMYLSTIIVFKIFTKFFKILKIHNICSNIINSLKYKLQNPNHKNLKKLLYCYKIF

SEQ ID NO: 271882 - protein, 77 aa, Glycine max
  unsure (1)..(77): unsure at all Xaa locations
  Clone ID: PAT_MRT3847_87528C.1.pep
MQIFVKTLMGEGIILEVDSSXIIDNLKAKIQDTEXIPPDQQRLXFAGKHLXDGRSLADYNIQNESDLQLVLRLHGSM

SEQ ID NO: 271883 - protein, 55 aa, Glycine max
  Clone ID: PAT_MRT3847_87529C.1.pep
MLTFAPTGLTTEVKSVEMHHGALTAALPGPDLVDGSREASPESPWPCSRSSVNRK

SEQ ID NO: 271884 - protein, 133 aa, Glycine max
  unsure (1)..(133): unsure at all Xaa locations
  Clone ID: PAT_MRT3847_8752C.1.pep
SLISIRVPHGVGIQGVYAPWQPTTALXECVSSALKDSGLSYXLMHPDVIDRRVIPQSLRAREYVKPIXSYDLVQSVLIKFQPLSTDSVVFTGLINELLGISDPRGKWLSILLCMRQMCSTVQKFFLYWCGSGL

SEQ ID NO: 271885 - protein, 50 aa, Glycine max
  unsure (1)..(50): unsure at all Xaa locations
  Clone ID: PAT_MRT3847_87530C.1.pep
MNMQVLVFFVATILXACECHAYHMFPLRLNTGXYGARPPDVNCARWRLAV

SEQ ID NO: 271886 - protein, 475 aa, Glycine max
  Clone ID: PAT_MRT3847_87531C.1.pep
LEPIRLERLEGKKAYIVVSGGNYCPCEDAARALKWPALVCKERRFKIFDLAIEALSGVSDSEAPVIHAVYTSLKGLIKIHNPSVVISLADIDPHVRKALKMASETNSNDTTFVLLPSSSVSQVLSRIGSSKFCLADWNRMRVSVNIITQNRANSLARLLKSLSNAYYLGDEIPITFNMDSKVDEATIRLVGSFEWPHGPKTLRRRIVQGGLIRAVSESWYPSSDDDFGLLLEDDIEVSPYYYLWIKYALMAYHYDPQVSLPELSSISLYTPKLVEVVKERPKWNATEFFKHIHPNTPYLHQLPCSWGAVFFPKHWREFYVYMNMRFTEDAKSNPVQIPKSRTNGWQASWKKFLIDMMYLRGYVSLYPNFPQQASFSTNHMEPGAHISAKDNLVKHNKRDFEVPLMKEDFRNFLPAMKMPPAPRLPSLNLFNQPVSLKGLKAAGAKLGQDVLRCDNATEVVAVDKDTGLPHTCSKF

SEQ ID NO: 271887 - protein, 91 aa, Glycine max
  Clone ID: PAT_MRT3847_87532C.1.pep
VYTSPQNKRRFMLLIEQDISFIAPSRKKNNKLISMIQYKILSFATRDRHISQLFPYYVMAKKNLLLHEKCHKHGNLETSKSSAHAGVALKF

SEQ ID NO: 271888 - protein, 148 aa, Glycine max
  unsure (1)..(148): unsure at all Xaa locations
  Clone ID: PAT_MRT3847_87533C.1.pep
SQPEMEHAKKVTGWAAWNSSGVISSLNNSRRETGDIDTVSKVQYCVICQSNIHMLKNXRCDTTYPLVTGCXMVGVVTEMGSKVXRIKSRHRVSVAGMIGSSGTCESXEFNIWIITEXMILTYGVKYVDGNMTNMSCSDVTPDYEHFEV

SEQ ID NO: 271889 - protein, 46 aa, Glycine max
  Clone ID: PAT_MRT3847_87534C.1.pep
TMPTYRSQLPVSRRACSCFAIHAPQCVSHRLEHIEGVFIWRVASHL

SEQ ID NO: 271890 - protein, 28 aa, Glycine max
  Clone ID: PAT_MRT3847_87535C.1.pep
FINGYALCKSINPYEAAAYGAAVQAAIL

SEQ ID NO: 271891 - protein, 64 aa, Glycine max
  Clone ID: PAT_MRT3847_87536C.1.pep
ITTCYAYKALRRNGHKGRTSMLSNSKISARKLHFFLLRVSFSTSVQWLISFLLVCDSFWHLYSA

SEQ ID NO: 271892 - protein, 66 aa, Glycine max
  Clone ID: PAT_MRT3847_87537C.1.pep
LIPLSHHHLYSLILAQPMYFFLFGVIHQGVTCPPTFTPFILEPNHTRGKICSNTISNISDFQLLDD

SEQ ID NO: 271893 - protein, 112 aa, Glycine max
  Clone ID: PAT_MRT3847_87538C.1.pep
MGDSSLLTCLSMENHHPSTLLSMDSSASSHEELDLEMNTQIIPPDINLPLSAERSPPPQPWNSDPCDILDVGLGTQGYETETFLNLPKAGRKCTKRIDSIWGAWFFFRVYFK

SEQ ID NO: 271894 - protein, 44 aa, Glycine max
  unsure (1)..(44): unsure at all Xaa locations
  Clone ID: PAT_MRT3847_87539C.1.pep
DYCLYXXCNMPSFXIITNKTRVLVQIRSWACYIKPXGLLLIXXK

SEQ ID NO: 271895 - protein, 33 aa, Glycine max
  Clone ID: PAT_MRT3847_8753C.1.pep
LEWSLAIKSIYTLRRPYNLYNKFFFIMMFLNCI

SEQ ID NO: 271896 - protein, 69 aa, Glycine max
  Clone ID: PAT_MRT3847_87540C.1.pep
SVAFNATFPHHARFHSHPPHFFTSLDAHQPKRFTDQTYPLNKCHKHQRAQSQCTNNANNLLSPSPLPIF

SEQ ID NO: 271897 - protein, 118 aa, Glycine max
  unsure (1)..(118): unsure at all Xaa locations
  Clone ID: PAT_MRT3847_87541C.1.pep
CLCFVSWPLPLVSVGGCFRCFVASCCCFRSLLCPCLPLPLSCRSLRACLVSSACAGAGGVPPVPLLGGASCVALVCRSTAMYGVLHSPKRLQIALVFPGRXSAPMRVFMMLEPNSELT

SEQ ID NO: 271898 - protein, 80 aa, Glycine max
  unsure (1)..(80): unsure at all Xaa locations
  Clone ID: PAT_MRT3847_87542C.1.pep
FSLLHRTILLLLIMESFDKTRTAITITLEVEYSDTIYNVKANIQVKDGIQPDHHRLIXNRXQLADGLTLHHYNIETEYTF

SEQ ID NO: 271899 - protein, 81 aa, Glycine max
  Clone ID: PAT_MRT3847_87543C.1.pep
ERQWPFPRPPHENAERKREEDEDEEHQPESEDSEDSESRTHKNKTPFLFGSNRLDTLFKHQYDRIRVLQRINQRSPQLQNL

SEQ ID NO: 271900 - protein, 106 aa, Glycine max
  unsure (1)..(106): unsure at all Xaa locations
  Clone ID: PAT_MRT3847_87544C.1.pep
MELLVLDGIISTLIQVILXPEKHVQLSKADIKQLFATCIDIFTIQPNLLLLDPPIKICGDIHGLYSDLLRLYEHGGLPTMSNYLYSGDYIDRRKHISDTICILLAY

SEQ ID NO: 271901 - protein, 44 aa, Glycine max
  Clone ID: PAT_MRT3847_87545C.1.pep
IISSISVQHSNKSYNSNIKSRTLPSVVFSQPYGRVGGRVGGRVG

SEQ ID NO: 271902 - protein, 137 aa, Glycine max
  Clone ID: PAT_MRT3847_87546C.1.pep
VFHDVPESVHPSEAFECFGGGVHPRFMHGQACCTHSRQSAKHTNITTSSIGYFAIGMEHGYDLVLVCACVWLPQSVSHGPQGSVRSSIAPNSEKGALESFQLAEVTYYRVDIDSLRLHARTKFVEQQVLDVGFRISW

SEQ ID NO: 271903 - protein, 169 aa, Glycine max
  Clone ID: PAT_MRT3847_87547C.1.pep
HQVEGPSAMFKVLQESPPIPETLSSVGKDFLQQCFRRDPADRPSAATLVKHAFVQNLHDQHVLVHSQSYPRGDLGPGGSANYPRDTPKSRRGIMQADMSTRIRNAIHTIFGEIFEQSNAKESNHIIPYLHSHVPEVKLLQSTLESGTLNFMSVANSKNISSDMRMITNF

SEQ ID NO: 271904 - protein, 86 aa, Glycine max
  unsure (1)..(86): unsure at all Xaa locations
  Clone ID: PAT_MRT3847_87548C.1.pep
KXVXXXXEXTSLXLHLKCXXXXXXXXXXXWWXPPPLFSSXPLADVXPXXXTPXXGGWXLXMXXPXNFIVFYXVSEXCAFIMHSXXK

SEQ ID NO: 271905 - protein, 41 aa, Glycine max
  Clone ID: PAT_MRT3847_87549C.1.pep
VCRPLSDKLSDSCLTFLPFSSLLQRVPLSRLIALVSFSRIR

SEQ ID NO: 271906 - protein, 92 aa, Glycine max
  unsure (1)..(92): unsure at all Xaa locations
  Clone ID: PAT_MRT3847_8754C.1.pep
PQLLFAPQPWPFGXXKRISKGKXGGKKKAADPFXKKDWXDXKAPSXXQVKNVGKTXVSRXQGTKIASEGLKHRVXXVSVADLQGDEDHASRR

SEQ ID NO: 271907 - protein, 84 aa, Glycine max
  Clone ID: PAT_MRT3847_87550C.1.pep
FTKFQTFSSIYSKLQLQREDLGDIHITIARLYEPNKTAAYFPPAMFSFIAPKEKPPNKKKILPVWKFTLLQSSLPRNKDHLYTH

SEQ ID NO: 271908 - protein, 66 aa, Glycine max
  Clone ID: PAT_MRT3847_87551C.1.pep
TWVYLLCIISARVQVIPECDQVQSAQTQLRFKGWCSMRSLVWHSDTGRSSQCLGIANRCGFQSVVL

SEQ ID NO: 271909 - protein, 53 aa, Glycine max
  Clone ID: PAT_MRT3847_87552C.1.pep
FYINKKIRLFIKNISLVLIYVCDVCAMHLGDRRNFTSPSTLIFSHVRKPTRVI

SEQ ID NO: 271910 - protein, 53 aa, Glycine max
  Clone ID: PAT_MRT3847_87553C.1.pep
YINNIPLPMLLYPILLYSRSIIFMLFLKRLRKLTLSCGSITIAFDNITSYSII

SEQ ID NO: 271911 - protein, 114 aa, Glycine max
  Clone ID: PAT_MRT3847_87554C.1.pep
RTRYFLVTNAIACTYAVLSLLLALVNRGKSKGLWTLIAVLDAFMVTVLFSGNGAAAAVGVLGYKGNSHVNWNKVCNVFGKFCDQMAASIGVSLIGSLAFLLLVIIPGVRLHRRN

SEQ ID NO: 271912 - protein, 188 aa, Glycine max
  Clone ID: PAT_MRT3847_87555C.1.pep
MEGVESKEREVMVAKPVAVVGVCDLLLRLLAFTVTLVAAIVIAVDKQTKLVPIQLSDSFPPLNVPLTAKWHQMSAFVYFLVTNAIACTYAAMSLLLALVNRGKSKGLWTLIAVLDTFMVALLFSGNGAAAAVGILGYKGNSHVNWNKVCNVFGKFCDQMAASIGVSLIGSLAFLLLVVIPVVRLHRRT

SEQ ID NO: 271913 - protein, 122 aa, Glycine max
  unsure (1)..(122): unsure at all Xaa locations
  Clone ID: PAT_MRT3847_87556C.1.pep
YGFYVLSPGALLLAMEYADEGGTSISCDPGPRGTSLSTGTPDAQRALNQALTMSDGLVLTPEEAEELTCIHDPILAGQEXLKRGIRTKWEHRKMGSKGSILITASSVARAPAFKVNAIDTEG

SEQ ID NO: 271914 - protein, 81 aa, Glycine max
  Clone ID: PAT_MRT3847_87557C.1.pep
MAQRTKNCTIKWWKHYHHTHLPNKTSLIQPKLAMGNVIPGYEISVRLAWEGEARDANGKVLQRVDRAVEIPYISDENAGED

SEQ ID NO: 271915 - protein, 132 aa, Glycine max
  unsure (1)..(132): unsure at all Xaa locations
  Clone ID: PAT_MRT3847_87558C.1.pep
MRTLGAPSQSLSGTLSPAIENLTNLRQVLLQNNNISGNIPPELANLPQAQTLDLSNNRFXGLIPASFRQLKXFRYLRLTNNNLSGSFPVSLAKTPQLAFLDLSYNNLSGPLPKFPARSFNIVGNPLVCGSST

SEQ ID NO: 271916 - protein, 91 aa, Glycine max
  Clone ID: PAT_MRT3847_87559C.1.pep
GHGVHLRKKATHSINETHTYIATSVKSNMHKTIASVHENAYRMTSHHPMHMEFDTHIKDAIINHTELDKHASRYLNTSFIHYHNTYEHMLH

SEQ ID NO: 271917 - protein, 59 aa, Glycine max
  Clone ID: PAT_MRT3847_8755C.1.pep
SPIQCQLTISSANSLSLIDNKKVNKPYRHRFSSDLISLLVSSLKNHAAALIKLAIFFSI

SEQ ID NO: 271918 - protein, 84 aa, Glycine max
  Clone ID: PAT_MRT3847_87560C.1.pep
CVLNMVKLTKNTSKLPFLSERLLSLGFDVISNILETGPGWRLVSPHFTTLLESAIFPALVMNDKDMSEWEETQMSIYKRIFLQI

SEQ ID NO: 271919 - protein, 96 aa, Glycine max
  unsure (1)..(96): unsure at all Xaa locations
  Clone ID: PAT_MRT3847_87561C.1.pep
XVFFFFFFFLERGFCLLDGSLKRGLRQRTYMRVQLCLCLQHVSIFFEGSYDPRVLNEHITSNREFVCSSTIRMDLELLILATPMDQSLHFLLSVVF

SEQ ID NO: 271920 - protein, 103 aa, Glycine max
  unsure (1)..(103): unsure at all Xaa locations
  Clone ID: PAT_MRT3847_87562C.1.pep
TISQFFAWGKPRRVAVEIVFRSWPGVLANLGQNQQSFSFLKSVAHXGEVFFLNPSPRSVKVQWGLFENLFFNFGDGFPPGDYFNMLGWAKRRFHPKPYGWVGS

SEQ ID NO: 271921 - protein, 68 aa, Glycine max
  Clone ID: PAT_MRT3847_87563C.1.pep
CIFNKLMAVQDSANTIIANVNLFTLNYGRSCHSRMRKSHVKFTTLQVGGAVFFFFFSEYRILSLSYQR

SEQ ID NO: 271922 - protein, 663 aa, Glycine max
  unsure (1)..(663): unsure at all Xaa locations
  Clone ID: PAT_MRT3847_87564C.1.pep
MRAGLSTIQQTLTPEAASVLNHSIAEAGRRNHGQTTPLHVAATLLASPSGFLRQACIKSHPNSSHPLQCRALELCFSVALERLPTSQNTSSSMEPPISNALMAALKRAQAHQRRGYPEQQQQPLLAVKVELEQLIISILDDPSVSRVMREASFSSXPAVKATIEQSLNAVPPTRPSGLGFRPSAVAPVNSGPGRNLYLNPRLQQQQQQGSTAQHRGDEVKRILDILLRTKKRNPILVGESEPEAAIKEVIKKIENKELGEGAFANAHVIHLEKELERLPTAQIPARLKELGDLIETRIGNSGCGGVFVDLGDLKWLVEQPVGFGIGGGLGNMQQLTLAEAGRAAVAEMGRLVSKFGEGGAGRLWLLGTATCETYLRCQVYHPTMENDWDLQAVPITTRASLPGIFPRLGTNGFLGTSLESLSPLKTLSTTTIPPLRRASENVDPAAVSICCPQCMQSCEQEVAEMLKETEKSDTELKSEAAKPSLPQWLQNAKTNKDNGKVMDQAQNQEVNVKKRTQEIQKKWHDSCLSLHPKFHQLNVSTERLVPTSLSMTGLYNMNLLGRQFQPKIPLNKNLGTSLQLSSNPTPIHPSEHVVSPKQMPVTTDLVLGQTKPADAVPEETHKEGINDFLSCLSSESQDKFDELQSKKLLDADSFKKCHVYPHC

SEQ ID NO: 271923 - protein, 93 aa, Glycine max
  Clone ID: PAT_MRT3847_87565C.1.pep
PYWGFLFAKLIYFGRMLGFDSYFISLSSTLMLVVFIRLQTLLCKGPAINISVYSSHIVFSMDYGCSTFDKIESRSRQKQHIVSSAFSLIEWSN

SEQ ID NO: 271924 - protein, 278 aa, Glycine max
  Clone ID: PAT_MRT3847_87566C.1.pep
MAAVFWALALVSLCCQLPSNAQAPASVPVKLPPTTLPPTTLAATSPSSGTPPAVTQPPTVVASPPTTSNPPTISQPPAIVAPKPAPVTPPAPKVAPASSPKAPTPQTPPPQPPKVSPVAAPTLPPPLPPPPVATPPPLPPPKIAPTPAKTSPAPAPAKATPAPAPAPTKPAPTPAPIPPPPTLAPTPIVEVPAPAPSSHKHRRHRHRHKRHQAPAPAPTVIHKSPPAPPDSTAESDTTPAPSPSLNLNAAPSNPQQRSIQATAALAITVLLAVTSYSC

SEQ ID NO: 271925 - protein, 567 aa, Glycine max
  Clone ID: PAT_MRT3847_87567C.1.pep
MADASSLPTDQLAAITLDEVPKANFSDRVPIRSIISRTDGGSGLAGRKARVGGWVKTGRKADKDAFAFLEINDGSCAGNLQVIVEAALGELGQLVPTGTCVVVDGHLKLPPAGTRQKIELRADKVLHVGPVDPAKYPLPKMRLTLEFLRDFVHLRSRTNTISAVARIRNALAYATHTFFNKEGFLYVHTPIVTTSDCEGAGEMFQVTTLLSEAERLEKELLQNPPPSEADVEAARVVVQEKGEVVSQLKAAKASKQEIGAAVDQLKKAKESLAKVEEWSKLKPGIPKKDDGKVDYGKDFFARQAFLTVSGQLQVESYACALSSVYTFGPTFRAENSHTSRHLAEFWMVEPEIAFAELKDDMNCAEAYVKFMCQWLLDNCLEDMEFMADKFDKGCIDRLKLVASTPFIRVTYTEAVEILEDAVKNGKKFENEVKWGIDLASEHERYLTEVKFQKPVIVYNYPKDIKAFYMRLNDDLKTVAAMDVLVPKVGELIGGSQREERYDVIQTRIKEMGLPVEPYEWYLDLRRYGTVKHAGFGLGFERMILFATGLENIRDVIPFPRYPGRADL

SEQ ID NO: 271926 - protein, 66 aa, Glycine max
  unsure (1)..(66): unsure at all Xaa locations
  Clone ID: PAT_MRT3847_87568C.1.pep
PFCHRVAVTLEEKHLPYDLKLVDLTNXPDWFLIVNPDGKAPVIXFDEKCAPDSYVISQTLEEMYPS

SEQ ID NO: 271927 - protein, 47 aa, Glycine max
  Clone ID: PAT_MRT3847_87569C.1.pep
GKNPVSETYGDRTDSSGVHPQKQEGLSYVGIHIPHGRIQPHDMDELA

SEQ ID NO: 271928 - protein, 57 aa, Glycine max
  Clone ID: PAT_MRT3847_8756C.1.pep
RHRLFWFSFKEKHVGELSTCGKCHNQYVNQDLDSGVSIVSLVYSVIEMESKIILILF

SEQ ID NO: 271929 - protein, 43 aa, Glycine max
  Clone ID: PAT_MRT3847_87570C.1.pep
SSHLNILIIKLPNLSNQPFSTHSPIYRLPPITSHSTPSNPTML

SEQ ID NO: 271930 - protein, 154 aa, Glycine max
  unsure (1)..(154): unsure at all Xaa locations
  Clone ID: PAT_MRT3847_87571C.1.pep
RLHPPIPMIMRKGIEDCVVNGNMIPKGSIVCVNIWAMGRXPNIWKNPLEFKPERFLEGEGSAIDTKGHHFELLPFGSGRRGCPGMPLAMRELPTIIGALIQCFEWKMLGSQGEILDHGRSLISMDERPGLTAPRANDLIGIPVARLNPTPFRQM

SEQ ID NO: 271931 - protein, 42 aa, Glycine max
  Clone ID: PAT_MRT3847_87572C.1.pep
DKWLYLLIEVFENYCYIVFTTLYTQTLKVCPLAPTLGTFNDG

SEQ ID NO: 271932 - protein, 53 aa, Glycine max
  Clone ID: PAT_MRT3847_87573C.1.pep
KERYLIKKISMIILEEQYNYLIHKFNASSKIINFLKHSELAKKKSFIIQVHNL

SEQ ID NO: 271933 - protein, 145 aa, Glycine max
  Clone ID: PAT_MRT3847_87574C.1.pep
MAETAVSLLFDHLVKLLSEETTILKNVHKEVEGIKDQLSLINSYIRDAEKKQQKDAVKEWLNSLRNVAFRMEDVVDHYLLKVAERGQRDGAFGVVTEVKEKFKTVTHRHDIASEIKHVRETLDSLCSLRKGLGLQLSASAPNHAT

SEQ ID NO: 271934 - protein, 84 aa, Glycine max
  Clone ID: PAT_MRT3847_87575C.1.pep
DASDTAVRTRTQRGTSECVDGESYGTLLMNLKVRLVLMTTDESMRLISSDLLLLRGEIVPAVRLRAVRFQHAIHGHHMRQVPGS

SEQ ID NO: 271935 - protein, 60 aa, Glycine max
  Clone ID: PAT_MRT3847_87576C.1.pep
HDHGGVPHLPSWGKFGLSVLGIFDWGACTPQPHCIWIRSCFLPLHPPHMCSSLLELCFLY

SEQ ID NO: 271936 - protein, 71 aa, Glycine max
  Clone ID: PAT_MRT3847_87577C.1.pep
HLTPFFFFLFHTKYTLNHTIIQRGSNPMPKKIQICHKTSLYIITSHATTLFFSRLNATGHYPILFHPKTKT

SEQ ID NO: 271937 - protein, 53 aa, Glycine max
  Clone ID: PAT_MRT3847_87578C.1.pep
ILVANIRTGGTKSKKWRNNEEKKKPATRSSLDASLSVQLALSATEDTGAKRGR

SEQ ID NO: 271938 - protein, 55 aa, Glycine max
  unsure (1)..(55): unsure at all Xaa locations
  Clone ID: PAT_MRT3847_87579C.1.pep
NIHNIITVFTHCVNILPAVTTSIHCKHTLNHISTTLXLLQARSPNQTNRTLMFIT

SEQ ID NO: 271939 - protein, 94 aa, Glycine max
  Clone ID: PAT_MRT3847_8757C.1.pep
PAEQTGNYGTEGPPGSDIRRQYEQTPASTSDPNPKWIIGLNGRCQSTKPLEKYIGKKPRPSLRQRVHRLDPKPTIHTKKKQEVGPQQNCKMFAL

SEQ ID NO: 271940 - protein, 91 aa, Glycine max
  Clone ID: PAT_MRT3847_87580C.1.pep
LWSLWGCLSCSLLVASRVVTVLTSQLLKDEKLTKYMIISSRGERVLISLFAYLGPPGHGFGSRFCAKFVILDITTCLMILLNKYTSKQHKK

SEQ ID NO: 271941 - protein, 90 aa, Glycine max
  unsure (1)..(90): unsure at all Xaa locations
  Clone ID: PAT_MRT3847_87581C.1.pep
CRKHAVFIYAKVNIICMIVFNPSGMNTLSSTSFPPVFTDVQVRLLFSALRPFMVLSNKPLTFYRNSPAPPTVGVPRYFQWFESXEVPLLA

SEQ ID NO: 271942 - protein, 68 aa, Glycine max
  unsure (1)..(68): unsure at all Xaa locations
  Clone ID: PAT_MRT3847_87582C.1.pep
GQYAEAISYLNQVGCLPVVPGFTNLFFLKTLXWGGGRFXTLXLLLSVPXLGGAGEQCACPPGNGWGYS

SEQ ID NO: 271943 - protein, 110 aa, Glycine max
  Clone ID: PAT_MRT3847_87583C.1.pep
PGPPLKLKGGPYMEPKKLGGVWGNSLGSGKNCFKSRETIFGGQQRDKKGPGFLPFIFEGSSPGGGKMGGLKKGGGGPPKKGNAPKEEGGPPPKKGNAKKENGAVPIKKKS

SEQ ID NO: 271944 - protein, 106 aa, Glycine max
  Clone ID: PAT_MRT3847_87584C.1.pep
TQSSVAASSYGTLELKRDTQSSLPHHRLSQWYINIAMINFVEFAAESSRGVVLATLFLYTKSLGGDLAFMGMLTSLFSVGRLISSTVFGWMCDHYSFRSVYLVSSR

SEQ ID NO: 271945 - protein, 75 aa, Glycine max
  Clone ID: PAT_MRT3847_87585C.1.pep
TQEYNIIYISCSLQSSDLQFHLFTLVLSLIAIVGDITPLDGVSKAEKNQREQAALDHMCKVLGGGSTGTFFSLCT

SEQ ID NO: 271946 - protein, 54 aa, Glycine max
  Clone ID: PAT_MRT3847_87586C.1.pep
FCKLNDTVTGVHHTCKGPHTTGRPRITLAHDATHAPPNYGDCTALHTKCKDLGF

SEQ ID NO: 271947 - protein, 88 aa, Glycine max
  Clone ID: PAT_MRT3847_87587C.1.pep
LSFEIYYQGGWGGFINCPFFTKNPLPFFGISHFLGWCSIMFFFLPCFYHPGLVCLILNFPFFLKKNIPFTWFKKKDPFTSLEAGGAHS

SEQ ID NO: 271948 - protein, 84 aa, Glycine max
  Clone ID: PAT_MRT3847_87588C.1.pep
IRLEERDTARNSLLINPLTANCCDPYPSILHFHLVFLFQTKKSLFFSYYIFNHAKVKVLRLLLLLIHFLRGRKIIFVPPDYVPR

SEQ ID NO: 271949 - protein, 48 aa, Glycine max
  Clone ID: PAT_MRT3847_87589C.1.pep
SSCAQLLPPPAPLLEHSCDADTANLQYPHPRRGYLSRPLNPLPENEGV

SEQ ID NO: 271950 - protein, 47 aa, Glycine max
  unsure (1)..(47): unsure at all Xaa locations
  Clone ID: PAT_MRT3847_8758C.1.pep
EGIFSDQQRFIFSXMQMSDGPTLSNYNIQTESTLNIILRLRGAMQIY

SEQ ID NO: 271951 - protein, 92 aa, Glycine max
  Clone ID: PAT_MRT3847_87590C.1.pep
CYNVVIQYTGNVSRLCSLRRWIIAAAVMVTREWFSLCSLFVTIKSLKWAVSGRRASPYMSPHLYIVLYKPSRENRYICMGPKWIANMLITYR

SEQ ID NO: 271952 - protein, 56 aa, Glycine max
  Clone ID: PAT_MRT3847_87592C.1.pep
HHNSPYEHYYCSRMHINMAVQKHLNLGANGTLDLLWEHTPLACSPHPNVWIPQNKR

SEQ ID NO: 271953 - protein, 294 aa, Glycine max
  unsure (1)..(294): unsure at all Xaa locations
  Clone ID: PAT_MRT3847_87593C.1.pep
NGVIGNKGTVSTPSPRLLVQKKTALDCPVSSPRGVLNSRALQGSPIRSAVRPASPSKLATPSLWSPSRGVSPSRAQNGVVSGLSSRFGGGSEPSVLSFAVDVSRGKVAENRIFDAHLLRLFHNRLLQWRFVNARADAALSAQTLNAEKSLYDAWIAMSNLRESVRAKSAEFQLLKQQFKLISILKDQMVYLEDWATLDRLYSSSLSGATEALRASTLRLPVVGGAKTELLNLKDAISSAMDVMQAMASSICLLSPKVGQLNSLVVEVANLSAKERVLLEKCXDLLSAITTMQVR

SEQ ID NO: 271954 - protein, 753 aa, Glycine max
  Clone ID: PAT_MRT3847_87594C.1.pep
IDKRLSGKRTFIVLDDVNEFGQLKNLCGNRKWFGQGSVIIITTRDRRLLDQLKVDYVYDVDKMDENESLELFSWHAFNEAKPKEDFNELARNVVAYCGGLPLALEVLGSYLNERRKKDWESVLSKLERIPNDQVQEKLRISFDGLSDHMEKDIFLDICCFFIGKDRAYITEILKGCGLHADIGITVLIDRSLLKVEKNNKLGMHQLLRDMGREIICESSRKEPGKRSRLWFHEDVLDVLTNNTGTVAIEGLALKLHSNKRYCFNAYAFEEMKRLRLLQLDNVQLTGDYGYLSKQLRWISWQGFPSKYIPNSFYLEGVIAMDLKHSNLRLFWKEPQVLKWLKILNLSHSKYLTETPNFSKLPNLEKLILKDCPRLCKVHKSIGDLCNLHLINLKDCKTLGNLPRGVYKLKSVKTLILSGCSKIDKLEEDIVQMESLTTLIAENTALKQVPFSIVNSKSIGYISLCGYEGFARNVFPSIIRSWMSPTLNPLSYISPFCSTSSYLVSLDMQSYNSGDLGPMLRSLSNLRSILVRCDTDSQISKQVRTILDNVYGVSCTELEITSQSSEHYLKSYLIGIGSYQDVFNTLSDSISEGLTTSESSDVSLPGDNDPYWFAHMGEGHSVFFTVPEDCRMKGMTLCVVYLSTPESKAIEYLISVLMVNYTRCTIQIFKRDTVISFNDVDWHDIISHSGPGDKVEIYVIFGHGLVVKKTAVYLMCDESIDKGMDPSPEPKIEPKKNAFVKFIKKIVSSKNEEQ

SEQ ID NO: 271955 - protein, 127 aa, Glycine max
  unsure (1)..(127): unsure at all Xaa locations
  Clone ID: PAT_MRT3847_87595C.1.pep
ARATTESAVLQMLLVLHTHMPRLINDASRYLNTDPADQDDTLFDESHSQCSVEGATLGTAHPRSGDAVGGIGDDNERNVAADEETDHDAYDYGASPDLPGSKSAKSXGSGSRVSAFYSDDQGFLASE

SEQ ID NO: 271956 - protein, 85 aa, Glycine max
  unsure (1)..(85): unsure at all Xaa locations
  Clone ID: PAT_MRT3847_87596C.1.pep
AKYAPVYFETYXVDGNMNAEPPDVVDSIRTIKVCLNGXLVSPIGGGVSCHNVQTXKELDLYASLVSCLNLPGLPTRHDNEDIVVI

SEQ ID NO: 271957 - protein, 37 aa, Glycine max
  Clone ID: PAT_MRT3847_87597C.1.pep
LIDNTCILKFKYYESLIIYLIYIINFKCQFIVCNSRL

SEQ ID NO: 271958 - protein, 56 aa, Glycine max
  unsure (1)..(56): unsure at all Xaa locations
  Clone ID: PAT_MRT3847_87598C.1.pep
IXXARVRKLGIRLETTLKPXTLXXXXLNXXXXXNXXNHGXFYDLSLQXXGLQAXXX

SEQ ID NO: 271959 - protein, 41 aa, Glycine max
  Clone ID: PAT_MRT3847_87599C.1.pep
FCPKGNPALKFSGAKKKRFFLCNRRGKIPRVCFRHGFPQHR

SEQ ID NO: 271960 - protein, 122 aa, Glycine max
  Clone ID: PAT_MRT3847_8759C.1.pep
PRTRTTVEISAPAESHSAVQRDSTIQRDTDPGNLLALGYVHSYAEDNNKDTYILACTRSYIELLSASRCSVCIALTKSKLLLQTKHPLLYLLKLHVGVSLLEIWVCSVQSRCCFCWVLCRVI

SEQ ID NO: 271961 - protein, 61 aa, Glycine max
  Clone ID: PAT_MRT3847_875C.1.pep
LFLVFLIRSFKFSDLYIQIFQWREFLLSFELGELAPKLYPELLALSKADIESIVFVHVKSY

SEQ ID NO: 271962 - protein, 290 aa, Glycine max
  unsure (1)..(290): unsure at all Xaa locations
  Clone ID: PAT_MRT3847_87600C.1.pep
KPRPYAFFICSYQSPNNQSVVRVTTVTRRWVDVAVSSLELVQGFDQETAAVVMARLASLKMETEEAFDATRWLDRLLIHLCSKFGDYRKDDQSSFTLTPSFSLFPQFMFNMGRSQFVQVFNNSPDETAYFRMLLNRENISKAAVMIQPXSLIAYSLDALPSPALLDVASISAGWILLLDSYFSVVIFHGMSIAQWCNMGYHNQPEHQAFAQLLQALQDDAQIIIRDHFPVPRLVVCDXHGSQGRFLLAKLNPSATYNNALEMAAGSDVIFTDDVSLQVFFEHLQIVVADS

SEQ ID NO: 271963 - protein, 135 aa, Glycine max
  Clone ID: PAT_MRT3847_87601C.1.pep
KQFNLKKLNHTTVQFSFYCKQFNISSSLKTLGVGNCKSLQTLPKLPHFLKTVLFPSAAVEQLAENRKKVLFLNCLKLDQQSLESIALNAQINVMKFANQHLSTANHDDIENYKDYDKKLHSYQVLYVYPGSSVPE

SEQ ID NO: 271964 - protein, 83 aa, Glycine max
  Clone ID: PAT_MRT3847_87602C.1.pep
TPRGAFKIFFSPFKWGAWLYFLGGAQTGFGWEPTNFWQGGLLGHPPEGGQGLKIPRAGLPTVYSRETGYAGPLGVGGPGNWGA

SEQ ID NO: 271965 - protein, 165 aa, Glycine max
  Clone ID: PAT_MRT3847_87603C.1.pep
MAFSAITTLPSPQFLRLPQSSPSLRFSPPILKRPKPLSIRSVSIPAAPASGSLAPAVSLTDNALKHLNKMRSERNQDLCLRIGVKQGGCSGMSYTMDFEDRANKRPDDSIIEYEGFEIVCDPKSLLFIFGMQLDYSDALIGGGFSFKNPNATQTCGCGKSFAAEM

SEQ ID NO: 271966 - protein, 66 aa, Glycine max
  Clone ID: PAT_MRT3847_87604C.1.pep
KRLLVFLKLNKLWGRLDQIYDHDKSHTTNKHAAIGRQVSYYIAPLCRYPKHSAHSIRGYTPKFSNY

SEQ ID NO: 271967 - protein, 169 aa, Glycine max
  Clone ID: PAT_MRT3847_87605C.1.pep
MAFSAMTSMHSPQFLRLPISLPRSSPSGRFSPPILKRPKPLSIRSVSIPAAPASGSLAPAISVTDNVLKHLNKMRSERNQDLCLRIGVKQGGCSGMSYTMDFEDRVNKRPDDSIIEYEGFEIVCDPKSLLFIFGMQLDYSDALIGGGFSFKNPNATQTCGCGKSFAAEI

SEQ ID NO: 271968 - protein, 135 aa, Glycine max
  unsure (1)..(135): unsure at all Xaa locations
  Clone ID: PAT_MRT3847_87606C.1.pep
GDHSFDPHTSLLKTXGVFVPLGFPRQVPCIPASLNIGTKTEAETVAGGTKENRKTIGPRDTVPIPPXIKVKPLESAKGDIQRFINRHVKNRMGTYAQNSMKKTLLEATPSGPSSSSRILTKKNGRSYESFIHRVD

SEQ ID NO: 271969 - protein, 81 aa, Glycine max
  unsure (1)..(81): unsure at all Xaa locations
  Clone ID: PAT_MRT3847_87607C.1.pep
LXGFXFHQXFVYTFLLFHAVPVEAIPNTRWSTXXVXSDSDTRXXDCIEELMSTTNFVLARSSIXTHREXAKNXEENTXEFH

SEQ ID NO: 271970 - protein, 375 aa, Glycine max
  Clone ID: PAT_MRT3847_87608C.1.pep
FLRYCQQNAMEGTWAIVDFPVDSFHQNFHPSYPHASRRSSGCVIQDMPNGYSRVTWVEHAKVEEKPVHQIFCNYVYSGMAFGAQRWLGVLQRQCERVASLMARNISDLGGEHSRGGRKNLMKLAQRMIKTFSLNMSTSGGQSWTAISDSPEDTVRITTRKITEPGQPNGVILSAVSTTWLPYSHTKVFDLLRDERHRSQMDTLSNGNSLNEVAHIANGSHPGNCISLLRINVASNSSQNVELMLQESCTDQSGSLVVYTTIDVDAIQLAMSGEDPSCIALLPQGFKIVPMLSSPITDTTNSSEPPISLNNNSGGCLLTMGVQVLASTIPSAKLNLSSVTAINNHLCNTLHQIEAALSSTNSHENGFFLCTEPTKQ

SEQ ID NO: 271971 - protein, 81 aa, Glycine max
  unsure (1)..(81): unsure at all Xaa locations
  Clone ID: PAT_MRT3847_87609C.1.pep
CGSSTSCSNSXNPIVMLEAAFGRERACELGFQVKPWIKISLAPGSGVLSKYVARSGLQKYLNELGVNIVVYGFTNXIGNSG

SEQ ID NO: 271972 - protein, 106 aa, Glycine max
  unsure (1)..(106): unsure at all Xaa locations
  Clone ID: PAT_MRT3847_8760C.1.pep
TKRTGQGTPGGQNRQGPPGXHRKPDGGNKKEKKPEPAAPPAPAGRKQRKQKGPEAGERTPTGTPATKRKQRLRKPERKKDHPRKEEXEHAANQERPKPQEEKAEED

SEQ ID NO: 271973 - protein, 62 aa, Glycine max
  Clone ID: PAT_MRT3847_87610C.1.pep
ILNTLVNPLFRTYSLCKYSELFKTDIHCFSQHACMRITVCSGHACMLRETVCSGHAYIVSRA

SEQ ID NO: 271974 - protein, 97 aa, Glycine max
  unsure (1)..(97): unsure at all Xaa locations
  Clone ID: PAT_MRT3847_87611C.1.pep
AASLQAAATFMQPTKLSRSNICSKSLLQSISKALVLDLLELKRXHAPXKLILRXLXXKXVDVPKXXGFXPXQXXXXLXXGANXXXXPKRXTLSTXSK

SEQ ID NO: 271975 - protein, 191 aa, Glycine max
  Clone ID: PAT_MRT3847_87612C.1.pep
RNTIRSRRAPRMRWTSTLHARFVHAVELLGGHERATPKSVLELMDVKDLTLTYVKSYLQMYRTVKTTYRAAASSGQSDVYDNGSSGDTSDDLMFDIKSSRRSDLSVKQGRSSVNQDKEYHGLWGNSSREAWLHGKTKTDSVGNVPFSLEKEMDPKCLSYERISDGSSSSNLSGSSPKKPNLDLEFSLGQPL

SEQ ID NO: 271976 - protein, 136 aa, Glycine max
  unsure (1)..(136): unsure at all Xaa locations
  Clone ID: PAT_MRT3847_87613C.1.pep
FDCGSLVVAKGVNHNQIVGLHVAGSKGRLGYASLIPYVEPAVQAQSAERYSDYYPVEVDSPEVVAHIRELKSDVYVPLXPTQTNSVETPREWLPHLPCDKIYNALSTTVETLEGTRXEGYHPFFGGCKKFPSHNAA

SEQ ID NO: 271977 - protein, 32 aa, Glycine max
  Clone ID: PAT_MRT3847_87614C.1.pep
ESVEHISKEIVLLISLIQNVFFFIKLAMLNGN

SEQ ID NO: 271978 - protein, 60 aa, Glycine max
  Clone ID: PAT_MRT3847_87615C.1.pep
FPEPNLLTGFPKNILFRVALVPGTPFPISTTPTLADSLSTPLIFACGLTPLANFSKQVVR

SEQ ID NO: 271979 - protein, 45 aa, Glycine max
  Clone ID: PAT_MRT3847_87616C.1.pep
SRVRILHDTHFSSSLSLRPEGQDNCVHTNYAYLLTKMHYVTCHTV

SEQ ID NO: 271980 - protein, 56 aa, Glycine max
  Clone ID: PAT_MRT3847_87617C.1.pep
PAHLDDFMVAPTPIPFFFCLLNLISYVFCVISTFEYLFRIIPRCRVCVATAIAVAS

SEQ ID NO: 271981 - protein, 842 aa, Glycine max
  Clone ID: PAT_MRT3847_87618C.1.pep
MAMVVAQHRESSSSGSIDKHLDSGKYVRYTAEQVEALERVYAECPKPSSLRRQQLIRECPILSNIEPKQIKVWFQNRRCREKQRKEASRLQTVNRKLTAMNKLLMEENDRLQKQVSQLVCENGFMRQQLHTPSATTTDASCDSVVTTPQHTLRDASNPAGLLSIAEETLTEFLSKATGTAVDWVQMPGMKPGPDSVGIFAISQSCSGVAARACGLVSLEPTKIAEILKDRPSWFRDCRSLEVFTMFPAGNGGTIELVYTQTYAPTTLAPARDFWTLRYTTSLENGSLVVCERSLSGSGTGPNPAAAAQFVRAETLPSGYLIRPCEGGGSIIHIVDHLNLEAWSVPEVLRPLYESSKVVAQKMTIAALRYIRQIAQETSGEVVYGLGRQPAVLRTFSQRLSRGFNDAVNGFNDDGWTVLNCDGAEDVIIAVNSTKNLSGTSNPASSLTFLGGILCAKASMLLQNVPPAVLVRFLREHRSEWADFNVDAYSAASLKAGTYAYPGMRPTRFTGSQIIMPLGHTIEHEEMLEVIRLEGHSLAQEDAFVSRDIHLLQICSGIDENAVGACSELVFAPIDEMFPDDAPLVPSGFRIIPLDSKPGDKKDAVATNRTLDLTSGFEVGPATTAGADASSSQNTRSVLTIAFQFPFDSSLQDNVAVMARQYVRSVISSVQRVAMAISPSGINPSIGAKLSPGSPEAVTLAHWICQSYSYYLGSDLLRSDSLVGDMMLKQLWHHQDAILCCSLKSLPVFIFANQAGLDMLETTLVALQDITLDKIFDEAGRKALCTDFAKLMEQGFAYLPAGICMSTMGRHVSYDQAIAWKVLTGEDNTVHCLAFSFINWSFV

SEQ ID NO: 271982 - protein, 116 aa, Glycine max
  unsure (1)..(116): unsure at all Xaa locations
  Clone ID: PAT_MRT3847_87619C.1.pep
DHSLYVGFRKDVENSVDCXLRQQQSLLFSATIPKXVRCVSQLVLKREXIYVDTVGMGCVDTPVKVNQSYLIAPHESHFQLVHHILKEHILQTPDYKVIVFCITGSGEMKLHVCWYK

SEQ ID NO: 271983 - protein, 325 aa, Glycine max
  Clone ID: PAT_MRT3847_8761C.1.pep
MEDTAQQIKRPFGVPEGPEFTVGLDVPLSELKVELLKEGVSIIMLTGLGGSGKTTLATKLCWDEQVIGKFKENILFVTFSKKPKLKIIVERLFEHCGYQVPEFQSDEDAVNQLGLLLRKIDASPMLLVLDDVWPGSEAFVEKFKFQISDYKILVTSRVAFPKFGTPYILKPLAHNDAITLFRHHALLEKSSSSIPDEELVQKVVRHCKGLPLAIKVIGRSLSNRSYEMWQKMVEEFSHGHTILDSNIELITSLQKILDVLEDNHIIKECFMDLALFPEGQRIPVAALVDMWVELYGLDNDGIATAIVKKLASMNLANVLVTRYIQ

SEQ ID NO: 271984 - protein, 38 aa, Glycine max
  Clone ID: PAT_MRT3847_87620C.1.pep
GLRRLMRKAWQPRSGTTAPPSCRNLPRVQGTFYTNHRT

SEQ ID NO: 271985 - protein, 92 aa, Glycine max
  unsure (1)..(92): unsure at all Xaa locations
  Clone ID: PAT_MRT3847_87621C.1.pep
VWTLQKSCSCKYIFEVPCYQFKVGTFNFHKTNIVEPDYALFSLQTYEKVATAFKLEEDVVIANLDADKYXDLAEKYDVSGFPTLKFFPKGNK

SEQ ID NO: 271986 - protein, 447 aa, Glycine max
  Clone ID: PAT_MRT3847_87622C.1.pep
MSSGNVKPEEEALEKENVGVPVPEISEPKEQKAGSNCKGIEQIPLSGENEEDVLVNITGSGSIISGGKAVEDASEDVTDATPCSSSSFGDTDSGLEDASASAFTNTEVESPMCDGDQSKTSLCRKNKTTTSHWRRFIHPVRWRCKWLELQVKKLNSVALKYDKELAAYDHRKQLEFSKFSIDDLNVKSVPIYDGIHTNKVMKRKKRKKAEESDLSSYVSNHSIFSYYENKNRGACIEDFRGDALRGNAEINIEELKFNDKLPSVDLEDNDKAIKDIIQRIGELQSQVGKLKTRIDNVVSENPGKFCSVTQLSMIGSSDGFNHSRHNSASFVGNDNTFPDRITSFIETTIKPQLEFLQENTKDEILIQNQAANEELHDFESVRNQFVEKTKKSVEEQKPISAAQVSESVMDTENAVPTLKAGSTSNSNFRRITNRRRKKPGSKRWKRR

SEQ ID NO: 271987 - protein, 157 aa, Glycine max
  Clone ID: PAT_MRT3847_87623C.1.pep
SSDGFNHSRHNSASFVGNDNTFPVSFVHASSQLKSELNTEDLLLTENPLPSQDRITSFIETTIKPQLEFLQENTKDEILIQNQAAKEELHDFESVRNQFVEKTKKSVEEQKPISAAQVSESVMDTENAVPTLKAGSTSNSNFRRITNRRRKKPGSKR

SEQ ID NO: 271988 - protein, 71 aa, Glycine max
  Clone ID: PAT_MRT3847_87624C.1.pep
STNISNMACSASYNAILLHVLQMNTGNLDVMEHIGIRVAKFYNYIYLNNLYICYHIRHNNWVILIWKGVVI

SEQ ID NO: 271989 - protein, 143 aa, Glycine max
  unsure (1)..(143): unsure at all Xaa locations
  Clone ID: PAT_MRT3847_87625C.1.pep
TFPFRXNYLAVRSSTAWLDAELYEYVSGGLRLLRLLRIRPYLLPGFNFVGLLLPAVFYLRDSNMRNAEGRLLFYACCLFGLRGNVLFFIIFFGDGTDWAVSLGTILTSYRVAVTAGYYRSLSLSHSLSLQYGPLLSSSHHAST

SEQ ID NO: 271990 - protein, 72 aa, Glycine max
  Clone ID: PAT_MRT3847_87626C.1.pep
NVRRVREKMDMSRVVKEPGWSWIEVNNEVHRFIARGTAHRDSILISLVLDNLILQIKGFGYVPNTATFFLDD

SEQ ID NO: 271991 - protein, 35 aa, Glycine max
  Clone ID: PAT_MRT3847_87627C.1.pep
SAIMRTIPLPDPQTVRVLIGSLLPAYKLYRANSSF

SEQ ID NO: 271992 - protein, 275 aa, Glycine max
  Clone ID: PAT_MRT3847_87628C.1.pep
MSKEVSQQRKDYVDPPPAPLIDLAEIKLWSFYRALIAEFIATLLFLYVTVATVIGHKKQTGPCDGVGLLGIAWAFGGMIFVLVYCTAGISGGHINPAVTFGLFLARKVSLIRALFYMVAQCLGAICGVGLVKAFMKHSYNSLGGGANSVSAGYNKGSALGAEIIGTFVLVYTVFSATDPKRSARDSHIPVLAPLPIGFAVFMVHLATIPITGTGINPARSFGAAVIYNNGKVWDDHWIFWVGPFVGALAAAAYHQYILRAAAIKALGSFRSNPTN

SEQ ID NO: 271993 - protein, 126 aa, Glycine max
  Clone ID: PAT_MRT3847_87629C.1.pep
CHGRALSSQGSAEPKHVSSHAGGRSILIGGRKHTIEGPLRALAPKACSFRHWSVIPEAAHDANRQWRNEQSHQCRRTRKHASGYGGAPNPNAKIKGSVACVTLGSMQNWMDSWESFSAESCQPEML

SEQ ID NO: 271994 - protein, 92 aa, Glycine max
  unsure (1)..(92): unsure at all Xaa locations
  Clone ID: PAT_MRT3847_8762C.1.pep
GEDSSRFEYAHRGGAAVVYLYRAADALATSQENSCRAGDATLYKALTKQADTLIQPDYEGSLQXLESLGGNGGPETGNKITSSEGDSNHLPS

SEQ ID NO: 271995 - protein, 184 aa, Glycine max
  Clone ID: PAT_MRT3847_87630C.1.pep
EFMFRGSLYDFLHKQKGVFKLPFLLKVAIDVSKGMNYLHQNNIIPRDLKTANLLMDKNEVVKVADFGVARVQTQSGVMTAEIGTYRWMAPEVIEHKPYDQKADVFSFGIALWELLTGEGLRPTIPKNTHPRLSELLQRCWQQDPTQRPNFSEVIEILQQIAKEVNDHKDKASHGFLSALRRAHH

SEQ ID NO: 271996 - protein, 88 aa, Glycine max
  unsure (1)..(88): unsure at all Xaa locations
  Clone ID: PAT_MRT3847_87631C.1.pep
QQSSIDPRTFKVHLPNYLKANKKGFAXNHAWFXAFXFDSFLSPQKIDHISSFVELPLMSFLMKLSPILIVNVQISIYPSTLFLCETHW

SEQ ID NO: 271997 - protein, 89 aa, Glycine max
  Clone ID: PAT_MRT3847_87632C.1.pep
SDSDQISIELVVYNTLERFHCIVLALNFCYNLRLSPICLSTYSPVNRMDASLVKVQNSRYRSPINSLLIYNCIPCFFDVVFCTQTLEVD

SEQ ID NO: 271998 - protein, 376 aa, Glycine max
  unsure (1)..(376): unsure at all Xaa locations
  Clone ID: PAT_MRT3847_87633C.1.pep
VTAILGEMGLNIQEAHAFSTTDGFSLDVFVVEGWPNEEXLRSMKGVLEKEIXKVKEQNLSNQGMTLCYXEQYQARMEPSPHCIQIPSDGADVWEIDTNQLKYENKVGSGSFGDLYRGTYCSQDVAIKVLKPERISTDMLREFAQEVYIMRKIRHKNVVQFIGACTRPPNLCIVTEFMSRGSLYDFLHKQRGVFKLPSLLKVAIDVSKGMNYLHQNNIIHRDLKTANLLMDENEVVKVADFGVARVQTQSGVMTAETGTYRWMAPEVIEHKPYDQKADVFSFGIALWELLTGELPYSCLTPLQAAVGVVQKGLRPTIPKNTHPRLSELLQRCWQQDPTQRPNFSEIIEILQQIAKEVNDHKDKSSHGFLSALRRAHH

SEQ ID NO: 271999 - protein, 50 aa, Glycine max
  Clone ID: PAT_MRT3847_87634C.1.pep
EDLVYVGKLVAGSFAGGAAIKYGSALFPQITTPNLVVALLLPLLSSSRSR

SEQ ID NO: 272000 - protein, 66 aa, Glycine max
  Clone ID: PAT_MRT3847_87635C.1.pep
KGPRQSQRLTHGHLKLRRTPRGHAYATLVTACKQSRTSLNGLTIGSWPRWRACRLLALTRTCTCAS

SEQ ID NO: 272001 - protein, 87 aa, Glycine max
  Clone ID: PAT_MRT3847_87636C.1.pep
RAWVLFAQKRKPFALNILIRIPVFTMYHLSRKQITTTRYQNSIRTPLKIKSGHLSSMETHPRFEKDILPKNHFHSKHPPHPKKILYP

SEQ ID NO: 272002 - protein, 72 aa, Glycine max
  Clone ID: PAT_MRT3847_87637C.1.pep
ETGQSEHLNIKVTDNNNEVFFKIKRTTTLGKLMNAFCDRQGKNINSVRLLFNGQRVTAQDNPDTLDMQDGDT

SEQ ID NO: 272003 - protein, 70 aa, Glycine max
  unsure (1)..(70): unsure at all Xaa locations
  Clone ID: PAT_MRT3847_87638C.1.pep
MESHNIRPSKTIPEYSLXPTKDYINGQQFTSYSKTDNQQALLYASELKVHHIDISILSILYTSLSNIPFY

SEQ ID NO: 272004 - protein, 69 aa, Glycine max
  Clone ID: PAT_MRT3847_87639C.1.pep
IQGPIQPKYCSRRNGNVAEWQTLYKPATDSSRLSPNEVNRGVYEGRELTNSTDTTRHAFRTSSIFQTRT

SEQ ID NO: 272005 - protein, 72 aa, Glycine max
  Clone ID: PAT_MRT3847_8763C.1.pep
LSLVLVHRMRSTMNLVVKMKREVHFLEWARPTERRESENSQRGSLHFQPPYLASPRSVPNFFNQLRLLYLPS

SEQ ID NO: 272006 - protein, 137 aa, Glycine max
  unsure (1)..(137): unsure at all Xaa locations
  Clone ID: PAT_MRT3847_87640C.1.pep
MASPGLYRRVLPSPSIEFASPEGKKLFGEALERGTMQGFFKLISYYQTQSEPAYCGLATXSVVLNALAIDPXREWEGSWKMVDQVMVEWLEPLAXVKWEGLTVGKVACWARCNGPKVEAFXIESKLVDDFRNRVISC

SEQ ID NO: 272007 - protein, 69 aa, Glycine max
  Clone ID: PAT_MRT3847_87641C.1.pep
DFSLKMENLIYTVFYRPFTNYRSFRDHLRRHHVPLPPSPPPSHRRLLRRLPSFSLLGPFCQLIRRYCPA

SEQ ID NO: 272008 - protein, 124 aa, Glycine max
  unsure (1)..(124): unsure at all Xaa locations
  Clone ID: PAT_MRT3847_87642C.1.pep
PRVRNKLPFFLTAKINYYWNQSNIXICALYDHGIYKFLNXHLKNCGLAEQEQMECIXDXGLHADVIEKRAHESIIHAAHESLKGQTPVGVILYXLKALPATEFIILLPSVVGDLKLLTDGQLLE

SEQ ID NO: 272009 - protein, 71 aa, Glycine max
  unsure (1)..(71): unsure at all Xaa locations
  Clone ID: PAT_MRT3847_87643C.1.pep
KAGTPLLTIKXTFPVNESWCSQGTLGGAKKGQAFPQCVFDHGKKMSSDPLKGESQMAKLVXHTPKRKGLKE

SEQ ID NO: 272010 - protein, 143 aa, Glycine max
  unsure (1)..(143): unsure at all Xaa locations
  Clone ID: PAT_MRT3847_87644C.1.pep
MAAASSMALSCXTLAGKAGKLGPSANEGARVSMRKTVTKQACSGSPCYGLDRVKYLGPFYGEPPSYLTVKFPGDYRCYTAGASADPETCTRDRELELIHSRWAMLGALTCVFPKLMSHNRVKFGDTARIRAGSQIFNQGGLDY

SEQ ID NO: 272011 - protein, 115 aa, Glycine max
  Clone ID: PAT_MRT3847_87645C.1.pep
LAPHMGLEILDEFRPIMPIRTVPVPKVRTFSQGSELVEASAKEEMLVQECHTPTSSSKVAQTLLVCPPPPKKPRVSRRTSHSHSQAGFFQVPHDDLASVFLLRTKPSVPRKLFAS

SEQ ID NO: 272012 - protein, 87 aa, Glycine max
  unsure (1)..(87): unsure at all Xaa locations
  Clone ID: PAT_MRT3847_87646C.1.pep
STFEYPCAPNKAYYGRGPIQLSCELNYGPAXGRALGFDGLNAPETGAIDPVVFFKTPLRYWMEHVVVLSSNQGFWVHPLELSMGDLN

SEQ ID NO: 272013 - protein, 132 aa, Glycine max
  Clone ID: PAT_MRT3847_87647C.1.pep
VCDLQVVVDERKKKRKQSNRESARRSRMRKRKHLDELTKQVSQLAKGNGEILGTIDITTQHYLNVEAENSILRAQMEELSQRLQSLNDIVDGIINLTNATTAYERDCYLTSAQNITTKNNTLCLNQQAVFQW

SEQ ID NO: 272014 - protein, 152 aa, Glycine max
  Clone ID: PAT_MRT3847_87648C.1.pep
MSMASSSGNSSISTKSQSSGSEGDLQVVVDERKKKRKQSNRESARRSRMRKRKHLDELTKQVSQLAKGNGEILGTIDITTQHYLNVEAENSILRAQMEELSQRLQSLNDIVDGIINLTNATTAYERDCYLTCAQNITTKNNTLCLNQQRFQW

SEQ ID NO: 272015 - protein, 58 aa, Glycine max
  Clone ID: PAT_MRT3847_87649C.1.pep
CIICFILGTKLPGSCFGPSNFYKFSFYLKLFLNLFLFNIFTPMIIFKPCLLILHFFDF

SEQ ID NO: 272016 - protein, 79 aa, Glycine max
  Clone ID: PAT_MRT3847_8764C.1.pep
YESRDVQGAGQGWLWQLSQWRYCFIKGTSVVRTSIPTLIIKIKTYVGNCTPIRLKMALNKPIDNSKNATLKHMHRLKTT

SEQ ID NO: 272017 - protein, 123 aa, Glycine max
  unsure (1)..(123): unsure at all Xaa locations
  Clone ID: PAT_MRT3847_87650C.1.pep
ISPNKVTFIALLNACSHGYMVEEGKLYFRLMVSDYAITPEIEHYGCMVDLLSRSGLLKEAEDMISSMPMAPDVAIWGALLNACRIYKDMERXYRIXQGSLKSMDPNHIGCHVLLGNIYSTSGR

SEQ ID NO: 272018 - protein, 63 aa, Glycine max
  Clone ID: PAT_MRT3847_87651C.1.pep
AFKTTGMGCQKAVTVDPREQGQVRIFTEAYPIIESMYCGQKSVKMLRGHFFIHRQIRMQCADL

SEQ ID NO: 272019 - protein, 68 aa, Glycine max
  Clone ID: PAT_MRT3847_87652C.1.pep
LLNAPHTLTSHGTNPERILMPCKTAAEVHHGTGDTPTDRGHTEHLHPIAAKAPGGTSPLGQANAFGVT

SEQ ID NO: 272020 - protein, 66 aa, Glycine max
  Clone ID: PAT_MRT3847_87653C.1.pep
TTGERDIPSDICSMLQAHSASQISLHLSLGVPVLSMLFMSTIRRAAVTKTRANDCITNIPVGGLWA

SEQ ID NO: 272021 - protein, 131 aa, Glycine max
  Clone ID: PAT_MRT3847_87654C.1.pep
CLTGVSIVNDTECTIHIYKRDAIISFNDEDWQGVISNLRPSDNVEIFVVLGHGLTVVKTALYLIYDDESITVKMEPSPNVIMESSSNMKTDPSPNVKMEPLSNMKSEPSMKPKKNIFARLIQRMGECTCMR

SEQ ID NO: 272022 - protein, 32 aa, Glycine max
  Clone ID: PAT_MRT3847_87655C.1.pep
GLLTIQLCAICQPRSRTHSELSLIHQFLTALR

SEQ ID NO: 272023 - protein, 283 aa, Glycine max
  Clone ID: PAT_MRT3847_87656C.1.pep
PRRPNIYDGCCQLDIQFSNLDELQVNYNNDRSRDFTNPNLPTEQKGRSSQPGYGDATGMYSGARAGGFSQMANAAAIAAAFGGGLPSGITGTNERCTVLVANLNPDRIDEDKMFNLFSIYGNIVRIKLLRNKPDHALIQMGDGFQAELAVHFLKGAMLFGKRLEVNYSKHANITQGADTHEYANSNLNRFNRNAAKNYRYCCSPTKMIHLSTLPQDITEEEIVSLLEEHGTIVNSKVFEMNGKKQALVQFETEEQATEALVCKHASPLSGSVVRISFSQLQNI

SEQ ID NO: 272024 - protein, 137 aa, Glycine max
  Clone ID: PAT_MRT3847_87657C.1.pep
MDTHAVHLALAALVGASVVAVSAYYMHRKTLAQLLEFARTVEREADAGGSDAESPPAHAKKRRGSSRKRRNGGYRRGSASLPDVTAISGGFDGDEKRNGPVHVEGIPAGLPRLHTLREGKSSQSGSFKRSLLRPTSP

SEQ ID NO: 272025 - protein, 60 aa, Glycine max
  unsure (1)..(60): unsure at all Xaa locations
  Clone ID: PAT_MRT3847_87658C.1.pep
EDIPYIKCQAXYKLSKELHQQVQFNLSDIAPKNISVYQIIDISHNVFYHTKVYSVCIFGI

SEQ ID NO: 272026 - protein, 107 aa, Glycine max
  unsure (1)..(107): unsure at all Xaa locations
  Clone ID: PAT_MRT3847_87659C.1.pep
FTVPRSLKKNPFGGDPFLRKINXLSPKAGKDFIITWARASPLLPPRVGPPLAFPPGKGPFPFFIPGRLGGPKLGGFSPPLNFPGPAKNFYCSKTKRFFSPKFFNRDF

SEQ ID NO: 272027 - protein, 60 aa, Glycine max
  Clone ID: PAT_MRT3847_8765C.1.pep
TIFNIEKSPESAGHAPMKRATKEVAPATVADAGITVHTSLRGAGRMKNQAIIKVTRVIPK

SEQ ID NO: 272028 - protein, 32 aa, Glycine max
  Clone ID: PAT_MRT3847_87660C.1.pep
VVKIYKMCVCLSSGLISVDLGYFNEKNFCVDL

SEQ ID NO: 272029 - protein, 66 aa, Glycine max
  Clone ID: PAT_MRT3847_87661C.1.pep
DGRGGSRRADVTVGVREKSILLRCPDEYTCTRPDYIYACGPSPIYKSAHIVKAPFMMNHDLICIKG

SEQ ID NO: 272030 - protein, 60 aa, Glycine max
  unsure (1)..(60): unsure at all Xaa locations
  Clone ID: PAT_MRT3847_87662C.1.pep
DMVSXQRWNRGRQGKRQWXRRXTRRNHKRMFYLASPLQXTTIIAHFQCCPATCXXVFLMX

SEQ ID NO: 272031 - protein, 62 aa, Glycine max
  Clone ID: PAT_MRT3847_87663C.1.pep
VMEFERRGSTRLLGSVLWVIVAAKGKIVVGSISFLTEYQSLRLAVELLQNFICFIVYNNLNI

SEQ ID NO: 272032 - protein, 33 aa, Glycine max
  Clone ID: PAT_MRT3847_87664C.1.pep
VKAQFEGAEMGVPAKNTACKCGPNCSCNPGPGK

SEQ ID NO: 272033 - protein, 42 aa, Glycine max
  unsure (1)..(42): unsure at all Xaa locations
  Clone ID: PAT_MRT3847_87665C.1.pep
SNVYLIDGWFILCXAXLSLQRFTLSHPPIFHVTNAELXXTSC

SEQ ID NO: 272034 - protein, 65 aa, Glycine max
  Clone ID: PAT_MRT3847_87666C.1.pep
FEPQFPGKLCFPACSQKGPTIVDLFFNLAVGEGVFLPELCEKHKTNPCGAMVELVSSGAAPGPVF

SEQ ID NO: 272035 - protein, 136 aa, Glycine max
  unsure (1)..(136): unsure at all Xaa locations
  Clone ID: PAT_MRT3847_87667C.1.pep
MAASASTGGAVNRALLNLIALGPGVSASSSSFFGSRLKKVIGSRVPNTKISSGSLKIVAVPETREIVETPRTDKDRWKGLAYDISDDPQDITRGKGLXLTPFFQGPQDAGTPYXVMSFFEYLSMDFFRTWTTTGVD

SEQ ID NO: 272036 - protein, 109 aa, Glycine max
  unsure (1)..(109): unsure at all Xaa locations
  Clone ID: PAT_MRT3847_87668C.1.pep
NXISCXLSTIACPNTHYKXNMFNSRSXTNYKTQKQXFLVLLAHMAKXSELVXNXTNYAGKNSKMIXWPVYIIXDIYPNPNTXIGEFPIKFHSXACSIXGKXXTFPFLAL

SEQ ID NO: 272037 - protein, 42 aa, Glycine max
  Clone ID: PAT_MRT3847_87669C.1.pep
RLLGNFPALCLKFLWAPYVLTIETKVCIYLLWGANSSKKTLP

SEQ ID NO: 272038 - protein, 206 aa, Glycine max
  unsure (1)..(206): unsure at all Xaa locations
  Clone ID: PAT_MRT3847_8766C.1.pep
LLPANPDILEGVEDLIQLSYLNEPSVLHNLQSRYXLKDMIYSKSGPILIALNPFKDVQIYGDDYISAYRQKLMDKPHVYAMADAAYNEMMKRXEVNQSFILKXGKKWNLGKTETAKIAMQXLTALGGGCSGIKXKFFRQILILKAFGNAKTSRNDNSSRFGKLIEIHFSAMGKICXAIVQTFLLEKSRXVQLALXEKSYHIFYQLC

SEQ ID NO: 272039 - protein, 45 aa, Glycine max
  Clone ID: PAT_MRT3847_87670C.1.pep
ALLLQLAKKIIPTISNCYPYISIYILDFLYCISFLIYHHLFLFLN

SEQ ID NO: 272040 - protein, 78 aa, Glycine max
  Clone ID: PAT_MRT3847_87671C.1.pep
FVNKKKKKKKKKKKKKKKKKKKKKKKKKKKKKKKKKKKKKKKKKKKKKKKKKKKIKKRGGGFKETNFLCPGCGKKFFF

SEQ ID NO: 272041 - protein, 31 aa, Glycine max
  Clone ID: PAT_MRT3847_87672C.1.pep
RINRSHNNIDNVAKSCLTILAPGRYNATDVW

SEQ ID NO: 272042 - protein, 159 aa, Glycine max
  unsure (1)..(159): unsure at all Xaa locations
  Clone ID: PAT_MRT3847_87673C.1.pep
MQAHTTVLKMAQASSMALSLTCLAGMAANLGPSAPKVGRVIMRKTVTKQAFSGSPWNXPYRVKYLGPFSGEPTSYLTGEFPGDYKMXTAGLLADPQTLFRNRELKVIHSKWAMLSALRXALPKLSSRTGGKFGEAEWIKAGSHILRXGGLDYLGKPSLV

SEQ ID NO: 272043 - protein, 164 aa, Glycine max
  Clone ID: PAT_MRT3847_87674C.1.pep
GCFFFFFFFYFFIYFLFLFFCSNPGTRVFSFSFNAIRLKLKLAPKFQKTPLLLKLGGILNPLLFFFFLVKTELTNRQIVAFAPFPGEAIKTFNPYWWWGGNKLYSYTFFFLRNMGRGCPGKRTKTFFSLISKLVILEHKVSNPPWWKPPKKWGGISPFPPQFFG

SEQ ID NO: 272044 - protein, 63 aa, Glycine max
  unsure (1)..(63): unsure at all Xaa locations
  Clone ID: PAT_MRT3847_87675C.1.pep
MAEXFLFTXEXVNEXHPDKVCDQIXGAXXXACLEXDPXRKVXAEHXRKXXLXMVFGEXTTXXN

SEQ ID NO: 272045 - protein, 116 aa, Glycine max
  Clone ID: PAT_MRT3847_87676C.1.pep
MPQPSLLNFCVTTPTTTAPFTTTTVVVPPITTTSSTTVPSPLMHQLQGIGDPGGAARSMVFINDVAFEVALGPFNVREAFGDDAVLIHASTGQPVLTNQWGLTLHSLQHGACYYLI

SEQ ID NO: 272046 - protein, 403 aa, Glycine max
  Clone ID: PAT_MRT3847_87677C.1.pep
MASSNRHWPSMFKSKPCSPHHQWQHDINASLISTSCHRSPYSSGGGGCEERSPEPKPRWNPKPEQIRILEAIFNSGMVNPPRDEIRKIRAQLQEYGVRGDANVFYWFQNRKSRSKHKLRHLQNSSSKNMNHHHHMNVDQQNHTIPTNSSLPQTTTTAPSSSSSSSSEKSSPKELIIPTTKVFSIGFSDAVPNSPTASVNQTRINDIMLPPPPPVEAFFFPVQQQHDVHHGVTSSSQGFCFSELSNVVHAQQNNVGPCTSLLLSEIVGHGAASAGASKKDKSQMKIMHQPSLLNFCVTTPTTATTSTPTTTTTVVVPPITTTSTTVSSPLMPQLQGIGDPGGAARSTVFINDVAFEVAVGPFNVREAFGDDVVLIHASSGQPVLTNQWGLTLHSLQHGACYYLI

SEQ ID NO: 272047 - protein, 197 aa, Glycine max
  Clone ID: PAT_MRT3847_87678C.1.pep
MSASRFIKCVTVGDGAVGKTCMLISYTSNTFPTDYVPTVFDNFSANVVVDGSTVNLGLWDTAGQEDYNRLRPLSYRGADVFLLAFSLISRASYENVAKKWIPELRHYAPGVPIILVGTKLDLRDDKQFFQDHPGAVPITTAQGEELRKLIGAPIYIECSSKTQQNVKAVFDAAIKVVLQPPKQKKKKRKGQKACSIL

SEQ ID NO: 272048 - protein, 82 aa, Glycine max
  unsure (1)..(82): unsure at all Xaa locations
  Clone ID: PAT_MRT3847_87679C.1.pep
FNMGGVIGGLIPFIXNYHRSEAASVNDGTYIGFMCFMSLGTLLSLAILPACKVVRDDCSRCTNMFYTDVSTECVEVLKLFSN

SEQ ID NO: 272049 - protein, 95 aa, Glycine max
  Clone ID: PAT_MRT3847_8767C.1.pep
PTTNPATGVRVLSINWAFGGMIFVLIYCTAGISGGHINPAVTFGLSLARKVSLTRAVVYMVSQVLGAINAVVLLIAFLRTYYFRSEGNEMVADST

SEQ ID NO: 272050 - protein, 68 aa, Glycine max
  Clone ID: PAT_MRT3847_87680C.1.pep
NFNLKWQGNDLKDSFPREHFFGIPVYKREKPPLFIKKGGGGKKNIFLFFGGGVFFLKKKPPPPFFFFF

SEQ ID NO: 272051 - protein, 479 aa, Glycine max
  Clone ID: PAT_MRT3847_87681C.1.pep
MGSLEAINKPHAVCVPFPAQGHINPMLKLAKLLHFKGFHITFVNTEYNHKRLLKARGPDSLNGLSSFRFETLADGLPQPDIEGTQHVPSLCDYTKRTCLPHFRNLLSKLNDSPDVPSVSCVVSDGIMSFTLDAAQELGVPNVLFWTTSACGFMCYVQYQQLVERDLTPLKDASYLTNGYLETSIDWIPGIKEIRLKDIPTFIRTTDPDDIMLNFARGECIRAQKASAIILNTFDALEHDILEAFSTILPPVYSIGPLNFLLNEVKDKDLNAIGSNLWKEEPGCLEWLDTKEVNTVVYVNFGSVTVMTNDQLIEFAWGLAASNKTFVWVIRPDLVIGENAILPKEFVAQTKNRGLLSSWCPQEQVLAHPAIGGFLTHNGWNSTLESVCGGVPMICWPFFAEQHTNCRFCCKEWGIGLEIEDIERGKIESLVRELMDGEKGKEMKKKALEWKRLAKVAASSPSGYSLVQFEKMIREVLIAF

SEQ ID NO: 272052 - protein, 38 aa, Glycine max
  Clone ID: PAT_MRT3847_87682C.1.pep
QWNDFLCLWILQQLSLKGFAGDTAKAHAKTSMIAGEGV

SEQ ID NO: 272053 - protein, 51 aa, Glycine max
  Clone ID: PAT_MRT3847_87683C.1.pep
LPLSFPILHRHKRKLMPSTNWGNWFSIPYRCAQPITHNWSRVFSCVLNYAC

SEQ ID NO: 272054 - protein, 79 aa, Glycine max
  Clone ID: PAT_MRT3847_87684C.1.pep
PLVIYGGTSSFRNIDIEDNTCYKALNPCLTVYVDIFKLICFVIGVVSNINDVRIGNCYIVVIPFCRLLSRLEPLEPSRI

SEQ ID NO: 272055 - protein, 84 aa, Glycine max
  Clone ID: PAT_MRT3847_87685C.1.pep
CQSPSPVGSFSTSSASPSILAVSSINGNVVAPTSNFNQARVTVYGQIIAGNFANVIQIYRPSCGSTTGSNSGTVPPGTQTSNSG

SEQ ID NO: 272056 - protein, 75 aa, Glycine max
  Clone ID: PAT_MRT3847_87686C.1.pep
LILVLKFSSKPLQIGPLRCWPGGLCLSRSIGDMDVGEFIVPIPYVKQVKLSKAGGRLVIASDGIWDALSSEMAAK

SEQ ID NO: 272057 - protein, 564 aa, Glycine max
  Clone ID: PAT_MRT3847_87687C.1.pep
MYSPISRKKPPMESHVDTILSAIFVLLLSSLTHFSITANATRTPQENSLHFQVANSTCEGTLYSDLCVSTLASFPDLTSKTLPQMIRSVVNHTIYEVTLSASNCSGLRRNLPKLDKLEQRALDDCLNLFDDTVSELETTIADLSQSTIGPKRYHDAQTLLSGAMTNLYTCLDGFAYSKGHVRDRFEEGLLEISHHVSNSLAMLKKLPAGVKKLASKNEVFPGYGKIKDGFPTWLSTKDRKLLQAAVNETNFNLLVAKDGTGNFTTIAEAVAVAPNSSATRFVIHIKAGAYFENVEVIRKKTNLMFVGDGIGKTVVKASRNVVDGWTTFQSATVAVVGDGFIAKGITFENSAGPSKHQAVALRSGSDFSAFYKCSFVAYQDTLYVHSLRQFYRDCDVYGTVDFIFGNAATVLQNCNLYARKPNENQRNLFTAQGREDPNQNTGISILNCKVAAAADLIPVKSQFKNYLGRPWKKYSRTVYLNSYMEDLIDPKGWLEWNGTFALDTLYYGEYNNRGPGSNTSARVTWPGYRVIKNATEANQFTVRNFIQGNEWLSSTDIPFFSDFS

SEQ ID NO: 272058 - protein, 126 aa, Glycine max
  unsure (1)..(126): unsure at all Xaa locations
  Clone ID: PAT_MRT3847_87688C.1.pep
YSSAHAFGALVSNFINLDWRAYLSFLNWMPEALRMPEPELIDHAGLDSVDYLRIYLIGLKIFIPIAFLAWIVLVPVNWTSTGLEGSQIKNITFSNIDKLSVTNDHTGSERVWXHIAMGYAFTFWTC

SEQ ID NO: 272059 - protein, 351 aa, Glycine max
  unsure (1)..(351): unsure at all Xaa locations
  Clone ID: PAT_MRT3847_87689C.1.pep
MESRVLSRAGTLSSLPHLRKPPREAVSSASLVAVKAGIPGSTHASKQTRTHDKQTKQHYDRKGTQSEREGSYRNKEKNFQRGESKRVLLFLFYIYLGAKLCEFIDKPEMATMLTKEHGLNLKETELCLGLPGGGGGGGGGGEVETPRATGKRGFSETVDLKLNLHSKEDLNENLKNVSKEKTLLKDPAKPPAKAQVVGWTPVKXYRKNMMAVQKVSTEDVAEKTTSSTANSGXLSKVSMDGAPYLRKVDLXMYKSYXELSDALAXKMFSSFTMGNYGAQGMIDFMNESKLMDLLNSSEYVPSYEDKDGDWMLVGDVPWEMFVESCKRLRIMKGSEAIGLAPRAMEKCKSRS

SEQ ID NO: 272060 - protein, 44 aa, Glycine max
  Clone ID: PAT_MRT3847_8768C.1.pep
SFERLYTCTFVIDGDSTMEEDYLLNLLYYEKGDNANWLLPATTA

SEQ ID NO: 272061 - protein, 60 aa, Glycine max
  Clone ID: PAT_MRT3847_87690C.1.pep
KVKRWHSEVSSLSACAYRETLTVHDAFKFHVNFFNWHTNQYESIISSIGFCTLITGLSSQ

SEQ ID NO: 272062 - protein, 56 aa, Glycine max
  unsure (1)..(56): unsure at all Xaa locations
  Clone ID: PAT_MRT3847_87691C.1.pep
HYLMNKIPLLLQMNPVHKKIPLLIHNFKPISKSLIADHYIXHVWNDRNPLLPSNPY

SEQ ID NO: 272063 - protein, 30 aa, Glycine max
  Clone ID: PAT_MRT3847_87692C.1.pep
LNGKAPYFRPRPCNPSCHTISRMITHKYEH

SEQ ID NO: 272064 - protein, 110 aa, Glycine max
  Clone ID: PAT_MRT3847_87693C.1.pep
MAISLRMVVAVLGNVASMSLYAAPSVTFKRVIRKKSTEEFSSIPYIIALLNSLLYTWYGLPIISNKWENFPLVTVNGAGIPFELSYVLIYFWFSSPKGKASCIHALPSLF

SEQ ID NO: 272065 - protein, 129 aa, Glycine max
  Clone ID: PAT_MRT3847_87694C.1.pep
EDTIRNLKEKNDMHMQKEETIRKLKEENEGHIQKEAISKETIKKFEEENDKLVQKETSLEMRIAQLQSENNSLLQKEAGLVERSNQLLNEKVGLETRFAQLHSENNSLLQKEATLVERTNQLLNEKEVL

SEQ ID NO: 272066 - protein, 63 aa, Glycine max
  Clone ID: PAT_MRT3847_87695C.1.pep
ILLDKNPGGFLHEKTGSLLLAIFLKLLPVAGNFSGLPGPPNPRFLKNLVGGWEGSIGPLFFPP

SEQ ID NO: 272067 - protein, 205 aa, Glycine max
  unsure (1)..(205): unsure at all Xaa locations
  Clone ID: PAT_MRT3847_87696C.1.pep
MATTAYCSSKEMKALKMVQIQVSQARSWVDGYVRLHGLLDKKYVALEDCVKLYGESESRLSHMLTDMNVYTTHDALTWISSVMTSHKTCLDELKAKGFPEPPQELDKNMTMMLREALVSYAKNRGKPKEPLQETLLESNGGLLASWSSGTSNADFTVAQDGSGTHKTIIEAIDALLQWIVVVLQXQXLYVKSXVYNEKSGYWNQF

SEQ ID NO: 272068 - protein, 104 aa, Glycine max
  unsure (1)..(104): unsure at all Xaa locations
  Clone ID: PAT_MRT3847_87697C.1.pep
MSKIVRRSGKQLHKXPKLISSGDAGFDKRMPPSPVVDATFTGYLPLGRLAVRDMCHTVPVGVFQIVDKMDPPAAKVSKGAQHKECVVRVGSSGDVGYNECWFLL

SEQ ID NO: 272069 - protein, 97 aa, Glycine max
  Clone ID: PAT_MRT3847_87698C.1.pep
LQVVSCKSTWFCTFSSSLSFSTLSRTDILCGFGFLRFDFRLYYFSLYFMVAGFMYVDLLFCFLAFSILLNQSEQIGKIIGHLPRQQILLWNGMNFPC

SEQ ID NO: 272070 - protein, 47 aa, Glycine max
  Clone ID: PAT_MRT3847_87699C.1.pep
IWWPFFAEPQTQCRFCCKEWGNGLENEKGEKEKIKNPVKEVKDGEKG

SEQ ID NO: 272071 - protein, 345 aa, Glycine max
  unsure (1)..(345): unsure at all Xaa locations
  Clone ID: PAT_MRT3847_8769C.1.pep
MRCFGRLTWPRISELIISSFLSKLPDFQKIIVCSSEFEKCNGPFGWLQCFSLTYSRESDFEEGNHFYRFFDHEPLISKCFNFRGTTNDSEPSAAAPAXDRLTKIMCAILESFASEDRRHVDYVAISKCEELRRYVTFTPLRRRGMLFVPSVYATRAFFINLYNAMIVHAIIRVGCQEGVINRKSFFDFHYLIGGHPYSLGAIKNGILRSNRRSPYSLIKPFGTGDRRLEHALVKMNPLVHFGLCNGTKSSPKVRFFSPYRVAEEARSAAREFFENDGIEVDLEKRTIHLTPIFKWHSSDFGQERNILNWIINFLDANKAGLLTHLLGDGGHVNISYMSYDWSINS

SEQ ID NO: 272072 - protein, 157 aa, Glycine max
  unsure (1)..(157): unsure at all Xaa locations
  Clone ID: PAT_MRT3847_876C.1.pep
VWALASTPIFNXLHSGGRDFSLYLXTDLQTRESSLLCSGEHSISSIGLMHDDSIWGASTDLLHFINGHTRMMXPQMIFHRGISSLAGNLSFSTAEVTPEGYYPCSCIYKNLPLTIWSSPAILQHEFLSXRRMCYTTDASGSLKLWYITKGICLEDYG

SEQ ID NO: 272073 - protein, 137 aa, Glycine max
  Clone ID: PAT_MRT3847_87700C.1.pep
PVLFHLTTSLSWCPCFYQLFSLVDDELIFVLEMISSDFLQYTGGLRALLTDRDKLLMTVGGATALAAGIYMTREGSKVTWGYINRILGQPSLIRESSMGKFPGSKIISQAKNKVLHDKTLAGAEKAIGSKNGLGNVI

SEQ ID NO: 272074 - protein, 121 aa, Glycine max
  Clone ID: PAT_MRT3847_87701C.1.pep
LFSPLAHEVAVASHGGHEYPPGAYQPPPGGYSPQDGYAPAGYPPQQGYPAAGYPAHGGYPADCYRPDGYPGSSQAPRSHGHSGIGALLAGGAPAAGADYGAHHVYHGCHGCYGRMHMVLTY

SEQ ID NO: 272075 - protein, 75 aa, Glycine max
  Clone ID: PAT_MRT3847_87702C.1.pep
FRVGQIDSLINVSQFLSSYMHSCLWQIFLTNFVLLIAFEFVLRIVLNYDYTLCLHERVFPGWNFVSYDVLCCLEA

SEQ ID NO: 272076 - protein, 44 aa, Glycine max
  Clone ID: PAT_MRT3847_87703C.1.pep
LKPIFSLLLNVTRCLPQSFFYERCLPHSKTQKAKKRCIKENKCN

SEQ ID NO: 272077 - protein, 59 aa, Glycine max
  Clone ID: PAT_MRT3847_87704C.1.pep
LTKGLLTIVICYATGLETEMDVRMMSDVHLQLSPQTTNALGYTDMETKVTETLVAESMN

SEQ ID NO: 272078 - protein, 36 aa, Glycine max
  Clone ID: PAT_MRT3847_87705C.1.pep
VRNPGSTHASVTILSEDVLVVSLVGGRSVILMYIYV

SEQ ID NO: 272079 - protein, 97 aa, Glycine max
  Clone ID: PAT_MRT3847_87706C.1.pep
QWNLLLFKPSILSLPVRLSASRQTTLYILLLNLCFLNCFDSHDEMSIILLADFHISYLFLINDVVFGKLLQSCLGWKNLILRNYLLFANIYQTLMLE

SEQ ID NO: 272080 - protein, 116 aa, Glycine max
  unsure (1)..(116): unsure at all Xaa locations
  Clone ID: PAT_MRT3847_87707C.1.pep
VCFWXLFFXFFRLXFXLXXAXXLVSFXRCXXXXXLSLXFFXXXXVLPRPFXFGSAXXLXLRXXGLXPXXXXXXGXXVSRCXGSVAXRVPXPRRXXPXPXXCCLXRYARVXXCXXXR

SEQ ID NO: 272081 - protein, 339 aa, Glycine max
  Clone ID: PAT_MRT3847_87708C.1.pep
MAQLLSPVCMEALKIHNPSLNLCSRSSWRMLVKGASPCTFLTHSGSKRRGFGKVRVTAEDSVSPSETIADDYYEVLGLLPDATPEQIKKAYYNCMKSCHPDLSGNDPETTNFCMFINEVYTVLSDPVQRMIYDEIHGYSLTSINPFLDDSSPRDHAFVDEFSCIGCKNCANVAPGVFAIEEDFGRARAYNQCGDPELVQQAIDSCPVSCIHWTSSAQLSLLEDEMRRVERVNVALMVSGMGTASIDVFRMASSRWEKRQSKVLAKAKLRMMREEGSDKKNSYWDNLWGKQKDYQSSDEEVEERAKRAASAARRWREYSSRGVDKPPTFKLPEASLGKDK

SEQ ID NO: 272082 - protein, 55 aa, Glycine max
  Clone ID: PAT_MRT3847_87709C.1.pep
KLVKFSRVFLNCSLDLTGYPFLKGSRITSPQKIILCMSPMLKKNNHVKTALKAPN

SEQ ID NO: 272083 - protein, 66 aa, Glycine max
  Clone ID: PAT_MRT3847_8770C.1.pep
WNHPKHKDKAIIRLLYLCLEGWQKKNWKTNSLNISKTYEKMLILNLFLFLFCDFTSLPFCRLLAAV

SEQ ID NO: 272084 - protein, 598 aa, Glycine max
  Clone ID: PAT_MRT3847_87710C.1.pep
LCQGNKLEHLITFANRFSGTLPDQYGECVSLQYVRIQNNQFSGPVPPSFWALAGLQFLEMSNNRFQGSVSASISRGLTKLILSGNSFSGQFPMEICELHNLMEIDFSKNRFTGEVPTCVTKLTKLQKLRLQENMFTGEIPSNVTHWTDMTELDLSFNRFTGSIPSELGNLPDLTYLDLAVNSLTGEIPVELTNLRLNQFNVSGNKLHGVVPLGFNRQVYLTGLMGNPGLCSPVMKTLPPCSKRRPFSLLAIVVLVCCVSLLVGSTLWFLKSKTRGCGGKSKSSYMSTAFQRVGFNEEDIVPNLISNNVIATGSSGRVYKVRLKTGQTVAVKKLFGGAQKPDVEMVFRAEIETLGRIRHANIVKLLFSCSGDEFRILVYEYMENGSLGDVLHGEDKCGELMDWPRRFAIAVGAAQGLAYLHHDSVPAIVHRDVKSNNILLDHEFVPRVADFGLAKTLQREATQGAMSRVAGSYGYIAPEYAYTMKVTEKSDVYSFGVVLMELITGKRPNDSSFGENKDIVKWITETVLSPSPERGSGDIGGGKDYIMSQIVDPRLNPATCDYEEIEKVLNVALLCTSAFPINRPSMRRVVELLKDHKLS

SEQ ID NO: 272085 - protein, 123 aa, Glycine max
  Clone ID: PAT_MRT3847_87711C.1.pep
APEYAYTVKVTEKSDVYSFGMVLMELITGKRPNDPRVRENKDIVKWITETVLSPSPERGSGNIGIGKDYIMSQIVDPRLNPVTCDYEEIERVLYVALLCTSAFPINRPSMRRVVELLKDHKLS

SEQ ID NO: 272086 - protein, 71 aa, Glycine max
  Clone ID: PAT_MRT3847_87712C.1.pep
KISTLSPRGGTKLYLEKEKHLLVLFFTLDPKGKVIPPLLFWPPLKTKPLQNTKQSPYLESLHKISNPHRPP

SEQ ID NO: 272087 - protein, 79 aa, Glycine max
  Clone ID: PAT_MRT3847_87713C.1.pep
GGPLFAHQSQFGSGGVKRYPCPSQCSGGCSQTPFPKPCLFFFPKCSRKCLCVPPGFFGNKTVCPCSPPWKAQEGGPQGP

SEQ ID NO: 272088 - protein, 81 aa, Glycine max
  Clone ID: PAT_MRT3847_87714C.1.pep
TWNVEWIYPDSTESVSRNGVNIVSLVQMIKHCHCNMYVHPFESQHQHMVADRTRWVGFDMVFFPSPFLCYMFLLKGASIKQ

SEQ ID NO: 272089 - protein, 84 aa, Glycine max
  Clone ID: PAT_MRT3847_87715C.1.pep
RQRHRSSILPLGEHSILRGLPRLLVSPIGPHAMVRKAQALVLSLQILHAHPFKCTSPWVAPSFSPLALWKRNCVYTENHTGVMT

SEQ ID NO: 272090 - protein, 112 aa, Glycine max
  Clone ID: PAT_MRT3847_87716C.1.pep
LFIKSKSSLARCQQVISHVLTFYFSLFFRFLYLKPYSLCFHLFSIFLLLPSRSRHSFVPPFFSHCQPKASTMHSCSAMTPFTPACSLSNLWLTVSSSLLQTCCCCRRHQALC

SEQ ID NO: 272091 - protein, 164 aa, Glycine max
  Clone ID: PAT_MRT3847_87717C.1.pep
MGATEDLVNSTQGAAECQENRTTGPSENPIKDNTSSTSENLVQYKALDAENPVSDQQGGAEIPETGGAENPASDQKNVEQIPASEQVGIAENMVNDQAGGAEDPTKDRTAGGAENPLNDLIFLAQNPESEQAGSVENLLSDQAGVAEDHTKNRAAGSAENPSMT

SEQ ID NO: 272092 - protein, 124 aa, Glycine max
  Clone ID: PAT_MRT3847_87718C.1.pep
LFLFRPRGSQRLRYLEVLVNLSLLSFRIRRDRFRHAASAGVIPDAYIRLASVLLTLDFDRSPSTVVEPRVDSCTESDSTGRAAFAGYALALWSLHSRLCMCVRKELNTTQQLRTGLLETQNMTT

SEQ ID NO: 272093 - protein, 31 aa, Glycine max
  Clone ID: PAT_MRT3847_87719C.1.pep
TKNDPRRSAQCFPSKNKKEVILVNFINLVIR

SEQ ID NO: 272094 - protein, 283 aa, Glycine max
  Clone ID: PAT_MRT3847_8771C.1.pep
MGDDSFPSLDKLRANWTPSQDRYFLQLLLSHVHKGNKTGKVFSRQAWVNMIEQFNTKFGFKYDVEVLKNRHKRFRKQYNDMKMIVGQKGFQWDGTQNMIVADDKAWDECIKAHPDAQPFKKRVIPYYDDLCIIYGHAVADGRYSLSCFDVDFEYEEKDLDDKTITSKGVDDQTPPAVVNQGRIDWSPMMDQFFVELMVDQVCKGNKIDTTFRRKAWVDMTESFNKRFLCHYNRRFLCHYGRVVLRNRFNVLRRHYRSINILLGKEGFSWDKTQHKVVADEQVW

SEQ ID NO: 272095 - protein, 61 aa, Glycine max
  unsure (1)..(61): unsure at all Xaa locations
  Clone ID: PAT_MRT3847_87720C.1.pep
SFFXPXLSLTSSSSXSLSLAXTAXLCSPKPXPXXVNAFPXVSNXKXFRDPCMXXDAHPXNK

SEQ ID NO: 272096 - protein, 66 aa, Glycine max
  Clone ID: PAT_MRT3847_87721C.1.pep
ANIHKHTLSGSNKCAKRPSTNKPTYLSPTSDFRAGARTGIRTYTRLEILERERSQFYRVLTALCCA

SEQ ID NO: 272097 - protein, 179 aa, Glycine max
  unsure (1)..(179): unsure at all Xaa locations
  Clone ID: PAT_MRT3847_87722C.1.pep
MEGLQKFLHFFFVASLLISTTAISDHTPKPYVVYMGNSSPNKIGVESQIAESSHLQLLSLIIPSEESEMIALTHHFSHAFSGFSAMLTESEASALSGHDGVVSVFPDPVLELHTTRSWDFWXSDLGMKPYYSYGTPTLHKHPSTDIIIGLIDTRIWPDSPNFKNEGIGEIPXKWKGVCM

SEQ ID NO: 272098 - protein, 269 aa, Glycine max
  Clone ID: PAT_MRT3847_87723C.1.pep
MAMSNNVIGCINFVAVILSIPIIGAGIWLLNGEADSCVQFLQWPVIILGVLILVVALAGFIGAFFRVSWLLIVYLVAMLVLVILLVSLVAFVYMVTLRGHGNIEPNRAYLEYRMDDFSGYLRRRVRSSFKWDRIRSCLSQTNMCAELNQGYRMAQDFFNARLTPMQSGCCKPPTQCAYTFVNPTYWISPINTAADMDCLQWSNDQTQLCYNCDSCKAGLLANLRKEWRRANVILIITVIVLIIVYLVGCCAFRNVKTEDLFRKYKQGYT

SEQ ID NO: 272099 - protein, 43 aa, Glycine max
  Clone ID: PAT_MRT3847_87724C.1.pep
KSSASQVIKCVTVGDRADGKTWWLISYTSNTFTTVFVPTRLDN

SEQ ID NO: 272100 - protein, 62 aa, Glycine max
  Clone ID: PAT_MRT3847_87725C.1.pep
MAFRWLYLGVIKRNVRGGRLGYVRWPPIWGPPRFGGGFFCFFLKLSPETKFYHPISIIEIPE

SEQ ID NO: 272101 - protein, 125 aa, Glycine max
  Clone ID: PAT_MRT3847_87726C.1.pep
MKFTDSPVIELAVNDAVLSLQQDNGSMHVGTTVWPCSLVLVKFAERWGPPSDNNPYARVLDFQGKRAVELGTGCGVAGMGLYLLGLTDLLLTDIAPVMPALERNLKVNKPILREALEHSVLYWDN

SEQ ID NO: 272102 - protein, 117 aa, Glycine max
  unsure (1)..(117): unsure at all Xaa locations
  Clone ID: PAT_MRT3847_87727C.1.pep
MTMSFFEQVVVIDDEGHLLGRMACIVAKQMLNGQNSSVVRARALNIYXEFFRAKLRYHAYLRTMTRNNPTRGGPFHLRAHWKSLYNAFHGMNPHKTARCADVLERIKVLEGVSAPYD

SEQ ID NO: 272103 - protein, 83 aa, Glycine max
  Clone ID: PAT_MRT3847_87728C.1.pep
RLPVLGFDATNFLLYCAKAGFDALSPLEPIGSFGVRNFVLCKKQVYSSSKAAPQFELASHKSSGGHGWKAWLNKSFGLKIVSH

SEQ ID NO: 272104 - protein, 127 aa, Glycine max
  unsure (1)..(127): unsure at all Xaa locations
  Clone ID: PAT_MRT3847_87729C.1.pep
EIDFDLSPLVNFTPRSSTSLGMVGDMQDPTAPKKAAEPRGISDSRTTAIVDLGGSLLSGGQWERNHPLGNATKPWILRKPPQVTSDDQSRQXRHKATVTYLPNNTLKQGGCQCVGTANREDKGNLGH

SEQ ID NO: 272105 - protein, 110 aa, Glycine max
  Clone ID: PAT_MRT3847_8772C.1.pep
LGLDILPSFVNSSSQPLDFTQPFVWIGPMGLFDLPNFLLGTEVFAKRLAALTVKGVPPFIGGGDYVAVVEKVGLVSVMSPIFMGVGAGWEFLEVKDLQGFLPLDEAVPFA

SEQ ID NO: 272106 - protein, 309 aa, Glycine max
  Clone ID: PAT_MRT3847_87730C.1.pep
MYLKEPLWSETGKDDGESAKTEEEVDGYGAVSEVVKSLQQQRVYREVTLALRTGLRDARAEFSFLRVRALRSILKFLRSVAESDSTIDLFNQIQSIPQLQVVPVLFQHSLKESGDDDYNEKKIKVGDLSHILFGVEPMKLTSPSTDAEVALALRVLEGCCLLHPQSTALAHQHNAIQVLMNILSTRGVLEQGACLDALISLMVDSSSNQMDFEKCSGIMEVADLLRDKQLDENLRLKCGEFLLLLIGHVNGRDPPPLATIHEDTRRLLGEKSASLIWAASQFGSTLDPEQRLTALQIQARRVLESLDLY

SEQ ID NO: 272107 - protein, 130 aa, Glycine max
  unsure (1)..(130): unsure at all Xaa locations
  Clone ID: PAT_MRT3847_87731C.1.pep
YRSGGCAVALQPPWSAVIAKPMQSASARVLSWASEAVVQKILLNPPDHRQHAVRICSMGWVSRHWXXILVKSSXHXXPAIAXPIMAIPTQSRIAEPLRCPPSFVSRPXPVVXXNLXAAIMLRSIXGPHXX

SEQ ID NO: 272108 - protein, 309 aa, Glycine max
  Clone ID: PAT_MRT3847_87732C.1.pep
MYLKKPLWSETGKDDGGSAKTEEEDHGDGAVSEVVKSLQQQRVYREVTLALRTGLRDARAEFSFLRVRALRSILKFLRSVAESGSTIDLFNQTQSIPQLQVVPVLFHHSLKESGDDDYNEKKIKVGDLSHILFGVEPMKLTSPSTDAEVALALRVLEGCCLLHPQSTALAHQHNAIQVLMNILSTRGVLEQGACLDALISLMVDSSSNQMDFEKCSGIMEVADLLRDKQLDENLRLKCGEFLLLLIGHVNGRDAPPLATIHEDTRRLLGEKSASLIWAASQFGSTLDPEQRLTALQIQARRVLESLDLY

SEQ ID NO: 272109 - protein, 164 aa, Glycine max
  unsure (1)..(164): unsure at all Xaa locations
  Clone ID: PAT_MRT3847_87733C.1.pep
MATCVPAVSGALHYGVTNCKGHSYRRSASFSDVPNTGFLQKDLSWSKVVSKVLQIHRCGFSAPSLHKDQKLFKVISSWKKDSPTKYFDFIVXIGSGIAGLRYVLEVAKYGSVAVITKAESHECNTNYAQGGVSAVLCPSDSVESYIKDTIVAGASSCDEESVRL

SEQ ID NO: 272110 - protein, 295 aa, Glycine max
  Clone ID: PAT_MRT3847_87734C.1.pep
MNLPIIDLSSPDPLSTAISIRQACIEYGFFYLVNHGVENDLVKAFDESKRFFSLPPGEKMKLARKEFRGYTPQDPTLGLHGDSKESYYIGPMADSASVKLNQWPSEELLENWRPSIEAIYWKLFEAGKKLYSLIALSLNMDEDFFDKIGAVDKPSAFLRLLRYPGEMGPHQEICSAHSDTGALTLLMTDGVPGLQICRDKLKEPRVWEDVPYMEGAFIVNIGDLMERWTNCLYRSTMHRVKRTGKERYSMAFFLDPHPDCVVECLKSCCSESCPPRFTPIRSGDYMDEILSNTPV

SEQ ID NO: 272111 - protein, 40 aa, Glycine max
  Clone ID: PAT_MRT3847_87735C.1.pep
KLPNKMVSQLSIDSKNQKDYKALYTKIVLDIRLGYTTLKI

SEQ ID NO: 272112 - protein, 57 aa, Glycine max
  Clone ID: PAT_MRT3847_87736C.1.pep
RVHQLISDSFNPTNNFVLLRLIFQEITLWSNNNLIELSMDVYNKKRIQSRLKKIYWS

SEQ ID NO: 272113 - protein, 84 aa, Glycine max
  unsure (1)..(84): unsure at all Xaa locations
  Clone ID: PAT_MRT3847_87737C.1.pep
VRGGVPPFGVLGGRFTPLFGVFSFFPLVLGGLFCCXXGRGFPVFSLGRPGVFGGCFPAVKLFYXWGWLVLSSRVPGWALFPFFV

SEQ ID NO: 272114 - protein, 70 aa, Glycine max
  unsure (1)..(70): unsure at all Xaa locations
  Clone ID: PAT_MRT3847_87738C.1.pep
GALAGFAQVVQMEXDKAXWGFKALKQTVKLFYXLGRFKEMMXAYREMLTYIKSXLTLTYRENCLNSFMDY

SEQ ID NO: 272115 - protein, 75 aa, Glycine max
  Clone ID: PAT_MRT3847_87739C.1.pep
GGAATWINFRHKGLSSTILLSKPLISRSFFITSLIGFLGLPLPQIGWLLSIWATLLIQDERIHPQKLKFSRFFFP

SEQ ID NO: 272116 - protein, 85 aa, Glycine max
  unsure (1)..(85): unsure at all Xaa locations
  Clone ID: PAT_MRT3847_8773C.1.pep
PQLNKINRLAPRVSIWGLNKFLVFCYYSRCTRTVTSLLIVLGIQYNSIYLSLSWCIRQIXPXANFILYNTFLYFSFIITIRMFSH

SEQ ID NO: 272117 - protein, 35 aa, Glycine max
  Clone ID: PAT_MRT3847_87740C.1.pep
SLTNIQLVLDTVDLSYSDLIGCDLEETVSPLIMCN

SEQ ID NO: 272118 - protein, 122 aa, Glycine max
  Clone ID: PAT_MRT3847_87741C.1.pep
MPTIVKPSSETEASDMRLAKVKVDADFNAPCDPSILYPAEGNMHWFTAVTACAVLDVQCLPSGSEYGGHCTYYQNFPFSSYSDGLSIPEEERTAYEWLQEKEKPENLKVVVKMYSGPKIVEN

SEQ ID NO: 272119 - protein, 171 aa, Glycine max
  Clone ID: PAT_MRT3847_87742C.1.pep
HFEQEFSDPRDADDARYSLDGRDVEGSRIIVEFAKGGPRGSRENLGRGLPPGSGRCFNCGIDGHWARDCKAGDWKNKCYRCGERGHIEKNCKNSPKKSSRHGRSLSRSPVRSHSPRRGRSRDRSYSRDRNYSRSRSPVRRERSPVSEDRSQSPEPSKIRKHSTSPDQSSPT

SEQ ID NO: 272120 - protein, 81 aa, Glycine max
  Clone ID: PAT_MRT3847_87743C.1.pep
ARGKHFGFKAYRTKKHVIIKKEIDISCNRIIKIKRVGFVGWSYLRPPQFDSAHLPHGSMGYRVPFMGCSWGTYIHPILLVF

SEQ ID NO: 272121 - protein, 37 aa, Glycine max
  Clone ID: PAT_MRT3847_87744C.1.pep
CQTPFVSGSLASSTQTAPTVAHNSTDIAHHITVINRA

SEQ ID NO: 272122 - protein, 98 aa, Glycine max
  unsure (1)..(98): unsure at all Xaa locations
  Clone ID: PAT_MRT3847_87745C.1.pep
MDSTYFLGIELQKXFPHLKQLLGHALQLLASVEFSHIVESPVIQTEISTVPLGWNNGGVKDGEPLKVYITGFGWHLCTHVQVNGNWCCHYAIKHHLLV

SEQ ID NO: 272123 - protein, 125 aa, Glycine max
  unsure (1)..(125): unsure at all Xaa locations
  Clone ID: PAT_MRT3847_87746C.1.pep
GKNRLSCYITYHSLFNLMSFLCYVGSVRHSWIRCASNHAPSSCCMTLPYSFSHLGLLSGLVLHILYVFLGTWLSXCLSRVLYMEFLTREGAGCVRCTNHVIQGFEVLDGLLAPCCKGGGGASQLN

SEQ ID NO: 272124 - protein, 97 aa, Glycine max
  Clone ID: PAT_MRT3847_87747C.1.pep
RSWRWEEECRSRSARRRRVWRREALRVRAKRRPTKREKREIMAINGNLHFPCCCSEELSWWCESSCFSLFIALVNLVREEEEKKRADAWADAWADAW

SEQ ID NO: 272125 - protein, 75 aa, Glycine max
  Clone ID: PAT_MRT3847_87748C.1.pep
RRRASKFSFLACPGVLPWFLLIARPLFLLAVDICIVFHGVFFWVSSGFSLSFSWTIISFFRVHVGFSHRPDILVG

SEQ ID NO: 272126 - protein, 47 aa, Glycine max
  Clone ID: PAT_MRT3847_87749C.1.pep
GSPNKLNHPTPNQHKNHFFIPLKGGYHALQISPRAHPRSQWVPIYFP

SEQ ID NO: 272127 - protein, 192 aa, Glycine max
  Clone ID: PAT_MRT3847_8774C.1.pep
ERHILLRVLPVLVVLVTSSEKDSESLYKRVKINRLINIFKNEAVIPAFPDLHLSPAAILKELSTYFPKFSSQTRLLTLPAPHELPPREAQEYQRHYLIINHIGAIRAEHDDFVIRFASAMNQLLLLKSTDGSDVEWSKEVKGNMYDMIVEGFQLLSRWTARIWEQCAWKFSRPCKDASPSFSDYEKVVRYNY

SEQ ID NO: 272128 - protein, 68 aa, Glycine max
  Clone ID: PAT_MRT3847_87750C.1.pep
RGTNLVNQRGSPLLLRTMLNIYQKCIYVRERVKTLLKCDPEMLYGELNRMEQLTIFHISWSQPNALTH

SEQ ID NO: 272129 - protein, 73 aa, Glycine max
  unsure (1)..(73): unsure at all Xaa locations
  Clone ID: PAT_MRT3847_87751C.1.pep
QYDRGLQMTLKRNVDKENYNDTYHLVERSSGKVMRRTRLSLNSXEKQVKACIEKGVLTVTTLKEEAMKYNVKP

SEQ ID NO: 272130 - protein, 53 aa, Glycine max
  unsure (1)..(53): unsure at all Xaa locations
  Clone ID: PAT_MRT3847_87752C.1.pep
SFGFLNAPVEKIAGAVPLPYAPNLEKMAVPQVXNIVFSPKKACSRFVPLAPFA

SEQ ID NO: 272131 - protein, 63 aa, Glycine max
  Clone ID: PAT_MRT3847_87753C.1.pep
GWRLKQNHSFKKTMGILQPGEHAKNGVTPSIPFSKKQNREGGSLVTIQGLQLEWKTFRKKLYR

SEQ ID NO: 272132 - protein, 436 aa, Glycine max
  Clone ID: PAT_MRT3847_87754C.1.pep
MSPAAGVSVPLLGDSKGTPPPASVPGAVFNVATSIVGAGIMSIPAIMKVLGVVPAFAMILVVAVLAELSVDFLMRFTHSGETTTYAGVMREAFGSGGALAAQVCVIITNVGGLILYLIIIGDVLSGKQNGGEVHLGILQQWFGIHWWNSREFALLFTLVFVMLPLVLYKRVESLKYSSAVSTLLAVAFVGICCGLAITALVQGKTQTPRLFPRLDYQTSFFDLFTAVPVVVTAFTFHFNVHPIGFELAKASQMTTAVRLALLLCAVIYLAIGLFGYMLFGDSTQSDILINFDQNAGSAVGSLLNSLVRVSYALHIMLVFPLLNFSLRTNIDEVLFPKKPMLATDNKRFMILTLVLLVFSYLAAIAIPDIWYFFQFLGSSSAVCLAFIFPGSIVLRDVKGISTRRDKIIALIMIILAVVTSVLAISTNIYNAFSSKS

SEQ ID NO: 272133 - protein, 82 aa, Glycine max
  Clone ID: PAT_MRT3847_87755C.1.pep
LKSPCQKLEYKTAGSESFQAQQRRFGIPKVVVSFRLGSGSLKGVRFSNQFYSALVSPAQFYINKPLTFSPLMGELFKGLPVP

SEQ ID NO: 272134 - protein, 118 aa, Glycine max
  unsure (1)..(118): unsure at all Xaa locations
  Clone ID: PAT_MRT3847_87756C.1.pep
PRVRNFSLRANIDEVLFPKKPMLATDNKRFMILTLVLLVFSYLAAIAIPDIWXFFQFPGSSSAVGLAFIFPGSIXLRDVHGISTRRDKIIALVMIILAVVTSVLAISPNIFNAFSSKS

SEQ ID NO: 272135 - protein, 343 aa, Glycine max
  Clone ID: PAT_MRT3847_87757C.1.pep
MASLMLNGAHQNPNLISGIAPNGLNFHNKCLFQKGVLSHGNKLRVVRKNFTPKGSMSASSSSSSRPGSQPRFIQHKKEAFWFYRFLSIVYDHIINPGHWTEDMRDEALEPADLYNRNLRVVDVGGGTGFTTLGIVKHVDAKNVTILDQSPHQLAKAKQKEPLKECKIVEGDAEDLPFPTDYADRYVSAGSIEYWPDPQRGITEAYRVLRIGGIACVIGPVHPTFWLSRFFADVWMLFPKEEEYIEWFKKAGFKDVKLKRIGPKWYRGVRRHGLIMGCSVTGVKPLSGDSPLQLGPKVEDVKKPVNPFVFLYRFILGTIASTYFVLVPIYMWIKDKIVPRGMPI

SEQ ID NO: 272136 - protein, 95 aa, Glycine max
  Clone ID: PAT_MRT3847_87758C.1.pep
PSLDCALELFTIPLSKSPSRAHPLSIAYIINSCTVLHPLSFETSLSLVVYSAAIESLSPWCGPPVRCAPILTQVKTLSSLSLFYLLKVKWTSPYS

SEQ ID NO: 272137 - protein, 50 aa, Glycine max
  Clone ID: PAT_MRT3847_87759C.1.pep
PPNLCFPFVLWWAPGLPLVLLPRVTEYTQMVGLAQNPSSPKNPKKNIKQK

SEQ ID NO: 272138 - protein, 37 aa, Glycine max
  unsure (1)..(37): unsure at all Xaa locations
  Clone ID: PAT_MRT3847_8775C.1.pep
KRVKERTEIEKSTHEVLYQIGEXGSTNPKFHQLELVI

SEQ ID NO: 272139 - protein, 46 aa, Glycine max
  unsure (1)..(46): unsure at all Xaa locations
  Clone ID: PAT_MRT3847_87760C.1.pep
LVCLYXLRLYSIVFLGEIAEAYLFNQLGLCHIPTFFYLLQREFIFD

SEQ ID NO: 272140 - protein, 67 aa, Glycine max
  Clone ID: PAT_MRT3847_87761C.1.pep
PNLRHHKNHGGEPSRNIGDCSQRRMTWNHTGQMNVTGTNRQRIQIPACHMDPKPRATPAPTIERSDQ

SEQ ID NO: 272141 - protein, 63 aa, Glycine max
  Clone ID: PAT_MRT3847_87762C.1.pep
RLFGCASRVVLLCIFQRLSILPGNSYGHVAASSNWLSFRKTWSPPTPRSKLKGRPKRKLILDH

SEQ ID NO: 272142 - protein, 44 aa, Glycine max
  unsure (1)..(44): unsure at all Xaa locations
  Clone ID: PAT_MRT3847_87763C.1.pep
AAKTDDPKNTFHXSNNTLPLSEYDCVSVSXMDXXXVRXVKKSTY

SEQ ID NO: 272143 - protein, 86 aa, Glycine max
  Clone ID: PAT_MRT3847_87764C.1.pep
IKVLFSSSRNMKRAIEFFLQLSLERQRLPFYGKRVGPFILLFPRKIAENMGVFFLSWSSPGIGSKKNVGGVPKLGKFLSVRVPFQW

SEQ ID NO: 272144 - protein, 60 aa, Glycine max
  Clone ID: PAT_MRT3847_87765C.1.pep
SVFRPGRGTVVVHARARWMDMRDIGNGNPYSEQMVRNGRRSVRLRCCSACFLGIIGVIYV

SEQ ID NO: 272145 - protein, 37 aa, Glycine max
  Clone ID: PAT_MRT3847_87766C.1.pep
SRRPQKTHLMLSKSDKSSQSLMPCPLYCEIGHHQQVS

SEQ ID NO: 272146 - protein, 63 aa, Glycine max
  Clone ID: PAT_MRT3847_87767C.1.pep
LGTLGVSICFYIFFLSIRQSFVSYNNQYIIRHLLYILTLGNQNCTSSFKTNNFLSRIRMQYTY

SEQ ID NO: 272147 - protein, 81 aa, Glycine max
  Clone ID: PAT_MRT3847_87768C.1.pep
PAGKPPQSPTQKTPDRPPRRHPRGYPLRFRGGRGAEKRAAHEFPQGTGTPPLKPSPKRENYKASRDPSRNPGGNPGSAHAA

SEQ ID NO: 272148 - protein, 38 aa, Glycine max
  Clone ID: PAT_MRT3847_87769C.1.pep
FCLFKVTNQSVLQHELKVATHPLFKAILTFEKAPLPTD

SEQ ID NO: 272149 - protein, 193 aa, Glycine max
  Clone ID: PAT_MRT3847_8776C.1.pep
NSYMSSVRKMACEILELMAEGLKIQQKNVFSKLLMDKESDSVFRVNHYPACPELVNGQNMIGFGEHTDPQIISLLRSNNTSGLQIFLRDGNWISVPPDHKSFFINVGDSLQVMTNGRFRSVKHRVLTNGFKSRLSMIYFGGPPLSEKIVPLSSLMKGKESLYKEFTWFEYKNLTYASRLADNRLGHFERIVAS

SEQ ID NO: 272150 - protein, 139 aa, Glycine max
  unsure (1)..(139): unsure at all Xaa locations
  Clone ID: PAT_MRT3847_87770C.1.pep
MDHTPASAITQAKKDLVTSIKEKLEAVSSLKSIFRVPEKLLEANEKMYIPSTVSIGPLHHGKEGLKYMEDRKWHYLFTLLSRQPNQLESSLHEFVNALSDLEKPARNFYAEELNLTCNQFMEMMXVDGXFIIELFLNIL

SEQ ID NO: 272151 - protein, 89 aa, Glycine max
  Clone ID: PAT_MRT3847_87771C.1.pep
QRGGVFWFFSLCKRGPPLYSVSFWGENSQANLFFFPYCGAHSRLLAYKGALFFFRLGSNYICFLTQSNMEIFGMGLVNLLCCINIKNIV

SEQ ID NO: 272152 - protein, 42 aa, Glycine max
  Clone ID: PAT_MRT3847_87772C.1.pep
SQNLSYCDIYPSDVQETGIWINGQLLYPDIHSYTNVILIINV

SEQ ID NO: 272153 - protein, 59 aa, Glycine max
  unsure (1)..(59): unsure at all Xaa locations
  Clone ID: PAT_MRT3847_87773C.1.pep
RKTLWXMLXDALXFNDESLXXXLDIXSIXVXLXQFXXLPXXDXPFPXRHSDDAXILQXX

SEQ ID NO: 272154 - protein, 95 aa, Glycine max
  unsure (1)..(95): unsure at all Xaa locations
  Clone ID: PAT_MRT3847_87774C.1.pep
REXELKAQITAIIDXSKEXXKAETESGDVGPLVTEADIQHIVSSWTGIPVXKXSSDESDRLLKMEETLHTRIIGQDEAVKAISRAIRRARVGLKN

SEQ ID NO: 272155 - protein, 90 aa, Glycine max
  Clone ID: PAT_MRT3847_87775C.1.pep
TAVVAVLAGYGLALFASSCSPGAASGGNAPGSSYLLHPLAHPISTVAPGTVAALSAASIVVWGAAQLLFKPETQPHCLVTGTWHISSDRS

SEQ ID NO: 272156 - protein, 119 aa, Glycine max
  Clone ID: PAT_MRT3847_87776C.1.pep
VKHIFGREGNGRENVRPVSGEQEVHKGPSVREPAHQERPAEKERKTQGYLAKLAEQAERYEEMVECRKKAGTLVPDLTAEDRNLLSTGYKNVTGAPRASWSMTPSIEHTDESKGNERTV

SEQ ID NO: 272157 - protein, 44 aa, Glycine max
  Clone ID: PAT_MRT3847_87777C.1.pep
QVRSNVGVTTRDFPRSLTIVKQTAQVPSLDINPQLKANKACVPH

SEQ ID NO: 272158 - protein, 57 aa, Glycine max
  Clone ID: PAT_MRT3847_87778C.1.pep
KRYGGRVEFYQPTLSFTRMKLYTHVRTGRDSLVLSFKCTTSAYNICIILEGTMQWDF

SEQ ID NO: 272159 - protein, 115 aa, Glycine max
  unsure (1)..(115): unsure at all Xaa locations
  Clone ID: PAT_MRT3847_87779C.1.pep
VKKVALVLVTGDRCLCGGWTTALIKKADAPITELNDLGSESTAISGGQTGNSYFIRERYLPVAPFIYGAPLATAKEAHARADDAPSLLGRPKVYRGELLXTALNSLVKEDPTSYT

SEQ ID NO: 272160 - protein, 75 aa, Glycine max
  Clone ID: PAT_MRT3847_8777C.1.pep
EYLLKKIGHSLNHLGKNNYPPKNRRHQVLTLFFASCHYHFDDSGISVSQGRQDCKTQLNMSYPFPFLFCAMQPFF

SEQ ID NO: 272161 - protein, 50 aa, Glycine max
  Clone ID: PAT_MRT3847_87780C.1.pep
GLIRGLFIRICTTGDFMCFSIVVIVGGSNLYWPSPLGFSFSVEKIKNYKF

SEQ ID NO: 272162 - protein, 209 aa, Glycine max
  Clone ID: PAT_MRT3847_87781C.1.pep
MAIFSESNHHHNTSDGVSQRVNSPRFSGPMTRRAHSFKRNNNNIAANTAATTSHGGAGGSGAGEVELQINSPRSEEASEGVPVGKHSHHHVTQRVHVRGLLKKPLASIVEDLGLRERKKIGHWMFLVFCGVCLFMGVLKICATGWLGSAIERTQSNKELSDSIASLNLMDKSSLGYAYRGGASDVERTLKTVATGDGSHTAMTEDSGIW

SEQ ID NO: 272163 - protein, 94 aa, Glycine max
  Clone ID: PAT_MRT3847_87782C.1.pep
RAPIEKRPGIDLAIALDKKGVEGQSLPKRAHPYKGGNSDLGIKRGNVRSRVTEPLYFRRKVTLTGLGAWVKRDRWLERGGTYQKGGSWKRGAWA

SEQ ID NO: 272164 - protein, 63 aa, Glycine max
  Clone ID: PAT_MRT3847_87783C.1.pep
SVKTGWVQPSYHVSRGAGVELTISKASTRGWSFQQSFKKEMKRIKVGTFIGHVTWEALHLLAA

SEQ ID NO: 272165 - protein, 45 aa, Glycine max
  Clone ID: PAT_MRT3847_87784C.1.pep
LGSNLITTLHSSFTIFGNQCGIQTVVIPCHMVFVVSKFGFGPNSM

SEQ ID NO: 272166 - protein, 81 aa, Glycine max
  Clone ID: PAT_MRT3847_87785C.1.pep
PSRRCYGTLLAVKTSLVLPASSLFLMGMLASRAELSGAQAVQPRVWESAVRLDPVVVVVVVNLFLCIQSSTRSLSCEHTVQ

SEQ ID NO: 272167 - protein, 95 aa, Glycine max
  Clone ID: PAT_MRT3847_87786C.1.pep
LALTRVSVEKRVASEILPLIRFWEHLHRLNTLLTCFRHFFKLHTVIHLLLTYISRVMTIVICESLHSNPMMPPPSLTRLLAFALCSFPTARSTVQ

SEQ ID NO: 272168 - protein, 28 aa, Glycine max
  Clone ID: PAT_MRT3847_87787C.1.pep
GLNPRLCKIQKLILSPDLNEMGNKFIVL

SEQ ID NO: 272169 - protein, 56 aa, Glycine max
  unsure (1)..(56): unsure at all Xaa locations
  Clone ID: PAT_MRT3847_87788C.1.pep
MRISESKRVKERSVIEXSTHEVLYQIGEXGSTNPKFHQLELVIKQTTDKESGKVCI

SEQ ID NO: 272170 - protein, 306 aa, Glycine max
  Clone ID: PAT_MRT3847_87789C.1.pep
MSSGTTYWCYTCRQPIWLEGREAICPYCDGGFVQELNELRGVARQHCFSSRMEDAHQMPDIMDAVRAVMEQRGSEPRIRVRDAVDNFMRQRMAGRYTNFDVRRRSGSGSGSGSILIPDETWGVFSSGPYLIFHGQAPGFTNSNGSSRGGPRRVDFGDYFLGPRLEGLIEQHISNDRLGPPPASHSSIDAMPTIKITHEHLQSDSHCPVCKERFELGSEARKMPCNHVYHSDCIVPWLVLHNSCPVCRVELPPKEHTSSRGRRIWGNGSGSGSSNDISRGRENRQMNNGRRNLLSYLWPFRTSSSST

SEQ ID NO: 272171 - protein, 170 aa, Glycine max
  unsure (1)..(170): unsure at all Xaa locations
  Clone ID: PAT_MRT3847_8778C.1.pep
VTFAEGIWDVPLNGLFSVRKDRCESSQNPSTPMVSIDLAIMDAKEPQDLLAGSDYMAFLRLDPKGEKLAGIQWSIPNLPGDKSELWVGYISENGXIYRRKCDAGNNPSLVEPPADPRWTPDGELYLFTDRKNGFWNLLNWIETENKAXPVYSLEAELAGPLWMFGVNAYE

SEQ ID NO: 272172 - protein, 85 aa, Glycine max
  unsure (1)..(85): unsure at all Xaa locations
  Clone ID: PAT_MRT3847_87790C.1.pep
MDTKPIEISCGMKIGGYNKRLKHYSLTLGCYMIFHIYLHSSASTYHKCPVLDLLSGLTCSDXNYIFKSCAQRTDFVEGVALVAPD

SEQ ID NO: 272173 - protein, 63 aa, Glycine max
  unsure (1)..(63): unsure at all Xaa locations
  Clone ID: PAT_MRT3847_87791C.1.pep
YQSHRGPLLPLVIPIVILRFTSSLRLWGAIYSTAQENDPRXSVRVATVRHRKRPRIRWFXVCQ

SEQ ID NO: 272174 - protein, 50 aa, Glycine max
  Clone ID: PAT_MRT3847_87792C.1.pep
SLLTDDYRPSMQFHNLNSEKQTIRLQVIIGGRTFKISILNIVAKPLFTLT

SEQ ID NO: 272175 - protein, 88 aa, Glycine max
  Clone ID: PAT_MRT3847_87793C.1.pep
MTWLAYELKQFWNIHKLFLSVSVRIVLYPQPDCDKGFNFQWWCNLQRLCLDLINVKFVGTKNRSVIMGNGIVRCMQHDSPRWMLECCY

SEQ ID NO: 272176 - protein, 135 aa, Glycine max
  Clone ID: PAT_MRT3847_87794C.1.pep
SIPRCRPARKTEVESFNKEGIMEMRRRYLNQKTMRRSLSDLEFEEVQGFKDLGFSFEKETLSPSLASILPGLQEKKRDETEEDKAARRPYLSEAWLVQSCAPAIPNWTSHKSSGDMKVQIKFWARAVASNVHLKC

SEQ ID NO: 272177 - protein, 37 aa, Glycine max
  Clone ID: PAT_MRT3847_87795C.1.pep
TARWDNTGTGHLCYNMYVRTTLCVMKNTRQIKMGREK

SEQ ID NO: 272178 - protein, 109 aa, Glycine max
  unsure (1)..(109): unsure at all Xaa locations
  Clone ID: PAT_MRT3847_87796C.1.pep
MKRTTIRELNRLCGGDEKLLRERTHLLXTSCSKMAICKKDVRRAECGIPSRFPLTAIGNSICNEMLIRYIYEKLLRQAKAPSMLSQSFKKXCSLGVYSDDTNECHEYAS

SEQ ID NO: 272179 - protein, 98 aa, Glycine max
  Clone ID: PAT_MRT3847_87797C.1.pep
IYIYILGILPNTDIFHIYMNSLCDPLSLLTLSNEERLVCCKSLVGFTNQERHGTLFCRCLAVNQVLFDLRRSQVTGSPASFRGTIGELFGPVSFSIAR

SEQ ID NO: 272180 - protein, 116 aa, Glycine max
  unsure (1)..(116): unsure at all Xaa locations
  Clone ID: PAT_MRT3847_87798C.1.pep
QEHHMKVSSMKIIVGKLVGMYIHHVLPFSLLTSXXSFVDKSILQEPTVHTTSLLKFWPRPSLSFLYSVHAIFFFVFPIQLIFNSFFVLVQLPCCVVVTLCIXASRKFAISTARYFF

SEQ ID NO: 272181 - protein, 54 aa, Glycine max
  unsure (1)..(54): unsure at all Xaa locations
  Clone ID: PAT_MRT3847_87799C.1.pep
XLKNTSRLDSVRKNTNWGVKKERPNSGPRKKARILSIWRGFQDLVKHLKPLTVY

SEQ ID NO: 272182 - protein, 48 aa, Glycine max
  unsure (1)..(48): unsure at all Xaa locations
  Clone ID: PAT_MRT3847_8779C.1.pep
QVVLEKSVPTLVGIXCSKDEILPRLLILDKPMTRCFTILPMESNLVVQ

SEQ ID NO: 272183 - protein, 42 aa, Glycine max
  Clone ID: PAT_MRT3847_877C.1.pep
SSQWTEAQRNLTRRMRADRTLHLDLHALILHTQKDWGDCSAR

SEQ ID NO: 272184 - protein, 53 aa, Glycine max
  Clone ID: PAT_MRT3847_87800C.1.pep
SISLCIVQTQNQSFKHCIHNVPKTRHKNPKMWLHHTHVRDTRHQLLLLRPNVI

SEQ ID NO: 272185 - protein, 61 aa, Glycine max
  Clone ID: PAT_MRT3847_87801C.1.pep
LSYHSSVTLIESEEGGRWRSHKTEKKRKKPRPLSAVTILFTVFSRIILTPITSRCPLSSPH

SEQ ID NO: 272186 - protein, 117 aa, Glycine max
  Clone ID: PAT_MRT3847_87802C.1.pep
EEDGSKLAATGTTSPEPIWPVELIEHAKQKLKGDSHVCCDSDMDGSDLDDEAIMTVANQATMNQNLNFFMVPNNQPLTTWVFPFLLLALLLSLVLLTRRPQESFYVLDEGTSVVTRI

SEQ ID NO: 272187 - protein, 54 aa, Glycine max
  Clone ID: PAT_MRT3847_87803C.1.pep
REWGQINLAPKSFKIFGPQKRGDSLGPKLNKSTQEDWGGSFTSPFTYLWGGEFD

SEQ ID NO: 272188 - protein, 117 aa, Glycine max
  Clone ID: PAT_MRT3847_87804C.1.pep
GCPSKIGWLAIVGLALYIIFFSPGMGTVPWVANSEIYPLRYRGACGGIASTTCWVTNLIDPQTFLTLTEAMGTAWTFMLTGSVALIGIFLGLTLLPQTMGVPMEEVELMLDERAVPS

SEQ ID NO: 272189 - protein, 38 aa, Glycine max
  Clone ID: PAT_MRT3847_87805C.1.pep
SEVKGKSAGLLELNPILAKPPAKTRWKPAYQSHLPLFL

SEQ ID NO: 272190 - protein, 49 aa, Glycine max
  Clone ID: PAT_MRT3847_87806C.1.pep
PPLRQVRRRRASCTPSELSIAQPEFFVARHLIEVHNARHNIEAIMHLSG

SEQ ID NO: 272191 - protein, 73 aa, Glycine max
  Clone ID: PAT_MRT3847_87807C.1.pep
MSGKGGGSQKAGIPPASRKMVQSLREIVSNIPEHEIYATLKDCNMDPNEAVSRLLSQDPFHEVKSKREKKKEG

SEQ ID NO: 272192 - protein, 188 aa, Glycine max
  Clone ID: PAT_MRT3847_87808C.1.pep
MSGKGGGGQKAGIPPASRKMVQSLKEIVSNIPEHEIYATLKDCNMDPNEAVSRLLSQDTFHEVKSKREKKKEGKDTTDSRSRVVSNTSSRGGGARVSADRYVGRGGATQFSSGGDSGLLQGKPVLKKENGTPAYGGLTAPASSALDNNVNRQLPSYSDSVRVCDGLSSSQYGDASMGGRTQVKYQWLT

SEQ ID NO: 272193 - protein, 80 aa, Glycine max
  unsure (1)..(80): unsure at all Xaa locations
  Clone ID: PAT_MRT3847_87809C.1.pep
MSLISIVIGELQSLSKINLSSNALSGSIPDFIGDFPSICLVDLSKNGFTVEIPSALFTYCYKTKXVSLSHNNLAGSIPAS

SEQ ID NO: 272194 - protein, 40 aa, Glycine max
  Clone ID: PAT_MRT3847_8780C.1.pep
FQVLDILPHHSACDIKEVCTPKPLGMFTAQVLLELKGITT

SEQ ID NO: 272195 - protein, 141 aa, Glycine max
  unsure (1)..(141): unsure at all Xaa locations
  Clone ID: PAT_MRT3847_87810C.1.pep
KEEADGDKTGRKGREEEAGTXGQRREEEKPKKREKKSKKVKHKNGDXGSPEGTRPXGTKQGXXAKGGEKASAKXERXGKDGKEAXKGKGGGGGAXAAKRGKADEGAPAXATKDGXXXKSTSARKSDFKETXKNXSLPXGRN

SEQ ID NO: 272196 - protein, 48 aa, Glycine max
  Clone ID: PAT_MRT3847_87811C.1.pep
MAELKLSESRDLTRIERVGAHSHIRGLGLDSSLEPRALSDGMVGQTAA

SEQ ID NO: 272197 - protein, 45 aa, Glycine max
  Clone ID: PAT_MRT3847_87812C.1.pep
GNVDYSRPYDRLRGTTSTYKYITLELYLASCNSYYYKLANKAIYV

SEQ ID NO: 272198 - protein, 68 aa, Glycine max
  Clone ID: PAT_MRT3847_87813C.1.pep
GRPFLWLKRILFLLREKIDQTFLRSHELFGSTQVKTKSFFTLLHQTTRSKTVDLSESSYKYSKQNAPR

SEQ ID NO: 272199 - protein, 53 aa, Glycine max
  Clone ID: PAT_MRT3847_87814C.1.pep
MEAERPPLPQHNSHTNKKPFSRLNQYVATTRVGKWFKLSQRNSTFTTELRAGT

SEQ ID NO: 272200 - protein, 111 aa, Glycine max
  Clone ID: PAT_MRT3847_87815C.1.pep
LFSPPVTINARKDFSKQQRRNSSTAAYVVQLMNRVQGIMEQKCLSPQYISNTDSSTQTTPTKLNYIFIYHSADKFPLENIDKQKTSKSNSKTRKSIVCSQQQQKPRFQHRF

SEQ ID NO: 272201 - protein, 41 aa, Glycine max
  Clone ID: PAT_MRT3847_87816C.1.pep
GKNEKESKRGETPHCDCYIYQESRPAIMYWHFPNYERVNNI

SEQ ID NO: 272202 - protein, 147 aa, Glycine max
  unsure (1)..(147): unsure at all Xaa locations
  Clone ID: PAT_MRT3847_87817C.1.pep
GCEKTTEGGSKREQERERRGRNATDGEERGGTKPSKRXANGEGVSLTKAGTAXSHPXXNQKPRHPGXDPNQHRKXSAEQTHAXRQRRTEEGXREAAQEQENXRQTAPXPKKEKEKGEPTQARXXKXXRPPGHNAERAKAAERNDEKK

SEQ ID NO: 272203 - protein, 125 aa, Glycine max
  Clone ID: PAT_MRT3847_87818C.1.pep
DYADPVSPFGATSILNECPALRANANSLNGQLPVQTYAGNLPKLESVDQVWTPNNENLTLSLLNITRPDFLLASDWYDLGSGHCKNQTITTDAATAFLGDDLATDLKHMTAGISKTMFENPFQPL

SEQ ID NO: 272204 - protein, 51 aa, Glycine max
  unsure (1)..(51): unsure at all Xaa locations
  Clone ID: PAT_MRT3847_87819C.1.pep
GTNMCTXYLMFRGGENLTKNSFLKNLGEKTGGGGAFRPEPLFLGAPPMLFL

SEQ ID NO: 272205 - protein, 49 aa, Glycine max
  Clone ID: PAT_MRT3847_8781C.1.pep
KNPPRARQPKPPTCKPPSKRIPPFRLWNPGPGKGPAPCRRQKKKPPPEK

SEQ ID NO: 272206 - protein, 71 aa, Glycine max
  Clone ID: PAT_MRT3847_87820C.1.pep
MNRSALLAASVAAASATAASLSSSAKLSLQDGGAQRDHGGSSPAASSASTEKFAPRFDGLRFIETLITAHR

SEQ ID NO: 272207 - protein, 55 aa, Glycine max
  unsure (1)..(55): unsure at all Xaa locations
  Clone ID: PAT_MRT3847_87821C.1.pep
LLYQLKDLKAQLSLLQNVPRSSAXTPNELYKMXAFRLSIAQVLTAIHQKQKAALG

SEQ ID NO: 272208 - protein, 42 aa, Glycine max
  Clone ID: PAT_MRT3847_87822C.1.pep
VFQRPILIYNHVKGSTNQNLTVNKYFILPLLATMVLSKPLLA

SEQ ID NO: 272209 - protein, 74 aa, Glycine max
  Clone ID: PAT_MRT3847_87823C.1.pep
MGDRVETLAILPQWKIDNFGPWSYKKSDPFKLGIWNWCVLNVLRNKYLYIHLFPEPSQVLKDNPPFSRFVLRVF

SEQ ID NO: 272210 - protein, 124 aa, Glycine max
  unsure (1)..(124): unsure at all Xaa locations
  Clone ID: PAT_MRT3847_87824C.1.pep
LLVLADTQEFSVGNFPADSWLPICVNCLYSVSQLPSEAXVYVYVTCGIGRGGLPTTGWISIVATNLSLDIIKRIRTALVKGXKIVFLTRIDPFSEFLLVCLFGLINEIXLSFNTYNPILLRLFV

SEQ ID NO: 272211 - protein, 40 aa, Glycine max
  Clone ID: PAT_MRT3847_87825C.1.pep
VNIEILSNLLQHLYLSLPFLFFLLSFNLPCFWRYESSDAW

SEQ ID NO: 272212 - protein, 43 aa, Glycine max
  Clone ID: PAT_MRT3847_87826C.1.pep
LSMGCSKIKHGQNPIIFLPWNLIIISLHILRNALNNTLLYYII

SEQ ID NO: 272213 - protein, 72 aa, Glycine max
  Clone ID: PAT_MRT3847_87827C.1.pep
YHQILNITTNYILTPSRIIYNNIHILKKQLQKTNFNFQSYKDKINDNHYNINFNKHIPYLIINITYIFQMNP

SEQ ID NO: 272214 - protein, 78 aa, Glycine max
  Clone ID: PAT_MRT3847_87828C.1.pep
THQSIFHTTSSKQSYYITTFGQLINSLIIKAILNTYHSYKISSNQYYINLIQTIYSPLHFIISHLFRPFNIPHGSNLF

SEQ ID NO: 272215 - protein, 68 aa, Glycine max
  Clone ID: PAT_MRT3847_87829C.1.pep
MWKISLALRKEFFRHQQLGSRENGPQMIDKAPPKFVRKGGVRGKGGPHNSDCKVKSVRQRIWGKWGAE

SEQ ID NO: 272216 - protein, 97 aa, Glycine max
  Clone ID: PAT_MRT3847_8782C.1.pep
VDAGAHFLPSLREGGLRGGCRRHFGGDVAAGGAGEAGGVCAAEHRELRVKSLGLASSESERARAIGSVSLCLMRTREKRTRAKKMKSYFLGFTFKEK

SEQ ID NO: 272217 - protein, 70 aa, Glycine max
  Clone ID: PAT_MRT3847_87830C.1.pep
LKTKIFFPINFFFLGGSRNTIWSPEFGYILGAPNFFYLAGGARTLNPPKLESFLKVFNRGGVFFFFLKVL

SEQ ID NO: 272218 - protein, 230 aa, Glycine max
  unsure (1)..(230): unsure at all Xaa locations
  Clone ID: PAT_MRT3847_87831C.1.pep
RKNKIYYFISVPFHSNTFQCFPVPAFPRSGNAPPPPTVPPPQLAPSPPSPTXTLIEISQNPRPSSPXPTTAPLPRRKTLSIITTLPPPTSSSASSSTLPLRSIPFPTPTTTSTSTPTSSAAPNTSPRSSPTGGSAASRRSSRPPPPATATATSTSSASTSVWLPPAARSNRISPSWSFSTRTTSPRRWTARRRRWICYRWRWSSFSKIACAGAWISSRRCRGRRTKRSEW

SEQ ID NO: 272219 - protein, 33 aa, Glycine max
  Clone ID: PAT_MRT3847_87832C.1.pep
MVMIFALLVSFLAVKQVVYLDNLEDRVWGLHFG

SEQ ID NO: 272220 - protein, 47 aa, Glycine max
  Clone ID: PAT_MRT3847_87833C.1.pep
ASLCLSHVFQHELWGNHPKFFKNSPCVVLSACVNTGVWENQNIPARH

SEQ ID NO: 272221 - protein, 75 aa, Glycine max
  Clone ID: PAT_MRT3847_87834C.1.pep
LESLGGKISPGEPLCPLFPQAFITTPFGESWSPSGSRPGIIPGAAGLIFRGPFFFFFFFFFFVSLSPFCRLLAAV

SEQ ID NO: 272222 - protein, 249 aa, Glycine max
  unsure (1)..(249): unsure at all Xaa locations
  Clone ID: PAT_MRT3847_87835C.1.pep
SVHDHVVGVSVVVPASKSEGYAKILRLEGQDPMLNAAKVSLGVLGAISKVKLSLERRFKRSITYNFTAEDDHIEDVYVDHAKMYEFADLTWYPSRHTVVYRYDSRVPLNASGDAVYDFIGFQANSILVSESVRAAEKLLESTRNANGXKCLTASTTLGLKKLVGNGLKNNGQIFTGYPVVGYQGKMQTSGSCLYSSRFDTACAWDPRIKGLFFYESTAIPFXPGEIRDFPXDVRKLRDLKXPENFCGVD

SEQ ID NO: 272223 - protein, 72 aa, Glycine max
  unsure (1)..(72): unsure at all Xaa locations
  Clone ID: PAT_MRT3847_87836C.1.pep
RLELEPNRLECQNLAATFWRCTNTXEADDEADDPGALAAVGCLRAISTLLESVSSLPQLFVHLEPALLPIMR

SEQ ID NO: 272224 - protein, 364 aa, Glycine max
  unsure (1)..(364): unsure at all Xaa locations
  Clone ID: PAT_MRT3847_87837C.1.pep
NSRVDPASVSRSNRKPLPSSSSSSSVATEAEQKEILEXLVSNLPLEKSSKAATATRFLFGLLRTTNILNASEACRDALEKKIGLQLEEATLDDLLVPSYSYLNETLYDVDCVERILSQFLEGLEARTAAETTEDAAATRSPALMLVGKLIDGYLSEIASDANLKPEKFYNFAISLPDEARLFDDGLYRAVDVYLKAHPWVSEEEREKICGLLDCQKLTLEACSHAAQNERLPLRAVVRVLFFEQLQLRRAIAEKLGAAEEPSRHSAAMAEEEEVEDDNNTWQVTVRENQVLRLDMDSMRTRVHELERECSSMKRAIEKMDKMGPRGGGPWRASLALGRKFGCKFKTQVCDSHEPATREGRPHRR

SEQ ID NO: 272225 - protein, 59 aa, Glycine max
  Clone ID: PAT_MRT3847_87838C.1.pep
IVPLYDQLKYTGTGAARKFAVWRMKVSNIGVITHTVFGGTNGLVSISYGRTYSTDCFME

SEQ ID NO: 272226 - protein, 51 aa, Glycine max
  Clone ID: PAT_MRT3847_87839C.1.pep
QLFINGPLVLYFKLPVKGGVSSVGHFVSNQLECFSVQIGIQSPIMILKFPP

SEQ ID NO: 272227 - protein, 437 aa, Glycine max
  Clone ID: PAT_MRT3847_8783C.1.pep
MVDLDWQTKMVHSNIMPPMSPKLSLPDHNIPIPTLQLPLRQNDITAASSPICAAYDNYLRLPELRALWASKDFPNWANEPILKPALHALEITFRLLATVFSDPRPYINKREWTRRVESLATAQIQIIAMLCEDEEENPETRGKAPVTDINGFTGQSRSYSEESLLPRLATWQKSKDVAQRILNSVDYEMGRCTYTLGLGEANIAGKKIFLFDAVCRPREIHSLETTPFDDYVGNHENKTLHATQQIAECWTRSVKKLLERVTESVEKKALEKAASECHAVERIWKLLTEVGDMNLMMDPEDFLRLKKELGMMRTAGETVAFCFRSRELVEVARVCRNLREKVPEILEVEVDPKGGPGMMEAAMKVYSEKEKGKVHVLQGMQGIEVAMKRFFYAYKQVVTVMMGSSEADNGFTKIFLEPTYFPSLDAAKTFLGYYNQN

SEQ ID NO: 272228 - protein, 133 aa, Glycine max
  unsure (1)..(133): unsure at all Xaa locations
  Clone ID: PAT_MRT3847_87840C.1.pep
RTKQTARKSTRGKAPKKQLATKAARKSAPTTGGVKKPHQYHAGTIALRKIEKYQKSTXLVMQKLPLQKLGSXMTEDFKTDLHVQSRXMLALRKAAEAYVGKLCRDTNLGTMHAKRIAIRRKDIRLARKIGGKR

SEQ ID NO: 272229 - protein, 166 aa, Glycine max
  unsure (1)..(166): unsure at all Xaa locations
  Clone ID: PAT_MRT3847_87841C.1.pep
GKATYASRFVRTCRLKQEECFGGSTFMKIADLKSLFPLVMGNIHMRITKCKELDASYGTITTNTTLLCHHTKLLSLSESHEPYTLKXVQDGDWRTLYVLDYYNTLNHCFTAHPKFDRGYIEHVYIYXYAHTPPYIAYIGMARRYCVHNPCPITRSSSMGMRDVGMT

SEQ ID NO: 272230 - protein, 102 aa, Glycine max
  Clone ID: PAT_MRT3847_87842C.1.pep
WLSSLISADADTTGYRAGAGMAATVTDLKSMDATAMSKTDIDIITIGSNSAKWHFMQAWPPVDTNKTDTENSLPDLADAPLADEVHILIRTGSNTILQIEPD

SEQ ID NO: 272231 - protein, 108 aa, Glycine max
  Clone ID: PAT_MRT3847_87843C.1.pep
RAGGLVLKMGYTLEILCEGGKRAKGTGTNMAGWHIRWTRATHGVLSESEVKLVIKWCNQHVYRTEICAHLELGVFPLPIQMKTTQHHPIGVSGTRRCRARGHFRNQVT

SEQ ID NO: 272232 - protein, 87 aa, Glycine max
  Clone ID: PAT_MRT3847_87844C.1.pep
PFLCLHFQFQALRSMVQSNPQILQVFIFSITFLTFGHFLMSNDFYFPLQPVLQELGKQNPGLLRLIQEHHGEFLQVDSRGSPGTELE

SEQ ID NO: 272233 - protein, 124 aa, Glycine max
  unsure (1)..(124): unsure at all Xaa locations
  Clone ID: PAT_MRT3847_87845C.1.pep
LFFFHMILIRKVSDSVAENLXGITTYEYVVAMRAMSEAPAGASVDEDLPNILFSPTGSATTGLSGGSSLGLQYKGAWCTPPRVFVDYQDEVVPHLEPGMLPSTVDPDAAGIAERGQKMPKRPVR

SEQ ID NO: 272234 - protein, 36 aa, Glycine max
  Clone ID: PAT_MRT3847_87846C.1.pep
ILVASASKKKKKKKKKKKKKKKKKKKKKKKKKKKKK

SEQ ID NO: 272235 - protein, 61 aa, Glycine max
  Clone ID: PAT_MRT3847_87847C.1.pep
RPAEYKRSRIPRNRRTDNRAYGGAISGRAARERIIRAFIVEEQKNVKKVLKIQTAQAKQAS

SEQ ID NO: 272236 - protein, 53 aa, Glycine max
  unsure (1)..(53): unsure at all Xaa locations
  Clone ID: PAT_MRT3847_87848C.1.pep
EVFREFGISHKLXKNXSKRRSHVSRRNNIYHHQXSKVILQRCIMLGDTFCKMI

SEQ ID NO: 272237 - protein, 174 aa, Glycine max
  Clone ID: PAT_MRT3847_87849C.1.pep
FHEGVSHIGFVHYLSPSIVVLVKQEGSCRSLKTFLSRFHESLHYFAAMFDSLDDCLPLESTHRLRIEKQLLGKEIKSMLNYDMDDGVEYYCPKYDRMETWKGRMENHGFVGRKISSKCVIQAKLLLKMRTHYYPLQFEEEGGGGFRVSERDEGRVISLGWQNRFLLTVSAWQPV

SEQ ID NO: 272238 - protein, 80 aa, Glycine max
  Clone ID: PAT_MRT3847_8784C.1.pep
IWLKKKKKKKKKKKKKKKKKKKKKKKKKKKKKKKKKKKKKKKKKKKKKGGPFKRTKVNYPGLAKKKFFKGAPKIKSTGRG

SEQ ID NO: 272239 - protein, 98 aa, Glycine max
  unsure (1)..(98): unsure at all Xaa locations
  Clone ID: PAT_MRT3847_87850C.1.pep
MADREPKPKDSPSEKDVKSPNIFERAKEENKAIFHHDKSPCHHKETCWTSDDIDVXTSPDEIKAPGVFERVKEEIEAVAEAIHPKKESESDTRDVSPK

SEQ ID NO: 272240 - protein, 44 aa, Glycine max
  unsure (1)..(44): unsure at all Xaa locations
  Clone ID: PAT_MRT3847_87851C.1.pep
SSEGVLHALRLLTNLNIDHQDLNVNXNQAMTYILRYIIIQKLRT

SEQ ID NO: 272241 - protein, 41 aa, Glycine max
  Clone ID: PAT_MRT3847_87852C.1.pep
EVICGFFRNIYRFQQNEKLVAFHLEMIPCIIFHSTVRPKSR

SEQ ID NO: 272242 - protein, 156 aa, Glycine max
  Clone ID: PAT_MRT3847_87853C.1.pep
MVFPMELLRLADWILYQLLANSCYRAARKMKSYGFHLGYLSSKPSLQPSSFPSVTECDWEGRGSQTLVACGIHRVLLRSHSFFPYFMLVAFEGGSILRALLLLLSCPVLWILDHELSLRVMTFITFCGLRTSAMENMSRAVLPKFYLENLNLHAYE

SEQ ID NO: 272243 - protein, 124 aa, Glycine max
  unsure (1)..(124): unsure at all Xaa locations
  Clone ID: PAT_MRT3847_87854C.1.pep
RLGGGANTFPKCYTYSADLGAEIGGTLELVYTVFSATDAERNARDSHVPILXPLPMGLAVXFLMHLPTILVRGTGINPARILCAPIIYNKDQAWDDHSIFRVGPFVGAVLANMYHLILIMAIHF

SEQ ID NO: 272244 - protein, 113 aa, Glycine max
  Clone ID: PAT_MRT3847_87855C.1.pep
PFWAERLWRKDLCGRKYTFPVHSLGAAVSAGGVCYNIYMRCEHPQSILLDFRLCEKYLVTYICHEPCNLRDVNRVVINLFEVRSGRVIMIFKESDDAFVVARVGGVTYVSWPV

SEQ ID NO: 272245 - protein, 256 aa, Glycine max
  unsure (1)..(256): unsure at all Xaa locations
  Clone ID: PAT_MRT3847_87856C.1.pep
MASNPSLLPEIGPDGLAKEAPVIGYTEKIIEAEQLQLQKYXIQENYSKIRNVERELANLSLEMKLTAGPKKAALEHLRKKIEESTERIRVAKLKEEQARKVWESASKVVRDEEALKQKLCEDLSNLVQESSNSQFARLEELKKRXLEALNPTRASTNLYHDGRSGASSQDSTPXPGSSVPNAKETNEGSTESVPNQSNGQQVAVQNGPNQQPNEGEGRSKRKVNFQPKGKGIGAVAKGRSSTPGWTGAGFDVDGRT

SEQ ID NO: 272246 - protein, 89 aa, Glycine max
  Clone ID: PAT_MRT3847_87857C.1.pep
MAALDTFLFTSESVNEGHPDKLCDQVSDADLDACLAEDPDSKVACETCTKTNMVMVFGEITTKANVDYEKIVRETCRNIGYVSNDVGLD

SEQ ID NO: 272247 - protein, 53 aa, Glycine max
  Clone ID: PAT_MRT3847_87858C.1.pep
RHTFKRPSTTHIIRNDLVLVRILSEDFRTAVLSISPHDTISTAYPIVFYSEPS

SEQ ID NO: 272248 - protein, 161 aa, Glycine max
  unsure (1)..(161): unsure at all Xaa locations
  Clone ID: PAT_MRT3847_87859C.1.pep
MADHYTSVILVDGXQREGILNEACSLARHCGIXKLIALYEDIHISIDGDTEIAFTENADQRIEALGWYAMRVKNGHTGYDETRAAIKEALAARDTPTLMKATTTIGSWSPNKANSYRVHGSALRTSXADATWKNLAWPYXPLHVPQDVEKHWRRHTPDGAK

SEQ ID NO: 272249 - protein, 466 aa, Glycine max
  unsure (1)..(466): unsure at all Xaa locations
  Clone ID: PAT_MRT3847_8785C.1.pep
MCVSLSYKYTTIFHFLFKSNAPNMVDLDWQTKMVHSNMPPKSPKLSLPDNNIPIPLRQNDITAASSPICAAYDNYLRLPELRALWASNDFPNWANEPILKPTLHALEITFRLLATVLSDPRPYINKREWTRRVESLATAQIQIIAMLCEDEEENPETRGTTPPVSDINGFIAQSRSYSEESLLPRLATWHKSKDVARRILDSVEYQMMRCTYTLGLGEANLAGKKIFLYDAVCRPSEIHSLETTPFDYVGNCENXPLHATQQIAECWTRAVRKLLERVVESVERKTLEKAARECHAVERIWKLLTEVEDVHVMMDPEDFLRLKKELGMMRNCGEMVAFCFRSRELVEVARMCRDLRQKVPEILEVEVDPTGGPGMMEAAMKVYSEKEKRNGFEKVHVLQGMQAIEVAMKRFFYAYKQVVAVMMGSSEADNGFTQIFLEPTYFPSLDAAKTFLAYYWENNNQNGVPC

SEQ ID NO: 272250 - protein, 46 aa, Glycine max
  Clone ID: PAT_MRT3847_87860C.1.pep
CAQTQSVMNTNWPPDIDAELAELGSYAFEKAPSSLAHLTLTMRCNC

SEQ ID NO: 272251 - protein, 62 aa, Glycine max
  Clone ID: PAT_MRT3847_87861C.1.pep
LNFKSNKTFIFVCTRCLEEGADEYFLKPAQQSDVNKLRPHLMKSKATDLLVFPILDKITYIT

SEQ ID NO: 272252 - protein, 79 aa, Glycine max
  Clone ID: PAT_MRT3847_87862C.1.pep
AASRIQNKSNPCTGAPTSSTIDTESSIKMPRLPIHNSQQMHFTLSLCNSVRITNVKVSAPVDIPHTDAIHISESTNVII

SEQ ID NO: 272253 - protein, 77 aa, Glycine max
  Clone ID: PAT_MRT3847_87863C.1.pep
LRVLYKPSLFIGVVLPFGIFGGHSFLYTSVTFFIGHCSYFLKTHWLSYSPKTRAIFVDSPPPPPPPPPPPKKEDVIQ

SEQ ID NO: 272254 - protein, 62 aa, Glycine max
  unsure (1)..(62): unsure at all Xaa locations
  Clone ID: PAT_MRT3847_87864C.1.pep
RDEAATVQMKNVERFLWRREKVVKVKGDASXXGXDGGTMATVLEAATLXXGCVIELMTLFPL

SEQ ID NO: 272255 - protein, 196 aa, Glycine max
  unsure (1)..(196): unsure at all Xaa locations
  Clone ID: PAT_MRT3847_87865C.1.pep
YYTLPLLFWDSKQSKEPSQKLTFSLGSVESGVAGATLVSPLFLSSLLIPALAGGGPGGYGQEVTRGQDLTGKDFSGXGTLIKQDFKTSILRQANFKGAKLIGASFFDADLTGADLSDADLRNADFSLANVTKANLSNANLEGALATGNTSFKGSNVTGADFTDVPLREDQREYLCKVADGVNPTTGNATRDTLFCN

SEQ ID NO: 272256 - protein, 48 aa, Glycine max
  unsure (1)..(48): unsure at all Xaa locations
  Clone ID: PAT_MRT3847_87866C.1.pep
VFXSNSKXTXWXCLWIAXKLLLLGVALFLFCXDLXSLFTHHXXXXPHH

SEQ ID NO: 272257 - protein, 122 aa, Glycine max
  unsure (1)..(122): unsure at all Xaa locations
  Clone ID: PAT_MRT3847_87867C.1.pep
SSIIFRSXPAPPTPPPSARSEPPRRTPXPPTPPNQPDPPNKHHLCPDAYPKHPNPSLHQTRRATFASPLPXDSLLPPPTTATTPTRPPSPRFSSTISISVVESTSSKSSSSSMASFPPFPLL

SEQ ID NO: 272258 - protein, 33 aa, Glycine max
  Clone ID: PAT_MRT3847_87868C.1.pep
KQRDLYEGPSFLRRWGGGSMTTPCIPYAPSHIE

SEQ ID NO: 272259 - protein, 62 aa, Glycine max
  unsure (1)..(62): unsure at all Xaa locations
  Clone ID: PAT_MRT3847_87869C.1.pep
FRGCALMPNIGYGXDKKIRHYLPNGLKNFVAHIVRDSXLIMMHNKTYCANIAHNVSARTRND

SEQ ID NO: 272260 - protein, 41 aa, Glycine max
  Clone ID: PAT_MRT3847_8786C.1.pep
SYLNKRVFLMTHEETLLVTHSRDLVRKCRRGLGVVAHACHP

SEQ ID NO: 272261 - protein, 63 aa, Glycine max
  Clone ID: PAT_MRT3847_87870C.1.pep
AMKNSIKRLTSGSHMENDLLINITMIIMILSIPQKMSYQLADYAPVGEIMQIPFSITTVINLG

SEQ ID NO: 272262 - protein, 37 aa, Glycine max
  Clone ID: PAT_MRT3847_87871C.1.pep
HCVLRVDPYTVIFLCNLPLFSSRNCSLFIFCPDFYFF

SEQ ID NO: 272263 - protein, 62 aa, Glycine max
  Clone ID: PAT_MRT3847_87872C.1.pep
PLFRAPSIPSVTTTANGSPPLLTTITFARLSSWTNSNRMPLAPRNALFQSDLKLSSSVNDLN

SEQ ID NO: 272264 - protein, 111 aa, Glycine max
  unsure (1)..(111): unsure at all Xaa locations
  Clone ID: PAT_MRT3847_87873C.1.pep
MKARSATLQTTAATDDDMKLSGIVGSPFVCKLHIRLKFKGVEYRSVEEDSSHMSDIXSNTNADHKNVPLCAHIDPSIAQSLVRVAYIDETWXNIRILPTDPYQEALDRFWF

SEQ ID NO: 272265 - protein, 62 aa, Glycine max
  unsure (1)..(62): unsure at all Xaa locations
  Clone ID: PAT_MRT3847_87874C.1.pep
LQLQCNLFMCCVLTSKTCTVLRPSYVSSKALGFRPHLSTCFLTYLALCDSSFAPFGKKKXAC

SEQ ID NO: 272266 - protein, 61 aa, Glycine max
  Clone ID: PAT_MRT3847_87875C.1.pep
IRLEAQFAADQPAHCTWMRSLPIHPTFPSRVIVTNIEMLINSLLYHQSLERECSAVVATAH

SEQ ID NO: 272267 - protein, 61 aa, Glycine max
  unsure (1)..(61): unsure at all Xaa locations
  Clone ID: PAT_MRT3847_87876C.1.pep
NNLSAAANTTADRLTACNCLKSVVCHFSGFXANNAASLPGKCXVSIPYKISTSTNCSTIKV

SEQ ID NO: 272268 - protein, 70 aa, Glycine max
  Clone ID: PAT_MRT3847_87877C.1.pep
SALNPSRNDSGNESPLKIALFSLAKMCAHPLCRQFIRSSPLFPVIGRLQQSPESSIAKYASAIISKVAEP

SEQ ID NO: 272269 - protein, 63 aa, Glycine max
  unsure (1)..(63): unsure at all Xaa locations
  Clone ID: PAT_MRT3847_87878C.1.pep
MVPGGKLEVDVNLKFNPTKSCQTLRNSIEIFPKAFPNDSKTIEVFEGDGKXPGFIRHISNGEG

SEQ ID NO: 272270 - protein, 198 aa, Glycine max
  unsure (1)..(198): unsure at all Xaa locations
  Clone ID: PAT_MRT3847_87879C.1.pep
MALLTFPHFSSHFPLLSSHFPSLSFSFPNTRSFSSTRRYCSMKATGTAILWFKHDLRTDDHPALLAASAFPSLVPIYVFDHRILSRFSDETLELVLLAVEDLRKSLKDRGSDLVIRFGNAENVIQQLATEVKATCVFAEQEVEYELRFIIDVVKQRLKSVSXSQGSPRIELWRTPFYDIKDLXNLPASYDEXKKLRLS

SEQ ID NO: 272271 - protein, 58 aa, Glycine max
  unsure (1)..(58): unsure at all Xaa locations
  Clone ID: PAT_MRT3847_87880C.1.pep
MRAPAAGRVARDAQDVWSECCPRLVSLVASESNEVCDQEQRRTXIAPVHVLKALWGLG

SEQ ID NO: 272272 - protein, 56 aa, Glycine max
  Clone ID: PAT_MRT3847_87881C.1.pep
SLHGGQTTALDDSATPTVVATYNNDHQPIEVSSHDSVLTFNRCHVIVSGTGLIFVQ

SEQ ID NO: 272273 - protein, 35 aa, Glycine max
  Clone ID: PAT_MRT3847_87882C.1.pep
NLQDYRKKKKKKKKKKKKKKKKKKKKKKKKKKKKK

SEQ ID NO: 272274 - protein, 281 aa, Glycine max
  unsure (1)..(281): unsure at all Xaa locations
  Clone ID: PAT_MRT3847_87883C.1.pep
MVKSTYEKFSKDFVMGGVAAIISKSAAAPIERVKLLLQNQGEMIKRGQLKKPYLGVSDGFKRVFMEEGLIAFWRGHQANIIRYFPTQAXAAGATTSLLLYHLDYARTRLGTDAIECRVTSQRQFKGLIDVYRKTLSSDGIAGLYRGFGISIWGITLYRGMYFGIYDTMKPIVLVGPFEGKFLASFFLGWSITTFSAVCAYPFDTLRRRMMLTSGHPNKYCTAIHAFQEIVRQEGFRALFRGFTANMLLGMAGAGVLAGYDQLNRISSRHSHYNETNQRVLK

SEQ ID NO: 272275 - protein, 77 aa, Glycine max
  Clone ID: PAT_MRT3847_87884C.1.pep
EKLIHRGIPIHRFASLPWKHLKPKVVVPSLSVRLPNCKPGQKVNRLKGLGLPICKENGKMGPPPCLEPPHNGGGSQG

SEQ ID NO: 272276 - protein, 131 aa, Glycine max
  unsure (1)..(131): unsure at all Xaa locations
  Clone ID: PAT_MRT3847_87885C.1.pep
KDFVMGGVAGIISRSAAAPIERVKLLLQNQGEMIKRGQLRKPYLGVSDGFKRVFMEEGLIAFWRGHQANLIRYFPTXGYFKSIFGYSKERDGYIKWFAGNVASSSAAGATTXSLLLSHSKYARTRLGTDAI

SEQ ID NO: 272277 - protein, 258 aa, Glycine max
  Clone ID: PAT_MRT3847_87886C.1.pep
MVKSTYERFSKDFVMGGVAAIISRSAAAPIERVKLLLQNQGEMIKRGQLKKPYLGVSDGFKRVFMEEGLIAFWRGHQANLIRYFPTQAFNFAFKGYFKSIFGYSKERDGYIKWFAGNVASGSAAGATTSLLLYHLDYARTRLGTDAIECRVTGQRQFKGLIDVYRKTLSSDGIAGLYRGFGISIWGITLYRGMYFGIYDTMKPIVLVGPFEGKFLASFFLGWSITTFSAVCAYPFDTLRRRMMLTSGHPNKYCTAIHA

SEQ ID NO: 272278 - protein, 59 aa, Glycine max
  Clone ID: PAT_MRT3847_87887C.1.pep
TLIQTNLWVGGARIAKKLLLHDKIGWFDLTARRRLLVVVAALTPLKALMASLAHKLLKL

SEQ ID NO: 272279 - protein, 72 aa, Glycine max
  Clone ID: PAT_MRT3847_87888C.1.pep
LNRSSIKSSTKTVTVVFVCVKPWSASDSRVGHDLPSVRVWAMGMRLSKPYCGGICLFTNSTKSVENRLLFRY

SEQ ID NO: 272280 - protein, 125 aa, Glycine max
  unsure (1)..(125): unsure at all Xaa locations
  Clone ID: PAT_MRT3847_87889C.1.pep
MQSPSSLYLNKTFFTTHHHHHHHLGFHHTLSSTHNSLPPLGFLPKPSCSTRLITAQDYRPNNHKRNDYPKEGVRVRGNKDNVWSIDNELAKACSSQKEKRRKXRGRRVXGGRAQRVGRVLALGLC

SEQ ID NO: 272281 - protein, 104 aa, Glycine max
  Clone ID: PAT_MRT3847_8788C.1.pep
DKPEPPPEGRLPDATKGSDHLRDVFGKAMGLTDQDIAALSGGHTIACYDFEFGVLATLQNYAAIILRKNVTSKLLYHYWRKIAKRIVGGSCTQGGAPGNQRAPG

SEQ ID NO: 272282 - protein, 54 aa, Glycine max
  Clone ID: PAT_MRT3847_87890C.1.pep
RQGAIIERNFAGCESQELSYSIDNGDEDEDENEKEGKDENISDACQCDHVDGIH

SEQ ID NO: 272283 - protein, 28 aa, Glycine max
  Clone ID: PAT_MRT3847_87891C.1.pep
FYKKSLLKGAQGDKTTIYSTLFNNIDVH

SEQ ID NO: 272284 - protein, 38 aa, Glycine max
  Clone ID: PAT_MRT3847_87892C.1.pep
REREKEHGFKFNNRKCLPYKNLRVQPVKGCQETQPTLV

SEQ ID NO: 272285 - protein, 82 aa, Glycine max
  unsure (1)..(82): unsure at all Xaa locations
  Clone ID: PAT_MRT3847_87893C.1.pep
SKLXMVPHPYHKGHLLLFYYSTLKTHYRKLQRRTLPXSETTXXDPRXWSKLPPDVVEHILLLLPLKTLLXLRPTCKAFTCLL

SEQ ID NO: 272286 - protein, 103 aa, Glycine max
  unsure (1)..(103): unsure at all Xaa locations
  Clone ID: PAT_MRT3847_87894C.1.pep
LFFVATIFLLTWPCLVSGYPRSPLQMITXYSELSFLVNCSHFMLASXAHNIRTFYTIPPERVQPTQDYINLEHLRSDSKTINQQAFPYASERDIHFCDIFMFP

SEQ ID NO: 272287 - protein, 53 aa, Glycine max
  Clone ID: PAT_MRT3847_87895C.1.pep
MASKGGKKKSSSSTSKSWTCEAPIGYSIEDARPNCGIKKFISAAYCNCARQPS

SEQ ID NO: 272288 - protein, 36 aa, Glycine max
  Clone ID: PAT_MRT3847_87896C.1.pep
CTNRCTAYPTMCYQLSPPRKLECRRFMPSAGRSFHF

SEQ ID NO: 272289 - protein, 141 aa, Glycine max
  Clone ID: PAT_MRT3847_87897C.1.pep
HGIDPYQRGCTQHDSSYESHVHEKTLYVDSVHKVKSQTNNIGGDFETSIRDSGIYNNSSIDSSPKVIKSKKINSESQVYGRDKNSDILTQNSELDLKRQLAAKWVDEECTLASSKVRYNGKIDLESQCLTKLGHQKISGLV

SEQ ID NO: 272290 - protein, 102 aa, Glycine max
  unsure (1)..(102): unsure at all Xaa locations
  Clone ID: PAT_MRT3847_87898C.1.pep
GRKFFVGGNWKCKGTTDEVKKMVTTLNDAKVPGQNVVXVVVSPSFVFLPVIKRLLRPDYHVSAQNSWVRIGGAYTVDSXTEMLVNLEIPLVIIGHLERIAGY

SEQ ID NO: 272291 - protein, 60 aa, Glycine max
  Clone ID: PAT_MRT3847_87899C.1.pep
LSMPTRSRKKKFENCDPKLITPRFLNDPKCPSLIWCISTRAQAIAILVMCGWMLTAAYQS

SEQ ID NO: 272292 - protein, 87 aa, Glycine max
  unsure (1)..(87): unsure at all Xaa locations
  Clone ID: PAT_MRT3847_8789C.1.pep
MGATSNAIIQCTSYTSSMQNDGLVSSRAEDTLGRSTCYIFEALNKRGMRAVKDDLYVQRGXYIAPEIIQAIEGTHDVAAAFNKDYGS

SEQ ID NO: 272293 - protein, 40 aa, Glycine max
  Clone ID: PAT_MRT3847_878C.1.pep
FHKTNTFYIYIYVSSTFFGLPKSAHENSPYKCPSALKNTW

SEQ ID NO: 272294 - protein, 50 aa, Glycine max
  Clone ID: PAT_MRT3847_87900C.1.pep
RLPKKFGCHSHRGFAFVEYVTPKEAENALSTLQHTHILGWHLVRETKLWI

SEQ ID NO: 272295 - protein, 70 aa, Glycine max
  Clone ID: PAT_MRT3847_87901C.1.pep
SKVKRNSNMMGNDKNISNEKNKRNADLLSFIYFYTYNTTILFITCFDQDIPQCYSCFITCANQSSFLHSH

SEQ ID NO: 272296 - protein, 70 aa, Glycine max
  Clone ID: PAT_MRT3847_87902C.1.pep
SSRCSCYGRFSFVNTVVRKLIRVASFVESTFSGWIFLTAEIRGAILPVFFLLNCTKYKQTTDKGLFIYLF

SEQ ID NO: 272297 - protein, 82 aa, Glycine max
  unsure (1)..(82): unsure at all Xaa locations
  Clone ID: PAT_MRT3847_87903C.1.pep
NATAPSKGSDHLRAAEVITTLDAQQKKLNLPILPTTTIGSFPQTAKLRRVRRQFKANKISXEEYVNPIKDETRKVLELQENL

SEQ ID NO: 272298 - protein, 98 aa, Glycine max
  unsure (1)..(98): unsure at all Xaa locations
  Clone ID: PAT_MRT3847_87904C.1.pep
VLLKVKSAPIQTLAATQEDVKLLGIGGSPLGWGFQIALIWKEVDSKFLEKILATRGDLFLKSNLCKRKVPGFVTNRQPYKKLFGMVDSIXDTWNNHPF

SEQ ID NO: 272299 - protein, 85 aa, Glycine max
  Clone ID: PAT_MRT3847_87905C.1.pep
IRSFASRRLKGESLKMSPKYMLVLLIALVLAVSSLSHGPVHGSVHPRPHPPPKITRYSAPHIHKPKPPNVATTNTYAAKKPPTKG

SEQ ID NO: 272300 - protein, 62 aa, Glycine max
  Clone ID: PAT_MRT3847_87906C.1.pep
VLYIFLELLLLVNQMFTVSRELHISYAFKYLQECILPLFSCGKRFPWLTRCICLGNILVLVS

SEQ ID NO: 272301 - protein, 130 aa, Glycine max
  unsure (1)..(130): unsure at all Xaa locations
  Clone ID: PAT_MRT3847_87907C.1.pep
MDPPDSQSQEQEAPKKNGVVFVILRWILAILFPFLLFLSIPFLLGLLVLMFADFSIPNPISLPSQCKIVSTGVDIRSSKICELGLLDYKAKDVFHHFERSKFRSRYDYYWASVFKVXYKDHFSGHLLPFL

SEQ ID NO: 272302 - protein, 85 aa, Glycine max
  unsure (1)..(85): unsure at all Xaa locations
  Clone ID: PAT_MRT3847_87908C.1.pep
EMINILCCGDEKXMREGTHLLLAXCSRMAICXKDVWRVPCGLPSEFTLTQICNSIFNEMLIRYSYEKLLRQAKATSMVLQSSKNN

SEQ ID NO: 272303 - protein, 91 aa, Glycine max
  Clone ID: PAT_MRT3847_87909C.1.pep
APNPRENPFKILLGKKKKMGPGLKKSPGFLSRSPFPPSFFPPKGFLILGSPFFGAKISSGFFPPKPPKKGKKFFFGPGPFKTHYKGGVFPT

SEQ ID NO: 272304 - protein, 372 aa, Glycine max
  unsure (1)..(372): unsure at all Xaa locations
  Clone ID: PAT_MRT3847_8790C.1.pep
MPALRKRNRSSESDAMPNNDTPHEHKMSEYELSREQRIRENRERMGKLGIFDLSLTLKLNNNNKRSYSSHKLRTPPSLPNPSAPVRRSSRLQNVTPVSYSEVPLKKAEFKENGRVVIEEGAKPEVYTEEHEKLLGNTDKPWTLFVDGVGKDGKRIYDSVLGKTCHQCRQKTLGYRTCCSQCNMVQGQXCGDCLYMRYGEHVLEALQNPTWLCPVCRGICNCSLCRQAKGWAPTGPLYKKISALGYKSVAHYLIQTRRSEIDEKKNADASDPVSAKRSLPFSDVDKSLEVNENHLESLKPLAETEGDGAEVPAKRLLFSDEQSQVEKVECSDTPKPLQLEKNECSDTKKPLASSSKPSSDSIAGRLRSRLKKP

SEQ ID NO: 272305 - protein, 35 aa, Glycine max
  Clone ID: PAT_MRT3847_87910C.1.pep
EPELEAADVQINLNASQMNLAFLSCGTGNPIDDRR

SEQ ID NO: 272306 - protein, 205 aa, Glycine max
  Clone ID: PAT_MRT3847_87911C.1.pep
ERERTSLGAAAEAIEKGRQGRGSKPLIPSSMDFIPGGVMQFTSGEVKPKKDLLAEDILKKKMYPKREEFQWRPSPLLCKRFDLIDPYMGKPPPAPRIRSKMDTLIFTSDSVKGTKVDGPVTSKKDISSLQQPTNKDITKSITENETEEDVEVENIERPVDLYKAIFSDDSDDEGEDPSNRRVENQEKKAEVANTALSRLIAGDFP

SEQ ID NO: 272307 - protein, 26 aa, Glycine max
  Clone ID: PAT_MRT3847_87912C.1.pep
SHKWIDGLLVSWIRLNETGYLNRCSF

SEQ ID NO: 272308 - protein, 63 aa, Glycine max
  Clone ID: PAT_MRT3847_87913C.1.pep
LPLCKKFQARDVNFGCLFFRLISSHQRYRFFYQQVLYHLLPVLMGKNKAFILQWPNHLSRGSV

SEQ ID NO: 272309 - protein, 81 aa, Glycine max
  Clone ID: PAT_MRT3847_87914C.1.pep
ENWPLEGSSWCSCLCCYLVAQVFNFYKHEVLVFIYARRALPSFHLTVSPDTVEKKRKLAHQLMKNFLCKHAERKFKGGPQP

SEQ ID NO: 272310 - protein, 41 aa, Glycine max
  Clone ID: PAT_MRT3847_87915C.1.pep
VIKLAKTTILVLGIIRNKPIPTMRCDESTSPSNENIFGGRG

SEQ ID NO: 272311 - protein, 107 aa, Glycine max
  unsure (1)..(107): unsure at all Xaa locations
  Clone ID: PAT_MRT3847_87916C.1.pep
PHRHTXKHNFTFHGPAAESRPRLVKKFLLDYCLFHYDDGFDGEGAEAGFFPPQLRGEEGETALNEGRHRRRLLPNWDPAAGVRRGGSLSDAEALLLLPRRLGRDRRR

SEQ ID NO: 272312 - protein, 115 aa, Glycine max
  unsure (1)..(115): unsure at all Xaa locations
  Clone ID: PAT_MRT3847_87917C.1.pep
RSGILGASHPSGPRRRQKGTKLYQYRPRPIGRTLDHTHFLQFACVTSRRHFWLQSSCMVVVSAPMAHAAITCGPVTNSLINCIGYPQNGGTPPSGCXCNGVKSLNAVGKTTVDRQ

SEQ ID NO: 272313 - protein, 109 aa, Glycine max
  Clone ID: PAT_MRT3847_87918C.1.pep
LMETHMALATSYMTLAPKYCCVQKRSFIVTSGLSSAFKPILRALPQIPRQIDASKTFTDIKSKFLNAVVDSAFEFVDQLVLPSQNNFAPVEELGEPVAITYIEGDIPDH

SEQ ID NO: 272314 - protein, 35 aa, Glycine max
  Clone ID: PAT_MRT3847_87919C.1.pep
MHAHTHDDADCLILATFQCGNSDIAPIKGHVYTLV

SEQ ID NO: 272315 - protein, 261 aa, Glycine max
  unsure (1)..(261): unsure at all Xaa locations
  Clone ID: PAT_MRT3847_8791C.1.pep
HKQSQFRKKLRQPKPKRTKAKKRSRKRKKPKRKRKKRRRRSRKRKKQRKERAKRKKLRKMKPXKGGAENGRGQKGRXQSPVPRPXLTEAADNVNKAVDDLSXLNRQKHXKNAAEATAEKTPXRAGKSIERSGRKRRKRTAEDGCQQNFGGKSEKRRGIGKRSENENGNTFXGQQKGQRRVDFDNXRQKDDFGREGEADGGADSQNVGQHEEGAESEQQCRRRRLRQVVLRRRRAGGGHGGQSMINQSDRRIRHCCVMKCSQ

SEQ ID NO: 272316 - protein, 94 aa, Glycine max
  Clone ID: PAT_MRT3847_87920C.1.pep
MQKKKGTQGVIEIENPNLVKPKSLKARDVDVGKTTELSRREREEIEKQRAHERYMRLQEQGKTEQAKKDLERLALIRQQREDAAKKREEEKAAK

SEQ ID NO: 272317 - protein, 163 aa, Glycine max
  Clone ID: PAT_MRT3847_87921C.1.pep
MGRGKFKSKPTGRRQFSTPEDMLAGTSNRPRTFRQKEAEHEEEEPEEVSGDESGEESEEETSKKKGTQGVIEIENPNLVKPKTLKARDVDVGKTTELSRREREEIEKQRAHERYMRLQEQGKTEQAKKDLERLALIRQQREDAAKKREEEKAAKEQKKAEARK

SEQ ID NO: 272318 - protein, 32 aa, Glycine max
  Clone ID: PAT_MRT3847_87922C.1.pep
MVKTLCGPFGFIKTLFSPHQFTKNSAFDKHGF

SEQ ID NO: 272319 - protein, 67 aa, Glycine max
  Clone ID: PAT_MRT3847_87923C.1.pep
MGRGKFKSKPTGRRQFSTPEDMLAGTSNRPRTFRQKEAEHEEEEPEEVSGDESGEESEEETSVSILQ

SEQ ID NO: 272320 - protein, 162 aa, Glycine max
  Clone ID: PAT_MRT3847_87924C.1.pep
MGRGKFKSKPTGRRQFSTPEDMLAGTSNRPRTFRQKEAEHEEEPEEVSGDESGEESEEETSKKKGTQGVIEIENPNLVKPKSLKARDVDVGKTTELSRREREEIEKQRAHERYMRLQEQGKTEQAKKDLERLALIRQQREDAAKKREEEKAAKEQKKAEARK

SEQ ID NO: 272321 - protein, 61 aa, Glycine max
  Clone ID: PAT_MRT3847_87925C.1.pep
SFFFFFFFFFFFFFFFFFFFFFFLFCSGQKNTQIFSGKIIPTLPKKTFGPLKKTPKAGGLP

SEQ ID NO: 272322 - protein, 71 aa, Glycine max
  Clone ID: PAT_MRT3847_87926C.1.pep
PESKPKPPPIDPMTPAPAKILRKETYCYKGTHKLCADYHDPNTHYPEVRPCNKVLYEQEYTNNYPFYQIME

SEQ ID NO: 272323 - protein, 53 aa, Glycine max
  unsure (1)..(53): unsure at all Xaa locations
  Clone ID: PAT_MRT3847_87927C.1.pep
IAKKYIYYVQKEKRAESENKEXREAPVVRTRILVTYSKIKPLNKEKHAGCYTG

SEQ ID NO: 272324 - protein, 58 aa, Glycine max
  Clone ID: PAT_MRT3847_87928C.1.pep
KGLSTARFIDSTGQSPGKSAIYMSGQSGLRRSIHPYKMTKDKIRMREGILKRLQTPGT

SEQ ID NO: 272325 - protein, 101 aa, Glycine max
  Clone ID: PAT_MRT3847_87929C.1.pep
PRVRSCEKTTEGDRGERKNLRDEDDGAERKRGRDEDYRTGRKQTRDENEHRERKFRRDEDDREGRKFRRDEDVYGERKNLRDEDVHGERKNLGEGDDRERK

SEQ ID NO: 272326 - protein, 135 aa, Glycine max
  Clone ID: PAT_MRT3847_8792C.1.pep
MVAEAWIVKMGNQVSANLKHALLLEPSARRKHNPKRQDNSTSSKEVIGILSFEVANVMSKTVHLHRSLSEPEIVKLRNEISNSQGVQNLVSSEEGYLLELARAEKLEELNRVANVVSRLGKKCSLPALQGFEHVY

SEQ ID NO: 272327 - protein, 74 aa, Glycine max
  Clone ID: PAT_MRT3847_87930C.1.pep
RIIIPFKMKPYLRPIFVLFLILLDQSISASAAININGLRNKIREVLNKHPSINLSADILNKVNRPLNALDYLHG

SEQ ID NO: 272328 - protein, 73 aa, Glycine max
  unsure (1)..(73): unsure at all Xaa locations
  Clone ID: PAT_MRT3847_87931C.1.pep
EKGYIRXXEYRXQTXVCVXVXEREMQFHXETXNXTSLATXLGXSIAXKTYAXPNXXSXFQLVXVMPFDSPFSX

SEQ ID NO: 272329 - protein, 261 aa, Glycine max
  Clone ID: PAT_MRT3847_87932C.1.pep
YKDRDQDRDRDRYRDDGMKERDREFRERDKSTAIANKDVLGSKMSLYPSKEKYLSKPINELDLSNCDQCTPSYRLLPKNYPIPVASQKTELGAEVLNDYWVSVTSGSEDYSFKHMRKNQYEESLFRCEDDRFELDMLLESVNVTTKRVEELLDKINSNIIKGDSPIRIEEHLTAINLRCIERLYGDHGLDVMEVLRKNAPLALPVILTRLKQKQEEWARCRADFSKVWGEIYAKNYHKSLDHRSFYFKQQDTKSLSTKGNK

SEQ ID NO: 272330 - protein, 361 aa, Glycine max
  Clone ID: PAT_MRT3847_87933C.1.pep
MHSHRVLNGELHQQFTVLESHTVRVVWCLHLHHQSNIIYIFKLKEFSLNTIKKILKRKGETLSSYYSEGKCVRLFGGEFLSTRLTGNMSAVVAGSSSSFSATFTPIRSPSLKNSQLSHSKALTSPQCQKTSLQGLSLHEAKRGVSESFLVENNNGSSIAGRRLEITARTAGASKTIEVEVDKPLGLTLGQKSGGGVVITAVDGGGNAARAGLKAGDQVLYTSSFFGDELWPADKLGFTKTAIQAKPDSVYFVVSRGAEVDVKKLTKRPAPPRFGRKLTETQKARATHICLDCGYIYTLQKPFDEQPDTYGCPQCQAPKKRFARYDVNTGKAIGGGLPPIGVIIGLLAGVGAVGALLVYGLQ

SEQ ID NO: 272331 - protein, 128 aa, Glycine max
  unsure (1)..(128): unsure at all Xaa locations
  Clone ID: PAT_MRT3847_87934C.1.pep
KLAFTRAAILAXPDSVYLFVTRGVKVDVKKLTKRPAPPRFGRKLTETQKARATRICLDCGYIYTLQKSFDEQPDTYGCPQCQAPKKRFARYDVNTGKAIGGGLPPIGVIIGLLAGVGAVGALLVYGLQ

SEQ ID NO: 272332 - protein, 72 aa, Glycine max
  Clone ID: PAT_MRT3847_87935C.1.pep
NMRSSIATHPGRFSCKAHTMSSICKVRSGNRPILFEQFRLRVAVTEIQNHMQQMSSATKKLRTNDHIDHHHR

SEQ ID NO: 272333 - protein, 60 aa, Glycine max
  Clone ID: PAT_MRT3847_87936C.1.pep
DDMITPDKLNIHINSKIRRKKMKKERTYESINFDDLVPKSKFQLVNLVRLSMIQIAIVNN

SEQ ID NO: 272334 - protein, 49 aa, Glycine max
  Clone ID: PAT_MRT3847_87937C.1.pep
VSLFCLSLNEHPIHRIAINIVKNLYCIVTIVNVIDFRKVLDHDNTSIGD

SEQ ID NO: 272335 - protein, 75 aa, Glycine max
  Clone ID: PAT_MRT3847_87938C.1.pep
GFKPPAPFFDFSHYKNCYCKLIFPGLGWGYFFSFNPPILPFFVGGQKGLYVFQCWLRPCLCPPFFFQEKGPFQVV

SEQ ID NO: 272336 - protein, 81 aa, Glycine max
  Clone ID: PAT_MRT3847_87939C.1.pep
DQTLFSLFFSTILHFSSSFHFCSFFLHKFHCSSTGDDHGRLKSQSIQGYTPSKTEFEFWISISILCASSSSSSILFLIFMI

SEQ ID NO: 272337 - protein, 82 aa, Glycine max
  Clone ID: PAT_MRT3847_8793C.1.pep
SFLYFLSMHIAPHSSMAMEGELQPSQVQLRVNSRQWRKVVNVHSMEIDPSFTSKVEHREVKHFKEWFPWLIPFFVIANVIVF

SEQ ID NO: 272338 - protein, 385 aa, Glycine max
  unsure (1)..(385): unsure at all Xaa locations
  Clone ID: PAT_MRT3847_87940C.1.pep
MSAFTISNNAAAATATWPLPQFNTCHFPHSPSIVLHHSLLNIRAFRIHCVPQEPLPPLQQQPKHDQLSPGGDGGHGDAGGGGGGGGDGGEGGGDEEFGPLLKFEAVMRESEARGVKLPPDMEEAARITGIREMFLLRYMELQGSSWPVSFLIQHCAMLRNRMLADPSFLFKVGTEIVIDSCCATLAEVQKRGKNFWAEFELYAADLLVGXLVVDIALVGLLAPYARIGKPSLSKGLLGQIQHACAALPSSVFEAESVGCKFSAMQRVSTYFYKGALYGSVGFGCGIIGQGIANMIMNAKRSFKKSEDDIPVPPLLKSAALWGFFLAVSSNTRYQIINGLENIVEASPVAKRVPLVAMAFTVGVRFGNNIYGGMQFVDWAKWSGVQ

SEQ ID NO: 272339 - protein, 114 aa, Glycine max
  unsure (1)..(114): unsure at all Xaa locations
  Clone ID: PAT_MRT3847_87941C.1.pep
GALYGSVXGFGCGIIGQGIANMIMNAKRSFKKSEXDIPVPPLLQSAALWGFFLAVSSXTHRYQIINGLESLVEASPVAKRVPLVAMAFTVGVRFGNNIXGGMQFVDWAKWSGVQ

SEQ ID NO: 272340 - protein, 92 aa, Glycine max
  Clone ID: PAT_MRT3847_87942C.1.pep
TTHLAFLCQIFGLHYLHLYFYTFLHKPHGAHGLIVGDRHNYLYDPSMCSNVYHLLGLNQTPLYSLQTQSRAGSRIRVHHSGIFGSLSSIHHH

SEQ ID NO: 272341 - protein, 68 aa, Glycine max
  Clone ID: PAT_MRT3847_87943C.1.pep
GSPRQHVVHAQFGSSDALSNQSRPGASRLMFPFNLGFRSPVMHHNANGVIPSCPLLLCMSTVPNQTCR

SEQ ID NO: 272342 - protein, 246 aa, Glycine max
  Clone ID: PAT_MRT3847_87944C.1.pep
ILSVSIGVLQSDLLAFNPTLPRWKLDAIEKCDVMVYTKIFLKFPYKFWPSGPDKEFFIYAHERRGYYTFWQHMENAYPGSNMLVVTLTNEESKRVEAQADEETLREAMAVLRDMFGPNIPNAIDILVPRWWNNRFQRGSYSNYPIISNHKLFHNIKAPVGRIFFTGEHTSERFNGYVHGGYLAGIDTSKALLEEMRKEKESQTLLLEPLLASLTMSKPETVSNIHKCDIPTQLYLSGKLGVPEAIL

SEQ ID NO: 272343 - protein, 218 aa, Glycine max
  Clone ID: PAT_MRT3847_87945C.1.pep
VKCDVMVYTKIFLKFPYKFWPSGPDKEFFIYAHERRGYYTFWQHMENAYPGSNMLVVTLTNEESKRVEAQADEETLREAMAVLRDMFGPNIPNAIDILVPRWWNNRFQRGSYSNYPIISNHKLFHNIKAPVGRIFFTGEHTSERFNGYVHGGYLAGIDTSKALLEEMRKEKESQTLLLEPLLASLTMSKPETVSNIHKCDIPTQLYLSGKLGVPEAIL

SEQ ID NO: 272344 - protein, 71 aa, Glycine max
  Clone ID: PAT_MRT3847_87946C.1.pep
LTSSNQASSSQSWPCLSSASSTSVPSVLMLHFQPFPPIIIALCWFKVILLDLRKRPGQQRLKLSSKMSITK

SEQ ID NO: 272345 - protein, 57 aa, Glycine max
  Clone ID: PAT_MRT3847_87947C.1.pep
MGIIRSGFSFIAGTVCGVYLAQNYQVPNVTKLADTALFMVKVVEEKYRKPKKRDDDD

SEQ ID NO: 272346 - protein, 86 aa, Glycine max
  Clone ID: PAT_MRT3847_87948C.1.pep
LLLLEASLVGFIALDSDWEKDIPFDPTGQLDELRAFIEDNIDTCTWVGIAVLVIQALSLLLALILRATVSSRRADFDYEDGYDVRG

SEQ ID NO: 272347 - protein, 86 aa, Glycine max
  Clone ID: PAT_MRT3847_87949C.1.pep
TAGPACTRSGLVPLIYHSLLPSFRLPHSFNGTYNTLSDPTLHSSLIMRHPTCTLPQQLAIHPLSFLLFYLSFLMRNLNSQPLFHAP

SEQ ID NO: 272348 - protein, 36 aa, Glycine max
  Clone ID: PAT_MRT3847_8794C.1.pep
MKRTKIRFMPVCACVCIHMTGKGSTLGQLSQISNDI

SEQ ID NO: 272349 - protein, 83 aa, Glycine max
  Clone ID: PAT_MRT3847_87950C.1.pep
EIATFASGKEISELANHVSLYSGCSHHGNQILLAKRLIKDGTNLWKVMSPNNHHIPWENAVYEIQEQFMKIASCCSRSLSPQD

SEQ ID NO: 272350 - protein, 63 aa, Glycine max
  Clone ID: PAT_MRT3847_87951C.1.pep
NTDIFQNNCYFSPWISLDHFSGTDSLCTTKHESEIKTFFNPMHLNSKQTACELQHQLIFIMYQ

SEQ ID NO: 272351 - protein, 67 aa, Glycine max
  Clone ID: PAT_MRT3847_87952C.1.pep
MNFFPDEVIEHIFDYVTSQRDRNDLSLVCKNWHRLERCSRKSLFIGNCYSISPERVIERFPELKSFT

SEQ ID NO: 272352 - protein, 47 aa, Glycine max
  unsure (1)..(47): unsure at all Xaa locations
  Clone ID: PAT_MRT3847_87953C.1.pep
GIKSCLLVSSMSSIGLKLCVFNPCWXCLSFSVFFSLFRDTWWVVRNN

SEQ ID NO: 272353 - protein, 51 aa, Glycine max
  unsure (1)..(51): unsure at all Xaa locations
  Clone ID: PAT_MRT3847_87954C.1.pep
VDARXHSYFLPHHYIHNTIGYPLFWRGSSFWGRTTSRLRITPSKSAICWPP

SEQ ID NO: 272354 - protein, 56 aa, Glycine max
  Clone ID: PAT_MRT3847_87955C.1.pep
IPHFCVVPSSKLWIILNSQGLVRRIRELLNNEWEKSRFYILKQTGVGPFCRLLAAV

SEQ ID NO: 272355 - protein, 90 aa, Glycine max
  Clone ID: PAT_MRT3847_87956C.1.pep
RLREDDRRGRSSCWSIRAVTEGDNKRLRRLNCRELHYPLSVTVLRSRSKPHFRFGLLEGKCLKDPIYTRDAMAINTHMLASMCYYCCHCD

SEQ ID NO: 272356 - protein, 45 aa, Glycine max
  Clone ID: PAT_MRT3847_87957C.1.pep
LIIVTAGELETINAVIGSPEISAYVTTEGRGNELDQKRHLLLNCL

SEQ ID NO: 272357 - protein, 45 aa, Glycine max
  Clone ID: PAT_MRT3847_87958C.1.pep
SCCDIFCLLRPKADCLGFSSVTTFCFTPIYYCAINPRVCSSLVFI

SEQ ID NO: 272358 - protein, 48 aa, Glycine max
  Clone ID: PAT_MRT3847_87959C.1.pep
LLLKRGGSLAMEIYTDENYVDSVRDMLENHLNCRQSYPSLVGASLGLP

SEQ ID NO: 272359 - protein, 179 aa, Glycine max
  Clone ID: PAT_MRT3847_8795C.1.pep
LLEIIALSLGLEAKRFEEFFIKDQTSFIRLNHYPPCPSPHLALGVGRHKDIGALTILAQDDVGGLEVKRKADQEWIRVKPTPGAYIINVGDLIQVWSNDLYESVEHRAMVNSEKERFSIPFFLFPAHYTEVKPLEELTNDQNPAKYRPYNWGKFLVRRKGSNFKKLNVENIQIYHYKIA

SEQ ID NO: 272360 - protein, 100 aa, Glycine max
  Clone ID: PAT_MRT3847_87960C.1.pep
LFLQKGPLINPKFQRPMRKPPLFLGGEFFKWGKVPLKRVFPKFPPNRDIYGFKIWVGAPWPQGFFPPPPGPFFFFWNKYVGENSLQKPPWGKKKKRVFVF

SEQ ID NO: 272361 - protein, 71 aa, Glycine max
  Clone ID: PAT_MRT3847_87961C.1.pep
WGYILRPVYVPHRTPFVSLRMVIFSPGSAAMHASFLSNSIFSTLMSEHGVFKEYHTLSYVVFCAEAQGTPL

SEQ ID NO: 272362 - protein, 53 aa, Glycine max
  Clone ID: PAT_MRT3847_87962C.1.pep
RKKESLCDLLLDNHVETNGAFQGKAKLLFAHAGDKWDAEFYAKVNDDVYVNIG

SEQ ID NO: 272363 - protein, 40 aa, Glycine max
  Clone ID: PAT_MRT3847_87963C.1.pep
FSVLLVVFRKMQGMSSYVSSSCINEHTICMIPIECLPLAE

SEQ ID NO: 272364 - protein, 34 aa, Glycine max
  Clone ID: PAT_MRT3847_87964C.1.pep
FTTLKTIDDRDSILISTHAIYCRYTDNPDDSHDS

SEQ ID NO: 272365 - protein, 601 aa, Glycine max
  unsure (1)..(601): unsure at all Xaa locations
  Clone ID: PAT_MRT3847_87965C.1.pep
TDRHVWMSEAGVXRVLLFAPIPTHVPGRLTPLAGPPAVPRRWSSPLLQRRWALRELAGVGPVVSCLGALLSPLGVLRPVCLHTDPGRSFARDRAPFPRPHVRRRLLASAGPLSGALVPPLHQRAENFHLHKEASQKGYYVKDASGNDFDGWCWPGSSSYPDTLNPEIRSWWADKFSYQSYEGSTPSLYIWNDMNEPSVFNGPEVTMPRDVTHYGGVEHRELHNAYGYYFHMATANGLLKRGEGNDRPFVLSRALFAGSQRYGAVWTGDNTADWDHLRVSIPMVLTLGLTGMSFSGADIGGFFGNPEPELLVRWYQLGAYYPFFRAHAHHDTKRREPWLFGERNTELIKDAIHVRYALLPYFYTLFREANTTGVPVVRPLWMEFPSDEATFSNDETFMVGSSILVQGIYTERAKHASVYLPGKQSWYDLRTGAVYKGGVTHKLEVTEESIPAFQRAGTIIARKDRFRRSSTQMANDPYTLVVALNSSQAAEGELYIDDGSSFNFLQGGYIHRRFIFSNGKLTSIDLAPASSSKGRYPSDAFIERIILLGHAPSSKNALIEPSNQKVDIELGPLWVLRARAPAVTTIRRPNVRVAEDWTITVI

SEQ ID NO: 272366 - protein, 63 aa, Glycine max
  Clone ID: PAT_MRT3847_87966C.1.pep
SARDRQRQVDSSGKVKAASSSSQGSPPLPVVTVAKANEQQWEGHSYNFNLPKSPSYEVGWDSL

SEQ ID NO: 272367 - protein, 35 aa, Glycine max
  Clone ID: PAT_MRT3847_87967C.1.pep
MASRAVLLLAMCVLPAMVVASRPAKNPFCAKGRVY

SEQ ID NO: 272368 - protein, 79 aa, Glycine max
  unsure (1)..(79): unsure at all Xaa locations
  Clone ID: PAT_MRT3847_87968C.1.pep
SHHKHQRQLRHTRIRHTPVRTPEEATQPDTXNAAFAEFISTFILLFAGAGSRNADHELTDVRAASHAGLTSSSNAHALG

SEQ ID NO: 272369 - protein, 53 aa, Glycine max
  Clone ID: PAT_MRT3847_87969C.1.pep
APKSAITMRLKLRLRENGPEEYSILPLNKILNEFEILGSAQPLAQSIQSKNLN

SEQ ID NO: 272370 - protein, 95 aa, Glycine max
  Clone ID: PAT_MRT3847_8796C.1.pep
MDNSKNRHNDSLGVNKLGKNIRKSPLHQPNFANNAARQQPQPQVYNISKNDFRDIVQQLTGSPSQDPPPRPPHNPPKPQSMRLQKIRPPPLTPIN

SEQ ID NO: 272371 - protein, 59 aa, Glycine max
  unsure (1)..(59): unsure at all Xaa locations
  Clone ID: PAT_MRT3847_87970C.1.pep
IAVSQNHKPDQTDERQRIEEPRSFVIXNRNXKVKSILTISHTFSNRLLKQYVCTDPEIQ

SEQ ID NO: 272372 - protein, 608 aa, Glycine max
  unsure (1)..(608): unsure at all Xaa locations
  Clone ID: PAT_MRT3847_87971C.1.pep
MAATSGKIVQFFFVSNCHQQNTQGRRDYCFAPSRLRKLAWTASSMQFRTLFKPQNHFSVQRNFHCNASASATAVPYLDKTDFLKLQNGSDIRGVAVDGVEGEPVNLTEPVAEAIGAAFAAWLVEKKKADASQHLRVSIGHDSRISAKLLQNAISRGLAGGGLEVVHYGLASTPAMFNSTLTKNEAFLCPADGSIMITASHLPFNRNGFKFFTNAGGLGKADIKDILERAADIYNRLARGKFDKFREKSFXSIKKVDYMIVYTSDLVKAVRKAAGNIEKPLEGFHIVVDAGNGAGGFFAAKVLEPLGAITSGSQFLEPDGLFPNHIPNPEDKTAMKAITQAVLDNKVDLGIIFDTDVDRSAAVDFTGREFNRNRLIALMAAIVLEEHPGTTIVTDSVTSDGLTTFIEKKLGGRHHRFKRGYKNVIDEAIRLNSIGEESHLAIETSGHGALKENHWLDDGAYLMVKILNKLASARASGKGGGSKVLTDLIDGLQEPDFAVELRLKINQNHPDLKGGSFREYGEAVLKHLENSIGSDPSLHKAPVNYEGVRVSGYGGWFLLRLSLHDPVLPLNIEAPSNDDAVKLGLAVLAAVKDFAGLDTSALNKFVGAS

SEQ ID NO: 272373 - protein, 38 aa, Glycine max
  Clone ID: PAT_MRT3847_87972C.1.pep
MLAFRVCVQREDPAGHGVVCELGCILLKSKESRQLARA

SEQ ID NO: 272374 - protein, 66 aa, Glycine max
  Clone ID: PAT_MRT3847_87973C.1.pep
LPYASSNEDHNAPIDVKPNPKQLLSLEWQDQGCSDAGKDSFGYLNGPGSWTGMMNGYGSSTTNPLV

SEQ ID NO: 272375 - protein, 75 aa, Glycine max
  Clone ID: PAT_MRT3847_87974C.1.pep
KNELELFENLLTRLVELKTYFFSQLGPQIFKLLQKKKRVATLFYRGVPLFPFGSPADFYKFLDKTFQGGGGFHFV

SEQ ID NO: 272376 - protein, 143 aa, Glycine max
  Clone ID: PAT_MRT3847_87975C.1.pep
GGFPPPNFGNFGGFSQVLLGSRTPPVDPPLRDGPGTLRSFLTGYVPGLWNMGPVFRLHFFNWGVHSGNYLMLVAGLLVRVLIRREYLPRPAIARGSSLRRDSSSKERNNYRQTVQSRGREGGVGWEIARYLAKHINQPKGSKP

SEQ ID NO: 272377 - protein, 71 aa, Glycine max
  Clone ID: PAT_MRT3847_87976C.1.pep
PVRVITLAEQVFALHNLPVNPWSSWADSYGVFAVLIGAIIIFHDIHTGSVRCLASYSSPNGPIRPLPESVP

SEQ ID NO: 272378 - protein, 74 aa, Glycine max
  unsure (1)..(74): unsure at all Xaa locations
  Clone ID: PAT_MRT3847_87977C.1.pep
MHQSCSQHHNLVLGALSLVKALAYSCXATTVSPIYSRDIAGNSGVAPHLDKSHGLINGFDRELGDPFLDKLIPV

SEQ ID NO: 272379 - protein, 64 aa, Glycine max
  Clone ID: PAT_MRT3847_87978C.1.pep
PLTDTPATEAGRCITVWAGGTTSHWDSIKLQRETLGMETSMFGLGLFIGAVAMRHGDDSRCKTS

SEQ ID NO: 272380 - protein, 144 aa, Glycine max
  Clone ID: PAT_MRT3847_87979C.1.pep
YMTKVMEYWRPWFWGHADKYYVVKLSQLRLKFGPTLDAANDKIIAIQIKGTATKKGKVSSSSSTSKSFLIPFHRTQKLGSTHTTTFPHRFTNSKAPTIVWDARDLCDFHLVLKHGTCYMTLHVLHAEGDIGEYKSEMVVVEKFS

SEQ ID NO: 272381 - protein, 91 aa, Glycine max
  Clone ID: PAT_MRT3847_8797C.1.pep
KKKKHPPGGLKKIIPPRLKRGVTGGGKFYPPDDKGPNSGGRHLCLGDPFYGFRDRFYAFPTRGGPSPLKTLGQKKRAPPPKEGGGSLWGGQ

SEQ ID NO: 272382 - protein, 118 aa, Glycine max
  unsure (1)..(118): unsure at all Xaa locations
  Clone ID: PAT_MRT3847_87980C.1.pep
GSKVFLRLTVPILGDELINTGWNXCRSCNGNPXADRHLLMVPALDXGQVYVVDVKTDPGAASWPKVAEPAIIVQKTGLANPHPSDCLAYGDIMISSLGNEDGNAAGNGSLSIDSELNV

SEQ ID NO: 272383 - protein, 75 aa, Glycine max
  Clone ID: PAT_MRT3847_87981C.1.pep
DDTIRDETLKEMSTDYGTISSCKVMREPTGISSGSRLVAVSTPEVATRAIGAMDGKMLAGEPLYVALAHRTVERR

SEQ ID NO: 272384 - protein, 226 aa, Glycine max
  unsure (1)..(226): unsure at all Xaa locations
  Clone ID: PAT_MRT3847_87982C.1.pep
LTNPPSISPRKFPEINSLSRFSRKMEGGRRRITLYDQMTAGNSCSSGSRDSLASLMMDDVVFKKMETEASGELSRSRTLQDIIREEKPNNSSNATDRNSWKAFKEKLWLKRAIGSAWSSATTITNHSNDDRNLPNLPETRHDSDELTQQNDVVAGEANDSEPIARFGSPVEQVAAGGDSSDGENNHEAVVGVSLMDLLEEAEXEMXLYRVSDDDDVAEYEKREGEG

SEQ ID NO: 272385 - protein, 296 aa, Glycine max
  unsure (1)..(296): unsure at all Xaa locations
  Clone ID: PAT_MRT3847_87983C.1.pep
NSRVDPRVRDYAFXKSDYPVILTLEDHLTPKHHDKFAKMATEIFGETLYFPETDHLTEFPSPESLKKRIIISTKPPKECRQSAIISKPVPNGREPSEEESRGLELPSSVAKLKTEDRNSSDEDQEDVNTSDNKPNQQDARQYKHLIAIHGGKSKGSMKNRLKDDDKVGRLSLSEKKLKSASESHGADLIRFTQRNILRVFPKGERVQSSNFRPYLGWLYGVQMVAFNMQGHGKSLRLMRGMFKANGGCGYVKKPEFLIRTLPHEEVFDPKKPPSVKQILKVSLALLTLLKGNWFVS

SEQ ID NO: 272386 - protein, 73 aa, Glycine max
  Clone ID: PAT_MRT3847_87984C.1.pep
WGDRNCFDLFHPVFLGISTEGVGPPIGFVLERLPRVSLSRVPRGCQRPYPACFGGAPFFFRIGLGRFSLPWVV

SEQ ID NO: 272387 - protein, 72 aa, Glycine max
  Clone ID: PAT_MRT3847_87985C.1.pep
VLDVAAIAASRFGWGIASEKAAEASLIHRRMQRGISQMHSSSLFSTVGTAVGTTFVSTSELISESVTVSAPL

SEQ ID NO: 272388 - protein, 97 aa, Glycine max
  Clone ID: PAT_MRT3847_87986C.1.pep
LILVTINTVPILVSSTPATQTAAAPEMHTGQYTAMQPCLPNTAINRTDCGDITLGSYLTQHMMDTWITHIYYDLNNLNPKHIYHLIAETSLHHDIRL

SEQ ID NO: 272389 - protein, 71 aa, Glycine max
  Clone ID: PAT_MRT3847_87987C.1.pep
WFNSPLFTRNFPYKVTISNYAWIFQNQCPTKICFLFSPGNPQKALFRIIAWRMLELVIQSGITPRSLGARN

SEQ ID NO: 272390 - protein, 85 aa, Glycine max
  Clone ID: PAT_MRT3847_87988C.1.pep
IFSLYVSCSHCLEYPSSPHSSLPKRSLLMPPVLAHDSSDHAGCPSSGFPQVRSEEMNFYVSPTVCRPGVPYSQGLPCLSLLPKHP

SEQ ID NO: 272391 - protein, 41 aa, Glycine max
  Clone ID: PAT_MRT3847_87989C.1.pep
DCEVPTLIPTFMGDPHREEWEYFGLLFCYTGTIFVILFMFL

SEQ ID NO: 272392 - protein, 136 aa, Glycine max
  Clone ID: PAT_MRT3847_8798C.1.pep
MAKDVEVAERGSFSGIDYHDPSPSPLIYPAHFTPFSFLFGSSCPNQLFIPSLSSPFPSPPPSIAPHPPLPFPPSPFPLPLPPRPVFPLPFPFPFPFPSFPPFPPSLSPISPPPLLIPSSPLPSPPLLSPPLPPLSF

SEQ ID NO: 272393 - protein, 39 aa, Glycine max
  Clone ID: PAT_MRT3847_87990C.1.pep
DYNKRLIYWVKFKSKSVLLEASQNILFSQSRVPNFPSES

SEQ ID NO: 272394 - protein, 71 aa, Glycine max
  Clone ID: PAT_MRT3847_87991C.1.pep
PSRMGLSGSRSSFALLSDSVSCIFPMLKDDPSIRTPDCLLTTGFSRTNFYGHYKRGFLVERRIFLDYAWHQ

SEQ ID NO: 272395 - protein, 65 aa, Glycine max
  Clone ID: PAT_MRT3847_87992C.1.pep
LRTLFPNCWGHFTNRFLLDYTYRLNIRRRITLSTTSNITSSSSSSSRLSRSSISSRLLSQRLRTV

SEQ ID NO: 272396 - protein, 67 aa, Glycine max
  Clone ID: PAT_MRT3847_87993C.1.pep
HTVIYMLRITELYIYASGTDHLKTYSKCYDELTVQLISHQHLIESSIFAPAPQVHDPEARAISGIVP

SEQ ID NO: 272397 - protein, 72 aa, Glycine max
  unsure (1)..(72): unsure at all Xaa locations
  Clone ID: PAT_MRT3847_87994C.1.pep
FDXVXNPSLYIKLGXLPKPXGVXXCGWXNVGITPLNGREKXPVTXFSXLSTLXXFXXXFEALLSMXRXTSVG

SEQ ID NO: 272398 - protein, 247 aa, Glycine max
  unsure (1)..(247): unsure at all Xaa locations
  Clone ID: PAT_MRT3847_87995C.1.pep
YSLLFRKKKMVQQEVRKGPWTEQEDFKLVSFVGLFGDRRXWDFIAKVSDLNRTGKSCRLRXWVNYLHPGLKRGKMTPQEERLVLELHSKWGNRWSRXARKLPGRTDNEIKNYWRTLMRKKAQDKKRGEAASSSSLRTGEESFYDTGGHGVTASTQDQGQKGEQGLFSMDDIWKDIDNMSEENNTLQPVYEGNSEEGCNFSCPPQVPSPSSWEYSSDPLWVMDEESLFCPLSEPYFSCYAQGSVFLTG

SEQ ID NO: 272399 - protein, 45 aa, Glycine max
  Clone ID: PAT_MRT3847_87996C.1.pep
EVRGAEGGWTSGAGWDGFPSRYPSVLELAATQCEEGEVCVQGVVA

SEQ ID NO: 272400 - protein, 300 aa, Glycine max
  unsure (1)..(300): unsure at all Xaa locations
  Clone ID: PAT_MRT3847_87997C.1.pep
MVQQEVRKGPWTEQEDFKLVSFVGLFGDRRWDFIAKVSGLKVAGESKIGIRQKKSNAYLGIMLQKNIDYGRRSLXPPHFVVGLNRTGKSCRLRWVNYLHPGLKRGKMTPQEERLVLELHSKWGNRWSRIARKLPGRTDNEIKNYWRTLMRKKAQEKKRGEAASSSPTPSSVDSSISSNNHAVDPHASKKAGEESFYDTGGHGVTASTQDQGQKGEQGLFSMDDIWKDIDNMSEENNTLQPVSVYEGHSEEGCNFSCPPQVPSPSSWEYSXDPLWVMDEESLFCPLSETIFFLLCTGHRFF

SEQ ID NO: 272401 - protein, 67 aa, Glycine max
  unsure (1)..(67): unsure at all Xaa locations
  Clone ID: PAT_MRT3847_87998C.1.pep
SPSLVTLIXSIIILHFWFVMPSHVDSFSVHLNCLTFFVFISYSKLILFSHLLICNLFFNHLLYMHVC

SEQ ID NO: 272402 - protein, 52 aa, Glycine max
  Clone ID: PAT_MRT3847_87999C.1.pep
NDKPWTDLASLCNTILITRYFKEDGVVKDTMTPLTCTFLFLSISSNEQQTLH

SEQ ID NO: 272403 - protein, 80 aa, Glycine max
  Clone ID: PAT_MRT3847_8799C.1.pep
RPAAALFFVFFFFSFVFYFFYFFFFFFFFFFLFLPREYIWCWPFRGPPNILKDGQAPWFLPERPYKVPPQDPQGKHAHRL

SEQ ID NO: 272404 - protein, 153 aa, Glycine max
  Clone ID: PAT_MRT3847_879C.1.pep
VSQMAEPSKKRKGSSSRSQRHPETQDTPIPSSISSSLFSSKEQHTWYTNLFSSCSIIDPKFIDMDFFSDESFKCIQAFHNSNLIPFMSSKLPVYFELVQVFYSNLEIQESTLIFEVCGIKMVIDQSLFYDLTQFSSDSVPSPSVRLFAAAHAS

SEQ ID NO: 272405 - protein, 31 aa, Glycine max
  Clone ID: PAT_MRT3847_87C.1.pep
NNLLEAELEIFINSLSTIVDIYNGNDKPMRK

SEQ ID NO: 272406 - protein, 153 aa, Glycine max
  Clone ID: PAT_MRT3847_88000C.1.pep
MATCFAPFSVSGGSHELWLTKRVGPKLTVQRRSNLVIKRNHTSSISAEYRDNRGGGGGDFVAGFLLGGAVFGTLAYIFAPQIRRSLLNEDEYGFRKAKRPIYYDEGLERTRQTLNEKIGQLNSAIDNVSSRLRGGNNVPAAKIESDPEVEATM

SEQ ID NO: 272407 - protein, 64 aa, Glycine max
  Clone ID: PAT_MRT3847_88001C.1.pep
THPTTRPCDMTTERDSKGKSVVPKKVHLSPFFHHRWNRLIWAQKPILLPLRRWLSTVTGRIAGL

SEQ ID NO: 272408 - protein, 65 aa, Glycine max
  Clone ID: PAT_MRT3847_88002C.1.pep
MYRCCGNCGCVIYCKCCNRCPRYLMYPHLSYTESTTTETLYMEDSPGNAQFDGTEMGTPAKNYGC

SEQ ID NO: 272409 - protein, 51 aa, Glycine max
  Clone ID: PAT_MRT3847_88003C.1.pep
KIHTFYLSFFFYLLHLINYFIISIILFFLFPSPFIFLFSFKFAVFFFFVRV

SEQ ID NO: 272410 - protein, 89 aa, Glycine max
  Clone ID: PAT_MRT3847_88004C.1.pep
ALIWLEAILAQDKDRLMDMLTYPKVEEENMIRVEEKAKKFGLVVDLNAKKPRAEPLYIINPSVVSDLYGHWVMPLTKEVQVAYLLRRLD

SEQ ID NO: 272411 - protein, 36 aa, Glycine max
  unsure (1)..(36): unsure at all Xaa locations
  Clone ID: PAT_MRT3847_88005C.1.pep
MASTEGLVPITRAFLAAYYDXHPFTPLSAHVSTQST

SEQ ID NO: 272412 - protein, 68 aa, Glycine max
  Clone ID: PAT_MRT3847_88006C.1.pep
HKNRNVCVAWGVACTDGWLFHYIIYSYLMLFQSLFYCCLTLSCIMFITCGTPQFRNFFSGEDQKLSNL

SEQ ID NO: 272413 - protein, 37 aa, Glycine max
  Clone ID: PAT_MRT3847_88007C.1.pep
RAAKIAVVLGANTCSQQWPLHHHLCSSHHLIMTSLSG

SEQ ID NO: 272414 - protein, 224 aa, Glycine max
  unsure (1)..(224): unsure at all Xaa locations
  Clone ID: PAT_MRT3847_88008C.1.pep
MDTIEQENMQFLGFLGIYKESYKLIFSWRKIFTQITFTLILPLSFIFLIHIQVSDLLFGKITHDAKDLTETLPGTPQHQKLLDTFSSDWATFFLFKLLYFISLLIFSLLSTSAIVYTVASFYTGKEVTFKKVLSVVPKVWKRLMVTFLCTVVAFFVYNVMAVLVLGIWALTIGVRNGGGAILSVLAILYLXGSVYLTVVWLLASVVTVLEDSYWYEALIKSKEL

SEQ ID NO: 272415 - protein, 109 aa, Glycine max
  unsure (1)..(109): unsure at all Xaa locations
  Clone ID: PAT_MRT3847_88009C.1.pep
MFLIQEALLWRGKQWSLEIIMSDNGEEAGENRLVPRLNERILSSLSRRSVAAHPWHDLEIGPDSSXFSCVVEITKGSKVSMNLTKRLLIXDRVLYSSVVYHITMPSHTV

SEQ ID NO: 272416 - protein, 68 aa, Glycine max
  Clone ID: PAT_MRT3847_8800C.1.pep
MARARNLIVAAGLVAFAAAGMAFPFYMASSKKPVIDPTKPLSPQATFRGPYINTGSRDVGPDVGPQKK

SEQ ID NO: 272417 - protein, 203 aa, Glycine max
  Clone ID: PAT_MRT3847_88010C.1.pep
MAEDIPSSSPPIAASDTAPLGSSVISLVNRLQDIFARVGSQSTIDLPQVAVVGSQSSGKSSVLEALVGRDFLPRGNEICTRRPLVLQLVQTKAPEDDEYGEFLHFPGRKFHDFSEIRREIQIETDREAGGNKGVSDKQIRLKIFSPNVLDITLVDLPGITKVPVGDQPSDIEARIRTMIMSYIKTPTCLILPVTPANSDLANS

SEQ ID NO: 272418 - protein, 279 aa, Glycine max
  unsure (1)..(279): unsure at all Xaa locations
  Clone ID: PAT_MRT3847_88011C.1.pep
GGGKGCVHWYFELNDIRQFETGGQDLYIRMPALESVNQEEQHGHTTSVKIKIATPIAAISGILLFCIFVMYRVRRSSADKSKTKDNLKKQLEDLDLRLFDLLTITTATNNFSXINXKASAQMNAITQGKLADGRDVAVKRLSSSSGQGITEFMTEVKLIAKLQHRNLVKLLGCCIRGQEKILVYEYMVNGSLDSFVFDQIKGKFLDWPQRLDIIFGIARGLLYLHQDSRLRIIHRDLKASNILLDEKLNPKISDFGMARAFGGDQTEGNTNRVVVLTVH

SEQ ID NO: 272419 - protein, 47 aa, Glycine max
  Clone ID: PAT_MRT3847_88012C.1.pep
QKKIFFPGAQSKLQGWGIVQLNGVPPFSKGRGLCGVFNLISPVRPGK

SEQ ID NO: 272420 - protein, 17 aa, Glycine max
  Clone ID: PAT_MRT3847_88013C.1.pep
YHSINLLKRRIYMNDSI

SEQ ID NO: 272421 - protein, 50 aa, Glycine max
  Clone ID: PAT_MRT3847_88014C.1.pep
HKHRPKCALFKTQPPVFSGQRTTLKRGQITLFWGLFQKKNDTLQSVGKVV

SEQ ID NO: 272422 - protein, 50 aa, Glycine max
  Clone ID: PAT_MRT3847_88015C.1.pep
FLIKLPPWLSPHFVPTHVLQKPRGTLSLSYIRGFPEPLLEHLLTMFMGPQ

SEQ ID NO: 272423 - protein, 91 aa, Glycine max
  Clone ID: PAT_MRT3847_88016C.1.pep
MEIQQQLVKFKYHIGVALLVSLSVFSGLHFAPRFLNILAYFWPLVLSTALFLALVLFFAKTQTSLNSDAFLPKPAEELLDFVAGHHHDPSL

SEQ ID NO: 272424 - protein, 195 aa, Glycine max
  Clone ID: PAT_MRT3847_88017C.1.pep
MMPPSQPPHWAPSPTPILSKSFLPPTSNSPAVDFTPPLIAMVVVVAAAFLVVTYSRLIARHLRPPVHRLLRRFRRRRFLPSSVGDLESLPYDSPFDGPHVFSPYGLDETVIKTIPFSLYTAKYDARFDESRYDCAVCLLEFEDEDYVRTLPVCSHTFHVDCIDAWLRSHANCPLCRAGVLCTDSPFTPMMAALEP

SEQ ID NO: 272425 - protein, 88 aa, Glycine max
  unsure (1)..(88): unsure at all Xaa locations
  Clone ID: PAT_MRT3847_88018C.1.pep
VGGPRSRNKVCTVLTTAHQMSRCRMGASEEEGAPNENGESSQAEGXYVCDGSVPPSAVGVNPMVTIQSTSHCIASMMAESLGKASTYS

SEQ ID NO: 272426 - protein, 62 aa, Glycine max
  Clone ID: PAT_MRT3847_88019C.1.pep
FINNLIYYDESSGKDTEKGTCAVDLFIVDEALLIGKSPTLSPLTFTYFRLPFRPFLLPKKPL

SEQ ID NO: 272427 - protein, 121 aa, Glycine max
  unsure (1)..(121): unsure at all Xaa locations
  Clone ID: PAT_MRT3847_8801C.1.pep
YKSVHYNSRNKIELLLKSNPPYKKVPVYIHNEKPIGKSIVIDGYIDETWNNIPILPSDPYQIASAQTWFKFIDDTVIGAVWKSASTGDEXSWLRMTXESIAALHMLENEIEDKKVSAGEDI

SEQ ID NO: 272428 - protein, 144 aa, Glycine max
  Clone ID: PAT_MRT3847_88020C.1.pep
SLHSSFFFSARSFHLRSFSRSFFPVLFRSFMPWPSYLSHSLLRGPSRLPPHNLLPLLPSPITRPLPPSAPHTCPITFQSLFLLTTYYFLSPLLPLFLLHLTYLLYSIATFILLKTLPHTLPLLPPNPTMLGPPTIHLLVSMATS

SEQ ID NO: 272429 - protein, 46 aa, Glycine max
  Clone ID: PAT_MRT3847_88021C.1.pep
TARTRPVQVQKSSVVSIDSGDAGSHESPCFEFGVGETRVRRQLLSQ

SEQ ID NO: 272430 - protein, 53 aa, Glycine max
  Clone ID: PAT_MRT3847_88022C.1.pep
MHGFSPVDGFVEISNCLAEVIKYVGNESSTGLFFIQHHTQNAVPNVIKLKNNI

SEQ ID NO: 272431 - protein, 33 aa, Glycine max
  Clone ID: PAT_MRT3847_88023C.1.pep
QNTKTKLGSLHYLKSYKKNNKFIEFKQNLPPYP

SEQ ID NO: 272432 - protein, 74 aa, Glycine max
  Clone ID: PAT_MRT3847_88024C.1.pep
MHGFSPVDGFVEISNCLAEVIKYVGNESSTGLFFIQHHTQNAVPNVIKLKNNIIDKSHETTLHTEDLEDSVSMV

SEQ ID NO: 272433 - protein, 54 aa, Glycine max
  Clone ID: PAT_MRT3847_88025C.1.pep
MVAMFIHSSVATYTAAMPPQEREFNSAIRHTWLSKETQNVFIKGIPLFTEFATC

SEQ ID NO: 272434 - protein, 129 aa, Glycine max
  unsure (1)..(129): unsure at all Xaa locations
  Clone ID: PAT_MRT3847_88026C.1.pep
GGDVCWGGVVCCFPPCPIVFPVFSWVVGGNEGALCHLGRPLFVRGADLLPCLLSKCHRVSGAMFVVLFSHGGVGFSALFFFQFLGGFGWWVWALWFLWSRTFCGLSVSLALVLLLPCFWCWXXLRFVFF

SEQ ID NO: 272435 - protein, 102 aa, Glycine max
  Clone ID: PAT_MRT3847_88027C.1.pep
CEDSFISFNEGGVYMWAAERLFFTHKKKECFFFSDQFLLKSFFFLGPFCVLGGKRGGVFSRGGRNPRFTYYRGCFLGGLLTLGGGRGRSLFGVTGVFQDRGF

SEQ ID NO: 272436 - protein, 239 aa, Glycine max
  Clone ID: PAT_MRT3847_88028C.1.pep
MTRKKVKLAFIANDSARKATFKKRKKGLMKKVSELSTLCGIDACAIVYSPYDPQPEVWPSPMGVQRVLAKFRRMPELEQSKKMVNQESFLRQRIMKAKDQLKKQRKDNREKEMTQLMFQYLSAGKIMHNISMVDLNDLAWLIDQNLKDINRRIEVLTKNAQSQPQIAAPAVTDVAAKVEDKGQGSQHGHQGFDINMDLMQKQNWFMNLMNNGGGGGNEAMPIVGDVNQQNGFWPNPFFH

SEQ ID NO: 272437 - protein, 66 aa, Glycine max
  Clone ID: PAT_MRT3847_88029C.1.pep
NSLSKHTVSVIVLPSKKETCGKQKKKEKKSSIHHLLQCKFNTPARTVLQTQNSSMGFHSILLERRM

SEQ ID NO: 272438 - protein, 82 aa, Glycine max
  Clone ID: PAT_MRT3847_8802C.1.pep
RKPATLDRKVASYLARPPYLHSSETWRATIHTGHLPVAHRTGWLQISSSTAEPRARLQELGCTPRRQRELGSMPNLGGTSTA

SEQ ID NO: 272439 - protein, 43 aa, Glycine max
  unsure (1)..(43): unsure at all Xaa locations
  Clone ID: PAT_MRT3847_88030C.1.pep
HXLSKLRNHXXXQXXXTVKXVRQCTMEHXXAFLICKXKXDLEX

SEQ ID NO: 272440 - protein, 89 aa, Glycine max
  unsure (1)..(89): unsure at all Xaa locations
  Clone ID: PAT_MRT3847_88031C.1.pep
MGXDTESGAFQAVINHVLSLIINTFYMQQVRSNFMSSSAMHSDTLDMNRSESLTDNSXLDAQSIDDIQIILEQTNITLIIIHRSIGISK

SEQ ID NO: 272441 - protein, 63 aa, Glycine max
  unsure (1)..(63): unsure at all Xaa locations
  Clone ID: PAT_MRT3847_88034C.1.pep
AIIPSKPVVXYNYXKEAKXFYARXXDXGTVAAFXLXXPKXGTIISGSXNEERLNXISSRIDXL

SEQ ID NO: 272442 - protein, 66 aa, Glycine max
  unsure (1)..(66): unsure at all Xaa locations
  Clone ID: PAT_MRT3847_88035C.1.pep
SVISNNTTXGRRLALXXRQXKNKPXPKXXXGRGXPEPKNRNXDEGKKKKGEDETPDSEHPDTREKE

SEQ ID NO: 272443 - protein, 126 aa, Glycine max
  unsure (1)..(126): unsure at all Xaa locations
  Clone ID: PAT_MRT3847_88036C.1.pep
LDLSRNQISGPIPESLGKMAVLSTLNLDMNKLSGPIPVSLFSSGISDLNLSRNALEGNIPDAFGVRSYFTALDLSYNNLKGAIPKSISSASYIGHLDLSHNHLCXPFDHXFVYNDCLCGKPLKPCY

SEQ ID NO: 272444 - protein, 110 aa, Glycine max
  unsure (1)..(110): unsure at all Xaa locations
  Clone ID: PAT_MRT3847_88037C.1.pep
CKEKCGERKGIPIALGLLSDAPXFIASSSSSHLVGASDDTYNAIFYHSFDEDFHGRRIASDREDYYRVWYLANSDEPDDYGLLVSEHASPYGIAKNLDEPVSLRARTCVL

SEQ ID NO: 272445 - protein, 122 aa, Glycine max
  Clone ID: PAT_MRT3847_88038C.1.pep
SLGKMAVLSTLNLDMNKLSGPIPVSLFSSGISDLNLSRNALEGNIPDAFGVRSYFTALDLSYNNLKGAIPKSISSASYIGHLDLSHNHLCGKIPLGSPFDHLEASSFVYNDCLCGKPLKPCY

SEQ ID NO: 272446 - protein, 72 aa, Glycine max
  Clone ID: PAT_MRT3847_88039C.1.pep
NLATLVTYIGCRLGSVTCSPWAILGVINMDLVPIHLHVRAFLRVLATLKLVFYPEGQDEPCFVHHLTLTLKA

SEQ ID NO: 272447 - protein, 368 aa, Glycine max
  Clone ID: PAT_MRT3847_88040C.1.pep
MGAVRSITVLLLVLFMAMSSGVRSCPPSDRAALLAFKAALHEPYLGIFNSWTGADCCHKWYGVSCDQETRRVADINLRGESEEPIFERAHRTGYMTGYISPAICKLARLSSITIADWKGISGEIPRCITTLPFLRIVDLIGNRLSGSIPADIGRLHRLTVLNVADNLISGTIPTSLANLSSLMHLDLRNNLFSGPIPRNFGSLSMLSRALLSGNRLSGAIPSSVSQIYRLADLDLSRNQISGPIPESLGKMAVLSTLNLDMNKLSGPIPVSLFSSGISDLNLSRNALEGNIPDAFGVRSYFTALDLSYNNLKGAIPKSISSASYIGHLDLSHNHLCGKIPLGSPFDHLEASSFVYNDCLCGKPLKPCY

SEQ ID NO: 272448 - protein, 37 aa, Glycine max
  Clone ID: PAT_MRT3847_88041C.1.pep
KYSVSVKQLASQQCISEISTVKCTLFCVYIIYLHFNK

SEQ ID NO: 272449 - protein, 60 aa, Glycine max
  Clone ID: PAT_MRT3847_88042C.1.pep
FFFFFFFFFFFFFFFFFFFFKKTAPYFLAWNSKDFPNSNPGGEKKNFFGKKIPFLIPNFP

SEQ ID NO: 272450 - protein, 40 aa, Glycine max
  Clone ID: PAT_MRT3847_88043C.1.pep
PGKKPKFVVHAAGDVGISGDGYRWRKYGQKVVKGNPHTRE

SEQ ID NO: 272451 - protein, 170 aa, Glycine max
  Clone ID: PAT_MRT3847_88044C.1.pep
RPTRARTRPPTRPVALAKSIGQRFRGIHHSPCKQLCNNNRCEGQVQSAGPVGSLLKSRSVIRFRGPDTLKFLQGLLTNDVRNFGEAVGDRTENLPTPNVPATSVPPIYAALLTPQGRFLYDLFLYKPSTCHTKLDHTGTGPDSKPHEPFHMFADVDASVLDELLQTLNKY

SEQ ID NO: 272452 - protein, 114 aa, Glycine max
  Clone ID: PAT_MRT3847_88045C.1.pep
PRVRPRVRPRVRIHRNTSLRTTSGGDNDADGQTREHAILAFTLVVKQMICCCIKMDATTGKYSKATYDEIANEVCYYLKMVGYNLNKMAFVPHCGYWGDNMIERFTNLDWYKGP

SEQ ID NO: 272453 - protein, 65 aa, Glycine max
  Clone ID: PAT_MRT3847_88046C.1.pep
RLKRPVVVLCVNQCSFLLLTLPFKHPSSCIPLPSKPNPKRPWDRDGREVVFSFLFIRFIYQIYQH

SEQ ID NO: 272454 - protein, 55 aa, Glycine max
  Clone ID: PAT_MRT3847_88047C.1.pep
KHSGYEKSIQWDGSCMNGNIRTAFLESQSVRNSSGVHSNYHSKYLSPSDLGIIII

SEQ ID NO: 272455 - protein, 147 aa, Glycine max
  Clone ID: PAT_MRT3847_88048C.1.pep
PTAREREREESIFAPRSLYFSANDTTASFSPFCIFHSLPMPLLSNSSPCCTAAAVVNSSDRKPGFVSPSWRNCKVTSPILRLSQNDKFNVSRLALSHSRRTISMALVGETVGVGQKGQVASSSGILAYDLIQGALVRWSSVMDRSLP

SEQ ID NO: 272456 - protein, 62 aa, Glycine max
  Clone ID: PAT_MRT3847_88049C.1.pep
MELVNNKNLSPESFVNLITPSGKHFPYRENWEEASTVNDFSVCYWAPEVKILIAPIYLFYEF

SEQ ID NO: 272457 - protein, 108 aa, Glycine max
  Clone ID: PAT_MRT3847_8804C.1.pep
VNLSSLTCPSGYRGPDPPLMASSRCWCTALLMRLLSHCVASIVLTVALSCLFLCASSFLGSIRAKANFWFGSFSQGRLPVNRRWHTAPSNISTIQCKFRASLCAAFFT

SEQ ID NO: 272458 - protein, 41 aa, Glycine max
  Clone ID: PAT_MRT3847_88050C.1.pep
LPLISLRSDVFSLGKLCEFGIGFSVLVASIVYFLVLGFNSN

SEQ ID NO: 272459 - protein, 169 aa, Glycine max
  Clone ID: PAT_MRT3847_88051C.1.pep
SQTIYGGLGVNWGTQATHQLRADTVVEMLKDNGIQKVKLFDADESSMSALSGSGIEVMVAIPNNQLAEMNDYDRALQWVKKNVTRYNFRGGVNIKYVAVGNEPFLKSYNGSFLNITLPALQNIQNALNDAGLGDSIKATVPLNADVYESPPNSPVPSAGIFRPDISDLM

SEQ ID NO: 272460 - protein, 46 aa, Glycine max
  Clone ID: PAT_MRT3847_88052C.1.pep
FGTGWTRSWIEMRCFRLKKTSLTGETKRRIGGSYWHRKYVEEVLYY

SEQ ID NO: 272461 - protein, 88 aa, Glycine max
  unsure (1)..(88): unsure at all Xaa locations
  Clone ID: PAT_MRT3847_88053C.1.pep
FFGCRNSARXXXXEXXXERERERERERERERERERERERERLXPXSTRCXXESSKDVSSRTKGSKDGYGGYEECVVSQQHQCWGACPS

SEQ ID NO: 272462 - protein, 112 aa, Glycine max
  unsure (1)..(112): unsure at all Xaa locations
  Clone ID: PAT_MRT3847_88054C.1.pep
KDVDIPVAAVRKTLNGPWXKETPENRGKLLNKIAXLIYKNADLIDCVEALAYGKAFTMGNKLGVPTRGGCLEYYGRXADYIEGNVCYTWAHIFKYVRKEPIGVSGXIIPWNL

SEQ ID NO: 272463 - protein, 300 aa, Glycine max
  Clone ID: PAT_MRT3847_88055C.1.pep
MDGIHGGDSRIHITDGQHPIHVPYVQEHEHHGLHHISNGNGIDDDHNDGGDTNCGGSESMEGEVPSNHGNLPDNHAVMMDQGGDSGDQLTLSFQGQVYVFDSVSPEKVQAVLLLLGGREIPPTMPAMPVSPNHNNRGYTGTPQKFSVPQRLASLIRFREKRKERNYDKKIRYTVRKEVALRMQRNKGQFTSSKSNNDESASNATNWGMDENWTADNSGSQQQDIVCRHCGISEKSTPMMRRGPEGPRTLCNACGLMWANKGILRDLSRAAPLSGTIKNENKSLEANQIVHRVAGEADDSS

SEQ ID NO: 272464 - protein, 112 aa, Glycine max
  Clone ID: PAT_MRT3847_88056C.1.pep
KGTPEYVRSCCEASLKRLDVEYIDLYYQHRIDQTVPIEETVGELKKLVEEGKVKYIGLSEASPDTIRRAHAVHPITALQIEWSLWTRDIEEEIIPLCRSVQLPQIHSNVQLS

SEQ ID NO: 272465 - protein, 40 aa, Glycine max
  Clone ID: PAT_MRT3847_88057C.1.pep
MVSNTIFDELREQDLINLIQVIVIELSFRIIVLSASRNCY

SEQ ID NO: 272466 - protein, 79 aa, Glycine max
  Clone ID: PAT_MRT3847_88058C.1.pep
PPFGMDQSPLVGAIGLVVHSTVHMSLPGTQCRLSCKVLRSGAQGAQFFKVRPFVKGPEQFSPRVDSSIAPFIKCIPSQN

SEQ ID NO: 272467 - protein, 78 aa, Glycine max
  Clone ID: PAT_MRT3847_88059C.1.pep
LNNSTAGNCLANGTSVNGGKGYSSTLKRKRSQVANAHELLKRKNRRRPLTKVLESTAMVSVPVICNQLPSSSSSPLCG

SEQ ID NO: 272468 - protein, 68 aa, Glycine max
  Clone ID: PAT_MRT3847_8805C.1.pep
LAGAIKSPFDLHVLMICSCYTDSLTMLVTILSASTRSTKTAGDARSTGYDTEACIDGSSNTIWVLDYG

SEQ ID NO: 272469 - protein, 125 aa, Glycine max
  Clone ID: PAT_MRT3847_88060C.1.pep
APWQSSLCVLSLFVSVGVGCSDVSSFVLSLLPLVLFSPWLRSLLGFSLCGASPQGLWFWFSLLPLCVFFSFFFCFGYSPVFVCAMPLLFCLLTVSSFSSSYSCCFIFHYKTCIKNKNHQNKKQYQ

SEQ ID NO: 272470 - protein, 319 aa, Glycine max
  Clone ID: PAT_MRT3847_88061C.1.pep
WLRDLCDAHQEMQSWAEAAQCAVAVAGVVMQALVARNDGVWSKDHVSALRKICPMVSNEITSEASAAEVEGYGASKLTVDSAVKYLQLANKLPTRAELFHFCASILELVIPVYKSRRAYGQLAKCHTLLTNIYESILEQESSPIPFTNATYYRVGFYGVRFGKLDKKEYVYREPRDVRLGDIMEKLSHTYESRMDGNHTLHIIPDSRQVKAEELQPGVCYLQITAVDPVMEDEDLGSRRERIFSLSTGSVRARVFDRFLFDTPFTKNGKTQGGLEDQWKRRTVLRTEGSFPALVNRLLVIKSESLEFSPVENAIGMIET

SEQ ID NO: 272471 - protein, 63 aa, Glycine max
  Clone ID: PAT_MRT3847_88062C.1.pep
QHLVFHGCPSELTWRCGCLDLLFQVNADRMEAQAVCKKTVGLAVHFDLLFPTAIFLRDFVAAS

SEQ ID NO: 272472 - protein, 81 aa, Glycine max
  unsure (1)..(81): unsure at all Xaa locations
  Clone ID: PAT_MRT3847_88063C.1.pep
QQSYHITSLPFSRSYDNGTSVCLLLFASXVFILYSSSHSLSPFGSPYINPLQSCSREFASWFVYLELCEPVENSNHPVCVS

SEQ ID NO: 272473 - protein, 40 aa, Glycine max
  Clone ID: PAT_MRT3847_88064C.1.pep
MHKDIPAQVDAYDTSHVRLNHYTSKYHEEGVTKQRSLNDN

SEQ ID NO: 272474 - protein, 574 aa, Glycine max
  unsure (1)..(574): unsure at all Xaa locations
  Clone ID: PAT_MRT3847_88065C.1.pep
LHIMWLLHLCDAHQEMQSWAEAAQCAVAVAGVVMQALVARNDGVWSKDHVAALRKICPMVSNEITSEASAAEVEGYGASKLTVDSAVKYLQLXANKLFSQAELFHFCASILELVSPVYKNKGAFDLLRLAVFQNENIRQRAAVGLQILVRSSFHYFMQTARLRVMLIITLSELMSDVQVTQMRSDGSLEESGEARRLRKSVDEMKDETKNAYLLKECGLPENALVTVPEKMTENRWSWSEVKYLSDTLLLAFLTNIYESIFEQEFSPIPFTNATSYNVLSYAVSFGNVVKKEWLLHLCDXTSVNAVMGKLCPVYYCXIYGNNTVPSIPEPXQLEEEAWFSGIEDLHIAAVCPLMXMTAXGSRRERCFSIYSGSVRALLVDCXIISPPNSNHFHFXTTHSKTCNTNVQLQERWMTRTVLQTEGSFPALVNRLLVIKSESLEFSPVENAIGMIETRTAALRNELEEPRSSEGDQLPRLQSLQRILQGSVAVQVNSGVLSVCTAFLSGEPATRLRSQELQQLIAALLEFMAVCKRAIRVHFRLIGEEDQDFHTQLVNGFQSLTAELSHYIPAILSEL

SEQ ID NO: 272475 - protein, 91 aa, Glycine max
  Clone ID: PAT_MRT3847_88066C.1.pep
YGGEFFNWWVCTVTMFSLASYRRVMVGVPVRTHFSVVVQFVGGLFPTGAHDLLVGVCRTFFFCSGYALGQAFQVYLNCQENLPAPVPEVCK

SEQ ID NO: 272476 - protein, 74 aa, Glycine max
  unsure (1)..(74): unsure at all Xaa locations
  Clone ID: PAT_MRT3847_88067C.1.pep
GATRPPRVRRLLYDFIMSRLXIRPLTCSNGKKQLNFSVPLILHKYSFAITLQKVTTPRILHTIHLISNNTTLFV

SEQ ID NO: 272477 - protein, 164 aa, Glycine max
  Clone ID: PAT_MRT3847_88068C.1.pep
MADSSSNFSLPCDALSLRQKSFSIFHTGGSRLGVGAKGLPDSESVWSPTSPLDCRLFSNLSNPFSAKSSRPSFQTGHKKQFDGSKVGLGIISSLANETKLNNDILAKFKRKGIIFGPQVKTGILKFSNNNQESLVPYLKSNSLPKNYVISLPSETTIPKSELEN

SEQ ID NO: 272478 - protein, 45 aa, Glycine max
  Clone ID: PAT_MRT3847_88069C.1.pep
PCKTWLHHYSTLIFIFLKILKLLIVFKLSFCTKKNFLSNLNFNFV

SEQ ID NO: 272479 - protein, 69 aa, Glycine max
  Clone ID: PAT_MRT3847_8806C.1.pep
RVRVRTWISYRGAMPMVCQEETLVEAALRVLNTADPLSEARLGDSGGFAAALWRLTRTVPPFRLPSHAI

SEQ ID NO: 272480 - protein, 173 aa, Glycine max
  Clone ID: PAT_MRT3847_88070C.1.pep
MEVLQLLASDFTLRHSLSKPTVSLPPTHSLSVVVFRRRRSPCGGRWWAPRACAVEVSESEGGKMVMELVGAFNELTERMNVLSTSSSRLLFKCLKLSIPILQSSPLAPDGRSPLSKALSVALLLADLQMDAEVISAGIFRAVLEAGELSIHEIRNQMGLATAHLLHESLRVNN

SEQ ID NO: 272481 - protein, 83 aa, Glycine max
  Clone ID: PAT_MRT3847_88071C.1.pep
RPTRPQCPNLENVHASGCQDMLIGAIQSQVHDASADMENHSPSKRLPDGSKRIRVPHLLSEESPEPEKKRRRIERQLCNVLLD

SEQ ID NO: 272482 - protein, 100 aa, Glycine max
  unsure (1)..(100): unsure at all Xaa locations
  Clone ID: PAT_MRT3847_88072C.1.pep
ILCICFKXIILGGLILGGRPSSIFLVPINRGAPTPQRACVGWFPIVSPIGETLVGVSHLTHRQGVSRVANTAPSVCFGSGNSGGLLLSMVLSPPLVFCPK

SEQ ID NO: 272483 - protein, 92 aa, Glycine max
  unsure (1)..(92): unsure at all Xaa locations
  Clone ID: PAT_MRT3847_88073C.1.pep
GGVSCPXLCRKLLGHGVPLVGSHKGANEPIGYCTRPLWHLRNSLGXIWVGSGQYEVLRAPNVFERIFHGLPVRSFSALQPLELKTSMIVAVR

SEQ ID NO: 272484 - protein, 110 aa, Glycine max
  unsure (1)..(110): unsure at all Xaa locations
  Clone ID: PAT_MRT3847_88074C.1.pep
DPQETGEGXTERGDKAGRRQGREXRRGGRDGQKGREKTADKDPKGGGDGTETQELDVCHSDTSGMNHFFFFELMGVDPGTNLVCHILGRKAILWGPNLCMDTGYETNVVV

SEQ ID NO: 272485 - protein, 108 aa, Glycine max
  unsure (1)..(108): unsure at all Xaa locations
  Clone ID: PAT_MRT3847_88075C.1.pep
ESCIVHKIWEVPVKVFNEMMDMNVKGMTNVLHSXKKMEVIIVNTSSGWGRXGAMLVAPYCASKLAIKGLSKXAKEVLEGMPVVALNWNIINTNMLSSCFGASTSLYQA

SEQ ID NO: 272486 - protein, 42 aa, Glycine max
  Clone ID: PAT_MRT3847_88076C.1.pep
VDSDYTTDQTTRRRLATPASNTQRPINTYQLQWQQATIKSKI

SEQ ID NO: 272487 - protein, 196 aa, Glycine max
  Clone ID: PAT_MRT3847_88077C.1.pep
LYSDVVGRGIDPDVFTYTCLIHGFCGLGQWREVTRLLCDMVDRNVNLNVYTYNILIDALCKKGMLGKAHDMRNLMIERGQRPDLVTFNTLMSGYCLYNDVVEARKLFDTFAECGITPDVWSYNILIIGYCKNNRIDEALSLFNKMNYKKLAPNIVTYSSLIDGLCKSGRISYAWELFSAIHDGGPSPNVITYNIML

SEQ ID NO: 272488 - protein, 42 aa, Glycine max
  Clone ID: PAT_MRT3847_88078C.1.pep
MADTGGGDAVRPVVICDNKCGCTLPCTGGSTCRSLKFMISTK

SEQ ID NO: 272489 - protein, 65 aa, Glycine max
  unsure (1)..(65): unsure at all Xaa locations
  Clone ID: PAT_MRT3847_88079C.1.pep
KTQXTWIPALNSQSKQHLWHHLLRQIPEHTNIILPQLLNLPLPTSKHCIRLACYAPPKLLEQKLQ

SEQ ID NO: 272490 - protein, 128 aa, Glycine max; identical to SEQ ID NO: 193537
  Clone ID: PAT_MRT3847_8807C.1.pep

SEQ ID NO: 272491 - protein, 47 aa, Glycine max
  Clone ID: PAT_MRT3847_88080C.1.pep
ISMQCFLFTLLYAFGLQYTVVKYSKFLIASLLYIIRFFIFTYPNLSF

SEQ ID NO: 272492 - protein, 80 aa, Glycine max
  unsure (1)..(80): unsure at all Xaa locations
  Clone ID: PAT_MRT3847_88081C.1.pep
XXFLXLVXVXAXDRQXAQTAXGSXSVSPXSSLVAVFARVPVVXLXXPAPPXDSAGKVKALGKGXACVXGDEXVDXKVGXT

SEQ ID NO: 272493 - protein, 54 aa, Glycine max
  Clone ID: PAT_MRT3847_88082C.1.pep
GLQNLVCGRKLNFSLSISNFIKSMSGAHYMSGKFLAAEKKFPYQKTYYLFSKDS

SEQ ID NO: 272494 - protein, 105 aa, Glycine max
  Clone ID: PAT_MRT3847_88083C.1.pep
NPQSTLCFQMLKFLHGSAIEIFLVLAPSPSARVFFQPKQASLFLKKGPFQFPSFKLSVVAMLSQVQSNVPSNKHPLSVHGTRHNNRVFLPLNPKKKGVTPIRVHR

SEQ ID NO: 272495 - protein, 112 aa, Glycine max
  unsure (1)..(112): unsure at all Xaa locations
  Clone ID: PAT_MRT3847_88084C.1.pep
MAMATQASLLTXPLSGLKASGRAFVPWKQNSNLFFSRPNPLKFSRTIIAPVVDETTEAPSKVEAAPVRYTLPELDPNTPSPIFLGIIFGLLRNVQLEELYVISCHSPIEQIL

SEQ ID NO: 272496 - protein, 94 aa, Glycine max
  unsure (1)..(94): unsure at all Xaa locations
  Clone ID: PAT_MRT3847_88085C.1.pep
MAMNDEVVTRQYSIIRHSRLHGCTFMSKAPNASTEIRKFAQYAMGTNDVMVDVQLDQLCLEPXIRTVPMTTKVRIARRTNDDEHAHEQLYTHVT

SEQ ID NO: 272497 - protein, 106 aa, Glycine max
  Clone ID: PAT_MRT3847_88086C.1.pep
KQLEDGRTLSDYNIQKESTLHLVLRLRGGMQIFVKTLTGKTITLEVESSDTIDNVKSKIQDKEGIPPDQQRLIFAGKQLEDGRTLSDYNIQKESTLHLVLRLRGGQ

SEQ ID NO: 272498 - protein, 133 aa, Glycine max
  unsure (1)..(133): unsure at all Xaa locations
  Clone ID: PAT_MRT3847_88087C.1.pep
MLDGWVCAFLLVLSWSVEVIDASAGDADPRYRGCITQCQETGCIGQRCFPNCKFSSDGEFIDRPWYMHFHGWVSFFILIHYKLPLKDGKKAYYEYAGLWHMYGLLSLNSWFLSAXFHSRDVDLTEKLDYSSAV

SEQ ID NO: 272499 - protein, 124 aa, Glycine max
  Clone ID: PAT_MRT3847_88088C.1.pep
SPVCSGGLETNAGFQMGDANAGLVVPNQHFRLMPSMKPRRPVASRLLCCAAIVKLLITRFAHLIGRIADSAQNPKTLFQGCRSRRKHASIGGGTEDPREAPPRRYRGAKSRNDGGGVRLTHLEP

SEQ ID NO: 272500 - protein, 343 aa, Glycine max
  Clone ID: PAT_MRT3847_88089C.1.pep
MLDGWVCAFLLVLSWSVEVIDASAGDADPRYRGCITQCQETGCIGQRCFPNCKFSSDGEFIDRPWYMQQEPLYLQWKKWDCQGDCRYYCMLDREKERESHNLGPVKYHGKWPFRRIYGMQEPASVAFSALNLAMHFHGWVSFFILIHYKLPLKDGKKAYYEYAGLWHMYGLLSLNSWFWSAVFHSRDVDLTEKLDYSSAVVLLGYSLILAILRTFSIRDEATRVMVAAPLIAFVTTHVMYINFYLLDYGWNMIVCVVMAVAQLSMWAVWAGVSNHPSRWKLWLVVIAGGLAMLLEIYDFPPHQGLFDAHALWHATTIPLTYIWWSFIRDDAEFRTSNLLKKAK

SEQ ID NO: 272501 - protein, 82 aa, Glycine max
  Clone ID: PAT_MRT3847_8808C.1.pep
ERCLRNRLFDVIILLLCDRNTIQWLDIYNVETGLALTLPNLMASNRIILSFANVLVNRNAPITFSYNYSAYMANETRPRSLY

SEQ ID NO: 272502 - protein, 91 aa, Glycine max
  Clone ID: PAT_MRT3847_88090C.1.pep
TRTTNKDQNIPTRNKKEERNEDGRGNTRRKTDRKKEENLDGERNHTKGQGNGEANDKGTQTREDNRDYANTAQDHENSNKEKTQGHQKHEK

SEQ ID NO: 272503 - protein, 117 aa, Glycine max
  unsure (1)..(117): unsure at all Xaa locations
  Clone ID: PAT_MRT3847_88091C.1.pep
MSMEVVGDTASLEVDLLQLPEVSALALKSNLTFVETLFEQWLSLPESNRLVTSLLNEAKSGAPLNVPGNRSSPNAASNSLPSMFPAGTAPPXSPRSTSSSPRIVKPESGPSNLGSPL

SEQ ID NO: 272504 - protein, 205 aa, Glycine max
  Clone ID: PAT_MRT3847_88092C.1.pep
MEDQKEKISVSENLEMNIDVQPELFVDKHEPETGGDTTGILRRWKRKEMLRRGSLGLRGIALFMSLISLILTASNKHGYWNNFDKFEEYRYMLAVAALSSLYTVVQVFRQVHELFTGKSLMRPKTEGLIDFVGDQVVAYLLISSTSSAIPATDEMREVTTNIFTDSAAAGIAFSFFAFCCLALSAVISGYKLSTQTYTPMNILDS

SEQ ID NO: 272505 - protein, 54 aa, Glycine max
  unsure (1)..(54): unsure at all Xaa locations
  Clone ID: PAT_MRT3847_88093C.1.pep
MSMEVISDTASLEVDLLQLPEVSSLALKSNLTXVETLFEQWLSLPESNRLVTSL

SEQ ID NO: 272506 - protein, 42 aa, Glycine max
  Clone ID: PAT_MRT3847_88094C.1.pep
LSMRMMVILRSLDTQMLIVLVLLVIRNLGYTLLDIVYSLEII

SEQ ID NO: 272507 - protein, 54 aa, Glycine max
  Clone ID: PAT_MRT3847_88095C.1.pep
CFQFSAYTTKNFILKFKFLEIEISSNFLIQPSMISKFIMCSSCPFHPVNLSILV

SEQ ID NO: 272508 - protein, 63 aa, Glycine max
  Clone ID: PAT_MRT3847_88096C.1.pep
GHFLIICILNANPAWLVAVLPIRSGPSSGSSLSTGPGFHSRGVAVSSSITATPSLVVPALVMK

SEQ ID NO: 272509 - protein, 452 aa, Glycine max
  unsure (1)..(452): unsure at all Xaa locations
  Clone ID: PAT_MRT3847_88097C.1.pep
RRCLEKDDFRVLTAVELGMRNHEIVPTELIDRIARLKHGGTYKVLKNLLKHKLLHHDSSKYDGFRLTYLGYDFLAIKTMVNKGVFVAVGRQIGVGKESDIFEVAREDGTVLAMKLHRLGRVSFRAVKSKRDYLRHRSSYNWLYLSRLAALKEFAFMKALETHGFPVPNAIESNRHCVVMSLVQGYPLVQVKQLLNPETVFEAILGQVVRLAEHGLIHCDFNEFNIMINDDEKITMIDFPQMVSVSHRNAQMYFDRDVECIFKFFRKRFNLSFQESIDDIDGSDXDEMKGRDEAGKPCFSSIERSAGFLDRELAYNGFTRKNEEDIQRFIEGGARKXTNSDSEGVDLVEDLNDADTVDGAEQNXGSGRSRERGDXEARESSGSEKEDASDNGESNEDTLQNEAELVKNLSKQRRHAIAKAHKGRKTVAARNSYKDKGGRSSHNSKIQKQLSSW

SEQ ID NO: 272510 - protein, 216 aa, Glycine max
  unsure (1)..(216): unsure at all Xaa locations
  Clone ID: PAT_MRT3847_88098C.1.pep
GSRALETHGFPVPNAIESNRHCVVMSLVQGYPLVQVKQLLNPETVFEAILGQVVRLAEHGLIHCDFNEFNIMXFDRDVECIFKFFRKRFNLSFQESIDDIDGSDEGRDEAGKPSFSSIERSAGFLDRELAASGFTRKNEEDIQRFIEGGAESDTNSDSERVDLVEDLNEADTVDDDSSHLSEQNEGSESQGKEEICEARESSGSEKEDASDNGGRQ

SEQ ID NO: 272511 - protein, 133 aa, Glycine max
  unsure (1)..(133): unsure at all Xaa locations
  Clone ID: PAT_MRT3847_88099C.1.pep
RWTRQRSPSSSAVPRPVPHRTGRLGVQHPDNNAMKPQNYCRVIPMIQDVGHAPRADRSASPDPVPDMATYQGASRQSCRPKGCSWLQANELLVPAGHTAHEIXXTFQPITSCQTSGVPSASDTCSFXRLERLE

SEQ ID NO: 272512 - protein, 128 aa, Glycine max; identical to SEQ ID NO: 193537
  Clone ID: PAT_MRT3847_8809C.1.pep

SEQ ID NO: 272513 - protein, 59 aa, Glycine max
  Clone ID: PAT_MRT3847_880C.1.pep
ETSGQAGLPAEFKHINKRRKRKGGKKKKAAAPQDESCLSTPGYDITPLQCRQLSSHQWS

SEQ ID NO: 272514 - protein, 223 aa, Glycine max
  unsure (1)..(223): unsure at all Xaa locations
  Clone ID: PAT_MRT3847_88100C.1.pep
LTAVELGMRNHEIVPTELIDRIARLKHGGTYKVLKNLLKHKLLHHDSSKYDGFRLTYLGYDFLAIKTMVNKGVFVAVGRQIGVGKESDIFEVAREDGTVLAMKLHRLGRVSFRAVKSKRDYLRHRSSYNWLYLSRLAALKEFAFMKALETHGFPVPNAIESNRHCVVMSLVQGYPLVQVKQLLNPETVFEAILXXVXSLAEHGLIHXDFNELXIMINDDEKIP

SEQ ID NO: 272515 - protein, 77 aa, Glycine max
  unsure (1)..(77): unsure at all Xaa locations
  Clone ID: PAT_MRT3847_88101C.1.pep
NPGDIFNPLGLNYYPKAFYKLTVKALKFGIMAMFSRLGFFVQAHVTGXGPLXNRADRLAVPVNTNSWALATFFVPGK

SEQ ID NO: 272516 - protein, 60 aa, Glycine max
  unsure (1)..(60): unsure at all Xaa locations
  Clone ID: PAT_MRT3847_88102C.1.pep
RIDDHHDCCRFRSLNSCLFSLERVXLSIELGPNKFERIQNLMAGLRLFKAHPPSYSEPFT

SEQ ID NO: 272517 - protein, 48 aa, Glycine max
  Clone ID: PAT_MRT3847_88103C.1.pep
QLDIPFYPEQKLPVCFGNSPLHAAILKGNPGIPSNSHQITSLIFFPAH

SEQ ID NO: 272518 - protein, 116 aa, Glycine max
  Clone ID: PAT_MRT3847_88104C.1.pep
ALDVPYFVSQVATLPCPISSNLSALTLVSIRLLSRSIGFPTSWLLLAVPSGLLLVITPSASHPFHPRYSSSFIVSQKILLLSLQLSLAPRIWALLNPMTLIYLILKYATKICLTVR

SEQ ID NO: 272519 - protein, 151 aa, Glycine max
  Clone ID: PAT_MRT3847_88105C.1.pep
MSFQGASIGPLIDLAIQIDPSLIFSAFVGTSLAFACFSGAALVARRREYLYLGGLVSSGLSILLWLHFASSIFGGSTALFKFELYFGLLVFVGYIVVDTQEIVERAHLGDLDYVKHALTLFTDLVAVFVRILVIMLKNSAERNEKKKKRRD

SEQ ID NO: 272520 - protein, 44 aa, Glycine max
  Clone ID: PAT_MRT3847_88106C.1.pep
WLLLSRDQWRRNSSIDLVLLAQKSNDGSHFHRMHVIHLSTLSSD

SEQ ID NO: 272521 - protein, 99 aa, Glycine max
  unsure (1)..(99): unsure at all Xaa locations
  Clone ID: PAT_MRT3847_88107C.1.pep
MVNYSSKPYMSTKCCKARXAPHLKLHFKNTSETAFAIRKLPLVKAKRYLEDVLSAQLIAISRSYAFCLGVIRTAQAKNIHSNGQRMRPFKLAXFILDLL

SEQ ID NO: 272522 - protein, 53 aa, Glycine max
  Clone ID: PAT_MRT3847_88108C.1.pep
MHRTGRMNHPHAGLGTGSKCSQRERGCTQRSGLSVICIDRQPATRSPPISSLL

SEQ ID NO: 272523 - protein, 90 aa, Glycine max
  unsure (1)..(90): unsure at all Xaa locations
  Clone ID: PAT_MRT3847_88109C.1.pep
LPXFXIPXIYXXLFFAXCXXLLXXSXHXLSXCPXXATPSXXXXXXCXLXXXTXFPXGXXXXXXXYXSXSXXXIIXXLLPSSRXXTXXXXI

SEQ ID NO: 272524 - protein, 331 aa, Glycine max
  Clone ID: PAT_MRT3847_8810C.1.pep
MTTFTHSIFHHDLLFLFYFFLLTEFPPQATAQPPNTLTPPPQQDRFTRLKFDKSMAIVLLILVVVFFILGFLSVYTRQCAERRMGGRFDLSILISRRQRGLGREVIETFPTFVYSTVKSLKLGRATLECAVCLNEFEEVETLRFIPNCSHVFHSECIDAWLANHSTCPVCRANLFPKPDDPSFDPIQIPDPEQPVISSPTRAETGGSNPRSPNLIDQNPTSRSRSTGFRIAGWFPRSHSTGHSLVQPGENCERFTLHLPEEVRNQLMLSRTKSCGVGVTFTRENSERRGYRARSVGSSLSPHVRGWFSVKDDVGERSSDRLFSTSTRDSEV

SEQ ID NO: 272525 - protein, 145 aa, Glycine max
  unsure (1)..(145): unsure at all Xaa locations
  Clone ID: PAT_MRT3847_88110C.1.pep
XXXXXXXNRPEVQXXXHAKPTNWSHCSDLIDWNDSPXTILXVIKYXTDSNIVLWIYSGDTDARXVPVTSSRYAINTLKLPIQVPWRPWYSGNEVGGYVVKYKGVTFVTVRGAGHLVPSWQPARALTLIFSFLYGSLPPASPWKGY

SEQ ID NO: 272526 - protein, 74 aa, Glycine max
  Clone ID: PAT_MRT3847_88111C.1.pep
FCFFFFVFFFFLFFYLCLFKKTKKDFFPNGNRGPTFRGQNFFLPRGLNLTWHFTRFHIFLRLPLIRARLPHLGG

SEQ ID NO: 272527 - protein, 76 aa, Glycine max
  Clone ID: PAT_MRT3847_88112C.1.pep
FFFFFFFFFFFFFFFFFFFFFFFFLGKTGPLYYKKKNDLKTIPPETLLNKEHEPLIFHYRTPKGAQIYFEKPRSLA

SEQ ID NO: 272528 - protein, 72 aa, Glycine max
  Clone ID: PAT_MRT3847_88113C.1.pep
ILIGVLYAHQCPPPAKSLKLQAAKQHYQAWKLILRNRSSKKINRFFLSMCGMSLLSAFIHNHLHTIAIYEEF

SEQ ID NO: 272529 - protein, 90 aa, Glycine max
  Clone ID: PAT_MRT3847_88114C.1.pep
LVLNFKLSLILFSLLSLVTLNYEINYLFCIIGDCIHRQNGTCILEYVLHIQSLLIKTALLNLLRIRVENEKITFCLLYEGMACCMHDHKI

SEQ ID NO: 272530 - protein, 65 aa, Glycine max
  unsure (1)..(65): unsure at all Xaa locations
  Clone ID: PAT_MRT3847_88115C.1.pep
KSMANSCCVVEFLAYXCEVLMVVGSMLMGREIYPVLGNSFDADKDGETKKTSTQKYKTQVGVAHC

SEQ ID NO: 272531 - protein, 48 aa, Glycine max
  Clone ID: PAT_MRT3847_88116C.1.pep
ASKPPSTSIALNTDLYPFLCGVIYPLIYITFVLRHSHVYPYAYPYSNT

SEQ ID NO: 272532 - protein, 87 aa, Glycine max
  unsure (1)..(87): unsure at all Xaa locations
  Clone ID: PAT_MRT3847_88117C.1.pep
GTASPVTDAEPKYQLTVVTRSADVHEGGXRHIIRAPVNRSXLFICQAQAGVKTWFKGASSFVESAACYVSVGHCFTVIAVNISRVSV

SEQ ID NO: 272533 - protein, 104 aa, Glycine max
  Clone ID: PAT_MRT3847_88118C.1.pep
LGFLLTQSSRSIDQGCVKAWGFFSLTGVLNFAFCFGFGENSLGFVQIFAMAWAWNLFFQGKKLFFRIKKHGVWVFLKKKKKKKKKKSKKKKIKKKKKKKRTTTL

SEQ ID NO: 272534 - protein, 155 aa, Glycine max
  Clone ID: PAT_MRT3847_88119C.1.pep
LPTAMSLVYRLGVGLWDLVAGPRAIDKNRPSGEQCLVEWAKPYLSNKRRVFRVMDSRLEGQYSLTQAQRAATLAFQCLAVEPKYRPNMDEVVRALEQLRESNNDKVKNGDHKKCSRVSGSGLGHPNGLPASTSKGSIDAAKKFNYPRPSASLLYS

SEQ ID NO: 272535 - protein, 43 aa, Glycine max
  Clone ID: PAT_MRT3847_8811C.1.pep
QSLSLDPCISSHEPPSDVVTNTDQRDYGICVRQARRLPHVPET

SEQ ID NO: 272536 - protein, 40 aa, Glycine max
  Clone ID: PAT_MRT3847_88120C.1.pep
LILDNPYKSIYVGNDNKIIVNKLLKLLNYSYRLIFKSFYV

SEQ ID NO: 272537 - protein, 482 aa, Glycine max
  Clone ID: PAT_MRT3847_88121C.1.pep
MTGSLAARLVLRRCRSPASQFFFRREASWPATERTTKDVVTSPPKELPAFDYSPPAYSGPSRDEIIAKRREYLSPSIFHNYKSPLNVVEGKRQYLFDDKGRRYLDAFGGIATVCCGHCHPDVVEAIVEQTKRLQHSTVLYLNHAITDFAEALAAKLPGNLKVAFFTNSGTEANELAILIAKLYTGSHDIISLRNSYHGNGGGTMGTTAQSIWKYNVVQSGVHHAVNPDPYRGLFGSDGEKYVRDVQEIINFGTSGNVAAFISEAIQGVGGIVELAPGYLPAAYDIVRKAGGLCIADEVQTGIARTGSHFWGFEAHGVVPDIVTIAKSIGNGIPLGAVVTTPEIAKALTRRSYFNTFGGNPVCTAAGLAVLRVIEKEKLQENAFVVGSYLKERLNALKDKYELIGDVRGRGMMLGVELVSDGKLKTPAQSETLHVMDQMKELGVLIGKGGYYGNVFRITPPLCFTKEDADFLVDAMDYTFSRM

SEQ ID NO: 272538 - protein, 199 aa, Glycine max
  Clone ID: PAT_MRT3847_88122C.1.pep
MPIFKTPFNGYSVKFSPFYENRLAVATAQNFGILGNGRLHVLDLSPEPSLPISELVAYDTADGIYDVAWSESHDSIVIAAVADGSVKLYDLALPPTSNPIRSFQEHTREVHSADYNPVRRDSFLSSSWDDTVKLWTLDRPTSVRTFKEHAYCVYSAVWNPRHADVFASAFGDCTLRVWDVREPGSTMILPAHEFEILAC

SEQ ID NO: 272539 - protein, 197 aa, Glycine max
  Clone ID: PAT_MRT3847_88123C.1.pep
MDTGGGGASPTAAMSRWKFAAWRQYQHLLDKSTPHVGRRWLGFAAVALLYLLRVYFVEGFYVVSYGLGIYILNLLIGFLSPQVDPETAILNADDPILPIAASDEFRPFVRRLPEFKFWYSITKAFCIAFVMTFFSVFDVPVFWPILLFYWVVLFSLTMRRQISHMIKYKYLPFSSGKQRYDVKRAPPETTSLSVSED

SEQ ID NO: 272540 - protein, 110 aa, Glycine max
  Clone ID: PAT_MRT3847_88124C.1.pep
SAACELQWLLYLFADLRVQLTRTPTLYCDNQSAVHIASNPVFHERTKHLEIDCHLVREKLLKGTLKLLPVSTSDQVADFLTKALAPPKFHDFVSKLSMINIYHDKLEGGC

SEQ ID NO: 272541 - protein, 249 aa, Glycine max
  unsure (1)..(249): unsure at all Xaa locations
  Clone ID: PAT_MRT3847_88125C.1.pep
MSSRKRTGMREGYEFMPIRDVGRSVGQKAKLIGVILDFGFPKKSKGTDFCCCLRIIDETHHQISMAINMFEENVERLPRLAAVGDVVVLCCVEVKIIXGEVNVTFNKRFFSFGLYKGKDGDDLDPYHVSSYFHHVREDESLIVKLRKWLMNFQPHEDSSNFPMLREIKEETSVNLACKILHFCETAKDEWIIFSWDGTNTPSNVICSKLEEEINCPLPLQLEPLPLSREVLCTLPVAGSILRMMFDKVV

SEQ ID NO: 272542 - protein, 59 aa, Glycine max
  Clone ID: PAT_MRT3847_88126C.1.pep
SARPADHACAASYRLFNHPPRWDSTQMGGFLLLKHYTMLVTMYTVVLIHINLTIMDHYV

SEQ ID NO: 272543 - protein, 97 aa, Glycine max
  unsure (1)..(97): unsure at all Xaa locations
  Clone ID: PAT_MRT3847_88127C.1.pep
DSFGGVQSSFSPETPTSAVPQEIKGGAELTXGGGGAVAAAPAGGAAAPDAAPAADKKEXKVEEESDDDMGLGLFDQSFFCFVLSSDGKAFLATNAIN

SEQ ID NO: 272544 - protein, 138 aa, Glycine max
  Clone ID: PAT_MRT3847_88128C.1.pep
MAQEKALRVRYLVAFLLVFFTMASCGSGVGVNWGTMATHKLPPNKVVKMLQENGFDKLKLFDAEEWIMAALMGTDIEVMLAIPNNMLEEMSRNPHVADSWVYENVTSYMYPGGLNIKAAMSTRLSDVSGQKPGSNDSS

SEQ ID NO: 272545 - protein, 73 aa, Glycine max
  unsure (1)..(73): unsure at all Xaa locations
  Clone ID: PAT_MRT3847_88129C.1.pep
FLSHLKHTNCCVNCICRNSCNFCNDCGCCHMYPYLNYTESTTTDTLFMGVAPVKAQFXSAKMGVPSYNYNCKC

SEQ ID NO: 272546 - protein, 30 aa, Glycine max
  Clone ID: PAT_MRT3847_8812C.1.pep
ITNSNFSRDVFLKSILSINALNRNFHKAIH

SEQ ID NO: 272547 - protein, 108 aa, Glycine max
  unsure (1)..(108): unsure at all Xaa locations
  Clone ID: PAT_MRT3847_88130C.1.pep
HEHHTTHXXXPPYKXPSXXPPPYKYPSPPPXVXKYKXTPPXVYKYKSPPXPYKYPSXSPPPYKYPSPPPPVYKYXSPPAAVXXPPXPVYXYACPXXSYATRLFLKNIQ

SEQ ID NO: 272548 - protein, 57 aa, Glycine max
  Clone ID: PAT_MRT3847_88131C.1.pep
LFKPNSHLFIFRFLSNQKCGGFIKLVPITPSPLTCKPPTRSVITTLSFCDKHTFPFY

SEQ ID NO: 272549 - protein, 94 aa, Glycine max
  unsure (1)..(94): unsure at all Xaa locations
  Clone ID: PAT_MRT3847_88132C.1.pep
SMKRTRPAXFGCPHPYDGEVCKGYTPSLPQVVGLSQYATRAVLVALPLQQWVLNIFLFDVCERTPPLVSLRSLFFXKPPSPPKNESLRXRTRGS

SEQ ID NO: 272550 - protein, 60 aa, Glycine max
  Clone ID: PAT_MRT3847_88133C.1.pep
GNTDLQNIYLTPHLMVCLSVFSLFKLFVYMIFRTYLFVVFSPLNIHFSLISPLDLFGDNF

SEQ ID NO: 272551 - protein, 65 aa, Glycine max
  unsure (1)..(65): unsure at all Xaa locations
  Clone ID: PAT_MRT3847_88134C.1.pep
VGGPRGWVCFLLEVAEHKGRAVLVTVELISGRAKQGQLDINSCRYKRAKGFFLNINSXSNPGDFV

SEQ ID NO: 272552 - protein, 69 aa, Glycine max
  Clone ID: PAT_MRT3847_88135C.1.pep
TLKIFSSTKPNQNYNCLYSHPPLYQHQPYLQAQLFKNTIILSHPTYSIKVLYPSHISQPKLSSPHKSLF

SEQ ID NO: 272553 - protein, 89 aa, Glycine max
  Clone ID: PAT_MRT3847_88137C.1.pep
TTPMLTSYKKLKKVGYHKKKKLPKFHPPPISYDHLFSLLPRGLKKTPHPQNQKNLFPTFKALRTPFFPPPSSHTNKKIFSQITPPLFFS

SEQ ID NO: 272554 - protein, 165 aa, Glycine max
  unsure (1)..(165): unsure at all Xaa locations
  Clone ID: PAT_MRT3847_88138C.1.pep
SDDSKKTRRTRKKGASSSAGLEEKKEVKEEKKVRRRKKTEEEKLIVEDKGSEAEISDQDEPSFLENVEDDSDSGLELIKDDGEDISFTYGWPPLVCCFGAVQHAFVPSGRPANRLINHEIHESMKDALWSPEXFVRAPGGSAGKGAIALATLSGRXAFMGKLADD

SEQ ID NO: 272555 - protein, 54 aa, Glycine max
  Clone ID: PAT_MRT3847_88139C.1.pep
VLAMRRDSANGGHVNLSFDTMSSIGFNGGFSIHFESVLSSVVRSIGRISPNEPW

SEQ ID NO: 272556 - protein, 45 aa, Glycine max
  unsure (1)..(45): unsure at all Xaa locations
  Clone ID: PAT_MRT3847_8813C.1.pep
GGLINHVQRKKETVEAGNYIERDESVLFWKTERERAAXARAYSAR

SEQ ID NO: 272557 - protein, 51 aa, Glycine max
  unsure (1)..(51): unsure at all Xaa locations
  Clone ID: PAT_MRT3847_88140C.1.pep
MAHGQRRVCVTGGTGFVGSRTIKXILEHGYAVNTTTRSDSGRKRHVSFLTN

SEQ ID NO: 272558 - protein, 99 aa, Glycine max
  Clone ID: PAT_MRT3847_88141C.1.pep
ESQRRHAGLLADIQTDRRLDRIDSQRRSQPMTDTIMVDNTMGNHLCAHEQVSGIEIRDKLAYGQMTEWMRAPVLTTGMGRSRERERVRVRLYPLSRRSE

SEQ ID NO: 272559 - protein, 73 aa, Glycine max
  Clone ID: PAT_MRT3847_88142C.1.pep
FTIPAQVCSTEISLSRLSDFYFLTTYLSLKIIYYKTAIKNLSVEMLFIYNFDYKVTSDLCYISSRCHWRHQKF

SEQ ID NO: 272560 - protein, 124 aa, Glycine max
  unsure (1)..(124): unsure at all Xaa locations
  Clone ID: PAT_MRT3847_88143C.1.pep
VRGLTFKYDIIGAGPHSSRGVGAKEDQQKPKMIDTRLRQIINPQYNEVQAQMETNLSKLPLDDVQSSKGSMXDLKISQSIIALPKNTFXGTIHRSDLLANFXTECNLIASVVXHRTHCIKGIIK

SEQ ID NO: 272561 - protein, 440 aa, Glycine max
  Clone ID: PAT_MRT3847_88144C.1.pep
MEAKLATTIILIFSVIWLMRVNGIDPCASQADNSDLNVIPIYSKCSPFKPPKSDSSWDNRIINMASKDPLRFKYLSTLVGQKTVSTAPIASGQTFNIGNYVVRVKLGTPGQLLFMVLDTSTDEAFVPCSGCTGCSDTTFSPKASTSYGPLDCSVPQCGQVRGLSCPATGTGACSFNQSYAGSSFSATLVQDSLRLATDVIPNYSFGCVNAITGASVPAQGLLGLGRGPLSLLSQSGSNYSGIFSYCLPSFKSYYFSGSLKLGPVGQPKSIRTTPLLRSPHRPSLYYVNFTGISVGRVLVPFPSEYLGFNPNTGSGTIIDSGTVITRFVEPVYNAVREEFRKQVGGTTFTSIGAFDTCFVKTYETLAPPITLHFEGLDLKLPLENSLIHSSAGSLACLAMAAAPDNVNSVLNVIANFQQQNLRILFDTVNNKVGIAREVCN

SEQ ID NO: 272562 - protein, 84 aa, Glycine max
  unsure (1)..(84): unsure at all Xaa locations
  Clone ID: PAT_MRT3847_88145C.1.pep
VQRVPACFFQGQLSVTVHAYGASSSVLHTSFRDQKVYCRVGCIVSGLAMSRSVVHLRIRKXSICGSPRSPVTCCSEVSMEESFQ

SEQ ID NO: 272563 - protein, 145 aa, Glycine max
  Clone ID: PAT_MRT3847_88146C.1.pep
RNSNIRQEILIVNTHLIFPHDSTLSLVYKILQYVESYQNDFQLKPMPIVLCGDWNGSKRGHVYKFLRSQGFVSSYDTAHHYTDADAHKWVSHRNHRGNICAVDFIWLLNPDKYRKLLKASWSEAVFGMFKYLLRRAILTESDAFA

SEQ ID NO: 272564 - protein, 61 aa, Glycine max
  unsure (1)..(61): unsure at all Xaa locations
  Clone ID: PAT_MRT3847_88147C.1.pep
SLRPGIDPQYNAVQAQPKTNVGTLAPADEAPAQGATMEIKLSXYNIALPKSAVGGTIMRSG

SEQ ID NO: 272565 - protein, 89 aa, Glycine max
  unsure (1)..(89): unsure at all Xaa locations
  Clone ID: PAT_MRT3847_88148C.1.pep
TLGWAEHVTEYNRTMDPYVTESYGVAIKYXDGILMAADMGGTDGYTLRYKNDERIKPIGKHYLLGTSGEISDFQEILRYLDELIIYDNM

SEQ ID NO: 272566 - protein, 94 aa, Glycine max
  unsure (1)..(94): unsure at all Xaa locations
  Clone ID: PAT_MRT3847_88149C.1.pep
IKXVTPFHPPTRGKGHHVHKESIQQRRTSKWYRKIQVYLIYHPLPTFFFCQRYLIFFHHSNGLNEGRGLLNWNLNLLFLKIIIITTLLHNPLCQ

SEQ ID NO: 272567 - protein, 96 aa, Glycine max
  unsure (1)..(96): unsure at all Xaa locations
  Clone ID: PAT_MRT3847_8814C.1.pep
SFQQITKESYARSIADYVHNFQSKGDAVTSNVDTHQPGFSRSISYIVIMGXSCLVVAVTTSYTGSHGHTCCHFVGPDIFTAXQLEDLAPSSHNCDV

SEQ ID NO: 272568 - protein, 93 aa, Glycine max
  unsure (1)..(93): unsure at all Xaa locations
  Clone ID: PAT_MRT3847_88150C.1.pep
APFNTLETLLPKRIVSLQGLANFXNPPXYKPPTHXPPFYNPPLEKPTVYKPSCNNPPIYIPXVNNPPLYKPPPRKPPXYTPPIEKPPLIIPPI

SEQ ID NO: 272569 - protein, 81 aa, Glycine max
  Clone ID: PAT_MRT3847_88151C.1.pep
DPVASAYCRLYMAHCAQKLPSHDIGYLVTCVNDIRVVLMQILSANERTHKNVKLNKKLQVSLMEPTIEYIMKCIFTGLSQY

SEQ ID NO: 272570 - protein, 43 aa, Glycine max
  Clone ID: PAT_MRT3847_88152C.1.pep
AAENLSIYRTTPKEAVAITTIKLTRYISIAKPYTKTPYLTANY

SEQ ID NO: 272571 - protein, 127 aa, Glycine max
  Clone ID: PAT_MRT3847_88153C.1.pep
RINSTISHDQIHRFPQFHFPSPPVLEPRSRVYFRFHTNVNFLAFSFPASSNRNYKKPMGVVVESSVFWEPNPSTYIFIFVCCCFSIFLFPHVSNLNRTSTIFDHGTSHWFLRFQRNFLLHYSLASVM

SEQ ID NO: 272572 - protein, 346 aa, Glycine max
  unsure (1)..(346): unsure at all Xaa locations
  Clone ID: PAT_MRT3847_88154C.1.pep
LELQSKKLIDVDSFKKLLKGLTEKVWWQQDAASAVASTVTQCKLGNGKRRSKGDTWLLFVGPDRIGKKKMAAALSELVSGSTNPIIIPLAQRRADGDSDAPHLRGKTALDRIAEAIRRNPLSVIVLEDIDEANILLRGSIRRAMEQGRFPDSHGREIXSLGNVMFILTANWLPEDFRCLSNESLLDEEKLENLAKGGWQLRISAGKRASKRRPSWLSDEDRSLKPRKEVNSGVSFDLNEAAADAAEDDRGDGSLNSSDFTVEHEDNYHDVGGSLSAVPRELLDSVDDAIVFKPLNFDLLRGISRHPSXRFSSVVGNGVSIEVQGEAFDKITSGVWLGQTTIDEWMD

SEQ ID NO: 272573 - protein, 328 aa, Glycine max
  unsure (1)..(328): unsure at all Xaa locations
  Clone ID: PAT_MRT3847_88155C.1.pep
MANKLNIRLGEPTLVPPAEETEKGLYYFLSNLDQNIAHPVRTVYFYNKSACRGNEEAAQVIKDALSKVLVHYYPMAGRLAISSEGKLIIECTGEGVVFVEAEEANCVIKDLGDLTKQPDLETLGKLVYDIPGATNMLQIPPLLVQFVLGVNVNHCMSDGICAMQFVNAWGETARGLDLSISPVLDRTILRARNPPKIEFPHHEFDEIEDVSNATKLYEEEEILYESFCFDPDELELLKKVAPEXTVLAKKCSTFEALTAXVWRARSEALXTHSNQQTKLLFAVDGRSXFVPPIPKGYFGNAIVXSNALCKVEELVNNPLSFNVGLVWR

SEQ ID NO: 272574 - protein, 119 aa, Glycine max
  unsure (1)..(119): unsure at all Xaa locations
  Clone ID: PAT_MRT3847_88156C.1.pep
FLIIKFGDGFSLVGLQEYFYDQVPDSMRSLGIAFYYSERXGTSFRSSLLITIVDHVTGKSGKNWFGKDLNSSRVDKFXWLLAIMTTLNLFVFVFFDRKYSYKNVQKVTMANNYDLDIIL

SEQ ID NO: 272575 - protein, 281 aa, Glycine max
  Clone ID: PAT_MRT3847_88157C.1.pep
VPDFPDKQMVDLKSLQGNKSKPRKALSDIDNLLKGMNMNKKTPLKKAVQCPGQQLASPTPPRSPFASLSLLQRHISRSKQSVDPFSAHEIDNLSSKNYSLTHTVNPELNLAGSGNLSNELNAHMIEDVHAVGKTSTVLDTDRNGTNTSEIPKEDYSGKSSNKWNAPSTEDIIAVGGNSLPEDTVRNGTSTSQKFIVDNSREPKFDVNIVSNEPHVDMDVDLTSSCMGDNVDRSNIEAHMIEDDIAVGKTSTVLDTDINSIHTSEISKEDKSGKSSNNLNVP

SEQ ID NO: 272576 - protein, 91 aa, Glycine max
  Clone ID: PAT_MRT3847_88158C.1.pep
KERGPFKSTLKQCSATIRADTDNQVGECSLGERNEKHHGASKSLSEDAPHRNFAETVRISNHHIDELYSWHDRGSRMTDSIDSAKFLKDGD

SEQ ID NO: 272577 - protein, 84 aa, Glycine max
  unsure (1)..(84): unsure at all Xaa locations
  Clone ID: PAT_MRT3847_88159C.1.pep
YQTFPLPMKTGYREPSSEVKCAPFRLAEEAHNIRAYKTIPEECAEPTXDYINGXQFRSDSTTFHQQACCYASERETHHNHILIF

SEQ ID NO: 272578 - protein, 107 aa, Glycine max
  Clone ID: PAT_MRT3847_8815C.1.pep
ASYLISYKRHSSFLGRQLSYKNEPPTATSSDSNPSVDCLASQLSHCPAWYFSYRVLLLFVWDLPLWEICSGFTRPCKMELTEWTDPFFFGKPILLLVWNNSLIQFSA

SEQ ID NO: 272579 - protein, 172 aa, Glycine max
  Clone ID: PAT_MRT3847_88160C.1.pep
MALTLRSSISLASQKETKLQKPDDEVPTKVFNFAKANPSFRLRAKSSMQQTHVTGDNNKNKNNNFNSEVTMINEKREKVHAPSVAHSHNDSMRVPVFVMLPLDTVTMGGTLNKPRAMNASLMALKSAGVEGVMVDAWWGLVEKEGPLKYNWEAYAELVQMVQRHGLKLQVVM

SEQ ID NO: 272580 - protein, 59 aa, Glycine max
  Clone ID: PAT_MRT3847_88161C.1.pep
RDQLTRTGGLLYIDVMTRDDDDDRCRRHMLHVPITSVAISEQRHILNLLFPYYFGLPSI

SEQ ID NO: 272581 - protein, 158 aa, Glycine max
  unsure (1)..(158): unsure at all Xaa locations
  Clone ID: PAT_MRT3847_88162C.1.pep
MKEGCRHDLWHQTQGVIIATIFYTQHPTGPTTGTGSLRXRKPGLHGLHMDMLXEHTLPLYCLATAMNVYPNNSDTETPEDNKRHAGDLVNVNVRRIDGTDIFLVPSSWIPLSGTHSIRGKIVVVPGDSDDLGEGGHELNKTTGHADLRGSCGIIGLQG

SEQ ID NO: 272582 - protein, 47 aa, Glycine max
  Clone ID: PAT_MRT3847_88163C.1.pep
THGKNEHAPDRHNHIKPMTLHPAALEGTLRPGVTLNPTWNLLTRPAP

SEQ ID NO: 272583 - protein, 57 aa, Glycine max
  Clone ID: PAT_MRT3847_88164C.1.pep
KNFPRGKVLPWFYPRFKRALFGENWYPSRSRPGNKSRGKGVISGGPPFFFFLSKTPQ

SEQ ID NO: 272584 - protein, 65 aa, Glycine max
  Clone ID: PAT_MRT3847_88165C.1.pep
GFWPVHRSVCPTRFTYVSSPSERPALNVSCLPLVAPSGFAIEAPGQSVVCYCHHIAKPHCDPLWA

SEQ ID NO: 272585 - protein, 143 aa, Glycine max
  unsure (1)..(143): unsure at all Xaa locations
  Clone ID: PAT_MRT3847_88166C.1.pep
XXIFFFLGLGYKNKGAFFSFNKKKPPFENLMGYQPLGFLPLNLPQIFNTHWHGFGVLTISICFKELNPFIPLFPFMGSLVFHHTFGFFALKFQRRMPPFFVWNKVRLSSFEGKPFPKMSRRSSGPEVLTPKLSSLMLSSNRNL

SEQ ID NO: 272586 - protein, 108 aa, Glycine max
  unsure (1)..(108): unsure at all Xaa locations
  Clone ID: PAT_MRT3847_88167C.1.pep
FFTLVDIPHSGWVLFCWDSAKTLPNNSSAQLLPRKLGNXVAAHCFPEWAPINXETIXQPIHITVGYYARKHDVSIEYDACTISNDCGSLAVVKVGIYKPTAGIHGAGS

SEQ ID NO: 272587 - protein, 38 aa, Glycine max
  Clone ID: PAT_MRT3847_88168C.1.pep
SIMLIGFVCYLKVWPMNHLSKLIESMEQVPSQRAYEYI

SEQ ID NO: 272588 - protein, 53 aa, Glycine max
  Clone ID: PAT_MRT3847_88169C.1.pep
IKWPGLKNLLIGKTLPFPNLIALKNIPFLPVGVLAKRPKPILFPKSLPTLNGK

SEQ ID NO: 272589 - protein, 76 aa, Glycine max
  unsure (1)..(76): unsure at all Xaa locations
  Clone ID: PAT_MRT3847_8816C.1.pep
AQSTNFPHITPKETTVINNVFNQPTSLSLTVSDIGYTKYMVIHGXPCTFILGKKGSGDLTTKKTCTYMVIGIYDEP

SEQ ID NO: 272590 - protein, 35 aa, Glycine max
  Clone ID: PAT_MRT3847_88170C.1.pep
TRHRMHHPFLQQYFNPFILALDQNHNCNQTLYGFN

SEQ ID NO: 272591 - protein, 81 aa, Glycine max
  Clone ID: PAT_MRT3847_88171C.1.pep
ESGNEGHPDKRCDQICDAGLDACLEQDPDSKDACETCTKTNLVMDFGEITTKGNVDYEKIVRDTCRNIGVESNDAGLDADD

SEQ ID NO: 272592 - protein, 60 aa, Glycine max
  Clone ID: PAT_MRT3847_88172C.1.pep
LWRPVIYSLIESIYIILTYYLIIAMNPTSQDDCHLLQNWRENRILIILMDDTVSRSCEKH

SEQ ID NO: 272593 - protein, 57 aa, Glycine max
  Clone ID: PAT_MRT3847_88173C.1.pep
KKKMDSISCFVSRFFYVSIFKKKCTWDSKPATQVYFSPPTFYVNKYVNYFDHFCMYK

SEQ ID NO: 272594 - protein, 86 aa, Glycine max
  unsure (1)..(86): unsure at all Xaa locations
  Clone ID: PAT_MRT3847_88174C.1.pep
QQLLLPTTDTSAPQLLGKVKIGINGFGRIGRLVARVALQRDDVEXVAVNDXFITTDYMXXMXXYDSVHGXWKHXXVXXGRXXXLFD

SEQ ID NO: 272595 - protein, 211 aa, Glycine max
  Clone ID: PAT_MRT3847_88175C.1.pep
MDASPSSMKLLKFLLLCLLCTMLFYSVMCSSKIHCNEKDMNTLLRFKTGVTDPSGVLSSWFPKLDCCQWTGVKCDNITGRVTHLNLPCHTTQPKVVALDEKDDKSHCLTGEFSLTLLELEFLWYLDFSNNDFKSIQYNSMGSQKCDQLSRGNLPHLCRNSTNLRLLDLSLNYDLLVDNLHWISRLFSLQYLSLEGVHLHKEIDWLHQSPCS

SEQ ID NO: 272596 - protein, 74 aa, Glycine max
  Clone ID: PAT_MRT3847_88176C.1.pep
YLLISSRASVTGREQCGYLTQSVVECRLTCSIGSEMLHRSLSSCGLRISLLSTGPLLGLCSYPPNLWLNLADAW

SEQ ID NO: 272597 - protein, 81 aa, Glycine max
  Clone ID: PAT_MRT3847_88177C.1.pep
GKGIEKFCNFSLAPSCCEDMKKFINSNYGKISCTILAAGGLSLLIYVLKRWPKPKPKPETEPTLGPKSEPQSMPKLGPKSV

SEQ ID NO: 272598 - protein, 85 aa, Glycine max
  unsure (1)..(85): unsure at all Xaa locations
  Clone ID: PAT_MRT3847_88178C.1.pep
VSLQNSAGWNALQEALCRRXSDIGFVLLRLHHHNAWSKWRRRLPRVIAALRRMRDFYMEISFHFESSLIPFVGKIAPSDTYKIWK

SEQ ID NO: 272599 - protein, 167 aa, Glycine max
  Clone ID: PAT_MRT3847_88179C.1.pep
NSAGAATRPNIMFPASLFSRFMHSPIQGHGRAAKRFWTYIRGTTDYGLYFLKTESGELQGYADSDWAGSVDDPKSTSGYAFSFCSAVFSWNSSKQDAVAQSSAEAKYISAAATANQAIWLRKIRLDVGQIQDGATVIWVDNKSVICIANNPVQHGRTKYIKVEVHDI

SEQ ID NO: 272600 - protein, 42 aa, Glycine max
  Clone ID: PAT_MRT3847_8817C.1.pep
FLLNLFKLFRLPLKNCMDPLGTVLIISTTCLTFYHTHIANLC

SEQ ID NO: 272601 - protein, 91 aa, Glycine max
  unsure (1)..(91): unsure at all Xaa locations
  Clone ID: PAT_MRT3847_88180C.1.pep
VLAGADPARDLKIAESGYSKLNSWLALQLLXPTVSVGILQPLEEIFLHSFAYPFFLVGGNYNNLYNFIKQQGFLLLFLLLICPHFFLINVA

SEQ ID NO: 272602 - protein, 131 aa, Glycine max
  Clone ID: PAT_MRT3847_88181C.1.pep
DFKITRITFHCRTSSQPEHISHHPNLITSHIIVTHCCSLSIVSNRRNENNAHRPHCNLSFASPNLELLHFSVQTSDKYSLPPIFTTPVFTNLLRRYPNQRIWKYKYQEKTCIVIGANSRIGYAIVVEGLAK

SEQ ID NO: 272603 - protein, 159 aa, Glycine max
  Clone ID: PAT_MRT3847_88182C.1.pep
DFLFYNQFFFSACVVSFLQWERKKTEDAGPSAKVKAGSKDPPKKEKISVSAMLASMDEKPDKPKKVPSSSSKPKPKSAPKASTYTDGIDLPPSDDEDDDDLLEEGEAKRSSQQQQRVDLKPLDVPIADKELKKREKKDLLAAHAAEQAKKEALRDDHDA

SEQ ID NO: 272604 - protein, 721 aa, Glycine max
  Clone ID: PAT_MRT3847_88183C.1.pep
MGRKKTEDAGPSAKVKAGSKDPPKKEKISVSAMLASMDEKPDKPKKVPSSSSKPKPKSAPKASTYTDGIDLPPSDDEDDDDLLEEGEAKRSSQQQQRVDLKPLDVPIADKELKKREKKDLLAAHAAEQAKKEALRDDHDAFTVVIGSRASVLDGGDDADANVKDITVENFSVSARGKELLKNATVKISHGKRYGLVGPNGKGKSTLLKLLAWRKIPVPKNIDVLLVEQEVVGDDKTALEAVVSANDELVKIRQEVASLQNAASVEDKDNDEEDDTGEKLAELYEKLQLMGSDAAEAQASKILAGLGFTKDMQARPTKSFSGGWRMRISLARALFVQPTLLLLDEPTNHLDLRAVLWLEEYLCRWKKTLVVVSHDRDFLNTVCTEIIHLHDLKLHFYRGNFDDFESGYEQRRKEMNKKYDIYAKQLQAAKRSGNQAQQKKVKDQAKFAAAKEKSKGKGKGKVDEDEAPPEAPQKWRDYSVEFHFPEPTELTPPLLQLIEVSFSYPNREDFRLSNVDVGIDMGTRVAIVGPNGAGKSTLLNLLAGDLVPSEGEVRRSQKLRIGRYSQHFVDLLTMDETAVQYLLRLHPDQEGLSKQEAVRAKLGKFGLPSHNHLTPIAKLSGGQKARVVFTSISMSNPHILLLDEPTNHLDMQSIDALADALDEFTGGVVLVSHDSRLISRVCEDEERSQIWVVEEGTVKNFPGTFEDYKDDLLREIKAEVDD

SEQ ID NO: 272605 - protein, 123 aa, Glycine max
  Clone ID: PAT_MRT3847_88184C.1.pep
PPPPFSHVLGGFVLQQLLGPPCRSFPFCPPPLVFFFLPRANSSVWVFPVPFLFFGKFFPGSGVFWFFPLSAPFVLFPSRVFLIPSFSPGFFFVVISFSFNSVIHKFMNINKNIIHYVWHSMHH

SEQ ID NO: 272606 - protein, 99 aa, Glycine max
  unsure (1)..(99): unsure at all Xaa locations
  Clone ID: PAT_MRT3847_88185C.1.pep
AFFVEIFGAIIALEMTKEKGWNRTWLECDFTLVIHAFKKPSIVPWQVRYRWKNCLSFCKHIVXFFSLISLEKLILMHTNLFLLVFHLGLQLFGLTPYFS

SEQ ID NO: 272607 - protein, 98 aa, Glycine max
  unsure (1)..(98): unsure at all Xaa locations
  Clone ID: PAT_MRT3847_88186C.1.pep
MDLTNALCRSYMLRSANRQSLTRRANHNARVNNRKPTXRLSAKDYAKEIAMSQHSRSAMQAGIDNLADAAGITLGLRGRNDAMDEFGSTKVSNDGVTI

SEQ ID NO: 272608 - protein, 108 aa, Glycine max
  unsure (1)..(108): unsure at all Xaa locations
  Clone ID: PAT_MRT3847_88187C.1.pep
LFFKHVAHESLKDQIPAADMLSSTKVNQFAKTRNLKQSAAGDLKLLTGGKKHEVKHTPASSIIAGENHVVXIPTMAQEEILSCRAREFRTAMESXSSKPDATAVHVGA

SEQ ID NO: 272609 - protein, 97 aa, Glycine max
  Clone ID: PAT_MRT3847_88188C.1.pep
GLVSSIGINEEDGTGYTAKCHKKRSGGNCVSGVSEKKTQRAFLMYYCSKDQIYVMCIITLSRASKKKKTTVSAAGTKKKKKKKKKKQEKKKQEKINI

SEQ ID NO: 272610 - protein, 100 aa, Glycine max
  Clone ID: PAT_MRT3847_88189C.1.pep
KDERYFCAQRHKLHNMHKQFFNPRNLVNKWHIIQKKNYFVISRDLVWQYDIRITLTIMKSFVFCRSISFYQIVLTFTLSSFIRLCVSKALHKPIPYRSKI

SEQ ID NO: 272611 - protein, 42 aa, Glycine max
  Clone ID: PAT_MRT3847_8818C.1.pep
GGRMESQVRIVLNVLMGDLEILLSLTKHLIDRRSLLQLHKQK

SEQ ID NO: 272612 - protein, 98 aa, Glycine max
  Clone ID: PAT_MRT3847_88190C.1.pep
MSGMLPGVECARRRRLHNSAGDDSTSNRSFCLYTTRNLQSSSSLLERSMLNRAYPDENLGGAAREAKRRLDQKFMAHIKSESHKRKGLFHGLWRQLRS

SEQ ID NO: 272613 - protein, 62 aa, Glycine max
  Clone ID: PAT_MRT3847_88191C.1.pep
SMIKAHSDKDHSLVAHSNSTLQLHIAQATNVYLKTSPSRGCTPPPQTAPSPCIYGARPQVFR

SEQ ID NO: 272614 - protein, 39 aa, Glycine max
  unsure (1)..(39): unsure at all Xaa locations
  Clone ID: PAT_MRT3847_88192C.1.pep
NYFIFRCAHVEFHPNQFDFLILTICIDDFTPPXGGFSHL

SEQ ID NO: 272615 - protein, 169 aa, Glycine max
  unsure (1)..(169): unsure at all Xaa locations
  Clone ID: PAT_MRT3847_88193C.1.pep
SYRCLPRGSSRVDHLCGGLLLSPRHAPKCEGELGQLFLDGSTIHFFKSLLDEYPSLTWEKLKSELLEXYGGIDEGDDLERLAVIRQDGMVDKYILEFETLTAQESRLPNDQFFGYFVHGLKDGIRGRVRSLHTLGPLFQSRMMKSGNSSGVRAWMEWTSRPSAKQCWGK

SEQ ID NO: 272616 - protein, 73 aa, Glycine max
  Clone ID: PAT_MRT3847_88194C.1.pep
LGVTPGLNWQRVRALSKYLTQNYSCPLGPPQSGDSLSSAFFTGSNKGSQAKILGGVTQIGFSICGISPPYFAN

SEQ ID NO: 272617 - protein, 77 aa, Glycine max
  Clone ID: PAT_MRT3847_88195C.1.pep
FYSSYTTVITVPYKDNFNIILPYYHDTTYNDKHTSYQQLIPDTESVLNTQHPYITRFFITKLTLALPNISVDCDILY

SEQ ID NO: 272618 - protein, 36 aa, Glycine max
  Clone ID: PAT_MRT3847_88196C.1.pep
VEICLPHLFFFVISTQIGENGSFYLVFVFDLVIMGR

SEQ ID NO: 272619 - protein, 76 aa, Glycine max
  unsure (1)..(76): unsure at all Xaa locations
  Clone ID: PAT_MRT3847_88197C.1.pep
PKTTKXASASFKAGLDFPIXLXVRYLKAVLYPHRTNSNSPLYLSADLQYLPPNVSDLACNPATDNNKTRIVPRHIQ

SEQ ID NO: 272620 - protein, 51 aa, Glycine max
  Clone ID: PAT_MRT3847_88198C.1.pep
KDYTRRDPKIKLKSKTGGQPKEPTEGLTKNNQAGIKGKRPIAHGPYQKRET

SEQ ID NO: 272621 - protein, 247 aa, Glycine max
  unsure (1)..(247): unsure at all Xaa locations
  Clone ID: PAT_MRT3847_88199C.1.pep
MANANGNIPTEQWAQVVEKTGGPCVYKKIPVAKPGPDEVLINIKYSGVCHTDLHAMMGDWPLATKMPLVGGHEGAGVIVAVGELVKDLKPGDLAGIKWLNGSCMSCSYCRQADEPLCGTPDLSGYTVDGTFQEYAIGKAAHVARIPEGTDLQAVAPVLCAGITVYKGLKESGIKPGQYIAIVGAGGGLGSLALQYAKAMGLHAIAIDGGAEKKQLCNDAGAIAYVDFMTSKDLXVSEVKAATPDGLG

SEQ ID NO: 272622 - protein, 57 aa, Glycine max
  Clone ID: PAT_MRT3847_8819C.1.pep
LKFGELKFFKKIVKNIGFLYKNIDERNTMWNNKILYKLFLFRCFEMKNFENGYCVKC

SEQ ID NO: 272623 - protein, 59 aa, Glycine max
  unsure (1)..(59): unsure at all Xaa locations
  Clone ID: PAT_MRT3847_881C.1.pep
KXEKXSXXREEXXXAXPEEEEAXXXQEQGRQXKAQEEEXETPXXKXXHRKNRXGXEEDK

SEQ ID NO: 272624 - protein, 618 aa, Glycine max
  Clone ID: PAT_MRT3847_88200C.1.pep
IIGSHLGQVLKKVLNSTSISNPRQEHSNLTGSLDSKILNRLDQLRVLSFKGNSLSGQIPNISALVNLKSIFLNENNFSGDFPASVALLHRVKVIVLSQNHISGEIPASLLNLRRLYVLYLQDNALTGRIPGFNQSSLRYLNVSKNRLSGEIPVTSALIRFNESSFWGNPGLCGEQIEEACKNGSGSLPPSISPSYPLKPGGTTSTTMGKSKRTKLIKIIGGSVGGVVFALGCVVLVWVICRKWKRTRRRRKRRNVCAEVAEGEVGTATCVVGGATSIEEEGGGFAWENEGVGKLVFCGGGDGDMSYSLEDLLKASAETLGRGIMGSTYKAVMESGFIVTVKRLKDARYPGLEEFSAHIQVLGRLTHPNLVPLRAYFQAKEERLLVYDYFPNGSLFSLIHGSKTSGGGKPLHWTSCLKIAEDLATGMLYIHQNPGLTHGNLKSSNVLLGSDFESCLTDYGLTVFLNPDTMDEPSATSLFYRAPECRNFQRSQTQPADVYSFGVLLLELLTGKTPFQDLVQTYGSDIPRWVRSVREEETESGDDPASGNEVSEEKLQALLNIAMACVSLVPENRPTMREVLKMIRDARGEAHVSSNSSDHSPGRWSDTVQSFPREEHQSI

SEQ ID NO: 272625 - protein, 45 aa, Glycine max
  Clone ID: PAT_MRT3847_88201C.1.pep
TALLFSTEDLHCFVIQHLLRTGMNVFNKTCLDKEHSHMMFQENGS

SEQ ID NO: 272626 - protein, 138 aa, Glycine max
  unsure (1)..(138): unsure at all Xaa locations
  Clone ID: PAT_MRT3847_88202C.1.pep
LLCEPIVLFILIFSVVASISTNLNSIPFVXGTNFKDWKENMQIVLGCMDLNLALRSEKLPTPTNSSTFDQRKLHEKWDHSYHMSLMIIKRGIPDVFRGIVXDEITSVKEFLVEIEKRFAKNDKVKTNTLLQNLISMKY

SEQ ID NO: 272627 - protein, 60 aa, Glycine max
  Clone ID: PAT_MRT3847_88203C.1.pep
APFLLCRITLSYQENSLTTRKWCLLTKLLSCTASTPFLLTTTSQILLSLPSIMLNIYCLL

SEQ ID NO: 272628 - protein, 603 aa, Glycine max
  unsure (1)..(603): unsure at all Xaa locations
  Clone ID: PAT_MRT3847_88204C.1.pep
MKFRELLLLELTRRSLSRSVLRPTAGELSGSVDDDEESGELDDLDLVALEQEAKDAVEAYSSSLSQILSIEDEEKSDRKESAQSRRKSPRRTKIIPDNLLPRVAIVGRPNVGKSALFNRLVGGNRAIVVDEPGVTRDRLYGRSYWGEHEFMVVDTGGVXTVSKSQATVMEELAITTTIGMDGIPLAVREAAVARMPSMIERQATAAVEESSVIIFLVDGQAGLTAADEEIADWLRKNYSDKYVILAVNKCESPRKRIMQASEFWSLGFEPLPISAISGTGTGELLDLVCSGLQKIEESNNLVEEDYVPAISIVGRPNVGKSSILNALVGEDRTIVSPISGTTRDAIDTEFTGPDGQKFQLIDTAGIRKRTAIASAGSTTEALSVNRAFRAIRRSDVVALVIEAMACITEQDYKIAERIEKEGKGCVIVVNKWDTIPNKNQQTASYYEQDVREKLRSLVWAPIVYSTAVAGHSVDKIIVAAIEVEKERSRRLGTSILNQVVQEAVGFKPPPRTRGGKRGRVYYCTQAAIRPPTFVFFVNDAKLFPETYRRYMEKQLRTDAGFSGTPIRLLWRSRRKMGKDEGKPVTKTRENLTSNDRKLVSTTP

SEQ ID NO: 272629 - protein, 105 aa, Glycine max
  Clone ID: PAT_MRT3847_88205C.1.pep
KIDSQHLRNQKHNRFDFGQLDRGKNRCPWSSVRKLVTLKPPQVGLNLMKPTRHNATQPATTTSNNTPTRAIPQCPVTSYIKSLSFLLPPSSLFFFPSVVFSQPLE

SEQ ID NO: 272630 - protein, 79 aa, Glycine max
  unsure (1)..(79): unsure at all Xaa locations
  Clone ID: PAT_MRT3847_88206C.1.pep
MMCSDSDQLLNHNPDLLKKLELSDGLXFAVAQLXGKRTRESLFEDPARDMTSLLKIWYLNICSGVVCLCYCQCSGWCEI

SEQ ID NO: 272631 - protein, 76 aa, Glycine max
  Clone ID: PAT_MRT3847_88207C.1.pep
VCRRGSSDAEGVNRDSGEPAAVSLDGTTDIRRSFSFRFTFSFSNFSVDPETGGHGSFESPHVWSCRSCTDVWADLW

SEQ ID NO: 272632 - protein, 38 aa, Glycine max
  Clone ID: PAT_MRT3847_88208C.1.pep
LVKALWITIQEGKQINTHSNSLISLSLACYLPLQPQQS

SEQ ID NO: 272633 - protein, 43 aa, Glycine max
  unsure (1)..(43): unsure at all Xaa locations
  Clone ID: PAT_MRT3847_88209C.1.pep
KRKIKKNAIFTLRSMVFPTGXGKAICMEIYRPQDLRENYKRQS

SEQ ID NO: 272634 - protein, 87 aa, Glycine max
  unsure (1)..(87): unsure at all Xaa locations
  Clone ID: PAT_MRT3847_8820C.1.pep
XGRGKDRKFEVDHKNRTVPQMRGMNDHKKKKKNTEEILVAESMGEXEXXPNCXXGFXFXXFGXXXXFXSLNSXSLSRSVFLTAMHAR

SEQ ID NO: 272635 - protein, 90 aa, Glycine max
  Clone ID: PAT_MRT3847_88210C.1.pep
ADRIPGLDQALSRNLFEFFQEKGFIDKNGYMRKDGRQIKWKKAFEEKKALLLDKNLVPHIQEELNLAFAYHEMTSVHSDQIFKWLETHMS

SEQ ID NO: 272636 - protein, 67 aa, Glycine max
  Clone ID: PAT_MRT3847_88211C.1.pep
VSYKFWTIERMIIDMTDEVMLEVAINACSVEWAVSAHTYQIEGHVVHGCHYDQIAGLVTMHVINVNA

SEQ ID NO: 272637 - protein, 290 aa, Glycine max
  Clone ID: PAT_MRT3847_88212C.1.pep
ALDKSCQVDLVKDGGHIYFIKFLDSMEAYPEQRAMAAFVLAVIVDGHRRGQEACIEAGLIHVCLKHLQSSCPNDSQTEPLFLQWLCLCLGKLWEDFSEAQTIGLQEDATTIFAPLLSEPQPEVRASAVFALGTLLDVGFDSCRSVGGDEECDDDDKFRAEVSIVKSMLGVASDGSPLVRAEVAVALARFAFGHNKHLKSIAAAYWKPQANSLINSLPSLANIKGSVGGYAKQNQHMPYGSIVSPQIGPIRVGNDNSPVIPDGRVSSSNPLAGSGIMHGSPLTDDSSHHSD

SEQ ID NO: 272638 - protein, 50 aa, Glycine max
  unsure (1)..(50): unsure at all Xaa locations
  Clone ID: PAT_MRT3847_88213C.1.pep
FRLELKIFQSKIALAKNTXGGTILRNDLLADFLTEGNFRASXDLQSTHQY

SEQ ID NO: 272639 - protein, 159 aa, Glycine max
  Clone ID: PAT_MRT3847_88214C.1.pep
MVIEHDIESCGSRAMQSLHAHHPRHHRQKLEVYNEVLRRIQESDCEEGHVPGFDDQLWLHFNRLPARYALDVNVERAEDVLAHKRLLKLAEDPASRPAFQVRLVQVYPFGGANYADSIHLDPSEKEDAQSSLNYSLKQGIHPPPTFGSSSNLEALALPK

SEQ ID NO: 272640 - protein, 67 aa, Glycine max
  Clone ID: PAT_MRT3847_88215C.1.pep
QGYHLMNRSHRAAIKKATSYWHSQWCLCQPEVRVCAAYHKSMNFSHILDFHHLIICYRESLGFKMHM

SEQ ID NO: 272641 - protein, 93 aa, Glycine max
  Clone ID: PAT_MRT3847_88216C.1.pep
MVIEHDIESCGSRAVQSSHAHHPRHHRQKLEVYNEVLRRIQESDCEEAHVPGFDDQLWLHFNRLPARYALDVNVERAEDVLAHKRLLKLAEDP

SEQ ID NO: 272642 - protein, 78 aa, Glycine max
  Clone ID: PAT_MRT3847_88217C.1.pep
SSVRGLPSLSRNSSSFIVVASGKKIKTDIPYGINGGMALRDGTDASGKIGKWCLLRLTRTVQKSMDRIISTTRRTGLH

SEQ ID NO: 272643 - protein, 161 aa, Glycine max
  Clone ID: PAT_MRT3847_88218C.1.pep
MDLVAPAEQVCSFHHFHITRARVSDNTISRPFVLYPDSSVSHHFSKLKATRSRKRLENRVSAVFKSEASGLNDGLHHIDSTPNGDLNVIRMESLPIGVNGSRSFEEFASDIHLRKLVRNGELEEGLKFLERMIYQGDIPDVIACTSLNHGFCTHGKTMKAT

SEQ ID NO: 272644 - protein, 97 aa, Glycine max
  Clone ID: PAT_MRT3847_88219C.1.pep
YVPARSLPYNQPGTCYTLVALPKEDPTAVACTFSCMMQFTVKDCDPTTGETDDEGYEDEYVLEDLEVTVADHIQKVMKLNFEAAWDEVGDEFEKEET

SEQ ID NO: 272645 - protein, 94 aa, Glycine max
  Clone ID: PAT_MRT3847_8821C.1.pep
RMHPITMAQITAQIPVTSALKKIYPPIVPLIENLFWVFIGVNKENVGSAEERGIWVEWQHVCASVFDDCPNARGMEHDSKDKVTDVVSYVSDAW

SEQ ID NO: 272646 - protein, 38 aa, Glycine max
  Clone ID: PAT_MRT3847_88220C.1.pep
SPPPVDVRMRVSLNARLFSATITPVTSSFLCGRKSHID

SEQ ID NO: 272647 - protein, 85 aa, Glycine max
  Clone ID: PAT_MRT3847_88221C.1.pep
EWKDFGSISSSILPSSCQSSLNLGSCDDKDVRNLITSNGGYMTRSQLHGFDFYYSRMAPLCAKGELQKANQSAKEFLSDLTESMN

SEQ ID NO: 272648 - protein, 115 aa, Glycine max
  unsure (1)..(115): unsure at all Xaa locations
  Clone ID: PAT_MRT3847_88222C.1.pep
MKNNEIGFFGATFTLFNATLVILSSLSPTHALGSGATLAGNFFGVCRMGASEPTRGIACYRHREGVAVAPNVSFSAIFGGRSYFCGLRSGNYXLLCWDTLSGFQSKRLYNNGTVL

SEQ ID NO: 272649 - protein, 186 aa, Glycine max
  unsure (1)..(186): unsure at all Xaa locations
  Clone ID: PAT_MRT3847_88223C.1.pep
MGCCCDEDDGDIFRHLMNSNFPSSSSTSATTTSSCTVISPMNSHFSALSSTDILRLIFDNLPIPDLARASCVCRLWNSVASQRDMVTRAFVAPWKLNDVVGNPLSGSFWRDNSLAKFAVSHHITRGDTVASLAVKYSVQVMDIKRLNNMMSDHGIYSRERXLLIPISNPDILHYRTCXIELDVYAK

SEQ ID NO: 272650 - protein, 171 aa, Glycine max
  Clone ID: PAT_MRT3847_88224C.1.pep
MNPNPNTNDFPLLSHLLNHLDPQTHPPLPAELDQSLLTQFPHLNHPSVLSSLARHASTLNVTPTLSLLRTLGPRPDPSAVAAARARIADPHAREDGGEAHVVHALVRVDDTHEECVKQLRASEKKLLEAYAESVKGVVEEVSDGVVRGLKKAESEEVERGDLSGSHLRDLP

SEQ ID NO: 272651 - protein, 74 aa, Glycine max
  Clone ID: PAT_MRT3847_88225C.1.pep
KCDKSCYSRMVVLVHAVKILVIVCFHKFLRYLTSIVLQFGLIGSIHEALKLHELWYIRRRRRLMGIVERSHIFS

SEQ ID NO: 272652 - protein, 105 aa, Glycine max
  Clone ID: PAT_MRT3847_88226C.1.pep
MEGNMEKKSPCMNVIKLDGKEIKMPGLNMDDINKQSNMVVSVSPTPQAASALKKSSSERRSCLCSPTTHVGSFRCRHHRSGMSHASSVGSNLSAMSSNDSLQSQY

SEQ ID NO: 272653 - protein, 60 aa, Glycine max
  Clone ID: PAT_MRT3847_88227C.1.pep
KKDVIVNDRINRSTTRHVICLQSIISLRQAIIYIHHTISALSSIHLTDSYAYHATTSPSV

SEQ ID NO: 272654 - protein, 262 aa, Glycine max
  Clone ID: PAT_MRT3847_88228C.1.pep
MGFPRKSLFLLLFLILFTNLAESASDYTTLVYKGCSKETFTDPNGVYSQALSSLFGSLVSQSTKAKFFKATAGSGQSSMTGLFQCRDDLSNSDCYNCVSRLPVLSDKLCGKTTAARIQLLGCYMLYEVVGFTQISGMQILYKTCGGTNAAGRGFEERRDTAFSVMENGVVTGHGFYATSYQSLYVMGQCEGDVGDSDCGECVKSAVQRAQVECGSSISGQVYLHKCFISYSYYPNGVPGRHSSSASSSSNSYSSSSSSSGNN

SEQ ID NO: 272655 - protein, 111 aa, Glycine max
  Clone ID: PAT_MRT3847_88229C.1.pep
FLALFATLALSQDVAQAEHISGYPILPGGTNHIMPSTRGAASGGLKLPRSGDWNCSSTGLDEYSDVLPGTPNKMSIPGIKPGLIFTGTALESAHQQKPDGAESSNRVWMVD

SEQ ID NO: 272656 - protein, 70 aa, Glycine max
  Clone ID: PAT_MRT3847_8822C.1.pep
RERELVSSFFFFFFTLNTSSFMLSFQEWSQRGILPGDLSFCDKDFRPQLSVTRQVCILLHFKEIYRSNMI

SEQ ID NO: 272657 - protein, 42 aa, Glycine max
  Clone ID: PAT_MRT3847_88230C.1.pep
LIKKYIKSFRILNRCSAHMRKIVPFNGLFFFVLFYNFFIYKN

SEQ ID NO: 272658 - protein, 177 aa, Glycine max
  unsure (1)..(177): unsure at all Xaa locations
  Clone ID: PAT_MRT3847_88231C.1.pep
LFCPFRSGIEVKPGKPCPYHADNVRGKLHVTQATLGIGSSSEKSILQCSSGHKSPVFLCSLLPDKVXFADDDGDDLRDDYEYDSWGEDIEGTESEESSEYDSEDGYADDSIADSDTDMYPSSPIPNSGVVIEEIMDDDKPKNGDDPTKRLTKKKHVAQLKEKDNKSSELPIVANGDT

SEQ ID NO: 272659 - protein, 274 aa, Glycine max
  Clone ID: PAT_MRT3847_88232C.1.pep
MGFWGIEVKPGRPCPYHADNVRGKLHVTQATLGIGSSSEKSILQCSSGHKSPVFLCSLLPDKVESCPLNLEFDADDLVAFSVVGSRSIHLSGYFAADDGDDLRDDYEYDSWGEDIEGTESEESSEYDSEDGYADDFIVDSDTDMYPSSPVPNSGVVIEEIVDDDKPENGYDPTKKLKKKKQVAQLKEKDNKSSGLPIVAKGDTDLVESEDEDGFPIPTAEKGVSVSQKAEAETKGEQARKKAEKAKKEKDVDHSASVKRKVDTADEDEPQDGNG

SEQ ID NO: 272660 - protein, 104 aa, Glycine max
  unsure (1)..(104): unsure at all Xaa locations
  Clone ID: PAT_MRT3847_88233C.1.pep
LEKARYTNPPFIYSNTYGASSLMRTQTTHASLTEINRLLGCKLSXDVXDVRCCIHLYLEDYIPCLCEAQTKLTCXSNYTMIDGRCGVXQLCTLVRWLVERWTTA

SEQ ID NO: 272661 - protein, 66 aa, Glycine max
  Clone ID: PAT_MRT3847_88234C.1.pep
MTFIPAIQIKTSSLNSYTDNNNYFTTHCRRLLPVAFLPIKTPAPAPGLFCNVDSTETTALHKQQKL

SEQ ID NO: 272662 - protein, 88 aa, Glycine max
  unsure (1)..(88): unsure at all Xaa locations
  Clone ID: PAT_MRT3847_88235C.1.pep
RSKXSRXXXXACCAAVXIRXAXIVSEXQRXDXDXGRXXDASAVQPRPQRRLRQRAAAEESGREPEVVVCFQDAVXVRFXQRRGGXXAL

SEQ ID NO: 272663 - protein, 50 aa, Glycine max
  Clone ID: PAT_MRT3847_88236C.1.pep
TEEFHKKKKFKQKKKTKKKKIKKKIKTKKKKKKIGRAALKKPFLRTLAYN

SEQ ID NO: 272664 - protein, 63 aa, Glycine max
  unsure (1)..(63): unsure at all Xaa locations
  Clone ID: PAT_MRT3847_88237C.1.pep
RVSGDCGXKVSQCQCCGILFTLXACVGVSSCQNHRHSRGPHVRCKWEIIKGTXPTEKDYPMSA

SEQ ID NO: 272665 - protein, 72 aa, Glycine max
  Clone ID: PAT_MRT3847_88238C.1.pep
PICCKPGTFKKIDHSTLTRFYPHFICSNSSDSMSCCCSHCRRKSNIQRFLPHKTVIVLNRGCHTGLYDKLSG

SEQ ID NO: 272666 - protein, 117 aa, Glycine max
  unsure (1)..(117): unsure at all Xaa locations
  Clone ID: PAT_MRT3847_88239C.1.pep
ASKLASFGALRKREIGAMVESLKEAAMAREIVDVSERVGEXVRXMACKMVLGRNKDRRFDLKGYMSVSVAFILADYVPWLRLFDLQVSVFVCACVNQDTNSTIKIHQNYNGKIINIY

SEQ ID NO: 272667 - protein, 77 aa, Glycine max
  Clone ID: PAT_MRT3847_8823C.1.pep
MAWKHSSDGNFTCLTIISPDRDDIVLPIPENENPKGLWFTTKEACNWARADEDVAAIYKPISVTDMKWAFSSSSLCN

SEQ ID NO: 272668 - protein, 195 aa, Glycine max
  Clone ID: PAT_MRT3847_88240C.1.pep
MPSPKSSRSGQIESHRRGRSSSFHGQGVMSVSQLRRPKTVSDLPSIRSLAGTATATLPEGLPRHPSKMLLKVTMLRSLAPVQMLMTPESTVRDLIAAAVRQYVKEGRRPILPAIEASDFDLHYSQFSLESLDRKEKLLELGSRNFFLCPRKAATTVEGSVTTSFASCAKEAKKERQGCGGGGGGFAWFKLMQFMM

SEQ ID NO: 272669 - protein, 136 aa, Glycine max
  Clone ID: PAT_MRT3847_88241C.1.pep
MPSPKSSRSGQIESHRRGRSSSFHGQGVMSVSQLRRPKTVSDLPSIRSLAGTAAATLPEGLPRHPSKMLLKVTMLRSLAPVQMLMTPESTVRDLIAAAVRQYVKEGRRPILPAIEASDFDLHYSQFSLESKSQTIS

SEQ ID NO: 272670 - protein, 168 aa, Glycine max
  unsure (1)..(168): unsure at all Xaa locations
  Clone ID: PAT_MRT3847_88242C.1.pep
GSKKKEFSRQTSFNTLDLNMKADEGDKAGESSPISSDQTGETIADPLNQNGFLDSIVNRFEFNTNPVKDREMAELFLCKFKESFEEVYGKKCLENLSVDERVIEDVGVGCGYFTNSLFEKWLKDVFXPSLKTVNFGGKEGILFKLSWGGEGDRKIGSGFMNSSLPKRI

SEQ ID NO: 272671 - protein, 64 aa, Glycine max
  Clone ID: PAT_MRT3847_88243C.1.pep
VTTKVNSEIIFFLKTTNKKFFLQKKICIEVTHFHFLKSSLSSRGIGLFVQNTARALPPSAPRVR

SEQ ID NO: 272672 - protein, 57 aa, Glycine max
  Clone ID: PAT_MRT3847_88244C.1.pep
RFCLLFRHTALTWQCKNDYSFNVKKTANVFYIGREKKRKKSESESIKKKDWKRGRGI

SEQ ID NO: 272673 - protein, 96 aa, Glycine max
  Clone ID: PAT_MRT3847_88245C.1.pep
GIVNKETYPTDRCAKDHEHHVYSNVPSLPTTENSGYDHLPKELNDMNIAYDKSKNNNDNDMEATIVTGNGTQTGDIITTAIESLDRQPNLTILYIS

SEQ ID NO: 272674 - protein, 42 aa, Glycine max
  unsure (1)..(42): unsure at all Xaa locations
  Clone ID: PAT_MRT3847_88246C.1.pep
SRXRXSQRSRRXVSKXEEHVRASGNXAMNSVXHSXASXDHKW

SEQ ID NO: 272675 - protein, 125 aa, Glycine max
  Clone ID: PAT_MRT3847_88247C.1.pep
LGNCPHTVGCGVVRGTARPNTAANVNLGAFYLVGMPVAVGLGFWFDVGFCGLWLGLLSAQVCCAGLMLYVIGTTDWEFEAHRAQLLTLVEDGVLPDKQPCGCVLTPCLSLLTKAQPPSVLWVFVF

SEQ ID NO: 272676 - protein, 46 aa, Glycine max
  Clone ID: PAT_MRT3847_88248C.1.pep
FLSQSPVLPERCSHRLDILHPTTTTMAVCPQGHCFPMPARVVERVG

SEQ ID NO: 272677 - protein, 70 aa, Glycine max
  Clone ID: PAT_MRT3847_88249C.1.pep
FVIVTWWHSIWSGNVDSVLCLSMHGCNNQHDIKLKLKLSHKCETNQGAKQNRNKITLSPTRPPTRPPTRP

SEQ ID NO: 272678 - protein, 470 aa, Glycine max
  Clone ID: PAT_MRT3847_8824C.1.pep
IILVVISICLTSRKKSRRVNGMLPLSHMLSVSDEIKEIRVDQVSANNHPQNGAFVSLYDRFSDRDSEKVLIQTNNGENSSQSGSFVHLKKDDGSQSGEESGAKSVSTYRSSSHPITAPSPLCGLPEFSHLGWGHWFTLRDLELATNRFSKDNVIGEGGYGVVYQGQLINGSPVAVKKLLNNLGQAEKEFRVEVEAIGHVRHKNLVRLLGYCIEGTHRLLVYEYVNNGNLEQWLHGAMRQYGFLTWDARIKILLGTAKALAYLHEAIEPKVVHRDIKSSNILIDDDFNAKISDFGLAKLLGAGKSHITTRVMGTFGYVAPYGCEKTTEGEKSDVYSFGVLLLEAITGRDPVDYSRPATEVNLVDWLKMMVGNRRAEEVVDPNIETRPSTSSLKRALLTALRCVDPDSEKRPKMSQVVRMLESEEYPIPREDRRRRKSQAGNMELEAQKETSDTEMTENPDSKSNGRRNQRK

SEQ ID NO: 272679 - protein, 63 aa, Glycine max
  Clone ID: PAT_MRT3847_88250C.1.pep
SMTATTMKEYVLLTWTNIHVALVAIAFAAAISAGFSRRLKLLIICMKIYFQDRKGSHLVHPRL

SEQ ID NO: 272680 - protein, 49 aa, Glycine max
  Clone ID: PAT_MRT3847_88251C.1.pep
KSRPCFHMVSGRSPLVGEGLSKSIHCSYGASSLSVALKICLISKAFPVS

SEQ ID NO: 272681 - protein, 74 aa, Glycine max
  Clone ID: PAT_MRT3847_88252C.1.pep
CIIRTPKPLQKKNKKKKSQLALHHSPPPTNLSLSACISCMCRGPSYEEVFVMYFTDNGLWVISVTLNPLERSKA

SEQ ID NO: 272682 - protein, 89 aa, Glycine max
  Clone ID: PAT_MRT3847_88253C.1.pep
RELGRALGPPRSAREAFRRYSQGDSNRIRLSHRGQAMPFSSSNYNSKLLYVKIERLHGAAPPINSRGLPDHQSTHGPGNEWVLREKKKV

SEQ ID NO: 272683 - protein, 493 aa, Glycine max
  Clone ID: PAT_MRT3847_88254C.1.pep
MGTSFMLFSPPPLLKPHQVPLTTPFPLPQTHHTASRNKRVHSTSKFGNFLDFKPENKPESLDFDLPWCHPSDRNRFDVIIIGAGPAGTRLAEQVSLYGVKVCCVDPDPLSVWPNNYGVWRDEFESLGLEDCLDKTWPMACVYVDDGKTKYLDRCYGRVGRRKLKERLVQGCVSNGVRFHKAKVWQVQHQEFESKVLCDDGVELKGSLVVDASGFASNFVAYDKVRHHGFQIAHGVLAEVDDHPFDLDKMVLMDWRDSHLGNEPYLRASNSRFPTFLYAMPFSSNLIFLEETSLVSRPVLSYMEVKRRMVARLRHLGIRVKRVLEDEKCLIPMGGPLPRIPQEVMAIGGTSGVVHPSTGYMVARTMAVAPVVAFAITQCLGSTRMIRGKQLHDKVWNSMWPIENRLVREFYSFGMETLLKLDLNGSRSFFDAFFNLKPYYWQGFLSSRLTLNELLWLSISLFGHASNPSRFDIVTKCPVPMAKMVGNIALEYIG

SEQ ID NO: 272684 - protein, 47 aa, Glycine max
  Clone ID: PAT_MRT3847_88255C.1.pep
KSISFKWQGENLTARLAIVETSQFKTHSESAKKKIDLPVQKNLLTKY

SEQ ID NO: 272685 - protein, 97 aa, Glycine max
  Clone ID: PAT_MRT3847_88257C.1.pep
MPILFGFSFQKRRRYQPPNMLHLPLSLVRQKKPLILTGDGGETTFKQTHHFLKENSDGGAWEKYPNLFFSNMTKWVLGIYKVGTLVGEISKKKWGIL

SEQ ID NO: 272686 - protein, 73 aa, Glycine max
  Clone ID: PAT_MRT3847_88258C.1.pep
HVVMEDGTAPALPFSDLEEPGATIDNLWRQWCFHLYSVDPKSLMICHEYRECSYYLIFCDGYTLCVFVQVTIM

SEQ ID NO: 272687 - protein, 319 aa, Glycine max
  Clone ID: PAT_MRT3847_88259C.1.pep
MSDALINGLAGAGGGIIAQLITYPLQTVNTRQQTERDPKKDTRSQGALERMCQVVKEEGWERLYGGLMPSVVGTAASQGVYYYFYQIFRNKAEAAALQQKKMGVGDGSVGMLSSLVVAALSGCVNVLLTNPIWVVVTRMQTHRKESNRTPADQGLFVATEQPILSAVEPLPYGTSHVIQEIYGEAGIWGFWKAKLGATVVTYPILVVKKFYSILPFLSKVAQFSLNSGTWDAIIKMIRYEGFNGFYKGMGTKIVQSVLAAAVLFMMKEELVRGSDSNNILKYGFNCILIIFIRLVSIEEIHAKNYTLGSLVCFMNKTGL

SEQ ID NO: 272688 - protein, 62 aa, Glycine max
  Clone ID: PAT_MRT3847_8825C.1.pep
WTPSVTFYLIICESFNSVILEAREKLIVSMLEDIHIYLMERWDTNSKKVVAREGSVLPNIKK

SEQ ID NO: 272689 - protein, 333 aa, Glycine max
  unsure (1)..(333): unsure at all Xaa locations
  Clone ID: PAT_MRT3847_88260C.1.pep
MSDALINGLAGAGGGIIAQLITYPLQTVNTRQQTERDPKKDTRSQGALERMCQVVKEEGWERLYGGLMPSVVGTAASQGVYYYFYQIFRNKAEAAALQQKKMGVGDGSVGMLSSLVVAALSGCVNVLLTNPIWVVVTRMQTHRKESNRTPADQGLFVATEQPILSAVEPLPYGTSHVIQEIYGEAGIWGFWKXPTLSNPSIQFMLYEAMLAKLRKRRAWSKKGSNGVTALEIFLIGALAKLGATVVTYPILVVKARLQARQDKTGDRRHHYKGTWDAIIKMIRYEGFNGFYKGMGTKIVQSVLAAAVLFMMKEELVRGVRFLLAKDAVKPKNL

SEQ ID NO: 272690 - protein, 488 aa, Glycine max
  Clone ID: PAT_MRT3847_88261C.1.pep
MATQSLDEETTKKVIRQVEFYFGDSNLLTDGFMRKSITESEDGMISLALICSFNRMRKHLNLGDVKPDEVAQETVNTVAQTLRNSASLKVSEDGKKVGRKTELPKLEDVEQVEIRTLAVSPFEYDLKLEDVEKFFGQYAKVNSVRLPHHVGDKKLFCGTALVEFSSEEEVEKVMKEKMVYAGAELELKPKKDFDAEREKELEDYKKSRPPVGSNHQNSSNVEEDYPKGLIIAFKLKSISEEIPSEQNGVDQQAKDNSVVSKTDENPRSEITSGENDQKVTENVGVDEEKNEMKEAKETVNEEDNEMKEAEETESEDNTDMKEAKGTESEDNNGMKEGKVTKDEEKKQQAGEKFSAAAYKDNMDVVSREDLKSVFEKFGTVKYIDFKIGAESGYIRFEETEAAQKARAAAVISEKDGLVVKNYIAILDPVTGEAEKEYWSLLRGNQGKHREFKNKQGRGGWHGRGGKHARSRDNGSRDRRNKAQKVGGA

SEQ ID NO: 272691 - protein, 266 aa, Glycine max
  unsure (1)..(266): unsure at all Xaa locations
  Clone ID: PAT_MRT3847_88262C.1.pep
ADREKELEDYKKSRPPVGSNQQNNTNVEEDYPKGLIIAFKLKSISDEIPSEQNGVDQQAKDNSVVSKTDENPHSEITSGENDQMVTENVGDDEENSETKEAKETESEENNGMKEGKVTEGEDKKRQAVENXSAAAYKDNMDVVSREDLKSVFEKFGTVKYIDFKIGAESGYIRFEETEAAQKARAAAVISEKDGLVVKNYIAILDPVTGEAEKEYWNLLRGNQGKHREFKNKQGRGGWHGRGGKHARSRDNGSRDRRNKAQKVDAA

SEQ ID NO: 272692 - protein, 56 aa, Glycine max
  Clone ID: PAT_MRT3847_88263C.1.pep
RRLQNSTAKNLKNRSRVKYIIFPVEGTTPASMTSYITIASQSFGSTRAFFKRTVHA

SEQ ID NO: 272693 - protein, 136 aa, Glycine max
  unsure (1)..(136): unsure at all Xaa locations
  Clone ID: PAT_MRT3847_88264C.1.pep
MLPFFALFFFLLCCNSLAPVVYSLNAEGSVLLTLKQTLTDPQGSMSNWNSFDENPCSWNGITSIPKRKLYGSLPSSLGSLSQLRHINXARTTRLFGNLPPRLFQAQGLQSMVLYGNSASGSGPTEIRNLRYLQALD

SEQ ID NO: 272694 - protein, 68 aa, Glycine max
  Clone ID: PAT_MRT3847_88265C.1.pep
CSVTQKSQPILLTRRCTPVTSLRRDSSIPRTTGIVLWSVVELKALVLGARINVPWLPFVIDTYRPFHS

SEQ ID NO: 272695 - protein, 271 aa, Glycine max
  Clone ID: PAT_MRT3847_88266C.1.pep
MGSLGTINKPHAVCIPYPAQGHINPMLKLAKLLHFKGFHITFVNTEYNHKRLLKARGPDSLNGLSSFRFETIPDGLPETDLDATQDIPSLCEATRRTCSPHFKNLLAKINDSDAPPVSCIVSDGVMTFTLDAAEELGVPEVLFWTTSACGFMCYVQYQQLIEKDLTPLKDSSYITNGYLETTIDWIPGIKEIRLKDIPSFVRTTDPDEFMLDFIQWECGRARGASAIILNTFDAIEHDVLDAFSSILPPVYSIGPLNLLVKDIDDQDLNAI

SEQ ID NO: 272696 - protein, 50 aa, Glycine max
  Clone ID: PAT_MRT3847_88267C.1.pep
LSFVAAHYISLQILSEGQNKNCLIYREVFECDIVGNRDKASGHYTDSMND

SEQ ID NO: 272697 - protein, 64 aa, Glycine max
  Clone ID: PAT_MRT3847_88268C.1.pep
FLRLADFQRCQKSHIPLVVDFFFFLPVLSWRNQQEDPPLVSVPIIKSIVKGKFESLCMFIAMRL

SEQ ID NO: 272698 - protein, 60 aa, Glycine max
  Clone ID: PAT_MRT3847_88269C.1.pep
AYPGRSSEDASTQVTPKQESSNCNAEFQYESVRYHRIWCQSYWSPRTYVLPSNRCPLRME

SEQ ID NO: 272699 - protein, 351 aa, Glycine max
  Clone ID: PAT_MRT3847_8826C.1.pep
MHQNVDVIEKTTHGGSSVTKEDELLNTGDHVDTVILSSKSETSMPTAEESNISTINEGNSDNMVGSFSSSSATAFSTKSSILGESTQICVNNEPDRQNDHEKCDLDVSVNDQDELMNTGDHVDTVILSNKSEASIFTSEENNISSIREGNSGKKVEGFPSGSVKDFSTKSSILGKSTQICANNESDRQNDQEKCDQVVSVNDQEHEKVPSDSSQKHCDVDKGVVSSSISEGSMEIKLTTSTVSIHVTPINNSVSQVVSENNSLTSHEIIDIPPSSKVVSTHEVTSHNEFQGITPVGNSSAEEKGESTAKAEEAGTSTLVGCSEQETASCPVPGTEKHHSSETSRQLLHDSD

SEQ ID NO: 272700 - protein, 47 aa, Glycine max
  Clone ID: PAT_MRT3847_88270C.1.pep
ELMWEGSTTIMLTSNNQKFLKTSIAYVSKKPIITNKQFNNLQLTLKI

SEQ ID NO: 272701 - protein, 154 aa, Glycine max
  Clone ID: PAT_MRT3847_88271C.1.pep
RGAKPFLSKWGGFGNFGLPPKNIEIKKPRGPLAFPFLGPPPSVEGIKVREFPPPEKGPAKGLNPPLGLFFPPPSLGFLGWGGLFQKKGGTFPLISLRSPQLFFGFGKTTPPPFGQENGNLPPLGGFLKRFPPPHPFLPLLGFSKKCSSPFAPSP

SEQ ID NO: 272702 - protein, 60 aa, Glycine max
  Clone ID: PAT_MRT3847_88272C.1.pep
SNLKANFIMIHKRLGSLLLWDVVIQYPPKHDKVCLSVTLNPYSTITIYLLLNFHQSLKTS

SEQ ID NO: 272703 - protein, 79 aa, Glycine max
  unsure (1)..(79): unsure at all Xaa locations
  Clone ID: PAT_MRT3847_88273C.1.pep
EGLIHVHNNGFDNXDIKLQIILVFGDGGIKIEDLRLAMDAGHKQENSECRGTPMFMSPEQATGGKCKSPADIWTMGCTI

SEQ ID NO: 272704 - protein, 223 aa, Glycine max
  Clone ID: PAT_MRT3847_88274C.1.pep
ANFNFIFKAVFESVFNGYSGIPRSGKALCCLGLQAHRFLALHLRLLRPGACRVILVFSCTIKCRDCTVEHCLKHRSGPDHKCPGPTKVESSFSFMNLLNGSKKQESKPKSSATSWSTSFLNAASNVRASAEAGVSKLSSWQTARGGVGQSHSSGQVEQCPQCGAKFSSVTTLVDHVQKVHERSRNRSGAKVTIDVCPKCSRGFRDPVALVEHVERDHGGSSRS

SEQ ID NO: 272705 - protein, 105 aa, Glycine max
  unsure (1)..(105): unsure at all Xaa locations
  Clone ID: PAT_MRT3847_88275C.1.pep
GGGKLRHAKKLRPREASGSFLLNDPSPPPRLPRRPPPPPHPPPXPPPPPPRHSPSPPPPHHSPSPPPPPSSPSPPPPPPPPPPLSPPPPPPPPPPPHPPPPPPPP

SEQ ID NO: 272706 - protein, 35 aa, Glycine max
  Clone ID: PAT_MRT3847_88276C.1.pep
LVNCQHKLKLGRNTIGMHNLITIFMDQFCKLLKEY

SEQ ID NO: 272707 - protein, 55 aa, Glycine max
  unsure (1)..(55): unsure at all Xaa locations
  Clone ID: PAT_MRT3847_88277C.1.pep
LXHXXKXTKXPXXTTXXXIYXNQLNXPXXKXXNXHXXKRXXXXQNSKXXSXYXXX

SEQ ID NO: 272708 - protein, 171 aa, Glycine max
  unsure (1)..(171): unsure at all Xaa locations
  Clone ID: PAT_MRT3847_88278C.1.pep
MLGTLNVFIEQGRGHSQFLRSATDDPGARSRMGHIMSALAKARDSCVAFNPNIARSRPAPDCIYLSGKPGRGKSAFAKMLARAWLAKRLDPDALELAERHLSALVYNGTPETEYWDGNGRQPGCIFDDFLQKKEVGGGDSAALDMIRXVNGEAALLYLANLNDQGSTYFTS

SEQ ID NO: 272709 - protein, 41 aa, Glycine max
  Clone ID: PAT_MRT3847_88279C.1.pep
LRIEYFPPLNFVPLLYLHKTARWFILTSYLSWLFLLRLSLY

SEQ ID NO: 272710 - protein, 395 aa, Glycine max
  unsure (1)..(395): unsure at all Xaa locations
  Clone ID: PAT_MRT3847_8827C.1.pep
MLNCQLHPEVSTKHQGARAPDADGPSSLYQALQXQEEKRWHLVPRVPPCGLNENSRKQLQHKRDSTNQILKAAMAINSITLAEMDSPESYLEFSLPKVSLAAMFCMFLSLYPVCIGSIFSPEXCLLACCLIYLLTCGIXIANRAEASMYIWRKRTNSKPASISARSSSRTSWEMVKDLMVDADKRDLFAERAESLLLSLKQRFPGLPQTALDMSKIQYNKDVGKAILESYSRVLESLAFNLVARIDDVLYVDDLTKNSDKISSLSKVGVVTHKSISVPHSVPVPGTPYKSAFGTPTLSPAHGISSPAKGGKSPLINYSNLPQRGSGVKKSLTDFLSIDPKGKDSDTSIEKQDSESNVLDEVTTCETDVESSACTEVLPVQVSWTGNGMCEAIDLL

SEQ ID NO: 272711 - protein, 80 aa, Glycine max
  unsure (1)..(80): unsure at all Xaa locations
  Clone ID: PAT_MRT3847_88280C.1.pep
FTGTVAKAFTTSSVLEAQWIRPNTCEVAYCRYSTVPRKHKACAEGHMSLHLTEXMVVAKCKDSMRMGNTVAQIMMAPGLI

SEQ ID NO: 272712 - protein, 42 aa, Glycine max
  Clone ID: PAT_MRT3847_88281C.1.pep
SVTRFFPLGSLSRFEWFLILPHTEFVLVMNNRKGFCFPPLLS

SEQ ID NO: 272713 - protein, 49 aa, Glycine max
  Clone ID: PAT_MRT3847_88282C.1.pep
IALVLVKSGHTPVLVYQMTSSSLVPDQHFHSVCRTHSMFLTSSSMCSFH

SEQ ID NO: 272714 - protein, 38 aa, Glycine max
  Clone ID: PAT_MRT3847_88283C.1.pep
ICIITYGMKVGFVGEFSLFSTGDVYGIWYPCTYISYMF

SEQ ID NO: 272715 - protein, 68 aa, Glycine max
  Clone ID: PAT_MRT3847_88284C.1.pep
KYKKKKKKKKKKKKKKKKKKKKKKKKKKKKKKKKKKKKKKKKGGAVLRVQFLLPRACKEKIFFLGPLI

SEQ ID NO: 272716 - protein, 76 aa, Glycine max
  Clone ID: PAT_MRT3847_88285C.1.pep
EFHLTLLLGFTLISIVCILLILFFIIFHFFFYFVFFFIMFFLFFPFFFLLLFYKGLFFCSISCLDDYLFPFIILFL

SEQ ID NO: 272717 - protein, 65 aa, Glycine max
  Clone ID: PAT_MRT3847_88286C.1.pep
WEMGVSYPLTPGGHCPPKGTEMRRHKLPLLEAPRGPPRAHCLFLSQKGPLIRSGPLFLGGPRGRK

SEQ ID NO: 272718 - protein, 64 aa, Glycine max
  Clone ID: PAT_MRT3847_88287C.1.pep
GGQGCIGVADYFVSMMVVVPLRGRACMPSYGMPWSFFLHNRLVQVVKGGVPRAGWTWPTSTMLM

SEQ ID NO: 272719 - protein, 94 aa, Glycine max
  Clone ID: PAT_MRT3847_88288C.1.pep
MMWEWEDYEDTITEPEPEPDSDSDSHLNFDFFSALSRPKDYYKILEVDYDATDDAIRSNYIRLALKWHPDKHKDHNSATSRFQDINEAYQGLSD

SEQ ID NO: 272720 - protein, 85 aa, Glycine max
  Clone ID: PAT_MRT3847_88289C.1.pep
VDNMLVVILSYFAYFSHFIILHVGLLLKIHVTGTHTCLLPILLTLGSSILRFTTLIQVTKKQSQKQMEHDLSFHASFYVKATTTQ

SEQ ID NO: 272721 - protein, 97 aa, Glycine max
  unsure (1)..(97): unsure at all Xaa locations
  Clone ID: PAT_MRT3847_8828C.1.pep
SVRFINHHIIHCIHTYYMKAIIINPQITILISNSIHYPRTTPQTWEDLIRKAKDGRLDLIDTYASXNVHEPSPDNYNFXRKNDLLQLIKTMQIVVLY

SEQ ID NO: 272722 - protein, 63 aa, Glycine max
  Clone ID: PAT_MRT3847_88290C.1.pep
CYVLEQRRSDDPLVQGSSATSFRLGNSNVNRRLKHECLSHTLQVVLCRQYRVKFMVLIKRCVY

SEQ ID NO: 272723 - protein, 63 aa, Glycine max
  Clone ID: PAT_MRT3847_88291C.1.pep
WMSRQFYRSSMKEREREENESKGDIQPPSKPPSTTYVLRCYMATRVIQPGFLRNFRSNTVTKP

SEQ ID NO: 272724 - protein, 40 aa, Glycine max
  Clone ID: PAT_MRT3847_88292C.1.pep
QTTCLTIFGFMNITLNSLTSKNSYLNSSMLSKNSSLVPSI

SEQ ID NO: 272725 - protein, 318 aa, Glycine max
  Clone ID: PAT_MRT3847_88293C.1.pep
MALVRHRRHPNLRLPLPEPSERRLRFPLPLPPTTTAKPASGDAIAAADLEKLAILGHGNGGTVYKVRHKATSATYALKIIHSDTDATRRRRALSETSILRRVTDCPHVVRFHSSFEKPSGDVAILMEYMDGGTLETALAASGTFSEERLAKVARDVLEGLAYLHARNIAHRDIKPANILVNSEGDVKIADFGVSKLMCRSLEACNSYVGTCAYMSPDRFDPEAYGGNYNGFAADIWSLGLTLFELYVGHFPFLQAGQRPDWATLMCAICFGDPPSLPETASPEFRDFVECCLKKESGERWTTAQLLTHPFVCNDPDTC

SEQ ID NO: 272726 - protein, 146 aa, Glycine max
  Clone ID: PAT_MRT3847_88294C.1.pep
IKPANILVNSEGEVKIADFGVSKLMCRTLEACNSYVGTCAYMSPDRFDPEAYGGNYNGFAADIWSLGLTPRADSARDFPFLQAGQRPDWATLMCAICFSDPPSLPETASPEFHDFVECCLKKESGERWTAAQLLTHPFVCKDPETC

SEQ ID NO: 272727 - protein, 80 aa, Glycine max
  Clone ID: PAT_MRT3847_88295C.1.pep
CRPFFFFLNKNGFEHYHLLDCGDILPHKNHNPISHQIQSQSPQFCNTLLEENWMVKIQPQNSHTQSHFIYKGNSLKMMGE

SEQ ID NO: 272728 - protein, 64 aa, Glycine max
  Clone ID: PAT_MRT3847_88296C.1.pep
KRPAQRFGTALEVLCDIIQDDAEPAKKKFYALKLSLLNKIGWPHLAAYESQGMHGGFPPRLPFF

SEQ ID NO: 272729 - protein, 85 aa, Glycine max
  unsure (1)..(85): unsure at all Xaa locations
  Clone ID: PAT_MRT3847_88297C.1.pep
WEKRQSKVLAKAKLRMMREEGADKKNSYWDNLWGKQKDYQSSDEEVEERAKRAASPARRWXEYSRRGVDKPPTFKLPEASLGKDK

SEQ ID NO: 272730 - protein, 269 aa, Glycine max
  unsure (1)..(269): unsure at all Xaa locations
  Clone ID: PAT_MRT3847_88298C.1.pep
MGMGTSTFVTRWINFLTMLLAIVVIIFGVWMSTHHDGCRKSLTVPVIGLGAVIFLISVVGFLGALKNNSILLWIYLITLFFVLVGILVFTVLEFIVTNNGSGHSVTGLRYKEYQLQDFSSLFLKESNNSRNWERWIGSLGDSPVGYGLPXQDKTLKQYKSAKLSPIEAGCCRPPSQCGYPAVNASYYDLTFHPVSPNNDCKRYKNSRAIKCYDCDSCKAGVAQYMKTEWRVVAIFNVVLFVVLVRQTNILALFLRLQQSETLVSIYVFQ

SEQ ID NO: 272731 - protein, 51 aa, Glycine max
  Clone ID: PAT_MRT3847_88299C.1.pep
KKITVKIKNMTKDCRKEDMLTRNSLKHTGEMHDKSYDREGGKNDMPQPEEG

SEQ ID NO: 272732 - protein, 105 aa, Glycine max
  Clone ID: PAT_MRT3847_8829C.1.pep
TGRFHLRKIPEKKKHSNQLKTKTPSRQWRELPTLSDMTVITGHRKPKKRNRAVEKIGTGLVASRPQSLKHTTGESSEGLVEVRLHAPTTMASQPEPAPSAKEQSK

SEQ ID NO: 272733 - protein, 78 aa, Glycine max
  Clone ID: PAT_MRT3847_882C.1.pep
TESAHRALFHQEMTIGNTRGFLDPGSSRVLPDSQPHFPDVTRADWHVIVRVRDGRRWKSSRGARAAARSVFQLRNREP

SEQ ID NO: 272734 - protein, 92 aa, Glycine max
  unsure (1)..(92): unsure at all Xaa locations
  Clone ID: PAT_MRT3847_88300C.1.pep
ILMNLPNAVLSMWGFFVGDLVFKVSNMTSPYIKCTVSFFIAFANSAGXSITFDAFPHKLSQFGEIHEHCVLKFSQYEYFTAWFIQVPSLSTF

SEQ ID NO: 272735 - protein, 55 aa, Glycine max
  Clone ID: PAT_MRT3847_88301C.1.pep
CDLLDLPAVTQLEKDAKYALLYQLLKIFLTQRLDAYLDYHAANSTLLKSYGKHCL

SEQ ID NO: 272736 - protein, 97 aa, Glycine max
  Clone ID: PAT_MRT3847_88302C.1.pep
GSRLDLLYGKNAWEALEAQLPSNYVTNGGHGVEEERADVVVLADGIVERTDLECETMDLYATADDAVKDVTSGGPSGRTIVVSLACRSHSAGETPTM

SEQ ID NO: 272737 - protein, 68 aa, Glycine max
  unsure (1)..(68): unsure at all Xaa locations
  Clone ID: PAT_MRT3847_88303C.1.pep
LISIVNRNFFYRAKMTPRNIQQQKNVTFKLFFLSKLLSNLSLKSIILLLLMLTLLSSSRRTXAWXNAW

SEQ ID NO: 272738 - protein, 48 aa, Glycine max
  unsure (1)..(48): unsure at all Xaa locations
  Clone ID: PAT_MRT3847_88304C.1.pep
YHSXLFGRNLIEINMPPRGYNNEGPIKIAPQVEPLTSLRITFRGLNGS

SEQ ID NO: 272739 - protein, 280 aa, Glycine max
  Clone ID: PAT_MRT3847_88305C.1.pep
KIDVSYTITFESQKKKGCVLRKESKLTRKVLTGVTGVVNPGELTAMLGPSGSGKTTLLTALAGRLAGKVSGTITYNGQTDPTFVKRKVGFVPQDDVHYPHLTVLETLTYAALLRLPKSLSREEKKEHAEMVIAELGLTRCRNSPVGGCMALFRGISGGERKRVSIGQEMLVNPSLLFVDEPTSGLDSTTAQLIVSVLRGLALAGRTVVTTIHQPSSRLYRMFDKVVVLSDGYPIYSGQAGRVMDYLGSVGYVPAFNFMNPADFLLDLANGVVADVKHDDQ

SEQ ID NO: 272740 - protein, 94 aa, Glycine max
  unsure (1)..(94): unsure at all Xaa locations
  Clone ID: PAT_MRT3847_88306C.1.pep
GHRMPPKEANLSKLSXESYEANHSKMVPKGSDAIWKTIDAHSETAAQKGSTLNSMDRKTEGCEXVRQGSKNDLXRHVCWHANGLAGRAELEFKE

SEQ ID NO: 272741 - protein, 143 aa, Glycine max
  Clone ID: PAT_MRT3847_88307C.1.pep
MCQICPISYSLLPFQVAERYVFFLLEFFERNWNQRLLLPSFCLQPLNQPYNLDMCFFWLHKFPPFGFCRKTKTVEEVLKIYIKPGWKKGTKITFPGKGNQEAEATAPDDLIFVVDEKPHALFKRDGNDLVVTQKILLVEALVG

SEQ ID NO: 272742 - protein, 70 aa, Glycine max
  Clone ID: PAT_MRT3847_88308C.1.pep
GVLLVLVVGCNGSWCRLSKVFCHSLCLFLCFSFALLIFSVGFGCGNWIPLSVSYSGSMYLVYIYWKRWLL

SEQ ID NO: 272743 - protein, 528 aa, Glycine max
  Clone ID: PAT_MRT3847_88309C.1.pep
RSLDRDIVESRLTFAGFVVFNCPIRSDSATVLSELKESSHDLVMITGDQALTACHVASQVHIISKPTLILGPTRNGEGYNWVSPDETENIHYSEKEVESLSETHDLCIGGDCIEMLQQTSAHLRVIPYVKVFARVAPEQKELIMTTFKTVGRLTLMCGDGTNDVGALKQAHVGIALLNALPPTQSGNSSSDSSKEEGSKSGKQKKSKPASEGTSKAKVASKSDSTSHSSGNRHQAAVEMQRQKLKKMMDELNEEGDGRAPIVKLGDASMASPFTAKHASVAPTTDIIRQGRSTLVTTLQMFKILGLNCLATAYVLSVMYLDGVKLGDIQATISGVFTAAFFLFISHARPLPTLSAERPHPNIFCAYVFLSLLGQFSIHLLFLISSVKEAEKHMPDECIEPDADFHPNLVNTVSYMVSMMLQVATFAVNYMGHPFNQSISENRPFRYALVAAVVFFTVITSDLFRDLNDWLKLVPLPAGLRDKLLLWAFLMFLVCYSWERLLRWAFPGKIPAWKKRQRLAVSNLEKKQV

SEQ ID NO: 272744 - protein, 87 aa, Glycine max
  unsure (1)..(87): unsure at all Xaa locations
  Clone ID: PAT_MRT3847_8830C.1.pep
KKMRSLGNSPNAQTFHSMVTGYAAVGGNYXVTELWGEMKALASSISMKFDQELLDSVLYTFVRGGFFVRANEVVAMMEKGKMFVDKY

SEQ ID NO: 272745 - protein, 108 aa, Glycine max
  Clone ID: PAT_MRT3847_88310C.1.pep
SPDGDRCHRVHGLLGHPAGEEVQRRHDSEVGSPSYFVQGKLGVARAAFAHVAVAEGAEQASGRRADGDCAFRSVQKVYKLRSPWPCISGNSAGRGIAAPSDAFHTVVV

SEQ ID NO: 272746 - protein, 78 aa, Glycine max
  Clone ID: PAT_MRT3847_88311C.1.pep
TTKAGLQNFKNLKTLRSPNQIHHHLYYPFPVSVPNAQYLQPLHNLAMWQSSNKGFALLSLGVPHFWPEKPLFIRTMRI

SEQ ID NO: 272747 - protein, 44 aa, Glycine max
  Clone ID: PAT_MRT3847_88312C.1.pep
KLVSIASYYPLFAGMCLLICYYLLIVLNGNITVNSFAKGIILST

SEQ ID NO: 272748 - protein, 52 aa, Glycine max
  Clone ID: PAT_MRT3847_88313C.1.pep
HYLTRHTILSIMDFLYKRADIIHCSLLSSTTKLLHSFYYYSKITQKTSLCTF

SEQ ID NO: 272749 - protein, 90 aa, Glycine max
  unsure (1)..(90): unsure at all Xaa locations
  Clone ID: PAT_MRT3847_88314C.1.pep
LFVRNVAHNVEQAQEKDMLEGNISIDMKSRTRLEKDSSTKAQSASGKTFKNDIKGAGSHSSEELPEKEDQXNPKKIEARLRQRIKPQNNE

SEQ ID NO: 272750 - protein, 60 aa, Glycine max
  Clone ID: PAT_MRT3847_88315C.1.pep
ILILLQFHTTYYHITIKIQILNHPNLITLTHININPTHYPLFNPKTSHYHLHKINLPNFT

SEQ ID NO: 272751 - protein, 47 aa, Glycine max
  Clone ID: PAT_MRT3847_88316C.1.pep
MHRVKPNTVQVSSKPVIELYYSLMNLYFFIIIHHLEYIIIILHLFSY

SEQ ID NO: 272752 - protein, 118 aa, Glycine max
  Clone ID: PAT_MRT3847_88317C.1.pep
NMTKTLLLWIFLLISILMFSTTGSTFTTKIEDLGTSRQQKETKTMYGVIMESSKPNTQRRTNLGLHVVQHTKVSQKAKTNGGGNNVKDHKGKNSASTYSINKSSSLFIPVMLLFGYLF

SEQ ID NO: 272753 - protein, 156 aa, Glycine max
  Clone ID: PAT_MRT3847_88318C.1.pep
MCAFYYIVVFYSIYFAMNFRLAVNKKGAATKARKPAGKGKAAKDPNKPKRPPSAFFVFMEEFRKVFNKEHPENKAGSAGGKAAGAKWKTMSDAEKAPYVAKSEKRKVEYEKNMRAYNKKQAEGPTGGDEEKPEKPVSEVNDEDDDEEGSGEEEDDQ

SEQ ID NO: 272754 - protein, 132 aa, Glycine max
  Clone ID: PAT_MRT3847_88319C.1.pep
TAARRRQKGGEFELTDICGLAYFLGIQCVTSNSVIFLHQKRYAIDILKMTNMLDCNSVTTPCEPIIRLITGEDTILVDSTLCRQLIASLRSWCNSMLRITYGVRLVGIFMTKPCTDHLLAAKRLLRSMTGTL

SEQ ID NO: 272755 - protein, 46 aa, Glycine max
  unsure (1)..(46): unsure at all Xaa locations
  Clone ID: PAT_MRT3847_8831C.1.pep
HHTITFLTKAPSTLDFXXXPQSQCPXGVYYSHIYKYFVITPTQFPT

SEQ ID NO: 272756 - protein, 292 aa, Glycine max
  unsure (1)..(292): unsure at all Xaa locations
  Clone ID: PAT_MRT3847_88320C.1.pep
MEEGSSDCIDNERDLIRNICILAHVDHGKTTLADHLIAAAGGGVVHPKLAGRVRFMDYLDEEQRRAITMKSSSILLRYAGRYAVNLIDSPGHIDFCSEVSTAARLSDGALLLVDAVEGVHIQTHAVLRQCWIERLTPCLVLNKLDRLITELKLTPSEAYTRLLRIVHEVNGIVSAYKSEKYLTDVDSLLAGTGTGTTTGETLEDYDDNEDVFQPQKGNVIFACALDGWGFGIREFAEIYASKLGASVNALLRALWGQTYYNPKTXMIVGKKGVGGNKKPMFVQFVLEPLWQV

SEQ ID NO: 272757 - protein, 119 aa, Glycine max
  Clone ID: PAT_MRT3847_88321C.1.pep
FSNPPRGNPPPGGGGKPPQRGLWTKKKIFPPPKKQPKLLKNPTTKTFFPFKNPKRTAQGFPPRGGRGHPGPTKKPQPRKRGQPQRGGGPPPQTRGGGGANPHGGEEGPLQGPGKPSPRG

SEQ ID NO: 272758 - protein, 111 aa, Glycine max
  Clone ID: PAT_MRT3847_88322C.1.pep
NVNALSRDDSDDEMPSSAIPHQRRSSLNSKQVELENIQIQERIMGDDSFNEGKTDALERDNRVDSMNSSQIEHQQMDDLADSEDEVAVSGFPDNARSRRQLRMVIDPEDDD

SEQ ID NO: 272759 - protein, 103 aa, Glycine max
  unsure (1)..(103): unsure at all Xaa locations
  Clone ID: PAT_MRT3847_88323C.1.pep
MGPPPGGAKGPHGAPGVIFKRGSPPPRPPPQDPHPLDGGPKAFPQRPPPXVLRGGSSPPPLRAPGPPFKXSGPPGVSLNPKPPKKGLFPPEGLPPGGQRPPPW

SEQ ID NO: 272760 - protein, 45 aa, Glycine max
  Clone ID: PAT_MRT3847_88324C.1.pep
NKRNRLDLQSDMRSCHRFFVEPRYCRSKRLSSRYIKDLSKTTIGV

SEQ ID NO: 272761 - protein, 43 aa, Glycine max
  Clone ID: PAT_MRT3847_88325C.1.pep
GTPLIPCRHNEGIYWNVVYPVLPSGVYWMLAGPSTNWVYHSYG

SEQ ID NO: 272762 - protein, 44 aa, Glycine max
  Clone ID: PAT_MRT3847_88326C.1.pep
TIPLKPLFYIKHIRRQYHLRPRASHVLSHVNVHYEVGRVGNVFL

SEQ ID NO: 272763 - protein, 34 aa, Glycine max
  Clone ID: PAT_MRT3847_88327C.1.pep
LKCLKQTKLRDVKSSKMLEKKGIKCTIGLHIMQT

SEQ ID NO: 272764 - protein, 51 aa, Glycine max
  Clone ID: PAT_MRT3847_88328C.1.pep
HKKKLKTGSTAGNPNRFLINGYNICGTTVGIIQWNRLNMTLPFLQGSPDST

SEQ ID NO: 272765 - protein, 121 aa, Glycine max
  unsure (1)..(121): unsure at all Xaa locations
  Clone ID: PAT_MRT3847_88329C.1.pep
IFGFYPPPPPKGASSPPPGGAPWKGPPPPVXGGENPVLFGPLSKNPKAPLGQNKKKNTPPVVIPPPGVGKSPGEXSPPGLGGLAPPPPSGLDASFLRSTHKACNHNIKTNKAAREKKKKNL

SEQ ID NO: 272766 - protein, 48 aa, Glycine max
  Clone ID: PAT_MRT3847_8832C.1.pep
LILCLFTIEQLTLKKNFPPIFPPFQSNGKNTIKVHNFLNLPSFFHNPF

SEQ ID NO: 272767 - protein, 98 aa, Glycine max
  Clone ID: PAT_MRT3847_88330C.1.pep
LYDVNYIVKDSVVQGRAGQSNCLVVNSRNAIRMQHLSDEVYRTTKNTSPRSIVQINLSFRSIFHLSKIVMHNSIKTQSRNHGGWCRKKPLKFNTEVVS

SEQ ID NO: 272768 - protein, 83 aa, Glycine max
  Clone ID: PAT_MRT3847_88331C.1.pep
HLFARVFTRGDERGFPLWKGRFFFKWNFFPQNIIILGVKKTLIPFCLKKKKKKKKKKKKKKKKKKKKKKKKKKKKKKGARSIE

SEQ ID NO: 272769 - protein, 42 aa, Glycine max
  Clone ID: PAT_MRT3847_88332C.1.pep
AVYSSSFKLSTQKYFSLTLLQTKTIPLPFITIYKTPIKIENH

SEQ ID NO: 272770 - protein, 52 aa, Glycine max
  Clone ID: PAT_MRT3847_88333C.1.pep
WFSMHFSSNVSSVLNQHMEYQSEWYQINSNDLLATTEFELMTPSVLYQYSNH

SEQ ID NO: 272771 - protein, 75 aa, Glycine max
  Clone ID: PAT_MRT3847_88334C.1.pep
LHVHKQPSHMRPLLFLALTHTYGRKLPVARIKLKCYNRCDLISVKNAPIDGCKYSRSTIASYRYLYLTSIQTRQF

SEQ ID NO: 272772 - protein, 196 aa, Glycine max
  Clone ID: PAT_MRT3847_88335C.1.pep
MKTALLKQVTSSYSTKIITACLFLFLNCHVGYGQNDFEKFSSLSSPPPPLMTELDACNGVFLTYALLGRVKEYPHVKNTSKQAWAFKAEASLTNVGDEEVQGWKMYVGFQHREILVSADGAVLTDAGDFPAEVGNGTTMMGSTATDLKTAIDTAGDIDQMSVRIQMKGTQFGLGAGATPMPKTIHLENDGFKCPAP

SEQ ID NO: 272773 - protein, 73 aa, Glycine max
  unsure (1)..(73): unsure at all Xaa locations
  Clone ID: PAT_MRT3847_88336C.1.pep
PWNWFNLKTLIPFDIIGRVRILHPPVMTCFPFSFGKKARFVAKHDPDIDEVQPIKLGRVDLVQXIXDWXMTGK

SEQ ID NO: 272774 - protein, 113 aa, Glycine max
  unsure (1)..(113): unsure at all Xaa locations
  Clone ID: PAT_MRT3847_88337C.1.pep
NRTQGNRRAGVELQRTHPTKGRTKTEGTDGISVNSPQTLGCAMNSTFRGRASTDLTLYDLKTXEKRNPACTKATTMLXDPNPGADAWNSHSPMWTRIQWEDMCITGRTVTLLY

SEQ ID NO: 272775 - protein, 129 aa, Glycine max
  Clone ID: PAT_MRT3847_88338C.1.pep
MKCVPSTVFHLLLFIFPLVLSVHLISALSPTGSAKHSIKFILGGQNLGPWKNGVTQVAQAARPRTKGTLVLAANRTNRPDILHGFRRYQGGWDIANRHYWAVSTMIPFHHVLKWLKLIYYYVSSYPNYI

SEQ ID NO: 272776 - protein, 91 aa, Glycine max
  Clone ID: PAT_MRT3847_88339C.1.pep
FALALQASSSSKNSRTCFNVKALNLNSLNYNANIASETEIRSVNAKGKEISALDRDDWNGKFFPCDDELSSIDYSKELTVSASPLVDDEKA

SEQ ID NO: 272777 - protein, 492 aa, Glycine max
  unsure (1)..(492): unsure at all Xaa locations
  Clone ID: PAT_MRT3847_8833C.1.pep
MQKHGFASKRNVLPYQTPRLRDHYVLGKKLGQGQFGTTYLCTHKVTGKLYACKSIPKRKLLCQEDYDDVWREIQIMHHLSEHPNVVQIQGTYEDSVFVHLVMELCAGGEXFDRIIQKGHYSEKEAAKLIKTIVGVVEACHSLGLMHRDLKPENFLFDTPGEDAQMKATDFGLSVFHKPGQAFHDVVGSPYYVAPEVLCKQYGPEVDVWSAGVILYILLSGVPPFWAETEAGIFRQILNGDLDFVSEPWPSISENAKELVKQMLDRDPKKRISAHEVLCNPWVVDDIAPDKPLDSAVLTRLKHFSAMNKLKKMALRVIAERLSEEEIGGLKELFKMIDTDNSGTITFEELKEGLKSVGSNLMESEIKSLMEAADIDNNGSIDYGEFLAATLHLNKMEREENLVAAFAYFDKDGSGYITIDELQQACKDFSLGDVHLDEMIKEIDQDNDGRIDYAEFAAMMKKGDPNMGRSRTMKGNLNFNIADAFGMKDKDSS

SEQ ID NO: 272778 - protein, 160 aa, Glycine max
  Clone ID: PAT_MRT3847_88340C.1.pep
VNQDSMIFLILDFIALLTGLYLLLFGSSASGVTSAQLYFGGATLLLIFPLCIPGIVYARAWFRRTIHSSFQMGSSSFILVHDDDLEMHRELHSCHNSFVRNGDTYSLLSDNGYMFGSQREKDSDMCCETMIVQDHLTVLGEEHPVAVVVRRLDFWLYYAT

SEQ ID NO: 272779 - protein, 329 aa, Glycine max
  Clone ID: PAT_MRT3847_88341C.1.pep
MSTEAAARESLDSDSMKPNYILSQTLSGHKRAISAVKFSSNGRLLASSAADKTLRTYGFTNSDSDSDSLTLSPMQEYEGHEQGVSDLAFSSDSRFLVSASDDKTLRLWDVPTGSLIKTLHGHTNYVFCVNFNPQSNIIVSGSFDETVRVWDVKSGKCLKVLPAHSDPVTAVDFNRDGSLIVSSSYDGLCRIWDASTGHCMKTLIDDENPPVSFVKFSPNAKFILVGTLDNTLRLWNYSTGKFLKTYTGHVNSKYCISSTFSITNGKYIVGGSEDNCIYLWDLQSRKIVQKLEGHSDAVVSVSCHPTENMIASGALGNDNTVKIWTQQKD

SEQ ID NO: 272780 - protein, 363 aa, Glycine max
  Clone ID: PAT_MRT3847_88342C.1.pep
MTSSSLLVSLQVALAIFACIFHAATVTCKPHHRDRTLKIFSSTSNSSKSSHHWIGPIGHRKITVDINGGGHYRSVQDAVNAVPDNNRRNVLIQINAGCYKEKVVVPVTKPYITFEGAGKEVTVIEWHDRASDPGPSGQQLRTYRTASVTVFASYFSARNISFKNTAPAPMPGMQGWQAVAFRISGDKAYFSGCGFYGAQDTLCDDAGRHYFKECYIEGSIDFIFGNGRSMYKDCELHSIATRFGSIAAHDRKEAEEKTGFAFVGCKVTGTGPLYVGRAMGQYSRIVYSYTYFDDIVAHGGWDDWDHADNKNKTVFFGVYKCWGPGAEAVRGVSWARDLNFEAAHPFIRKSFVNGRHWIAPSDA

SEQ ID NO: 272781 - protein, 212 aa, Glycine max
  Clone ID: PAT_MRT3847_88343C.1.pep
MRLSLRHALVFVLIGALWNLQRAEGIRFVIDRDECFSHDVKYEGDTVHVSFVVIKADSPWHYGDEGVDLVVKGPSGEQIQEFRDKTSEKFDFVAHKSGVHKFCFTNKSPYHETVDFDVHVGHFSYFEQHAKDEHFTPLLEQIGKLEEALYNIQFEQHWLEAQTDRQAIVNDAMSRRAVHKAIFESAALIGASALQVYLLQRLFERKLGTSRV

SEQ ID NO: 272782 - protein, 217 aa, Glycine max
  unsure (1)..(217): unsure at all Xaa locations
  Clone ID: PAT_MRT3847_88344C.1.pep
MSSFYMSLNPSISQSCYKPKQFFNLERESTLVGRSPVIQIRCRRVVSACLNVDVDAPDSGKTALEKTKDVIEMEGKFLVGTYARTPVVLERGEGCKLYDVEGREYLDLSAGIAVNALGHGDADWLKAVVEQAGTLTHTSNIFHTIPQVELAKRLVASSFADRVFFANSGTEANEAAIKFXRKYQRDTTTDGKEPXTEFIAFSNCFHGRTPGALALTS

SEQ ID NO: 272783 - protein, 114 aa, Glycine max
  Clone ID: PAT_MRT3847_88345C.1.pep
HLDQHNLQEQKYLLAKFALPPIQDWKKVPLLIASSLAFPSAASFKYLSANWTLLTFSCSWTSMLPYVKSFTVSLPDQFCWLSCISTFQLSSTHHDGVDSHLGKDKLTLERFSLS

SEQ ID NO: 272784 - protein, 137 aa, Glycine max
  Clone ID: PAT_MRT3847_88346C.1.pep
MAASVSTVGAVNGAPLSLNSSGAGASVPSSAFFGTSLKKVIASRVPNVKISSGSFKIVAAEKEIDEKQQTDKNFMTLPNIKVPLILGIWGGKGQGKSFQCELVFAKMGINPIMMSAGELESGNAGEPAKLIRQRYRE

SEQ ID NO: 272785 - protein, 114 aa, Glycine max
  Clone ID: PAT_MRT3847_88347C.1.pep
RVHPRVRTSRAFFSRKTVSSYAASQHSNSYVSPLHLQRLKPLALESLTYIHLMKTMEVRLISMESTALLLVLLQLIHLLLVHLPLLLLPKDFPHCQPIPISLSLPLLSTQLVKP

SEQ ID NO: 272786 - protein, 444 aa, Glycine max
  Clone ID: PAT_MRT3847_88348C.1.pep
PTRSEVLNIYFTVTLQLNLNGSGAGASAPSSAFFGTSLKKVIASRVPNSKVSGGSFKIVAVEEKKEIEETQQTDKDRWKGLAYDISDDQQDITRGKGLVDSLFQAPQDAGTHYAVMSSYEYLSTGLRQYLDNKMDGFYIAPAFMDKLVVHISKNFMTLPNIKVPLILGIWGGKGQGKSFQCELVFAKMGINPIMMSAGELESGNAGEPAKLIRQRYREAADMIKKGKMCALFINDLDAGAGRLGGTTQYTVNNQMVNATLMNIADNPTNVQLPGMYNKEENPRVPIIVTGNDFSTLYAPLIRDGRMEKFYWAPTREDRIGVCTGIFRTDGIPEQDIVKLVDTFPGQSIDFFGALRARVYDDEVRKWISGVGVDGIGKKLVNSKDGPPTFEQPKMTLEKLLTYGNMLVQEQENVKRVQLADKYLNEAALGNANEDAINRGTFFQS

SEQ ID NO: 272787 - protein, 478 aa, Glycine max
  Clone ID: PAT_MRT3847_88349C.1.pep
MAASVSTVGAVNGAPLSLNSSGAGASVPSSAFFGTSLKKVIASRVPNVKISSGSFKIVAAEKEIDEKQQTDKDRWKGLAYDVSDDQQDITRGKGLVDSLFQAPQDTGTHYAIMSSYEYLSTGLKQYNLDNNMDGFYIAPAFMDKLVVHISKNFMTLPNIKVPLILGIWGGKGQGKSFQCELVFAKMGINPIMMSAGELESGNAGEPAKLIRQRYREAADMIKKGKMCALFINDLDAGAGRLGGTTQYTVNNQMVNATLMNIADNPTNVQLPGMYNKEENPRVPIIVTGNDFSTLYAPLIRDGRMEKFYWAPTRDDRVGVCNGIFRTDNVPKDDIVKLVDTFPGQSIDFFGALRARVYDDEVRKWISVVGVDFIGKKLVNSKEGPPTFDQPKMTLSKLLEYGNMLVQEQENVKRVQLADKYLKEAALGDANQDSINRGTFYGKAAQQVNIPVPEGCTDPNASNFDPTARSDDGTCLYTP

SEQ ID NO: 272788 - protein, 123 aa, Glycine max
  unsure (1)..(123): unsure at all Xaa locations
  Clone ID: PAT_MRT3847_8834C.1.pep
MLDIVCKKYRIMVSGNGLFYPVVGFASIVLFIYMSFGDVRFGFEEEAELAFVERNGTQFMVGXEKAFYINGWNSYWLMGFNLWMSSRPKGSXMLRAGAKMGLTVCGTWALNDGDYRALERGPG

SEQ ID NO: 272789 - protein, 478 aa, Glycine max
  Clone ID: PAT_MRT3847_88350C.1.pep
MAASVSTIGAVNRAPLSLNSSEAGDSVPSSAFFGTSLKKVTASRVPNVKISSGSFKIVAAEKEIDEQQQTNKDRWKGLAYDISDDQQDITRGKGMVDSLFQAPQETGTHYAVMSSFEYLSTGLKQYNLDNNMDGFYIAPAFMDKLVVHITKNFMTLPNIKVPLILGIWGGKGQGKSFQCELVFAKMGINPIMMSAGELESGNAGEPAKLIRQRYREAADIISKGKMCCLFINDLDAGAGRLGGTTQYTVNNQMVNATLMNIADNPTNVQLPGMYNKQENPRVPIIVTGNDFSTLYAPLIRDGRMEKFYWAPTRDDRVGVCKGIFRTDNVPEDEIVKLVDTFPGQSIDFFGALRARVYDDEVRKWISGVGVDLIGKKLVNSKEGPPTFDQPKMTLSKLLEYGNMLVQEQENVKRVQLADKYLNEAALGDANQDAIKRGTFYGKAAQQVKIPVPEGCTDPNASNFDPTARSDDGTCLYTP

SEQ ID NO: 272790 - protein, 61 aa, Glycine max
  unsure (1)..(61): unsure at all Xaa locations
  Clone ID: PAT_MRT3847_88351C.1.pep
KIKVLQDEHGAVSXGKKGPSGVTSKKPGTALFIGIYDYPSHPGQCNLVFERFEHYVLDQGL

SEQ ID NO: 272791 - protein, 443 aa, Glycine max
  Clone ID: PAT_MRT3847_88352C.1.pep
MAASVSTVGAVNRALLNLNGSGPGVSAPSSSFFGSSLKKVIGSRVPNTKISSGSFKIVAVEEKKEIEETQQTDKDRWKGLAYDISDDQQDITRGKGLVDSLFQAPQDAGTHYAVMSSYEYLSTGLRQYLDNNMDGFYIAPAFMDKLVVHITKNFMTLPNIKVPLILGIWGGKGQGKSFQCELVFAKMGINPIMMSAGELESGNAGEPAKLIRQRYREAADLIKKGKMCALFINDLDAGAGRLGGTTQYTVNNQMVNATLMNIADNPTNVQLPGMYNKEENPRVPIIVTGNDFSTLYAPLIRDGRMEKFYWAPTRDDRIGVCTGIFRTDSIPEQDVVKIVDTFPGQSIDFFGALRARVYDDEVRKWISGVGVDGIGKKLVNSKDGPPTFEQPKMTLEKLLTYGNMLVQEQENVKRVQLADKYLNEAALGNANEDAINRGTFFQS

SEQ ID NO: 272792 - protein, 411 aa, Glycine max
  Clone ID: PAT_MRT3847_88353C.1.pep
MAASVSTVGAVNRALLNLNGSGAGASAPSSAFFGTSLKKVIASRVPNSKVSGGSFKIVAVEEKKEIEETQQTDKDRWKGLAYDISDDQQDITRGKGLVDSLFQAPQDAGTHYAVMSSYEYLSTGLRQYLDNKMDGFYIAPAFMDKLVVHISKNFMTLPNIKVPLILGIWGGKGQGKSFQCELVFAKMGINPIMMSAGELESGNAGEPAKLIRQRYREAADMIKKGKMCALFINDLDAGAGRLGGTTQYTVNNQMVNATLMNIADNPTNVQLPGMYNKEENPRVPIIVTGNDFSTLYAPLIRDGRMEKFYWAPTREDRIGVCTGIFRTDGIPEQDIVKLVDSVGKKLVNSKDGPPTFEQPKMTLEKLLLYGNMLVQEQENVKRVQLADKYLNEAALGNANEDAIQRGTFFQS

SEQ ID NO: 272793 - protein, 141 aa, Glycine max
  Clone ID: PAT_MRT3847_88354C.1.pep
KKIFPFYKKNGSPPCLGGGKILTFSPPNPGRGPPFFFFFFPISQVLPGPPPTFWGGSKHFFGVFPLKTFGPLFTRQIAFSHFFSKGFFSRNFSTGFSSPMPPGSNGFPGFFIPPLSPFSPKIGWGFGVFWLRRIFGGPTPP

SEQ ID NO: 272794 - protein, 92 aa, Glycine max
  Clone ID: PAT_MRT3847_88355C.1.pep
YCIEISLHCLMLSLYCFDVASLFIVLYYGKCILCDEIVQKECKPNGSLVVWLLLSTMVVQDQVKFLITLADTACTIARLTGFHFPKQLIECP

SEQ ID NO: 272795 - protein, 70 aa, Glycine max
  Clone ID: PAT_MRT3847_88356C.1.pep
IRITFSFTNSRGFYQLGQPGDQQVGSQMKALENSVEFLKWVTSKYNSQLLEIKKSVEQINSNKQMLGKWM

SEQ ID NO: 272796 - protein, 86 aa, Glycine max
  Clone ID: PAT_MRT3847_88357C.1.pep
MAKPHHLFLLLLLLCATLEFSSSSPSDHLYNVGELVPLFVNKVGPFNNPSETYEYYDLPFCTPDPIVRKKESLGEVLNGDRLSNAL

SEQ ID NO: 272797 - protein, 53 aa, Glycine max
  Clone ID: PAT_MRT3847_88358C.1.pep
TTTTKRLNGGSRISEIQSSGLATIIRTFARQIVISQTLYLSGPNIPIGSGWVV

SEQ ID NO: 272798 - protein, 60 aa, Glycine max
  Clone ID: PAT_MRT3847_88359C.1.pep
MWKGGITSYRICDRRACSQLFGALPHSLQAFRSVVLLASPLVLDGSQVAVGLLSFLMFVV

SEQ ID NO: 272799 - protein, 81 aa, Glycine max
  Clone ID: PAT_MRT3847_8835C.1.pep
GSRRLKKENGVLNSELTSMKRKCKELLDLVATYSSHAKEEKKDERPMLFGVRLEVQGGREMKRNRAEMSESTSIMLSQSCK

SEQ ID NO: 272800 - protein, 59 aa, Glycine max
  Clone ID: PAT_MRT3847_88360C.1.pep
FGSSLNVMQILLCRPMNYPMPECSSRPNFFPLRKEDHFLLFLLRIGKVLICHLRGKFNF

SEQ ID NO: 272801 - protein, 77 aa, Glycine max
  Clone ID: PAT_MRT3847_88361C.1.pep
ALIQGPGISGGWSHDSRIGKFAKPRGAELELSQFPRKRFFGKGRREWRQLLRRSEGENENEKRKRKKKRKRKNGEKE

SEQ ID NO: 272802 - protein, 105 aa, Glycine max
  unsure (1)..(105): unsure at all Xaa locations
  Clone ID: PAT_MRT3847_88362C.1.pep
MSTESACFYIKGNPINXQKLITLMCAIVLREHPSSTIVTDSRTIMALTIFIFYLFGHHFLYRVSYINVIDMVLHLNNDSIXTHLMIETSCHGALKENHFLDDCAY

SEQ ID NO: 272803 - protein, 66 aa, Glycine max
  Clone ID: PAT_MRT3847_88363C.1.pep
NRKGCVFFLCMKMSLSPAGGSCAGPAQRKTKQLQNKRPRHKSNMCLAHALTYPYGTVRLLVVLLLC

SEQ ID NO: 272804 - protein, 63 aa, Glycine max
  Clone ID: PAT_MRT3847_88364C.1.pep
EIYALSRPGFCHPLIVRCMLPPCHCFLSHGGTIAYPLLCPSLAASFAECDRFKPLFYEMSRKV

SEQ ID NO: 272805 - protein, 48 aa, Glycine max
  Clone ID: PAT_MRT3847_88365C.1.pep
THLYSNARNDWIPSNSRTQEQKFEDATSLTNKHKMSSHGQGTSTEHLE

SEQ ID NO: 272806 - protein, 52 aa, Glycine max
  Clone ID: PAT_MRT3847_88366C.1.pep
MVKICCIGAGYVGGPTMAVIALKCPSIEVAVDDLSKFRIATWNSDHLSIYEP

SEQ ID NO: 272807 - protein, 62 aa, Glycine max
  Clone ID: PAT_MRT3847_88367C.1.pep
IFPNLYMLFLRIFKIGGFFYKRCVIWYVYRNEATCALYNRRRGFFLMERKISVCKVGPAILI

SEQ ID NO: 272808 - protein, 49 aa, Glycine max
  unsure (1)..(49): unsure at all Xaa locations
  Clone ID: PAT_MRT3847_88368C.1.pep
NGVRIFIPNACISESHTHTNHSTETSXSYKGLGTTHTPSHVSAVVFLIP

SEQ ID NO: 272809 - protein, 46 aa, Glycine max
  unsure (1)..(46): unsure at all Xaa locations
  Clone ID: PAT_MRT3847_88369C.1.pep
GDQVHGIRTSHYPHTSDACSENYXRPETVALRCAAXXALGSSRRTA

SEQ ID NO: 272810 - protein, 319 aa, Glycine max
  Clone ID: PAT_MRT3847_8836C.1.pep
MPKERRDRSLSHESSRASPYPSSSSRVGRSSLKESEENVKEWEEARCPVCMEHPHNAVLLICSSHEKGCRPYMCNTSYRHSNCLDQFCKSFADTSSTIPQVEGQISDTFESRIDVPEDRNEGTVQSRIDVPEDRSEGLVTMQALSCENDAKSKLVCPLCRGKIKEWKVVEAARHFMNEKSRNCSCETCNFSGTYPDLRNHARLEHPLERPSAVDPERQRSWRRLERQRDLGDLLSTLQTSFGVDDPIDDGGLLAVFFLILQPASMSRGTTLQMRIRRPTTTLWGENYDGQSGSDDANESSDGGSDNRPRRVRRRRTPPP

SEQ ID NO: 272811 - protein, 54 aa, Glycine max
  Clone ID: PAT_MRT3847_88370C.1.pep
CKFFIGVAIQVLHVEEWETNLISPLFLVIQGTSIVTRRVMLQAITHLGDTRYIF

SEQ ID NO: 272812 - protein, 97 aa, Glycine max
  unsure (1)..(97): unsure at all Xaa locations
  Clone ID: PAT_MRT3847_88371C.1.pep
KTLIDLPVIDISSGHASDEFYMGQKDGGDFWTSDAGPXRHLIGVGKKLEEIAKAFIVITRHMPLISRHGPVKMRYPLLYPSSEXGLLFRGIPLSLSI

SEQ ID NO: 272813 - protein, 112 aa, Glycine max
  Clone ID: PAT_MRT3847_88372C.1.pep
WVGPKKQSYSLKKDLPFWGSTPPCPKNKNWGGPQTPRGGPSPTIFGAFFKNTWGGNSYPSLKKLLSPKRGLPFLPPCPVFSLDEKDNFTSGTTGQNGPRFYTSIIPPWGGTP

SEQ ID NO: 272814 - protein, 89 aa, Glycine max
  Clone ID: PAT_MRT3847_88373C.1.pep
HRRRFLVSPRIIRFRSVLLRSTPHHNESNRISRNNHVIFDHHLFSPINHEIFDLLLNLHSLTPASNTHHARKLFFFFNFALLWIFRVDL

SEQ ID NO: 272815 - protein, 66 aa, Glycine max
  Clone ID: PAT_MRT3847_88374C.1.pep
SLSSYYLFYFSLRWFLAHNFLWSEETSAHSPKVAHTFLLMLKVVRDLGKNMFIRTWILTGRETNGV

SEQ ID NO: 272816 - protein, 56 aa, Glycine max
  Clone ID: PAT_MRT3847_88375C.1.pep
NLFSTFIVNTIQSQNSLAQILTRSFFHSRITQQLNSLTPAFLLPSKSSIPFSQFFA

SEQ ID NO: 272817 - protein, 59 aa, Glycine max
  Clone ID: PAT_MRT3847_88376C.1.pep
GVPFTKGGLGGVSLVLESFFIVPSIKFSYFFKKFFYRRLKIVGFSKPKLSFFFFCRFYF

SEQ ID NO: 272818 - protein, 49 aa, Glycine max
  Clone ID: PAT_MRT3847_88377C.1.pep
SFQEILDASYKFDEKLLLGVGGFGRVYNGTLAAGSNVAVTRGNAALRAR

SEQ ID NO: 272819 - protein, 61 aa, Glycine max
  Clone ID: PAT_MRT3847_88378C.1.pep
FFFFFFFFFFFFFFFFFFFLAIKILLSHHLFVTSHCKKDVKKKGIRIELRWNLEVISMITK

SEQ ID NO: 272820 - protein, 93 aa, Glycine max
  Clone ID: PAT_MRT3847_88379C.1.pep
MLGLFEVMGALLEDPYRAQTHPQPCTDTPWPGVECELSNSNQPIFHVTKIHIGADIVFPFQPCKPSAYLSQSLMKLKYIKTLSIFDCFGASPV

SEQ ID NO: 272821 - protein, 111 aa, Glycine max
  unsure (1)..(111): unsure at all Xaa locations
  Clone ID: PAT_MRT3847_8837C.1.pep
KECXKALELNXXYIKALVRRGEAHKKLEHFEEAIEDMKKILEIDLSNDQARKTIRQLEPLAAEKREKMKEEMIAKLKDMGNSVLGRFGMSVDNFKAVKDPNTGSYSISFQR

SEQ ID NO: 272822 - protein, 84 aa, Glycine max
  Clone ID: PAT_MRT3847_88380C.1.pep
NFFTPPIINTSLHTTLITDYFLKTFPPISLQTIYFMQTVSGCFNLYFRGTLTSSYVGEVREFPFYDLLTTMQAHKQAHKSAQRF

SEQ ID NO: 272823 - protein, 70 aa, Glycine max
  unsure (1)..(70): unsure at all Xaa locations
  Clone ID: PAT_MRT3847_88381C.1.pep
MQKDDKCSWCTEVTLDYLTTLDLLCLQRASEAFSNKIVXFDDKLVLANTQKFFDGNCSRDSWLPHFGNWL

SEQ ID NO: 272824 - protein, 63 aa, Glycine max
  Clone ID: PAT_MRT3847_88382C.1.pep
FEPLQLWLSPHVLHFFKIMSNILMILVTHFLYDLNVIESKKNYIMHQFHGITPQNRNAKSKKL

SEQ ID NO: 272825 - protein, 49 aa, Glycine max
  Clone ID: PAT_MRT3847_88383C.1.pep
LLSAYNNVFHFLRQFSFLQHHVLAVVACETVLLISLFICSSLLCLNLHR

SEQ ID NO: 272826 - protein, 202 aa, Glycine max
  Clone ID: PAT_MRT3847_88384C.1.pep
AQAFQINYYPYCHSSAYTLHPNNHIDAYGVGIKLVEDVKKGAQELLNLSIEEKKKLWQKPGDTEGFGQMFVYKEGPSDWVHLVYIFTLPSHLRNPHLFPNISMPFRENLEDYCIKMRDLAINIFVLIGKALGIELKDIKESLGEGGQSIRFNYYLPCPQPENVLGLNAHTDGSALTILLQGNEVEGLQVKKDGTWIPFSPFE

SEQ ID NO: 272827 - protein, 119 aa, Glycine max
  unsure (1)..(119): unsure at all Xaa locations
  Clone ID: PAT_MRT3847_88385C.1.pep
EIWCNSDAAEAILLGFQHYLVMLGTTVLIPTALVPQMGGGNVSINKLNILKIPYXISNGIILKGLSNHLIEVALFSXPKFITYKNIILSCRFNDEPYPIEKFKMIMRATQSALIVASTL

SEQ ID NO: 272828 - protein, 70 aa, Glycine max
  Clone ID: PAT_MRT3847_88386C.1.pep
FSTVLRLLLSFGVFVAAYERLGAVGSLSLLGLGFVFSSKNMDFSFSLFFPSGAFFTRGVLKRLKTVVAVG

SEQ ID NO: 272829 - protein, 83 aa, Glycine max
  Clone ID: PAT_MRT3847_88387C.1.pep
PFLFLTPFSRPIPLGGKGFLNNPPWGWVKKQKGWVPKNRGGGKKGWTWVPPFLVQTGILKKKKKTISPFVLLSSREKWKIMYP

SEQ ID NO: 272830 - protein, 37 aa, Glycine max
  unsure (1)..(37): unsure at all Xaa locations
  Clone ID: PAT_MRT3847_88388C.1.pep
TLXPIVSSXNPSPISFRXIKILLHDLEVVPFPKSRVR

SEQ ID NO: 272831 - protein, 99 aa, Glycine max
  unsure (1)..(99): unsure at all Xaa locations
  Clone ID: PAT_MRT3847_88389C.1.pep
MRELNEGKPGFSDRHKELQTDHGXLASEPSRSFKLEGAVCVIGQNLQTNDTLQTELVLVQRNNAAXSKLAQTQNRWPNSGGLRGMLVGSPTPSLNANDA

SEQ ID NO: 272832 - protein, 49 aa, Glycine max
  Clone ID: PAT_MRT3847_88390C.1.pep
KKKNCPFKSPPKKTRAISRRLIKPPAPFKPKREKKKKLIFPLRKKAIKG

SEQ ID NO: 272833 - protein, 87 aa, Glycine max
  unsure (1)..(87): unsure at all Xaa locations
  Clone ID: PAT_MRT3847_88391C.1.pep
VXLSLXXXXKCFSTXTLXQCMCSXXIHKGFXXRPIXHVXRXRLSXREIKNLKDXXPSTSIIDXMPLHEXTXXIEDQLEXAVXPNTKX

SEQ ID NO: 272834 - protein, 51 aa, Glycine max
  Clone ID: PAT_MRT3847_88392C.1.pep
IWHLSDRSYIYASKGGSKVVFYVFSILPSNVFCSISLYPIINKGQIHLETV

SEQ ID NO: 272835 - protein, 60 aa, Glycine max
  Clone ID: PAT_MRT3847_88393C.1.pep
CIGHIFRRSCCVSLATRPLLILLKIRRAEGCFHLITAQRMAVIPPLFPYSQLVLAPLITC

SEQ ID NO: 272836 - protein, 79 aa, Glycine max
  Clone ID: PAT_MRT3847_88394C.1.pep
LPTEEDHDALRGLSASIVSIHFLVRVGAPSCAWHPYGIGGRLFILNRLLQVANGGCLLRVHMTTLRNVDLTLSASPSAT

SEQ ID NO: 272837 - protein, 39 aa, Glycine max
  Clone ID: PAT_MRT3847_88395C.1.pep
MSSLVHYMLLVNQLSQKLSWVKLHKWFLCFYRVHLFISC

SEQ ID NO: 272838 - protein, 48 aa, Glycine max
  Clone ID: PAT_MRT3847_88396C.1.pep
KKIFIGRISPSKLSILWSPKIDFPWDVLVGVLPKFNDRPRTFFNVKEN

SEQ ID NO: 272839 - protein, 80 aa, Glycine max
  Clone ID: PAT_MRT3847_88397C.1.pep
ITHFQCLRMSRFQPGSSKEWMLAVGQVALWGYVVIPQGYNHAQYLAWHSPIFCLRCPEAKRARWWSVRSSVPAPECAREG

SEQ ID NO: 272840 - protein, 47 aa, Glycine max
  Clone ID: PAT_MRT3847_88398C.1.pep
LNSTLFTTPPLNLFPLHNITQISERIKIKTKTHALHFLASLSNNLFS

SEQ ID NO: 272841 - protein, 56 aa, Glycine max
  unsure (1)..(56): unsure at all Xaa locations
  Clone ID: PAT_MRT3847_88399C.1.pep
SIIVXXSSITHIKIQINLCCYSTSSKFVKGHVHFLSSNQLQDLLKDYQFKNILVLX

SEQ ID NO: 272842 - protein, 352 aa, Glycine max
  Clone ID: PAT_MRT3847_8839C.1.pep
MKRASRETRTPPTPPTTIPTASKPPATPIWPVKATTVGPASRKNRIAPNRVIPRSRRSKSRNTMHFCISCIETFQKMVVIEQEESEHRNANPSNDASDGFETASDTDLASDGDDGGAGSPEEQNHIEQSHTEQNHTEQSHTEKHQQQQQTEQEPEHDDPQSTESSENNALINEEESRQKALDQANEAKVEGNKLFVEGKYEEALLQYELALQVASDMPSSVEIRSICHSNRGVCFLKLGKYDNTIKECTKALELNPVYVKALVRRGEAHEKLEHFEKAIDDMKKILEIDPSNDQARKTIRRLETLAAEKREKMIAQVKDMGNSFLRYLGLKENNFKAVKDPNTGSYSISFQR

SEQ ID NO: 272843 - protein, 226 aa, Glycine max
  Clone ID: PAT_MRT3847_883C.1.pep
PRVRKGPHYNTIHLDRVNIRWEKDLDEMDMIVLSFGKWFMAPSVYYEGEKVIGCLNHPVSNCTTEIGFYGPIRRALRTALNSIIERKVIKGNGVDVILRTYAPSHFEGDWDKGGSCAKTKPYGVWERQLEGKDAEIRRIELEEVENAKAKAKNFRGFRMEVMDVTKLALLRPDGHPGAYMNPFPFANGVPKRVQSDCVHWCLPGPIDTWSEIFLQMLENMARAAKE

SEQ ID NO: 272844 - protein, 125 aa, Glycine max
  unsure (1)..(125): unsure at all Xaa locations
  Clone ID: PAT_MRT3847_88400C.1.pep
MTVAAGIGYALVALGPSLSLFVSVISKKPFLILTVLSSTLLWLISLIVLSGIWRGVLXILIFSSVAFQEALRLFFWKIYKRLEDMLDAFADRVSKPHLHLTDKMLIALAGGLGHGVAHAVVFCIS

SEQ ID NO: 272845 - protein, 104 aa, Glycine max
  Clone ID: PAT_MRT3847_88401C.1.pep
YFVDRCSKVPFFLLSAIIALAFVTIHTFSMVIAFNGYSEGNKVDQYFVPIVHVVAGMVTLVNLAPGGCAVGIPLLYLVAILTLIHCGRMVWRKLTENPIRLVHS

SEQ ID NO: 272846 - protein, 44 aa, Glycine max
  Clone ID: PAT_MRT3847_88402C.1.pep
VNLAPGGCAVGIPLLYLVAILTLIHCGRMVWRKLTENPIRLVHS

SEQ ID NO: 272847 - protein, 249 aa, Glycine max
  Clone ID: PAT_MRT3847_88403C.1.pep
MTVAAGIGYALVALGPSLSLFVSVISKKPFLILTVLSSTLLWLISLIVLSGIWRGVLPLSTTASWPFGILIFSSVAFQEALRLFFWKIYKRLEDMLDAFADRVSKPHLHLTDKMLIALAGGLGHGVAHAVFFCISLLTPAFGPATYFVDRCSRVPFFLLSAIIALAFVIIHTFSMVIAFNGYTEGNKVDQYFVPIVHVVAGMVTLVNLAPGGCAVGIPLLYLVAILTLIHCGRMVWRKLTENPIRPVHS

SEQ ID NO: 272848 - protein, 70 aa, Glycine max
  Clone ID: PAT_MRT3847_88404C.1.pep
KGVTDYPHSIADDPASVLSAFNWLLPGTVSISAGLFTSTPTEADAVPAQAFQIGTKKVHDIPDEVAPKKT

SEQ ID NO: 272849 - protein, 63 aa, Glycine max
  Clone ID: PAT_MRT3847_88405C.1.pep
FFFFFFFFFFFFFFFFFFFFFFFFFKKKKGLMGLMAGGAKGRGKTQKGPQGGGGGGFYFTKKI

SEQ ID NO: 272850 - protein, 78 aa, Glycine max
  Clone ID: PAT_MRT3847_88406C.1.pep
GSGMVGSFTDQALCLCLWLSSFIDTGTKGVRSGQALWFDGGLLLWVELSALESEREQCFYATSPRGAMSMQVGQPCMV

SEQ ID NO: 272851 - protein, 64 aa, Glycine max
  Clone ID: PAT_MRT3847_88407C.1.pep
LKSIIGFCKDMYVQKIVMMTIEDDADNNLVLRRCAEADQGLAKFTCTSTHRINGIKRKARKRRQ

SEQ ID NO: 272852 - protein, 85 aa, Glycine max
  unsure (1)..(85): unsure at all Xaa locations
  Clone ID: PAT_MRT3847_88408C.1.pep
XLXGXXSXXXXXXXXXXXVXVXXNXXXXXLXXXXXXXXXXXXXXXXXXXXXXXXXVXXXXXLXXXXXXXXXLXKXXXXXWXXNXL

SEQ ID NO: 272853 - protein, 100 aa, Glycine max
  Clone ID: PAT_MRT3847_88409C.1.pep
GEAKIFYYNFIRPTINTLRIVGQKRNPREPETKPTQIPNLKPPPDNPLKKLNLIINPNLRGHMPNFSSFHGIHRFPPRGSGENHLSHRNPGFYHRRILHL

SEQ ID NO: 272854 - protein, 279 aa, Glycine max
  unsure (1)..(279): unsure at all Xaa locations
  Clone ID: PAT_MRT3847_8840C.1.pep
MGSNQAAISFLTNVARAAFGLGAAATALSSSLYTVDGGQRAVLFDRFRGILDSTVGEGTHFLVPWVQKPYIFDIRTRPHTFSSVSGTKDLQMVNLTLRVLSRPDTEKLPTIVQNLGLEYDEKVLPSIGNEVLKAVVAQFNADQLLTDRSQVFVMVLDRXIRRDKVFTMVFDDVAITHVSYIRRSSHFIMEQQDVQNNADRLRLVVMPPDQERRAAIIRAEGESDAAKLISDATASAGMGLIELRRIEASREVAATLAKSPNVSYLPGGQNLLMALGPSR

SEQ ID NO: 272855 - protein, 125 aa, Glycine max
  unsure (1)..(125): unsure at all Xaa locations
  Clone ID: PAT_MRT3847_88410C.1.pep
VLVVPVVRPHGGSFLRDAVVAAVAARLGVSLALLVGRXAWSSRCWLCGSPPRFLRRGGCFGCGGCCSSSVSACPRVRCCXXWCLVCSRSRRPFPSSLPGCVLCPVCVFGLSSFAXVFLGFLTRQP

SEQ ID NO: 272856 - protein, 60 aa, Glycine max
  Clone ID: PAT_MRT3847_88411C.1.pep
ILRMITTNPWQTATTWTILFYFKNLSSSLNYIWITSADVPHPTNLHFARKLVYLDTMDIA

SEQ ID NO: 272857 - protein, 182 aa, Glycine max
  Clone ID: PAT_MRT3847_88412C.1.pep
MASREREGEPLSPTGKLFHEPSLNCYVIAIMGCKTSINPQVIREGLCQTLLKHPRFTSKLVKKGRKTKWIPTKVDLDNHIIVPEIDSNLEYPDRFVEDYVSHFTKTPLDQSKPLWELHLLNIKTSDAEAVSVFRIHHSIGDGASLISLLLAATRKTSDPNALPTVPIPKKDTSHQRSSSPFR

SEQ ID NO: 272858 - protein, 80 aa, Glycine max
  Clone ID: PAT_MRT3847_88413C.1.pep
CVGLFLGRLACSFPGPRVLCAAVAAFLGFRFLLSFSPALCVPLSCLLSVGFGVFLCPCPPPSVVFSRVISRVGPPGVFGP

SEQ ID NO: 272859 - protein, 95 aa, Glycine max
  Clone ID: PAT_MRT3847_88414C.1.pep
IWGWVGVKTNNGLSRLGMPCRAVPSIYKKRTSHKHTGRNKPHWTGLFRGSGYFMQHHCQGYDGNSNRGVALCLLVSRLHRQRANVQLAQGLPQGH

SEQ ID NO: 272860 - protein, 86 aa, Glycine max
  Clone ID: PAT_MRT3847_88415C.1.pep
LEPMKCNRLAIHVQHLLNTPIMLKNKIEDTPIWSEEINDGRFFEAINGKKFYHVCTAPVKYDPRWSSDKDVAFIVTGAQLHVKKHE

SEQ ID NO: 272861 - protein, 69 aa, Glycine max
  Clone ID: PAT_MRT3847_88416C.1.pep
LLISQAQKRDNAVLSAIHMTEMVNETNFTLAIEVQPLEEETEENGKYNSSSVFLFHKFEVERGKTHTND

SEQ ID NO: 272862 - protein, 105 aa, Glycine max
  unsure (1)..(105): unsure at all Xaa locations
  Clone ID: PAT_MRT3847_88417C.1.pep
PKXSPMRVFVLPDHTCPNTGVWGXXIRCMLMITHXEGRXXXXMASQGIMPETDRALDMKSXSMQSXKPIWKLXTQDAGXIXGSXQLXQWSYHFSSFHXRXPXXIF

SEQ ID NO: 272863 - protein, 46 aa, Glycine max
  unsure (1)..(46): unsure at all Xaa locations
  Clone ID: PAT_MRT3847_88418C.1.pep
QLXXXFPPRMTHIVXXIGIXPASXQKFGXKLCPKLXPINEKMSACV

SEQ ID NO: 272864 - protein, 54 aa, Glycine max
  Clone ID: PAT_MRT3847_88419C.1.pep
KISLTQIKLFSVNQNYADHTNEFYCRNKTRDTPVCDVVMEDVSTSKKHIRERLR

SEQ ID NO: 272865 - protein, 62 aa, Glycine max
  Clone ID: PAT_MRT3847_8841C.1.pep
YILCPPVSRENMGGGKLVSSDQCHNANEFINQIKARQSFQERKPQTKQPSCSLDAPTFGNFF

SEQ ID NO: 272866 - protein, 92 aa, Glycine max
  Clone ID: PAT_MRT3847_88420C.1.pep
GAAIYTPVGGMLWLDPKAQRCTCQCGIWPVPLVPSDSPRLMESMAAASLPLPTPPPAQGLLPHLSREKLAFLSKATGSQCSFRVHKDLSGPL

SEQ ID NO: 272867 - protein, 34 aa, Glycine max
  Clone ID: PAT_MRT3847_88421C.1.pep
AWADYKKATYSLRLGDTRIQLFTNRLTTNHHPKV

SEQ ID NO: 272868 - protein, 129 aa, Glycine max
  Clone ID: PAT_MRT3847_88422C.1.pep
MALQWLILTYVVAAEAAVAILLTLPTPKLLRDRFASLVSLILQPALFIVPFAGFQLLDIYWKNEHRLMCTSEVCTAAERDRYEKSIYKAQRNVILCVTACLLYWSISRICKYQKEIQSLEEGEKRIKSH

SEQ ID NO: 272869 - protein, 45 aa, Glycine max
  Clone ID: PAT_MRT3847_88423C.1.pep
GQLKNLHKFSFWMCNVNEAVKNITIQFSKVFPNLEEMNIYYCDIV

SEQ ID NO: 272870 - protein, 43 aa, Glycine max
  Clone ID: PAT_MRT3847_88424C.1.pep
VHKFPDLGKEFNLEANPTFFFFKKRKKIPKVLGAKKDELQKKI

SEQ ID NO: 272871 - protein, 85 aa, Glycine max
  Clone ID: PAT_MRT3847_88425C.1.pep
PSSILLHQLPFSLSVCCLLNLASPDLFLYLEVSTIYASVHYEILTHSHFEQIHRPIASQTRSRKIAYQFLHLSKKKTRQCYFPKN

SEQ ID NO: 272872 - protein, 87 aa, Glycine max
  Clone ID: PAT_MRT3847_88426C.1.pep
YSEFSGQKPARSPEKSSLSQTCSLLSHYIKEKASFGDLTLGMTSCGSPETSCHSVTTMNLVTPKENNVAPKTLTAMDLLSAQAYSYG

SEQ ID NO: 272873 - protein, 125 aa, Glycine max
  Clone ID: PAT_MRT3847_88427C.1.pep
APACYDVMVDVPFPIQRELNALVANVERTKEIDACDESICGIIRKIHEHRPRVRFFVGFSQSPLEFIKALVESQNKDLKVLLGESRHNAEKDRKSDFFKQPWVEDAIVRYLNRKPAAGSDAPGST

SEQ ID NO: 272874 - protein, 83 aa, Glycine max
  Clone ID: PAT_MRT3847_88428C.1.pep
LVVNPPIKVPVSPKQLVGVKKVPFLKDQKGFQIFPPEVEGSLSISGKPVSQTFGGKKKTPPLFKPFENLSLLGGFGFFPPPAF

SEQ ID NO: 272875 - protein, 376 aa, Glycine max
  Clone ID: PAT_MRT3847_88429C.1.pep
MASLSVLRHNHLFSGPLPARPKPTSSSSSRIRMSLRENGPSIAVVGVTGAVGQEFLSVLSDRDFPYRSIHMLASKRSAGRRITFEDRDYVVQELTPESFDGVDIALFSAGGSISKHFGPIAVNRGTVVVDNSSAFRMDEKVPLVIPEVNPEAMQNIKAGTGKGALIANPNCSTIICLMAATPLHRRAKVLRMVVSTYQAASGAGAAAMEELELQTREVLEGKPPTCKIFNRQYAFNLFSHNASVLSNGYNEEEMKMVKETRKIWNDKDVKVTATCIRVPIMRAHAESVNLQFERPLDEDTARDILKNAPGVVVIDDRESNHFPTPLEVSNKDDVAVGRIRQDLSQDGNQGLDIFVCGDQIRKGAALNAIQIAEMLL

SEQ ID NO: 272876 - protein, 88 aa, Glycine max
  Clone ID: PAT_MRT3847_8842C.1.pep
LSNLTGLRLALQTFWYLNSNHKPFDQSPLPSHPPLIGSFFTPPLRAHFKVFGGPPFGPPPPPPPPPPPPPPPPPTQRRRTSYSEDGKP

SEQ ID NO: 272877 - protein, 379 aa, Glycine max
  Clone ID: PAT_MRT3847_88430C.1.pep
MMMSSLSVSRHNHLFSGPLPARPKPKPSFSSSRIRMSLQENGPSIAVVGVTGAVGQEFLSVLSDRDFPYSSIKMLASKRSAGRRITFEDRDYVVEELTAESFDGVDIALFSAGGSISKYFGPIAVDRGTVVVDNSSAFRMDENVPLVIPEVNPEAMQNIKAGTGKGALIANPNCSTIICLMAATPLHRRAKVLRMVVSTYQAASGAGAAAMEELQLQTREVLEGKPPTCKIFNRQYAFNLFSHNASVLSNGYNEEEMKMVKETRKIWNNKDVKVTATCIRVPVMRAHAESVNLQFETPLDEDTARDILKNAPGVVVIDDRESNHFPTPLEVSNKDDVAVGRIRQDLSQDGNQGLDIFVCGDQIRKGAALNAIQIAEMLL

SEQ ID NO: 272878 - protein, 176 aa, Glycine max
  Clone ID: PAT_MRT3847_88431C.1.pep
FLASGLKHGQNSTKTLARTSNFPCTLYHCMIFDPLSHVLNFPLVPKDIFFSSCHVSMMIFHPRKLFHPYLGSSDSTMGMGRRTNYSSIPSPLHSPIPLSSIPWVPSLIHGDHMHLNLAPIVIIVLAGTTCIIMFLITLFKILRYYYPNRYNVSRSDPPILFDIRGDFPLSDDEERE

SEQ ID NO: 272879 - protein, 77 aa, Glycine max
  Clone ID: PAT_MRT3847_88432C.1.pep
NKTLSILDQKKRGKIFMLRATLWEKGGRAPSGGFNPSASLLLKKGALWDGHISLNWLSTGDLGFTSEGPRGFRWSTP

SEQ ID NO: 272880 - protein, 62 aa, Glycine max
  unsure (1)..(62): unsure at all Xaa locations
  Clone ID: PAT_MRT3847_88433C.1.pep
LXXKPHLLSFFFSNKKIFIKLFLYLFSLKSNYFPFFSTFYIFPKTYIFFTQLYTNFQKYILL

SEQ ID NO: 272881 - protein, 51 aa, Glycine max
  Clone ID: PAT_MRT3847_88434C.1.pep
RSKDLGSFVAPSLVAWQGRAHHIFPVRMNTVYRARTPDEECARRKLAVEEH

SEQ ID NO: 272882 - protein, 295 aa, Glycine max
  Clone ID: PAT_MRT3847_88435C.1.pep
LIPSYSYLNETLYDIDCVARILGYFLEEERNVAAIDGRAPRSPGLMLVGKLIDGYLSEIATDANLKPSKFYDLAISVPDRARLFHDGLYRAVDVYLKAHPWVSKSDREKICAVLDCQKLTLEACSHAAQNERLSLRAGVRVLFFEQLQLRHAIAGTLVAAEAAAEPGRQSAALEREAEGGGREGLGLDLEHVQERNGTWRVPVRENQVLRLDMDSMRTRVHQLERECSSMKRVIAKFDKSDGGAAGGWRASLGRKFGCKFKTQVCDSHESTAVDTRKGRHHQQQQPQQQQHPHHV

SEQ ID NO: 272883 - protein, 63 aa, Glycine max
  Clone ID: PAT_MRT3847_88436C.1.pep
FMSLLEIVGLVEIVKMMVILVSLLLPVYKPKYSSFCNLYSISLSQILFTFSLFWALPCFSTLY

SEQ ID NO: 272884 - protein, 71 aa, Glycine max
  Clone ID: PAT_MRT3847_88437C.1.pep
SSAPASVLTVMCWKAGLIATANPCAPGSSGYPGQKTGYVKTSRLCPNASPISKNRGQRCGSSHLCSAARSC

SEQ ID NO: 272885 - protein, 40 aa, Glycine max
  Clone ID: PAT_MRT3847_88438C.1.pep
ADLQFLRDQVTITQVTIARVYNWDVHQRRIQQAVATTAQA

SEQ ID NO: 272886 - protein, 81 aa, Glycine max
  Clone ID: PAT_MRT3847_88439C.1.pep
SELLLACFAAQRDETAMAMVVREKEHLPRDDYLMSLTIAGLYLDLLFVRHDALDRIIKAHSYLAFGPLSFFLTCNYLDRLL

SEQ ID NO: 272887 - protein, 252 aa, Glycine max
  Clone ID: PAT_MRT3847_8843C.1.pep
MGRNEAAISFLTNVARTAFGLGAAATAVSSSLYTVDGGQRAVLFDRFRGILDSTVGEGTHFLIPWVQKPYIFDIRTRPHTFSSVSGTKDLQMVNLTLRVLSRPDTEKLPTIVQNLGLEYDEKVLPSIGNEVLKAVVAQFNADQLLTERSQVSALVRDSLIRRAKDFNIVLDDVAITHLSYGGEFSRAVEQKQVAQQEAERSKFVVMKAEQERRAAIIRAEGESDAAKLISDATASAGMGLIELRRIEASREV

SEQ ID NO: 272888 - protein, 70 aa, Glycine max
  Clone ID: PAT_MRT3847_88440C.1.pep
VTLFSVILNLFLQNPKVKGNFGLLFCLCFYQGRSRFLLDRLRLPFVFNFQCYFNKECSHQEFTKRDYTHV

SEQ ID NO: 272889 - protein, 144 aa, Glycine max
  Clone ID: PAT_MRT3847_88441C.1.pep
RAQKPGKIQKKITKGGTFNNKQTNRGLEFFFRTRGKKQKTTGLGKRKKKPFSGGFLKKNKALPQLRGEKGRPLQISTIPGEMGKEKFIKGLLGRGVQAGNQPMGGKAPRIGPTPLKGPPFKQPCHLETLQGGGHRERGKTGGPP

SEQ ID NO: 272890 - protein, 65 aa, Glycine max
  Clone ID: PAT_MRT3847_88442C.1.pep
LLLNSFCSLISSMLSGKKKPLLIPVKSSPPILCCNANNSLFPFKPVFPVSLLIQQGFGTILFHVI

SEQ ID NO: 272891 - protein, 45 aa, Glycine max
  Clone ID: PAT_MRT3847_88443C.1.pep
THHIHVTTLLISIIIYYVSLQDTLISNVWLCILIFFPHTIYICSY

SEQ ID NO: 272892 - protein, 77 aa, Glycine max
  Clone ID: PAT_MRT3847_88444C.1.pep
RFPEIPQVFPLTALIEFSNVREKEKRLKPLFHCLRAMSISPSTDIILQIPTMQVCGNESRTTYQNFTTIQWLTSPGS

SEQ ID NO: 272893 - protein, 85 aa, Glycine max
  Clone ID: PAT_MRT3847_88445C.1.pep
CCACRYRDRPGSGLGPPRFPIKGSSPTPIPNPTYNAYHASLNERSNDCAPCNACNESKFMEEDGYTVVTSRRKGRSFPELGVTCW

SEQ ID NO: 272894 - protein, 72 aa, Glycine max
  unsure (1)..(72): unsure at all Xaa locations
  Clone ID: PAT_MRT3847_88446C.1.pep
SIYPILLIIPHRGGLPHHPSPPSPTPPPPTLPPPPXPPPLPPHPSPSPPHPPPPPIEWRTVIHVMTGKPLLG

SEQ ID NO: 272895 - protein, 55 aa, Glycine max
  Clone ID: PAT_MRT3847_88447C.1.pep
CLNSEYDHPLQWKLTVNNPDFGQQCITNPWYQFLENNDFDPRDEISFYFRTYQRV

SEQ ID NO: 272896 - protein, 44 aa, Glycine max
  Clone ID: PAT_MRT3847_88448C.1.pep
TEQSLSYSSHIVRLQWIYGQKKSSSYLYFFMISPLFCELELIVL

SEQ ID NO: 272897 - protein, 82 aa, Glycine max
  Clone ID: PAT_MRT3847_88449C.1.pep
EDTLSTAFNIYVSNIPTNNKNFISLDEVSYLDCMTSLDLIKNQILKDITHYEIPLNNLLKCSSWSLSTSSRTAKNHAIYSPY

SEQ ID NO: 272898 - protein, 97 aa, Glycine max
  Clone ID: PAT_MRT3847_8844C.1.pep
GTKDMLLLNPATLTLNLDSVGGIVTYLMPKISHITAIRSIVATTCRDQPTTDSIPVLEGQRNMTNDCSLLDEFDMPVITTPPRGTPNIELTLLHDLN

SEQ ID NO: 272899 - protein, 102 aa, Glycine max
  Clone ID: PAT_MRT3847_88450C.1.pep
MEKNWCLRWIFVVGLMCLSVEGIGVNWGTQATHKLPPDTVVHMLKDNGIKKVKLFDSDDSTMSALAGTGIEVMVAIPNNQLAEMNDYGKAKQWVKKNVTRYN

SEQ ID NO: 272900 - protein, 129 aa, Glycine max
  unsure (1)..(129): unsure at all Xaa locations
  Clone ID: PAT_MRT3847_88451C.1.pep
ALNSQNAFVINRGMGKLTFPQGTYQRVKRRPVSIGGGAGAENAIMMNLATAAVSMGTYPAGDQASEVYKKSCAYIKRSVCVFIGNRKFWLMTPSDDXGCYPQEWPRKGETQERVVLRVTHEEYITDGTT

SEQ ID NO: 272901 - protein, 64 aa, Glycine max
  Clone ID: PAT_MRT3847_88452C.1.pep
RDNVNGAVDPTSSQSIEISGLGYQTGDDTQYKDINEWCSCCYDCTHGLFYFLNCNFSLKPLHLI

SEQ ID NO: 272902 - protein, 98 aa, Glycine max
  Clone ID: PAT_MRT3847_88453C.1.pep
MAPPPPSNLPLQERVLQLVQTLQFAWFAGHVTLLLSSVRYALSYLTFHANSKWAIFSYRTAFVAAAATYGIVVFKSFRARARAGKATGGPLQIVGDEN

SEQ ID NO: 272903 - protein, 56 aa, Glycine max
  Clone ID: PAT_MRT3847_88454C.1.pep
MRLFDPWPVFFKREWKRNWPFLVGFAVTGTLITKLSLGLSANEEATKSKFVQAHKR

SEQ ID NO: 272904 - protein, 124 aa, Glycine max
  Clone ID: PAT_MRT3847_88455C.1.pep
YNVQSHCKSSILKSPLVCLDEFRLFGFLLRETKGKFGDESSGDGESNQEGPIPLPFSLEENRPWIEQSHFFCTSLSLSMCSSAFPSQLNSQIQYDGTVTLRAATPPPPPQKKKKEEKKRNLVNK

SEQ ID NO: 272905 - protein, 96 aa, Glycine max
  Clone ID: PAT_MRT3847_88456C.1.pep
KGWARNNLLFLEKGCFGTGNKNHPKLGKLKLGLWWFNQFLRLVLEEMAGLFYLKGFFKLSEGRKIFRFICKENPRKFIRVFGPFKMWPPWLNPKWN

SEQ ID NO: 272906 - protein, 53 aa, Glycine max
  Clone ID: PAT_MRT3847_88457C.1.pep
TLALKGSKSQHLTNQVVMPLSGVIKAVPLFRILTQEPLCCIIEAEPFCGLKKP

SEQ ID NO: 272907 - protein, 344 aa, Glycine max
  Clone ID: PAT_MRT3847_88458C.1.pep
MMRSQHRLLLGISHFKFLNKDNVSQTLHFSTLLPPFLQPHDSPILIQRKIGRELGKLLQLPSPNILTSHYYKKIHAHIVVLGFHQHDVFLVNTLLHAYSKMNLQSDAQKLFDTMPHRNLVTWSSMVSMYTQHGYSVEALLLFCRFMRSCRCICGVRPLIDMYAKCDSLTNARKVFDLVAAINVVSYNAMIEGYSRQDKLVEALDLFREMRLSLSPPTLLTFVSLLGLSSSLFLLELSSQIHCLIIKFGVSLDSFAGSALIDVYSKCSCVGDARLVFEEIYDRDIVVWNAMFSGYSQQLENEESLKLYKDLQMSRLKPNEFTFAAVIAAASNIASLRHGQQFHNQ

SEQ ID NO: 272908 - protein, 55 aa, Glycine max
  Clone ID: PAT_MRT3847_88459C.1.pep
SSSVNKKILPLCRMSLSLQFRVFSGGFYQIYTSKNLGRLKIGKKNALEQQVLCEG

SEQ ID NO: 272909 - protein, 90 aa, Glycine max
  Clone ID: PAT_MRT3847_8845C.1.pep
FDITNKAIPPMGGFVRYGMVKNDWVMIKGSCPGVVKGVVTLRKWLIKHTSGGALKKITPKFIDTSSKFGPGRPQPFEEKRAFEGQKKIKA

SEQ ID NO: 272910 - protein, 95 aa, Glycine max
  unsure (1)..(95): unsure at all Xaa locations
  Clone ID: PAT_MRT3847_88460C.1.pep
ILWLQTPLANCKKIFKGSVKYAWATVSTXANGGVGFMLCFTEGPPVNFQHPINKLNPKKNGGAKGPFKFFNPKNHGGAFCLPFFVGKVVLSHTHL

SEQ ID NO: 272911 - protein, 70 aa, Glycine max
  Clone ID: PAT_MRT3847_88461C.1.pep
GLNSMKKNYKDWGFYHTTTFISYFGKYCLTIRAIICHIKLSLSDGARKIDKIYFVQRRLDHLESITKKIN

SEQ ID NO: 272912 - protein, 125 aa, Glycine max
  Clone ID: PAT_MRT3847_88462C.1.pep
AQHDVSKSLADLDGGSIPQDYNKINSTTTSRENLAENPPLPALVAFPPKMGTFNQMDSGCNIAAQTSTESPSNTIFDDWEKLLDDENSGFQWERDSRLDIHFCVTNFVVEESSVLFQDNPINLWI

SEQ ID NO: 272913 - protein, 180 aa, Glycine max
  unsure (1)..(180): unsure at all Xaa locations
  Clone ID: PAT_MRT3847_88463C.1.pep
AVLVSIAGVVMTTLGKTWAADDAISSASNGQRSLVGDLFGLLSAMSYGLFTVLLKKISGEEGERVDVQKLFGYVGLFTLVALWWLIWPLSALGIEPKFTIPHSARVDEVVLANGFXLCVVWTTPLVATLGMSLTIPLAMMADMVIHGRHYSALYILGSIQVFAGFVIANISDRPTKKQGL

SEQ ID NO: 272914 - protein, 79 aa, Glycine max
  Clone ID: PAT_MRT3847_88464C.1.pep
KGQFGQAYPKNGQKPIFFLQKKNSTGGKQPRGILQQKLMGSPGPQSKNLIGGDPREKEINPPRNWVRNRPGAGWEKTGP

SEQ ID NO: 272915 - protein, 76 aa, Glycine max
  Clone ID: PAT_MRT3847_88465C.1.pep
TLVVLGLRHGPHDTTSGSRGLFTREPMPLALRIMPIVCLPNPEAESLKLALIPLCIVHNVLLYAPSLCTNSFMRQG

SEQ ID NO: 272916 - protein, 268 aa, Glycine max
  Clone ID: PAT_MRT3847_88466C.1.pep
TILQRHHGQGIVLGQDIRNFTNNLSYRLEIETDKPNGIGELLEIFGSVITGFALPLKEEHKIFLWRVLVPLHKPKSIGAYFQQLSYCVMQFIEKEPKLASIVIRGLLKYWPATNSQKEVMFLGELEEILEVINMVEFQRIMVPLFWRIGCCINSLHFQVAERALFLWNNDHIVNLIAHNRQVILPIIFPALDRNVQSHWNPAVVNLTHNIRKMFLEMDEKLFISCHNHFKEEEAILISTAEKRKEAWKQLEHAASLRPVIGNTAVLVS

SEQ ID NO: 272917 - protein, 80 aa, Glycine max
  unsure (1)..(80): unsure at all Xaa locations
  Clone ID: PAT_MRT3847_88467C.1.pep
PDQKYLRRTVYPACQQKPLVKSAFDEFRGXFIERIVIIDARNSDRASRSWIGPGIVPYDFFKPSSEQGAQXKGVPYSISV

SEQ ID NO: 272918 - protein, 87 aa, Glycine max
  Clone ID: PAT_MRT3847_88468C.1.pep
MYAKSIIADAALAGAVFADPVGEKQPPKGWWTEGLEPYMTYHTRYLALECYNQHNSQFFDQCCSPLLKGVSLDSRPAQCTSSDEATL

SEQ ID NO: 272919 - protein, 49 aa, Glycine max
  Clone ID: PAT_MRT3847_88469C.1.pep
EILICSLRSELTVAGIQLKLVRILEYDRIDIQYNLSIRDFTSLQIRATT

SEQ ID NO: 272920 - protein, 55 aa, Glycine max
  Clone ID: PAT_MRT3847_8846C.1.pep
FSLMKNGSPEAIFLILHIWVGIVGDRSRRSQTSRDGNDCSVALTVGCLLSSSDAC

SEQ ID NO: 272921 - protein, 45 aa, Glycine max
  Clone ID: PAT_MRT3847_88470C.1.pep
ELNNFISYGPKEHACRSYLEKDQLLARKTIFLTLCQVRARNLFSL

SEQ ID NO: 272922 - protein, 138 aa, Glycine max
  Clone ID: PAT_MRT3847_88471C.1.pep
MLPRFSVLVLYTMNLENCHCLSTIRSNSSLSWSSYERIGYDPIVCVNKFVIRLKMGSWKALWRKIKRQRRRFFRPSPVFHVQYDPTSYLQNFDDGYSTDPDNVSRSFSARFAAPSKIFGKIEVMDDGELEISHKSNMV

SEQ ID NO: 272923 - protein, 45 aa, Glycine max
  Clone ID: PAT_MRT3847_88472C.1.pep
RPNPGRPRSDGWRDQEGQLLFTTQGKGLQRRFLLTIHFAVVYLDY

SEQ ID NO: 272924 - protein, 72 aa, Glycine max
  Clone ID: PAT_MRT3847_88473C.1.pep
SVYRLIASVRIAASRTKKVIVMSVWQRVPHIRFVVNSIYNVMSDTNIHQYASGAARTLSFPISRPLGRVRTR

SEQ ID NO: 272925 - protein, 71 aa, Glycine max
  Clone ID: PAT_MRT3847_88474C.1.pep
PSSQKVILILSNTQISNHHISSTSHMERKTQKYSSISTLWFMVAFLFPTIYEDSVVVRFFDDDTVSMAHST

SEQ ID NO: 272926 - protein, 76 aa, Glycine max
  unsure (1)..(76): unsure at all Xaa locations
  Clone ID: PAT_MRT3847_88475C.1.pep
YWPNSSCYLYLHFIVKLTRRALLANAIMPVTANEHSPDPQSEYAVKSDACEGKPDHQICATAXRGPDPDLIAIAER

SEQ ID NO: 272927 - protein, 128 aa, Glycine max
  Clone ID: PAT_MRT3847_88476C.1.pep
NSDVITQIPMVKAYNLHAGATVVRGPGFTGGDILRRTSNGMVVTLRVDASAVRNQRYRIRFRYAATSNFYFVVRRGNLGVNGREIMKTMSTGEELKSASFVLGEFITPFNFFENQVPLQIEIQSLSPG

SEQ ID NO: 272928 - protein, 87 aa, Glycine max
  Clone ID: PAT_MRT3847_88477C.1.pep
YTNFSKHLLHLLIPIILNKSNISNFYSISFINPSPSSTLLTISPFYFSTLHPLNYFFSLHSFTHPYTLYYSTLLINLNLFHFLINYS

SEQ ID NO: 272929 - protein, 65 aa, Glycine max
  Clone ID: PAT_MRT3847_88478C.1.pep
ICLGGMGRKFLSQRITPSFIWLRHTKGVFMFTSQDTFLACPFMERGGNLWLAEERICYFYFNNNK

SEQ ID NO: 272930 - protein, 115 aa, Glycine max
  Clone ID: PAT_MRT3847_88479C.1.pep
SELPPFFRWTKSDYFKGSLGGNATASDRDNFYSRLKSFKRQLGLMDIQEESGRVEQKNLRPGLFQPQEEVKRFQSGPFVIGQLMEMVDQNTGLVGSTTGFNFYFRVFITINRRVF

SEQ ID NO: 272931 - protein, 87 aa, Glycine max
  unsure (1)..(87): unsure at all Xaa locations
  Clone ID: PAT_MRT3847_8847C.1.pep
XSPFFHATXXIKXXXSLYXAGGTXELXTGXXRFXXRFPVRSEVSLRSSXFSLPFXALSEXVSLXSPXSDEVTTVCAFXGEVLSVIXA

SEQ ID NO: 272932 - protein, 226 aa, Glycine max
  unsure (1)..(226): unsure at all Xaa locations
  Clone ID: PAT_MRT3847_88480C.1.pep
VSSEFGSRRNPAVIADNVGDNVGDIAGMGSDLFGSYAESSCAALFVASISSFGTNHDHTAMSYPLIISSMGIVVCLITTLFATDLFEIKNVSQIEPSLKRQLLISTILMTAGIAIVSFTALPSEFTLYNFGAKKVVKNWHLFFCVAIGLWAGLAIGYITEYYTSNAYSPVQDVADSCRTGASXNVIFGLALGYKSVIIPVFAIAIAIYVSFSLAAMYGIAGAALGM

SEQ ID NO: 272933 - protein, 42 aa, Glycine max
  unsure (1)..(42): unsure at all Xaa locations
  Clone ID: PAT_MRT3847_88481C.1.pep
PAVRLSRFRFPVVLSPPYVYRGLTHKSLYKFPXVPAPEARPG

SEQ ID NO: 272934 - protein, 134 aa, Glycine max
  unsure (1)..(134): unsure at all Xaa locations
  Clone ID: PAT_MRT3847_88482C.1.pep
GNGLRXCARMEHGGYATPRHPEXSRDPGGDRSPLWICGGFLGVSRSCTLLXILLKSPRALSNLXNTRSKVRMIECAFGVEVIDIRSLFCXXWNLVGGIGTLSLFVPYLRHGFLEVPCTSXXRIQGFYEPFVINR

SEQ ID NO: 272935 - protein, 66 aa, Glycine max
  Clone ID: PAT_MRT3847_88483C.1.pep
NNRRVDRDPSPKTRCSPRLIRLKNLLRACESHVNTPPMLCSIFGVYLPLSHLCFHRHVPHLAAQRR

SEQ ID NO: 272936 - protein, 57 aa, Glycine max
  unsure (1)..(57): unsure at all Xaa locations
  Clone ID: PAT_MRT3847_88484C.1.pep
PLTTVAYDLHTLGITVILSCRVRLLNITLSASGIDSAQLRNLHASYIKSSGXSLSSS

SEQ ID NO: 272937 - protein, 97 aa, Glycine max
  unsure (1)..(97): unsure at all Xaa locations
  Clone ID: PAT_MRT3847_88485C.1.pep
KKERVRVSPTGLGSIWDLMGHQNVSINSLRYRAVDADLRGYREPXAPPSISKHHCLHIGGETEGHIDSLGVQQENLGGHDWGAIIGWYLYMFRRDKT

SEQ ID NO: 272938 - protein, 61 aa, Glycine max
  Clone ID: PAT_MRT3847_88486C.1.pep
FITSNPPFLNPIAGASHVDILCRVNLYLYHYANCIDILLIYDIYGYRIIIVEEYCRLGCSC

SEQ ID NO: 272939 - protein, 157 aa, Glycine max
  Clone ID: PAT_MRT3847_88487C.1.pep
MAQVGSLSSEMETLNHVLALVEAFRAFDADNDGRITQAELGGILGSLGYNPSEQEVRAMIEHGDKNKDGLLSIHEFLEMNTKDLEGGNLANTLSTAFEALDEDGNEILTGEELHEVMQNLGLDLSLENCVHLVTSLDADGDGAVSLDEFRLIVDSLI

SEQ ID NO: 272940 - protein, 401 aa, Glycine max
  Clone ID: PAT_MRT3847_88488C.1.pep
MYKNQLQELAQRSCFNLPSYTCIREGPDHAPRFKATVNFNGEIFETPHYCSTLRQAEHSAAEAALNSLSHRGPSHSLAAKILDETGVYKNLLQEIAQRVGAPLPHYTTYRSGLGHLPVFTGIVELAGITFTGEPAKNKKQAEKNAAMAAWSSLKQLAKETARSSTEPENNDELEQITIARALLNYRLKEKISMSNSNAPVPFPKKFQIQNPRPTSPQPPPAATSKILPLICQKAAPRSRHLVGASPARASCDNSAMPQLSATPESRGIRRPKFPAAGAAPYVPIRQMRPCQGMAPPVTIRTAIPVFSPPPAAAAVSHQVLRAPHVRVAPPVTIRQAVPVFATPPPPIRKDEPVPIPKDEPPTISAPSPEDKLPAKTPEAETKTENIPPKPDMVKSLEQLKI

SEQ ID NO: 272941 - protein, 186 aa, Glycine max
  Clone ID: PAT_MRT3847_88489C.1.pep
MRYGGGRKRRMLLQPFLVLCATVTGLGLFMLALRPLDPPITVDFPKKIELGDSNSSSLNGGGEKPCAAVEEMGKDFEAGVVGKETLRVRRIIEDHFDLNGASRIRDLPPEQFCSHGFVLGKTAEAGFGNEMYKVLTAAALSIMLNRSLIIGQTRHIGKYPFGDYICYSNFTFTMNEVKHLWRQKSL

SEQ ID NO: 272942 - protein, 35 aa, Glycine max
  Clone ID: PAT_MRT3847_8848C.1.pep
RYSKAEVYVHCRGDARSELEITEIRLLRCHGLENL

SEQ ID NO: 272943 - protein, 116 aa, Glycine max
  Clone ID: PAT_MRT3847_88490C.1.pep
MDFWPEFLASSSGREFVAGGFGGIAGIISGYPLDTLRIRLQNSKNGSAFTILRQMVSREGPASLYRGMGAPLASVTFQNAMVFQTYAVLGRGWAEWGVVRTLLGTGGGVGGELGAG

SEQ ID NO: 272944 - protein, 54 aa, Glycine max
  Clone ID: PAT_MRT3847_88491C.1.pep
MGHSNSSSSSSPSKRGHALRQWRLLDLVSGVFFFLGLLFFTMVFTPLGDLLAAS

SEQ ID NO: 272945 - protein, 88 aa, Glycine max
  unsure (1)..(88): unsure at all Xaa locations
  Clone ID: PAT_MRT3847_88492C.1.pep
HGVAQNKHSTLMNLRMKGNGFSSIGSPPRSCYAXRQPPCXXAXXWLLXNSPXPQIHGLXLPHXRKNATMTXXPPLASXTVEGVPXXMQ

SEQ ID NO: 272946 - protein, 43 aa, Glycine max
  Clone ID: PAT_MRT3847_88493C.1.pep
IASGRPFFFFFFFFFFFFFFFFFFFFFFFLEKKKTEAGFFIFS

SEQ ID NO: 272947 - protein, 34 aa, Glycine max
  Clone ID: PAT_MRT3847_88494C.1.pep
LSWAEPPHRLECHLPCEMIGYNDVSRAECLERIP

SEQ ID NO: 272948 - protein, 65 aa, Glycine max
  Clone ID: PAT_MRT3847_88495C.1.pep
PTKHPGPGSRTMSRKDLRYIYGLQLHIWNPYRSLFPIINFMKFIVTKNVGPIKYKPSRHSINPCF

SEQ ID NO: 272949 - protein, 68 aa, Glycine max
  Clone ID: PAT_MRT3847_88496C.1.pep
CASGICYLCVYWFGVHLYYSNIYCTRTYGQGFSYVKLPTSSNSNTDSPSVVFSQPYSSRSSRSSRSSR

SEQ ID NO: 272950 - protein, 108 aa, Glycine max
  Clone ID: PAT_MRT3847_88497C.1.pep
LSRYYLNNFQDGIRQDALDLISGHYNVSRNVPSPFRSNNFEPLTYLPVASALIIGGLTATTFTFQQAGRNTQHYVSSVLCAGITAGVMAIVKANGRHFCSRPRLCGLL

SEQ ID NO: 272951 - protein, 44 aa, Glycine max
  Clone ID: PAT_MRT3847_88498C.1.pep
HTVAAQVTEVVGGVRKLDINLFTDEKGHIPELLSDSQCRRFASV

SEQ ID NO: 272952 - protein, 361 aa, Glycine max
  unsure (1)..(361): unsure at all Xaa locations
  Clone ID: PAT_MRT3847_88499C.1.pep
PRVRDIARFRPDLKLLISSATLDADKFSDYFDSAPKFKIPGRRYPYEIFNFTEAPSDYLDAAIEASLKIHVTEPPGDSKIYHKDLDENTVKLSQXLDDNTVPEIQRTNLANVVLTLKSLGIHDLLNFDFMDHPPAEALLKALELLFALSALNKLGELTKVGRRMAEFPLDPMLXKMIVASENYKCSDDIISIAAMLSVXKCFKLYTAYTFHKEMDDNTVPSLQRTNLANVVVTVKCLGIDNVMHFDFMDPPSDDALLKALELLYALSALNKFGELTKVGRRMAEFPLDPTLSKMIVASEKFKCSDDIISIAAMLSVGKSIFYRPKDKQVYADNAMRNFHTGNVGDHIALLRVYNSWKETNY

SEQ ID NO: 272953 - protein, 195 aa, Glycine max
  unsure (1)..(195): unsure at all Xaa locations
  Clone ID: PAT_MRT3847_8849C.1.pep
MEPTSLTVPFVQEIAKDALTRVPERYVRPLHERPILLSATTTPLPQVPVIDLSKLLXQDLKEPELEKLHYACKEWGFFQLINHGVSTSLVEKVKRGAQDFFNLPIEEKKKLGQREGEGVEGYGQAFVVSEEQKLEWADMFFMLTLPPHLRKPYLFPNIPLPFRDNLETYSAGLKKLAIQIVELMANALNVDSKEI

SEQ ID NO: 272954 - protein, 154 aa, Glycine max
  unsure (1)..(154): unsure at all Xaa locations
  Clone ID: PAT_MRT3847_884C.1.pep
MNMKALVVFDATIEGAWECHAYDMVPVRMNTVYGARTSEVKCSRRRLAVEAHIIFGFETIPEQSVEAPKDCIHGEQYRSDSRTVNQHAYWYARDLXVHPKDTSAFSIDGTVLSNIACYGIHAYXVLKYNSSLTDEXVHKGNAAALPETLKNYNS

SEQ ID NO: 272955 - protein, 75 aa, Glycine max
  Clone ID: PAT_MRT3847_88500C.1.pep
DITVDTIESGKRQKIKMNVGIRIMRPIQMGRVVLCEGEDLVSPGFKVFVYGAIADRSVSLSLQLIKQPSWKSISW

SEQ ID NO: 272956 - protein, 204 aa, Glycine max
  unsure (1)..(204): unsure at all Xaa locations
  Clone ID: PAT_MRT3847_88501C.1.pep
PRADSARASSVFYSRQIPSQVSEWGRMSMCDAERRLLANALLDISNEWFILLSESCIPLYNFSFVYHYIMKSKHSFVGAFDDPGPYGRGRYNEHMAPLVNVTKWRKGSQWFEVNRKLAITIVEDTTFHPIFEQYCRPACYVDEHYFPTMLTIQAANVLANRSITWVDWSRGGAHPATFGRNDITXEEFFNRVRRGHTCLYNNRN

SEQ ID NO: 272957 - protein, 76 aa, Glycine max
  Clone ID: PAT_MRT3847_88502C.1.pep
PFPCRLGYHFGQGGPNLVVFARVVLKCERKWEGVHVFPSEALVCLKQPDIVFIRKPCIFGIWRPTNTCRLPEGAKK

SEQ ID NO: 272958 - protein, 56 aa, Glycine max
  Clone ID: PAT_MRT3847_88503C.1.pep
MPSQKVETGHQDTDHDVAMDYYGKRLATASSYHTIKIIGVNNTVYYHLATFTAHQG

SEQ ID NO: 272959 - protein, 181 aa, Glycine max
  unsure (1)..(181): unsure at all Xaa locations
  Clone ID: PAT_MRT3847_88504C.1.pep
MAFPPHVVEDCMGLLKLLSDGTVLRSNINFQEQPQPTQHDNLVQFKDFVFLKKFNLHLRFYKPKFEDNDDDDNENNNKKLLPVVMFLHGGGFCFGSRAWPHMHSCCVRLATSLRAAVVAPDYRLAPEHRLPAAVDDGVEAVRWLQRQKGHHGGDEXVTPGVDFDRVFILCDSSGGNIAHHL

SEQ ID NO: 272960 - protein, 178 aa, Glycine max
  unsure (1)..(178): unsure at all Xaa locations
  Clone ID: PAT_MRT3847_88505C.1.pep
MNMVSLVKYTALPLTSPDSSSHVPRPQLCALPSVHNVQQSTQPSLSSLKPLYISSTQNFAFRRRRVPECQAYEADRSRPLELNIELPDEEAGIEATQRIKIGLYFATWWALNVVFNIYNKKVLNAFPYPWLTSTXSLAAGSLMMLISWATKVAXAPKVDFQFWKALFPVAVXHTFGHV

SEQ ID NO: 272961 - protein, 117 aa, Glycine max
  Clone ID: PAT_MRT3847_88506C.1.pep
YNTEVALPSVLLLWRLGITLLPSSLTLLASSAANLLLIHCIANNMALPTNRDQTPKSDSTNPCCELSKMKYLKTQESLNALRHADKALEHKINEIQSRYNKVCGVTVGREEKLGEFV

SEQ ID NO: 272962 - protein, 56 aa, Glycine max
  Clone ID: PAT_MRT3847_88507C.1.pep
RELHFQGSNQLCKEIMEMNQIPNDLNKETMFKCQISILDKANHNPGLATCSIVSSY

SEQ ID NO: 272963 - protein, 149 aa, Glycine max
  Clone ID: PAT_MRT3847_88508C.1.pep
MQSISLFNSSPILFHPFSPSRPCSNGKKMNSFAPTKASMRGSADQNFSGRLVDESMIILRKRIHEMNMIERNYEPPSDWMDWEKRYYNKYDSIICEAVGVLQSQLMNTRPSLALGAMALVAISVPTSSAVLLFHLVELAKVVLAGAHLG

SEQ ID NO: 272964 - protein, 149 aa, Glycine max
  Clone ID: PAT_MRT3847_88509C.1.pep
MPSISLVNSSPILFHPFSPSKPCSKGKKTNSFAPIKGSMRGSADQNFSGRLVDEGMIILRKRIHEMNMIERNYEPPSDWMDWEKRYYTKYDSIICEAVGVLQTQLMNTRPSLALGAMALVAISVPTSSAVLFFHLFELAKAVLAAAHLG

SEQ ID NO: 272965 - protein, 49 aa, Glycine max
  Clone ID: PAT_MRT3847_8850C.1.pep
YRLSCHGSGVFLVHSCVKGLFHGWNSIVRSYSHVMFPACFYWLFHCCSQ

SEQ ID NO: 272966 - protein, 228 aa, Glycine max
  Clone ID: PAT_MRT3847_88510C.1.pep
NCLQRIPNQRDLEDCRVFYDNRSLPFGFLKSGSRSRVIFILVGIFGGLGFIVLLALVLMLVLKQCHNRRSLGVQRGTKDGGPVQEGESPIPPKDTVFVTVGDAFSFEQMLHLTSNFAEANVIKHGHSGDLFLGVLEGGATVVVKKVDLNLFKRESYVVELGLLSKVPHARLVPILGHCLDNENEKFIVYKYMPNRDLATSLRRVTGSDGELQALGWVPRLKIAIGAAG

SEQ ID NO: 272967 - protein, 65 aa, Glycine max
  unsure (1)..(65): unsure at all Xaa locations
  Clone ID: PAT_MRT3847_88511C.1.pep
IVFVARTGQHARRTFLSPPRPIPPXPSPPFSPSQPPPPSPTPTKPSPRPSHLQSSDPPATLQTPP

SEQ ID NO: 272968 - protein, 75 aa, Glycine max
  Clone ID: PAT_MRT3847_88512C.1.pep
YIQLQCEPVRVGVTRYKYRSNGAIEQSSVLINAHNLSYSRLFAYSSLAVYSEASPYVWTVQVCRKICIDGREKKV

SEQ ID NO: 272969 - protein, 85 aa, Glycine max
  unsure (1)..(85): unsure at all Xaa locations
  Clone ID: PAT_MRT3847_88513C.1.pep
LNXXLKEXGRVXKSKXFLSLXSLVFLALASGLVSSFSSGGGSAXAGSGXGSTAXXGXFCGHGNXXKLGLXXXWXXXMMENVEXRN

SEQ ID NO: 272970 - protein, 56 aa, Glycine max
  Clone ID: PAT_MRT3847_88514C.1.pep
SIGPHKKDQAFVAKVRFEKKKKMGSLKKGSWLVIPLCTLPSVFFACPRKKIALYYY

SEQ ID NO: 272971 - protein, 80 aa, Glycine max
  Clone ID: PAT_MRT3847_88515C.1.pep
PHGSDDMSESHCTLLPVLEGAERSDKSLRRLDTEPNIDPTATAEGSQDPASTCVPHIRQLRASKMLTEEGITAGLISLFV

SEQ ID NO: 272972 - protein, 95 aa, Glycine max
  unsure (1)..(95): unsure at all Xaa locations
  Clone ID: PAT_MRT3847_88516C.1.pep
INHGLVALVESYEMKIFEVKLIVMMSCFTALITYVADTSDVIETATLLVRNANFLYIDVVQILWDVLMDAVQMSGXDIYPNANACLVLVNTWAEL

SEQ ID NO: 272973 - protein, 192 aa, Glycine max
  Clone ID: PAT_MRT3847_88517C.1.pep
MAAESSEGEEETKLSGGNQLLIVDDDLTEMGKKAAWSVSSCKPGNGVSSLRDDNLETYWQSDGGQPHLVNIQFQKKVRLQLIVLYVDFKLDESYTPSKVSIRAGDGFHNLKEIKTVELVKPTGWVYLSLSGVDPRDTFVNTFMLQIAVLSNHLNGRDTHVRQIKVYGPRPNPIPHQPFQFTSREFITYSSIR

SEQ ID NO: 272974 - protein, 47 aa, Glycine max
  Clone ID: PAT_MRT3847_88518C.1.pep
PILSYADFYQLAGVVAVEVTAGPAVPFHPGGKVKPEPPPYVRLPDAT

SEQ ID NO: 272975 - protein, 47 aa, Glycine max
  Clone ID: PAT_MRT3847_88519C.1.pep
QWPGFFQQPGLRWLFQGLILKLTTLPNQPGPLAGFKENSFNFFFSKN

SEQ ID NO: 272976 - protein, 62 aa, Glycine max
  unsure (1)..(62): unsure at all Xaa locations
  Clone ID: PAT_MRT3847_8851C.1.pep
MGHSNVWNSHSKNYRPGSRNCRMCGNPNRLIRKYGLRCLHECFRSNDSEXGLIKYREQSGCH

SEQ ID NO: 272977 - protein, 44 aa, Glycine max
  Clone ID: PAT_MRT3847_88520C.1.pep
GRGPRLNGWLLRSRRGFGHIFFMSLAIIRECKKPISEIPEMCNE

SEQ ID NO: 272978 - protein, 64 aa, Glycine max
  Clone ID: PAT_MRT3847_88521C.1.pep
GRPSHGLQVSGGWFWLGLGPQANPGGWPLKFNTVFISGKLVIIIHLPIGVFKGQLNPFLMGSLI

SEQ ID NO: 272979 - protein, 71 aa, Glycine max
  Clone ID: PAT_MRT3847_88522C.1.pep
VEEFGVVWIWNPNSRILLCPGSRVPGFHPPSLFCWLWPKPRLVIDLSPPPPKKKKKKKLLYSFFFTVCPSG

SEQ ID NO: 272980 - protein, 56 aa, Glycine max
  Clone ID: PAT_MRT3847_88523C.1.pep
PINYDSVKKINYDLLHNTIIRSSIKYNLNEKKLISYSFVFFLYQSYSFLISPKKLH

SEQ ID NO: 272981 - protein, 253 aa, Glycine max
  unsure (1)..(253): unsure at all Xaa locations
  Clone ID: PAT_MRT3847_88524C.1.pep
MELEKTPTSLVFGVNGERFELSHVDPSTTLLQFLRTRTRFKSVKLGCGEGGCGACVVLISKYDPVLDQVEDFTASSCLTLLCSIHGCSITTSEGIGNSKEGFHPIHKRFAGFHATQCGFCTPGMCVSLFGTLVNAEKTTCPEPPAGFSKVTVAVAEKAIAGNLCRCTGYRPIADVCKSFAADVDMEDLGFNSFWRKGDNKDSKLSRLPQYDHNQTNSRFPLFLKEVKHDVFXSFREHSWHRPISLMELQSLLK

SEQ ID NO: 272982 - protein, 71 aa, Glycine max
  Clone ID: PAT_MRT3847_88525C.1.pep
IASGPLFFFFYYYYFFLFFFPPLRELSHLLLDLFSSSTESLRIEIQSGQNKWIFEDIKSPSMNVGKYKSLT

SEQ ID NO: 272983 - protein, 56 aa, Glycine max
  unsure (1)..(56): unsure at all Xaa locations
  Clone ID: PAT_MRT3847_88526C.1.pep
LSVVSPSVFLXXWXXXLXXSXGLWQXXAXVLXLGLDGXGKTSLLHMLKDEXLVQHQ

SEQ ID NO: 272984 - protein, 121 aa, Glycine max
  unsure (1)..(121): unsure at all Xaa locations
  Clone ID: PAT_MRT3847_88527C.1.pep
ISLDSSVSTIPGDFVLGVNLATINNLCAFGLNPGTLGSRLLDSTPHFYFTXTVWYQMATVRTPLNFDPSKHSFCQFSIDLLRGGILVDITGDRITLIQNSPISYLLRVAAXWKKGCLMRKI

SEQ ID NO: 272985 - protein, 41 aa, Glycine max
  Clone ID: PAT_MRT3847_88528C.1.pep
TIQLICLIELITYERHPKSIFSIQTWFDIQSFYLCINWFMK

SEQ ID NO: 272986 - protein, 102 aa, Glycine max
  Clone ID: PAT_MRT3847_88529C.1.pep
SFYNFPRGTNIYLGAFFMRYQRHSPNKTQGVQPKRSDESLSKQQGFHYGPRHNVTRGLLRRRTSCTKWWIREYGPPFAEFRELVTGDSVQRRYLLKNWEPKS

SEQ ID NO: 272987 - protein, 72 aa, Glycine max
  Clone ID: PAT_MRT3847_8852C.1.pep
QLPMSICKFRGLPLQSSSNTGTTLWSSRTRTLLSTCDSVSHLRSYWNGTNESSYSNCIMLSVFSKQDLSIVL

SEQ ID NO: 272988 - protein, 106 aa, Glycine max
  Clone ID: PAT_MRT3847_88530C.1.pep
TYPPPIGGSGRFGKKGVSINFVPPDDAKKLFDIQKFSNGPGKEPPPKGADFPRRGKFGSRVRPQGLIFFGKENWVPFFPQKFSPLRTKNMGSEAIWIGSQKFGLTN

SEQ ID NO: 272989 - protein, 56 aa, Glycine max
  Clone ID: PAT_MRT3847_88531C.1.pep
HLRSVSNLSIFTNSRYSPLIYEYTRASSGTIYITNSTSSTAFPSLLLCLDRFERLR

SEQ ID NO: 272990 - protein, 127 aa, Glycine max
  Clone ID: PAT_MRT3847_88532C.1.pep
VVSIRDFALGLTSIFQVNRKYRIAPIAAYSDRRRNSSMLYLKGRQKASMKIDRDETNILTRSQIDLELEKIRSMTPQEAAAFAARAVAEAEAAIAEAEEAAKEAEAAKADAEAAQAFADATTKSAKG

SEQ ID NO: 272991 - protein, 76 aa, Glycine max
  Clone ID: PAT_MRT3847_88533C.1.pep
IRQKRISAVVCVRVPCQAIATVSLPPPVSLRPPAFASSPPQLPTRSQIAPDSLRPELSSHGNGDSTRISSKLSIMP

SEQ ID NO: 272992 - protein, 84 aa, Glycine max
  Clone ID: PAT_MRT3847_88534C.1.pep
IVAQKDIISVKLDGSGPLEVVHHERWKNYKRRLLCSRLWSALNLQNKGKVGEAEGNGPQLIFWSTCLLKCGILINFFFCFFFFF

SEQ ID NO: 272993 - protein, 142 aa, Glycine max
  Clone ID: PAT_MRT3847_88535C.1.pep
NSARARAGLAEKYSKTSITRTNSCEVLLGACYAHGDLGTGSSVGEYLKNLEPEKEVGYVLLSNLYCASGKWREAEMVRKAMLDQGVKKVPGSSWIEIRNEVTSFVSGNNAYPYMADISKILYFLELEMRHTSPINFDIEGPL

SEQ ID NO: 272994 - protein, 270 aa, Glycine max
  unsure (1)..(270): unsure at all Xaa locations
  Clone ID: PAT_MRT3847_88536C.1.pep
GCEKTTEGSNGDREMAAAFYAAGFEPXDITMSDLLNGKISLLDFRGIVFVAXGGFSYADVLDSAKGWSASIRFNESVLQQFQEFYKRPDTFSLGVCNGCQLMALLGWVPGPQVGGVHGAGGDLSQPRFIHNESGRFECRFTSVTIKDSPAIMFKDMAGSTLGIWAAHGEGRAYFPDEGVLDRIVHSELAPIRYCDDAGNPTEAYPFNVNGSPLGVAAICSPDGRHLAMMPHPERCFLMWQFPWYPKQWDVEKKGPSPWLRMFQNAREWCS

SEQ ID NO: 272995 - protein, 80 aa, Glycine max
  Clone ID: PAT_MRT3847_88537C.1.pep
RPWVSNLMREKGYYTMVGPHSLFCQPFYIPSFFKPSYCPIISFCCFWVSYCCHPLCGLVSFGNISAKYNKKTPDHRYNRR

SEQ ID NO: 272996 - protein, 46 aa, Glycine max
  Clone ID: PAT_MRT3847_88538C.1.pep
ASRDNEKQIYVCWCKSILAKKSKNYEDHLSKDVSLKLIASGYFNLI

SEQ ID NO: 272997 - protein, 89 aa, Glycine max
  Clone ID: PAT_MRT3847_88539C.1.pep
NQLNVSISGIWYHKMASICPCSLCLVPVGTSTHVSKNPATASEDTLNKFHPLVTSILRLGPPLSILKALYQFIRHMQEAMHFSLGLYCL

SEQ ID NO: 272998 - protein, 77 aa, Glycine max
  Clone ID: PAT_MRT3847_8853C.1.pep
AASIVRATTAAVARSTPSSGTPFAIISSIWSMLPVVFVEIIVFMGCILSRDQKYSRYEHSYTKQSLGTHFSELTVVL

SEQ ID NO: 272999 - protein, 71 aa, Glycine max
  Clone ID: PAT_MRT3847_88540C.1.pep
DRVFGAEKNSKMKGVGTRYGNWPEQGRMYSSPFCMVIIIGFYRIWVLTRNHRGVQLKPRIRHNTQRVSTTP

SEQ ID NO: 273000 - protein, 71 aa, Glycine max
  Clone ID: PAT_MRT3847_88541C.1.pep
ARAKMLFSLIMWLTIIVYLRPGTESGLTPVFSSTTPTNAEVTLHTTVLVSWIKERDPPSFQAAQSAIRTHL

SEQ ID NO: 273001 - protein, 160 aa, Glycine max
  Clone ID: PAT_MRT3847_88542C.1.pep
MARVAGIFLCLLILVMDVAAGILGFEAEIAQNKVKHLRLWIFECREPSHQAFMLGLGAAVLLGLAHAIANLLGGCNCICSQQEFEKASSNRQLSTACLILTWVVLAIGLSMLVIGTMSNNRSDGSCGFSHHHFLSIGGICCFVHGLFCIAYYVSATASMD

SEQ ID NO: 273002 - protein, 84 aa, Glycine max
  Clone ID: PAT_MRT3847_88543C.1.pep
CVSSMVYEVCGINVSVLVADLKSDLYSSPRMYSCDAKSLSTAVVIKPHMLCASTSTFYHARFTYVERATTGSVHYHRQHLDSMA

SEQ ID NO: 273003 - protein, 101 aa, Glycine max
  Clone ID: PAT_MRT3847_88544C.1.pep
TKNPGLGFLEKGGCKLKKFKNNSIKNKRVALPQKKVKRGGGGKKIGNSPPLLGHWFFFYQKRSPRVFFPPPFLPKGFFFWGGIEKELPPPLKGFFFGGLPK

SEQ ID NO: 273004 - protein, 66 aa, Glycine max
  Clone ID: PAT_MRT3847_88545C.1.pep
HPICSRRPHENMVSLIMHSGNHSLQLLCMCEILLSCWCQIIDYHPTHAVNTRFTHSTLYKQVHVWS

SEQ ID NO: 273005 - protein, 118 aa, Glycine max
  unsure (1)..(118): unsure at all Xaa locations
  Clone ID: PAT_MRT3847_88546C.1.pep
NGSPYLYYAXTPXLXWXAQSXLILMSHMKIXXNPPWDXFSPPLAXXHDSQFXXXDPSPPLXPLXXYSFLTXVRNWELTAQGMNEEMAPTHSGKEEEEGDPTCFLVFXIIXXTXRSPLL

SEQ ID NO: 273006 - protein, 326 aa, Glycine max
  Clone ID: PAT_MRT3847_88547C.1.pep
MGERKVLNKYYPPDFDPSKLPRARRPKNQQIKVRMMLPMSIRCNTCGNYIYKGTKFNSRKEDVIGETYLGIQIFRFYFKCTKCSAEVTMKTDPQNSDYIVESGATRNFEPWRAEDEEADKTKEKRDAEEMGDAMKSLENRTLDSKREMDILAALDEMKSMKSRHATVTVDEMLEALQRTAADKEKRLEEEDEALIKSVVFHNSDGFVRRIRDEDIETEEQLDQFSNGHGETSSSNTKRQKISEDCPSKPTDTLTKASLDDYGKQENSRSGGKLNSLVRISVIKKPVTSDVKSPAEPEQKKQEKDNETNTASGLLSLCQNYGSDDED

SEQ ID NO: 273007 - protein, 43 aa, Glycine max
  unsure (1)..(43): unsure at all Xaa locations
  Clone ID: PAT_MRT3847_88548C.1.pep
EEVTDPIYLGGRXQLLGLGADQETRVQLKVMVLNIGRWYMWSM

SEQ ID NO: 273008 - protein, 271 aa, Glycine max
  unsure (1)..(271): unsure at all Xaa locations
  Clone ID: PAT_MRT3847_88549C.1.pep
MAVVAVSHSSAPPTFNLNKSPKFPPSPISATFPIPNSATSTSRIFCRATNSRTDPVKNKNNKKKKRKKTSDESLPQMNPNDDFQVLNDFPLQNGPDTSDAPIHYPSMPLPEPPAGFVINDNGNVRHASPNRLITDVDPTNNLPLECVIRRVFESSERDECMLLWPVDTPVQILKSTKADGWSAISDKEVXSNLPAASYALAKIHMHLHRSGYWYTACAGFFYIFRELYLLKRDDGKGVHGLPTGRCRNYKVRSGRFPLQDLYIMGFTEFFR

SEQ ID NO: 273009 - protein, 134 aa, Glycine max
  unsure (1)..(134): unsure at all Xaa locations
  Clone ID: PAT_MRT3847_8854C.1.pep
MPGLAQRNEHLTSGSSTPTCSLSANGFWSKNSDDVSYNQLQKFWSELSLHARQKLXRIDKQSLYEQARKNMYCSRCNGLLLEGFLQIAMYGKSLQQEGLDAHXPXHRSGGLRQLTNDGSSIINGCQDEIQDPSI

SEQ ID NO: 273010 - protein, 88 aa, Glycine max
  Clone ID: PAT_MRT3847_88550C.1.pep
PKVLGSASCSTVVVGSGCEFEGVLVGPFNFRGLVNQLCYTCRLFLVPVKDSNVRLTVKGVTCKVLKTANNATTTIKGDYKNKTLGNRK

SEQ ID NO: 273011 - protein, 80 aa, Glycine max
  Clone ID: PAT_MRT3847_88551C.1.pep
FGCSTPFSRMVLKPKNLVSFQTNLQFGHFPLGSRAPKPIFLWKRKNLDGRQFPSSQNGTTEETKAFHFHHPVSSYLAQPE

SEQ ID NO: 273012 - protein, 53 aa, Glycine max
  Clone ID: PAT_MRT3847_88552C.1.pep
PIGLGTVEPTDTAQERISDGYYGFSPFCPGEVPCGKLSGPPQWGGDAMDESSA

SEQ ID NO: 273013 - protein, 43 aa, Glycine max
  unsure (1)..(43): unsure at all Xaa locations
  Clone ID: PAT_MRT3847_88553C.1.pep
MVSYSASIRNDTXXNRPSPRYKEPIHEGAKQDKQRLGLFISDF

SEQ ID NO: 273014 - protein, 153 aa, Glycine max
  Clone ID: PAT_MRT3847_88554C.1.pep
MDRRLNGPTVSSSSNGGPAVGRSSPTLQPNYSSRLVQEALEHLASIDLIELCKEAKVERCRATRDLRSCGRYVHHVLNSCRHASLCEECSQRCDICPICRIPISKSGAKVHLRLYYECIEAGLISKRCDERFQEREDGEKDLTADVQRLYSLV

SEQ ID NO: 273015 - protein, 189 aa, Glycine max
  Clone ID: PAT_MRT3847_88555C.1.pep
GRVGSVSRQNVQGKNMFGSTAHSINNGLNMENLQQMNSEQRIAPMQDFHGRQELAGSLEMSQDKMLVQAPSSQNMATLDPTEEKILFGSDDSLWDGFGSNLGGFSMLDGTDSFSGIPSIQSGSWSALMQSAVAETSSSDICKQEELSGLSFRNLGQSSGNEQPSTIDSSKQQSIWTDSNLQSASNINSR

SEQ ID NO: 273016 - protein, 177 aa, Glycine max
  Clone ID: PAT_MRT3847_88556C.1.pep
GSRRDCEFLEAEKIMDYSLLVGIHFRDDNTCDKMGLSPFLLRTGNRDTYQNEKLMRGYRFLEAELQDRDRVKSGRKSLIRLGANMPARAERVARRSDFDQYTTAGISHLTPYRSGETYDVILYFGIIDILQDYDISKKLEHAHKSLQVDSTSISAGDPKLYSKRFRDFVGRIFIEER

SEQ ID NO: 273017 - protein, 88 aa, Glycine max
  Clone ID: PAT_MRT3847_88557C.1.pep
HLLNPILLILYFHFFFPVGYQMGFHSFFLSAILIPYINFGTSTLELQNFISSPNDLKALTGFSSFLKSTISDWNSFTFPDYCTWSGVT

SEQ ID NO: 273018 - protein, 94 aa, Glycine max
  unsure (1)..(94): unsure at all Xaa locations
  Clone ID: PAT_MRT3847_88558C.1.pep
DNLMAALREGADFTGFFAWSLLAPFEWLFGFSVRFGLPPVAFSPLXRSPKFSALWSEPFLVNYCVADSLVPPHAEKREFCLFIHPTLVLRPSRA

SEQ ID NO: 273019 - protein, 67 aa, Glycine max
  Clone ID: PAT_MRT3847_88559C.1.pep
MVRIRNRKRKAFERNRKNMYTVHPFPWDCSSIGQSTALSRRKLRVRAPSVPMDPTPPKKRHLFIFCV

SEQ ID NO: 273020 - protein, 95 aa, Glycine max
  Clone ID: PAT_MRT3847_8855C.1.pep
RVPTESGAMLVLVPLLRCNNPWAQEHAITTSDPKCMKNITRGEDHSTRQRSRLFAKSQDITDPSTYGLEVYLCWVQPVQRRRNYRAGAWEDSSPH

SEQ ID NO: 273021 - protein, 79 aa, Glycine max
  Clone ID: PAT_MRT3847_88560C.1.pep
LCSSKWHHCHNPQSPQSDGEKKTKIWIILVVVVGLICLGIHIFLVWRFKRKPKAISSAFGYNNNSEILVIDLTRSTDLS

SEQ ID NO: 273022 - protein, 38 aa, Glycine max
  Clone ID: PAT_MRT3847_88561C.1.pep
NIKYNTSFELFHCHYWHFILALLVRMSLIQYLWVNEIT

SEQ ID NO: 273023 - protein, 47 aa, Glycine max
  Clone ID: PAT_MRT3847_88562C.1.pep
KLAAPLLYSCQPRQFYHLIGFMLEFTVLSMETLCTLIDEVLSSSCVL

SEQ ID NO: 273024 - protein, 60 aa, Glycine max
  Clone ID: PAT_MRT3847_88563C.1.pep
SMYISLYNPFSHRFGDLTSAYRDAGPPLKDVKVTKRCALTGNDYQNTPGGRLIVTAALRE

SEQ ID NO: 273025 - protein, 143 aa, Glycine max
  unsure (1)..(143): unsure at all Xaa locations
  Clone ID: PAT_MRT3847_88564C.1.pep
MASDGGANRLADKGSKKKKGKATANTVANLSESAADNQEQTLTKSKRGPKRGKDTSSQTXDSKTGSRKELLKMKEDNPGPSQEWIMQKITALLSRFEEQGLDDPETILRPLANQIRPTIIXSRCEKQNVLLTNNAERMKRLVD

SEQ ID NO: 273026 - protein, 79 aa, Glycine max
  Clone ID: PAT_MRT3847_88565C.1.pep
SNLLYLTITTSKTKFYKYIYSSSSHIYFHYYIQLLHHQNILHYYMPTLTYTSTNLQNHSHFISHNIIYFPTSFIFLSLF

SEQ ID NO: 273027 - protein, 148 aa, Glycine max
  Clone ID: PAT_MRT3847_88566C.1.pep
SCRIRHHVAKIFFSVTSGSSSFGNTFRVTCDGENIEVPGEKGICVLSFDKDLKNPSICKIFECSDQSSCNSFCSAIEKIKDGSYLVLGYKGNSVKNFTSDCKKTISNLGSKEISRLDDRESWALITKKGSNSVLEYRQPNLVNFSYNL

SEQ ID NO: 273028 - protein, 432 aa, Glycine max
  Clone ID: PAT_MRT3847_88567C.1.pep
MAAKRVYQVWKGSNKFICGGRLVFGPDARSLFVTLLLIIVPVIIFCICVARHLRHELSSYNSGYAILAVAILFTVHVLVVLFLTSSGDPGIVPRNPHPPEEEFRYDSSVSVDAGGAGRQTPSLQFPRTKEVVVNGIAVKVKYCETCMLYRPPRCSHCSICNNCVERFDHHCPWVGQCIGLRNYRYFFLFVSWATILCIYVFSISAFYIKVLMDRYHGTVWKAMKESPASVILMAYCFISLWFVGGLTGFHLYLIGTNQTTYENFRYRADNRINVYNRGCFNNFLEVFCTKVKPSRNNFRAFVQEEVPRPPPPVISREPEPDLGGGDPRSKVEDDLDIGEDLLKISQRRNIEEIDEDIRSRGSNGPPHNTSEVDSVLGSDRRAPTIRSEARHSSEGRSESWEIGSEVLANSTVTESRSYVVSKEVRQKLGGSF

SEQ ID NO: 273029 - protein, 59 aa, Glycine max
  Clone ID: PAT_MRT3847_88568C.1.pep
QNKYTIYLCMGNSKAPIFFLAKENQISHRFGFSGRVVEHFYQWLIFQPHTPIGPTQKNP

SEQ ID NO: 273030 - protein, 32 aa, Glycine max
  unsure (1)..(32): unsure at all Xaa locations
  Clone ID: PAT_MRT3847_88569C.1.pep
MSELDDQIPTAXDPFADAXADDSGAGSKEYVH

SEQ ID NO: 273031 - protein, 176 aa, Glycine max
  Clone ID: PAT_MRT3847_8856C.1.pep
MGGKGKRRREKNYRAAHGGYTGLPPPPDASKHDALPSKLRQIISFTQNPTGAIGFSNDKKNVGGHAQNKTALKDTGDVETVDVKQGISNGQLKAPQLLDRSEEKRMESGGVDKKKKKRKRKEVKDLRFEMEVDKTSSQLKRKERKKKYFEAKKKKHKKSNEEKMDFPGQEKIKFGD

SEQ ID NO: 273032 - protein, 67 aa, Glycine max
  Clone ID: PAT_MRT3847_88570C.1.pep
ERKRAEQEDASSFQHWVSTYCSKWECIQSCSFSVSDLLILGVPCSTVQTLQHPAIVLLPFKFNVSLP

SEQ ID NO: 273033 - protein, 65 aa, Glycine max
  Clone ID: PAT_MRT3847_88571C.1.pep
FSLTLRKFLVLSFNFVYIPTKTSHGKSILRDQSMDNFDWEDPANQNFFLKKTLPRKLTKFLKTFF

SEQ ID NO: 273034 - protein, 81 aa, Glycine max
  unsure (1)..(81): unsure at all Xaa locations
  Clone ID: PAT_MRT3847_88572C.1.pep
CLEGRRGLSPAEPGGVGAGSVGQLAGRGCLRXWXLLLIIXLLIQGALCVPVCXNSPRRGKAEPRALQQGRFPSPXFRLLST

SEQ ID NO: 273035 - protein, 48 aa, Glycine max
  Clone ID: PAT_MRT3847_88573C.1.pep
TNKKCPKCMNASPKNFVLIPLGDRIFPPIYETHLFSLSGIIILNYSIG

SEQ ID NO: 273036 - protein, 162 aa, Glycine max
  unsure (1)..(162): unsure at all Xaa locations
  Clone ID: PAT_MRT3847_88574C.1.pep
MSDRGDTPCPLCAEEMALTDHQLKPCKCGYEICVWCWHHILVMAEKDDTEGRCPACRSPYHTEKIVGMAANCERLVAEVHIEKKMXHRLAKSNFSDARKQLSSVRVIQRNLVYIVGLPLNLAGEDPLQRRDYLGQYGKVLQVPMSRTTAGVVQQFPNNTCSV

SEQ ID NO: 273037 - protein, 45 aa, Glycine max
  unsure (1)..(45): unsure at all Xaa locations
  Clone ID: PAT_MRT3847_88575C.1.pep
RMTENXSALSXIXHSXXLXXXXXFLKXXNXXXXTXXRAYXRXHXI

SEQ ID NO: 273038 - protein, 75 aa, Glycine max
  Clone ID: PAT_MRT3847_88576C.1.pep
VNKRLCGSVEKGPRLIALKYQGFLHFFERKSHTGGCVSLGSQDLAFYYGKAHLLVDLGNQSRQIGCVTPRNQLLL

SEQ ID NO: 273039 - protein, 51 aa, Glycine max
  unsure (1)..(51): unsure at all Xaa locations
  Clone ID: PAT_MRT3847_88577C.1.pep
MLPIFCPPKTKPPPPRPPPPXKPPNPPAPRQPPPXPPPPPTPLCPSTPSPP

SEQ ID NO: 273040 - protein, 54 aa, Glycine max
  Clone ID: PAT_MRT3847_88578C.1.pep
HGIIKVSCERIFFKPFGKGRIGHFCFQSHCQSNALLVSKFVKSGWDFEFVKIFI

SEQ ID NO: 273041 - protein, 52 aa, Glycine max
  Clone ID: PAT_MRT3847_88579C.1.pep
MSLHVTVAHIMRRFHDQESELNDVALISRSPHPLILQAYVVCHKRCFGKGFR

SEQ ID NO: 273042 - protein, 250 aa, Glycine max
  Clone ID: PAT_MRT3847_8857C.1.pep
SVTDGTEDTTETQTPSSSSFLCLQQTPSFTTPHNNNNNHSDASVADILVSVFTEQPNADTPELNCFAPILTPPLVESVLTRLRTWKLAHSFFHWASNQGFRHTCYTYNSIASILSRSHQTSPLKTLLKQISDSAPCSFTPGALGFLIRCLGHAGLAREAHHLFDEMRLKGLCVPNDYCYNCLLEALSKSGEVDLIEARLEEMKGFGWEFDKFTLTPLLQAYCNARRFDEALRVYNVMREKGWVDGHVCSM

SEQ ID NO: 273043 - protein, 118 aa, Glycine max
  unsure (1)..(118): unsure at all Xaa locations
  Clone ID: PAT_MRT3847_88580C.1.pep
TKTFSMELXIGTLKTIKLQRIINHKSKKFTCKKMSEHENLIKHFQHMKSKKIIDYQINYQNDREKEANNNPNFFGKQRSIERRMLLXEMIEDSTREGKFRTSRNLCLALFYHRGKGHW

SEQ ID NO: 273044 - protein, 129 aa, Glycine max
  Clone ID: PAT_MRT3847_88581C.1.pep
MASETEAALAATPSDGPTVFDKIINKEIPSTVVYEDDKVLAFRDIDPQAPTHILIIPKVRDGLTGLSKAEERHCEILGRLLCTAKLAAKQEGLDDGFRIVINDGRDGGQSVYHIHVHLIGGRQMGWPPF

SEQ ID NO: 273045 - protein, 89 aa, Glycine max
  Clone ID: PAT_MRT3847_88582C.1.pep
NAHDVNLSHLSHHLRQMSSAFTSILYRARGLASRNGICSQSWVEGVNSRRPRLGDSTLSPGRVADGCSYAWQSRMCRPYVDFAKVEAAR

SEQ ID NO: 273046 - protein, 77 aa, Glycine max
  Clone ID: PAT_MRT3847_88583C.1.pep
LGFLSFRLWHHKFLQSFWQHLLSSLLLTPRKARTKTCTSEKHYPEAVMYLLNLSVYVVLQSLHEEDAHSQKVILPQG

SEQ ID NO: 273047 - protein, 99 aa, Glycine max
  unsure (1)..(99): unsure at all Xaa locations
  Clone ID: PAT_MRT3847_88584C.1.pep
NPQGSPAQIRGVATQTHAXXASTSIYTGMKGATKAMETLNKRMVPAKQVKAIKEFQKXSAHLDMTIEMMSQSIDETLDIDEAEEEYRELTSQILDEIRS

SEQ ID NO: 273048 - protein, 91 aa, Glycine max
  unsure (1)..(91): unsure at all Xaa locations
  Clone ID: PAT_MRT3847_88585C.1.pep
VEVIHDKNTFLDRSEQLTSHILLHKTSERRFQAGNIRVWRILSFERSQRAHMTWRGLHCIPXSFFSSKFQILNVIQNSHLVLLLKINTEIY

SEQ ID NO: 273049 - protein, 77 aa, Glycine max
  Clone ID: PAT_MRT3847_88586C.1.pep
LALLVHDRISRSTCFDIVHERTISHMLRLRLVSIHICKLILLVLVPRPVRLRQKVSATHRPRSCACTRCSYVPGLDA

SEQ ID NO: 273050 - protein, 190 aa, Glycine max
  Clone ID: PAT_MRT3847_88587C.1.pep
PPQGGAFFRNFPRYCPWVFNKTKGPFFFPRGGSLWKPPLKQMVFPPLSKFFGKIYGKPQKKKWGGGPLQPPPFFFCPANFFGKIPKGFGAQSFPPVKKVFFPNAPKFFFFKKGIFFSFPPPPPRQRVSPPFFFFLKKLGENPPFGWINPSQAGGWAIFFPPQKRPPVCKIFLAFLGQPLLKQGVLMGFFP

SEQ ID NO: 273051 - protein, 64 aa, Glycine max
  Clone ID: PAT_MRT3847_88588C.1.pep
LDELWPSPSISNSFPWRFMQKLERPGSTFGGGEKYRPEKITTHKPPPNGYFLSKFPHYLHDPPN

SEQ ID NO: 273052 - protein, 56 aa, Glycine max
  Clone ID: PAT_MRT3847_88589C.1.pep
ATSAIHQSAFTGQTALKQLNEFVRMTGGAGKGHTNMHRTVNNAPHTIWYNPNPAKY

SEQ ID NO: 273053 - protein, 112 aa, Glycine max
  Clone ID: PAT_MRT3847_8858C.1.pep
HCCEGSVGTTCMGFEVNLNPSIVGSHEEFDLSTRLFFYSLVIKRQNLTEKSAPQLPLLSHFYSIQVKYIFSILFFFEFVLVFNCVCNELELELELATWIVSQRVFYSRFPPK

SEQ ID NO: 273054 - protein, 50 aa, Glycine max
  Clone ID: PAT_MRT3847_88590C.1.pep
EAIVTISYTGLRLSLIMTHQSFYSSQSHITRLSMPTFQTMMVTLTIVQME

SEQ ID NO: 273055 - protein, 112 aa, Glycine max
  unsure (1)..(112): unsure at all Xaa locations
  Clone ID: PAT_MRT3847_88591C.1.pep
MGGHTSSQKLILCPKKKRKRFLSGGRTRGSLLNCPCLLAHNHLICSRVRNRLLFVMQPYDXANPAVNNFSGVATHSHFSTCLTNXDAAYDSASQKIRSLNEPSYPPCITAIC

SEQ ID NO: 273056 - protein, 267 aa, Glycine max
  Clone ID: PAT_MRT3847_88592C.1.pep
KKSSSASKGAAANDGVIKGGSIDWELRPGGMLVQKRQPLDSSSSSMIKIKVSHGSYHHEVTVPAQSTFGHLKMVLTSETGLEPKEQRLLFRGKEKEDEECLHMVGVKDMSKVILLEDPASKERKLEEMHKSEDISKACEAISKVRTEVDKLYQKVVALETTVCGGAKVEDKEFAILTELLMVQLLKLDSIAAEGEAKGQRRVEVRRVQSYVDTIDNLKARNFAAFSNAGNNAVPVIWEALESGVGSLKSPTSFPTSTVITQNWEHFE

SEQ ID NO: 273057 - protein, 53 aa, Glycine max
  Clone ID: PAT_MRT3847_88593C.1.pep
HMPTMHQHIEATPYFILTRWANSPSLIRLDLAPITRYKAKNFIPHAALAEYYT

SEQ ID NO: 273058 - protein, 76 aa, Glycine max
  unsure (1)..(76): unsure at all Xaa locations
  Clone ID: PAT_MRT3847_88594C.1.pep
MKEHKLLTDTLHGHTHPSPGAHTTYQGYPPAHGYPQQGGYTPAGYAPCGYPPAXIVVTPSDGYPSHDHPRSKSSHG

SEQ ID NO: 273059 - protein, 70 aa, Glycine max
  Clone ID: PAT_MRT3847_88595C.1.pep
CRIQTTHLCRCFRQLYFHVISPCTIQSRIQFCVVHESLKPYVCDHFMFFARFHRHHSWVFCNISCLSVSE

SEQ ID NO: 273060 - protein, 524 aa, Glycine max
  unsure (1)..(524): unsure at all Xaa locations
  Clone ID: PAT_MRT3847_88596C.1.pep
KPGFGQSPSLFNTAPAQATSSPFGNSIFGNTQSSPLFSSAAPTGGQTGSAFGQNTSPFGQTTTPSFSQSSLFSSPSSGLVGSIFSSSAPLTSNNLTGFGQTAPSISTPFQPAQPAQSSGAFGFSNFGQTQPVGASSFGGTPRIFGSKYFRPVXEPPQGDGSRERLRTQXLNLNHMIPLXRVEESGSATSASTGISSMKTVGXMMXLRVGPFDSIRWMTTVDLSFLEPMIILRMMVPMVAFFSDDEDTPTTPKADALFIPRENPRALIICPMEHWPGKVSEKASTFKDRSIPVNENGNIXSAVENGFVKEQAQPISTKPTSNGSNEDHSLQKADVYKTLSGHRAGEAAIVYEHGADVEALMPKLRRSDYYTLPRIHELAAKERAEPGFCSHVKDFVVGRQGYGSIRFLGETDVRRLDLESLIQFNNREVIVYMDDLKKPPVGQGLNKPAEVTLLNIKCFDKKTGHQYTEGPKIEKYKEMLKRKAEDQGAEFLSYDPTKGEWKIRVSHFSIYKLVEDENSWINDDN

SEQ ID NO: 273061 - protein, 154 aa, Glycine max
  unsure (1)..(154): unsure at all Xaa locations
  Clone ID: PAT_MRT3847_88597C.1.pep
PLLTSRHLSQRRIRLPVRKYHSKNDGPKVAFLGDXEDTPTTPKADALFIPRENPRALIICPMEQWPGKVSEKPSTFKDRSIPVNENGNISKDASVTPDRTTSQDKDKEKSAVENGVVKEQAQPITTKPTSNGSNEDHSLQKADVYKTLSGHRAG

SEQ ID NO: 273062 - protein, 62 aa, Glycine max
  Clone ID: PAT_MRT3847_88598C.1.pep
DKKALKAFKRLGTNLPEIEEKINARTSVPSLKTRIGPVKLPYTWLHRSSKKGLPFKGIPTSI

SEQ ID NO: 273063 - protein, 69 aa, Glycine max
  Clone ID: PAT_MRT3847_88599C.1.pep
TRPVSLSPLPFFFSLSFLLSLFFFFGGIFSFLWMDFIYLLILGFGLFYWAWNPSGEVRIFALSHFACVV

SEQ ID NO: 273064 - protein, 61 aa, Glycine max
  Clone ID: PAT_MRT3847_8859C.1.pep
SEYWPRVCHVADEPPMPNRRWDMLVTAFSSGVFCCTMYFMVVWLSFSITRFIVEMYKEGYH

SEQ ID NO: 273065 - protein, 83 aa, Glycine max
  Clone ID: PAT_MRT3847_885C.1.pep
FDRIGFVTQDDVLFPHLTVKETLTYVALLRLPNTLRKEQKEKRALEVIEELGLERCQDTMIGGSYVRGISGGERKRVCIGNEI

SEQ ID NO: 273066 - protein, 57 aa, Glycine max
  Clone ID: PAT_MRT3847_88600C.1.pep
RDWKTSFFAVIPQRKRCQSDSEVNAEDIIIEAEEESEQNDDITSNKKICVEEVPSNS

SEQ ID NO: 273067 - protein, 68 aa, Glycine max
  Clone ID: PAT_MRT3847_88601C.1.pep
LRDRFVLEEFGCLKLKPAIHCWLNWKFFLPGALWNSHFVPHYLAFVLIFLILGIPTGKGILPFVTITF

SEQ ID NO: 273068 - protein, 36 aa, Glycine max
  Clone ID: PAT_MRT3847_88602C.1.pep
GPMYNHTTLHLTQLLSPKLIFIHPTITSTSLSKTLF

SEQ ID NO: 273069 - protein, 218 aa, Glycine max
  Clone ID: PAT_MRT3847_88603C.1.pep
MASPPASPPPPPLPPSNASDSPSAVKRTRKASRLRSLSTRPPSVERPVVHVDPGTSKADGSHRKKLRTYLGIVTRDKVDVMWKEVPTAQKDLIWKDIQAEFEIPEASDSRTKKKLLQTVDERWRQFKSDLTRKWTLAADQDGVDDTVCEKYGIRKEKWAQFFQTSRDLSWEKLLAEKTKKKMEEVAQSGSVDGVIDPPSPVRRHVKWKISHVASLTND

SEQ ID NO: 273070 - protein, 32 aa, Glycine max
  Clone ID: PAT_MRT3847_88604C.1.pep
QRLLGLQLHQMRTRSLMKSLAYQYEYFATSPL

SEQ ID NO: 273071 - protein, 95 aa, Glycine max
  Clone ID: PAT_MRT3847_88605C.1.pep
RLERLEHDSALLNINDTTTILAHLSTITWTHSHCSTTITDHFRLAMTSVEHVRPCLRATLSDRYLVLAPDFALSICASQPSSLSSIVPLKRLTLH

SEQ ID NO: 273072 - protein, 42 aa, Glycine max
  Clone ID: PAT_MRT3847_88606C.1.pep
LNAPYMLQNSVGGINLQRSYTVNSFLVSSVELYSSNYRQTSV

SEQ ID NO: 273073 - protein, 103 aa, Glycine max
  unsure (1)..(103): unsure at all Xaa locations
  Clone ID: PAT_MRT3847_88607C.1.pep
HASGKSQKAYLVLIDLELTGIGIKYGVSNTNNPFQRSSLLLFLTAIFSHVLASTADMTKQIIIITFHMSGITGCETLMWILIHDXMCYFMVNLLLLLLLAKFF

SEQ ID NO: 273074 - protein, 35 aa, Glycine max
  Clone ID: PAT_MRT3847_88608C.1.pep
GPRIDGCLSLGVERLILANAGVFGLSDFHPLTAGG

SEQ ID NO: 273075 - protein, 75 aa, Glycine max
  unsure (1)..(75): unsure at all Xaa locations
  Clone ID: PAT_MRT3847_88609C.1.pep
SLIHILPSWLRGVFKDIRSLSPIQICGLFYDGRFXFWSKHDKNLALTEEEKMELIRNISIPAVVLCIASLMILKN

SEQ ID NO: 273076 - protein, 51 aa, Glycine max
  Clone ID: PAT_MRT3847_8860C.1.pep
YVGELPGYKERSRLLAESKIPDPNAQLQEDILAIIIRQRVRGCNNVILNTV

SEQ ID NO: 273077 - protein, 94 aa, Glycine max
  unsure (1)..(94): unsure at all Xaa locations
  Clone ID: PAT_MRT3847_88610C.1.pep
MGKLTFPQGTPLXVKRMPLTIGGGAGAKNAILMNTPTAVLSMWRYLAGDPVLKVSXKKTSPYIKCPVNLFIATGNXADDTTNIEDLPHMLEQNG

SEQ ID NO: 273078 - protein, 62 aa, Glycine max
  Clone ID: PAT_MRT3847_88611C.1.pep
MGTVASTEDQATDLLQKLSLETQPKPLEIPAPTKKATGKQNGSVDSGNAREGQIPLDERSVT

SEQ ID NO: 273079 - protein, 93 aa, Glycine max
  Clone ID: PAT_MRT3847_88612C.1.pep
KSKPTFRAPSLLLKLNTLNIRGNRDRVDKISRIKGNSHGATAEIEKSHTEIAATDALVVEYDGKRKRGINRIRMDRIRGYQGTRTKTQPLRAR

SEQ ID NO: 273080 - protein, 87 aa, Glycine max
  Clone ID: PAT_MRT3847_88613C.1.pep
FAFLPIKLCPYVALCPAPSLMHLVLDLRRVCAATAPVETAETSLVLHDAVMPLVLIFKLSLPAACFACLIRTEPHRFPCLSPCAGRD

SEQ ID NO: 273081 - protein, 112 aa, Glycine max
  Clone ID: PAT_MRT3847_88614C.1.pep
STPTKSTSKEKTEKVTKGKGKKKEKSSPSDNQLRDAICKILKEVDFNTATFTDILKQLAKQFDMDLTPKKASIKLMIQEELTKLADEADDEEDGEEDAEKDEAPSTGQEVKA

SEQ ID NO: 273082 - protein, 64 aa, Glycine max
  unsure (1)..(64): unsure at all Xaa locations
  Clone ID: PAT_MRT3847_88615C.1.pep
FLYYDSIIWVGGCIILAVSMDFFYVSGVGLGSSSHCSLDGVGCDSLLALSWEPNPFLIYTXPLG

SEQ ID NO: 273083 - protein, 79 aa, Glycine max
  unsure (1)..(79): unsure at all Xaa locations
  Clone ID: PAT_MRT3847_88616C.1.pep
LLQLFYLNHGQTFFYGDTRPDRNKKEMVRVKYFTKVLXYRNKTLASNINLFCRTYYAIVHEGNYYTMSWLRGQEHGPRY

SEQ ID NO: 273084 - protein, 88 aa, Glycine max
  unsure (1)..(88): unsure at all Xaa locations
  Clone ID: PAT_MRT3847_88617C.1.pep
AEPHCHEDLFXXQSXINLFGXFXIXLFRKIFWEFXELXPYHIYXXXQXFYLIRVCXSLSXPPXHSSLXXLSSYVIFFHXQLHVIXNYI

SEQ ID NO: 273085 - protein, 120 aa, Glycine max
  Clone ID: PAT_MRT3847_88618C.1.pep
MNYARLISGGGWLLRRLCTAAETPAKKPNLYRMLSALDITGGTVSQTLDQYIMEGKVIKKPELERCVEQLRKYRRFQHALEIIEWMEIRKVNFSWSNYAVQLDLVSKTKGVDAAENFFGG

SEQ ID NO: 273086 - protein, 122 aa, Glycine max
  Clone ID: PAT_MRT3847_88619C.1.pep
AQGYRVSLNAQAWGLVLWFLGPCSPCSVFRFWFVPRYPQASGLPFRPSCFLLIPFALWVLRFKVFCFLGFPGFGGFWFIFLFFNLLGRWLWGHASFSFCFGVPVCPFALWWRLKVLCSFFFF

SEQ ID NO: 273087 - protein, 250 aa, Glycine max
  unsure (1)..(250): unsure at all Xaa locations
  Clone ID: PAT_MRT3847_8861C.1.pep
MALSLLCPLLATFLFMQTMADTSFVQSRAAFYPNSQENGTDVGACEFGSFGAXFNGGDVSAASNLYRNGVGCGACYQVRCGNSALCSGNGVTVVITDQGSGHNTDFILSQRAFGRMALNTDAAASLLALGVVDIQYRRVSCSYPNKNITVKIHESSNNPHYLAFVIWFQQGNRDITAVQICETQNFVCKLLDRSHGAVWTTTAPPSGPLSLRMLFSPEEEGEETWVVPVNKIPQDWKAGQTYDLGVQVDQ

SEQ ID NO: 273088 - protein, 66 aa, Glycine max
  Clone ID: PAT_MRT3847_88620C.1.pep
TRPLFNFFFFFVSIFFLSTVVKRVDSLCDAVSSYVKLHETMIDLHVFFFLEVSAALGGLSIIEHAL

SEQ ID NO: 273089 - protein, 53 aa, Glycine max
  Clone ID: PAT_MRT3847_88621C.1.pep
NNNHSVIIYGPWGYCLHHSYSSYRIMIARNEIPKFILHLILFKFNIPSTSECK

SEQ ID NO: 273090 - protein, 227 aa, Glycine max
  Clone ID: PAT_MRT3847_88622C.1.pep
ERFDREEFVNGVSRWLQRAQRARVASGDAGPHTMKFLSDFHTETVREHDLLDVGGQVNEEAEGIENAKWISIKAVLLLLLGTIIAAAFADPLVDAVDNFSEATSIPAFFISFIFLPLATNSSEAVSAIIFASRDKRQTASLTFSELYGAVTMNNVLCLSVFLALVYARGLTWDFSSEVLVILVVCIVVGVFASLRTVFPLWTAILAILLYPFSLALVYVLDYVFGWS

SEQ ID NO: 273091 - protein, 159 aa, Glycine max
  Clone ID: PAT_MRT3847_88623C.1.pep
RRSPRLNNVEQRPPPLRRCPRLNNESSDKKLKDTRVKKGGEAETKENRVVSDEGFGGGRKKKRNRKRIEVETQENGVVSDKGFVGGRKKEENEERVKTKANCFVLDEGFDGGREKGVNGGKRKRGGEEISKGWTKEQELALQKAYLAAKPSPHFWKDVS

SEQ ID NO: 273092 - protein, 270 aa, Glycine max
  Clone ID: PAT_MRT3847_88624C.1.pep
CSIVSLGLLIAYCLYQIFQPWIQRRKLEFIKHKHVILGLLTHLKKRALGRLLKENGEPDKEEIRRLFQTIDENQDDNLTHNELRALVIGIQFEEIDLDHDDAVKRIMDDFDTSGNERVDREEFVNGVSRWLQRAQRARVASGDAGPHTMKFLSDFHTETKREHDLLDVGGQVNEEAEGIENAKWISIKAVLLLLLGTIIAAAFADPLVDAVDNFSEATSIPAFFISFIFLPLATNSSEAVSAIIFASRDKRQTASLTFSEVCFLVFTLSL

SEQ ID NO: 273093 - protein, 730 aa, Glycine max
  unsure (1)..(730): unsure at all Xaa locations
  Clone ID: PAT_MRT3847_88625C.1.pep
MDENPNPSIPRASSSSSQEFLKQVQAALKRHRPLGTTQSHNVRPKRAMVALRKATNKLEEDPPSISDTCTGEGCKNEPSLLLESLSVGAHNKVQFLTEINNATAQPQDEASIGFNQHEKHQNMQQAESETSLVSEGGKTSMLPKRTIVTQDHLQQFKNFLRQPATQSSVVGLPCPTTTSVHSTSAPMLNSITHSNSCIDSGSHVAAEPYGNLDGNSRPIIQGDVKSPNISLKDTNRMSIDQVASAVQDCNSPIDAEVTVKQSDPSYEQQGCMLKDTSISKCTSCRDDMLSKGEVSAAVTNLQPQVPTSSSEVKLESSKLEKQEKXPSSKASSGLRKRAYDPELFFKVNGKLYQRLGKIGSGGSSEVHKVISSDCTIYALKRIKLKGRDYATAYGFCQEIEYLNRLKGKNNIIQLIDYEVTDKALFEGVINGSFSNKDGRVKDDGYIYMVLEYGEIDLAHMLSQKWKELDGSNQTIDENWLRFYWQQILQAVNTIHEERIVHSDLKPANFLLVKGSLKLIDFGIAKAIMSDTTNIQRDSQVGTLSYMSPEAFMCNESDASGNIIKCGRPSDIWSLGCILYQKVYGRTPFADYKTFWAKFKVITDPNHEIMYAPVSNPWLLDLMRRCLAWDRNERWRIPQLLQHPFLVPPVPCHSSFYQEQTFKLLQLISEACINDPESSQLCCQLQQVLGNPIKSTSIHSLNSLDQQHKLLSRISELCILLQERLTKTDKL

SEQ ID NO: 273094 - protein, 222 aa, Glycine max
  Clone ID: PAT_MRT3847_88626C.1.pep
MAAILARKSLLALRARQLAVSGQGLHSSQYYGLRLSAHSFSTKREDEEREQLAKDISKDWSSVFERSINTLFLTEMVRGLMLTLKYFFETKVTINYPFEKGPLSPRFRGEHALRRYPTGEERCIACKLCEAICPAQAITIEAEEREDGSRRTTRYDIDMTKCIYCGFCQEACPVDAIVEGPNFEFATETHEELLYDKEKLLENGDRWETEIAENLRSESLYR

SEQ ID NO: 273095 - protein, 40 aa, Glycine max
  Clone ID: PAT_MRT3847_88627C.1.pep
LNTFLELWEKECLVLDNWGSQEIYFFNIRFGKILLVEMGD

SEQ ID NO: 273096 - protein, 153 aa, Glycine max
  Clone ID: PAT_MRT3847_88628C.1.pep
KGAAFGIFIIYIVTLSIFPGFIAEDLESKILRDWYPILLITVYNLADLMGKSLTAFYVMQSMTRAIWAATARLLFYPLFVVCLHGPKWLKTEVPMVVLTFLLGFSNGYLTSVLMILAPKSVPLSESELSAIVMTGFLGFGLVGGSVLGWFWIL

SEQ ID NO: 273097 - protein, 54 aa, Glycine max
  Clone ID: PAT_MRT3847_88629C.1.pep
QKSERGIFMNIFFPLIVSTRLFHLVLIGGNLPISKGGKLSFSSDPPPGFLLGGV

SEQ ID NO: 273098 - protein, 107 aa, Glycine max
  Clone ID: PAT_MRT3847_8862C.1.pep
EPGSMSRTSLEKSHIEQKNTEYHLRTMPRSPKGYKSEDNDVNAQKEAEIGIQGLDKSKIVNERHRTSLTWNSARAAHQNEPMWEAHDVQSNRIVMSRRRCQTRQSCD

SEQ ID NO: 273099 - protein, 183 aa, Glycine max
  Clone ID: PAT_MRT3847_88630C.1.pep
MNNEERAVYTIIRERKEMGIWQGDIKREKNIHIPDSLLKKTLKMLITKNLIKEVVNVHNKSKKLLMATDFEPSKEISGGEWYTDGKFDTEFIGALSDACLSNIRRRKVATCDGIVGWIRKVGSDVFPGGVSKGQVEQILKNLVMENKVQEVTSTGFGDFESVPVGEVCYRLVKKGAGGCCHGF

SEQ ID NO: 273100 - protein, 64 aa, Glycine max
  unsure (1)..(64): unsure at all Xaa locations
  Clone ID: PAT_MRT3847_88631C.1.pep
SMAPKPPNTGLLAGPNNGHGFGXKELASHPLHRMGKTSTREHFARNHIREVAGIAPYEKRITEF

SEQ ID NO: 273101 - protein, 111 aa, Glycine max
  Clone ID: PAT_MRT3847_88632C.1.pep
NNLSSNTHQNPMKFHTKVIKFGTNSAYPEQRVNKKGIKFKKFTTPPLKNEDEILIENTKPPPPATFLHPKINHPQTAKIEAVILEKQDPIIDPITQTEPLTRFRNHKRGPK

SEQ ID NO: 273102 - protein, 456 aa, Glycine max
  Clone ID: PAT_MRT3847_88633C.1.pep
MEHVIGGKFKLGRKIGSGSFGELYLAVNVQTGEEVAVKLEPVKTRHPQLHYESKLYMLLQGGTGIPHLKWFGVEGDYNVMVIDLLGPSLEDLFNYCNRKFTLKTVLMLADQLINRVEYMHSRGFLHRDIKPDNFLMGLGRKANQVYAIDYGLAKKYRDLQTHRHIPYRENKNLTGTARYASVNTHLGIEQSRRDDLESLGYVLMYFLKGSLPWQGLRAGTKKQKYDKISETKVSTSIEVLCKSYPSEFVSYFQYCRSLQFEDKPDYSYLKRLFRDLFIREGYQFDYIFDWTMLKYPLICGSSRGRHGTGKAAMHAGPHVQKAEKISVGKEIREKFSGAVEAFSRRNPANASPRGDHTKHRSFEDVPVQKDLHYAQHNSTRYGSSSRRAMISSNKPISSGDHTGRQTITGSRPSGAHRIQPVYDTKQATYTRGGSIRGHRDDPLRNFELLNIREVIK

SEQ ID NO: 273103 - protein, 146 aa, Glycine max
  unsure (1)..(146): unsure at all Xaa locations
  Clone ID: PAT_MRT3847_88634C.1.pep
MKFILVSSSFCAISLCVSVLLLATPKIVEVGSSPQYVSDPTTVDHLVFGIASSGISWPKRKEYSKIWWNWKLNKTMRGCVFVDTLPHEENANNNNDGSRPPLCVSEDTSQFLYTYKPXGLRSAIRVARVVKETVALNHSGVRMYVF

SEQ ID NO: 273104 - protein, 55 aa, Glycine max
  Clone ID: PAT_MRT3847_88635C.1.pep
THMCISSSLCIRDMNNSSIQRVVLMLCNRHQASMLNPESISQCRLTRINSVNMSP

SEQ ID NO: 273105 - protein, 114 aa, Glycine max
  Clone ID: PAT_MRT3847_88636C.1.pep
GGTNLLLKIYGAINTQPAAGNRGARGWELVRVPPLAAFSLPLGSRALFLAWPIYLHFQRAINSTDTGFKRWPEMNLLWDLKHIMAMTMMVTLMSAAHRIVWELMCRKSLPFHKL

SEQ ID NO: 273106 - protein, 74 aa, Glycine max
  unsure (1)..(74): unsure at all Xaa locations
  Clone ID: PAT_MRT3847_88637C.1.pep
LFDHWCXVLEARHNKAISRDTWSQLLEFAKTVGSNLSDYDAEGAWPYLIDEFVEYLNENGIIQNDLINDSSLKR

SEQ ID NO: 273107 - protein, 55 aa, Glycine max
  Clone ID: PAT_MRT3847_88638C.1.pep
IFVLSQEHSWTHGSTNLTSDVGPFLVVFFFLLERHTFLECCNKLIQMITHHSTFS

SEQ ID NO: 273108 - protein, 259 aa, Glycine max
  Clone ID: PAT_MRT3847_88639C.1.pep
MHKLGRGHRDKLQQFITITGASEKIALQALKASDWHLEGAFDFFYNQPQLKTFTDSRHLEELYNRYKDAYVDMILADGITVLCNDIQVDPQDIVMLVLSWHMKAGTMCEFSKKEFIEGLQSLGIDSLDKFREKIPYMRSELKDEQKFREIYNFAFGWAKEKGQKSLALDTAIGMWQLLFAEKQWPLVDHWCQFLQARHNKAISRDTWSQLLEFAKTVGSNLSDYDAEGAWPYLIDEFVEYLNENGIIQNDLINDSSLKW

SEQ ID NO: 273109 - protein, 38 aa, Glycine max
  Clone ID: PAT_MRT3847_8863C.1.pep
YVNDYLNLQLQHTNCLCIGSSDQHSNGAGRGLHYYISF

SEQ ID NO: 273110 - protein, 64 aa, Glycine max
  Clone ID: PAT_MRT3847_88640C.1.pep
PSSFPSSIFPLDFLCINLCHTLFFFVLTSLHHTFPSILLSCLILLCMSMCHALSFLSAYDFFTL

SEQ ID NO: 273111 - protein, 79 aa, Glycine max
  Clone ID: PAT_MRT3847_88641C.1.pep
KTSDGCCSQTTDRIYSFGDAYQSNSFSLYASRCSSQYTSSAPAPTITTTYLDQGITYVLMLLAMLLTYIIHSSSTYYTF

SEQ ID NO: 273112 - protein, 48 aa, Glycine max
  Clone ID: PAT_MRT3847_88642C.1.pep
IRQFMLLLYLKVYLYVWVKVVICLLNYLIRLVAHKQFYLAGLIRIKMK

SEQ ID NO: 273113 - protein, 63 aa, Glycine max
  Clone ID: PAT_MRT3847_88643C.1.pep
KKKDEIHVIAKYVNDYGGDVKKEITGVLKKKMKKKKEKKNGNEKTTSGLIESIADYVRLKANY

SEQ ID NO: 273114 - protein, 118 aa, Glycine max
  Clone ID: PAT_MRT3847_88644C.1.pep
STTSPQNHIFIFQIDYRMSSSIFLLCCLLIFSLYSLSQHTGYSLDATPTRKLSMPAPVHDLKTQYKMQGADKAMESTPANEDSMTPEYNSNSYSPHDLVFHIDYHGVTTHPTPKHPKP

SEQ ID NO: 273115 - protein, 71 aa, Glycine max
  Clone ID: PAT_MRT3847_88645C.1.pep
HTSRGRFPLNPQLPYPCDRAPQLEMGDDACRSLSRPTTRIPLDAIPWAGGESGHPGGDCPPNGRTELTVVN

SEQ ID NO: 273116 - protein, 97 aa, Glycine max
  Clone ID: PAT_MRT3847_88646C.1.pep
KRKKEIEEKLQGLNDNKHNLVLVLKQILNAEEELKRRNSMQVVAMHGPSVPLQGDGTNDTGLMIRHMPPRLGSQGNLVAADVDGGEGVCFCFLFCFF

SEQ ID NO: 273117 - protein, 45 aa, Glycine max
  Clone ID: PAT_MRT3847_88647C.1.pep
NCAYWNKPHFHVHTICCSNYEFSIFFYSIDKAHSIKYKSFAKCLH

SEQ ID NO: 273118 - protein, 86 aa, Glycine max
  unsure (1)..(86): unsure at all Xaa locations
  Clone ID: PAT_MRT3847_88648C.1.pep
LIFITPQHNANLATNHCTAVDCLPSGYAATNSTALLTTALAFLQFXLTGIPSLCTRLRCFFCFWLPVCRPYTGLPGYSVASGHLCY

SEQ ID NO: 273119 - protein, 205 aa, Glycine max
  unsure (1)..(205): unsure at all Xaa locations
  Clone ID: PAT_MRT3847_88649C.1.pep
MADNDHSHSHPHHHHHHHRPHRLSVPPRSTTFGGTPGTQPAFWYSSSTTPTPTPSKTRRSLSFPKSKSKSRSSVFLLLFFSLRSLYSLLPFLRSSPSFSLFPFSFLVSLLSFSLTLSFSLFSSSSTSSKDPFLHHKPKHPLLSPFLTPSQQRIWVTKXILLALVFLLRFQALRCWGAASMILAGGDGLHRCPAQKPLTAQPPGVS

SEQ ID NO: 273120 - protein, 128 aa, Glycine max
  Clone ID: PAT_MRT3847_8864C.1.pep
QQQLSLAKGTRQRNNEWIFRDVPSDVTIEVNGGTFSLHKFPLVSRSGRIRRLVAEHRDSDISRVELLNLPGGAECFELAAKFCYGINFEIRSTNVAQLCCVSDYLEMTEDFSKDNLGSRAEEYLDSIV

SEQ ID NO: 273121 - protein, 35 aa, Glycine max
  Clone ID: PAT_MRT3847_88650C.1.pep
VLSKLLYMVMHTVITKHHSLFSEICIGVFMLTMSI

SEQ ID NO: 273122 - protein, 122 aa, Glycine max
  unsure (1)..(122): unsure at all Xaa locations
  Clone ID: PAT_MRT3847_88651C.1.pep
RYRFRVPRSTHASADAWWLANEAASEYVKLAKKHSLTSGQLALGFVRDRPYTASTIXGATTMDQLXKENSDAFTRAARALTPEVLDDIESLLKRYRDPTLSKETIEKKERFRMRAFVFFDYE

SEQ ID NO: 273123 - protein, 118 aa, Glycine max
  Clone ID: PAT_MRT3847_88652C.1.pep
PWEGYNFEDAVLINERLVTAAKDDRRDIRKYEIQTHMTSYGSERITNKIPHLEAHLLRNLDKNGIVILGSWVETGDILVGKLTPQMAKESSYSPEDRLLRAILGIQVSPFKETCLNYL

SEQ ID NO: 273124 - protein, 248 aa, Glycine max
  Clone ID: PAT_MRT3847_88653C.1.pep
MEDTPTPSTALTYLNPSYWDEGFSKEEQYEWFKDYSHFRHLIQPHLTPHSAVLELGCGNSQMCEQLHKDGTTNITCIDLSPDAVQCFGLPQSFLLGRKVLEGGAIRVVLGLFLFSPLDSTPSGTMDVLFVDSGNPWNPKPETISKVMATLKGVHGVLKAGGTFISVTFGQPHFRRPIFNAPDFSWSVEWTTFGETFHYFVYVLKKGQRSSYDDIPPVKRFEASPINLLHEELESEDFAFRINVDELNY

SEQ ID NO: 273125 - protein, 74 aa, Glycine max
  Clone ID: PAT_MRT3847_88654C.1.pep
STRRSIRSKLTYACMQNDCSSKMSSKLSSLAVIFKLSDWKTLRMIHLKRLAVKSPLFRLRTSNYACRNHTFNHL

SEQ ID NO: 273126 - protein, 86 aa, Glycine max
  unsure (1)..(86): unsure at all Xaa locations
  Clone ID: PAT_MRT3847_88655C.1.pep
MKLSNVFTISYHKTQNPNRCIFCAWKGIKTGFTKRIPTQKTSGELKXNLLKIEKLKYIRLSEASPDTTXRAHSVHSITALQIEWSL

SEQ ID NO: 273127 - protein, 72 aa, Glycine max
  Clone ID: PAT_MRT3847_88656C.1.pep
RYHRRRVLNCFKTNLLNFDDNLDRLEKMSLSRKARERGNEKEGPWPVYDEVLRRGRRGCWRRRGERGLGPLV

SEQ ID NO: 273128 - protein, 94 aa, Glycine max
  Clone ID: PAT_MRT3847_88657C.1.pep
VLLLLKIIGFSLAKYYSKEVKNLGVFSQIQGPLYIRSKGLDHGKITYVNVYFKPQEYIIYNLSGPKIKSCKISKSSEIFTHVNTSYITYQVPKF

SEQ ID NO: 273129 - protein, 171 aa, Glycine max
  Clone ID: PAT_MRT3847_88658C.1.pep
MKDTMETPTTLTTLLRHVAAKFPSRRAISVAAKFDLTHSRLHRLVESAAAQLVSAGVKPGDVVALTFPNTIEFVVMFLAVIRARATAAPLNSAYTAEEFEFYLSDSESKLLLTSPEGNKPAQAAASKLSIPHATASITKAENEEAELSLSLLNHPELNSPYSVESLVTTLM

SEQ ID NO: 273130 - protein, 229 aa, Glycine max
  unsure (1)..(229): unsure at all Xaa locations
  Clone ID: PAT_MRT3847_88659C.1.pep
ALMANPAIKRGENQWVDKIXELMDAVDNYIPIPQRQTELPFLLAIEDVFTITGRGTVATGRVERGTIRVGETVDIVGVKETTNTTVTGVEIVQKILDEALAGDNVGLLLRGIQKTDIQRGMVLAKPGTITPHTKFSAIVYVLKKKEGGRHSPFFAGYRPQFYMRTTDVTGKVTAITNDRDEXSQMVMPGDRVKMVVELIVPVACEQGMRFAIREGGKTVGAGVIQSIIE

SEQ ID NO: 273131 - protein, 65 aa, Glycine max
  Clone ID: PAT_MRT3847_8865C.1.pep
TAAEDDRRGCKCYLITNMKFFWFLQILFCLAMVLINPSVAPRAPAPPTSPDPLHPPLPKVSDSRP

SEQ ID NO: 273132 - protein, 63 aa, Glycine max
  Clone ID: PAT_MRT3847_88660C.1.pep
NSITNTTLQTIQKTLLYNIHTISHIILKYYITLTKKTHYHFSTITSILYYILISSIRNFSIFF

SEQ ID NO: 273133 - protein, 479 aa, Glycine max
  Clone ID: PAT_MRT3847_88661C.1.pep
MAISWAAATTSKLAYPPHVHFSPSPSSNYLFLKTHKPSATHLSSSFIHPTTILHLAAANTTTRRRSFTVRAARGKFERKKPHVNIGTIGHVDHGKTTLTAALTMALASLGNSAPKKYDEIDAAPEERARGITINTATVEYETENRHYAHVDCPGHADYVKNMITGAAQMDGAILVVSGADGPMPQTKEHILLAKQVGVPNIVVFLNKQDQVDDEELLQLVELEVRELLSKYEFPGDDVPIISGSALLSLEALMANPAIKRGENQWVDKIYELMEAVDDYIPIPQRQTELPFLLAIEDVFTITGRGTVATGRVERGTIRVGETVDIVGVKETRNTTVTGVEMFQKILDEALAGDNVGLLLRGIQKTDIQRGMVLAKPGTITPHTKFSAIVYVLKKEEGGRHSPFFSGYRPQFYMRTTDVTGKVTEIMNDKDEESKMVMPGDRVKLVVELIVPVACEQGMRFAIREGGKTVGAGVIQSIIE

SEQ ID NO: 273134 - protein, 139 aa, Glycine max
  Clone ID: PAT_MRT3847_88662C.1.pep
KLLASLIEAVCKCHDFGDDAVELLVLKTLLSAVTSISLRIHGDCLLLIVRTCYDIYLGSKNVVNQTTAKASLIQMLVIVFRRMEADSSTVPIQPIVVAELMDPVEKTDVDNSMTQSVQGFITRIVQDIDGVLNPVTPSA

SEQ ID NO: 273135 - protein, 353 aa, Glycine max
  unsure (1)..(353): unsure at all Xaa locations
  Clone ID: PAT_MRT3847_88663C.1.pep
MEWCVSMPKIELHAHLNGSIRDSTLLELTKALIGKGVMNFSEVEHIILKYNRSLKEVFKLFDLIHILTTDHNTVTRITREVWLLHKFLFLPNLLPFHCASNNNTXKQVIEDFASENVVYLELRTTPKKNDSVGMSKHSYVEAVLKGLRSITSVDVDFIPHCEDSKTLFTPAPVINGHVRKKIFVRLLLSIDRRETTEAAMETVKLALEMRPYVVVGIYLSGNPRIGDWYIKLIXNLFHLNNFQVEICFLSNVCATTVPSINVPPYTHLYNAKHPLALCTDDSGVFFTCLSKEYKNAADSFGLGRREMFXLSRNAVEHIFADSKVKEGFRKIFHSVAKKYGSVTPVSSLKNICL

SEQ ID NO: 273136 - protein, 85 aa, Glycine max
  Clone ID: PAT_MRT3847_88664C.1.pep
RSSHINNKIRTALGKGKKVVFLTRVDPFPLAVLAVLFGVKRWILSSNASNPMLTRLLENCKSLNHLVEECPFAIGTHYVIFYSLE

SEQ ID NO: 273137 - protein, 366 aa, Glycine max
  Clone ID: PAT_MRT3847_88665C.1.pep
MEWCVSMPKIELHAHLNGSIRDSTLLELTKALIGKGAINFSEVEHIILKYNRSVEEVFKLFDLIHILTTDHNTVARITREVIEDFASENVVYLELRTTPKRNDSVGMSKRSYVEAVLKGLRSITSVDVDFIPHCEDSKTLFTPAPAIDGHARKRIFVRLLLSIDRRETTEAAMDTVKLALEMRPYGVVGIDLSGNPSIGDWTTYLPALKFAREQGLYVTLHCGELPNSKEIKNMLDFRPQRIGHACFFEDEHWRQLKSSNIPVEICLTSNVRTMTVPSIDVHHFAHLYNAKHPLVLCTDDSGVFSTCLSKEYKIAADSFGLGRREMFELSRNAVEYIFADSKIKEDLRRNFNSVAKKYGSVTTVSS

SEQ ID NO: 273138 - protein, 74 aa, Glycine max
  Clone ID: PAT_MRT3847_88666C.1.pep
MNHNPQCLLNCTLSFQVAPYFASKWAIEGLTRSLAKELPPGLAAIALSPGVVNTDMLNSCFGSSAALYQPSETW

SEQ ID NO: 273139 - protein, 49 aa, Glycine max
  Clone ID: PAT_MRT3847_88667C.1.pep
CFFIYGRGSFLFWCCLKNLQRRTARFFRASSTEGSFRPTLACCSSHLGG

SEQ ID NO: 273140 - protein, 104 aa, Glycine max
  unsure (1)..(104): unsure at all Xaa locations
  Clone ID: PAT_MRT3847_88668C.1.pep
PPKRIKKIPLGKQKHGDPGKFXYLYDPKAGKNGVEMKGRLNKSGGISPRFXLGSKKIKXWDVRVLPPKQVGENGLTTPTGLLGHXKARKKNVGGKKLGFFYQVK

SEQ ID NO: 273141 - protein, 122 aa, Glycine max
  Clone ID: PAT_MRT3847_88669C.1.pep
MCKKRIASTNEETHDCDSTLINGSPLRISDGSCSLDENFEYCVKVIRWLECEGHIKHEFRLKLLTWFSLRATEQERRVVNTFIQTLIDDPGSLAGQLVDSFSDIISNKRLRSGFCSKAGASN

SEQ ID NO: 273142 - protein, 165 aa, Glycine max
  unsure (1)..(165): unsure at all Xaa locations
  Clone ID: PAT_MRT3847_8866C.1.pep
SMSVIAGSYGYIAPEYAYTXRVNEKCDIYSFGVVLLELVTGRPPIDPEYGESDLVKWVSSMLEHEGLDHVIDPTLDSKYREEISKVLSVGLHCTSSIPITRPTMRNVVKMLQEVTTIPKCRSVNDGNVPCFHEGASHNISEMKCSLSNNVLKVNILDSLTFSIAL

SEQ ID NO: 273143 - protein, 67 aa, Glycine max
  Clone ID: PAT_MRT3847_88670C.1.pep
SDCCARIRLIHSIMRSSNKANSHFLMKFLMTDKHMDACLLGQNYAKFHLMFKRTVHVALGDSKHNNQ

SEQ ID NO: 273144 - protein, 80 aa, Glycine max
  Clone ID: PAT_MRT3847_88671C.1.pep
TQQRKLTTTTTTTTTTTFVSGRVVLLGIHGNNKPLIPLPILPREGPFCYSVGHLQMDLEDKFLAKGRVLGSSAGPLATAD

SEQ ID NO: 273145 - protein, 88 aa, Glycine max
  unsure (1)..(88): unsure at all Xaa locations
  Clone ID: PAT_MRT3847_88672C.1.pep
MAETKSTSKIVKKQDSKKVSGLTNQPSRKQHRKGENPGRVVPAPDPPSDFGHSNSWICKNSACRAVLSKDDTFXRKCSCCIRNLFDDN

SEQ ID NO: 273146 - protein, 55 aa, Glycine max
  Clone ID: PAT_MRT3847_88673C.1.pep
TMASQMSHNFCKHCNLDLDSYVSGQVFNKYAIGNVLFYCLLFMMFMLNKIYNFFS

SEQ ID NO: 273147 - protein, 83 aa, Glycine max
  unsure (1)..(83): unsure at all Xaa locations
  Clone ID: PAT_MRT3847_88674C.1.pep
MYCVKVIRWLECXGYIKHEFRLKLLTWFSLRATEQERRVVNTFIQTLIDDPGSLAGQLVDSFSDIISNKRLRSGFCSKAGASN

SEQ ID NO: 273148 - protein, 100 aa, Glycine max
  Clone ID: PAT_MRT3847_88675C.1.pep
YFLIALQLLSVLVMILTCAVSFPQYVASHINTPIFIVYAAYDSRLDYSVAQEVSVCIQVFLYRNLLSHVHILPSIGKVFDHSTHSCVFLDSKLEDNIDLV

SEQ ID NO: 273149 - protein, 565 aa, Glycine max
  Clone ID: PAT_MRT3847_88676C.1.pep
MGKAFDIGAVPFNADGWGPPDNATSGSNNNNLPLNVPFAPFSRSDKLGRIADWTRNFNNPTRSKNPADAVFDFANDDSFPASADDDASFRLVDGKPPPRPKFGPKWRFQQQRQLPQRRDEEVEAKKREQEKERARRDRLYHMNRSNPNQQRREAAVFKSSVDIQPEWNMHDQIPFSTFSKLSFTVPEPEDLLLCGALEYYDRTYDRITPKNERRLERFKNRNFFKVTTTDDPVIRRLANEDKATVFATDTILSTLMCAPRSVYSWDIVVQRVGNKLFFDKRDGSQLDLLSVHETSQEPLPESKDDINSAHSLSVEAAYINQNFSQQVLIRDGNKVTFDEANPFANEGEEVASVAYRYRRWKLDDDMYLVARCEVHSVVDVNKQRSFLTLNALNEFDPKYSGVDWRQKLETQRGAVLATELKNNANKLAKWTAQALLASADTMKLGYVSRIHPRDHFNHVILAVVGYKPRDFAAQINLNTTNMWGIVKSIVDLCMKLNEGKYVLVKDPSKPQVRIYEVPADAFENDYVEEPLPEDEQVQPPSEGAEGGEATTTTNDVEDKQIDGQA

SEQ ID NO: 273150 - protein, 96 aa, Glycine max
  unsure (1)..(96): unsure at all Xaa locations
  Clone ID: PAT_MRT3847_88677C.1.pep
GNFPVFKSFGFADELKRWIFGAASALFVLSPWEALPGDPFFVPKTEKEIXKFGKGFRVFPKPAKKFFNPVPRGKGLPVEEKVVQHGTNQGARARKV

SEQ ID NO: 273151 - protein, 71 aa, Glycine max
  Clone ID: PAT_MRT3847_88678C.1.pep
YSVHLPQCQCSFCHSWWHRGPNQLSVFRVLVPPGSGFSQSVLVPLSRRLAKQTWVFPQSPPERGSTGITGP

SEQ ID NO: 273152 - protein, 61 aa, Glycine max
  Clone ID: PAT_MRT3847_88679C.1.pep
CYMITTTVNMVQVHVVTFCKGSFDPSIGWGNGIAIDLSWDLHKVDVGHIQQYVILKWYYCK

SEQ ID NO: 273153 - protein, 983 aa, Glycine max
  unsure (1)..(983): unsure at all Xaa locations
  Clone ID: PAT_MRT3847_8867C.1.pep
LSLTQDSLFLFEARRXLSDPENALSSWDSSAANPCRWRGVTCDPLTATITAVSLPSASLSGPFPAILCRIVSLTTLNLTTNLISSTLSAVVAAVCRNLVVLDLSQNNLVGPIPPXLQHLDLSGNIPPSLAALSRLKTLNLVSNLLTEAIPSSLRNLTSLKHLQLTYKLFLPSRIPXQLGNLRNLETLFLSGCNLVGPIPDTLSNLSHLTNLDFLKNGITAHIPQWFTRLKRVTQIQLFKNKHSRELPKGIWNMXSLRFFDASVNELAGTILTELCELPLASLNLYNNKLEGVLPPILAHSPNLYELKLFSNKLIGTXPRDSGSNLPLNHIDIWFDXFSSEILAIICQRGEFEELILMCNYFSGKILASLGDCRSLKRVRLKSNNLSGSVPDGVWGLPHLNLLELSENSLSGKISKAISGAYNLSNLLLSNNMFSGSIPEEIGMLDNLVEFAASNNNLSGXIPESVMKLSQLVNVDLSYNQLSGELNLGGIGELSKVTDLNLSHNRFDGSVPSELGKFPVLNNLDLSWNKFSGEIPMMLQNLKLTGLNLSYNQLSGDIPPFFANDKYKTSFIGNPGLCGHQLGLCDCHCHGKSKNRRYVWILWSIFALAGVVFIIGVAWFYFRYRKAKKLKVLSVSRWKSFHKLGFSKFEVSKLLSEDNVIGSGASGKVYKVVLSNGEVVAVKRLCGAPMNVDGNVGARKDEFDAEVETQGRIRHKNIMRWLWCCCNSEDQRLLVYEYMPNGSLADLLKGNNKSLLDLPTRYKIAVDAAEGLSYLHHDCVIRLVQDVKSNNILVDAEFVAXIADFGVAKMVTXSAKGHXSMSVIAGSYGYIAPEYAYTXRVNEKCDIYSFGVVLLELVTGRPPIDPEYGESDLVKWVSSMLEHEGLDHVIDPTLDSKYREEISKVLSVGLHCTSSIPITRPTMRNVVKMLQEVTTIPKCRSVNDGNVPCFHEGASHNISEMKCSLSNNVLKVNILDSLTFSIAL

SEQ ID NO: 273154 - protein, 70 aa, Glycine max
  Clone ID: PAT_MRT3847_88680C.1.pep
YADITLIDQSNFDFETTLLYKLSYMATWSKLKGTVPLVKFMEPTYKIIRPELHCTLRSFAAHCQFVMKKI

SEQ ID NO: 273155 - protein, 75 aa, Glycine max
  Clone ID: PAT_MRT3847_88681C.1.pep
GFSSFWGKKAFLAPKKLIPYFKARKHLLKKLGGPKKKIAWVQQKGNLFPSKFPSQLGGFGPGKTLFFFPLPTLEV

SEQ ID NO: 273156 - protein, 95 aa, Glycine max
  unsure (1)..(95): unsure at all Xaa locations
  Clone ID: PAT_MRT3847_88682C.1.pep
MTLFKRLSNTKPLWRSSSNLGGQAYRGTTSWTPPLPAVXNDTXLNSRLTGPRSGTQSRGITLCGSEVRVGKLIGNRGRAHEVLKLDRPREGTGKA

SEQ ID NO: 273157 - protein, 158 aa, Glycine max
  Clone ID: PAT_MRT3847_88683C.1.pep
MVSFTVYKGGKDGKVTKATTEKGELERDQVLVRVTASGLCGTDLHYRTADMALGHEGVGVIEDVGPQVTYMKKGDRVGWGYLHNSCGHCQECLKGNETYCPERAMYAMANTDQGSFASHAVWREAYLFKIPDSLSDEAAAPLMCGGATVFNALHAYNA

SEQ ID NO: 273158 - protein, 43 aa, Glycine max
  unsure (1)..(43): unsure at all Xaa locations
  Clone ID: PAT_MRT3847_88684C.1.pep
XIXHSXXXSIXXDRQAXSFLFRIAWKYDLLXXALMKAXFXTXA

SEQ ID NO: 273159 - protein, 260 aa, Glycine max
  Clone ID: PAT_MRT3847_88685C.1.pep
VPLLLIHGHWNYQRLGYMIIYNFYRNAIFVLVLFWYVLFTALGLTTAINEWSSVLYSIIYSAFPTIVVGILDKDLSKRTLLKYPQLYGAGLRQEAYNKKLFWLAMADTLWQSIAVFFTPLIAYWGTTVDVTSIGDLWTLSVVILVNLHLAMDVIRWNWITHAAIWGSIVATFICVIIIDAIPALPGYWAIFHAAGTGLFWLCLLGTVIAALLPRLVVKYMYQYYFPSDIQISKETEKFGNPKDNGVGQIEMLPVSDGPPR

SEQ ID NO: 273160 - protein, 62 aa, Glycine max
  Clone ID: PAT_MRT3847_88686C.1.pep
CHTAQPSLLTWSHFASLFSLSFCVDVHVNHLGHRVKSQYLISILTGQFYLPPCKEASVISEL

SEQ ID NO: 273161 - protein, 40 aa, Glycine max
  Clone ID: PAT_MRT3847_88687C.1.pep
INMAPIISNMIAHSTSTACVIFDSLSTLIFLSYNPAFATI

SEQ ID NO: 273162 - protein, 80 aa, Glycine max
  Clone ID: PAT_MRT3847_88688C.1.pep
NSVVWGCLMGACEKYGNVDMAEWVAKHLQELEPGNDGVYVVLSNIYANRGLWKEVERIRSVMKQGRLAKVPAYSLAPNSN

SEQ ID NO: 273163 - protein, 142 aa, Glycine max
  Clone ID: PAT_MRT3847_88689C.1.pep
KNQAPRGNPKSGRGTLGIPPPQPIFFLKKKTFLTKNRGGGGPPTPKRGGGSQGKGGDLKTPPKTLGEKWGKKKSQRVQSLQKMAKSPRETNPQEAIPGGENGVGERTPGRGGQGILGPPLGQKTWSPPLFFPKEKKGPRGKG

SEQ ID NO: 273164 - protein, 76 aa, Glycine max
  Clone ID: PAT_MRT3847_8868C.1.pep
MNHQQQSPVTAYPAGAQSNLAAPPPPVGYPTKDDLPSQQNVPVKTTTRGGGFWSGCCTALRYGCCCIHCLQCCFSS

SEQ ID NO: 273165 - protein, 86 aa, Glycine max
  Clone ID: PAT_MRT3847_88690C.1.pep
MSKIKQASMTLVKTYMARVTMELESIRNSDRESIQDSLLLQGVHFAYRAHQFTGGLDSETMCAFEEIRQRVPGNLTGSRELLAGIP

SEQ ID NO: 273166 - protein, 66 aa, Glycine max
  Clone ID: PAT_MRT3847_88691C.1.pep
KAQAQLLEQATSPTIWRKGGQLTLLSLWKVRHPFKADFDPNLRWEEASTSPLLQPQMACCNTGINN

SEQ ID NO: 273167 - protein, 122 aa, Glycine max
  Clone ID: PAT_MRT3847_88692C.1.pep
DGGDPTIQRLIKLRSSVTHSYQMYNIPTAWMLDSGIMSEIKQASMTLVKTYMKRVTMELESIRNSDRESIQDSLLLQGMHFAYRAHQFTGGLDSETMCAFEEIRQRVPGHLAGSRELLAGIP

SEQ ID NO: 273168 - protein, 40 aa, Glycine max
  Clone ID: PAT_MRT3847_88693C.1.pep
ISTQKEAHQLARDGAFEFKQQLCELSRAFLDGDAVQRSFI

SEQ ID NO: 273169 - protein, 511 aa, Glycine max
  Clone ID: PAT_MRT3847_88694C.1.pep
MAGGGVEIGGPGKRAHLYEHKFSWYFVYTCFVGALGGSLFGYDLGVSGGVTSMDDFLKEFFPKVYRRKQMHLHETDYCKYDDQVLTLFTSSLYFSALVMTFFASFLTRKKGRKASIIVGALSFLAGAILNAAAKNIAMLIIGRVLLGGGIGFGNQAVPLYLSEMAPAKNRGAVNQLFQFTTCAGILIANLVNYFTEKIHPYGWRISLGLAGLPAFAMLVGGICCAETPNSLVEQGRLDKAKQVLQRIRGTENVEAEFEDLKEASEEAQAVKSPFRTLLKRKYRPQLIIGALGIPAFQQLTGNNSILFYAPVIFQSLGFGANASLFSSFITNGALLVATVISMFLVDKYGRRKFFLEAGFEMICCMIITGAVLAVNFGHGKEIGKGVSAFLVVVIFLFVLAYGRSWGPLGWLVPSELFPLEIRSSAQSIVVCVNMIFTALVAQLFLMSLCHLKFGIFLLFASLIIFMSFFVFFLLPETKKVPIEEIYLLFENHWFWRRFVTDQDPETSKGTA

SEQ ID NO: 273170 - protein, 373 aa, Glycine max
  Clone ID: PAT_MRT3847_88695C.1.pep
MVVTNTNQLGETIDSTYDRKAEKKAFDDSKAGVKGLVESGVTKIPRMFHAGKLDVIETSPSHSKLSIPIIDLKDIHSNPALHTQVMGKIRSACHEWGFFQVINHGIPISVLDEMIDGIRRFHEQDAEVRKEFYTRDLKKKVLYYSNISLYSDQPVNWRDTFGFGVAPDPAKPEEIPSVCRDIVIEYSKKIRDLGFTMFELLSEALGLNPSYLKELNCAEGLFILGHYYPACPEPELTMGTTKHTDSNFMTLLLQDQLGGLQVLHQNQWVNVPPVHGALVVNIGDLLQLITNDKFVSVYHRVLSQNTGPRISVASFFVNSHDPVEGTSKMYGPIKELLSEENPPIYRDTTLKEFLAYYYAKGLDGNSSLDPFRV

SEQ ID NO: 273171 - protein, 40 aa, Glycine max
  Clone ID: PAT_MRT3847_88696C.1.pep
AMLVESLSQNSHICWWRRNFVNSKIPHRFWLCDWCVLIAP

SEQ ID NO: 273172 - protein, 99 aa, Glycine max
  Clone ID: PAT_MRT3847_88697C.1.pep
HEALVVNIGDLLQLITNDKFVSVYHRVLSQNTGPRISVASFFVNSHDPAEGTSKVYGPIKELLSEENPPIYRDTTLKEFLAYYYAKGLDGNSSLGPFRL

SEQ ID NO: 273173 - protein, 54 aa, Glycine max
  Clone ID: PAT_MRT3847_88698C.1.pep
NNNSLSLYQDIIGFLLLSFSDTATVANCTPVSQNNAITCGKYISSFSLVGGNRR

SEQ ID NO: 273174 - protein, 43 aa, Glycine max
  Clone ID: PAT_MRT3847_88699C.1.pep
HSWKLCSPCISPRAIIQIHSHMLYIIILQSITSITILHLPLHR

SEQ ID NO: 273175 - protein, 59 aa, Glycine max
  Clone ID: PAT_MRT3847_8869C.1.pep
RLYPVHDSKTRCTTERLKQRRQEGFIGKNCNRILMQMCKKIQQHSVIMDPIYSTKKLGP

SEQ ID NO: 273176 - protein, 161 aa, Glycine max
  unsure (1)..(161): unsure at all Xaa locations
  Clone ID: PAT_MRT3847_886C.1.pep
HASVYAWGDGIPDILHLQLRNYLYSFEFFLDDKSWRASIHKYQAGKTRYAHFRQADELLADSGWHCSFCFRYISDFAFKMQAYSHVDRIRFKYFLNPERIQDVICRGADLFDMLPEEYTFQEIIAKLGPIPSTYSGVHLPSYLLRNXADRFRYLLPATAGK

SEQ ID NO: 273177 - protein, 51 aa, Glycine max
  Clone ID: PAT_MRT3847_88700C.1.pep
PLTTPCDVREHFVRSSDNLAWVHSLSHIIENPSVTMNKCPWGIPGAQARTR

SEQ ID NO: 273178 - protein, 261 aa, Glycine max
  Clone ID: PAT_MRT3847_88701C.1.pep
ELHHRRSCSMLAAWLYSAYSATALSSMACHSHSHSNNAHGHGHATSAYDMMPLLPDDSETCVNELGKALVLRGVELTKPNETCDVVYCFCGIRLHHLTCPDSFSVGQSGELVGDAIVRRLEKNCLSSSTNVNGLPGLGGCSKCLNTLYLLNKKTSNSSKAEDRTTKIHNKDCELMGLTWLLAKNRTAYMHTVSAVLRALMLNTDGSYPQSCSLNSDGMPLAVDSSEISDHSSSNNLQPPISLSLLFLCLLLLPMHLTMLSS

SEQ ID NO: 273179 - protein, 71 aa, Glycine max
  unsure (1)..(71): unsure at all Xaa locations
  Clone ID: PAT_MRT3847_88702C.1.pep
EKLFRKVMLKTXLGXPHKRVSPESFYTNSWPECFCQTSTQNPADKCPPNDILNIMNDELQKTETDANSTIS

SEQ ID NO: 273180 - protein, 107 aa, Glycine max
  Clone ID: PAT_MRT3847_88703C.1.pep
MPGVLSSSIVSPGDELVAAGSRTSSANMTAAELPKQVEEKNPYDESLEVREHVQLAYTQHNESAIQPTSFAVNDDCACSFEVALDSLGTLIQQYGLHKSVNEVLVVI

SEQ ID NO: 273181 - protein, 41 aa, Glycine max
  unsure (1)..(41): unsure at all Xaa locations
  Clone ID: PAT_MRT3847_88704C.1.pep
AIXXCAXDAXAXMXEHQLYTXXSLTEIXSSRXXXXRTRXPX

SEQ ID NO: 273182 - protein, 62 aa, Glycine max
  Clone ID: PAT_MRT3847_88705C.1.pep
GGGSGRLASVVASRRCGGRAGRRPGARPGGRAACPGRAWRGGAGGAAAPPPRPPPPPPPPPP

SEQ ID NO: 273183 - protein, 106 aa, Glycine max
  Clone ID: PAT_MRT3847_88706C.1.pep
KFSCGLRVSTATGSTAAMQSAGGFPMPILSQDLQYMLREPISLGATSNYMHGLIKRNQTIVATWTCRKGVIYIDGSHVNYTFKDGDIIAISSKAPVLKVLLPHKFL

SEQ ID NO: 273184 - protein, 61 aa, Glycine max
  Clone ID: PAT_MRT3847_88707C.1.pep
RLCLRRMVFALTFIYKCRSCFMNTSWMTCCIFIFPSGVAGFCAVFNPETMCLILMQIIQLV

SEQ ID NO: 273185 - protein, 84 aa, Glycine max
  unsure (1)..(84): unsure at all Xaa locations
  Clone ID: PAT_MRT3847_88708C.1.pep
HLCLPLLDLKGGSHKNVEKFHSREILLHRCRLNFRNSCCLLYXITLFHVCIHSICDDHNVTHRKLVVSFDFVLPFPEFPCFLLL

SEQ ID NO: 273186 - protein, 131 aa, Glycine max
  unsure (1)..(131): unsure at all Xaa locations
  Clone ID: PAT_MRT3847_88709C.1.pep
PTRSPTRPATRTEVWTTACTIAMTMXFNPDPCCDAWRLESLKRTEFHCDIICATGWTDTAMQDVEGTIDWYICSHECDRRTYXDINPQNTFVINKRMVKLSIPQGTYRRAKXMPVCIWGGAAAXNAMLMNM

SEQ ID NO: 273187 - protein, 50 aa, Glycine max
  unsure (1)..(50): unsure at all Xaa locations
  Clone ID: PAT_MRT3847_8870C.1.pep
VGFGIHKKFTLFEVLHQTQNLKTSQKGISVLWTLTFRGTKVGRHSAPGGX

SEQ ID NO: 273188 - protein, 59 aa, Glycine max
  Clone ID: PAT_MRT3847_88710C.1.pep
KANNRKNILNRKFLYSYTNQSSLEKKKERREILTTRIIKDNTKPPDTKLNRCGTCKGPE

SEQ ID NO: 273189 - protein, 159 aa, Glycine max
  Clone ID: PAT_MRT3847_88711C.1.pep
NKSRGPPFFPFLKGKGKPPRFKKNGGAKTKPLLPQGGVIVKKRAPKRGAPLFRAPRPPPGGGPPKKKFKMDRPLGPPKAIPFLLGGEKEKKKNPLAPKKKKLGFPPPPPWGEKAPLFNPGGGKHLGPKTGPGGSFIYHFWGGGPPFPAPPWIQGPQIWG

SEQ ID NO: 273190 - protein, 98 aa, Glycine max
  Clone ID: PAT_MRT3847_88712C.1.pep
HLQSVSAKQRALCSPGRSAHDGPGLSHISPVSSQEATVTWSGSSQHDESCHGATRGKSWFREEGSSWRSLSRSIFHNVTASTTLCFSLLVVPQSISSP

SEQ ID NO: 273191 - protein, 41 aa, Glycine max
  Clone ID: PAT_MRT3847_88713C.1.pep
NAVSHKFPTITSTISTTRCHSYNTYIGARAPSVLYLTKLET

SEQ ID NO: 273192 - protein, 104 aa, Glycine max
  unsure (1)..(104): unsure at all Xaa locations
  Clone ID: PAT_MRT3847_88714C.1.pep
WRDSCPXAVHPPRIFSPAPRASLLRGRPFFFFFFFFFFCFFFAFFVVVFFPSCVWKTQKKRVSLCPNLNPRYPIFNPGNQMGMGFPIGLGESFFPEITPPNKDV

SEQ ID NO: 273193 - protein, 66 aa, Glycine max
  Clone ID: PAT_MRT3847_88715C.1.pep
LKTILSILLSVLSSFLQFWQGSNYQLFTLYLTDVLRRSRHHSRDMFQFPAWLTIKQRSHVWGCSCI

SEQ ID NO: 273194 - protein, 70 aa, Glycine max
  Clone ID: PAT_MRT3847_88716C.1.pep
TLAPERSSTSASKDRKLFAGIAEPVVRSERHEQIMGSMEKVLNLRRLTVGGGAGLTFCGVKEANSARTSF

SEQ ID NO: 273195 - protein, 59 aa, Glycine max
  unsure (1)..(59): unsure at all Xaa locations
  Clone ID: PAT_MRT3847_88717C.1.pep
XTRADPRVRTGEKDNRGIPHQPLLTMPWSGKFLHTRIQFKIILYPKSCILDCTSLDQLL

SEQ ID NO: 273196 - protein, 518 aa, Glycine max
  Clone ID: PAT_MRT3847_88718C.1.pep
MMQISSTVPAHNLHKFQAIRCPSFSFRCQQASSSSFQKPFISTESTRLHLANLHKLLETQKPEVPPPTQIQHHQPIINDPKEKKGRSFLEGLNLARLWPEMKATDEMSPRHLKRLQRLLSMTGEYSPRNILGGRWREYHGSNDWKGMLDPLDENLRREVVRYGEFVQAAYQAFHSDPAMSTEEPPHPQHVALPDRSYRMTKSLYATSSIGLPKWVDEVAPDLGWMTQRSSWVGYVAVCEDRREIARMGRRDIIISLRGTSTCMEWAENLRAHMVEMGDEEGKAKVECGFMSLYKTKGAQVPSLAESVVEEVRRLIDLYRGEELSISVIGHSLGATLALLVAEEISTCCPQVPPVAVFSFGGPRVGNKAFGDRLAAKNVKVLRIVNSQDVITRVPGIFVSEELEQKIRNVGGGVLEENTPLAYSHVGTELRVHTKMSPYLKPDADMACCHDLEAYLHLVDGFLASNCPFRSNAKRSLARLMQDQSANVKKLYTSKAKSLTVNLSRQGSMSMSNCLPSPS

SEQ ID NO: 273197 - protein, 389 aa, Glycine max
  Clone ID: PAT_MRT3847_88719C.1.pep
REYHGSNDWKGMLDPLDENLRREVVRYGEFVQAAYQAFHSDPAMSTEEPPHTQHVALPDRSYRMTKSLYATSSIGLPKWVDDVAPDLGWMTQRSSWVGYVAVCEDRREITRMGRRDIVISLRGTSTCLEWAENLRAHMIDMPDNDSSEEAQGKPKVECGFMSLYKTKGAQVPSLAESVVEEVRRLIDLYKGEELSISVIGHSLGATLALLVAEEISTCCPQVPPVAVFSFGGPRVGNKAFGDRLAAKNVKVLRIVNSQDVITRVPGIFVSEELEQKIRNVGGGVLEENTPLAYSHVGTELRVHTKMSPYLKPDADMACCHDLEAYLHLVDGFLASNCPFRSNAKRSLARLMQDQSANVKKLYTSKAKSLTVNLSRQGSMSMSNCLPSPS

SEQ ID NO: 273198 - protein, 83 aa, Glycine max
  Clone ID: PAT_MRT3847_8871C.1.pep
MRATHHSFVKFCQYGFIFGYFTAHSESSMLTVCLLYMTTCGPARYSIFTSIAIVSYTFLNLHHILSYWIKFHIASRLFFYLLF

SEQ ID NO: 273199 - protein, 66 aa, Glycine max
  Clone ID: PAT_MRT3847_88720C.1.pep
GVNLCRILKSEKLCCFSLVGCGGRRIAERGVSGIKKAVPYGSLFGVVKKCGMLAAVRGRGRPVFFS

SEQ ID NO: 273200 - protein, 95 aa, Glycine max
  Clone ID: PAT_MRT3847_88721C.1.pep
MKIHVIWSCMRCHLLEFFSNRQRKRGAVDIGAQRGMEASVDEERRDWGFFANPSWKRYFFLQCRFKNKGFIGLPFLGVLCCLREKALCRFSKQKK

SEQ ID NO: 273201 - protein, 60 aa, Glycine max
  unsure (1)..(60): unsure at all Xaa locations
  Clone ID: PAT_MRT3847_88722C.1.pep
AFDVPVFGPIPLFTWVVLFXTTMRRQISHMSKYKYLPFSSGKQRYDVKRAPPEITSLSED

SEQ ID NO: 273202 - protein, 205 aa, Glycine max
  Clone ID: PAT_MRT3847_88723C.1.pep
KAEDPAARRYIISFNANTTLVVEGVEFVKCEVVGQSFMLHQIRKMIGLAVAIMRNCAPESLIDEALQQDVNINVPTAPEVGLYLDECFFTSYNQKWKDHEELSMKAYEKEADEFKMKYIYSHIASTEQKEGTVALWLHSLNHRNYPDLRVINEEAIPNNKSADPKEAITDNKSADPEDATTKNKGADLKEAITDNKSADPEVVTE

SEQ ID NO: 273203 - protein, 56 aa, Glycine max
  Clone ID: PAT_MRT3847_88724C.1.pep
KKLKIVFKITKKHIINCSLLILTISVVEFTSIGNSPSCSYIFLFIWVLFVVNIFNE

SEQ ID NO: 273204 - protein, 52 aa, Glycine max
  Clone ID: PAT_MRT3847_88725C.1.pep
VEEVRQVVSFLLWLRSRLCLYINQFCFVSFLIGAGCFSCVLCKCGRFSVADS

SEQ ID NO: 273205 - protein, 99 aa, Glycine max
  Clone ID: PAT_MRT3847_88726C.1.pep
SSLGESSTLVREKQKRTSTRSTNASSNNHHVTFCKFARRLVMVLSLRTWFFAIRELALHHLSQKQLTNVVIAAAMFILSDFGIVVVAVIASFVTEAIGF

SEQ ID NO: 273206 - protein, 110 aa, Glycine max
  unsure (1)..(110): unsure at all Xaa locations
  Clone ID: PAT_MRT3847_88727C.1.pep
FPLNSPTIYSLQPCTKPWAPYHEPVYNLVDAVNKIIPPVLIGTSLQGXTFTLNGMDAMASIKNRPIILSVLKPTVQXECPVVKSYQWGLRTAIFECGSPFTPDYYDEKIP

SEQ ID NO: 273207 - protein, 41 aa, Glycine max
  Clone ID: PAT_MRT3847_88728C.1.pep
STKCPGLYFVHMSGTRNLLCVKRKDLQDYYVGCYPGLKSHL

SEQ ID NO: 273208 - protein, 216 aa, Glycine max
  Clone ID: PAT_MRT3847_88729C.1.pep
FSRDPFAPCDNNLPSQRFSSSATAKRSQSAGRNKSVITTAAERDPSPAGKGKRSASPVPSKCVVPSLVSAREENRKVSREPAIIVPSRYRQPSPTGRKQPSSSPRRTSLSPGRRLSGGLKVSPLVADSSVKKKMATIVAGISKVSDALVGSKSARKNWDEQLPATPVEAGGSKSKVDAQAILRTQAAMSRRLSDVSGQKPGSNDSSSNEKTKAVSP

SEQ ID NO: 273209 - protein, 277 aa, Glycine max
  unsure (1)..(277): unsure at all Xaa locations
  Clone ID: PAT_MRT3847_8872C.1.pep
MSFQDIEXAGRPFRSRRGLMNGKXDPTQAVAAGIFQIXNTAVSTFQRLVNTLGTPNDTPYLREKLHKTRLHIGQLVERXTQAKLKQASDIDHHAEVIASKKIADAKLAKDFQXALLKEFQKAQRFAAERETAYTPFVPQAVLPSSYTASEVDVGSDKSPEQRALLVESRRQEVLFLDNEIAFNEAIIEEREQGIQEIQQQIGEVNEIFKDLAVLVHEQGAMIDDIGSNIENSHAATAQAKSQLAKASKTQRSNSSLTCLLLVIFGIVLLIVIIVLAA

SEQ ID NO: 273210 - protein, 93 aa, Glycine max
  Clone ID: PAT_MRT3847_88730C.1.pep
AYGVELATKICASIQKGLQISRDLLSFLFLFSMANIMFLDTCQDGTDQTERGGLEIGRKRKGRYLFLNKRITYKFNLICPPLLKIIPHTHQVS

SEQ ID NO: 273211 - protein, 77 aa, Glycine max
  Clone ID: PAT_MRT3847_88731C.1.pep
VWILKYFGNGDTCNVTQCMRAVAESMLVSHFGEAITDELFSRYQEILSDRMSKEKTKFTIVTISFVCFLSESAIAGL

SEQ ID NO: 273212 - protein, 187 aa, Glycine max
  unsure (1)..(187): unsure at all Xaa locations
  Clone ID: PAT_MRT3847_88732C.1.pep
YLSSXGQLKNLGVFDASHNRLQGHIPDSFSNLSFLVQIDLSNNELTGQIPSRGQLSTLPASQYANNPGLCGVPLPDCKNDNSQTTTNPSDNVSKGDRKSATATWANSIVMGILISVASVCILIVWAIAMRARRKEAEEVKMLNSLQACHAATTWNIDKEKEPLSINVATFQRQLKKLKFSQLXEATN

SEQ ID NO: 273213 - protein, 99 aa, Glycine max
  unsure (1)..(99): unsure at all Xaa locations
  Clone ID: PAT_MRT3847_88733C.1.pep
ARLACLKMDSDETFDATLWLERILIRLCSMLGDYRKDDALSXSLNRTFLLFPQVMFNLEHLQFVQVFNSSPYETAYIRMLIDSENIMYAAVLIHPSLIS

SEQ ID NO: 273214 - protein, 88 aa, Glycine max
  Clone ID: PAT_MRT3847_88734C.1.pep
EVESDHASVTVLKNDSAVNSAEPLVNASKVVHHSEAPITDPVSTSCTLFKGLFLSDYLEQSASLSVQSELSASPTVLELSTGGHSGIT

SEQ ID NO: 273215 - protein, 89 aa, Glycine max
  Clone ID: PAT_MRT3847_88735C.1.pep
RMALIFSCPLLPKGIIYVEREPHVLHGAINTTSYTVWLHAITDVLPSLFFFFVNNIKRIYFLYGKIKVNPWTIYMLVFKCYIPINIKEI

SEQ ID NO: 273216 - protein, 51 aa, Glycine max
  unsure (1)..(51): unsure at all Xaa locations
  Clone ID: PAT_MRT3847_88736C.1.pep
XFXXEXXXXQGXHSSXHXXXGXHSXSEXESCXXRMXXXSRXPSXRXRASXS

SEQ ID NO: 273217 - protein, 106 aa, Glycine max
  unsure (1)..(106): unsure at all Xaa locations
  Clone ID: PAT_MRT3847_88737C.1.pep
FDFSYVRXEISVLSKDGRWIILEKPRKSYEDTIIRTTLITTHFLSYVKKNPDSSAKSVWDKLSKNKESYEVMPLQKDLLNHMALMGEAAKRDTALEKSKVCLLFRL

SEQ ID NO: 273218 - protein, 157 aa, Glycine max
  Clone ID: PAT_MRT3847_88738C.1.pep
MMELISFKPLADAEVEETMRFEKSLQELRELRSELHKAAEYCETTFSKSEEKSDVLDNTKEYICRTMVTVVDHLGNVSANLDGLISHTNAFSEAELRIQCLQQRLLSCEQYARKLALAKLQWNENSLRFHSRYLSTSPLERSSSKKVIRDSESQVPS

SEQ ID NO: 273219 - protein, 365 aa, Glycine max
  Clone ID: PAT_MRT3847_88739C.1.pep
MANSKNNLILVSTLLMLLQLHFTPSKAAIKGGYWYSESGLAVSNINPSHFTHLFCAFAHLDPNTNKVTISSSDSSQFSTFTQTLQAKNPSVKTLLSIGGGFGPSLAANFSRMARQANTRKSFIDSSIQQARSNNFLGLDLDWEYPSSDTDKTNFASLIKEWKEAVTKESRTSGKAPLFLSAAVAGSDQITPLKYYPGKDVANNLDFVNVMAYDLFTSEGYPTVTQPPAPWNNPRGQFSAEQGVTEWNKTLGVPLNKLNLGLPFYGYKWSLSDSNKNGLFAPAKQGLGAVKYKDIKNVAAQVVFDSTYVTNYCFKGTDWFGYDDTQSISAKVVNAKQKGLVGYFAWHIEQDSNWALSQAASQAWGM

SEQ ID NO: 273220 - protein, 105 aa, Glycine max
  Clone ID: PAT_MRT3847_8873C.1.pep
MAKGNSPLERPSLASLDQKLAFAKRCSHEGVLAGAKAAVVASVASAIPTLASVRMLPWARANLNHTAQALIISTATAAAYFIVADKTVLATARKNSFNQPSNSEA

SEQ ID NO: 273221 - protein, 138 aa, Glycine max
  unsure (1)..(138): unsure at all Xaa locations
  Clone ID: PAT_MRT3847_88740C.1.pep
WVAQKLGPEARNNGLGFPKKKLSVDAQHYHAWFHKQGALQTLGGWENELNYCPELLKEALFSNFAWNPKNFVKTRSPFLGGLKAIKKSQVLYPLEALKAPPENXSSWRNFRGLXKGETTSRGNDPQVFSGCLKIFRTN

SEQ ID NO: 273222 - protein, 111 aa, Glycine max
  unsure (1)..(111): unsure at all Xaa locations
  Clone ID: PAT_MRT3847_88741C.1.pep
VGVCSALVLFLLFLSFCAGGCGCLVGGFGFVFGGGFFFRFAVVVLLWVVLSRCVVVPVVSVLLVWLGLFRVCVLXXVGGCLLPLAAPFRSRLPFFSLIRFMLCSWGAARXA

SEQ ID NO: 273223 - protein, 153 aa, Glycine max
  Clone ID: PAT_MRT3847_88742C.1.pep
MDHYKVLGLHRTATKEEIKAAFKKLAFQFHPDKHSQSPKAVRENATLRFKQVSEAYEVLMDDRKRADYNFRRSSGAGTGNNYYSQYSYGYGRSGNSYYEYKPRSGGGGGFASKFELAFRILTARSSLLNLGFAAPILWGLAVCVSGGVSWGCV

SEQ ID NO: 273224 - protein, 93 aa, Glycine max
  Clone ID: PAT_MRT3847_88743C.1.pep
VSGAAIRAQNGVAGCVRVRRESRSDTDPDAFASAFLEHCNASFDTTRNTLANLQEDRSIHSCDGQNIHGSYHIVVKLNSHPFHQCQHSIITVD

SEQ ID NO: 273225 - protein, 233 aa, Glycine max
  Clone ID: PAT_MRT3847_88744C.1.pep
MDLHRRPPPAADDGAIHPKKRRDTSSPKASDALPLPLYLTNAIFFTLAFSVAYFLLHRWRDKIRSHTPLHVVTLSEIAAIFSLIASFIYLLGFFGIDFVQSFISRASNDAWDLDDAVTDSPSSSPSPSPSPAITKMPSRDASIILSSEDDEEIVNSVVEGVTPSYALESRLGDCRRAAGIRRAALQRLTGQSLEGLPLEGFDYDSILGQCCEMPVGYVQIPVGVAGPLLLDGF

SEQ ID NO: 273226 - protein, 109 aa, Glycine max
  unsure (1)..(109): unsure at all Xaa locations
  Clone ID: PAT_MRT3847_88745C.1.pep
NYFFNPNLIHTQRIFXIWATQVILIFPIKRYRIADGPLGEVTDPIYPGGSFDPLGLAYDPXAFAELNVNELNNVLLAMFSMFGFFVQAIFTXKGSIXNLSDHLAYPFNN

SEQ ID NO: 273227 - protein, 73 aa, Glycine max
  Clone ID: PAT_MRT3847_88746C.1.pep
SYILKRAYEPEWPFNVRRKFYNTVYKICCDGCIEGHRNDFMRLARVYALKIIKANGPEIRGLHVESELHTWFI

SEQ ID NO: 273228 - protein, 343 aa, Glycine max
  Clone ID: PAT_MRT3847_88747C.1.pep
MHTGMASLTQLHYKVHTSTFRRVHSRSQGLLKSGKLSQLQRSAFPSIHINQSCICCTKLTPWESSPVTYAPTDNQSDTFLPQNANIFETLESSKTADSSITNAEGVVETESQPGLQLQVFKWPLWLLGPSVLLATGMVPTLWLPISSIFLGPNIASLLSLIGLDCIFNLGATLFLLMADACSRPKSPTQDCKSKAPFSYQFWNIVATLTGFVIPLLMMFGSQKGFLQPQLPFIPFAVLLGPYLLLLSVQFLTEMLTWHWQSPVWLVTPVIYESYRVLQLMRGLKLGVELSAPAWVMHTIRGLVCWWVLILGLQLMRVAWFAGLAARTRKQQLSSDTSSANGDW

SEQ ID NO: 273229 - protein, 52 aa, Glycine max
  Clone ID: PAT_MRT3847_88748C.1.pep
FRVYVGFPPFSCPPYSVYPVAFVVRSTPFRGSMIGRGSAVLLRSVKIVGEYV

SEQ ID NO: 273230 - protein, 66 aa, Glycine max
  unsure (1)..(66): unsure at all Xaa locations
  Clone ID: PAT_MRT3847_88749C.1.pep
MVKNSIIPVISQXRKXKNPGSVXFQIFXFTDRXXRLTSHXXXXXXXYLSXRGLRXILGXRQRLLSF

SEQ ID NO: 273231 - protein, 71 aa, Glycine max
  unsure (1)..(71): unsure at all Xaa locations
  Clone ID: PAT_MRT3847_8874C.1.pep
GGAXXXGXKSKKHPSSHTNGAQREKSHHHGHGKHQHENIRKTTSTPKTQTSKTPQESRRSQPADTQGGRHK

SEQ ID NO: 273232 - protein, 74 aa, Glycine max
  unsure (1)..(74): unsure at all Xaa locations
  Clone ID: PAT_MRT3847_88750C.1.pep
PIVLVTNSDGIDSPXLTHLIEALVQQSLYNVHICVPQSNKSISGHSITLQKTIEXTSTKINDATSFKMSGTPIN

SEQ ID NO: 273233 - protein, 60 aa, Glycine max
  Clone ID: PAT_MRT3847_88751C.1.pep
IPTTCSERILVPPSLPLYLVASLETIGIYFTDDIISRKMLCLCLSRWDCKINLCHWILQQ

SEQ ID NO: 273234 - protein, 308 aa, Glycine max
  unsure (1)..(308): unsure at all Xaa locations
  Clone ID: PAT_MRT3847_88752C.1.pep
VVLPNNNKPDKSQPVLPTENGPDTKSQLPKLVLKPSNGSVKPPNRKKGGHKELSSTIHGQRLEVAVRWRPLKLVYDHDIRLAQMPVNCNFRGLRDVVSKRFPSSSSVLIKYKDCDGDLVTITSTDELRLAESSVDSHLVKEPGEDKSDSVAMLRLHIVEVSPEQEPPLLEEEEEKPVENEGGMGEENGSHSSLGESVSEVADTVKVDKTVKDTPKEKPGTTGDTECKEVEMDDWLFEFAQLFRSHVGIDPDAHIDLHELGMELCSEALXETVTSEEAXDLFDKAASKFQEVAALAFXNWGNXHMCAAR

SEQ ID NO: 273235 - protein, 70 aa, Glycine max
  Clone ID: PAT_MRT3847_88753C.1.pep
SPFRTKNNTSAFSNPKTLSRKEDLETNEVHLKVWSSKTGTADRMLVISQPRIGQFGQRHITGNAAFRAAR

SEQ ID NO: 273236 - protein, 162 aa, Glycine max
  Clone ID: PAT_MRT3847_88754C.1.pep
KKKKKKKKKLETTHSPLIFLYFGALCLYDLDPTVQNVRGLCCLFSQVLELQTFRSTSFVSRSSFLALVCLSYEMETKPSSVMVTLSYGALTCAAEVLATLLASAVVKATLLAPDLYRLLLTNTPTTKGERKTQSQDKQRDAEGEDGNDDEGDDDDDGDGGFG

SEQ ID NO: 273237 - protein, 60 aa, Glycine max
  Clone ID: PAT_MRT3847_88755C.1.pep
LKFVLIKCMFSSINVFGNKLVCTELQLLKQLIIVCVDYVLNADPHRLTKHSLYPERFASS

SEQ ID NO: 273238 - protein, 128 aa, Glycine max
  Clone ID: PAT_MRT3847_88756C.1.pep
MSLKMAILILGLLAMFLLVSSEVASTNSKEVTNGVEDAKYPGGGYGGGYPGNGGGGYPGRGGGYPGRGGGYPGRGGGYPGRGGGYPGRGGGYCRYGCCGGRTYNGGCRRCCYYAGEAVAAQTQDKTHN

SEQ ID NO: 273239 - protein, 254 aa, Glycine max
  Clone ID: PAT_MRT3847_88757C.1.pep
METKQSSVTVTLSYGALTCAAEFLATLLASAVVKASLLAPPQPRQDLMLSVSFVKAICVISRVHVFMVYKQLWEVFYGLCQYAPILHANMRMLIKSQGSGFVWVIRLDMPLSVKHASRTRVVFVLLLPGILGGKKEGEDGNDDEGDDDDDGDGGFGEGEEELSSEDGGGYGNNSNNKSNSKKAPEGGAGGAEENGEEDEDEDGDDQDDDDEDDDDDDEEDEAGEEEDEDGAEDEENEEDEEDEEALQPPKKRKK

SEQ ID NO: 273240 - protein, 190 aa, Glycine max
  Clone ID: PAT_MRT3847_88758C.1.pep
METKQSSVTVTLSYGALTCAAEFLATLLASAVVKASLLAPDLYRLLLINTPTAKGESKIQSEDKQRDAEGEDGNDDEGDDDDDGDGGFGEGEEELSSEDGGGYGNNSNNKSNSKKAPEGGAGGAEENGEEDEDEDGDDQDDDEDDDDDDDDEEDEGGEEEDEDGAEDEENEEDEEDEEEEALQPPKKRKK

SEQ ID NO: 273241 - protein, 84 aa, Glycine max
  Clone ID: PAT_MRT3847_88759C.1.pep
MRRHREIHLSHALLCTVFCLLVAASAATEKEILLEFKGNITGNPRASLSSWGSSGNLGHDYRGVSCNSEGFGEENGLWNTSLEG

SEQ ID NO: 273242 - protein, 117 aa, Glycine max
  unsure (1)..(117): unsure at all Xaa locations
  Clone ID: PAT_MRT3847_8875C.1.pep
TALYISAKNNLQEMFSYLLSMCHFEVAKIRSKADMNAFLVAVKRGKLHFVRELSDILPDVXSLWDSSNTNPLFSAAGQEHLDVVDAILYVDVSTMFKVRINGVSFLRYAAGHGELCG

SEQ ID NO: 273243 - protein, 91 aa, Glycine max
  Clone ID: PAT_MRT3847_88760C.1.pep
FSSGGVSQFNSMSCAPAFHCFACFSLAVALQTGDCLGCGLRVSAGTRSWCGCGIRGAGLCSSKSVPSVGLTPFLWSVVPVGAVVFFLACLP

SEQ ID NO: 273244 - protein, 369 aa, Glycine max
  Clone ID: PAT_MRT3847_88761C.1.pep
MASRTICFTIQVTLVVAFLTTKVVLSDDTVPIPANKAQLGEWYNTNVGPLDQRKSTVDPALVTAEEGAKVVKVMQDGSGEFKTITDAIKSIPSGNTKRVIIYIGAGNYNEKIKIEKTKPFVTLYGVPEKMPNLTFGGTAQQYGTVDSATLIVESDYFVAANIMISNTAPRPDPKTPGGQAVALRISGDKAAFYNCKMYGFQDTICDDRNRHFFKDCLIQGTMDYIFGSGKSLYVSTELRTLGDNGITVIVAQARKSETEDNAYSFVHCDVTGTGTGTFLGRAWMSHPRVVFAYSNMSDIVNKLGWSNNNHPEHDKTVRFGEYQNSGPGADPKGRATITKQLSETEVKPYITLAMIEGSKWLLPPPTPKV

SEQ ID NO: 273245 - protein, 104 aa, Glycine max
  unsure (1)..(104): unsure at all Xaa locations
  Clone ID: PAT_MRT3847_88762C.1.pep
ATTVMTTLPHFRGLRPQFSSAPXEDLDAVKPMKPKGKDAMXSIWEYIESSTNMIMVASTTLMLIAGRVGIAPSTQKKKNGGXKMEVKNSRMXTGEPAGLPLENT

SEQ ID NO: 273246 - protein, 64 aa, Glycine max
  Clone ID: PAT_MRT3847_88763C.1.pep
DNVEEYQLLFSVSPPPNFPYSRKCCEVNGINLICLINTWLLLSSPLNINRSMSLLSCSKGWFFV

SEQ ID NO: 273247 - protein, 71 aa, Glycine max
  Clone ID: PAT_MRT3847_88764C.1.pep
PLSKALRRKGTVGVRRPSHTSFLNLEFGPVPASIEKVTLPGYCPVSEDVKPSRWEILPPVQSHAPQFRVVL

SEQ ID NO: 273248 - protein, 124 aa, Glycine max
  Clone ID: PAT_MRT3847_88765C.1.pep
SMRTLLLALLLAFMMMVTMLHAGAVKVEHEQRTKPKRNLLSETSLGRKGMGTDTNNQQTMKVSASSSANTISTADSVNNSKAKKNSDNNGDDDDDKNGSYQSYGPGPVLNSHHYFHIRTPPIHG

SEQ ID NO: 273249 - protein, 82 aa, Glycine max
  unsure (1)..(82): unsure at all Xaa locations
  Clone ID: PAT_MRT3847_88766C.1.pep
APKRQGETISQGHKNYXLMLNLQLGIRHAVGRPAPSTSLDLKXSAFDPKEKVWTKFPPEGSKHTPPHQSCEFRWKDYCPVVL

SEQ ID NO: 273250 - protein, 29 aa, Glycine max
  Clone ID: PAT_MRT3847_88767C.1.pep
VFTLTIFISKYETGGDVNPKKNEHKNGAY

SEQ ID NO: 273251 - protein, 95 aa, Glycine max
  unsure (1)..(95): unsure at all Xaa locations
  Clone ID: PAT_MRT3847_88768C.1.pep
DILHIMKAKAGSAPPDTGNGNGILSYHITHGSHLMMGXSAHPMEDYLSSELKQEKDRELSLFAIFDGHLSHDXASCIENHLFHNILKDHDFWTRD

SEQ ID NO: 273252 - protein, 48 aa, Glycine max
  Clone ID: PAT_MRT3847_88769C.1.pep
ISRCAAKSKITLKYKFGMFADAFLNDVVTSSFKERDFYCLWWGLRNLR

SEQ ID NO: 273253 - protein, 150 aa, Glycine max
  Clone ID: PAT_MRT3847_8876C.1.pep
RRLLPCVLLFITTLGLSLFFAIVFFAIVRYIILVLTPAHPVDFTIGLFTNCRIFSYLCRWLFPCLLLAILSLQAFRYCRFPVPAYSYIFPSYRYWHPSHHISFLFSSFRSTMPPISYLFLTLLLFLIFDTRLPHASIPPPPPKQVVLLHV

SEQ ID NO: 273254 - protein, 72 aa, Glycine max
  Clone ID: PAT_MRT3847_88770C.1.pep
LDLLKKNLCELNRKIKLNNSEIRSIPNAFPNLACHVRFAGLYFRLLPCIMHKRDIIPMNALAFRYTCIYIGA

SEQ ID NO: 273255 - protein, 260 aa, Glycine max
  Clone ID: PAT_MRT3847_88771C.1.pep
TRPAIATSTRALRRSNCIPSCSVSYQKFVEFALDETKRHTHLIPSPLQEKFSFMNSKDVKGSFSMLSFEAAKIRLLRSLIIQTETMQVLDFTVFPKAEYDVPIFCANFFTSAKTNIIVLDLNPVHDIINQYEYKEKYFKSLIPLGLKYAEVWLELICKAVKETDESQIFHNLEAQHRYLTWRAEKDPGQGGLKKLIGDTLAKDMLRSFLFNGVDELGNKTFNDYFPRYCCQEGTLNKKGNVIGKSFENRPWNARGEFIGE

SEQ ID NO: 273256 - protein, 46 aa, Glycine max
  Clone ID: PAT_MRT3847_88772C.1.pep
DSSVESSLRHLQPSTATRTLRGHVRSSSPTGSTWLRIMGRKAGTHF

SEQ ID NO: 273257 - protein, 57 aa, Glycine max
  Clone ID: PAT_MRT3847_88773C.1.pep
PVFFSLGKAFNGMHIRSRGIFFILSFSSSSSNMSLLLFYHFHFILIINLFPFIFNHI

SEQ ID NO: 273258 - protein, 155 aa, Glycine max
  Clone ID: PAT_MRT3847_88774C.1.pep
MGRIKPQALLQQSKRKKGPSRISATIVTFYALILVMLVFILFVTYRHWSNRTRLQPESYISVSEDENTSVESKKSDLPGYAVVITSKGSIIVELYKESAPEVVDEFIDLCQKGHFKGMLFHQVIKHYIIQAGHNKGPGATEDWNLLGKKYASMRH

SEQ ID NO: 273259 - protein, 69 aa, Glycine max
  Clone ID: PAT_MRT3847_88775C.1.pep
SIHIHITMHPTFIFPIFMLLLTTLRQSHCQPNDPVCRQESYNCGSLSNISYPFWGLNRSRSCGGGDPFE

SEQ ID NO: 273260 - protein, 158 aa, Glycine max
  Clone ID: PAT_MRT3847_88776C.1.pep
VSSVSRRSSQGSVSPLQKSASVSDWMLDSKQMSTKDSITNGISASFLTTHLQNLLQQTSIQQDLIMNLLNSVQSAEAIEVSQNGKLPPLPRSSEINGSVDTAASERERLLLLKILELQTRIITLTDELTAEKLKYMQLQQQLTLYSQEQNMDKREEIA

SEQ ID NO: 273261 - protein, 65 aa, Glycine max
  Clone ID: PAT_MRT3847_88777C.1.pep
EHSYFFLNGFITEIPHPSICICTTSESSLVLLTILHFNPCGYVSNYICIYSSNLLTYYQAYDKFY

SEQ ID NO: 273262 - protein, 78 aa, Glycine max
  Clone ID: PAT_MRT3847_88778C.1.pep
QRETTLLWSKSTGLPLHNAIVWMDARTSSICRRLEKELSGGRNHFVESCGLPISTYFREGTSSAAQNFRASDSDNHFD

SEQ ID NO: 273263 - protein, 519 aa, Glycine max
  Clone ID: PAT_MRT3847_88779C.1.pep
MSKEDVFVGAIDQGTSSSRFIIYDAKTGVVGCHHVEFTQFYPQAGWVEHDPMEILESVKVCVAKAVDKATADGFNVDKGLKAIGLTNQRETTLLWSKSTGLPLHNAIVWMDARTSSICRRLEKELSGGRNHFVESCGLPISTYFSALKLLWLMENVDAVKEAIKKKDALFGTIDTWLIWNLTGGVNGGLHVTDVSNASRTMLMNLKTLDWDASTLKTLNIPAEILPNIVSNAEIIGEVGSGWPIAGVPIAGCLGDQHAAMLGQSCRKGETKSTYGTGAFILLNTGEGIIQSKHGLLSTIAFKLGPKAPTNYALEGSVAIAGAAVQWLRDGLGIISSAAEIEEMALQVESTGGVYFVPAFNGLFAPWWREDARGVCIGITRFTSKGHIARAVLESMCFQVKDVLDSMHKDSGESESQKTEFLLRVDGGATVNNLLMQIQADLVGCPVIRPADIETTALGAAYAAGLATGIWKEDFIFNTEEKLKNARVFRPVMTEEVRKKKVDSWCKAVSKTFDLADLAL

SEQ ID NO: 273264 - protein, 237 aa, Glycine max
  Clone ID: PAT_MRT3847_8877C.1.pep
HHVGASAADTGDSSLQLSRAASIVMVIAYCAYLVFQLWTHRQLFEAQNEDDEEGGSDSEAVIGFWSGFTWLVGMTMTIALLSEYVVQTIEVASDSWGFCISFLNIIFNLIFGDATEHALAIIFAFKNKLDGTSHYMKGPVPLLSMFVVPLCVIVAWILGIKMDLNFNILETASFTMAITITAFTLQDGTSHYMKGLVLLLCYIIIGACFFVQRTPSNQTNVANITLKSATEAVFRAQ

SEQ ID NO: 273265 - protein, 408 aa, Glycine max
  Clone ID: PAT_MRT3847_88780C.1.pep
AVKKMPSTEEEAISRSQYQQGVSAWNFDIDDLKAQASLVRDDDDIAEMREEAEKKFFTNYKAIAIDSQSGTVKMNSEKSPQNKITSQVGAFDIKQTEQDEYLNKKEKNPKSDLQEPGLPKNIIWKRNGSITEATTSTLEKDIGMCKIKGQSRKIRQTQSGPLLPGTVLSHSALERGRTLERLENGNQLLGEKNNHEARRAPSFSGPLMLPMRASANSLSAPIKSSGGFIDSLDDKSKANLVQIKGRFSVTSENLDLVKDIPVSSVSRQSSQGSVSPLRKSASVSDWMLDSKQMATEDSATDSISASLLTTHLQNLLQQTSIQQDLIMNLLNSVQSAEAIEVSQNGKLPPLPRSSEINGSVDTAASERERLLLLKILELQTRIITLTDELTAEKLKYMQLQQQLTLYSQ

SEQ ID NO: 273266 - protein, 55 aa, Glycine max
  Clone ID: PAT_MRT3847_88781C.1.pep
DLEQSQLTTEESHCFTELMRKRKPAPRFHEYSRGRIICLETQRQKKINQGCVAVV

SEQ ID NO: 273267 - protein, 71 aa, Glycine max
  Clone ID: PAT_MRT3847_88782C.1.pep
DRVHETPCSAPSETRLSQSYPVDLYTAFYDHEIKALTLPSIHFLGWTTEYHTKDTKRRKELNQVREQAAEK

SEQ ID NO: 273268 - protein, 58 aa, Glycine max
  Clone ID: PAT_MRT3847_88783C.1.pep
IALRNHVLKDVGTQRSDRMWHWGIGFYRRPCLSRSKFIIYLEKHYDGVRKVNVSLLPS

SEQ ID NO: 273269 - protein, 76 aa, Glycine max
  Clone ID: PAT_MRT3847_88784C.1.pep
SSARSTLDLSWALIMHDSSADRTAFVPPTLMSDDTPCELAILMIRSHHDCYSRTLIMVKNSLREPTKLVPLAAMPP

SEQ ID NO: 273270 - protein, 133 aa, Glycine max
  unsure (1)..(133): unsure at all Xaa locations
  Clone ID: PAT_MRT3847_88785C.1.pep
PPIGIIIGMSCVGAMDGVVFDHTGQLVKCNGISFAIGDYGYYFARHSVFPNIYQSMADRTQFTTTLLICNGLCVKIYAGTAIMGYLXMFGDGTLTXITLYMPPDSFASKAALRTTTINPPSKSAQLMNKLSSS

SEQ ID NO: 273271 - protein, 103 aa, Glycine max
  Clone ID: PAT_MRT3847_88786C.1.pep
RGQLSGIEVAWLRYVGFLAVMLVAALVRAHLKRGASPFRSARPGLQVVRGIALVASSLLFLAGLRVLPVAETTAIAFVSPIFVTALSIPVLGEKVGARRWEKK

SEQ ID NO: 273272 - protein, 108 aa, Glycine max
  unsure (1)..(108): unsure at all Xaa locations
  Clone ID: PAT_MRT3847_88787C.1.pep
MCGTERPLVAGNAILITMQLCSAGVLGLCLQXLFQDRYGLAPGVSLFIAAHIXENPIWKALRATTINIGRGPEYEGAGPALFHXVITRTHTGRALWVASYRHNLSNVT

SEQ ID NO: 273273 - protein, 54 aa, Glycine max
  Clone ID: PAT_MRT3847_88788C.1.pep
TITRVMSGFFQTPCGRFMALSLSFGIQIETINCSTIVDVVLDSLHRAPCFFCYI

SEQ ID NO: 273274 - protein, 174 aa, Glycine max
  unsure (1)..(174): unsure at all Xaa locations
  Clone ID: PAT_MRT3847_88789C.1.pep
MMMMDKGVLDDVIRRLLEGKGGKQVQLSESEIRQLCVNARQIFLSQPILLDLRAPIRVCGDIHGQYQDLLRLFEYGGYPPAANYLFLGDYVDRGKQSLETICLLLAYKIRYPDKIYLLRGNHEEAKINRIYGXFYDECKRRXFNGRLWKIFTDCFNCLPVAALIDEKILCMHGG

SEQ ID NO: 273275 - protein, 90 aa, Glycine max
  unsure (1)..(90): unsure at all Xaa locations
  Clone ID: PAT_MRT3847_8878C.1.pep
EFSKMVLVNILHVYSMSKQSNVVSKTDGVSLMGLKSQFLQLASSSSFFNKAECRVRDILRXSCVGNSPLMEPKSPPEGVSGVVVTIKGFK

SEQ ID NO: 273276 - protein, 44 aa, Glycine max
  Clone ID: PAT_MRT3847_88790C.1.pep
PANDRNISLAAIDRNTTSILTPCITPMSMHAVHPLCYLPYTAYP

SEQ ID NO: 273277 - protein, 216 aa, Glycine max
  Clone ID: PAT_MRT3847_88791C.1.pep
MMMMTMEGMMDKGVLDDVIRRLLEGKGGKQVQLSESEIRQLCVNARQIFLSQPILLDLRAPIRICGDIHGQYQDLLRLFEYGGYPPAANYLFLGDYVDRGKQSLETICLLLAYKIRYPDKIYLLRGNHEEAKINRIYGFYDECKRRFNVRLWKIFTDCFNCLPVAALIDEKILCMHGGLSPELENLDQIREIQRPTEIPDSGLLCDLLWSDPDASI

SEQ ID NO: 273278 - protein, 56 aa, Glycine max
  Clone ID: PAT_MRT3847_88792C.1.pep
LVNIGNIYFTNTSPSEVYQAYLDQFSPYFNLFLKSRAEELLRGGGMVLSIPFIEKT

SEQ ID NO: 273279 - protein, 52 aa, Glycine max
  Clone ID: PAT_MRT3847_88793C.1.pep
KLKIFLVKLGKQLKQTPSSAFRGQWEKLQSSMCLLSLGLARAGTPRCYTAST

SEQ ID NO: 273280 - protein, 46 aa, Glycine max
  Clone ID: PAT_MRT3847_88794C.1.pep
PSLMALARKYFRDNMICRKCYGRLHLRVVHCRKKKSVHSTQFRHKN

SEQ ID NO: 273281 - protein, 206 aa, Glycine max
  Clone ID: PAT_MRT3847_88795C.1.pep
WHYIVRRRGHKQIQELLTRSSLNADVDILSAETSLDERLDAANGFEDPLTGQNETVDCLVNDVKSSTEFLLGSSSGSLYVDSSSSLGEGTNIAEEASANLFVEDGLSKVEDHAEVLNDVTEGNFYPTELIIVDNDYDSSREGLHPNFGSQSSIMPTEISGELPIQTVSSGNSESEDSLVGKMDGEITLSLTESHSNTSFNDSNIDT

SEQ ID NO: 273282 - protein, 64 aa, Glycine max
  Clone ID: PAT_MRT3847_88796C.1.pep
ISTLAFTETNPMTIYKPLGVISQHFMRYRNHHLYFEYEDYQHQKTIVAKTKAHHCGTTTPNPYC

SEQ ID NO: 273283 - protein, 43 aa, Glycine max
  Clone ID: PAT_MRT3847_88797C.1.pep
IGKYIGYGNFVYGAGYKTHQINFITITEYRYSKFTSLLIFFPN

SEQ ID NO: 273284 - protein, 58 aa, Glycine max
  unsure (1)..(58): unsure at all Xaa locations
  Clone ID: PAT_MRT3847_88798C.1.pep
MELVTXSXVXCPXDSCITCIRYEQHTESXXXWHIYIRILTWYFIFKVHKGIQTXIMCY

SEQ ID NO: 273285 - protein, 249 aa, Glycine max
  Clone ID: PAT_MRT3847_88799C.1.pep
MAACRAATATRFNGFSGDAFKSYFPLHQYGVGPSEASSGFMRSRFLQKLPNKRSMRAPHASGTSTLHARFVHAVELLGGHERATPKSVLELMDVKDLTLAHVKSHLQMYRTVKTTDKPAASSGHSDGSGEDDLSPMVSTADRGGLRQFPNHRGRPEWAAQQDMDYSSTTTTLWSNSSSCGESRLRPSSNDIDGLRSPILHSQTISGGHQIQECDSIQLKSNMPGSNLECKIPSLEFTLGRPDWDGKEQA

SEQ ID NO: 273286 - protein, 79 aa, Glycine max
  Clone ID: PAT_MRT3847_8879C.1.pep
LARFHFFQPGTFLLILILTDTMVRKHGVHFLLDHLKGYNSKARETQYDGRPLHKNTEQRTWKLMHKRHYHGNPKKLQHI

SEQ ID NO: 273287 - protein, 74 aa, Glycine max
  Clone ID: PAT_MRT3847_887C.1.pep
FKKRAQNAWTRSQRGVFSRQQGFFGPPMVMQRIRLSRTAIVSPSHSSIGNENLESSNKSFNPGHIGKTKLMFLR

SEQ ID NO: 273288 - protein, 55 aa, Glycine max
  unsure (1)..(55): unsure at all Xaa locations
  Clone ID: PAT_MRT3847_88800C.1.pep
MSVFKFVVFDVIIWYLWVSSLGIIVDYLVYEGWLRVLKTVCDVTXDLRVHMGEEI

SEQ ID NO: 273289 - protein, 178 aa, Glycine max
  Clone ID: PAT_MRT3847_88801C.1.pep
GSRVNSLLNLSQSQNKSLRDGLKLAAKGLILPFLPSKHWSSVISTFSQTETDILSLNPICSGTEFERRNRNGYMDPISAMTATVVPVQSPSTPSHNVIERRDPRTWGAGASSHIEVEGKWLKGHKAGLKKELRMLRELAKASFSGDTRFDEASTSYTLGEQQHSSGEIYLGNPKRRYC

SEQ ID NO: 273290 - protein, 54 aa, Glycine max
  Clone ID: PAT_MRT3847_88802C.1.pep
IQFQFLMVQILRTGKRTCKLFLVAWIYVGDGKSMEVEAIWNFRLLLCTDFFIWI

SEQ ID NO: 273291 - protein, 70 aa, Glycine max
  Clone ID: PAT_MRT3847_88803C.1.pep
VFFRRIPIGRKMVLNAHVQPVIVYSPHLLAVYHNSATSRPSSPQTKAFSMFRTSSYIPAFRCLVHPSRAE

SEQ ID NO: 273292 - protein, 206 aa, Glycine max
  Clone ID: PAT_MRT3847_88804C.1.pep
MVSGSGICAKRVIVDARHHMLGRLASIVAKELLNGQKVVVVRCEEICISGGLVRQKMKYLRFLRKRMNTKPSHGPIHFRAPGKIFWRTVRGMIPHKTKRGEAALARLKVYEGIPPPYDKTKRMVVPDALKVLRLQKGHKYCHLGQLSSEVGWNYYDTIRELEKKRKDRAQLCYERKKQLAKLREKAEKVAEKKLGSQIEILAPVKY

SEQ ID NO: 273293 - protein, 73 aa, Glycine max
  Clone ID: PAT_MRT3847_88805C.1.pep
SDSCSSPWDLQYFDVSIWSRCFMHIPLSFQVHRQTVTAQSILSSILDMSRFNDHCPLHRGHCFKCKDLYKCYS

SEQ ID NO: 273294 - protein, 260 aa, Glycine max
  unsure (1)..(260): unsure at all Xaa locations
  Clone ID: PAT_MRT3847_88806C.1.pep
LYFEEPEDGVPKIVLATNIAETSITINDIVFVLDCGKAKKSSYDALNNTPCLLPTWISTRAVQQRRGRAGRVQPGECYHLYPRCVYDSFAEHQLPEILRMPLQSLCLQIKSLKLGSISEFLSRALQSPEILAVQKAIEYLKTIGALDENENLTILGHNLTMLPMEPKLGKMLIFGVIFNCLDPILTIVAGLSVRDPFLTPLDKKDLAEAAKSQXSQDYSDHLAIVRAYEGWKDAEKDLNGHEYCWKNXLSAQSLRVLMLF

SEQ ID NO: 273295 - protein, 57 aa, Glycine max
  Clone ID: PAT_MRT3847_88807C.1.pep
QKAKTSVVRKDLDIKTTQFQINKVNHFRINGNKSNTDGRRRKKAKKMKNQHFRKERK

SEQ ID NO: 273296 - protein, 66 aa, Glycine max
  Clone ID: PAT_MRT3847_88808C.1.pep
TKRPFIDTSYDQRLQSQHSLCLIDAFHIILICIRNLPGSSLNLSPLFSTQCIYHFTSQPFFKEYYL

SEQ ID NO: 273297 - protein, 120 aa, Glycine max
  unsure (1)..(120): unsure at all Xaa locations
  Clone ID: PAT_MRT3847_88809C.1.pep
PGPGLVPHEARRRCNIQGYHVPKGTRVFANVWXLHRDPSVGGEPXKFSPXRFISEKEKLDAAHHFEYLPFGSGRRACPGSTFATKVWLLALSRLLQGFDLHVPMEEPXGLERGVGHTLAK

SEQ ID NO: 273298 - protein, 282 aa, Glycine max
  Clone ID: PAT_MRT3847_8880C.1.pep
MLRRWSKAVTPISKFGSQQSHLNFVKDVARQSYAGVAPAPTTIEDKPQPPVVKLDKMFWSKPCSLALPRDSPLRAEEPDYQGIKRFMLKLMLFYSKQSKSIRGANVVYRRIISQIDKPPIYEVFNLEKTFKTTFSLLVLHMWLCLRRLKQEGNEGVEFGQYLYEIYNHDVELRVSKAGVNLLLTKWMKELEKIFYGNIVAYDTAILPEAKPGDFSNVIWRNIFSEDGSSTPDAAASQSVQAMARYARREVSCMTLTDKEALYSGNFMFTSLKHENRSGKGPQ

SEQ ID NO: 273299 - protein, 68 aa, Glycine max
  Clone ID: PAT_MRT3847_88810C.1.pep
ILKSFSKFLSHDQIKNMASSNSLLTLKDALENIILFRICQIDQTTAIYQLRHLLILIPFTCTYECWRK

SEQ ID NO: 273300 - protein, 316 aa, Glycine max
  unsure (1)..(316): unsure at all Xaa locations
  Clone ID: PAT_MRT3847_88811C.1.pep
NLYNAGKRNNRAADSPLEAKTPHFLILISEGFREAWGALSRSGITSLPSNQSPVKVDAVSVTPVTEAPPTSMPVNGSIPNRQPVPAGNVAPATVKVEPVLVASMVSGPAFPHNSSVPRATSTSQGVPSLQTSSLSSVSQDIITNNENAQDTKPTVSMLPLRPVNPVQANVNILNNLSQARQVMNSAALSGGTSMGLPSMGQTPVAMHMSNMISSGMTSSVPAAQNVFSSGQSGITSMTSSGPLTVPAQVGQNSGLGSLTSNTSNLSSSSNIGISQPLGNLQGVVSIGQQVSRMSQGNLSXAQIVQGGVSMNQNGMS

SEQ ID NO: 273301 - protein, 109 aa, Glycine max
  unsure (1)..(109): unsure at all Xaa locations
  Clone ID: PAT_MRT3847_88812C.1.pep
LPPKRAKGGTPPKGKGGINPAPGPPPXSSPVPGGGPPFPLMRPNKTRPKPGNNPTPVEKWYPPTXSPHPKTPEPKMQRPGGPNKGPTPPIIGCPPPPPFSSRKPNRPPP

SEQ ID NO: 273302 - protein, 325 aa, Glycine max
  Clone ID: PAT_MRT3847_88813C.1.pep
MAVERSGIAKDVTELIGKTPLVYLNKLADGCVARVAAKLELMEPCSSVKDRIGYSMIADAEEKGLITPGKSVLIEPTSGNTGIGLAFMAAARGYKLIITMPASMSLERRIILLAFGAELVLTDPAKGMKGAVQKAEEILAKTPNAYILQQFENPANPKVHYETTGPEIWKGSDGKIDAFVSGIGTGGTITGAGKYLKEQNPNIKLIGVEPVESPVLSGGKPGPHKIQGIGAGFIPGVLEVNLLDEVIQISSDEAIETAKLLALKEGLFVGISSGAAAAAAFQIAKRPENAGKLIVAVFPSFGERYLSSVLFESVRREAESMTFEP

SEQ ID NO: 273303 - protein, 96 aa, Glycine max
  unsure (1)..(96): unsure at all Xaa locations
  Clone ID: PAT_MRT3847_88814C.1.pep
EHIAWXFLTFPLXFSXXXFXXXLXDXXEXXXXXPIPATRRPTAPYYPFWNTRLXXTRRAQXSSXGSXXDEKSPNRQXAPXIPGSXPGNSXGVKRCR

SEQ ID NO: 273304 - protein, 110 aa, Glycine max
  Clone ID: PAT_MRT3847_88815C.1.pep
PTTISSLYLSTNALRRFPFRVFARSWFQRHPPKEDAVFFSHPLLWISGSTFGTPQKKTQSFSISASLVKAPSFFSLSKRSKMGIFGGIKMPEYTVLFGFGDEKKQKRHTP

SEQ ID NO: 273305 - protein, 63 aa, Glycine max
  unsure (1)..(63): unsure at all Xaa locations
  Clone ID: PAT_MRT3847_88816C.1.pep
FKSLFKVNFTQRQTXRQPPGEPPKEESLGKPCTPQKRSARGSLRQLKTRQLQENPDTIGPPKH

SEQ ID NO: 273306 - protein, 54 aa, Glycine max
  Clone ID: PAT_MRT3847_88817C.1.pep
KKKINLKKKKKKKKKKKKKKKKKKKKKKKKKKKKKKKKGGGFKRTKVYERGNEK

SEQ ID NO: 273307 - protein, 83 aa, Glycine max
  Clone ID: PAT_MRT3847_88818C.1.pep
FGGGKNFPREKALPRFPQSLKRAPLGENGSPPGTGAGINSRGGRAIIGGAPFFFFFFFFFVQYLSTFSLYKKNYNEFEQQRIQ

SEQ ID NO: 273308 - protein, 140 aa, Glycine max
  Clone ID: PAT_MRT3847_88819C.1.pep
ANFTHSVTNSRGFLRLTGGWNDMWNTAPDTTDGAEQLEHLPASRKSLSLVATHSSQPVLRPSFEMEVARLAALPDDEDDDGGIESALLKLEGRYEKKSPDPSPKAAEFYVPKGAPPQSMKREDSHGGDEETPEEERQTHT

SEQ ID NO: 273309 - protein, 132 aa, Glycine max
  Clone ID: PAT_MRT3847_8881C.1.pep
MLRRWSKAVTPISKFGSQSHLNFVKDVSRQTYAGVAPAPTIEDKPHRPVVNLDKMFWSKPCSLALPGDSPLRVEEPDYQGIKRLMLKLMLFYSKQSKSIRGANVVYQRIISQVDKPPIYEGPFCSQQYKLWL

SEQ ID NO: 273310 - protein, 54 aa, Glycine max
  Clone ID: PAT_MRT3847_88820C.1.pep
LEGLLKYWVILYCFLAMEHYIVRNSDPIHYCPGYCTCPVSGNTTWIDHNTFILY

SEQ ID NO: 273311 - protein, 65 aa, Glycine max
  Clone ID: PAT_MRT3847_88821C.1.pep
NVAASNNIYVSTRDSVFHLMGRIHVVLSDFRIFGLAALIYCAVNFHGTSFHMLKYEWPIALKCEK

SEQ ID NO: 273312 - protein, 47 aa, Glycine max
  Clone ID: PAT_MRT3847_88822C.1.pep
YYFFRVCFFSSIPIVFLTLPFHRSELTLVMLNTQRPLADFLPQMGSS

SEQ ID NO: 273313 - protein, 56 aa, Glycine max
  Clone ID: PAT_MRT3847_88823C.1.pep
FMHKEELRRSDFLSKGGYVGAEAPLLSTSKNKKEIKKKKKKKKKKKKKKKKKKKKK

SEQ ID NO: 273314 - protein, 47 aa, Glycine max
  Clone ID: PAT_MRT3847_88824C.1.pep
FVFFSPYTSHFMLKSICNFYFASGIMNITNQRCKLTSSKINVFFCLW

SEQ ID NO: 273315 - protein, 61 aa, Glycine max
  Clone ID: PAT_MRT3847_88825C.1.pep
QHEFTCCPLKRAPYEKPELRLRLTKKAIKPHCFQRSGLRSFYYAAYDLTIPFYLYHVATHY

SEQ ID NO: 273316 - protein, 88 aa, Glycine max
  Clone ID: PAT_MRT3847_88826C.1.pep
VCSIKLNQQAPKNFGICFLSSGRSSYSSRTWGLTRLTRPWCIILAKRSINSSNKSRCYIKQFYMQIIRVYPHKYSNLLIQTKMLNEFP

SEQ ID NO: 273317 - protein, 246 aa, Glycine max
  Clone ID: PAT_MRT3847_88827C.1.pep
MSQEGCLLIFLICSSQGPLSANDQYTIYIPGTVKVLVSMLPIFFFSPLILCFACLLCYCQLMQGNIWLVPNAQGFPQVMALFLRFQLRRSIAVSISEPGENSEPSNSNSFFRGLPGCFGLQVLLVENDDVNRAVTQRLLQKLGCVVTPVASGFECLTVIGPAGCSIQVILLDLHMPDLDGFEVATRIRKFRSGNQPMIVALTASAEEDLWERCMQVGINGVIRKPVLLHGIASELRRILMQGNNVL

SEQ ID NO: 273318 - protein, 97 aa, Glycine max
  Clone ID: PAT_MRT3847_88828C.1.pep
KPFFFPPAPPPLNSFLLVLPRFFPEMPPEQNFFKKGFFPLPGLGKMGSFCPLFLEGKGGKLGFSPFIVPPFFPSVFYGGKKKKKKKKKKKKKKKKKK

SEQ ID NO: 273319 - protein, 85 aa, Glycine max
  Clone ID: PAT_MRT3847_88829C.1.pep
PLFRVLKRFFFKLPMGGFPALLKCGNQGLPPGWPSGGIGPKGFLNYRPGFLPFRDHQSFLCQVWETICSSPFSQRACHERKILFV

SEQ ID NO: 273320 - protein, 139 aa, Glycine max
  Clone ID: PAT_MRT3847_8882C.1.pep
CLRRLKQEGKEGVEFGQYLYEIYNHDVELRVSKAGVNLLLTKWMKELEKIFYGNIVAYDTAILLEAKPGDFSNVIWRNIFSEDGSSTPDAAASQSVQAMARYARREVSCMTLTDKEALFSGNFMFTSLKHENTNGKGPQ

SEQ ID NO: 273321 - protein, 59 aa, Glycine max
  Clone ID: PAT_MRT3847_88830C.1.pep
LRVAGMVYWHLSSAITRSMDLPRVAGERNRDEEWHPVSQVHDVFARDDCSGFGDTTGKT

SEQ ID NO: 273322 - protein, 48 aa, Glycine max
  Clone ID: PAT_MRT3847_88831C.1.pep
TRLGRVLLGTKIIYFDVFVGFNSPILILLFCQNNLCPVTFLSSVHPIR

SEQ ID NO: 273323 - protein, 88 aa, Glycine max
  Clone ID: PAT_MRT3847_88832C.1.pep
SWEVTEASLSHPVPFHSPRLILTLAFLKPCQSTTHDWRGIMCERTEHAYEPNKSKKPPTRLIIIKYIILPRLFSDDDRCRTLRIDQHI

SEQ ID NO: 273324 - protein, 44 aa, Glycine max
  Clone ID: PAT_MRT3847_88833C.1.pep
ILTKILHNYVSTKNNPTEDIHLIIIQPACFIKDSTTKNLIPQWP

SEQ ID NO: 273325 - protein, 93 aa, Glycine max
  Clone ID: PAT_MRT3847_88834C.1.pep
MLTELEKALNSIIDVYHKYSLIKGNFHAVYRDDLKKLLETECPQYIRKKGADVWFKELDINTDGAVNFQEFLILVIKMGVAAHKKSHEESHKE

SEQ ID NO: 273326 - protein, 147 aa, Glycine max
  Clone ID: PAT_MRT3847_88835C.1.pep
VRGAHWPCGGVFYRTINILLVYIRRNDDTNDWAGIALMLCRPNAAIYAMVEKKIIDGCAYQETKYGGTIWFDTDALLKLTTNGGYVNKENKVKEAFKTHDVPKMVSFHWGTGDGPKIGGELKYLVPCVPMLLKDEHIILWRGNVHEY

SEQ ID NO: 273327 - protein, 310 aa, Glycine max
  unsure (1)..(310): unsure at all Xaa locations
  Clone ID: PAT_MRT3847_88836C.1.pep
MTEVLHFSSSSSPATCSSDGILQEAPPPPPPSSSVSAVVDGFSTVTDCDGCGVTFTDRTQQQEEELSLLAILVTLLRKSLIACNKSEEGHGAMEIGWPTNVRHVAHVTFDRFNGFLGLPREFEPEVSTRPPSASATVFGVSTESMQLSYDTRGNSVPTILLLMQRHLYALGGLQEEGIFRINADNSQEESVRDQLNRGLVPEDVDIHCLAGQIKAWFRELPTGVLDSLSPEQVMQCQTEEDCTELAGQLPHTEASLLDWAINLMADVAQEEDLNKMNARNIAMVFAPNMTHMXADPLTALMYAVQVMNFL

SEQ ID NO: 273328 - protein, 80 aa, Glycine max
  Clone ID: PAT_MRT3847_88837C.1.pep
LGGGFVKHMQENEFLQEVFNFPPKRRYFNTNELRMFSGEKKMFKSPNSVQNKARAQLLNKPRLLFEGRNLGPYPAKMVDD

SEQ ID NO: 273329 - protein, 95 aa, Glycine max
  Clone ID: PAT_MRT3847_88838C.1.pep
MASRMKEDEKNERVIRGLLKLQHNRRCINCNSLGPQYVCTNFWTFVCTNCSGIHREFTHRVKSVSMALFLLAWLVPVMLTGSETLLNMFMWIEDS

SEQ ID NO: 273330 - protein, 117 aa, Glycine max
  Clone ID: PAT_MRT3847_88839C.1.pep
LVSEEWSFYSCFHCKSGFPNRAIRLVCRCDAKKISANINNYQPKIENILHSTVRFLAVITWECCQPTVESLFWSIEIKTVSLQSYTLLNQLDSLGTYHSILLMLVTVSPFCRLLAAV

SEQ ID NO: 273331 - protein, 81 aa, Glycine max
  Clone ID: PAT_MRT3847_8883C.1.pep
APIPQRFHPYHRVRHLSPIQGHQFHPHQPPRLLSVKIWPTFCTPPPPLFVKTKNPFPPPFAFGGFLTPYFGFLESGLQMGN

SEQ ID NO: 273332 - protein, 42 aa, Glycine max
  Clone ID: PAT_MRT3847_88840C.1.pep
VRLLTLFNYTNGCHLLRSSHLRGYQIPRLIPFWKNLYLLSIN

SEQ ID NO: 273333 - protein, 47 aa, Glycine max
  Clone ID: PAT_MRT3847_88841C.1.pep
HFFLLSMSGSLFNLSSITLYPIILSNHVASNKEICKSYLTCQIVNNL

SEQ ID NO: 273334 - protein, 47 aa, Glycine max
  Clone ID: PAT_MRT3847_88842C.1.pep
RMYSAEVLWFTIRYVRTVFFAILLRAETLASFFFYSDFSLYNPRHFS

SEQ ID NO: 273335 - protein, 85 aa, Glycine max
  unsure (1)..(85): unsure at all Xaa locations
  Clone ID: PAT_MRT3847_88843C.1.pep
KDHFSMHGMNQQLLLQYYKWQRSNVCYGGRVLFTQTIIWGYCGAYARQGDQGGFXRNQTRQNSKTGYCWLAHRNDLMDNDYMIHG

SEQ ID NO: 273336 - protein, 31 aa, Glycine max
  unsure (1)..(31): unsure at all Xaa locations
  Clone ID: PAT_MRT3847_88844C.1.pep
QQKLLVXAXTIIXCTAIXILXYSLCXXXVIK

SEQ ID NO: 273337 - protein, 69 aa, Glycine max
  Clone ID: PAT_MRT3847_88845C.1.pep
REETDEREDFLYQIRTKAFNLRPTVTGKSNDTTGPTANVKVTAILEKANAIRQVVASDDGEDDDNWSDT

SEQ ID NO: 273338 - protein, 63 aa, Glycine max
  unsure (1)..(63): unsure at all Xaa locations
  Clone ID: PAT_MRT3847_88846C.1.pep
FMPRYVHSYMESTTISDRRXDXGIILRCXEYLDKXXKAKDPSTSLXHYFXVYQELVXCPHDCX

SEQ ID NO: 273339 - protein, 81 aa, Glycine max
  Clone ID: PAT_MRT3847_88847C.1.pep
RGAPGSHALSDVLSEVVFFCLDFSVNKATDGSVIHRLYDDLWFWNKDYDKCEEAWAKVLEFKDAMTVNLDEKKTGSIRVAN

SEQ ID NO: 273340 - protein, 138 aa, Glycine max
  Clone ID: PAT_MRT3847_88848C.1.pep
EPKVVEYLPKAAAIVFVVDAVDFLPNCRAASEYLYDILTKGSVVRKKIPLLILCNKTDKVTAHSKEFIGKQMGKEIDKLRESRSAISPADIANEFNLGVPGEPFSFTQCPNKVRLQDASGLTGEISQLEQFIREYVKP

SEQ ID NO: 273341 - protein, 54 aa, Glycine max
  Clone ID: PAT_MRT3847_88849C.1.pep
KLVYCKSIILGKKIKRDSPTNITGRMREGNTNHGGSAESEVSEKREENGYHKGV

SEQ ID NO: 273342 - protein, 90 aa, Glycine max
  Clone ID: PAT_MRT3847_8884C.1.pep
LDVETQCRSLLVMRGNSADMARYVMCPSPNRRVSITFFKVRPDSNHCQSPTPTMTTAMTLWHPSIFSPFTLPKGPLNGYEAMDMMPQWGF

SEQ ID NO: 273343 - protein, 60 aa, Glycine max
  Clone ID: PAT_MRT3847_88850C.1.pep
RIAVSCRRFESQGLGVCRLFRDDVCYMQQTLLERYAPYGINISLCLGSRIVYIEGGNPSA

SEQ ID NO: 273344 - protein, 648 aa, Glycine max
  unsure (1)..(648): unsure at all Xaa locations
  Clone ID: PAT_MRT3847_88851C.1.pep
MPGSLILPLALSQLALLPPIPPFIFRISQLSPIIPTPKTNSSSYSYPLFLTSTIAMASHSNQPGPGAEGLGEKDPPTSFQNPLSEISPSPSPSSAPAPALVLSNSGKRIDQAGKKKYVKQVTGRHNDTELHLAAQRGDVGAVRQILEDVDSQIMGTLSGDGDEDDLNAEIAEVRACLANEENELGETPLFTAAEKGHLDVVKELLNYSTAQTVSKKNRSGFDPLHIAASQGHHPIVHVLLDYDPGLSKTIGPSTSTPLITAARRGHTVLVNELLSKDCSWFDITRSYGKNAWHCAVRQVHVXEIVKALISIEPQLARRTDKKMQIALHMAVKGQSCDVVKLLLEADAAIVMLPDKFGNTALHVATRKKRVEIVNELLHLPDTNVNALTRDHKTALDIAEDLPLSEEASDIKDCLSRYGALRANELNQPRDELRKTVTQIKKDVHTQLEQTKRTNKNVHNISKELRKLHREGINNATNSVTVVAVLFATVAFAAIFTVPGGDDDDGSAVVAAYAAFKIFFVFNAIALFTSLAVVVVQITLVRGETKAEKRVVVVINKLMWLASVCTSVTFIAASYIVVGKKNEWAAILVTLVGGVIISGVIGTMTYYVVRSKRSRSMRKKEKQAARRSGSNSWHHSEFSNSEVDPIYAL

SEQ ID NO: 273345 - protein, 101 aa, Glycine max
  unsure (1)..(101): unsure at all Xaa locations
  Clone ID: PAT_MRT3847_88852C.1.pep
KRVVEVINKLMWLASVCTSVAFIASSYIVVGRKNKWAAILVTLVGGVIISGVIGXMTYYVVRSKRSRSMRKKEKQAARRSGSNSWHHSEFSNSEVDRIYAL

SEQ ID NO: 273346 - protein, 172 aa, Glycine max
  Clone ID: PAT_MRT3847_88853C.1.pep
RLELARGLDYYTGVIFEAVFKGGTQVGSIAAGGRYDNLIGMFGSRSVPAVGVSLGIERVFAIMEQQQKDQNQMARPTKTEVLVSIVGNDFTLAAELAGELWDARVKAEFLVNKRRTKHFEYAKESRIPWIVLVYEQEIKEEGVVQLKNLEANIDIKISRAEFVEELRRRLYP

SEQ ID NO: 273347 - protein, 93 aa, Glycine max
  Clone ID: PAT_MRT3847_88854C.1.pep
TEVLVSIVGNDFTLAAELAGELWDARVKAEFLVNKRRAKHFEYAKESRIPWMVLVYEQEIKEGVVQLKNLEANIDIKISRAEFVEELRRRLYP

SEQ ID NO: 273348 - protein, 50 aa, Glycine max
  Clone ID: PAT_MRT3847_88855C.1.pep
FEYVDMMRRRCLHSHAMDEHTYLSLSLDLQKVDHGSSPCVDLEHCTLRLD

SEQ ID NO: 273349 - protein, 50 aa, Glycine max
  Clone ID: PAT_MRT3847_88856C.1.pep
IRVCVLVVDSTMYRCKILVTCNLGSGFHQDYISLTMEPLVCGLIMPRLYI

SEQ ID NO: 273350 - protein, 97 aa, Glycine max
  Clone ID: PAT_MRT3847_88857C.1.pep
ALPPGWVAPPIHPFYPEPAVFFFSGGNVHPPPGIPGALFNSFGFGGPHFGGGFFGFQPFLARLGCLPFLLNPGFRLLKICSPPPPGGFFFRGGPPPI

SEQ ID NO: 273351 - protein, 54 aa, Glycine max
  Clone ID: PAT_MRT3847_88858C.1.pep
NWGRGLETFKNTAGFFFCALGPCGSGFGLRQWALTSTVWVLFIISGDFVNAFLS

SEQ ID NO: 273352 - protein, 190 aa, Glycine max
  Clone ID: PAT_MRT3847_88859C.1.pep
MFGRIRASTSSLDTLDGSPSKILKDDTFSIYEATLMKLKLGARRDTSEVTNDSSVNSPCAEEANLKPDLNPATSTSCSETTMMDTESDNSSPRVSDHVSSGNSEQRKQSNVSILYFFKVKDTGHAGVSSSEEATASTGNGSSESISSTSVESDYREKPAQWARGWCLVKCDSFRQLDSMIGLLNSPECCG

SEQ ID NO: 273353 - protein, 136 aa, Glycine max
  Clone ID: PAT_MRT3847_8885C.1.pep
GGAYGGVFVLKALGFGRVFGNSRGIFVPAQCCFWVGFFFPGRDLFFKKSFFFLQQSAVFLSCCFFLWGQKRFPGKVGVSTVLLCGGAFFFLPHRLFFLHGAIFFSFSGGQESSPSRVVAFVSSHGGSPFSRKNVSI

SEQ ID NO: 273354 - protein, 122 aa, Glycine max
  unsure (1)..(122): unsure at all Xaa locations
  Clone ID: PAT_MRT3847_88860C.1.pep
DDPSWEVAILTAKFIYINDSDVIGNGYTPVLDCHTSHIVGXYGELMINIDRLSGPELENESIYLMNSDAGFVNMIATTSMGAETSCDCPTVCRFAATDMHQTCADGVIKSHMMTDHTGAKDT

SEQ ID NO: 273355 - protein, 74 aa, Glycine max
  Clone ID: PAT_MRT3847_88861C.1.pep
LVSLSFLLSQEKILRPLVQLDIQLIKGEAVYSSESTRPEDSCHYFWQPTSTTSDNIELDGTMVHGTYPCDALKF

SEQ ID NO: 273356 - protein, 51 aa, Glycine max
  unsure (1)..(51): unsure at all Xaa locations
  Clone ID: PAT_MRT3847_88862C.1.pep
VKINSPTQKRVSPPQSRHFEIGSSSSGGLRSDRKFIFXSVPFFPLHWSPLC

SEQ ID NO: 273357 - protein, 90 aa, Glycine max
  unsure (1)..(90): unsure at all Xaa locations
  Clone ID: PAT_MRT3847_88863C.1.pep
MINAQQGRPAGERQTAAHPEKTPQXQKATGAXTGPXTARKSQETRXPGKKEKREQTRKSTQETEATDGPEPPKNTPGTTRATXTGTTTRE

SEQ ID NO: 273358 - protein, 34 aa, Glycine max
  Clone ID: PAT_MRT3847_88864C.1.pep
WDEHWIFWVVPFMGAALAPVYHQVVIRAIHFKFK

SEQ ID NO: 273359 - protein, 66 aa, Glycine max
  Clone ID: PAT_MRT3847_88865C.1.pep
LLQQQQGIQRERAYTKLSYRGVDLHSPQDMSSNELLWMFSARAHERFNIRLNQAPRAMIMKLHKAS

SEQ ID NO: 273360 - protein, 161 aa, Glycine max
  Clone ID: PAT_MRT3847_88866C.1.pep
APFFSSLRSVAVLRSFCFDQIQHRPADTLQLASVGPIHCAEVGLLKREGVGAQVVLGEVGDGHCASGEVQLGMAKAVFSVRGPCRLTGEQILGLLAGRSLSLDHQFAGHILVFVLLAQLDLLTPDCAFDGGQGDDANDGEDERGNNRRHFRLLELNWLSNM

SEQ ID NO: 273361 - protein, 97 aa, Glycine max
  unsure (1)..(97): unsure at all Xaa locations
  Clone ID: PAT_MRT3847_88867C.1.pep
KQVGGTSFPSLGAFYPCFVKTYEKVGPPISFPFXGFGLKPPLEKNFIYNRAGLLGFFSKGAAPHKLNSVFNVFSHFXPQNLWFLFDIGQKKVGIAPE

SEQ ID NO: 273362 - protein, 75 aa, Glycine max
  Clone ID: PAT_MRT3847_88868C.1.pep
TLREKENLYSPRKPFKVQPVGVQAKRALLLKRNLIQIKGSSFENCPKKTLKISSKTGFWNQNLQFSFHMSQPFNG

SEQ ID NO: 273363 - protein, 305 aa, Glycine max
  Clone ID: PAT_MRT3847_88869C.1.pep
MGFSVAASLGTYVVLRDTHETRIKCQFLCRKEQNSRIGFKFSKHKAIQSAIFFSKHEFTDLDERKSSDEVKEEIKKCYELINRLGRGVVYLGSSRMGPSHSHYVQAQELAKEIANLLDCTSWSGAGPGLMDAVTQGSMLAGKPVGGFKIGREAGEWTASNFHPYLPSENYLTFRFFSARKHGLVDAVVRNNSFDKTAVVALPGGIGTLDEVFEILALIQLERIGSKFPVPFLLMNYDSFYSKLLEFLNDCEGWGTVSKGEVASLWKVCNSNSEALAYLEEFYGISSSDKSKNVTKLYSTYESPSS

SEQ ID NO: 273364 - protein, 264 aa, Glycine max
  Clone ID: PAT_MRT3847_8886C.1.pep
EFPARPTRPVVVSLCMCLVWCCRRRRQLAKRSKWAISKPAPLSIKMMEKSGPFAFETESGTSWVADLKEPSSAPVVVFEKPLMNLTFVDLLAGTSHFGKDSLLAEGRCGPVYRAVLPGDIHVAIKVLENARDVHDDDAVALFVDLSQLKHPNLLPLSGYCIAGKEKLVLYEFMSNGDLGRWLQELPTGETNVEDWSGDTWDIIQNGAASRASPPEKMGWLVRHRIAVGVARGLAFLHHAGSRPVVHGHLVTSNVLLGDDFEPRI

SEQ ID NO: 273365 - protein, 50 aa, Glycine max
  Clone ID: PAT_MRT3847_88870C.1.pep
FEFEERFLKLVLQFMTELSFLQHVVLYTLRSKTRSERESWHCEGQGLFES

SEQ ID NO: 273366 - protein, 45 aa, Glycine max
  Clone ID: PAT_MRT3847_88871C.1.pep
LKSFKLEDISCTIVNLNVLVHTFTYILITDSFHAQMYIKHYIIHT

SEQ ID NO: 273367 - protein, 91 aa, Glycine max
  Clone ID: PAT_MRT3847_88872C.1.pep
EPRCFVTALRCYRGLFLQDRGFFFVEPTLEISIQLGWKDNGFLENMYFPPDPIVFGLAVCIFASGGEFSRSGFQPSGGVLYLLCLYISFGA

SEQ ID NO: 273368 - protein, 88 aa, Glycine max
  unsure (1)..(88): unsure at all Xaa locations
  Clone ID: PAT_MRT3847_88873C.1.pep
LVQVYLSDICSAEHFYACKCTKSEPHYCEXILPKDVWGPNNGFVMXRSVWTNKTSSGWKFLIDNPIQPTVIDILLGISQDCEKAGYTL

SEQ ID NO: 273369 - protein, 52 aa, Glycine max
  Clone ID: PAT_MRT3847_88874C.1.pep
TMHDLYGLTCVNESLLSVIRKALTVVVSAICSCTTRESFENASSYFIPRIIL

SEQ ID NO: 273370 - protein, 204 aa, Glycine max
  Clone ID: PAT_MRT3847_88875C.1.pep
MTMAEATASELEIVEPTTTDAAAADVAVDGVESNLKRTREDSDDEEDGVSKKQKVDAEEKKASGPVKLGFKSFASSVEMFDYFYNLLHAWPAYLNLNQYEHMMLLELLKNGHTEPDTKIGGGIRVFQVRKHPMWKSRCFFLVRDDESVDDFSFRKCVDHILPLPEEMQVRPDANRALGGGKKHYRGKSGGGGTSGHGHGKKRRI

SEQ ID NO: 273371 - protein, 44 aa, Glycine max
  Clone ID: PAT_MRT3847_88876C.1.pep
TGSTISRSPGKIGKRTSFFVAREMQRTEMRSSDQEKSLWLVLPL

SEQ ID NO: 273372 - protein, 74 aa, Glycine max
  unsure (1)..(74): unsure at all Xaa locations
  Clone ID: PAT_MRT3847_88877C.1.pep
LXPVLCGLLPLRXLSCGXLGVCAVLCAVVLASVLPLXACCLLACAPXPVCCPRCVCGRSLVLFRGCXRVGRSGV

SEQ ID NO: 273373 - protein, 114 aa, Glycine max
  Clone ID: PAT_MRT3847_88878C.1.pep
KIFKNPPKKPSFFLRGFLYFFSQERPPFFLGPPVIALSKKTNPFFSFLAFGFGPPKNHEGGFFFFKSPKGPVGFFPFRPGPFSPGSKGENFPPCPVLWFQMFGETLFLVTQIRG

SEQ ID NO: 273374 - protein, 111 aa, Glycine max
  unsure (1)..(111): unsure at all Xaa locations
  Clone ID: PAT_MRT3847_88879C.1.pep
PSSLPCHRCSSRWSSPPTASPPLXXXXXXXXXXSSPQSTPGPTASTHSSYSSFHHYPSRFIFLILAPPPLLCAQSRPSTIPGRCARDSHHHPHHRARQPSPEESPHPHPLP

SEQ ID NO: 273375 - protein, 56 aa, Glycine max
  Clone ID: PAT_MRT3847_8887C.1.pep
QAITIYWDLDELDRDVNSQVVSNLLGNTTTRGTMSHNFSNKTVYTSKPYNYKTRGC

SEQ ID NO: 273376 - protein, 59 aa, Glycine max
  Clone ID: PAT_MRT3847_88880C.1.pep
AYTLDMESFMSSVIETAFGISLSHGVVIWYRFIYWNWNMLHEHWVRMKDAEVRYVIIPI

SEQ ID NO: 273377 - protein, 272 aa, Glycine max
  Clone ID: PAT_MRT3847_88881C.1.pep
DDQLYNLCAICHSLGGAGMMMYVITQRIEGKPHRLSRLVLLSPAGFGEDSTGVFSMAELLLVLLAPVLSLLVPAFYIPTRFFRMLVNKLARDLHNLPAVGGLVQTLMSYVVGGDSSNWVGVLGLPHYNTNDMPGVSFRVALHLAQMKRTGKFRMFDYGSASANMKVYGSPMPLDLGEHYGLIDIPVDLVAGQKDKVIRPSMVKRHYKLMKGARVDVSYNEFEYAHLDFTFSHREELLSYVMSCLLLVDPNPKHQVNQRVVRSRRKGQVAASG

SEQ ID NO: 273378 - protein, 46 aa, Glycine max
  unsure (1)..(46): unsure at all Xaa locations
  Clone ID: PAT_MRT3847_88882C.1.pep
RNSSSFRVVASGGKKIKTXDKPYGYKGGLALREGVXDASGKKGKGK

SEQ ID NO: 273379 - protein, 62 aa, Glycine max
  Clone ID: PAT_MRT3847_88883C.1.pep
CTRSLNVYNHPCYSYNYFCFYFPAIFCYISYFFLLFCCIFYCVSSNNISHVQYCTTFFLSHA

SEQ ID NO: 273380 - protein, 110 aa, Glycine max
  unsure (1)..(110): unsure at all Xaa locations
  Clone ID: PAT_MRT3847_88884C.1.pep
LLLKMLTGKTPFXYPGYEDVVDLPRWVRSVVREEWTAEVFDEELLRGQYVEEEMVQMLQIALACVAKGSDNRPRMDEVVRMLEEIKHPELKNHHRQSSHESDSNVQTPTP

SEQ ID NO: 273381 - protein, 642 aa, Glycine max
  Clone ID: PAT_MRT3847_88885C.1.pep
MKVQFSIVALVLLGSTLCLSGLIVADLNSDQQALLEFASSVPHAPRLNWKKDSVSICTSWVGVTCNSNGTRVVGLHLPGMGLIGTIPENSIGKLDALRVLSLHSNGLIGSLPSNILSIPSLQFAYLQHNGFSGIIPSPVTPKLMALDISFNNFSGSIPPAFQNLRRLTWLYLQNNSISGAIPDFNLPSLKHLNLSNNNLNGSIPNSIKTFPYTSFVGNSLLCGPPLNHCSTISPSPSPATDYQPLTPPTTQNQNATHHKKNFGLATILALVIGVIAFISLIVVVICVFCLKKKKNSKSSGILKGKASCAGKTEVSKSFGSGVQGAEKNKLFFFEGSSHSFDLEDLLKASAEVLGKGSYGTAYKAVLEEGTTVVVKRLKEVVVGKKEFEQQLEIVGRVGSHPNVMPLRAYYYSKDEKLLVYNYMPGGSLFFLLHGNRGAGRTPLDWDSRVKILLGAAKGIAFIHSEGGPKFAHGNIKSTNVLINQELDGCISDVGLPPLMNTPATMSRANGYRAPEVTDSKKITHKSDVYSFGVLLLEMLTGKTPLRYPGYEDVVDLPRWVRSVVREEWTAEVFDEELLRGQYVEEEMVQMLQIALACVAKGPDQRPRMDQVVRMLEEIKHPELKNYHRQSSESESNVQTPTP

SEQ ID NO: 273382 - protein, 91 aa, Glycine max
  Clone ID: PAT_MRT3847_88886C.1.pep
MSGTEKAGSGTTKTPADFLKSIRGRPVVVKLNSGVDYRGILACLDGYMNIAMEQTEEYVNGQLKNKYGDAFIRGNNVLYISTSKRTLAEGA

SEQ ID NO: 273383 - protein, 51 aa, Glycine max
  Clone ID: PAT_MRT3847_88887C.1.pep
SRVFFFFFFFFFFFYNNQVLLSASVLQYHNANSTFTQTFNNLHMNPTYTNF

SEQ ID NO: 273384 - protein, 231 aa, Glycine max
  unsure (1)..(231): unsure at all Xaa locations
  Clone ID: PAT_MRT3847_88888C.1.pep
YFLYQLXXGXKYIXSANXXXRDXXXSXXLLNANCDLKICDFGLARTTSETDFMTEYVVTRWYRAPELLLNCSEYTAAIDIWSVGCILMEIVRREPLFPGKDYVQQLALITELLGSPNDSDLGFLRSDNAKKYVKQLPHVEKQSFAERFPEMSPLAIDLAEKMLVFDPSKRITVEEALNHPYMXSLHEINEEPTCPTPFIFSFEXXILKEEDIKELIWKESLNFSQDHQMLE

SEQ ID NO: 273385 - protein, 429 aa, Glycine max
  unsure (1)..(429): unsure at all Xaa locations
  Clone ID: PAT_MRT3847_88889C.1.pep
MIPSGIMKYPRGKLPLPIIVITTCVLVFVAILYVERLSFLSSKSIFKFKPCPRKTTKTKSSDKKADEEVVVVNASTWIDDRFDFDPEECNVANGKWVFNHSIKPLYSDISCPYIDRQFSCVKNGRNDSDYRHWEWQPEDCTLPRFNPELALRKLQGKRLLFVGDSLQEDQWESFVCWVXWVIPHKHKSMRLDSISYYLKNKAXMETYVFWVLFPIRITVLPMICITQINRVEELNVIAEQHKEATVIYHLNFVLNVWWMSGVRIKTIWGSFANGQEGYEEFDTPVAYKLALKTWANWIDSTINPNKTRVFFTTMSPTHTRSQDWGNMEGVKCFNETKPVRKKKHWGTGSDKRIMSVVAKVTKKMKVPVTFINITQISEYRIDGHCSVYTETGGKLLTEEERANPQNADCIHWCLPGVPDTWNQILLAML

SEQ ID NO: 273386 - protein, 74 aa, Glycine max
  Clone ID: PAT_MRT3847_8888C.1.pep
SRPMVLFEPSFCFTTWSTVAGSLLSLFNASTNYLLSFSHSSSISISTTTILSTSSFSHSMYFLLYYYDYRRLLH

SEQ ID NO: 273387 - protein, 76 aa, Glycine max
  unsure (1)..(76): unsure at all Xaa locations
  Clone ID: PAT_MRT3847_88890C.1.pep
NHFWGHKVIVSFYVFKGKKINFLTXLSFQRFSLEKKPIPNLEFLLPLFAPIIHKEEINPYYXLSLLIFNLLGQHHL

SEQ ID NO: 273388 - protein, 63 aa, Glycine max
  Clone ID: PAT_MRT3847_88891C.1.pep
GSKNQAYIAVYRCGLRFQARDLLVILQVPKHPIMLACTIFSRKDPSACACANEHKIPAYGLAE

SEQ ID NO: 273389 - protein, 48 aa, Glycine max
  Clone ID: PAT_MRT3847_88892C.1.pep
FKLQFLLRDLVFGCHRDLMSFPHTLVSCSIQLRVATSNRRLPVDRDAA

SEQ ID NO: 273390 - protein, 101 aa, Glycine max
  unsure (1)..(101): unsure at all Xaa locations
  Clone ID: PAT_MRT3847_88893C.1.pep
XRAGIGRRTLTKPTGQVSVSSNHSDGYLQRGEACVTTTYHQGERASTRLEPTHELSVMGVRGCVXSITTEGPSCKRLTICGAVLSEGILKRNVMRRNRGDS

SEQ ID NO: 273391 - protein, 477 aa, Glycine max
  Clone ID: PAT_MRT3847_88894C.1.pep
MTHDCHLTKARNSRARATFFLPPPSTMGVKHTTTTTTTILFTSMLLHLSIIAIANDPCASQHDDDDSDITMIPIYGNCSPFKNYSTSWENIIIDMASKDPERVVYLSSLDASLRRKPISAAPIASGQAFGIGSYVVRVKLGSPNQLFFMVLDTSTDEAWVPCTGCTGCSSSSTYYSPQASTTYGGAVACYAPRCAQARGALPCPYTGSKACTFNQSYAGSTFSATLVQDSLRLGIDTLPSYAFGCVNSASGWTLPAQGLLGLGRGPRPLPSQSSKLYSGIFSYCLPSFQSSYFSGSLKLGPTGQPRRIRTTPLLQNPRRPSLYYVNLTGVTVGRVKVPLPIEYLAFDPNKGSGTILDSGTVITRFVGPVYSAIRDEFRNQVKGPFFSRGGFDTCFVKTYENLTPLIKLRFTGLDVTLPYENTLIHTAYGGMACLAMAAAPNNVNSVLNVIANYQQQNLRVLFDTVNNRVGIARELCN

SEQ ID NO: 273392 - protein, 41 aa, Glycine max
  Clone ID: PAT_MRT3847_88895C.1.pep
FLHSIIIFSKFSFYSYLYQVPSVNNIIYDVYLDLSPFYSFI

SEQ ID NO: 273393 - protein, 45 aa, Glycine max
  Clone ID: PAT_MRT3847_88896C.1.pep
LQSSNTQKLGHVSGKFWHAHYPQEGYLPFNTGLTTIYDDLAKSIQ

SEQ ID NO: 273394 - protein, 422 aa, Glycine max
  Clone ID: PAT_MRT3847_88897C.1.pep
MCSSTLSSYSFLTISSTFFKSQFCPPPFPSRVVACHVGSNSNVQKHVATDLKFVLHDALHDSGINTTHAREAREHFCSQIRRFTDIEKGTSICINRCVDLGRTALYIAAEDDSLVSHSSVPLPVDDFITRLDDLSMDYCPHYSPKYDSSPEKFLESIERFLYIHKGFRRANANVLEPRALYLHSVLTHRSGSAAMLSLIYSEVLKMLRLWSLLHFDAEIFFPRDALTLPTGYHKQKSKESDQAHIMTSGNLLVEILNDLKHAFWPFQHDHTKTLFLRAATAANCVDRSDFVGESGSQIALAKAAQHRLDRGVWTSVRFGDMRRSLSACERLILLKNDANELRDYSILLYHCGLYEQSLEYLTKYRDLKNSSTQELSSSNSLSSLEEDAVDNLMMRLNLVLMEQGWSRPSYAKNFLGNNSEPW

SEQ ID NO: 273395 - protein, 122 aa, Glycine max
  Clone ID: PAT_MRT3847_88898C.1.pep
RSRWYPLHECFPRRAVNEPITRNTTALASSSRIVGVSVGKIVSSASSSSQGSRVPGGSQVVRQQAANRVNVGVGCSSTVRRRSRRTRRHDVWFSAATMAEASTGPPIRYKIVVITAREMYAE

SEQ ID NO: 273396 - protein, 185 aa, Glycine max
  unsure (1)..(185): unsure at all Xaa locations
  Clone ID: PAT_MRT3847_88899C.1.pep
EKRTSSNSCTSSNFTIDSITNSNNIEDXNNRVTKEGSKSKPSFSLFGLSKGRKGCQVRDKEDKEDNIKHKKKLGYDVMHALKKYLRMVQPLVLFGGRREKGRFHGQAYSHSGNLIRKNKPELRGRRGEYSAPASMRTSPTNSGLLLATAALPPANDSTMEELQAAIQAAIAHCKNSIAKEEKLSC

SEQ ID NO: 273397 - protein, 128 aa, Glycine max
  Clone ID: PAT_MRT3847_8889C.1.pep
KPAPFPVEKSSVRGLPSPPRNSSSFKVVARGGKKIQPAHPYGINGGLPFREGVFASARKGKGKGVSPFVAQTGANVDGSRPFFAPQGWSPPGDVSPGGTPGLAIWAGPPLGFLAGGALLVSPPRALAP

SEQ ID NO: 273398 - protein, 231 aa, Glycine max
  Clone ID: PAT_MRT3847_888C.1.pep
MKVHQFARGFWEHEPSLTLGCKRLRPLAPKLSNTDTISPPHHPVTTFDLKSFIKPESASRKLGIGSSDDNTNKRDPSSPQGQAETHIPGGTRWNPTQEQIGILEMLYRGGMRTPNAQQIEQITAQLSKYGKIEGKNVFYWFQNHKARERQKQKRNNLGLAHSPRTTLTTSPPFSCCVITTMDTTKRGEVVEREEEDSPLKKCRSWAFEYLEDQREEEHRTLELFPLHPEGR

SEQ ID NO: 273399 - protein, 66 aa, Glycine max
  unsure (1)..(66): unsure at all Xaa locations
  Clone ID: PAT_MRT3847_88900C.1.pep
ARNSARXXXXXLRXXXQNXLXXXRXSKGVGXXNGLTRXXVXXXXKSRXXRGXXSGRKYRRLFXNPX

SEQ ID NO: 273400 - protein, 229 aa, Glycine max
  Clone ID: PAT_MRT3847_88901C.1.pep
MVVSLGPGKFYGTSLPRPRIYTDVKFNDHRVDPPVPVNDPLMSWAQEAHWSMGGLSFKRLRLQGKIEGNVERLRSQREKFQAQSPSPSPPARADLRRSKRAASPLTPPAPFMPKRQRYMDLIQEEEEEEEEGVVVRRTSVRKSGLVKKLGDDFDRVALENDESNTVSSLKTTRGRKLVKNGELGNKTVVEVAEKSNTKGKKSASEAEKSPGVRTSSRLAKRVSNQTSCN

SEQ ID NO: 273401 - protein, 59 aa, Glycine max
  Clone ID: PAT_MRT3847_88902C.1.pep
SSSSVIKYSELEDQSSNCLVTVKLGFHVVSIDSVDLFPVNWLICVIHHHRGQCRRLGLK

SEQ ID NO: 273402 - protein, 123 aa, Glycine max
  unsure (1)..(123): unsure at all Xaa locations
  Clone ID: PAT_MRT3847_88903C.1.pep
MLCKFHFKKQLRFPPIPYSFVTQCTHSWSIIRASVPFPDETHFRDPHTVHLFCANALKVSAKRALLPEGKQLHAHLIKFGFCHVLSLQNQIXGVYLKCTAADDAEKLFEELSVRNVVSWNILI

SEQ ID NO: 273403 - protein, 103 aa, Glycine max
  Clone ID: PAT_MRT3847_88904C.1.pep
ARTQTGPQGFGRGGRKGGRNPGNQPEANENPNGQRGFGRGATRGGRNHDHPAEDHEDPDAAQGFARGGPAPRGGRGGRRGGGRDNHHRRDRAMKKHMQGLTGL

SEQ ID NO: 273404 - protein, 34 aa, Glycine max
  Clone ID: PAT_MRT3847_88905C.1.pep
KNYLLIFNYYMENNYFIFLNLIGMHKFFIVTYQK

SEQ ID NO: 273405 - protein, 199 aa, Glycine max
  Clone ID: PAT_MRT3847_88906C.1.pep
LIEILPDYARVIDDGFYRAVDIYLKAHPALTEQECKKLCKLIDCQKLSQEACNHAAQNDRLPLQMVVQVLYFEQLRLKNALSGSSGDGLLSQRISSGVPSAAMSPRDNYASLRRENRELKLEISRMRVRLSELEKEQMFMKQGIIDKAGNGRTFLTSLSKGIGRIAIFSSQGGGKRQKSGRKSRGSEGKTGRSRRYSVS

SEQ ID NO: 273406 - protein, 51 aa, Glycine max
  unsure (1)..(51): unsure at all Xaa locations
  Clone ID: PAT_MRT3847_88907C.1.pep
GXTTXNXXAXYXLXKVGXQAPGXRXXXPHLTXTMXHTIKPHYSNSRSYPHI

SEQ ID NO: 273407 - protein, 60 aa, Glycine max
  Clone ID: PAT_MRT3847_88908C.1.pep
MKQGMIDKAGNGRTFLTSLSKGIGRIAIFSGQGGGKHQKSGRKSRGLEGKTGRSRRHSVS

SEQ ID NO: 273408 - protein, 47 aa, Glycine max
  Clone ID: PAT_MRT3847_88909C.1.pep
FTLLNYWEYFFSSLGHMNVRTLIMSPNASMAPNGPPNKFEGIKTKTA

SEQ ID NO: 273409 - protein, 83 aa, Glycine max
  Clone ID: PAT_MRT3847_8890C.1.pep
LTADTISGSQELYQLPTNKDGSQSVSVRAGHHMTIIGESLDTTGLDSCFTGISVSWVDISYPPKSDVCFFTRHSSRYVRSRKS

SEQ ID NO: 273410 - protein, 87 aa, Glycine max
  unsure (1)..(87): unsure at all Xaa locations
  Clone ID: PAT_MRT3847_88910C.1.pep
XSERAXSFKERIWDWEGDGLRWRLFLFSFDSSLIHNLPIQQPQPXTHTYTHLNAYRPSHGLKRXXKEXKDXQKDPPTXFSAXXXXRT

SEQ ID NO: 273411 - protein, 151 aa, Glycine max
  Clone ID: PAT_MRT3847_88911C.1.pep
AAKAAIMLRRAIQRARLHLPAPIGHDNGGGGSSSDEEDYSVSPSVAYTSLRDDESVRDHFRKRPEDVSGVHLIIAEEAAKTRKGQVAELLLEEQRSAANAWARLQKLYGLFRELEAATEEATADSDSKSVKAEAKRQLKTTRRRPKRDDGL

SEQ ID NO: 273412 - protein, 334 aa, Glycine max
  Clone ID: PAT_MRT3847_88912C.1.pep
MDLQNVQNQSMMRLVLSTDAKPRLKWTPELHQRFTEAINQLGGAEKATPKSLMRVMGIPGLTLYHLKSHLQKYRLGKSQPLETCSDNKQQGYSEIQNSDGHCSKEISIGTQNQMTESLKIAEALQMQMEVQRKLYEQIEVQKHLQLRIEAQGKYLQSVLTKAHEALARHSSSTTGVELAKFELSLLVSIINNACPSSPISELTETRGLSLNCGERKQDRGTMCSLESSLTSSESSEQQHIMDEAENPQKFDGVSVELPLISIHPAEVKAFKGDTSVDGRKRSAETDSDHCVDQACGKKKLRKSEVSQMLDLNSQYQRDIDSSVKEIDLNFSSSF

SEQ ID NO: 273413 - protein, 59 aa, Glycine max
  Clone ID: PAT_MRT3847_88913C.1.pep
YLVLISPNILICRIILSTRHYITFLKGRIQHSSLLLGFSCVAQVLHYSMGLLHPVKKNQ

SEQ ID NO: 273414 - protein, 232 aa, Glycine max
  Clone ID: PAT_MRT3847_88914C.1.pep
MNEKLLQTPCNGNCVFGEKDERETKVLVSCFSNEPVRPLVSILEHKGLLTERIREELRLGEEYWALERKLCSALTNKEEILVEDVMKAIHLKSFDYRVLNLLLYQLQGTKVEELHMEFLSISEFLVEVSDDLYDYEDDVLENNFNILRMFIRIYGPSAAPAMLAKCIGEAEDKYASLLKSLDPHLSLSYQKRCAEATKEGGKVSEHPLGTWSIPTVIQDEELYRLKLKSDIS

SEQ ID NO: 273415 - protein, 71 aa, Glycine max
  Clone ID: PAT_MRT3847_88915C.1.pep
NGWFNLTLKWAEREKILSPLDQNHRGKGLENPPLPIWGGVDLGGTRPGQEPFRQKDRASTNVPSESHVWRA

SEQ ID NO: 273416 - protein, 285 aa, Glycine max
  Clone ID: PAT_MRT3847_88916C.1.pep
GTVVLVFQPAEEGGGGAKKILDAGALENVAAIFGLHVTPNFPIGEVASRSGPLLAGSGFFEAIISGKGGHAALPQLSIDPVMAATNVIISLQNLVSREADPLDPQVLTIAKLQGGDAFNVIPDYVTIGGTFRAFSRETLEHLKQRIEQVIIGQAAVLRCNASVNFFEEENPLYPPTINNGDLHKLFVDVAGNLLGINKVDTNMEQDMAAEDFAFYQEVIPGYYFTLGMKNASSFEPVAPLHSPYLVINEDGLPYGAALHASLATGYLTKYQRGIAKVVGKYHDQL

SEQ ID NO: 273417 - protein, 76 aa, Glycine max
  Clone ID: PAT_MRT3847_88917C.1.pep
AREEAFEVVGDCITVERLMSYVGSGLKPGSDPDELKEAYEVFDTDRDGRISVEELFRVFKAIGDQRRTLEERRRMI

SEQ ID NO: 273418 - protein, 76 aa, Glycine max
  unsure (1)..(76): unsure at all Xaa locations
  Clone ID: PAT_MRT3847_88918C.1.pep
ILFILLNLLSXHXTTXPSKKDFYLXLPPPSXPTFXIQNFSYNSYNKSHLLNLIIKNLLLIHPYPNKYILYFIPFPP

SEQ ID NO: 273419 - protein, 47 aa, Glycine max
  Clone ID: PAT_MRT3847_88919C.1.pep
FQNQKAKTRKCFPIFFVFFKYSLSMYYKIKLLKNKKYVHGTNTSQCD

SEQ ID NO: 273420 - protein, 181 aa, Glycine max
  Clone ID: PAT_MRT3847_8891C.1.pep
PSPRSQFPKPPPRIVCRRSKLINHLRCKAYVCAITKLYLFLSLTFRIISFMPGQAVNTGVLFMLTSTCATNVTRHPCVYVLMLWLLLKVKSTRPRNIILSLSIPGLRHHRYTFQYCSGGCGARTPARLFCSFVYSVHLTLCYLLYSSLRWGLSIIGHYALARAPPPPPPQRRRTSYSDDGN

SEQ ID NO: 273421 - protein, 35 aa, Glycine max
  Clone ID: PAT_MRT3847_88920C.1.pep
IWHIVLVKVLLISVLRILIKKLKGESIYYENHKRA

SEQ ID NO: 273422 - protein, 39 aa, Glycine max
  Clone ID: PAT_MRT3847_88921C.1.pep
TGKTLAFPTLIPLQKIPFSPVGLLPKRPDPMAFPKNVPP

SEQ ID NO: 273423 - protein, 102 aa, Glycine max
  unsure (1)..(102): unsure at all Xaa locations
  Clone ID: PAT_MRT3847_88922C.1.pep
FELTCISRHIYLRKHVGVGALAKLYRXAHRHGNRPSHHKXPRTGVQRAVLQSLEKIGVLEKATDGGRKISVDGQRDLDRIATSTLESQVEEESDEEEDEEDD

SEQ ID NO: 273424 - protein, 72 aa, Glycine max
  Clone ID: PAT_MRT3847_88923C.1.pep
FLFFFFFLGPKITFSSLSNLFPSALTDSASQLQVPFSAAQAPESFGLSHFELFQLGSTSPTPFVGLLTLMPL

SEQ ID NO: 273425 - protein, 54 aa, Glycine max
  Clone ID: PAT_MRT3847_88924C.1.pep
ERHNKPHYYIFPLQTPWNTYHVSLALSYPSPAYCCPSRITTPMWTIPTLWGHLL

SEQ ID NO: 273426 - protein, 54 aa, Glycine max
  Clone ID: PAT_MRT3847_88925C.1.pep
SGSLSNPAASYLSLQMMESPWFARPVGVSKVRCELPANHAAHTVLGVLLLFLVA

SEQ ID NO: 273427 - protein, 111 aa, Glycine max
  Clone ID: PAT_MRT3847_88926C.1.pep
LFSFKSLGLTCSRFFIIRNRLNFSTLRLIASIAVLVNPPYFTLRIQDFKGLVGSRFSQLPPIYIQLFSTVLSGLVSPFTGYGGISCFISICFSFPYVYYHQLVIYLEPLFN

SEQ ID NO: 273428 - protein, 96 aa, Glycine max
  Clone ID: PAT_MRT3847_88928C.1.pep
LKGQILTKKKRGVFIIQRKKKKQFSGAGIPPKQGGGNQTLLGEFFKPGPDPLKKGKFFSLGNLFERPQRKRGKAFLPPLGGGPNFFFPSQKTPLIF

SEQ ID NO: 273429 - protein, 72 aa, Glycine max
  Clone ID: PAT_MRT3847_88929C.1.pep
LDLYPTKGRDCVSVTKMTGMLFLITLTGMFTTCFFIAKKSKAEISRKNLGPHTQKLIKFRTPDNWTTENNCF

SEQ ID NO: 273430 - protein, 91 aa, Glycine max
  Clone ID: PAT_MRT3847_8892C.1.pep
MVLKSHTNLLDMCCEDVFDFQQPLRSPRHVVNSPGIISDPDWESSNDGNSVGSMPFCFKRKIIVANFLPVICAKNEATREWSFAMDDNQLL

SEQ ID NO: 273431 - protein, 77 aa, Glycine max
  Clone ID: PAT_MRT3847_88930C.1.pep
IFKFMLFFKGPKGRIIYKFKGFLGAQLAKIYRACPHFIFVGRRPLDFLLIPESQNQGLGNSKGLKFICPTFFGAWDP

SEQ ID NO: 273432 - protein, 67 aa, Glycine max
  Clone ID: PAT_MRT3847_88931C.1.pep
RSALAARAVRADSARGHLTLSLLQTCCAHEHGLLHTRNLILSRGWVESLPESVSLNRGQCYRKRLYC

SEQ ID NO: 273433 - protein, 89 aa, Glycine max
  Clone ID: PAT_MRT3847_88932C.1.pep
FSVLSLFCQRIHHGVHMRPSPFLWNTPLGQHTQSLSIVYHFLPRSIGTLINKIQACVSHSRIAIAVNRFQDFQLLSSPYESGFPCNQLD

SEQ ID NO: 273434 - protein, 202 aa, Glycine max
  Clone ID: PAT_MRT3847_88933C.1.pep
NGSRKSRSTFFIMEAYSGSYSSSSNSSYLTQNNREDSKGYHMKQQIYPLQNHSSSWLRSVRKTPAKPWKKHHVAPMPPTPVKVYKVDAINFREVVQQLTGAPKHKPQQLLQINIARAESSDAPLDVPPKQNQSSGDTCNKWYQEFLLGMNSPGTNNNNNDGAMTPGFLGMNLLSPNSYSNYFCFFPPLSPSGVTSLEPGKVL

SEQ ID NO: 273435 - protein, 181 aa, Glycine max
  unsure (1)..(181): unsure at all Xaa locations
  Clone ID: PAT_MRT3847_88934C.1.pep
HGHGELFTSDHSRHSHTPMPFSILSIFKGXACLPNSQRFQEILAKLNTVMPFSLLNRCCLXKSRFVCNAREAVNEVKVVTDSSWNNLVIASETPVLVEFWAPWCGPCRMIAPVIDELAKDYAGKIACYKLNTDDSPNIATQYGIRSIPTVLFFKNGEKKESIIGAVPKSTLSATVEKYVEL

SEQ ID NO: 273436 - protein, 72 aa, Glycine max
  unsure (1)..(72): unsure at all Xaa locations
  Clone ID: PAT_MRT3847_88935C.1.pep
MFRFPSVLLSRXLHRRELSSSTTSXXPSLPLSHPIYXIWGSNTGVGKTLVSAGIAAAFLLSXPXXSQFHYLK

SEQ ID NO: 273437 - protein, 61 aa, Glycine max
  Clone ID: PAT_MRT3847_88936C.1.pep
MVSALAKSHQSGPPSKIKILTIYVQRDFVPHYAVKGRLSQMFRALCNDILFFHRSWAKAPP

SEQ ID NO: 273438 - protein, 83 aa, Glycine max
  Clone ID: PAT_MRT3847_88937C.1.pep
GLIVRWKLNEQAEVSLVGKRLIRLIEHCILISNGIPIRHQQHRVILGGIKTKLESRGAGRHRYWSSPILSLRDDEFREVVSQK

SEQ ID NO: 273439 - protein, 307 aa, Glycine max
  unsure (1)..(307): unsure at all Xaa locations
  Clone ID: PAT_MRT3847_88938C.1.pep
LVLLRLETTQKSTVCSLRSGEICELCSGLYNSHFSPVRAASPQIRTNPEVDSXQYLTELLAEHQKFGPFMQALPICSRLLNQEILRVSGMLSNQGFGDFDRLRHRSPSPMASSNLMSSVTGTGLGGWNSLQQERLRGTPGMTMDWQXAPASPSSYTVKRILRLEIPVDTYPNFNFVGRLLGPRGNSLKRVEASTGCRVYIRGKGSIKDPDKEEKLRGRPGYEHLNEPLHILIEADLPANVVDIRLRQAQEIIEELLKPVDESQDYIKRQQLRELAMLNSNFREESPGPSGSVSPFNSSGMKRAKTGR

SEQ ID NO: 273440 - protein, 41 aa, Glycine max
  Clone ID: PAT_MRT3847_88939C.1.pep
CTDSTRITRTSHNQKLPSEAPKRAERAEMKIGIRDRVCVRC

SEQ ID NO: 273441 - protein, 80 aa, Glycine max
  Clone ID: PAT_MRT3847_8893C.1.pep
VELEPIRLREGSTKKESQFMDNEVESFGTELVIKQDLSGELGGTVWDASLVLIKYFENTSIFPINYFKGKRIIELGAGTG

SEQ ID NO: 273442 - protein, 176 aa, Glycine max
  Clone ID: PAT_MRT3847_88940C.1.pep
MSGLYNSNFSPVRAASPQIRTNPEVDSQYLTELLAEHQKLGPFMQALPICSRLLNQEILRVSGMLSNQGFGDFDRLRHRSPSPMASSNLMSSVTGTGLGGWNSLQQERLRGTPGMAMDWQVAPASPSSYSVKRILRLEIPCDAYPNFNFVGRLLGPRGNSLKPVEASTGCRVSIRG

SEQ ID NO: 273443 - protein, 261 aa, Glycine max
  Clone ID: PAT_MRT3847_88941C.1.pep
MSAAVCGSKRSLFEELPPSPPVSKRLRCSSSPIRLSLPSLIDHLRPLFPHMDDQVLERALQECGNDLDAAIKSLHGLCLGSADDNSQPAPQPDHPNLVVDTGALEENGDASASGDQPAAANFPAGGAEWIDLFVREMTCATSVDDARSRAARLLEVLEKSITAHASSGATTALQRENLMLKEHIEALTKEKNCFKSAFRIQLERLSDYENKNQELQQLKQLVSQYQEQIRTLEVNNYALRMHLNQAQQYNPFPGCFPPDAF

SEQ ID NO: 273444 - protein, 206 aa, Glycine max
  unsure (1)..(206): unsure at all Xaa locations
  Clone ID: PAT_MRT3847_88942C.1.pep
MSAAVCGSKRSLFEELPPSPPVSKRLRCSSSPIRLSLPSLIDHLRSLFPHMDDQVLERALQECGNDLDAAIKSLHGLCLGSADDNSQIAPQPDLPNVVHTGTLEENDDASASGDQPASGNFPADGAEWIDLFVREMTCATSVDDARSRAARMLEVLEKSITAHASSGATTALQXENLMLKEQNEALTKEENCFKSAFRIHLNVFLI

SEQ ID NO: 273445 - protein, 58 aa, Glycine max
  unsure (1)..(58): unsure at all Xaa locations
  Clone ID: PAT_MRT3847_88943C.1.pep
VARSARPSARAAPXDLXLXXXLLGXXXAGXXFPXXIXFXDKLXLAXTRXFIDGXFXVD

SEQ ID NO: 273446 - protein, 103 aa, Glycine max
  Clone ID: PAT_MRT3847_88944C.1.pep
LSNDSNEYSYLQLQSLSGNNSKHPQQDQGCYISGSDIKCETFMKLGKEEPQKTVHRFFDEWPPKSRGSWLDLDDKSSTTQLSISIPTSTHDFATFSSTTQRDG

SEQ ID NO: 273447 - protein, 61 aa, Glycine max
  unsure (1)..(61): unsure at all Xaa locations
  Clone ID: PAT_MRT3847_88945C.1.pep
SCSRXTHSXXXMYXXMXDNYIIXVXIXSYSICXAQYTXXVKLANXXKXLNHEHGXGPXTNX

SEQ ID NO: 273448 - protein, 72 aa, Glycine max
  Clone ID: PAT_MRT3847_88946C.1.pep
YLYINTSQRVYKIQLSYMLRLKREKEKKMSIFNINKAYNVNRRRLQIKIIMINKPMILLLDSRSICVYYTIQ

SEQ ID NO: 273449 - protein, 32 aa, Glycine max
  Clone ID: PAT_MRT3847_88947C.1.pep
WSHSRVRICFPNSRSGSNSCINPFFRSYSSLF

SEQ ID NO: 273450 - protein, 96 aa, Glycine max
  unsure (1)..(96): unsure at all Xaa locations
  Clone ID: PAT_MRT3847_88948C.1.pep
MYATIGGSTXGTHCISKTATQEGTLHETVRMGNPVGVQGKKICTLGEGGIRVIFSGNCSLDLFSEFVRGKSSNSNHSPHRTLTVCYPLSIHLNLYK

SEQ ID NO: 273451 - protein, 56 aa, Glycine max
  Clone ID: PAT_MRT3847_88949C.1.pep
IKSFQFSTIALSRIFLRVLLAQLSVELVSGFSQPLRSCLDRPNVLHQITQQFSFSF

SEQ ID NO: 273452 - protein, 53 aa, Glycine max
  Clone ID: PAT_MRT3847_8894C.1.pep
EEAEGIAALRMQIFVKTLTRKTSKPRSREQRRIDDSQERGFKRRRGVGPGEQR

SEQ ID NO: 273453 - protein, 88 aa, Glycine max
  Clone ID: PAT_MRT3847_88950C.1.pep
KTRFFQIFQGVWEGQGPFQKKESRKPICFAKSLFLEQLRLVNLLFRVKGTGGAGLPGFILPFIKKKTRWTFMHFQQQKTECIGGPPFL

SEQ ID NO: 273454 - protein, 124 aa, Glycine max
  unsure (1)..(124): unsure at all Xaa locations
  Clone ID: PAT_MRT3847_88951C.1.pep
XXPPGLQGENVVPNKLALSXSGGQRVFXLGQXLXEGKSGVGTLFFQLRTXNFWGGGGNXQFLNKSRSLKTPRESLRAGTPPKRPNQVXTRRPSTKNVRRNSAARTKXASTGRKASGPEAKLCGD

SEQ ID NO: 273455 - protein, 190 aa, Glycine max
  unsure (1)..(190): unsure at all Xaa locations
  Clone ID: PAT_MRT3847_88952C.1.pep
GSSSKAAKDCGCREFVTLTRLFEQDSGFLVQDTVIFSAEVLILKETSTMQDITENDSKLSSSGSQVDGNGKRSSFSWKVENFLSFKEIMETXKIFRKFFQAGGCXLRIGVFESFDTICIHLESDQAVGSDPDXNFWVRYRMAVVNQKNPAXTVWKESSICTKTWNNSVLSFMEVVDLLESDAGFLSLTLK

SEQ ID NO: 273456 - protein, 107 aa, Glycine max
  unsure (1)..(107): unsure at all Xaa locations
  Clone ID: PAT_MRT3847_88953C.1.pep
LLHCISILFVVSGGAKQWSALFPSFRRSRGAGSSLFASSLRKRLQLRFFASGENGGTGGAVEEISEAEKEPTNFAWPDNKXPRVGILXGGGFGGLYTALRVDHWRGL

SEQ ID NO: 273457 - protein, 44 aa, Glycine max
  Clone ID: PAT_MRT3847_88954C.1.pep
EELLFLGYVLEHLKVLEQFGNVEIIAAIFEQIHFQSHNGNTNWA

SEQ ID NO: 273458 - protein, 39 aa, Glycine max
  Clone ID: PAT_MRT3847_88955C.1.pep
CKGRTVIVSWALLTTYKRVPRKSCALIKSDQNGSSMWAI

SEQ ID NO: 273459 - protein, 89 aa, Glycine max
  unsure (1)..(89): unsure at all Xaa locations
  Clone ID: PAT_MRT3847_88956C.1.pep
VXLETPVXXSPLIXXXWXNXXXXXXXXXXXLRGIXVGLAHXYLLVGPFVKAGPLRNTEIXGQAXSLAAXGLVVILSLASQSMGFQSFNE

SEQ ID NO: 273460 - protein, 46 aa, Glycine max
  Clone ID: PAT_MRT3847_88957C.1.pep
YLLDIWIYLFIFIKLNLTKKLYNLFISITICFNLKTHFFILHFFLY

SEQ ID NO: 273461 - protein, 38 aa, Glycine max
  Clone ID: PAT_MRT3847_88958C.1.pep
TIIFHPRLFAIPSDFSHWRANIQSEISVIEEYGFVFHQ

SEQ ID NO: 273462 - protein, 117 aa, Glycine max
  Clone ID: PAT_MRT3847_88959C.1.pep
FHFHLSSTHKIAKPKAQVCSVVPPHSPYAMICVKRNNQQKMSCVILFLLLLLLSTTPCHAAARKTRFDRLKGGSSSDDEFKFKPSNNFHGAGLQGNNAQKDGDQVFGADKRKVYTGP

SEQ ID NO: 273463 - protein, 67 aa, Glycine max
  Clone ID: PAT_MRT3847_8895C.1.pep
VRPKVLHPLSICIYRSRRGGPSIHRSRCPVKSAQFASLSFTISNCRSVIQEIKHAQWSSWYDSNNMI

SEQ ID NO: 273464 - protein, 68 aa, Glycine max
  Clone ID: PAT_MRT3847_88960C.1.pep
LVHTEGEAAKRGSKLHKQAPGQSSTIKDTTHHRQSRAAWHTRRPFNAGRHSTKFEHNILANNPGESPA

SEQ ID NO: 273465 - protein, 65 aa, Glycine max
  Clone ID: PAT_MRT3847_88961C.1.pep
ILWCHHGFRSAPRQLKTLGGSFFQAMLRSSYAMISTALINQKGQQSEESTQSVRDLSSWGPSYMS

SEQ ID NO: 273466 - protein, 38 aa, Glycine max
  Clone ID: PAT_MRT3847_88962C.1.pep
LKRLTCISGNINQWWFDNLHIVIQASPMLGMVLSKRGR

SEQ ID NO: 273467 - protein, 163 aa, Glycine max
  unsure (1)..(163): unsure at all Xaa locations
  Clone ID: PAT_MRT3847_88963C.1.pep
DPEAARGPGQTPHSPPPETTAPKAKRAPNGPAARTPEPTKEQPQQTCTEPKKQAFPGLEKRAGERRXALNARKRPTPTDKGEKPRPPPPSXRRGERPRQRPPTNRRGSEPAGXKQQAKRTTPAGRSRSRKGEKTGTRGKKEKKDNKERDTTDPANGKQTNQRR

SEQ ID NO: 273468 - protein, 64 aa, Glycine max
  Clone ID: PAT_MRT3847_88964C.1.pep
FSVNLFLFSSQSFKPIYLFLENYIFTYLSTNKVFIDSTLRLLFYSIITNILFMVCDYHLSKEIL

SEQ ID NO: 273469 - protein, 122 aa, Glycine max
  Clone ID: PAT_MRT3847_88965C.1.pep
RRVGDIREVERVGIDEERCWVVRRVSVGYVSWVHKVKRLQTAICRRRLNFRSASVKVHRHVAFFFFFFYDVSLSLSLSHSVTHFVQLINGYRGSYKLEMKLRRKVERCCLDRQSVHHHRTRR

SEQ ID NO: 273470 - protein, 702 aa, Glycine max
  Clone ID: PAT_MRT3847_88966C.1.pep
MATYFNGSTSEIQPSADGGLQTLYLMNPTYVPYADAPHHPTTLLVNPNAPNLANIPHAPPVSPNQQHHHVIHGVTSIIGSGNSDDHSRPSLIGENIAAFHGFSGGAGTASTTAPRLHYNLWGPVVDQPGTPSSSSGGGGFRRPSQQGLSLSLSSQQTNFRSVSGELDVAGQGHVAGIGNSPMSASIGVSGVIMGSKYLKAAQELLDEVVNVGKGIYKEEKFSESVKANRESTNSGAAGDGGDGSSGGGENSAGKQVVELSTAQRQELQMKKSKLVTMLDEVEQRYRQYHHQMQIVVSSFEQAAGYGAAKSYTALALKTISKQFRCLKDAISAQIKATSKTLGEDDCLGVKVEGSRLRYVDHHLRQQRALQQLGMIQPNAWRPQRGLPERAVSILRAWLFEHFLHPYPKDSDKVMLAKQTGLARSQVSNWFINARVRLWKPMVEEMYLEEIKEHEQGNGSENTKSKESSKELASTANVALDHLQSKHESFNNQNTSPTEISTSSSMSPMGGSLQSHSGFHLAGSSDMQIRSPNKPRSSEMQNSPSSILSVDMEMKHSGDHGNNRDANTKFGIERHHQQKDGYPLMTSNPNHGGGFGAFTMEDIGSRFNVTTEQLASRFHGNGVSLTLGLPHNENLSMSGTQQHGFLSQNIHLGRRLEMGTNGNEFCTINTAPPSSHSGTTYESIDIQNRKRFVAHQLLPDFVA

SEQ ID NO: 273471 - protein, 89 aa, Glycine max
  unsure (1)..(89): unsure at all Xaa locations
  Clone ID: PAT_MRT3847_88967C.1.pep
MEDVKLHAIWMDPAGPKPTHCWGPTXKGGISIGHLADHSKRPEQLSYPSRIVGTATGTFWAMYRTVVTPKERDPMSGHIAIAGTGLHQL

SEQ ID NO: 273472 - protein, 53 aa, Glycine max
  Clone ID: PAT_MRT3847_88968C.1.pep
PISLGGFHKAVPLQPYHSSETFYPIPSVVPLKSNIGGGLFCSYPSASFLHPNP

SEQ ID NO: 273473 - protein, 78 aa, Glycine max
  Clone ID: PAT_MRT3847_88969C.1.pep
TPTCLLEGRLMDLCKPKCCRNNTNSCGDNIFQNSVLLTKDSNITKRIAMLEEGTTFKSEEALSCDDLCIIHDEHGYMG

SEQ ID NO: 273474 - protein, 49 aa, Glycine max
  Clone ID: PAT_MRT3847_8896C.1.pep
FKIGLALPLTKKNLAPRVLNFFSLNHSSLHYRLSLAKIPALGWGGNFTG

SEQ ID NO: 273475 - protein, 80 aa, Glycine max
  unsure (1)..(80): unsure at all Xaa locations
  Clone ID: PAT_MRT3847_88970C.1.pep
IYGIVILFFPGGTPDIGRASLPEHAHFGQTEFVLAVAXVALGHSIELSXFEQSGLLIYGYEALRVICTALITIGFGAYVV

SEQ ID NO: 273476 - protein, 41 aa, Glycine max
  Clone ID: PAT_MRT3847_88971C.1.pep
DLPWLSVSSVPKYTQKKVLVLWNIYGTRDSTGTCWDMKSKC

SEQ ID NO: 273477 - protein, 84 aa, Glycine max
  Clone ID: PAT_MRT3847_88972C.1.pep
DHPTRSQHPFAMQQSPHTDLIKTRKYFNITKYIYPLKNSGNTKGRESYSSFFTHNRVPTLPPKVLDVWATYTSTPEDSPYPRVT

SEQ ID NO: 273478 - protein, 100 aa, Glycine max
  unsure (1)..(100): unsure at all Xaa locations
  Clone ID: PAT_MRT3847_88973C.1.pep
LQRFAFQGCITPWTRLLRSRRKAVFHAAYTLPYLPGVMTAXRGVKPSFSSSLFTDCLSRAGSTYTPPLSIFSTTHASTISRAHKQAHETRHINRAQRFQS

SEQ ID NO: 273479 - protein, 100 aa, Glycine max
  Clone ID: PAT_MRT3847_88974C.1.pep
LRFRGRVGLKSCFKIMNAACTWSFDSFLIFWFVSVLSMRRVTILAQHLFQWQEEKDGEAPRVLQHYTAEKLSCFGELALMYNKPLQASVCAVTKGTFLVF

SEQ ID NO: 273480 - protein, 55 aa, Glycine max
  Clone ID: PAT_MRT3847_88975C.1.pep
ALKQRIAFKERPRGFSPPHSELTAMGFNRFKMEGKWGISHKNFGQNKKKSKINFP

SEQ ID NO: 273481 - protein, 345 aa, Glycine max
  unsure (1)..(345): unsure at all Xaa locations
  Clone ID: PAT_MRT3847_88976C.1.pep
VPDLVDKAVASEGGTDDAKRRGDAGARALGAHLARLMEEPSSYGKLGLANLLEMREECLREFQFVDAYRSIKQRENEASLAVLPDLLVELDSMDEESRLLTLIEGVLAANIFDWXRSRACVDLYHKGTIIEIYRMSRNKMQRPWRVDDFDAFKQRMLGTGDKKPPPHRRALLFVDNAGADIVLGMLPLARELLRRGTEVVLVANSLPALNDVTAMELPDIVAEAAKHCDILRRAAESGGLLVDAMTNTLDSPRENSSSVPLMVVENGCGSPCIDLRQXVSSELAAAAKNADLIILEGMGRALHTNLNARFQCDALKLAMVKNQRLAEKLIKGNIFDCICKYEPAN

SEQ ID NO: 273482 - protein, 182 aa, Glycine max
  Clone ID: PAT_MRT3847_88977C.1.pep
MSQLLPYELNHVASADAWEKAELLEKLMKTRDSLSAPLTKTLGLSISFFKIKQLLLGDMSKSSASDLEVSCVQMFEMYCKNLPLSKDMDPQESMHGEELLSMICNILVQLFWRTQNVGYLVEAIMVLEFGLAIQRYVSQYKILLLHLYSHCGALSVAHEWYKSLEVKNILMESILHHIWPQM

SEQ ID NO: 273483 - protein, 49 aa, Glycine max
  unsure (1)..(49): unsure at all Xaa locations
  Clone ID: PAT_MRT3847_88978C.1.pep
MSAEDXYSFPSVMPSPSIPRXXXDRSCSARAXVGWLKIKSAMRWAXCIR

SEQ ID NO: 273484 - protein, 39 aa, Glycine max
  Clone ID: PAT_MRT3847_88979C.1.pep
KLVIIAFIKSSISFIVHFNKHQRENGNHSQKNQTYLIQK

SEQ ID NO: 273485 - protein, 162 aa, Glycine max
  unsure (1)..(162): unsure at all Xaa locations
  Clone ID: PAT_MRT3847_8897C.1.pep
LEPIRLEGTSTSLTVYGLSWVVLAGLIILFKGFTFSQKISVNFQLLLRFIQGISLLVALAGLVVAVILTELSLPDIFASMLAFIPTGWGILSIAAAWKPVMKRFGLWKSXQLLLYDAGMGMLIFVPIFPLYQQLPNLMFFYQAXRGLEISLILAGNNHNTGI

SEQ ID NO: 273486 - protein, 113 aa, Glycine max
  Clone ID: PAT_MRT3847_88980C.1.pep
FICITEITNWGDHSNYTITLTLNIFNKISGQHEYIFSFIEQLSYFLPCIFYLINIFFCTVLKFLIWAFLLLFSFFSFYLIFGPVPFILPFFLIVSHFISFCIHFLIFFFCIYF

SEQ ID NO: 273487 - protein, 92 aa, Glycine max
  Clone ID: PAT_MRT3847_88981C.1.pep
INSSGVDGQFINIFNVMKSVWWGRWNPNNLWLSKAALEEGLKKNTGFGQRVQLLATITRNTNQKHYWLEGDLQDIGDITVRGRRRCSLKGIY

SEQ ID NO: 273488 - protein, 97 aa, Glycine max
  unsure (1)..(97): unsure at all Xaa locations
  Clone ID: PAT_MRT3847_88982C.1.pep
QDTWEGRMHFDTKSRSKSVKVSXTKAHFGSGKTTRSDIIGAGSHASKPNTEEEDHEKPNSIDATLTQTTDXKIADVEAHMXTNPSKLTLRDVETTKG

SEQ ID NO: 273489 - protein, 56 aa, Glycine max
  unsure (1)..(56): unsure at all Xaa locations
  Clone ID: PAT_MRT3847_88983C.1.pep
GSXXGIGRGRRINDFTXXXCSXACDRINHQFHHQTIIITPCPSLVVLRVMKLVFKE

SEQ ID NO: 273490 - protein, 38 aa, Glycine max
  unsure (1)..(38): unsure at all Xaa locations
  Clone ID: PAT_MRT3847_88984C.1.pep
INXXLDXXXHCXAEMXXTTMLHDASXNLPXHTXLHEXQ

SEQ ID NO: 273491 - protein, 157 aa, Glycine max
  unsure (1)..(157): unsure at all Xaa locations
  Clone ID: PAT_MRT3847_88985C.1.pep
ISARRHFQRKPSHQGDPTPVNAWPLQERLWIPTGDQPPSSDXRAPTPRKTYPFMSKDAEKMQQLPQSRAFYIGWDGDLQQQQQQQQQKHHRHQYRSSIPHTYYEQSHETTNEIVFGAVQEQDRKQESVVIKPVDYGESMYEHNIRSRMSSMGYGYRY

SEQ ID NO: 273492 - protein, 46 aa, Glycine max
  Clone ID: PAT_MRT3847_88986C.1.pep
LSGCHRVIGLMKPRSPLSVGLTIHIWYRIAFALRQPSLEIESLYSV

SEQ ID NO: 273493 - protein, 53 aa, Glycine max
  Clone ID: PAT_MRT3847_88987C.1.pep
STDATGDFSCLQALKISLMNWALIAHHKWQVKPNLIYFTSRLHAICLQFPFFC

SEQ ID NO: 273494 - protein, 107 aa, Glycine max
  Clone ID: PAT_MRT3847_88988C.1.pep
LFDHTSMLQFLPLYSKGSLPDEISTQNQVSSSLTTFFMQMHTFMGLNTQWTTYKLIVLVWRNPVTLLQMLARCTSLSYINFMKAFPSMLKWCDSMDQLLDSAEAATA

SEQ ID NO: 273495 - protein, 257 aa, Glycine max
  unsure (1)..(257): unsure at all Xaa locations
  Clone ID: PAT_MRT3847_88989C.1.pep
MLTFNLNAISSSFSVVPFHANYPLSTQTQLLVPSNLSYSFATTGTRKFKSFQLKAGFWESIKSGLMKNNSMQVIDPPSADEEDEEPLPQEFVLVEKTEPDGTIEQIIFSSGGDVDVYDLQALCDKVGWPRRPLSKLAAALKNSYIVASLHSIRKSPGSVYLAKXGTEGNEQKRLIGMARATSDHAFNATIWDVLVDPGYQGQGLGKALIEKLIRTLLQRDIGNITLFADSQVVEFYRNLGFEADPEGIKGMFWYPNH

SEQ ID NO: 273496 - protein, 311 aa, Glycine max
  Clone ID: PAT_MRT3847_8898C.1.pep
MDPIQHKFVNVGALKLHVAETGTGPNAVVFLHGFPEIWYSWRHQMIALAGAGFRAVSFDYRGYGLSDPPPEPDKTSWSDLLSDLLHILDALALSKVFLVGKDFGARPAYLFSILHPERVLGVVTLGVPYVPPGPSQYHKFLPEGFYILRWQEPGRAEADFGRFDAKTVVRNIYILFSRSEIPIANENQEIMDLVEPDTPLPTWFTEEDLATYGALYEKSGFQTALQIPYRSLGEVLSLPDPVVKVPAFLIMGGKDYVLKFPGIEDLTKGEKAKWFVPNLEVTFIPEGTHFVQEQFPEKVNQLILDFLAKHT

SEQ ID NO: 273497 - protein, 156 aa, Glycine max
  Clone ID: PAT_MRT3847_88990C.1.pep
MSMLSLLRSQLFNFMPIIHCLLKLNSTRKFKSFQLKAGFWESIKSGLMKNNSMQVIDPPSTDEENVEPLSQDFVLVEKTEPDGTIEQIIFSSGGDVDVYDLQALCDKVGWPRRPLSKLAAALKNSYIVASLHSIRKSHGSGKNSMTSFSPLSKLVS

SEQ ID NO: 273498 - protein, 171 aa, Glycine max
  unsure (1)..(171): unsure at all Xaa locations
  Clone ID: PAT_MRT3847_88991C.1.pep
FLPILVTPLLQQVDTLSLSLTSSLVFISYHNLFTAMLSLLVAGTRKFKSFQLKAGFWESIKSGLMKNNSMQVIDPPSADEEDEEPLPQEFVLVEKTEPDGTIEQIIFSSGGDVDVYDLQALCDKVGWPRRPLSKLAAALKNSYIVASLHSIRKSPXSGKSSMTSCCVLCLN

SEQ ID NO: 273499 - protein, 159 aa, Glycine max
  Clone ID: PAT_MRT3847_88992C.1.pep
MDVEKLKKMASSVRTGGKGTMRRKKKAVHKTTTTDDKRLQSTLKRIGVNAIPAIEEVNIFKDEIVIQFLNPKVQASIAANTWVVSGSPQTKKLQDILPNIIHQLGPDNLENLKKLAEQFQKQVPEAGDGATAAQEDDDDAVPDLVPGETFETAAEETKS

SEQ ID NO: 273500 - protein, 173 aa, Glycine max
  Clone ID: PAT_MRT3847_88993C.1.pep
TGLVNIGNSCYMAATMQVVFSTRSFTSRYYLNQSLKKAFEMSPADPTVDLNMQLTKLAHGILSGKYSVPAFENDEKENVATSTTTAKQEGIRPHMFKSVIAASHPEFSSPRQQDALEFFLHFLDQVERANAGKVELDPSTSFKFGIEDRILCSSGKVTYNRKHDYILSLNIPL

SEQ ID NO: 273501 - protein, 45 aa, Glycine max
  Clone ID: PAT_MRT3847_88994C.1.pep
RKYQKIIRKSRLNTLYPLKCTRESYSCSPEKFSASSSRFSLMKGF

SEQ ID NO: 273502 - protein, 142 aa, Glycine max
  unsure (1)..(142): unsure at all Xaa locations
  Clone ID: PAT_MRT3847_88995C.1.pep
RGMYRGLSPTIVALLPNWAVYFTSYEQLKGLLRSRDGCDELTTIGNIIAAAGAGAATAISTNPLWVVKTRLQTQGMRPDVVPYKSVLSALTRITHEEGIRGLYSGIVPSLAGVSHVAIQFPAYEKIKSYMAEKDNXTVDKLT

SEQ ID NO: 273503 - protein, 147 aa, Glycine max
  Clone ID: PAT_MRT3847_88996C.1.pep
RGSMLIEDPNWIGVACCALLVAHHDPSNIGNRSTHLDHYPSIGYSFQNKQVLNKTHQLLPIHLQNDLVTGELDHLLILFASREEFLLFPRHETDMHGLDTRGFTTWIRDHPKGLRLQVKSCGYRWVFKEDLQQLNPNMMFRGNSSSR

SEQ ID NO: 273504 - protein, 58 aa, Glycine max
  Clone ID: PAT_MRT3847_88997C.1.pep
SNSYEFILLFYNTFFSKNIRHQHQVGQLWFSHPVAGMLYKTRKEKKKVRNYFKLTPKK

SEQ ID NO: 273505 - protein, 71 aa, Glycine max
  Clone ID: PAT_MRT3847_88998C.1.pep
SVRIKASLHVTISCFLCQIVVHSRRADLLCCLHTSQTSEVRLYLALFQYTKPRDVFDSDVGDGSLQLAFAA

SEQ ID NO: 273506 - protein, 83 aa, Glycine max
  Clone ID: PAT_MRT3847_88999C.1.pep
RGTFPGETLRLATSRAVTHTRCIGVTYRVEVSHRANTSVIGRSFTSTLFAIASRTGADEDGGGGAGIFLSVVRPSYVRLSHSG

SEQ ID NO: 273507 - protein, 49 aa, Glycine max
  Clone ID: PAT_MRT3847_8899C.1.pep
QPIWSHERRPFNQLSRLIAYSYYRILQFQSVEAMIQWHPLPSTAHLGFV

SEQ ID NO: 273508 - protein, 176 aa, Glycine max
  unsure (1)..(176): unsure at all Xaa locations
  Clone ID: PAT_MRT3847_889C.1.pep
RPCWLKALLASNSICWMAGLYGPAHAADLPVKTAPPITAAPSTLWNWTGIYVGAHLGGAFGSSDWQTATGLQADFSNRGFPGSGNAEGLLGGGQIGVNYQFGTWVTGLEIAASAADVDGFAKCANRADNRYGVISFTCDNRVTSLGTIAGRLGQTXGNLLIYGKAGAAWATDESDE

SEQ ID NO: 273509 - protein, 134 aa, Glycine max
  unsure (1)..(134): unsure at all Xaa locations
  Clone ID: PAT_MRT3847_88C.1.pep
GICFSQIIFEPSFPPWGAFGPSKLAPLFPANELPNRSQEKGGGFFSNFFFPGTIPPLFFRDNRAGKGFFNVFGGRGLXNVPPGAPPPFFLALPPPVKGTRGQFFSPRILAKTPPPGGVFFLAQKLWGFPPGFSK

SEQ ID NO: 273510 - protein, 90 aa, Glycine max
  Clone ID: PAT_MRT3847_89000C.1.pep
LRHVIYFYYFSVKKKKKKKKKKKRKGYSLLVGVNFSLALAVVLQRRDWENPGVTQLNRLAAHPPFASWRNSEEARTDRPSQQLRSLNGEW

SEQ ID NO: 273511 - protein, 102 aa, Glycine max
  Clone ID: PAT_MRT3847_89001C.1.pep
KYPTRPHKHIHKKMRKTLFVAPTSVLVSRLSVFHLRPAPPIFEFNTIFGSRVKMKRDLNAITLFKHMHVKGIVGIVEPGLGIFKILVSCSCHLGHMKFAFFM

SEQ ID NO: 273512 - protein, 135 aa, Glycine max
  Clone ID: PAT_MRT3847_89002C.1.pep
AQEVFRGGFIPGSPLGPFLKRELFPGDSFFSPQTGGISPGGLFKGRFPVFFCKVGPQKPVFLKYFFWQQKVALWGLGFPWGAPKGEGLFGGRLGKLLSFLRTGFPPLLPWAFFGVLPETFVDRGAPPFFLTWGPV

SEQ ID NO: 273513 - protein, 90 aa, Glycine max
  unsure (1)..(90): unsure at all Xaa locations
  Clone ID: PAT_MRT3847_89003C.1.pep
TLCDRLKCCLSLIEPYFYFFFGFAVGYCHPCRCRTYTRXSPVCDSYTKLYFVNHHLILAHGAAVNCYTSKYHAHHIGHIVVTIVTIFFEP

SEQ ID NO: 273514 - protein, 66 aa, Glycine max
  Clone ID: PAT_MRT3847_89004C.1.pep
CTSPLPLDIESHVCLSIMLHSQNNINGYVCIRLIFYSTKILIGQISEGLSYQRNGFADSLNSLLSI

SEQ ID NO: 273515 - protein, 195 aa, Glycine max
  Clone ID: PAT_MRT3847_89005C.1.pep
MAEAVGGAFLSAFLDVVFDKLSTDEVVDFIRGKKLDLNLLENLKSTLRVVGAVLDDAEKKQIKLSSVNQWLIELKDALYEADDLLDEISTKSATQKKVSKVLSRFTDRKMASKLEKIVDKLDTVLGGMKGLPLQVMAGEMSESWNTQPTTSLEDGYGMYGRDTDKEGIMKMLLSDDSSDGVLVPAIAIVAWWGQA

SEQ ID NO: 273516 - protein, 79 aa, Glycine max
  Clone ID: PAT_MRT3847_89006C.1.pep
CSSPADFQAKFFPPPPVKSSVIKKKYGLSKSSPLNPPPILPNYTNLAGLLKIFGRQTNFKEISGATPRREAHATHWHIR

SEQ ID NO: 273517 - protein, 110 aa, Glycine max
  unsure (1)..(110): unsure at all Xaa locations
  Clone ID: PAT_MRT3847_89007C.1.pep
KAGIFGGDSEENRGKLCFGALGDLEKQERVEDDAERYKDMLLDAMAILNFNMLCSSVALQSSHRIWGKLGGGDGDDDNXSGALKMWEGKLLDCFDDRRIALESACLPCYR

SEQ ID NO: 273518 - protein, 61 aa, Glycine max
  Clone ID: PAT_MRT3847_89008C.1.pep
VFKGIEGAPLPINVVLAITPSVFVKGAPPPFGIEPSFGVGAFELYPDVNYPPVEENLGQFA

SEQ ID NO: 273519 - protein, 42 aa, Glycine max
  Clone ID: PAT_MRT3847_89009C.1.pep
LYAVRCTLTHGSGRVGDISIFLESNLYNGLRVAFYSPMTIKC

SEQ ID NO: 273520 - protein, 389 aa, Glycine max
  unsure (1)..(389): unsure at all Xaa locations
  Clone ID: PAT_MRT3847_8900C.1.pep
MNALAATNRNFKLASRLLGLDSKLEKSLLIPFREIKVECTIPKDDGTLQSYVGFRVQHDNARGPMKGGIRYHPEVDPDEVNALAQLMTWKTAVANIPYGGAKGGIGCDPPELSISELEYMXRLTRVFTQKIHDLIGTHTDVPAPDMGTGPQDLGGSLGRDAATGRGVLFATEALLNEYGKSVSGQRFVIQGFGNVGSWAAQLISNKGGKVVAVSDITGAIKNSNGLDIPSLLEHSKVHRGVKGFNGSDPIDPNSILVEDCDVLVPAALGGVINRENANEIKAKFIVEAANHPTDPEADEILKKKGVVILPDIFANSGGVTVSYFEWVQNIQGFMWDEEKVNNELKTYMTKGFIDVKEMCKTHECDLRMGAFTLAVNRVARATVLRGWEA

SEQ ID NO: 273521 - protein, 85 aa, Glycine max
  unsure (1)..(85): unsure at all Xaa locations
  Clone ID: PAT_MRT3847_89010C.1.pep
GKYKFTVDIPVTLVAGKNTIDLLSLTVGXQNYGAFFDTWGSGXILVPVILKGFANGNTLDLSSQKWTYQVGLQGEDLGLSSGSSG

SEQ ID NO: 273522 - protein, 33 aa, Glycine max
  Clone ID: PAT_MRT3847_89011C.1.pep
NLIGLNANNFYHNRQEQPLMTHAISYILIKLGD

SEQ ID NO: 273523 - protein, 55 aa, Glycine max
  Clone ID: PAT_MRT3847_89012C.1.pep
LFLFHRLIENTLFLFPFIKKNTFGRKTKLLLPLYGAFFFNRWISIFFLLKKVTVI

SEQ ID NO: 273524 - protein, 126 aa, Glycine max
  unsure (1)..(126): unsure at all Xaa locations
  Clone ID: PAT_MRT3847_89013C.1.pep
GYFAYMAIDSLPGNQXWERISLLIIPPSRRYKILEGYHASFVESVPFKTIAVFTILQFVYFLICFGVTWIPVGGILFPLPFFLLITIREHLLPKIFKPNHLQELDASGYEEIGGAPHITHNIPPRE

SEQ ID NO: 273525 - protein, 76 aa, Glycine max
  Clone ID: PAT_MRT3847_89014C.1.pep
ISAFTPQIYERPGHNHHRRVDLDPIHPDPVTKSVRRKGQKEIWIIHKRRMNNTITKGLKPSGRVGRPGNSGTGNLP

SEQ ID NO: 273526 - protein, 83 aa, Glycine max
  Clone ID: PAT_MRT3847_89015C.1.pep
SLAASLVCAPFMCEAASNKFPRLIASTSTPVFFYKLASVRQVTIQLKPGEGVFSGPGPFFLWVGFSSYSLKAKAAPKAAFRCL

SEQ ID NO: 273527 - protein, 66 aa, Glycine max
  Clone ID: PAT_MRT3847_89016C.1.pep
QRGVLFDTISICKSTGTKLGLTPYWDLWLIFGGFLLSLLIPFFFHLALMGKRKQNPFLFPNPNRGG

SEQ ID NO: 273528 - protein, 180 aa, Glycine max
  Clone ID: PAT_MRT3847_89017C.1.pep
TSTTAVWSMVGHIVGLGDRHGENILFDSTSGDCVHVDFSCLFDKGSQLEKPELVPFRLTQNMIDGLGITGYEGIFLRVCEITLSVLRTHRETLMSVLETFIHDPLVEWTKSHKSSGVEVQNPHAQRAISNIEARLQGVVVGVGAAPSLPLAVEGQARRLIAEAVSHKNLGKMYIWWMPWF

SEQ ID NO: 273529 - protein, 63 aa, Glycine max
  Clone ID: PAT_MRT3847_89018C.1.pep
NNQTFSRFQAYIKKAKPLIPKKLKKRARMIRDSHTSSHYFLHFNRCHASVSHFLHQMQSSNHC

SEQ ID NO: 273530 - protein, 145 aa, Glycine max
  unsure (1)..(145): unsure at all Xaa locations
  Clone ID: PAT_MRT3847_89019C.1.pep
MKIYCNECXLVEPQFLCXANEAALCWECDEKDHADNKLAFKHQRVAVSISWYHLPEWDIGQEPFSYFFCLQERALLCIKMXDVALHTGKAFVSRHQKVLFTGVRVCLEAIEPGASLTSLTTNSGERVSDAKNSSVCRKVFTVPQP

SEQ ID NO: 273531 - protein, 150 aa, Glycine max
  Clone ID: PAT_MRT3847_8901C.1.pep
GVKGFHGGDPIDPNSILVKDCDVLVPAALGGVINRENANEIKAKFIVEAANHPTDPEADEILKKKGVVILPDIFANSGGVTVSYFEWVQNIQGFMWDEEKVNNELKTYMTKGFKDVKEMCKTHECDPRMGAFTLAVNRVARATVLRGWEA

SEQ ID NO: 273532 - protein, 241 aa, Glycine max
  Clone ID: PAT_MRT3847_89020C.1.pep
MYFSSCFSHSPLTLKAMKPCGSVGKGKNFAFPIRSNGAELCDGHIVRSRVNLSGDWSFIGGSRIIVKPKATRLLLHYPKRGQMQASCFIGSQLASTVFTVGTIAVLPFYTLMVLAPKSELTKKSMESSIPYVVLSILYAYLLYLSWTPETVRLIFASKYLLPELAGIAKMFSSEMTLASAWIHLLVVDLFAARHIFQDGLKNQIETRHSVSFCLFFCPIGILTHVITKSMTKPARKEGHGL

SEQ ID NO: 273533 - protein, 154 aa, Glycine max
  Clone ID: PAT_MRT3847_89021C.1.pep
PLYTWPCRSNSSPSLNPAIKFADTFVTRPQISPSLAAKPDLLLPRAAATARQGPQLQVAHRPPAPLSSCSSCRLAIPRWWCEAKNQRGVQGRGRRRTQNCYQSEEAYQAQDQPAQWRLRADDEGLFLQPRASHVRNRESRADSKTTLYCELRWR

SEQ ID NO: 273534 - protein, 44 aa, Glycine max
  Clone ID: PAT_MRT3847_89022C.1.pep
LKRSFMLFCRANFYFVFAYFSSNRPKSKLPGLTGRPSRVAFPPG

SEQ ID NO: 273535 - protein, 76 aa, Glycine max
  unsure (1)..(76): unsure at all Xaa locations
  Clone ID: PAT_MRT3847_89023C.1.pep
YYXXAXXTXFSVAXSRFXVLXXIHHXSSKMXXXXXXVKPIWKXVLGLXMPMMLESAEXRXSXIRKVXSIIAHPVCS

SEQ ID NO: 273536 - protein, 230 aa, Glycine max
  Clone ID: PAT_MRT3847_89024C.1.pep
MAETDSSSSSDGEPSQSLASIAENLQRSAIQSARTVQHSSSTHFRAFQNFLPEAVSQYRTYEDAFVNKVKDGLMIAKENPAVSAGVAISAALLAMRAPRRFLFRHTLGRFQSEEARYARIEKNVKDLNLSVDLLKKENAKLLQRTTLAEKEMKYGHTELVSAGTQFQQLAKSAYKVETRAADLLDKLRYIPSREALALRAEVASMASNLKRQRSSLNKRIMKINELGVPV

SEQ ID NO: 273537 - protein, 81 aa, Glycine max
  Clone ID: PAT_MRT3847_89025C.1.pep
SHIRGCDCFSPLITVALGKGLDFSPMKDMIICSGSSKYLQRVGEYSLLSTLFSCRYSMCPHSQGSLKLQKKKFTLLSFSSP

SEQ ID NO: 273538 - protein, 44 aa, Glycine max
  Clone ID: PAT_MRT3847_89026C.1.pep
SLSEIEFRIYIYTVIITFFACMGIKTHYKLIIIIVICLKNFGQN

SEQ ID NO: 273539 - protein, 93 aa, Glycine max
  Clone ID: PAT_MRT3847_89027C.1.pep
CVLLLPSSCFCDFLLPLYFIVSFSQQTNTVLLLLFFLCNSLSLILRVYHRHSNDAVSSPIPKPRLSGFLVLFVHCTLLFLHVLTRRCSFCISG

SEQ ID NO: 273540 - protein, 46 aa, Glycine max
  unsure (1)..(46): unsure at all Xaa locations
  Clone ID: PAT_MRT3847_89028C.1.pep
RPXXTLVLASSXTLELRQVLVTXTXSLXQXXXLSCGAQVXXPLVFY

SEQ ID NO: 273541 - protein, 106 aa, Glycine max
  Clone ID: PAT_MRT3847_89029C.1.pep
VFVFFFFFFFFFFFFFFFFFFFLKGLTRGELSKHINSGWLTWAFLTLGTKFFGGQARLAVAPPFLGGLKKKWVFYFRWGKLPSWKIFSSPLGRDLGFFQRIKSLIL

SEQ ID NO: 273542 - protein, 249 aa, Glycine max
  unsure (1)..(249): unsure at all Xaa locations
  Clone ID: PAT_MRT3847_8902C.1.pep
MNALAATNRNFKLASRLLGLDSKLEKSLLIPFREIKVECTIPKDDGTLQSYVGFRVQHDNARGPMKGGIRYHPEVDPDEVNALAQLMTWKTAVANIPYGGAKGGIGCDPAELSISELERLTRVFTQKIHDLIGTHTDVPAPDMGTGPQTMAWILDEYSKFHGYSPAVVTGKPIDLGGSLGRDAATGRGVLFATESLLNEYXKSLYGQRFMIQGFECVGSWAAQLINNNGGKGAAVSGGWEGCKYGIGLE

SEQ ID NO: 273543 - protein, 116 aa, Glycine max
  unsure (1)..(116): unsure at all Xaa locations
  Clone ID: PAT_MRT3847_89030C.1.pep
LLLPCDKIPRGXNTTDERLHGTEHEGYDPLLGEMQKYATPMMPLDEEIKPKVASLSGXEWFDGEDEEDSYEGFHSTIWHRTAGGDYYMDRISFTIFFSLTRIVSRKNGEKGKRRSC

SEQ ID NO: 273544 - protein, 52 aa, Glycine max
  unsure (1)..(52): unsure at all Xaa locations
  Clone ID: PAT_MRT3847_89031C.1.pep
KFLSTATCINNLYYFVLFTYLNYLGNVKNRGGXEDPELVTCEHQCATGTSEY

SEQ ID NO: 273545 - protein, 34 aa, Glycine max
  Clone ID: PAT_MRT3847_89032C.1.pep
SLPPLRLLFVRQPPYHHHQCMFRSTEGHHRPEWR

SEQ ID NO: 273546 - protein, 45 aa, Glycine max
  Clone ID: PAT_MRT3847_89033C.1.pep
NPKRSDATSVTIEYVPSISLTVSGSRLDNNISFNIVLYDGMLNTP

SEQ ID NO: 273547 - protein, 77 aa, Glycine max
  unsure (1)..(77): unsure at all Xaa locations
  Clone ID: PAT_MRT3847_89034C.1.pep
EHSIQLSGIGSSGAQGSAIDSYISSFHHEVRWCPFGTENXAKVCNLKEPWLVVLHAPRCRLCYALEEPSCLFGSNIS

SEQ ID NO: 273548 - protein, 49 aa, Glycine max
  unsure (1)..(49): unsure at all Xaa locations
  Clone ID: PAT_MRT3847_89035C.1.pep
GPNLANPKNIGKGQIFLKGNFKRLIKRKKXKEKKKKKKKKKKKKKKKKK

SEQ ID NO: 273549 - protein, 71 aa, Glycine max
  Clone ID: PAT_MRT3847_89036C.1.pep
ITIHSGPSAKPCHKLNFSNLMPDTRYFCLTIVFSVTYMIDASHTCSLVLSEARVCQRKKKRGNRWYFALVV

SEQ ID NO: 273550 - protein, 92 aa, Glycine max
  Clone ID: PAT_MRT3847_89037C.1.pep
APGHCSLCVRREVFLKLLPGFNSPQNHPMPSISPVLYIPPYEVDLVPLLHPGPNSRVVPPGPFFGWFGSPQKLEAIVQKNTGEKKNKKKASP

SEQ ID NO: 273551 - protein, 291 aa, Glycine max
  Clone ID: PAT_MRT3847_89038C.1.pep
DASYSSTAELVTVDEEEGPVTSVAWAPDGCHVAIGLNNSHVLLWDSNVSRLVRTLRGGHQARVGSLSWNNHILTTGGMDGRIVNNDVRVRHHIGESYRGHQQEVCGLRWSPSGQQLASGGNDNVIHIWDRAMVSSNSPTRWLHRFEEHKAAVRALAWCPFQANLLASGGGGGDHCIKFWNTHTGACLNSVDTGSQVCALLWSKNERELLSSHGFTQNQLALWKYPSMLKMAELKGHTSRVLYMAQSPNGCTVASAAGDETLRFWNVFGTAQASKPAPTASTDPFAHVNRIR

SEQ ID NO: 273552 - protein, 137 aa, Glycine max
  Clone ID: PAT_MRT3847_89039C.1.pep
SVKDPKPIILSMAFLALFTTMDSCSKRLAFSEPFMSQRRKVISGFSLGVGVSLLFLTLILLNNTSLSVPKVQVFLQGSDSNSSSSSFSWRFPFTTTLSSNASVSPLHRVEVRVSSSEGSEKTPFGKSHWGSEKCKLA

SEQ ID NO: 273553 - protein, 405 aa, Glycine max
  unsure (1)..(405): unsure at all Xaa locations
  Clone ID: PAT_MRT3847_8903C.1.pep
MNALAATNRNFKLASRLLELNSKLEKSLLIPFGEIKVNGTLPKNDGTLHFYLGFGFQHNNANVPMKGFTYASYSFDCXVLGVTKVVELSISSIXWGVCKHRRNCACSIEXIPLGILSRLTRVFTQKIHDLIGTHTDVPAPDMGTGPQTMAWILDEYKFTLVVTGKPXDLGEPLSKDAATGRGALFATEALLNEHXKSVSGQRFVIQGFGNVGSWAAQLISNKGGKVVAVSDITGAIKNSNGLDIPSLLEHSKVHRGVKGFNGSDPIDPNSILVEDCDVLVPAALGGVINRENANEIKAKFIVEAANHPTDPEADEILKKKGVVILPDIFANSGGVTVSYFEWVQNIQGFMWDEEKVNNELKTYMTKGFKDVKEMCKTHECDLRMGAFTLAVNRVARATVLRGWEA

SEQ ID NO: 273554 - protein, 127 aa, Glycine max
  Clone ID: PAT_MRT3847_89040C.1.pep
SYFLSFFVGGLFFIVRFFFFFFSHFFFRVSQNPQFFFLGPVKKKKPNSLGGKGVKHMIILSPSPHNLTFPKITPKAGGGGQFFFGGPPKKGPPSFLKTGGYQKRAHFPSWGGHSKTGRGKKSLAPQG

SEQ ID NO: 273555 - protein, 57 aa, Glycine max
  Clone ID: PAT_MRT3847_89041C.1.pep
IAINITIIQRFLHGQQTGTVYYISGLHNIFGMLPTYKKRHGHQRSTLITKVCGIHFT

SEQ ID NO: 273556 - protein, 35 aa, Glycine max
  Clone ID: PAT_MRT3847_89042C.1.pep
KKNRAQDAWVMSLLENHEDICNSYAITTTDEGCRV

SEQ ID NO: 273557 - protein, 140 aa, Glycine max
  unsure (1)..(140): unsure at all Xaa locations
  Clone ID: PAT_MRT3847_89043C.1.pep
XQVTRAXXVSXXXXMXADDIQKAKMRALXMQSKYXKXGSKESSETKIDSPYKQPQTNPASIAACSSKVPTPPKIEENEKPLLLASKATNKLEASYSKPKMDVKEPLWEKCKRVQIPWKTPAGAVPIVFVTYIKYMPIILG

SEQ ID NO: 273558 - protein, 79 aa, Glycine max
  Clone ID: PAT_MRT3847_89044C.1.pep
ALGRLYEGSPPVPTIPLLHGQVKVCVEEVKNAEAFVPVSPGDVPLLENMLFPSVFPPMLKVPPLIVFSLTPVFQKPMFT

SEQ ID NO: 273559 - protein, 77 aa, Glycine max
  unsure (1)..(77): unsure at all Xaa locations
  Clone ID: PAT_MRT3847_89045C.1.pep
RARAARAGQDVEVSRKVFDEIPHRXIVSWNSMISGYTVNGYVDDAILLFYDMLRDESVGGPDHATFVTVLPAFAQAA

SEQ ID NO: 273560 - protein, 161 aa, Glycine max
  Clone ID: PAT_MRT3847_89046C.1.pep
IIRMGFHSYLHIENALISMYSKCGAIDDALHIFENMVSRDVVTWNTMISGYAQHGLAQEAINLFEEMIKQGVNPDAVTYLGVLSSCRHGGLVKEGQVYFNSMVEHGVQPGLDHYSCIVDLLGRAGLLLEARDFIQNMPIFPNAVVWGSLLSSSRLHGSVPI

SEQ ID NO: 273561 - protein, 102 aa, Glycine max
  Clone ID: PAT_MRT3847_89047C.1.pep
RSPPFKTLRGKPGNLAKKERKKTKRTGAKGLANLKVNFGVNTQTAGVKWPVKGGVQLPFKVGKFLERGFVWAFFVFSQLGKRGFFSKGFNLGNPRFFQFPNF

SEQ ID NO: 273562 - protein, 53 aa, Glycine max
  Clone ID: PAT_MRT3847_89048C.1.pep
MASFDEAPPGNSKNGEKIFKTKCAQCHTVDKGAGHKQGIYRHSSSSFPLFSLP

SEQ ID NO: 273563 - protein, 69 aa, Glycine max
  Clone ID: PAT_MRT3847_89049C.1.pep
KVRGVLLSPNLFQFRSHGVIRNPHCNFEFSVIILIVQFLIFPFVIRVFLCNYKIHFFSSNIYYTSRFVG

SEQ ID NO: 273564 - protein, 301 aa, Glycine max
  unsure (1)..(301): unsure at all Xaa locations
  Clone ID: PAT_MRT3847_8904C.1.pep
GFGGGGFGGASRADDVDNWAVGKKPAPVRSSNFGSSFRDSGVEPDRWTRGDPPREVEQRTERPRLVLDPPRGDGLVNESPVKAMDKANPFGAARPREEVLAEKGLDWKKLDSEIETKKTSRPTSSHSSRPSSAQSNRSEGPGLQGTDAVVKSRPKVNPFGDAKPREAVLGERGMDWRKIDLELERRSVARPETMEEKLLKEEIDNLKKELEKESTINSNKESVDEAGGDQTSRHAILPQKEKELXLLIHEKKNKVPPRQTAVXRPGXSAGXSSXFSXRXPSXSGSFXXSXSVAFXXXPRSR

SEQ ID NO: 273565 - protein, 108 aa, Glycine max
  unsure (1)..(108): unsure at all Xaa locations
  Clone ID: PAT_MRT3847_89050C.1.pep
ATRGLRIRLACLDDEHSGHDEASYKQNXFFRMTSKSMTSWTETQRALIRANLQTDGCIXEQALVFWRGGTTAGTAHLIDGNQLVEAPACDXQGGICENGKALTLSVDH

SEQ ID NO: 273566 - protein, 97 aa, Glycine max
  Clone ID: PAT_MRT3847_89051C.1.pep
HEKVFIETLAPSPSFWIVTLFVSISTLIPYFSYSAIQMKFFPRLEEMVQWIRHEGKTNDPQFVAMVRQGSLRPTTVGSTARLAAKDNDFRDSGTNHR

SEQ ID NO: 273567 - protein, 49 aa, Glycine max
  unsure (1)..(49): unsure at all Xaa locations
  Clone ID: PAT_MRT3847_89052C.1.pep
XPVKLFFSFTFSXREXHQVCSVALXMQLCFFWFRLGSAXANGGFGGHRR

SEQ ID NO: 273568 - protein, 56 aa, Glycine max
  Clone ID: PAT_MRT3847_89053C.1.pep
ICKFKERRWNLKQLVGSGGMPSSHSATVTALAAAIGLQEGFGGPLFATALVFACIV

SEQ ID NO: 273569 - protein, 304 aa, Glycine max
  Clone ID: PAT_MRT3847_89054C.1.pep
NYQLSMAPSFDTSTHTVCVMDASGHLGFSLVQRLLQRGYTVHASVQKYGEENLFTGISSDPDKLKVFRSDPFDYHSIIDALRGCSGLFYTFEPPFDQPNYDEYMADVEVRAAHNVLEACAQTETMDKVVFTSSATAVVWREDRKTMELDLDERHWSDVNFCRKFKLWHGVSKTMAEKSAWALAMDRGVNMVSINAGLMMAHDLSIKHPYLRGAAEMYEDGVFVTVDLGFLVDAHICVYEDVSSYGRYLCFNHIINTHEDAVQLARKLTPGASSSLQQSDDYGKSFIEQRISNKKLNKLMVDFEA

SEQ ID NO: 273570 - protein, 71 aa, Glycine max
  Clone ID: PAT_MRT3847_89055C.1.pep
KNVCKNGFNETRNSLETIFCNCNTRTHHMLNWLTLPSFENYPSLAKIGRKKVSLNELLTKQASNSSKHYYH

SEQ ID NO: 273571 - protein, 67 aa, Glycine max
  Clone ID: PAT_MRT3847_89056C.1.pep
YGGIGTNFSTFCTQILSRRKTANVIALITVQKDDHGSRLCLEVHHQFVQLLVANSLFDKTLPIVITA

SEQ ID NO: 273572 - protein, 170 aa, Glycine max
  Clone ID: PAT_MRT3847_89057C.1.pep
MAPSFDTSTHTVCVMDASGHLGFSLVQRLLQRGYTVHASVQSYGEENLFNGISSDPDKLRVFRSDPFDYHSIIDALRGCSGLFYSFEPPFDQPNYDEYMADVEVRAAHNVLEACAQTETIDKVIFTSSATAVVWREDRKTMELDLDERHWSDVNFCRKFKVWHGIVICTY

SEQ ID NO: 273573 - protein, 43 aa, Glycine max
  Clone ID: PAT_MRT3847_89058C.1.pep
QPSLVRVNGMRLERSTYSEPPLSVFGYHFKEPDGLYTPRVSPF

SEQ ID NO: 273574 - protein, 37 aa, Glycine max
  unsure (1)..(37): unsure at all Xaa locations
  Clone ID: PAT_MRT3847_89059C.1.pep
XSLLGIFPXXLSTSXXPTXDKEKXSFPPRTGRXWXFT

SEQ ID NO: 273575 - protein, 90 aa, Glycine max
  unsure (1)..(90): unsure at all Xaa locations
  Clone ID: PAT_MRT3847_8905C.1.pep
MQRHHGHTLCSTCLTRVHNRRPTCREELGDIRGLALDKISQXLELPCRYFLLGXCPIFAYYNKIKHEAICDFTTYKCPYAGSKWYGGGDI

SEQ ID NO: 273576 - protein, 61 aa, Glycine max
  unsure (1)..(61): unsure at all Xaa locations
  Clone ID: PAT_MRT3847_89060C.1.pep
EKKNSXSHGGGRVGWSKEVSFHHLRPXKEGFVKEWLKSRWSVDPLKALVLWKVAFDLQLVP

SEQ ID NO: 273577 - protein, 128 aa, Glycine max
  Clone ID: PAT_MRT3847_89061C.1.pep
SPAPLPKSHNTLLCVSAITAPTLFHPTLTRLPPCVTTCTTCIRTSPHNPCYSNTYPYVLTTNHDPMRYYSPSTTTCANYPHTKKSHISMHIHQRSQVPLLRLPQFWLVKSYKVHPAPCTPYAMFWHVP

SEQ ID NO: 273578 - protein, 120 aa, Glycine max
  unsure (1)..(120): unsure at all Xaa locations
  Clone ID: PAT_MRT3847_89062C.1.pep
PAFSIPNGWRGLDIGPDFVXSFREALGSSPTLXWKGPMGGFGFSKFSFGPRVFSKKLVSLSGKGGAPIIGGGDFFPPLEKVGVFSVFSPIFPGGGARLGFLEGKKLPGVLVFYEPVPVPG

SEQ ID NO: 273579 - protein, 110 aa, Glycine max
  Clone ID: PAT_MRT3847_89063C.1.pep
SPPVKKKKGGPVFFFHPKPTFGTKQGGLIGGAPPEGPFFYFPPHGGGRGTRLKGDWSFKTGPPHGPNYYKIFPPPKKGPGPKRGIFWGEPRRFLGREGPQPSRKKTPLGG

SEQ ID NO: 273580 - protein, 54 aa, Glycine max
  Clone ID: PAT_MRT3847_89064C.1.pep
LFPFAQEEINPTYKFHGKVSKLRVYPCKANSVHTSCHKIKLPSLFPMLQYSGKL

SEQ ID NO: 273581 - protein, 37 aa, Glycine max
  Clone ID: PAT_MRT3847_89065C.1.pep
STGLLYDSIVAMHPSGKSCNSLDVSYDAEPKLASTVY

SEQ ID NO: 273582 - protein, 40 aa, Glycine max
  Clone ID: PAT_MRT3847_89066C.1.pep
SLSLLEQPEPFEANQSYGVSHQIYYPYLSLHLDFKCNSDS

SEQ ID NO: 273583 - protein, 62 aa, Glycine max
  unsure (1)..(62): unsure at all Xaa locations
  Clone ID: PAT_MRT3847_89067C.1.pep
VVWKEIIIRVVGREWWRXCGEKXEXWIRNWEKDVYGIWXINGVGNXGEWLGXXWEFKDXXGM

SEQ ID NO: 273584 - protein, 37 aa, Glycine max
  Clone ID: PAT_MRT3847_89068C.1.pep
YQFMTVTNGISFLYRYLTHLTTHRVASIRIQYPERVQ

SEQ ID NO: 273585 - protein, 44 aa, Glycine max
  Clone ID: PAT_MRT3847_89069C.1.pep
HTSLILIHPSYTLSKYTHSHSPTLTYILTFTDNLIHNIYNKLLI

SEQ ID NO: 273586 - protein, 56 aa, Glycine max
  Clone ID: PAT_MRT3847_8906C.1.pep
KIRPCPFREFTNLWDFGGDVLVHLYHPSFIHCKFYLRLSMNTDFFVNLYLILLNKK

SEQ ID NO: 273587 - protein, 78 aa, Glycine max
  Clone ID: PAT_MRT3847_89070C.1.pep
CVEGNSDCSWLIRMLGSVGGVFSASEFRMLGFVMGCCMEESDLGRNFLRDGDEMVPEKRVSALLLCLMVMVSQSKQII

SEQ ID NO: 273588 - protein, 110 aa, Glycine max
  unsure (1)..(110): unsure at all Xaa locations
  Clone ID: PAT_MRT3847_89071C.1.pep
QTSIPCLADPYYDTTRHDLSKIYYVKDIPAFFLIGPDDXLVEENGKLSFSSYGSXAIPFTESRIIYHETPLINERKALPPHVDDVKPEHELKKEMSKAYVCNPCPKQRIF

SEQ ID NO: 273589 - protein, 53 aa, Glycine max
  Clone ID: PAT_MRT3847_89072C.1.pep
SRAASNRVVSLSPDHHLKEAQPVRSCQVRYRSNYIKRFKHLYYKICILISSLC

SEQ ID NO: 273590 - protein, 79 aa, Glycine max
  Clone ID: PAT_MRT3847_89073C.1.pep
PNMALLKRPGKTWAGILKFLLLVNPQTLAKEIKKPRPNFFPSPFLKAKHRGFWLKTVLFRGWERSFYWPKKEALSLLNG

SEQ ID NO: 273591 - protein, 61 aa, Glycine max
  Clone ID: PAT_MRT3847_89074C.1.pep
GFRMVHEIYTEVVQDLTQSPGGYMPHNLRRNIGIMAVTDPVEVPLDIENCRTQILLQIGKI

SEQ ID NO: 273592 - protein, 40 aa, Glycine max
  Clone ID: PAT_MRT3847_89075C.1.pep
IHASNAYQTPLKLNIYLFSKYYITGWDTCFFFFFSISRLG

SEQ ID NO: 273593 - protein, 70 aa, Glycine max
  Clone ID: PAT_MRT3847_89076C.1.pep
LVHAYQSIIRWVKFCVSPNWLSQCYLSTSKSQSTRHQQIRTSQSPPHCLSHHPYGGRSIITIGRVFLIQK

SEQ ID NO: 273594 - protein, 142 aa, Glycine max
  Clone ID: PAT_MRT3847_89077C.1.pep
IFTASPFPPVIIYDQNCAPLLFPSFYPNLVCFLVTDPKKRGGGGGFPFVQTLGLFSGGEKKGGGRTKTVGGGNLNLGVFLGFFFCGEKKRQGGIVTGPAPVVSCRVFFFGGDAFFFFNKLVFLLGRFSFVLQVQFFARKNNL

SEQ ID NO: 273595 - protein, 119 aa, Glycine max
  Clone ID: PAT_MRT3847_89078C.1.pep
LIFPREVCGPDNGFVMCSSEWANQTSWHLCFLTDDPKQSTVFDILLGISQDFEIAGNTLMPAFSVPQAIARSSEKLGILCMVWILYFHWFVRLFHSIEEIRHDPLVEYALPIWEFPHLF

SEQ ID NO: 273596 - protein, 157 aa, Glycine max
  unsure (1)..(157): unsure at all Xaa locations
  Clone ID: PAT_MRT3847_89079C.1.pep
AFNLLLDALCKCCLVEDAETLYKKMRKTVKPNAETYNIXVFGWCRVRNPTRGMKLLEEMVELGHRPDNFAYNTAIDTYCKAGMVTEAVDLFEFMRTKGSSISSPTAKTYAIIIVALAQHDRMEECFKLIGHMISSGCLPDVTTYKEIIEGMCVCGKI

SEQ ID NO: 273597 - protein, 31 aa, Glycine max
  Clone ID: PAT_MRT3847_8907C.1.pep
GYELWLLFISIYNCNNLPKMRHYEDNWCLEV

SEQ ID NO: 273598 - protein, 205 aa, Glycine max
  Clone ID: PAT_MRT3847_89080C.1.pep
LPSSLSTKSENRVVKSDGNCLSGSVQHQHAVSYCTETHAKKKSYRVGIFVGLIVGILAIIVVLALTIVITCKRYFPWGVSEQHLLHKTVQDSSYAAGISSELLTNARYVSEAAKLGREDLPTCRSYSLEELKEATNNFDNSTFMGENIYGKLYRGKLESGIQVVIRSLPLSKKYSIRNFKLRLDLLAKLRHPHLVSLLGHCMDGA

SEQ ID NO: 273599 - protein, 79 aa, Glycine max
  Clone ID: PAT_MRT3847_89081C.1.pep
NFLLSQSFKTFKLAGSFQERKTLNLLNRLNATVNFVSFFWAVSGSVETSWSNSPPPFNSSPGNKANRISSNSLKEFNLT

SEQ ID NO: 273600 - protein, 91 aa, Glycine max
  unsure (1)..(91): unsure at all Xaa locations
  Clone ID: PAT_MRT3847_89082C.1.pep
VGVNLNIVXYTALLDGXCEDGRMREAEELFGALLKAGWTLNQHIYTSLFHGYIKAKMMEKGNEYFXEINKKNFKPDLLLYGTKIWDFFQTK

SEQ ID NO: 273601 - protein, 81 aa, Glycine max
  Clone ID: PAT_MRT3847_89083C.1.pep
KKKKKKNLKNYKKKKKKKRKNCKNNNSHILTPKYNQSQLINTTSNPYKTLSLPNLISFHHILLSSSNPHIYKPHTYHPSSH

SEQ ID NO: 273602 - protein, 251 aa, Glycine max
  unsure (1)..(251): unsure at all Xaa locations
  Clone ID: PAT_MRT3847_89084C.1.pep
IEPNRLEENLPQDGYLKRLLSGDLDLSVRKEALDWIWKRGKSWSMQLLAVACLSIAAKMEEIKVPPCVDLQVLXPKFAFEAKDIQRMELLVLSTLRWKMQASTPFSFLDYFLRKITCDQVIVKSSILRSVGPILNIIKCINFLEFRPSEIAAAVAISVSREMQAEEIDKTLTCFFIVGKERILKCLELIKDLSLIQDSANLGTNLASFVPQSPIGVLDAACLSSISDELTVGSYTDSSLNTPNSKRRRKSD

SEQ ID NO: 273603 - protein, 238 aa, Glycine max
  Clone ID: PAT_MRT3847_89085C.1.pep
HAVRYINVVPFPTLFFHPPLHVSLNPLRVYIIDFFIFVCIKFSSFNPSVEELVLQDESLSWDHKHLNLNNQCLIKDNHGSEHFWDFSVQSDETVMGLVGRESEHLPHVGYLKRLLSGDLDLSVRKEALDWIWKAHAYFDFGPCSLCLSVNYLDRFLSVYELPRGKSWSMQLLAVACLSIAAKMEEIKVPPCVDLQFAFEAKDIQRMELLVLSTLRWKMQASTPFSFLDYFLRKITCDQ

SEQ ID NO: 273604 - protein, 55 aa, Glycine max
  Clone ID: PAT_MRT3847_89086C.1.pep
YWVLKKKKKKKKKKKKKKRRKKKKKKKKKKKKNKKKKEKKKKRGPPKKKNFNPRK

SEQ ID NO: 273605 - protein, 56 aa, Glycine max
  Clone ID: PAT_MRT3847_89087C.1.pep
MQDSANLGNNLASFVPQSPIGVLDAACLSSISDELTVGSYRDSSLDTPNSKRRKSD

SEQ ID NO: 273606 - protein, 135 aa, Glycine max
  Clone ID: PAT_MRT3847_89088C.1.pep
LKIRLELEPLELQGNSINGTIPWDVGHCQKLILLNLSRNSLTGIIPWEISALPSITDVDLSHNSLTGTIPSNFNNCSTLENFNVSFNSLTGPIPSTGIFPNLHPSSYSGNQGLCGGVLAKPCAADALSAADNQVD

SEQ ID NO: 273607 - protein, 86 aa, Glycine max
  Clone ID: PAT_MRT3847_89089C.1.pep
DPLLSDLINLNLSDTTEKVIAEYIWIGGSGMDLRSKARTLPGPVSDPSELPKGNYEGTSTGQAPGEDCEVRQCYQYIPHVFFFPPP

SEQ ID NO: 273608 - protein, 76 aa, Glycine max
  Clone ID: PAT_MRT3847_8908C.1.pep
GTPYRFIQTREKILKLVRLNEQLVGLMNSSPDCAGPPRSVEGLHGVGWRNHFFGYRVSPLCYGFDHCDAVLNLLKL

SEQ ID NO: 273609 - protein, 84 aa, Glycine max
  unsure (1)..(84): unsure at all Xaa locations
  Clone ID: PAT_MRT3847_89090C.1.pep
XASXFSLPSLFSSFLLSFFFFLPSLVYHFLPRFVNLLIQSIPHXLLTGXFSXKXXERKKGDGGNXXXGGXXXAPGGGXXAPPPP

SEQ ID NO: 273610 - protein, 69 aa, Glycine max
  Clone ID: PAT_MRT3847_89091C.1.pep
TNKRPKNASCLQNTGVQLLLEELLSLLLQPLQLVTLSLMFLLLQCMITALLPCRRRLNLSSWFPSNILC

SEQ ID NO: 273611 - protein, 66 aa, Glycine max
  Clone ID: PAT_MRT3847_89092C.1.pep
PRVRPRVRWVTLHSARGESVDRNTIVFVHRLSMIIRRGIYILERTTSKTHSRNLRCHRVYFHTHLF

SEQ ID NO: 273612 - protein, 105 aa, Glycine max
  Clone ID: PAT_MRT3847_89093C.1.pep
CEKWECFKNFSYASIMAATSSDLVIFCGEKSVLNLFLLFTTFFNPKSSLTQIHYRMPELSKQLKLETLNIFLLHLYTSLSEGFKKKTIYSFALSLSLFFSAKLSL

SEQ ID NO: 273613 - protein, 113 aa, Glycine max
  Clone ID: PAT_MRT3847_89094C.1.pep
EFRTRQKPIKGSPYPRNYYRCSSSKGCMARKQVERSNTEPDMFVVTYTGDHSHPRPTHRNSLAGSTRSKTLVTNPPPSPGSLSCFQATPFSSSSSSPPHSPTSPEEDPRKPPI

SEQ ID NO: 273614 - protein, 86 aa, Glycine max
  Clone ID: PAT_MRT3847_89095C.1.pep
LFMVVMELSMGGHKVEGKQCPNNSNHPILFGLVLKFFFISKNKFFFFIYIYIYISEYQRYKSCIFGIVQSFGSKIRLNPVSRGTKS

SEQ ID NO: 273615 - protein, 91 aa, Glycine max
  Clone ID: PAT_MRT3847_89096C.1.pep
ITRNSIIQLARDLGYQAEERKFSVDEFLEADEVFCTGTAVGISAVGSATYKNTRVEFKTGADTVTQKLFDMITGIHTGLLEDNNGWMVKID

SEQ ID NO: 273616 - protein, 90 aa, Glycine max
  Clone ID: PAT_MRT3847_89097C.1.pep
LHRTASLTLYSKMAVSRVLRSRCRSLPNLFTRTFRTNLLNRASSWSNLVTARARSPGPVGRPRKTRLSIDTSSEENTLTRGHERGGLLLC

SEQ ID NO: 273617 - protein, 50 aa, Glycine max
  Clone ID: PAT_MRT3847_89098C.1.pep
EKKKKKMPSSLFIFHTLFLLVTLNNNFYPFSYLFFHPLFIQINYFITLFL

SEQ ID NO: 273618 - protein, 98 aa, Glycine max
  unsure (1)..(98): unsure at all Xaa locations
  Clone ID: PAT_MRT3847_89099C.1.pep
XXXXHSXSVSMWYAIHYPTLWPPPKGVRECSTDHADPQNPLCYTFSLIFISYVGSMTSFKVLICKAELCPLRAGLHFAGIFIITNSVESNSWLVWFPI

SEQ ID NO: 273619 - protein, 97 aa, Glycine max
  unsure (1)..(97): unsure at all Xaa locations
  Clone ID: PAT_MRT3847_8909C.1.pep
ALCRVGLTFLFVILVQVXRLGSLEKGGSIETKLTKRKKRKTATFFFSCTLSYTNTSDTLFHFFCPMKCVLEVLTISXXHSTINIIINNNINSNMSQT

SEQ ID NO: 273620 - protein, 105 aa, Glycine max
  Clone ID: PAT_MRT3847_890C.1.pep
MAGVESPRECGNFPPPHNGGYKLAPFASAAQNKKACVFPSCWARVREIGQKPRGLCAVLFSHPPKRGGVNPQVAVPIPKRFNLGNRPVGSKCGPSPLPLKSWGCF

SEQ ID NO: 273621 - protein, 36 aa, Glycine max
  Clone ID: PAT_MRT3847_89100C.1.pep
MGVEKQLLRPGTGPKPIHGHEVTGHYTGFGTNGDLS

SEQ ID NO: 273622 - protein, 43 aa, Glycine max
  Clone ID: PAT_MRT3847_89101C.1.pep
PKTKVFPKGFLQNGPMHENNLINVSEHYKIILMKVTHKCCLIP

SEQ ID NO: 273623 - protein, 55 aa, Glycine max
  Clone ID: PAT_MRT3847_89102C.1.pep
PIMINPKACFSKHSQWPPKSFRLRQARELMLLLSFLGCLRSNYIICLTIFSFRVD

SEQ ID NO: 273624 - protein, 89 aa, Glycine max
  Clone ID: PAT_MRT3847_89103C.1.pep
CSYHNHALCYSHPPHTVTSCLEHSKQRLCSSLPSLPPQQKHKVHHLLLRFNSDPQPMVSHVWYSRSEEPHEYLVLSRAPRHSIRLTSDG

SEQ ID NO: 273625 - protein, 85 aa, Glycine max
  Clone ID: PAT_MRT3847_89104C.1.pep
TTVALSLEMEGVECIKLETIAFSRCFTSVLSSELSNLDHEMMFLELDPGIKGCIPYRRLVRSLPDACADACVDSGILGRTSRVPV

SEQ ID NO: 273626 - protein, 129 aa, Glycine max
  Clone ID: PAT_MRT3847_89105C.1.pep
MSVLMCWDRRSLSLSALIFYISGTIFLFSYGSSSLVSSDDLVCFYFTYLYVRWGFALSKMVVFVGDCGDTHYARLLGGLHSSVLLYGVSRCALLPLSNNSRYPLSDVSPLDCLYFLWATEEILCADFHA

SEQ ID NO: 273627 - protein, 80 aa, Glycine max
  Clone ID: PAT_MRT3847_89106C.1.pep
MLIEITRNSVMQMKVRVFLVSIRLGTWQSHAYDMFPLLRNTASAARPPKVTLPPWVLAVAAYNIFNFDIIPDDFIPASME

SEQ ID NO: 273628 - protein, 57 aa, Glycine max
  Clone ID: PAT_MRT3847_89107C.1.pep
TEIFNSTVKPTLLKPWPSLWVPNCEYWSDHSLGKLTILEYTYSIKCFYFVYFVFYYL

SEQ ID NO: 273629 - protein, 45 aa, Glycine max
  unsure (1)..(45): unsure at all Xaa locations
  Clone ID: PAT_MRT3847_89108C.1.pep
ALTSPRXLHQFSTXIGEWNKMRXRNXRXLXRXXSXRXXFSXQSXR

SEQ ID NO: 273630 - protein, 63 aa, Glycine max
  Clone ID: PAT_MRT3847_89109C.1.pep
LLTITNIILILNTPRIHLQLSIHIHIHSTQHISLTGSRSPTTTLKLLSFKTSIPILNIHNCIH

SEQ ID NO: 273631 - protein, 102 aa, Glycine max
  unsure (1)..(102): unsure at all Xaa locations
  Clone ID: PAT_MRT3847_8910C.1.pep
SFACSVFYIVISMRLVDTYDGKAXNTFHKIFVAPFKGLNPIHFVTFSNTIFQIEPYINSNFYLFITTTNVYFFQCKDLSIFKNNVLCASFVFTSSYTPTPFL

SEQ ID NO: 273632 - protein, 86 aa, Glycine max
  unsure (1)..(86): unsure at all Xaa locations
  Clone ID: PAT_MRT3847_89110C.1.pep
HLVSSQGAPSNHPVYPAPPTRVKNVFWEQFFFKRPGCFSNXKAISNFRANPFFDPAEGRSPHGIFRNLKNRGPPPLLVGPPVLENS

SEQ ID NO: 273633 - protein, 95 aa, Glycine max
  Clone ID: PAT_MRT3847_89111C.1.pep
LSAAGVALTFCAKTRCTHDAGARAVDASLLRAAQWDGFRAVCSSLTRLLIRSGCPLAVQRRPGSPSLSTGVVRCFPCFLVPARAPAPQQTVKMLV

SEQ ID NO: 273634 - protein, 50 aa, Glycine max
  Clone ID: PAT_MRT3847_89112C.1.pep
KQVDSNFRHKKKKKGGPPSRDLVARGLIPGRDPEGAQVSPMGGRLRFGRN

SEQ ID NO: 273635 - protein, 56 aa, Glycine max
  Clone ID: PAT_MRT3847_89113C.1.pep
AIGGMVLTAGLMFISKRKSHNQRQKLAAIKRTARKLESRMMEQRPSNAQEHRRVSR

SEQ ID NO: 273636 - protein, 91 aa, Glycine max
  unsure (1)..(91): unsure at all Xaa locations
  Clone ID: PAT_MRT3847_89114C.1.pep
QLKTISENLKIVTLTNCENTANFRKIIKTRLILDLKVSSYNLAPTHQSLLISLILIIVSLIKLNPNYNIFILMFYFSYIIKIIKIILLLXY

SEQ ID NO: 273637 - protein, 737 aa, Glycine max
  Clone ID: PAT_MRT3847_89115C.1.pep
QSVSSTSESEAVPAVSNETSDIILGDSKTLKTETTAPVEKTVEVEGDSNAERDDDYGDSWETEEIPKVVSLAPSSASDGPASFRSLSGKSDDGGNSIGSLSRLAGLGRGARRQLAAILDEFWGQLFHFHGQFTQEAKAKKLDVLLGVETKLTGTLEIMDTCSATSYEYFKSVGSRAPDTLMNSAPYESPRLNRMQSNLEASFGPQRSSSSLQANPVQFMDEYVQTSSRNLLDAGERRYFSVHNLPTSAAWDYQPATIHGYQVSSYINQVGKDTNSDKLNGLRESPSMGNTNNYRNSIAFALGKKLQNGSGLSQPPGFPNIAVSKNSQLPSERSYYDSRPSGPVDSTVSSVYAKKFHSLPDISGYAIPHRDVYLSDKSAPWDDSVGGYRSSASRTHYEPSLYSNSGSSTGAPLAFDVLSPSKVYGGVLSSQLSSGFGTGSLWSRQPFEQFGVDDKIHNAATEDVGNRPSATTHEITSVVDIDGKLLQSFRQCILKLLKLEGSDWLFKQNDGADEDLIDRVAAREKFVYEIETTEMNRNHMGETRYLSSDGKACSSMKNNEANWSSFSVTSIPNCGEGCVWRADIIISFGVWCIKRVLDLSLMESRPELWGKYTYVLNRLQGIIDLAFSKPRSPMTPCFCLQVPMTYQQKSSSPPSNGMLPPASKPGRGKCTTASVVFEMVKDVEIAISSRKGRTGTAAGDVAFPKGKENLASVLKRYKRRLSNKPVGTTQEGIRKIYL

SEQ ID NO: 273638 - protein, 95 aa, Glycine max
  Clone ID: PAT_MRT3847_89116C.1.pep
SGSPPSNGMLPPASKPGRGKCTTASVVFEMVKDVEIAISSRKGRTGTAAGDVAFPKGKENLASVLKRYKRRLSNKPVGTTQEGIRKIPTSAPYNL

SEQ ID NO: 273639 - protein, 196 aa, Glycine max
  unsure (1)..(196): unsure at all Xaa locations
  Clone ID: PAT_MRT3847_89117C.1.pep
FILPSYRFNKFFIFCFDAINNENQQCFYCTLLAAHLISLASFANCSWXCRHEXGLCNFLHSRYVFMRMKFALFFSSSFSKVGKSSSSSLKILNKEHIVTTMFVGNFIGIVCARSLHYQFYSWYFYSLPYLLWRTNYPTLLRLILFVGVELCWNIYPSNSLSSVLLLCLHLIILWGLWSAPPEYPYEENKPSSYKNK

SEQ ID NO: 273640 - protein, 88 aa, Glycine max
  Clone ID: PAT_MRT3847_89118C.1.pep
KTSRAKTHSPAPFVSSPGLVSPPLETLPMSPKTVSVYEKVASLMNLQLGKVKTFPSSWKVKGPSGFGSSRGPMNRPGFFKLSTTPTQA

SEQ ID NO: 273641 - protein, 84 aa, Glycine max
  unsure (1)..(84): unsure at all Xaa locations
  Clone ID: PAT_MRT3847_89119C.1.pep
RRLVTISPNNKPKMNTGKIQESIGEAVNGIVKHXTYYETLEKNEVVPEENWHTRARNFCRFVTAINNTPRNIGKDGKFQMLVCL

SEQ ID NO: 273642 - protein, 72 aa, Glycine max
  Clone ID: PAT_MRT3847_8911C.1.pep
EEIFQFPLISFEKLKRGAKTPYLVFNKAKAKCPPLPQTKHAFSTQIGFILQKPTGWFSSYPSHPLEQKFFGN

SEQ ID NO: 273643 - protein, 143 aa, Glycine max
  Clone ID: PAT_MRT3847_89120C.1.pep
RSSFFFFFVFFFFLIGFLFWFLYSVFIVFFTIFFLFQLCKKKTRGRALSPSGGEKDQSTRDWGGGPQPNEELGANGVSGNSQNRGGDQTPRGCYPSGSRRGGPNRGAPPELRPLQRAARTAGRKRSRGSIEPLYGHARGIYPQ

SEQ ID NO: 273644 - protein, 81 aa, Glycine max
  unsure (1)..(81): unsure at all Xaa locations
  Clone ID: PAT_MRT3847_89121C.1.pep
GSSLSGQVHELAIQNYENEAKGXSRDSWTMDYIMDTSDEERVHGETVGAARAHXVTESTGFTIWDAPGHKSCVXSMISGAS

SEQ ID NO: 273645 - protein, 168 aa, Glycine max
  Clone ID: PAT_MRT3847_89122C.1.pep
MVGQDYDFPKPNLNPLVKLLATGLAGYEGEKWSKHRRIINPAFNLEKLKIMLPLFLQSCNDLVSKWEGMLSSEGSCEMDAWPFLQNLTSDVIARSAFGSSYEEGRRIFQLQREQTEHLMKVILKIQIPGWRFLPTKTHRRMKEIDREIKASLKNMINKRDKALKSGEA

SEQ ID NO: 273646 - protein, 74 aa, Glycine max
  Clone ID: PAT_MRT3847_89123C.1.pep
QEVFPHFARFFMSIGMFPALRSHHAASITRSNITLSGIFRPSESQSLNVIISNSKMGSGLESSSYGCYQTYLWA

SEQ ID NO: 273647 - protein, 48 aa, Glycine max
  Clone ID: PAT_MRT3847_89124C.1.pep
KLITPSKEKLCTKRDNPFFYKTLKTKGGGEKKGGGKKNQGHGGPTEKY

SEQ ID NO: 273648 - protein, 338 aa, Glycine max
  unsure (1)..(338): unsure at all Xaa locations
  Clone ID: PAT_MRT3847_89125C.1.pep
SVEGNLSSLGTNKTGERRRAKAEKTITLQVLRQYFAEPTIFXIKQFPVCTTTLKRICRQHGIKRWPSRKIKKVGHSLQKLQLVINSVQGASGAFQIGSFYSNFPDLASPNLSGTGFFSTLNQSDYPNSTSTQPDHGSLSPEGASKSPSSSSSQSSISSHSCSSMSELQQHRTANGAGNKVSTTVSEYSAGVVLKRISSEAELKSLSQDRAKLLPRSQSQETLGEHPKTQYQQPLLKTSSSKVDSHRVKVAYGDEKTRFRMPKSWGYEDLLQEIARRFNVSDMSKFDVKYLDDDCEWVLLTCDADLEECIDVCQSSESGTIKLSLQPSSHSMRSSLEFR

SEQ ID NO: 273649 - protein, 59 aa, Glycine max
  Clone ID: PAT_MRT3847_89126C.1.pep
VPKNLELLLFGPPLPYELYPVIINFCLIEHQLQLPQSSFLYYLWLCSLFWCAFSSFPPM

SEQ ID NO: 273650 - protein, 65 aa, Glycine max
  Clone ID: PAT_MRT3847_89127C.1.pep
LIWETNFKFKLYKPDEMFFKHYKVSESYLRFFTNWNNHSFTYIVPGVMDLVLSFFMFCWWILGII

SEQ ID NO: 273651 - protein, 48 aa, Glycine max
  Clone ID: PAT_MRT3847_89128C.1.pep
MDFIYEAPRVAEDSYVLPLIEHIVRHVTMIYSTENIAVQDELMIKNGE

SEQ ID NO: 273652 - protein, 70 aa, Glycine max
  Clone ID: PAT_MRT3847_89129C.1.pep
FKVFLITSGNTFKNNVIDYYVLVIDKTRNPRKQTWSQKQLCNRLQIYDNRLNQSYELFASFSKTYIIDYT

SEQ ID NO: 273653 - protein, 75 aa, Glycine max
  Clone ID: PAT_MRT3847_8912C.1.pep
DTRILVTKYIIEGRKVLITGSHLLAVPSLSDFTLKVSISGIKINQLPYTIIANYKVNFHSTRPPACTGRKILQNA

SEQ ID NO: 273654 - protein, 54 aa, Glycine max
  Clone ID: PAT_MRT3847_89130C.1.pep
MGLRKLTHNTIDVEIFQKVAGTQLSEPCLPCKTITLSRCQGQVHMREWTGGLGS

SEQ ID NO: 273655 - protein, 125 aa, Glycine max
  Clone ID: PAT_MRT3847_89131C.1.pep
PRIKYISDGGLSMGTETEGSICSIFNGTLSPGSISSIVEYTLFPELEKAAEITPVKDTTTDNLPAESTEKLIMPSKIPKAAQVPQKVQSRPSRLSLNKTSSKVLSSVRKPAASSSSSVKPPKRWQ

SEQ ID NO: 273656 - protein, 145 aa, Glycine max
  unsure (1)..(145): unsure at all Xaa locations
  Clone ID: PAT_MRT3847_89132C.1.pep
RKQPSGSRSLATPRASSSVVSIPIRAILFPGNGTGPKTANSANQISQAVEXPIKREEXYEGPEIAPKPQTFXDWEKLKTXRKNKVGWKGPWAPPMEKGHRPLILPRRKNPIWKAKVQPGYSLPGYKPPNEKANLITIREKTEGEY

SEQ ID NO: 273657 - protein, 45 aa, Glycine max
  Clone ID: PAT_MRT3847_89133C.1.pep
KYHQIPNDLIDPKINSITLLNNFLLFLIYNTIKANIIHDLRFFLL

SEQ ID NO: 273658 - protein, 60 aa, Glycine max
  unsure (1)..(60): unsure at all Xaa locations
  Clone ID: PAT_MRT3847_89134C.1.pep
MAASAHTPSKEFVYMAILADHAHRYXEMVEFMRKVSASADNHELSVEERNLLSVGEHNFI

SEQ ID NO: 273659 - protein, 277 aa, Glycine max
  unsure (1)..(277): unsure at all Xaa locations
  Clone ID: PAT_MRT3847_89135C.1.pep
MANALEVSALNRIKLHLLGELSPLTQFQEPNTTSLCSQSSTSDSFTTVDQIFSEFLDFPTTTTSSTEQNQFSAFEFEPKPEIIEPQLEFSFPTTRCKSSRRPSLQISLPKKTEWIQFGEPEVTETVSQSNPNAEEKKHYRGVRQRPWGKFAAXEIRDPNKRGSRVWLGTFDTAIEAAKAYDRAAFRLRGSKAILNFPLEAGADDRKRQREEKVEPVLEVVKREKIGESDVSLIKNNPLTPSSWLGFWGSDANGIFTVPPLSPLSPHPALGFPQLMVV

SEQ ID NO: 273660 - protein, 61 aa, Glycine max
  Clone ID: PAT_MRT3847_89136C.1.pep
NDNLILSKIMIVKKVLSEFENFKIKLYWRAYLIKKPPVFELVLYKKSEVLLVYNLEPTSAL

SEQ ID NO: 273661 - protein, 53 aa, Glycine max
  Clone ID: PAT_MRT3847_89137C.1.pep
FIYVELLLACVTSNLLSLPLAILNFLCLFKFIIFYSYCVYFFNSISFVFYLLL

SEQ ID NO: 273662 - protein, 65 aa, Glycine max
  Clone ID: PAT_MRT3847_89138C.1.pep
SPPFGRCVLFFRAVSPRDRSLGRFYLFCKQACVALRPLRLGLLYFSPPFGGLLCLNFVFHPVIWR

SEQ ID NO: 273663 - protein, 58 aa, Glycine max
  Clone ID: PAT_MRT3847_89139C.1.pep
SSLYFTNTLIHTIPISIIIIFLFYVQDLSFFYFFCINNINITSLILIIMYLLLFSKIY

SEQ ID NO: 273664 - protein, 50 aa, Glycine max
  unsure (1)..(50): unsure at all Xaa locations
  Clone ID: PAT_MRT3847_8913C.1.pep
LYPSNGVNMGRFAIKNSLVKIXGVEGEWVKRVFSAFFWASLHQKKRKTGF

SEQ ID NO: 273665 - protein, 54 aa, Glycine max
  Clone ID: PAT_MRT3847_89140C.1.pep
NTQKLDESHDHDHDHDHHVSLDMLRCCTCYGWLNLCEDSRICVLTLNIMLADGQ

SEQ ID NO: 273666 - protein, 81 aa, Glycine max
  unsure (1)..(81): unsure at all Xaa locations
  Clone ID: PAT_MRT3847_89141C.1.pep
VSISLLEKVQHLLIPILLRSCRSVHAFSSEGLKLKLVSVLLFICIYFHRSSVTLSMVADLVLTPERXYITYLMFFPLYFHA

SEQ ID NO: 273667 - protein, 161 aa, Glycine max
  unsure (1)..(161): unsure at all Xaa locations
  Clone ID: PAT_MRT3847_89142C.1.pep
MCRMKGSCLLLTSSFTGIRTSKELRHMLSLCELKSITCFSVCNQKQKYNQKLYIIPVRTVCVRFCISRSSVGSVELSGTGTHSDAYSGFSAPNDYQRIDWLKKDLEELFXEGKKWIILGTKKDALNLLPANNEGGKERLNAGPKGIEKAATLDIIALGYMA

SEQ ID NO: 273668 - protein, 103 aa, Glycine max
  unsure (1)..(103): unsure at all Xaa locations
  Clone ID: PAT_MRT3847_89143C.1.pep
AYIGDTAAAVISQAVADTALEKSEVVKAVIESPCKELRRSVGIIIQXDHNATIVIDQQGNPKGTRILCAIERELRQLNFNKIVSLAGRGIITRYCAKDPIVLW

SEQ ID NO: 273669 - protein, 111 aa, Glycine max
  Clone ID: PAT_MRT3847_89144C.1.pep
VLFPRWGGRSRTLFSIEVFSEGFFFSSGRSFTHPFLIWWAPSFSLRLVAIFFSPVLFLGGGKISFSSSPLGGPNVSPPFQARSSQRGRGKFFHQGFSPPAFCGGAPVGFLC

SEQ ID NO: 273670 - protein, 207 aa, Glycine max
  unsure (1)..(207): unsure at all Xaa locations
  Clone ID: PAT_MRT3847_89145C.1.pep
VECCPGGALXSYPLKNRRRKLAFKVVVQLALDLARGLSYLHTKKIVHRDVKTENMLLDKTRTLKIADFGVARIEASNPHDMTGETGTLGYMAPEVLNGNPYNRKCDVYSFGICLWEIYCCDMPYPDLSFSEVTSAVVRQNLRPEIPRCCPSALANVMKRCWDANPDKRPEMDEVVTMLEAIDTSKGGGMIPHDQPQGCLCFRSYRGP

SEQ ID NO: 273671 - protein, 171 aa, Glycine max
  Clone ID: PAT_MRT3847_89146C.1.pep
FTNIYVRIFLFTPAVKSVLQFIGATMGTSELQIQTENGHIGMPSNVCCVVVEYCPGGALKSYLIKNRRRKLAFKVVVQLALDLARGLSYLHTKKIVHRDVKTENMLLDKTRTLKIADFGVARIEASNPHDMTGETGTLGYMAPEVHASIPLKISLSCALFFWGFVFNTLYV

SEQ ID NO: 273672 - protein, 80 aa, Glycine max
  Clone ID: PAT_MRT3847_89147C.1.pep
GEYWGPQTQKKKGPGLLKKKFIKEKKALKKARLKKKRFSLLRTKRCCFEKGTKGFLNYPPVNATTGKPMPTIQGSKIFPI

SEQ ID NO: 273673 - protein, 89 aa, Glycine max
  Clone ID: PAT_MRT3847_89148C.1.pep
MAKSKEDITYATSQARLSEDEAVRVAYEHGSPLEGGKIADSQPVDLFSSAHNMPKSGQTTMDSNTSDQSQMQRDTQEGGSKEFTTGAPG

SEQ ID NO: 273674 - protein, 101 aa, Glycine max
  Clone ID: PAT_MRT3847_89149C.1.pep
RALVATHFMLVRSLFWHPRVFFFWSGVAFFLICLSFFGFCRVICFVIVSPIFYYSSYCEKWGPCWYRCVFLGWAPVSARGALKKKINKKKKNPNKKKEKVF

SEQ ID NO: 273675 - protein, 81 aa, Glycine max
  Clone ID: PAT_MRT3847_8914C.1.pep
VQAQPLRVPVYEEDRQGRPVGALTCNGIFEQDMLFNKGLAWRYVAYVLRPELETWDFQARSKRVGLWATTNREKFWEWSSR

SEQ ID NO: 273676 - protein, 48 aa, Glycine max
  Clone ID: PAT_MRT3847_89150C.1.pep
RYESRHEPFFIFFFTMAVLQRMPTLKVSCVCVRYIYSIGRLIKFTSRI

SEQ ID NO: 273677 - protein, 276 aa, Glycine max
  Clone ID: PAT_MRT3847_89151C.1.pep
MAKEREKKLYVALLGNYAAELKLLLTTLLLLCAVATLLQFLPSRFTISASDLRVCISRVTQTTQTIPNSTNATSPPVTATASASASASPLVASLSSTTSPSPPPPSPPPPSPPSSEQILPDGTIKRVFNPYGSAAYNFVTMGAYRGGLDTFAIIGIASKPLHVYAKPTYECAWFSLAGDKKKLSTTVGYKILPDWGYGRVYTVVIVNCTFPIPVNADNSGGKLVLFASTSGGGGGYRSRDGGYGGGYGGGGGGGYGGGRDRGYSRGGDGGDGGWRN

SEQ ID NO: 273678 - protein, 389 aa, Glycine max
  Clone ID: PAT_MRT3847_89152C.1.pep
MSHRKFEHPRHGSLGFLPRKRASRHRGKVKAFPKDNPSQPCGLTAFVGYKAGMTHIVREVEKPGSKLHKKETCEAVTIIETPPLVVVGVVGYVKTPRGLRTLNTVWAQHLSEEVKRRFYKNWCKSKKKAFTKYSKKYETEEGKKDIESQLEKLKKYATVIRVLAHTQIRKLKGLKQKKAHLMEIQVNGGTVDQKVDYAYSFFEKQIPVDAVFQKDEMIDIVGVTKGKGYEGVVTRWGVTRLPRKTHRGLRKVACIGAWHPARVSFTVARAGQNGYHHRTELNKKIYKVAKADHESHSAITEFDRTEKDITPMGGFPHYGVVKDDYIMVKGCCVGPKKRVITLRRSLLKQTSRVALEEIKLKFIDTSSKFGHGRFQTTQEKQKFYGRLKA

SEQ ID NO: 273679 - protein, 431 aa, Glycine max
  unsure (1)..(431): unsure at all Xaa locations
  Clone ID: PAT_MRT3847_89153C.1.pep
MWVGHSSMYKRTPSRDNSNMEDMEENSDLLDIGLDKGTSNPSLMLSLPHVLVATISSFLFGYHLGVVNEPLESISVDLGFRGNTLAEGLVVSICLGGALIGCLLSGWIADGVGRRRAFQLCALPMIIGASMSAATNNLFGMLVGRLFVGTGLGLGPPVASLYVTEVSPAFVRGTFGAFIQIATCLGLMGALFIGIPVKEISGWWRVCFWVSTIPAAILAAAMVFCAESPHWLYKQGRTAEAEAEFERLLGVSEAKFAMSELSKVDRGDDTDTVKLSELLXIVSMGLMDKLGRKVLLFWSFFGMAIAMILQATGATSLVSNMGAQYFSVGGMFLFVLTFALGAGPVPGLLLPEIFPSRIRAKAMAVCMSVHWVINFFVGLLFLRLLEKLGPQLLYSMFATFCIMAVIFVKRNVVETKGKSLHEIEIALLPQD

SEQ ID NO: 273680 - protein, 111 aa, Glycine max
  unsure (1)..(111): unsure at all Xaa locations
  Clone ID: PAT_MRT3847_89154C.1.pep
EAEAVFERFLGVSEAKFAMSEXCSADKGDHSDSVKLSELLHGRHSXLSGINAVFYFSSTVFKSAGVPSDIANVCIGIANLAGSIVSMGLMDKLGRKVLLFWSFFGMAIAMI

SEQ ID NO: 273681 - protein, 170 aa, Glycine max
  Clone ID: PAT_MRT3847_89155C.1.pep
MLICTIQIGALAMFVNVTLCYVGKPRKRQQVGTWSVLGFFGMAIAMILQATGATSLVSNVGAQYFSVGGMLLFVLTFALGAGPVPGLLLPEIFPSRIRAKAMAVCMSVHWVINFFVGLLFLRLLEKLGPQLLYSMFATFCIMAVTFVKRNVVETKGKSLHEIEIALLPQD

SEQ ID NO: 273682 - protein, 107 aa, Glycine max
  Clone ID: PAT_MRT3847_89156C.1.pep
MWMGHSSMYKRTPSRDNSNMEDVEENSDLLDIGLDKGTSNPSLMLSLPHVLVATISSFLFGYHLGVVNEPLESISVDLGFRGNTLAEGLVVSICLGGALIGCLLSGW

SEQ ID NO: 273683 - protein, 338 aa, Glycine max
  Clone ID: PAT_MRT3847_89157C.1.pep
LEGLGLGPPVASLYVTEVSPAFVRGTFGAFIQIATCLGLMGALFIGIPVKEISGWWRVCFWVSTIPAAILATAMVFCAESPHWLYKQGRTAEAEAEFERLLGVSEAKFAMSELSKADRGDDSDSVKLSELLHGRHSKVVFIGSTLFALQQLSGINAVFYFSSTVFKSAGVPSDIANVCIGIANLAGSIVSMGLMDKLGRKVLLFWSFFGMAIAMILQATGATSLVSNMGAQYFSVGGMFLFVLTFALGAGPVPGLLLPEIFPSRIRAKAMAVCMSVHWVINFFVGLLFLRLLEKLGPQLLYSMFATFCIMAVIFVKRNVVETKGKSLHEIEIALLPQD

SEQ ID NO: 273684 - protein, 58 aa, Glycine max
  Clone ID: PAT_MRT3847_89158C.1.pep
FNVVLSIKRASLCNCDVDITPDYGICFSKYDLLVYLSILQYSMKVLPCGRITDALNEY

SEQ ID NO: 273685 - protein, 71 aa, Glycine max
  unsure (1)..(71): unsure at all Xaa locations
  Clone ID: PAT_MRT3847_89159C.1.pep
MEFNPIPIGSCSNKHQMIYTEXFNSTESDHDRHITGTDPNTFFAMSNLSREDPKQVYSSAHSQRRRYLRFT

SEQ ID NO: 273686 - protein, 62 aa, Glycine max
  Clone ID: PAT_MRT3847_8915C.1.pep
ILRIYFLSFRKYILPDRVQQHQLGFEVKKKCEPIGTMRNAFFDTRPPPQNDVVQLNANALLH

SEQ ID NO: 273687 - protein, 118 aa, Glycine max
  Clone ID: PAT_MRT3847_89160C.1.pep
SYCLQEKTLANFQNVLLLSSPQDGYVPYHSARIEPCPAASLDFSKRGKIFLEMLNNCLDQIQAHTNDRVVMRCDINFNTSSYGRNLNTLIGRTAHIDFLESDIFAKFIMWSFPDLFRQ

SEQ ID NO: 273688 - protein, 75 aa, Glycine max
  unsure (1)..(75): unsure at all Xaa locations
  Clone ID: PAT_MRT3847_89161C.1.pep
AIYRIVAIDARSQREGRDLQKLGFYDPIKNQTYLNIPVILYFLERGAQPTGIVQDISKRAGVFKELSSXHQTKFH

SEQ ID NO: 273689 - protein, 63 aa, Glycine max
  Clone ID: PAT_MRT3847_89162C.1.pep
NRESGIKKNLRAGSERDMDIRESSKVIADFAVDLLHLRAHLQAGSGHGCHLPARTLLPRRGFG

SEQ ID NO: 273690 - protein, 50 aa, Glycine max
  Clone ID: PAT_MRT3847_89163C.1.pep
ASALLAHREHLDFRYGQYKRLRYEIDKHEGGLDTFSRGYEKFGFQRRYYF

SEQ ID NO: 273691 - protein, 870 aa, Glycine max
  unsure (1)..(870): unsure at all Xaa locations
  Clone ID: PAT_MRT3847_89164C.1.pep
MVYTISGIRFPVLPSLHNSRFRGDRRTASLPVFLRNNSFSRKTLALKSSHDSDSLSSAIAKSDKVLIPQDQDNSASLTDQLETPDITSEDTQNLEDLTMEDEDKYNISEAASSYRHIEDGQGSVVSSLVDVNIPAKKASVSVGRKSKIVSDEVKPKXIPPPGTGQKIYEIDPSLLAHRDHLDFRYGQYKRLCYEIDKHEGGLDTFSRGYEKFGFIRSATGITYREWAPGAKSAALIGDFNNWNPNADVMTRNEFGVWEIFLPNNVDGSPPIPHGSRVKIRMDTPSGIKDSIPAWIKFSVQAPGEIPYSGIYYDPPEEEKYVFKHPQPKRPKSLRIYESHIGMSSPEPKINTYVNFRDDVLPRIKRLGYNAVQIMAIQEHSYYASFGYHVTNFFAPSSRFGTPEELKSLIDRAHELGLLVLMDIVHSHASNNTLDGLNMFDGTEGHYFHPGSRGYHWMWDSRLFNYGSWEVLRYLLSNARWWLDEYKFDGFRFDGVTSMMYTHHGLEVAFTGNYNEYFGFATDVDAVIYLMLTNDVIHGLFPEAVTIGEDVSGMPTFCLPTQDGGVGFDYRLHMAIADKWIEILKKNDEDWKMGDIVHTLTNRRWLEKCVAYAESHDQALVGDKTIAFWLMDKDMYDFMALDRPSTPIIDRGIALHKMIRLITMGLGGEGYLNFMGNEFGHPEWIDFPRGDQHLPTGVIVPGNNNSFDKCRRRFDLGDADYLRYRGMQEFDQAMQHLEEKFGFMTAEHQYISRKNEGDKIIVFERGNLIFVFNFHWNNSYSDYRVGCSTPGKYKIVLDSDDALFGGFSRLNHTAEYFTSEGWYDDRPRSFLIYAPSRTAVVYALADDVEPTLADEAEPALADEAEPEPVDP

SEQ ID NO: 273692 - protein, 45 aa, Glycine max
  Clone ID: PAT_MRT3847_89165C.1.pep
ERLIKQGNKFVSNPHMRIIILSSDCEKNANQFHICPPIAPSHPSK

SEQ ID NO: 273693 - protein, 62 aa, Glycine max
  Clone ID: PAT_MRT3847_89166C.1.pep
MGLPRPSFVGGDSNNFSPLKRRRLNTKGPLGVFQYKGGNPFFMAFPGRKFFFLLEWRFCFLC

SEQ ID NO: 273694 - protein, 117 aa, Glycine max
  Clone ID: PAT_MRT3847_89167C.1.pep
EATLEVALPQADAKEVEVTKKAQQKRAGLAHPLQRVLMTAYINSLAAASAKRVIRGEARGAGPHAATLRAVNPVTPLSKEVDGIIDDHDEAIKYTLTCIEIATTAVLTTRLHAFASD

SEQ ID NO: 273695 - protein, 90 aa, Glycine max
  unsure (1)..(90): unsure at all Xaa locations
  Clone ID: PAT_MRT3847_89168C.1.pep
MTMVNAKGNNSNAKTNGLKQNAKKIVRIHVSKTNKSFFFYLNHAYKYLVQGNDVXLSALGMASPTVVIISDILKSNGWAFGNNITTSTVA

SEQ ID NO: 273696 - protein, 64 aa, Glycine max
  Clone ID: PAT_MRT3847_89169C.1.pep
DKISSPLTNLQISFHLSKKLCENFYKLINGELISTYKKIYFIFSSHFLFVKVLLEKLISKQQVV

SEQ ID NO: 273697 - protein, 221 aa, Glycine max
  unsure (1)..(221): unsure at all Xaa locations
  Clone ID: PAT_MRT3847_8916C.1.pep
MHRAISFFVQPRCLLLIGVLSKFLILALSGTKWVEEKEEQPEITDRVFFDVDIDGQRLGRIVIGLYGQVVPKTVENFRALCTGEKGKNASGVKLHYKGXFHRIISGFMIQGGDIVHHDGRGYESIYGGTFPDENFKIKHSHAGCSLYGNSGPDXHGSQFFITTVKTGWLDGEHGVFGKVVQGMDSVFAIEGGAGTSNGKPRKKVVIADFGEIPKSQWDKEK

SEQ ID NO: 273698 - protein, 42 aa, Glycine max
  Clone ID: PAT_MRT3847_89170C.1.pep
QEPMKAWVHDHDRDLRVGHTEGKTSRTELVGTCGRCTTCTLQ

SEQ ID NO: 273699 - protein, 226 aa, Glycine max
  Clone ID: PAT_MRT3847_89171C.1.pep
TRPDEWLISAYVIPQDIVPASISYSEVDQLPELNIGFPSVLTKLRSKRGSRDPESPSKHETKSSVLKNSACSTNDKNNFNNEQHVVVDDHNNTRVASNQGENGSQEVDPQIRQNSTSQDLPEPHSQRDKMYKAVYRRSRSHRAVTNLADSSGQGEFNSNGRNSNFNATANFSNGTNEAIHTNGSLELEPTTCDPNYERNNLKVLQGPGNCMVKSPQNVSTSGGQLT

SEQ ID NO: 273700 - protein, 81 aa, Glycine max
  unsure (1)..(81): unsure at all Xaa locations
  Clone ID: PAT_MRT3847_89172C.1.pep
CQAFDMCPLPMNTDYCAPHSDVKCANWRLAVETHNIFGFETIPEECVLTTNEYILGEQYXIKLPNSXQQAYFFSKDLEIHS

SEQ ID NO: 273701 - protein, 63 aa, Glycine max
  Clone ID: PAT_MRT3847_89173C.1.pep
VPSDQCDFFHQAPSQQLTLGDIPCHLAMSGERNKPQKGLLWRWSFGVSVYEGSESCITLTGVT

SEQ ID NO: 273702 - protein, 138 aa, Glycine max
  unsure (1)..(138): unsure at all Xaa locations
  Clone ID: PAT_MRT3847_89174C.1.pep
LRVRGLQGARKXFPNKIVFNDKLVLANTQEFFDGNFPVDSWLPNFVNCLYPVSXLPSEADDVNVTCGSGRGGLPTTAWISSEVYNRSLDLNKKIRTALDKGKRMCFLTRVGPFSDTILAVLFGVMNDILRSNATNPML

SEQ ID NO: 273703 - protein, 146 aa, Glycine max
  Clone ID: PAT_MRT3847_89175C.1.pep
KRQKLVNCFNDPSKDEFVFLLSSKAGGCGLNLIGGNRLVLFDPDWNPANDKQAAARVWRDGQKKRVYIYRFLSAGTIEEKVYQRQMSKEGLQKVIQQEQTDSLVAQGNLLSTENLRDLFTFHENIKSEIHENMQCSRGQTIDGPRS

SEQ ID NO: 273704 - protein, 46 aa, Glycine max
  Clone ID: PAT_MRT3847_89176C.1.pep
LTVSLMTHLIFENYQKTNSGERPIVRDMKQKFEPPFFYYQHELETK

SEQ ID NO: 273705 - protein, 176 aa, Glycine max
  unsure (1)..(176): unsure at all Xaa locations
  Clone ID: PAT_MRT3847_89177C.1.pep
MFKFLKEVVGGSGTGVKDLPYTIAEPYPSAWGSWTHSRGTSKDDGSPVSVFSLSGSNAQDGHLAAARNGVKRLRTVRHPNILSFLHSAEIETYDAGSPKVTIYIVTEPVMPLSEKIKELGLEGTQRDEYYXLGLHQIAKAVSFLXNNXCKNCHGNICMASTVVTPTLDWKAHALGC

SEQ ID NO: 273706 - protein, 74 aa, Glycine max
  Clone ID: PAT_MRT3847_89178C.1.pep
DRILAFPVSRRPIQGNRSLSTPYTGSNLWQLSSPAVERPGGRCALWIAVFWVMTPVPKFRVCKRGFRHQGVFHG

SEQ ID NO: 273707 - protein, 132 aa, Glycine max
  Clone ID: PAT_MRT3847_89179C.1.pep
LLGGGGGRVKRERKRRRGEGYKGGRVRAENRHERQNNKGYRHLTWGGILLVASSTVRPFIAFLTPMVGSVSSSIKATVFFVVALLQFHFQNCQSFSVSKVFATFKYLVILFAQHLQTILSAIPVVSGFLKLA

SEQ ID NO: 273708 - protein, 44 aa, Glycine max
  Clone ID: PAT_MRT3847_8917C.1.pep
KFKIKIFFWRGKSLLSQVLTMHKENYKGLEKMIKRGPPPHFFFL

SEQ ID NO: 273709 - protein, 71 aa, Glycine max
  Clone ID: PAT_MRT3847_89180C.1.pep
ECGTLHPLYVCHSFIMSYRDVVSDRSVFMFSWVCGYQYLWFGGILHKSILVYDGYMDMHNVVHCTNQSSPV

SEQ ID NO: 273710 - protein, 353 aa, Glycine max
  Clone ID: PAT_MRT3847_89181C.1.pep
CHFGPQNGAFWFTTKAVAAAQEVVRCELPQSIQNNPHKARGISATVSHVRDEAMIPSVAKIGGYREEINRGNKKKNKLELCACTMVWNQARAMKEWVMYHAWLGVEKWFIYDNNSDDEIDHVVRELEVKGYNINRVAWPWIKSQEAGFSHCSLRAKEECKWVGFFDVDEFFYFNERRRNALISIVGNLSNSIAEIRTGCLNFGPSGLRTHPRNGVSVGYTCRLRTPERHKSIIRPDLLHVSLLNVVHHFELKEGFRSLNMPQSVAVINHYKYQIWEIFKAKFFRRVATYVVDWKEDANIGSKDRAPGLGTEAIEPRDWRLRFCEVWDTRLRDFLLSSFADRETGLLPWERSSE

SEQ ID NO: 273711 - protein, 33 aa, Glycine max
  Clone ID: PAT_MRT3847_89182C.1.pep
LMEKIYPNELRFRIFAKNYSHNTALLNRTRGST

SEQ ID NO: 273712 - protein, 44 aa, Glycine max
  Clone ID: PAT_MRT3847_89183C.1.pep
NHSDRVGPQTLSRTPRKKVAIGAARGLSFLHNAKSQVIYRDGKA

SEQ ID NO: 273713 - protein, 73 aa, Glycine max
  Clone ID: PAT_MRT3847_89184C.1.pep
KLGYNNDPDQAAMIKVKEIKNGRLDMFEMLGLYLQAYVRGEGHVENLDNNLSDHFEKNLLTVIVGYDERAKTI

SEQ ID NO: 273714 - protein, 231 aa, Glycine max
  Clone ID: PAT_MRT3847_89185C.1.pep
MASHHHHHHHTPPPPTTTHNSCSCHNPSSYTCCIPPPPHHPSYTCCTPSPPQHHHLLQVIASLLSQPQPHPIPIPIPSQQHYTHQNLNLPTQNHHPQRQPHSTMSSLLHRIETLESSLNHYTHHSLRHAAARLIQTHFRSLLARRSRTLSQLKHLASIKSTFNALKSSFSSHTHVDFAAISLKAMNLLLELDSIQGCDPMIVDGKRSISRDLVQFLDSVEEVALKNMYFML

SEQ ID NO: 273715 - protein, 46 aa, Glycine max
  Clone ID: PAT_MRT3847_89186C.1.pep
CVYRLFLICADCSTDICFSIGACWTQFFPTNPFFLVLSKKPFGNKN

SEQ ID NO: 273716 - protein, 249 aa, Glycine max
  unsure (1)..(249): unsure at all Xaa locations
  Clone ID: PAT_MRT3847_89187C.1.pep
MASHHHHQPPPPTTHSCCSCHNFSSYTCCTPPPPYHPSHTCCTPPPPQHHHHLLQAFSSLLSQPQPHLIPIPSQQHYTKSYTHQNLKLPTQNHHLQHPHQHQTHSTISSLLDRIESLESSFNHYTHHSLRHAAARVIQTHFRSFLARRSRTLAQLKHLASIKSTFNALKSSFSNHTHVDFAAISLKAMNLLLELDSIQGCDPMIVDGKRSISRDLVQFLDSIEEVALKKHVLHVKXRKTGGVCQESPKE

SEQ ID NO: 273717 - protein, 522 aa, Glycine max
  Clone ID: PAT_MRT3847_89188C.1.pep
MAAIGLNGVKVGTTSSQAYLEGKAVKETRALMAELCRHFYTLGWVTGTGGSISMKVHDDSIPRPQQLILMAPSGVQKERMEPEDMYVLSHSGSVLSAPSPKPWPHKPPKCSDCDPLFKKAYEMRDAAAVFHSHGIESCLVTMINPLSKEFRITHMEMIKGIKGHGYYDELVVPIIENTAYEYQLTESFAKAIEDYPKATAVLVRNHGVFVWGDSWISAKTQSECYHYLFDAALKLHQMGLDWSTPNHGPIQSARRGLSIAGESNVSVKARKSNGDSDPLPRCVVLDIEGTTTPISFVSEVLFPYARDNVGRHLSLTYDTPETKADIKLLRSQVQSDLEQGIAGAVPIPPDDAGKQEVIAALVANVDAMIKADRKITALKELQGHIWKTGYENNELEGIVYDDVPEALEKWHALGIKVYIYSSGSRLAQRLIFGKTNHGDLRKYLSGFFDTTVGNKRETRSYVEISESLGVEKPSDILFVTDVYQEATAATAAGLEVIISIRPGNGPLPDNHGFKTIKSFSEI

SEQ ID NO: 273718 - protein, 33 aa, Glycine max
  Clone ID: PAT_MRT3847_89189C.1.pep
MRMSCNGGPVLRKGGGENCGIRPCVQWGKSPES

SEQ ID NO: 273719 - protein, 76 aa, Glycine max
  Clone ID: PAT_MRT3847_8918C.1.pep
HLPSSLTIYRLFNTTNTVSCPGHTRADDDNNLVLQGIFHILTSHGHSTHKVRRPMKTTGWHNLESLKLFSIAPFTK

SEQ ID NO: 273720 - protein, 103 aa, Glycine max
  Clone ID: PAT_MRT3847_89190C.1.pep
MDSPPSQHTWGRSTTSLSSSLSKSNSDSIQSLSSILNNPHAADAASWAGWWSSSSSAVAVAVPEFAIIPASKAASDVSRSDFLPYLSPISDAFHRFEDIRNHA

SEQ ID NO: 273721 - protein, 72 aa, Glycine max
  Clone ID: PAT_MRT3847_89191C.1.pep
NKKLRVSQIWEGKWRTLSLGCCHPRLALHCGLCRSLIIWKKKKKVLLHMFPVPFGILPFFPENFSWLVRPTH

SEQ ID NO: 273722 - protein, 81 aa, Glycine max
  unsure (1)..(81): unsure at all Xaa locations
  Clone ID: PAT_MRT3847_89192C.1.pep
LSKFVCVCCVVSHRWQHHLARARADYRLTSSSFLLHXAXSGVXKELCXLLTDFXDGLTYSXNPVSXSQPNPFGAMWNXXKG

SEQ ID NO: 273723 - protein, 78 aa, Glycine max
  unsure (1)..(78): unsure at all Xaa locations
  Clone ID: PAT_MRT3847_89193C.1.pep
LDVEENDYKTAYSYLSEAFESFNTLDEPKAEVGLAXMLLCEIMVSQADDVAXIIFSIAGVQYLGPDLDAMKVIADADS

SEQ ID NO: 273724 - protein, 55 aa, Glycine max
  Clone ID: PAT_MRT3847_89194C.1.pep
ARFLVFFLMFKQFGVFSQLLSPLGSLGRIMYNSKQALCSFHPYGLAGVVKLIHII

SEQ ID NO: 273725 - protein, 150 aa, Glycine max
  Clone ID: PAT_MRT3847_89195C.1.pep
RNFHRKETPDGTYLLPFHHRHQPPPPPFAPYYRAPAGYLHMTGPQHATLALPSTSGGGGTQSPREDQGDLSDPPTSGATTHGGSSSKKRFRTKFTQQQKDKMLAFAEKLGWRIQKHDEGVVQEFCSETGVQRHVLKVWMHNNKHTLGKKP

SEQ ID NO: 273726 - protein, 214 aa, Glycine max
  Clone ID: PAT_MRT3847_89196C.1.pep
PSSDPVRRRGRPTRPPPMDLRLTALSEKLAETFSKATGATCSPEDLTCLAKFSQHFGATNIEHSLCKFIELTQKSQDVAPLSKETTLHSCDVTKDDANEAVKNLQVSKPLPSDTPVKYGVSPAKAAQVERHSSTESEESSKSSDEDQRSAERSRSLVRSATPRRSASPMRRVQIGRTGPRNAAALTIKSLNYFPGRERITVQDAAENDFEWGSI

SEQ ID NO: 273727 - protein, 46 aa, Glycine max
  Clone ID: PAT_MRT3847_89197C.1.pep
GVSYVAWGNLGMVIKSHAWCNDPLCHLRNPPLSMEWAWQGTQSQVR

SEQ ID NO: 273728 - protein, 67 aa, Glycine max
  Clone ID: PAT_MRT3847_89198C.1.pep
NIKIFKYYFPNFISLVFPFILKIKKYSLRQNKNQIFPLFLGKLFLTPQFFFFFRTKILKKYNFSPKY

SEQ ID NO: 273729 - protein, 48 aa, Glycine max
  Clone ID: PAT_MRT3847_89199C.1.pep
AIIIIGPSFNRGQTIHLTQSPSMHNLHNTNILISQTQTYQILPTIKVL

SEQ ID NO: 273730 - protein, 74 aa, Glycine max
  Clone ID: PAT_MRT3847_8919C.1.pep
RADSARAQRDKVENGPLKLVAPSTGLIPLVTAVDATHPRIQVLYSAKSGDSIVIKSVSDPAPKKRAFHMSAHED

SEQ ID NO: 273731 - protein, 119 aa, Glycine max
  Clone ID: PAT_MRT3847_891C.1.pep
MAKSSFKLEHPLERRQAESARIRDKYPDRIPVIVEKAERSDIPDIDKKKYLVPADLTVGQFVYVVRKRIKVSAEKAIFVFIYNTLPPTAALMSSIYEENKDDDGFLYMTYSGENTFGSR

SEQ ID NO: 273732 - protein, 138 aa, Glycine max
  unsure (1)..(138): unsure at all Xaa locations
  Clone ID: PAT_MRT3847_89200C.1.pep
NFHKEEGVTDCSTQVRXPGTTMMXDGWPYFXALEHDSLKCTIPXILALEVKSTTINNMSTYGXLNPVISGSGLLVTIHYCXSQHTGRNQMATVKTPLNFDSSKQSFCHDSIDHVRERILMDKNGDWITLIQNSAIRNL

SEQ ID NO: 273733 - protein, 115 aa, Glycine max
  unsure (1)..(115): unsure at all Xaa locations
  Clone ID: PAT_MRT3847_89201C.1.pep
SXXXXXNXXXXAXTAGXXXRGLQXXXQAXXLXTXXPXXQXSXTYXRXXNPGFSAXXELTXXFVXXWCDFIXXXXEXWXTXXGXCXXLSXVDXXQRXXXMXXAXXXIPNXVRXXXX

SEQ ID NO: 273734 - protein, 95 aa, Glycine max
  Clone ID: PAT_MRT3847_89202C.1.pep
CPRFLRPFFLTPPPKQTNLPQKLLVPPQWLKAYFPFRESAPLNILPFFFFWGGAFFLAPSKPSRGGVFYPCIFPFFFPRAGHIFFFFPKNLGAPS

SEQ ID NO: 273735 - protein, 64 aa, Glycine max
  Clone ID: PAT_MRT3847_89203C.1.pep
AGFCGLASLLGFYFLTTRISLSPSNDFSWLLIIRCIISGFSLTRIFDVLIDIKKPRIIPFLCIL

SEQ ID NO: 273736 - protein, 139 aa, Glycine max
  Clone ID: PAT_MRT3847_89204C.1.pep
VPKISRRMMMKGVESKNDILVASYHTEPETIAFSRDQVNGGDNSDVMVFRPQNSYIEDGKSLYAAWCRCTDNLALDKSSDELNEKLWDDGSSEDDDGEGVIDKPSAYEILEVWKEMREEDGSLLHSELNLHVASDCKLF

SEQ ID NO: 273737 - protein, 97 aa, Glycine max
  Clone ID: PAT_MRT3847_89205C.1.pep
APENQKQIGIEDSSPESKTQTECTLIYYTDPFLPENNEAEKNKGLKSAKSRENTIQYQRNVLSKTNVKKKRMIFSVVRNWFAKIFSRAFPLLLLLCG

SEQ ID NO: 273738 - protein, 70 aa, Glycine max
  Clone ID: PAT_MRT3847_89206C.1.pep
DYQQIGCDCLYQPLPWCTFTVGMIFGSLETNPFDNRVLTMTIALIWTNHLPAHDIYLASMMQFNYTESPG

SEQ ID NO: 273739 - protein, 62 aa, Glycine max
  Clone ID: PAT_MRT3847_89207C.1.pep
DRNYDELRKPRLMLSSIVHCSISAVDSRTPRYETYAIQALLLGGRIKCGVSLEGPFISMRPR

SEQ ID NO: 273740 - protein, 90 aa, Glycine max
  Clone ID: PAT_MRT3847_89208C.1.pep
ANKQKNILRSQTFLSRERIKSNNRGVLILQITTKNSEMHHHHIEYTKNTSMINMNPHFPIFSASNQSIGSSNKPTTNNSPMQSIREFLCK

SEQ ID NO: 273741 - protein, 422 aa, Glycine max
  unsure (1)..(422): unsure at all Xaa locations
  Clone ID: PAT_MRT3847_89209C.1.pep
TAARRRQKGGTVSDRRLSPGGLPRKKFLVHRDRILESAAQMMDLHASNKVVLEVEYDEEVGTGLGPTLEFYTLVCQEFQKSGLAMWREDDSSFTLKTNLQAEEIGVHSFYGLFPRPWSSMQDTSGGIQFSEVTKNFFLLGQVVAKALQDGRILDLHFSKAFYKLILGKELSLYDIQXFDPGLGKVLQEFQALVMRKKFMESVSGGNSELQYGLSFRDMSIEDLCLDFTLPGFPDIVLASGTDHTMVNMRNLEDYVSLIVDATVRSGVSRQVEAFKSGFNQVFSIDHLRIFNEEELERMLCGEYDSWAVNEFGDHIKFDHGYTASSPPIVNLLEIVREFDNGQRRAFLQFVTGAPRLPPGGLASLNPKLTIVRKHCSNRADTDLPSVMTCANYLKLPPYSSKERMKEKLLYAITEGQGSFHLS

SEQ ID NO: 273742 - protein, 78 aa, Glycine max
  Clone ID: PAT_MRT3847_8920C.1.pep
KKENWQAELTSCFTEDFFTSKSNEKNCFPPAFSEMNTQERKIFFLIRTQERINYYSEGNIPQKILDAICTFILTGSSS

SEQ ID NO: 273743 - protein, 65 aa, Glycine max
  Clone ID: PAT_MRT3847_89210C.1.pep
LQSRLQLWKVGNCFGKCETGFLIGSQTHSYRLAWMVIFEIQMSPLHMCVSRIAITREGFFSSKVR

SEQ ID NO: 273744 - protein, 113 aa, Glycine max
  Clone ID: PAT_MRT3847_89211C.1.pep
HASGNSSGYMKSKLHRKSWLAGLGCKCYCSDKNSVDISDHAGEISFSKNSSHGKTTSRNMFNADPEANHSVKVTRPHAAEISINKDVYFQRPEKLGVGLSKENSLALSSLNSN

SEQ ID NO: 273745 - protein, 314 aa, Glycine max
  Clone ID: PAT_MRT3847_89212C.1.pep
MATLIAPSNHSPVEDAESLRKAVKGWGADGKAIIAILGHRNATQRTLIREAYQNLFQEDLIKRLESELSGDFERAMYRWILEPAEREALLANIAIKSADKNYQVIVEISCVLSPEELFAVRRAYHNKYKRCLEEDVAANTSGHLRQLLVGLVSSFLYGGSETNAKLAQSEADALPWTLKDKNKSNDEIIRILTTRSKTQLVATFNRYRDDHGIAITKKLSDEGSDEFHKAANLAISCINDHKKYYEKVLRNAMEHLGTAEDALTRVIVTRAEKDLKEIKEVYYKRNSVHLEHAVAKETSGDYKKFLLSLMGKEE

SEQ ID NO: 273746 - protein, 163 aa, Glycine max
  unsure (1)..(163): unsure at all Xaa locations
  Clone ID: PAT_MRT3847_89213C.1.pep
PRVRAQVKAFPGRSTAPNLDSLDVSGTEVLAEQSGGDSENLDNQDAVNSVLSKFRDLNLDENLDLVAEDXKGEGIVSLFHQIKDLEKQVNQRKDWAHXKAMHAARKLNSDLTELTMVRMEREETLKLKKGEPELGDTTLXKRLLEMEKASEKATGQLDPANAA

SEQ ID NO: 273747 - protein, 90 aa, Glycine max
  Clone ID: PAT_MRT3847_89214C.1.pep
AARQPGHVVRGRGRRLVPPRDRGHGRRRHVQAVRARWQARGRAARQARQLGARLWRQQGSRFRGGQEGWFSELRQWGLDAVTMYMLFVYS

SEQ ID NO: 273748 - protein, 78 aa, Glycine max
  Clone ID: PAT_MRT3847_89215C.1.pep
LFLHDIRRVAVRAAVAMGEEGDVVVVAGKGHETYQVEGDKKEFFDDREECREALQYVDELHQAGIDTSEFPWRLPESH

SEQ ID NO: 273749 - protein, 768 aa, Glycine max
  unsure (1)..(768): unsure at all Xaa locations
  Clone ID: PAT_MRT3847_89216C.1.pep
KKNSKTQTKPLTLLPSGSVFDGVIISWCSALWSPATTSSTAKLQHFRKPCTCSSTPFFRLLSYPFLHVRAPRAIGPDGKFYPSPADDDPPEADEDSSHGFSTFQQIQRQAERARQIEEDDYKKNQSTYLAAIADVEDAPDNAPFDSSEDDLFGEIDKALALKRKEFVSQGLLQPNPPKQDQLPVAAVDELQPDELGDLDXEIERLQGLTGDGNGSINRXPFEFHFDSYGKSKVRIVEGKFKIXLAELLDESKVVPVSVSGDLEIEITGIQHDSRIVSSGDLFVCCVGRKTDGHLFLSEADKRGAVAVVASKEIDIEDTLGCKALVIVEDTNAVLPALAASFFKQPSTKMAVIGITGTYGKTTTTCLIKSLYESMGLRTGMLNSVASYVHGDNKLELGNAVPDAVLVQNLMAKMIHNGTEVVVMEAGAHGLGDGKYDEVDFDIAVFTNLSQEEEGDIDAQAKLFSRMVDPERHRKVVNIDDPNAPFFVSQGNREVPVVTFAMENKEADVHPLKFELSLFETQVLVNTPTGILEISSGLLGKHNIYNILAAVAVGIAVGAPLEDIVRGIEEVDAFPGRCELIDEEQAFGVIVDYASTPDALSRLLDSVRELGPRRVITVIGCCGEGDRGKRPVMTKIATDKSEVTMLTSDNPKNEDPLDILDDMLAGVGWTMQDYLKYGENDYYPPLPNGHRLFLHDIRRVAVRAAVAMGEEGDMVVVAGKGHETYQVEGDKKEFFDDREECREALQYVDELHQAGIDTSEFPWRLPESH

SEQ ID NO: 273750 - protein, 126 aa, Glycine max
  Clone ID: PAT_MRT3847_89217C.1.pep
LRDPIIIRRNSSNFKVFQYPIDICSETMLFFFFQALKQCPTTILFSFTNNKRIFEFQTTHFFLPRLHDQTIKCIFVSNFPPLSHAHPHTLCKIPFPRESAMPLMNGNTHQQNVTRKEAIPINGMES

SEQ ID NO: 273751 - protein, 64 aa, Glycine max
  unsure (1)..(64): unsure at all Xaa locations
  Clone ID: PAT_MRT3847_89218C.1.pep
RRRERARDRXRXXGWKVKLWTIXSXGXXXLRXGXRSGXRXXDSGXXYXXXGXXANPXNPGRNFL

SEQ ID NO: 273752 - protein, 218 aa, Glycine max
  unsure (1)..(218): unsure at all Xaa locations
  Clone ID: PAT_MRT3847_89219C.1.pep
MYKRNTILLVVLAAFCLLSSSYACSGDNECGSEEYCSDTGSCQYSRGLPLKLFYPYGDTNGDSRLDAVDDGKESVSLSVPVIYNNRKYDTLYIGVNGLISFGDSANEIEDVPFDSPAPSAFPVPNQKFVAPYWLDLDASGEISDGNAIYFRETQDGDAIARASKIVREAFSSESDMKDWEATSVTVVTWYRVGTFPSRVDXLNTFQAIVATDGTSPSL

SEQ ID NO: 273753 - protein, 163 aa, Glycine max
  Clone ID: PAT_MRT3847_8921C.1.pep
ISSQSSEPTKKGASNSIAPPTPRHPFSRYQSMKNRKPKPHHIPRNTFRGNQNNPTPNPNTQGEPPQMVGHRRNGLTGPRGPRGAVTLNNNNPFAIAAPKTPPDQNTCGPPDLPAGEKPTKGGPPASKITDLKGPPSNQPWRERHTAQLGKRRETGQKQKTPDP

SEQ ID NO: 273754 - protein, 304 aa, Glycine max
  Clone ID: PAT_MRT3847_89220C.1.pep
MLKSGMGIQERKKVKKPAQASSRKGCMRGKGGPENATCTYKGVRQRTWGKWVAEIREPNRGARLWLGTFDTAREAALAYDAAARKLYGPDAKLNLPELSVPYAAGVMNPSHMQQQQQQQQQPQVPQMMMQQQQPLVHPTFDLVNVTPHSDFNNNSINILNNNPVVSSMASSFLADAAAPVYTSCDSIVSLPLSATNYTTNNTVPMEMDGYYYSSIAVESKEDDMFRPFWGPTMDDTMPVSDESIWTEAAMSLDYPIVGGGGGFVTTENLFGEATAWTPCKLLLSACKLSSDERDRQYSNKVLCL

SEQ ID NO: 273755 - protein, 152 aa, Glycine max
  unsure (1)..(152): unsure at all Xaa locations
  Clone ID: PAT_MRT3847_89221C.1.pep
ARRRQKGCKQLVRHXLIQLTCPYSQVCYFNDSYSKVLELSDTSSASHDARRDQENIPPEKNAQETTPGKAAETRDVLRDSHITIPETPSPDQPGDAAYGVVKKELGICNDMGPRKRASRIVGNSKNSDNARLQNGVILFGSGERSGSPYSDI

SEQ ID NO: 273756 - protein, 37 aa, Glycine max
  Clone ID: PAT_MRT3847_89222C.1.pep
ASFPVLAFRAGLFLWFKMDRCFPSRFALFYERSVTVI

SEQ ID NO: 273757 - protein, 60 aa, Glycine max
  Clone ID: PAT_MRT3847_89223C.1.pep
LPVWLGFGASFKKGIDENVNNLCLRNETCKQWPCCRATLHLVAMVFAGGDSKLAALNDRL

SEQ ID NO: 273758 - protein, 37 aa, Glycine max
  unsure (1)..(37): unsure at all Xaa locations
  Clone ID: PAT_MRT3847_89224C.1.pep
QSCFFTYRISPISGNLIHLPPLIFTTFYSLGGIPSXS

SEQ ID NO: 273759 - protein, 119 aa, Glycine max
  Clone ID: PAT_MRT3847_89225C.1.pep
EEYSVFFSLKKKKKKKKKKKKKKKKKKRKKKEKKKKKNLKKKKKRGAAKKEVGKPEKKLGTGPGGGKNFPKRKGKKKGGKKGKKGVPGENGNRVKIPKKKKAGRKNGKTGGPKRGTKPK

SEQ ID NO: 273760 - protein, 159 aa, Glycine max
  unsure (1)..(159): unsure at all Xaa locations
  Clone ID: PAT_MRT3847_89226C.1.pep
GLCYDIMXIFKDSDIKPTFGRFSSSVKGFRNIDLFVQHNDGKKIIDPESQKTLCSCLKEEMLHPLRVTIVNRGPDTELLVANPVELSGKGRPRVFYDVTLTLKALGVGIFSAEVVRHSTQERQWEVYRFLLEESRDFPLTRSQARTQIVDKVRRTLMGW

SEQ ID NO: 273761 - protein, 68 aa, Glycine max
  Clone ID: PAT_MRT3847_89227C.1.pep
GLVLPLMVMNLSCTRNGSDGLMLSAWEGFNGVGSIRTASARTVLRDTRHDHTASNDHIAADREELDLT

SEQ ID NO: 273762 - protein, 87 aa, Glycine max
  Clone ID: PAT_MRT3847_89228C.1.pep
IVLVSLTGQRLLALQFLRRQSSSRSSSWLRTSLHLLSCRIQCFLVTATPLSHSIMKLWHSLNPCNQFTILVTSFVIRTIEYRCTIHD

SEQ ID NO: 273763 - protein, 61 aa, Glycine max
  Clone ID: PAT_MRT3847_89229C.1.pep
LLNFFESITNTRHLHGSITETSPGSMHINHNISLLYVYVIFNFKIVFAPHKTFSCFFLNKS

SEQ ID NO: 273764 - protein, 241 aa, Glycine max
  unsure (1)..(241): unsure at all Xaa locations
  Clone ID: PAT_MRT3847_8922C.1.pep
ISYGNLTGQIPSSVGNLSSLVTLDLSFNALSGSIPEEIGMLSKLQLLLLNSNSLQGGIPTTIGNCSRFFFVEIFDNQLSGMIPGEIGQLRALETLRAGGNPGIHGEIPMQISDCKALVFLGLAVTGVSGEIPPSIGELKNLKTLSVYTAQLTGHIPAEIQNCSALEDLFLYENQLSGSIPYELRSVQSLRRVLAXWKNNLTGTIPESLGNCTNLKVIDFSLNSLGGQIPVSLSSLLLLEEF

SEQ ID NO: 273765 - protein, 95 aa, Glycine max
  unsure (1)..(95): unsure at all Xaa locations
  Clone ID: PAT_MRT3847_89230C.1.pep
LLGSSAAFASPGASFASWGSLACLRLGLLGSLFVAPGAFLLLCLCVSSCVAFVRAVPCCCPLVCACVLPPGFKRPPFGAWFEIKLVCAALWVXAS

SEQ ID NO: 273766 - protein, 38 aa, Glycine max
  unsure (1)..(38): unsure at all Xaa locations
  Clone ID: PAT_MRT3847_89231C.1.pep
NVELLCQIILCKGATQETDAFIACCQAXXSLNRGRELF

SEQ ID NO: 273767 - protein, 174 aa, Glycine max
  unsure (1)..(174): unsure at all Xaa locations
  Clone ID: PAT_MRT3847_89232C.1.pep
LISLXXXHPLDPXFNFPVKCPTLHHIKLVVISRKIMEIAYNYYLPELQEIEDPTFFDQYQMDSFACPLDDFDFESFSGSPESNSSYHFNSESTPNCFPAESHDQSFTPARPTKRLKNTCASDFISHKVSAFSSSQLISFGHFNAPSPSHASQQFQNLDFDEKASSENMDFAAFV

SEQ ID NO: 273768 - protein, 40 aa, Glycine max
  Clone ID: PAT_MRT3847_89233C.1.pep
FIVLLVMFGFFRVIRTFLILCGHSFSSLINIKLSSSFYLS

SEQ ID NO: 273769 - protein, 127 aa, Glycine max
  unsure (1)..(127): unsure at all Xaa locations
  Clone ID: PAT_MRT3847_89234C.1.pep
GGFIVEQAIQTRRLFILDHQDYLIPYLGKINPNPTKPFAPGPIFFWKDDGPLPPLAMEXRRPHPKGEEYGPVSEFYVPASEGGEAIIWLLAKAMVVVNDACSHQIISHWLNTYAIVGPFVIPPIRQL

SEQ ID NO: 273770 - protein, 155 aa, Glycine max
  Clone ID: PAT_MRT3847_89235C.1.pep
MARVDLSRISLRPFKMSDVDDFLIWAGDDQVTRNLRWKTCGSREEALAFIRDVCIPHPWRRSICLDDRSIGFVSVYPWSGDERCKADIGYAIGTNYWGQGIATKALMTAVPQVFKDFNELLRLQAFVDVENKASQRVLEKAGFLREGVLRKYTYL

SEQ ID NO: 273771 - protein, 73 aa, Glycine max
  Clone ID: PAT_MRT3847_89236C.1.pep
GYRFYPGRVFFNLKSERHKVWLPNFVPDPFVLSFSSLRLCLTSLTIASGVLVLCTCCTKSLPRHQIPYPRLIL

SEQ ID NO: 273772 - protein, 96 aa, Glycine max
  Clone ID: PAT_MRT3847_89237C.1.pep
ITPMDPPLISDSTFSPAYSLAEIWPGMPHFPDHSHLTATAPTKGKDSTAADEVLSSTTTANLSNNDSGSNKRMKGGGSSFENDGFIAEAEASSVGG

SEQ ID NO: 273773 - protein, 201 aa, Glycine max
  Clone ID: PAT_MRT3847_89238C.1.pep
MDAAATVGRVSNGGGVVRFPLSASSALFMQKGDITKWSIDGSTDAIVNPANERMLGGGGADGAIHRAAGPQLVEACRTVPEIRPGVRCPTGEARITPGFMLPASHVIHTVGPIYSADINPAASLASAYRNTLMVAKENNIQYIAFPAISCGVYGYPYDEAATVAISTIKEFPNDFKEVHFVLFSPDIYDIWSNKVEELLKD

SEQ ID NO: 273774 - protein, 175 aa, Glycine max
  unsure (1)..(175): unsure at all Xaa locations
  Clone ID: PAT_MRT3847_89239C.1.pep
MGASVQIEMLYNRIYLRLIYRTLVCCDRSVLPLFVESLSLALSANAEPHYTVVHIATCLALGQNIPMGMLRQEMIDXATVKAIEGEVKPDLSCSMMEGLVTRVSSHLQSAGPLRAAGVKIREAVAPIDREQGGXRILXENGITLQAIITSTEMVIMLRNHGKLDEEMVGGATKFL

SEQ ID NO: 273775 - protein, 78 aa, Glycine max
  unsure (1)..(78): unsure at all Xaa locations
  Clone ID: PAT_MRT3847_8923C.1.pep
MNCNIDKEGGIGKDAXIANKEGVQEADRPKKGFYIRSGMTIIREKAPIQHGAVISKDRAHFWAEYPNSPEEECSHLWT

SEQ ID NO: 273776 - protein, 84 aa, Glycine max
  unsure (1)..(84): unsure at all Xaa locations
  Clone ID: PAT_MRT3847_89240C.1.pep
PNLIPHPPXNGKSHSNHNPILYTLTIPTHPYHRSYQLTLTNKNLPTHSTPYHISTNVEEIINNSHNSYTAHPTIGHYFSLLNKP

SEQ ID NO: 273777 - protein, 47 aa, Glycine max
  Clone ID: PAT_MRT3847_89241C.1.pep
VGCIPSSSSTTHQAVDPIWSPPSPPVTSRISLVFNCVGPVHILLHLD

SEQ ID NO: 273778 - protein, 88 aa, Glycine max
  Clone ID: PAT_MRT3847_89242C.1.pep
TQLSIKKYLESQCIRNNKVIGTDKSMLHKLILWNLYKIKGLIGSFRITSLLFKQSKEVHDIAVQQDRPLYRLGDTNDTMSQSLGISVL

SEQ ID NO: 273779 - protein, 63 aa, Glycine max
  Clone ID: PAT_MRT3847_89243C.1.pep
TIVAFPTVSPLMEASIPNSMRIEADANSIVVGSDRDCENELFMFLCSVQRQQKQIHSESEQWS

SEQ ID NO: 273780 - protein, 70 aa, Glycine max
  Clone ID: PAT_MRT3847_89244C.1.pep
LPLSSTCIQYLSNVRAAEYRVLTFGTAVLVVDLLNLVRGLFSKWVAKKPLEATTQLGCFRVICTSFRDKL

SEQ ID NO: 273781 - protein, 119 aa, Glycine max
  Clone ID: PAT_MRT3847_89245C.1.pep
MDSADKAVKIRAVAVGVIVSAEKTSISVMSTACYEIMRKRKVRPVGFLPWATFAGSIGTCTSLLLYGDGIECAVESLPAAPSIASLGRGIQHLHEASQAVRRMEGSRIQASIESLIKRI

SEQ ID NO: 273782 - protein, 71 aa, Glycine max
  unsure (1)..(71): unsure at all Xaa locations
  Clone ID: PAT_MRT3847_89246C.1.pep
RKSEGKIIPERGIIMVGEFGFFPPGDIXAYVQEGGVKAIGVGRSIVKQSDPGKGASNLFGKISIWVKVKNI

SEQ ID NO: 273783 - protein, 89 aa, Glycine max
  Clone ID: PAT_MRT3847_89247C.1.pep
KDDSDLCTYSQWIINATYIRNGEGIDTTHGSTGCSDITELTGNSVSELISMPRKITGAHYVQLVTILHDVFDADFNAGGAQIIIDSAYI

SEQ ID NO: 273784 - protein, 98 aa, Glycine max
  Clone ID: PAT_MRT3847_89248C.1.pep
KMGCLKPLLNMRLYISKKRTKIFGFLQKKGFDIVFKKCGPPLPWIKKTGLCKMVARKTLGRPNGKIFFLKFWALRGVYKKQRVENGFDTPKNKGGGFF

SEQ ID NO: 273785 - protein, 323 aa, Glycine max
  unsure (1)..(323): unsure at all Xaa locations
  Clone ID: PAT_MRT3847_89249C.1.pep
MAGLGIWMGFVSLCLLSVSVSGLLQRLEHPVKADGSLSLMVIGDWGRKGTYNQSQVATQMGRVAAKLNIDFVISTGDNFYDDGLTGIDDPAFEISFSKIYTAKSLQKQWYSVLGNHDYRGDVEAQLNPILQKIDPRWICQRSFIVDTEIAEFFFIDSTPFVDKYFLKPKDHKYDWRGVLPREKYLSKLLKDLEIALKDSTAKWKIVVGHHPVRSIGHHXGDTKELIRXILLEILGENNVDMYINGHDHCLEHISSRSSQIQFLTSGGGSKAWKGDXIKIRKMGSSFTMMDKDLCPWSWKKPMPKLFISIFMGKFCMLXICPRG

SEQ ID NO: 273786 - protein, 110 aa, Glycine max
  unsure (1)..(110): unsure at all Xaa locations
  Clone ID: PAT_MRT3847_8924C.1.pep
MARRSYEEAICATTKLIIEKADLRGVSAAKSKQTTAELETDTANRSTPFNPQQRTTTGFGHFMNEKFQKNPQLYGXLAKGHNPKVMAVDCSDSRDCPSHILDFNPGEAFV

SEQ ID NO: 273787 - protein, 254 aa, Glycine max
  Clone ID: PAT_MRT3847_89250C.1.pep
RGNNHVWTMSYKVGITDCEMQLWRRMENGDIKALLLLLHSESTCYKLDPNNHVSVLDFRLDVTTVDGKDDLLFVDSKATYRNNKLCFQLTKSIYGDGSVTQTSVFLYGMGHKAGLVVLQRHYNGSAQDENPCAVTLTHYHATSPGINDYSKSKADFGLSVIARIVPSKRNVVIDVEGPKQHPSSALFYLFDQVRSTGVWNPSMCPHCAAQDPRPRSRDSVVPVARPHARLFANEGRFAGTGNGGKIRCRNFNVY

SEQ ID NO: 273788 - protein, 39 aa, Glycine max
  unsure (1)..(39): unsure at all Xaa locations
  Clone ID: PAT_MRT3847_89251C.1.pep
SIMLLSESVLASSRECMSGYPITXIPIHAQLKFQHNVNR

SEQ ID NO: 273789 - protein, 445 aa, Glycine max
  Clone ID: PAT_MRT3847_89252C.1.pep
MRIFYGCEKTTEGGRFQTQLRLLFFQFHSFVHSQVVMAAAPAATFAIGTTGSLGQRGSSLPQSKSFGLKFNSLNHLKSFCGLKAMSSVRCESESSFFGNKTGAALRASFASKAQKENNHNSQPQASYKVAVLGAAGGIGQPLSLLIKMSPLVSNLHLYDIANVKGVAADISHCNTPSQVRDFTGASELPNCLKDVNVVVIPAGVPRKPGMTRDDLFNINAGIVRDLVSAVADYCPDAFVQIISNPVNSTVPIAAEVLKQKGVYDPKKLFGVTTLDVVRANTFVAQRKNLKLIDVDVPVVGGHAGITILPLLSKTRPSASFTDEEIDELTVRIQNAGTEVVEAKAGTGSATLSMAYAAARFVESSLRALDGDGDVYECSFVESNLTDLPFFASRVKLGRTGVEALIPSDLQGLTDYEQKALEALKPELKASIEKGIAFAQKQTVAA

SEQ ID NO: 273790 - protein, 213 aa, Glycine max
  Clone ID: PAT_MRT3847_89253C.1.pep
MAAAPAATFTIGTTGSLGQRGNSLPQLKSSGLKFNSQNHLKSFCGLKAMSSVRCESESSFLVNKTGAALRASFASKAQKENDQNFNYNSQPQASYKVAVLGAAGGIGQPLALLIKMSPLVSDLHLYDIANVKGVAADISHCNTPSQVRDFTGASELANCLKDVNVVVIPAGVPRKPGMTRDDLFTINAGIVRDLVSAGADNSPDAFIQIISNP

SEQ ID NO: 273791 - protein, 102 aa, Glycine max
  Clone ID: PAT_MRT3847_89254C.1.pep
EVVSESSGSAIDDCKFSHGSSNSLGDAKTKLFDAGLIRQEQDSIIGSYDSFEEMKLVLQGFLKKASSDELSAMHKLFSSDAQFTKCRAEFVSLIEEIQKACA

SEQ ID NO: 273792 - protein, 32 aa, Glycine max
  Clone ID: PAT_MRT3847_89255C.1.pep
WIYGVLRRKMHWFIWELMNVKKRRGEGDVRGI

SEQ ID NO: 273793 - protein, 339 aa, Glycine max
  unsure (1)..(339): unsure at all Xaa locations
  Clone ID: PAT_MRT3847_89256C.1.pep
HICATLQWSWQTILLGFGFLVFLLTTRHISLRKPKLFWVSAAAPLTSVILSTILVFLLRNTTHQISVIGHLPKGVNPPSANMLYFNGPYLALAIKTGIITGXILSLTEGIAVGRTFASLKNYQVDGNKEMMAIGLMNIAGSCSSCYVTTGSFSRSAVNYNAGAQTTVSNIIMAAAVLVTLLFLMPLFYYTPNVVLAAIIITAVIGLIDYQSAYKLWKVDKLDFLACLCSFFGVLFISVPLGLGIAVIISVFKILLHVTRPNTLVLGNIPGTQIFHNINQYIEALRVPSFLILAXESPIYFANSTYLQERILRWVREEEEHXKANNGAPLKCIILDMTVV

SEQ ID NO: 273794 - protein, 95 aa, Glycine max
  Clone ID: PAT_MRT3847_89257C.1.pep
DDKKLNTSHSYYFFNIKKVIRMKNKKVVLSKTPTNYEIPYLPLHTLERTILIERGAFTSSYLEVFCLSWTHTKPSTKLSPKLLNMSPYKLLETYP

SEQ ID NO: 273795 - protein, 46 aa, Glycine max
  Clone ID: PAT_MRT3847_89258C.1.pep
RFIINKFKQALKANPLHEIKNQNIQANMLDHDLHQGLSSSGHPNQV

SEQ ID NO: 273796 - protein, 75 aa, Glycine max
  Clone ID: PAT_MRT3847_89259C.1.pep
HETNKKYQERSTLAIGLHLFALKKPFEQRKEQKWLTEICNNVTNHGRTETRIITSHNGGPPTMSQQYVLVNGLHV

SEQ ID NO: 273797 - protein, 50 aa, Glycine max
  Clone ID: PAT_MRT3847_8925C.1.pep
VDASSLSFAVRVGLIHLYIALFRIPCSAVGGYVSIPPPGMGLPRFQPPRL

SEQ ID NO: 273798 - protein, 50 aa, Glycine max
  unsure (1)..(50): unsure at all Xaa locations
  Clone ID: PAT_MRT3847_89260C.1.pep
PVFHKKAKTTKKIVLKLQCQSCKHXYKHPIKRCKHFEIGGDKKGKGTSLF

SEQ ID NO: 273799 - protein, 80 aa, Glycine max
  Clone ID: PAT_MRT3847_89261C.1.pep
MGKEKVHINIVDIVHVNSGKSTTTDHLIYKLGRIHKRVIERSENEAADMNKRSFKYAWVLDKLKAERERGITIDIALWKF

SEQ ID NO: 273800 - protein, 56 aa, Glycine max
  Clone ID: PAT_MRT3847_89262C.1.pep
SMMFLPGVITYSTLGGVQFCKTTDGLMDTQKAVLILQVGPANLPLNGIHHTCERRM

SEQ ID NO: 273801 - protein, 88 aa, Glycine max
  Clone ID: PAT_MRT3847_89263C.1.pep
PKAMTQHHYQGTGAPPNALLQPVSFRKGVIGAVITTLPCLPTTPPTPTPTPCNVSTPTKATNCNFPRINGTNTLRSNFLFPPHSPRPN

SEQ ID NO: 273802 - protein, 81 aa, Glycine max
  Clone ID: PAT_MRT3847_89264C.1.pep
RPNTNSWRQYRATCEMPDLNSRTEVMPNPEFLSLFSSPDTLQGVVALSGSSSVAACSAAISLRSRSHTCMHWDYDQTGARG

SEQ ID NO: 273803 - protein, 79 aa, Glycine max
  unsure (1)..(79): unsure at all Xaa locations
  Clone ID: PAT_MRT3847_89265C.1.pep
MSPPSQLCSLTIVDQILSSEGQTPEKPRSSFTAHQSSVTTHVPVPDQTSPRVQTTPXSWTSDAGEXQGSQTAAKTKSQQ

SEQ ID NO: 273804 - protein, 51 aa, Glycine max
  Clone ID: PAT_MRT3847_89266C.1.pep
PTRPSYSTSVNHRCRMSFSTDVKTAFCISVYFNFTTWDILVHLPIIQQLVI

SEQ ID NO: 273805 - protein, 90 aa, Glycine max
  Clone ID: PAT_MRT3847_89267C.1.pep
PLSSKTIIFLALLCLMLENGVRLDGYSFVLVLKGCARVGLVRKGMQVHGLLWKMNFGFDVLLQNSLIGFFVRYGCVELARQVFDRGEKFD

SEQ ID NO: 273806 - protein, 332 aa, Glycine max
  unsure (1)..(332): unsure at all Xaa locations
  Clone ID: PAT_MRT3847_89268C.1.pep
MVSVNPNPAQGFYFFDPSNMTLPGVNNLPPPPPPAPAAPAAVEDPNKKIRKPYTITKSRESWTEQEHDKFLEALQLFDRDWKKIEAFVGSKTVIQIRSHAQKYFLKVQKNGTSEHVPPPRPKRKDAPPYPQKAPKTPTACHVMGPLLSSSIFIDCAYIYIYPAFFVLGWPASNMPLLRRLYNTTPQPGILLQVTRDDMGLTGAXQAAPLNCCVAAAEESTPPTWPRSKRINQGDQGKPIKVMPDFAQVYSFIGSVFDPNSTNHLQKLQQMDPINVETVLLLMTNLSVNLMSPEFEDHKRLLSSYDTDSDKSKFVNICSKSFTNKSESAVLSA

SEQ ID NO: 273807 - protein, 47 aa, Glycine max
  Clone ID: PAT_MRT3847_89269C.1.pep
SYKKESLKLSELRFNQNYSLNNDLRPYHKSKQCIKVYQSIHIFIRLK

SEQ ID NO: 273808 - protein, 147 aa, Glycine max
  unsure (1)..(147): unsure at all Xaa locations
  Clone ID: PAT_MRT3847_8926C.1.pep
GSRSLKLHFLECVNGVAPLGPNGSDGGGRDPTDTSGQDHEDLGERSSQTGYRAYXSVTGLELVKAMAERMIDCEDLGXIDRLDCEGHLLCTWKQTGIIRSYTYGAGAANEYISLHTGTYTSGTLTQYRXLKHSRAHSRAERLCRVQL

SEQ ID NO: 273809 - protein, 88 aa, Glycine max
  Clone ID: PAT_MRT3847_89270C.1.pep
ANKKEDHRARSHMQSSEELTRSVLEPVIPRHIVEHKSRSEDDDDVHSSECLPIMPNTDTGLYLLATSNFTSSQAMKTDLMLLDDNILN

SEQ ID NO: 273810 - protein, 187 aa, Glycine max
  unsure (1)..(187): unsure at all Xaa locations
  Clone ID: PAT_MRT3847_89271C.1.pep
VSNIAPNIISENQRGFIKGRSIFDCINTTSEVIKLLSFMGSVMLVKFVIHTMLAYSFHVYLWPCDLLGVWTSXIRNFLWSGDVDIRKHVIVAWSSICKPFEEGGLGLRSMATINKATMLKLGWDMLSTDLQWAKILKAHVFRSREITSSHIGSSIWCGIKKPNCIMSLTAPLGLLVLLRSVFGKIGG

SEQ ID NO: 273811 - protein, 44 aa, Glycine max
  Clone ID: PAT_MRT3847_89272C.1.pep
AATLVGAFFKGKRLNPKPPPGRDQKKLLFKQSCQEKQKKGHSPN

SEQ ID NO: 273812 - protein, 52 aa, Glycine max
  Clone ID: PAT_MRT3847_89273C.1.pep
AIPRQLTPLKYIKSAGPFSFPTFFYFSCPLKKNPIPFQSLFSFFVLAADFIN

SEQ ID NO: 273813 - protein, 86 aa, Glycine max
  Clone ID: PAT_MRT3847_89274C.1.pep
NYISLTNSPILSSFEPPLSVRNYIFLFIYEPNLGYALTLSYVFLCVPRHIFDMFYTTCYLNQWSTIQHITNGRCHSELLSIFLYHH

SEQ ID NO: 273814 - protein, 223 aa, Glycine max
  Clone ID: PAT_MRT3847_89275C.1.pep
MGRRPARCYRQIKNKPYPKSRFCRGVPDPKIRIYDVGMKKKGVDEFPFCVHLVSWEKENVSSEALEAARIACNKYMAKFAGKDAFHLRVRVHPFHVLRINKMLSCAGADRLQTGMRGAFGKPQGTCARVAIGQVLLSVRCKDSNSHHAQEALRRAKFKFPGRQKIIVSRKWGFTKFSRADYLKYKSESRIVPDGVNAKLLGCHGPLANRQPGQAFLSSATATA

SEQ ID NO: 273815 - protein, 66 aa, Glycine max
  Clone ID: PAT_MRT3847_89276C.1.pep
KRKSEFIYTSEKILIMHDILCKNVYNRAFKGLQLWKSIGQIILTILCLIEKKCVGPLCFKKMILGL

SEQ ID NO: 273816 - protein, 82 aa, Glycine max
  Clone ID: PAT_MRT3847_89277C.1.pep
SSLSISFPSFPCLSIPLDQNCYIITHQTFHTSPPPFENTSINLDDHGSTQFKHLCHTSIPSRSLLHYLCCFIISKRFGLPHK

SEQ ID NO: 273817 - protein, 223 aa, Glycine max; identical to SEQ ID NO: 273814
  Clone ID: PAT_MRT3847_89278C.1.pep

SEQ ID NO: 273818 - protein, 223 aa, Glycine max
  unsure (1)..(223): unsure at all Xaa locations
  Clone ID: PAT_MRT3847_89279C.1.pep
MGRRPARCYRQIKNKPYPKSRFCRGVPDPKIRIYDVGMKKKGVDEFPFCVHLVSWEKENVSSEALEAARIACNKYMAKFAGKDAFHLRVRVHPFHVLRINKMLSCAGADRLQTGMRGAFGKPQGTCARVAIGQVLLSVRCKDSNSHHAQEALRRAKFKFPGRQKIIVSRKWGFTKFSRADYLKYKSESRIVPDGVNAKLLGCHGPLXNRQPGQSFLSSATATA

SEQ ID NO: 273819 - protein, 44 aa, Glycine max
  unsure (1)..(44): unsure at all Xaa locations
  Clone ID: PAT_MRT3847_8927C.1.pep
LCXNKRKLTLXRITSYIPMLHGNCTRSRQFQTMAFGNTIKDLKK

SEQ ID NO: 273820 - protein, 222 aa, Glycine max
  Clone ID: PAT_MRT3847_89280C.1.pep
MGRRPARCYRQIKNKPYPKSRFCRGVPDPKIRIYDVGMKKKGVDEFPFCVHLVSWEKENVSSEALEAARIACNKYMAKFAGKDAFHLRVRVHPFHVLRINKMLSCAGADRLQTGMRGAFGKPQGTCARVAIGQVLLSVRCKDSNSHHAQEALRRAKFKFPGRQKIIVSRKWGFTKFSRSDYLKFKSENRIVPDGVNAKLLGCHGPLANREPGRAFLDTATSS

SEQ ID NO: 273821 - protein, 106 aa, Glycine max
  unsure (1)..(106): unsure at all Xaa locations
  Clone ID: PAT_MRT3847_89281C.1.pep
FIHLFRASPXPISSLAILENVVFSYQILMFXPLIMNVINFRFLFLHDLCYVYLKTFKIAVIPLSCIAFWGQPLQTATWIKNXNIYIYTQTPNTLKYTQKFEVYKSI

SEQ ID NO: 273822 - protein, 158 aa, Glycine max
  Clone ID: PAT_MRT3847_89282C.1.pep
QDTPHSPSRFVLQQLFTSIPTASTTELDAVSAFSEIVPDTVVFDDFEKFPPTAATVSSSLLLGICGLPDTIFRNAVEMALADSECYGLENPNARLSCFVNKAFANIGSDMAKLVPGRVSTEVDARLAYDTHAIIRKVHDLLKLYNDSNVPPQRLLFKI

SEQ ID NO: 273823 - protein, 223 aa, Glycine max
  unsure (1)..(223): unsure at all Xaa locations
  Clone ID: PAT_MRT3847_89283C.1.pep
MGRRPARCYRQIKNKPYPKSRFCRGVPDPKIRIYDVGMKKKGVDEFPFCVHLVSWEKENVSSEALEAARIACNKYMAKFAGKDAFHLRVRVHPFHVLRINKMLSCAGADRLQTGMRGAFGKPQGTCARVAIGQVLLSVRCKDSNSHHAQEALRRAKFKFPGRQKIIVSRKWGFTKFSRSDYLKFKSENYELXPDGVNAKLLGCHGPLANREPGRAFLDTATGS

SEQ ID NO: 273824 - protein, 398 aa, Glycine max
  Clone ID: PAT_MRT3847_89284C.1.pep
MSLTLQTPPSTTLSSASPIHRTITRYTTFSFSLRPPTTLHFNPHRSLPLIRASNSSINAASTTELDAVSAFSEIVPDTVVFDDFEKFPPTAATVSSSLLLGICGLPDTIFRNAVEMALADSECYGLENPNARLSCFVNKAFANIGSDMAKLVPGRVSTEVDARLAYDTHAIIRKVHDLLKLYNDSNVPPQRLLFKIPSTWQGIEAARLLESEGIQTHLTFVYSFAQAAAAAQAGASVIQIFVGRIRDWARNHSGDTEIESAQLRGEDPGLALVTKAYNYIHKYGHKSKLMAAAVRNKQDLFSLLGVDYIIAPLKVLQSLKESVASPDEKYSFVRRLSPQSAAKYTFSDEELVRWDEDSLSKAMGPAAVQLLAAGLDGHADQAKRVEELFGKIWPPPNV

SEQ ID NO: 273825 - protein, 219 aa, Glycine max
  Clone ID: PAT_MRT3847_89285C.1.pep
SYSDENSDYNVLAGEKMRYGNDLLQRKDDNGFFLKGWWNDLLHGKIYKEIDHSGKMVLLMEILTMSSDVGDKVLVFSQSIPTLDLIELYLSRIPRRGKQGKFWKKGKDWYRLDGRTESSERQKLVERFNEPLNKRVKCTLISTRAGSLGINLHAANRVVIVDGSWNPTYDLQAIYRSWRLMVPSFLEVLLAKMASMSSQIFCQVHCWKNCCLCSYVFLF

SEQ ID NO: 273826 - protein, 37 aa, Glycine max
  Clone ID: PAT_MRT3847_89286C.1.pep
RLREDDRRDVSNFMLTSVFKKSMLIIILSTLVLSTSI

SEQ ID NO: 273827 - protein, 42 aa, Glycine max
  Clone ID: PAT_MRT3847_89287C.1.pep
LLSRYSPDNMDGCHLSSLAKMTEWLLGHALNTPAAEKLLLRI

SEQ ID NO: 273828 - protein, 99 aa, Glycine max
  Clone ID: PAT_MRT3847_89288C.1.pep
GLMDATRDTRADGSAAKGRREVKQRTQNTLTGTSQLWNVHPQGLMQYPSTRTGSLDIDLKKDSVRLTVQAGCYTPLTNPNTRAPQQKTPEGELMNTTSP

SEQ ID NO: 273829 - protein, 122 aa, Glycine max
  Clone ID: PAT_MRT3847_89289C.1.pep
PLRVLHRSVRVTDNTEATPICWAFNKHSKRLAHAEPVCGGTLATATPDGTTPTHKTGFLGLVGETVGTIGCCNVKISELWARLESEERVTLIETHVDADVVLFIRWGGARSASQSSAAQRVD

SEQ ID NO: 273830 - protein, 358 aa, Glycine max
  Clone ID: PAT_MRT3847_8928C.1.pep
TRPINSEKKDVSEGIISKGISSCRVHDKDGKEVEFENHGGAGTGSKLIKGENLSNQLIECEDELSEYEREELESKIDCALDQCFFCLYGLHLRSDSSYEDDLVVHKNTSRGDYQTKEQCADVFKYVLPYAKASSRTGLVKLRRVLRAIRKHILQPPEDLLAGNPIDKFLDDPNLCEDKLSEEAGSDGFLESITKRMFPDVGGLAQYNATLLRRSEPYLEVYCNLYYFLALSEEMSATDKWPGFVLTKEGEEFVEQNAKLFKYDLMYNPLRFESWQRLGNIYDEEVDLLLNDGSKHVNVVGWRNNATLSERVETSRRRSRRCLLMSLALANTSAQQCEIHELLALVYYDSLQNVVPFYD

SEQ ID NO: 273831 - protein, 67 aa, Glycine max
  Clone ID: PAT_MRT3847_89290C.1.pep
KKGWANWQWRSINDGDMNGAFFVQLGPKRGSRPFSKEKMIPPKGGNYVGGVTRYFGTPFKCKGGGPC

SEQ ID NO: 273832 - protein, 79 aa, Glycine max
  Clone ID: PAT_MRT3847_89291C.1.pep
FSPNKTILFLKKGLFKKNMGVILGVKIIPHLEFLFFFKPFWKTVGQAPQSGFVNSFSHPAIKRFSGPTRIRHVYFPRGF

SEQ ID NO: 273833 - protein, 89 aa, Glycine max
  Clone ID: PAT_MRT3847_89292C.1.pep
SDSVSKELVFLRLLSFFRGRFGGCRRSFSFLCIWCSVESIIDGFEWLRKALEGISGPRSSRRCKLTDIQDILTDYQTINMTFTAVKCQL

SEQ ID NO: 273834 - protein, 204 aa, Glycine max
  Clone ID: PAT_MRT3847_89293C.1.pep
TRPQECGHKCAFYHGSMDPVQRASVQKQWSKDEINIICATVAFGMGINKPDVRFVIHHSLPKSIEGYHQECGRAGRDGQHSSCVLYYTYSDYIRVKHMLSQGAIEQSSMTSGYNRSNMINSGRILETNTENLVRMVSYCENDVDCRRLLQLAHFGEKFNSSTCLKTCDNCLKITSFIEKDVTEIAKQLVWEQFLYIYFFHPSTY

SEQ ID NO: 273835 - protein, 43 aa, Glycine max
  Clone ID: PAT_MRT3847_89294C.1.pep
KICFFKFLKFSIACKQRFLLISDYTRVENKYTKYFNKFLFNYY

SEQ ID NO: 273836 - protein, 64 aa, Glycine max
  Clone ID: PAT_MRT3847_89295C.1.pep
KGDQSLRIINKGGGKKIRVHLKEGLFLKLQKNSPKPGGLKMPKKTTPVHFQKKPFKTGGLNLKK

SEQ ID NO: 273837 - protein, 39 aa, Glycine max
  Clone ID: PAT_MRT3847_89296C.1.pep
DNKICHMPIHASISFLNVSITHRSQSSPMPYVPLTSMGT

SEQ ID NO: 273838 - protein, 69 aa, Glycine max
  Clone ID: PAT_MRT3847_89297C.1.pep
VRASCSIETVIVVIHLDPCEMDLIAAYHEERDHVIYVVLDAVHHPDLEQHLVAALCSLHELSLLLGYCE

SEQ ID NO: 273839 - protein, 972 aa, Glycine max
  Clone ID: PAT_MRT3847_89298C.1.pep
MKVRSMKLKEAHTAKSGGAAFCSVLWDQKAKHLITASSSDVAICIHDSLFPSLAPKTLRHHRDGVTALALSPNSTCLASGSVDHSVKLYKYPGGEFERNITRFTLPIRSLAFNKSGSMLAAAGDDEGIKLINTFDGTIARVLKGHKGSITGLAFDPNGEYLASLDSTGTVILWELQSGKIIHNLKGIAPDTGLDVSTMNVLCWSPDGETLAVPGLKNDVVMYDRDTAEKVLSLRGDHIQPICFLCWSPNGKYIASSGLDRQVLIWDVDRKQDIDRQKFDERVCCMAWKPTGNALAVIDIMGKYGIWDNVIPSSMKSPTEDIPVKSKSNGVVYFDEEDPENSASENSSDVGGNSNQESEPPSRKRSRKQSLSEENSGEDGGEEIVSYPKVDTNKKRNRPSKENLDSVNMGFRGTMVTSKAKMQEPFQPGSTPVQPGKRRFLCYNMLGCITSIEHDGYSHIEIDFHDTGSTPRVPSMTDHFGFTMAALNESGSIFANPCKGENNMSTLMYRPFSSWANNSEWSMRFEGEEVKVVALGSAWVAAVTSFNYLRIFSEGGLQRDVFSLDGPVVTASGFKDKLAVVTHATDGLLSNDQKLEFMVFNIPRGTLLLQGRLPLSPGSSLSWFGFSEEGQLCSYDSKGVLRSYTSKFGGRWIPLFSATKEKSDENYWVTGLNASKVFCVVCKKPEDFPQVMPKPVLTPLNLSFPLASSDLGGSEAHEKEFMMNNLRLYEIQRTMDEMASVGLDTTSLDDDAFNFEAAQDKCILRLIAACCNSDKLVRATELVKLLTLEKSMRGAVKLVTAMKLPNLAERFSSILEERLLEEAKKAMETNIKENSVAPVTADALPNRSKAPTHTEALNAVTMSSSPKLSAPSFLRKDKTQERAKAGTSKTAMVNENLKVKQTGEETSDKVGKVVQQTSHPYDPSTKSSNKNGLNKSETSLGQSNRPSNPFLKSETSLEQSNRPSNPFLKAIIK

SEQ ID NO: 273840 - protein, 88 aa, Glycine max
  unsure (1)..(88): unsure at all Xaa locations
  Clone ID: PAT_MRT3847_89299C.1.pep
MATRGKLEVDIDLRSNSDWSWHTLTNLTGIFAKALRHDYKRIEVLDGDGXSTGSMRHIRYGEGSPLVKSSFEKIDAVDDEMKVMSYTI

SEQ ID NO: 273841 - protein, 138 aa, Glycine max
  Clone ID: PAT_MRT3847_8929C.1.pep
MADHRNGSTQPPNGKASAAGSAYSIDLNAFQSRLKYFYKHWDDHKTDLWGSSDAIAIACPPPSEDLRYLKSTALNLWLLGFEFPETIMVFMKKQIHILCSQKKASILESVKKSAKEAVGADLGLHVKPKNDDGTALMD

SEQ ID NO: 273842 - protein, 65 aa, Glycine max
  Clone ID: PAT_MRT3847_892C.1.pep
NESRTRMSLLLSPSPAMLPSSLPISEQHYCFISGLLSLKSLPDPPSVLGNELTNVSEHIRGHEIA

SEQ ID NO: 273843 - protein, 112 aa, Glycine max
  unsure (1)..(112): unsure at all Xaa locations
  Clone ID: PAT_MRT3847_89300C.1.pep
FPVSRGRTRGETDRSAAPHPNRERHQNQKRTSRGRNRGSGSSSKRTNTGRGRRRYPGMSNTKETTTETEERGGAPEEDKFEGLXRGEPTENKGFQCGPNSACTPCTRNRAVG

SEQ ID NO: 273844 - protein, 81 aa, Glycine max
  Clone ID: PAT_MRT3847_89301C.1.pep
LNFSITPHLRYSNRLSKEDADSAVGLVDVWGYMTCLTVSKLLIAALDLITTDILYRYGEPLFMSLLVENIEDSPYPACLST

SEQ ID NO: 273845 - protein, 215 aa, Glycine max
  unsure (1)..(215): unsure at all Xaa locations
  Clone ID: PAT_MRT3847_89302C.1.pep
MCIFESSSTHLLLLSLFALLNSASEATPIYTAHACTDGSYYLPNTPFQTNLNLLLSSLVSSATLHDGFHRTTIDDVKGLFLCRGDATPSACHDCVTAAAKNITDLCTNQTESIIWYDHCMLRYSNSSILNNIVPSFGLGNEPSVPDSDHTRFNDVLAPTLNDAAREAVISXKKFATKEANFTSSMKLYTLXAVHAPICPLXECNTCLRKLHRCLS

SEQ ID NO: 273846 - protein, 45 aa, Glycine max
  Clone ID: PAT_MRT3847_89303C.1.pep
RLTCHFLPVRVPFITSFHFFLSSMRFSSALIKRSKSVSLFLSLII

SEQ ID NO: 273847 - protein, 69 aa, Glycine max
  Clone ID: PAT_MRT3847_89304C.1.pep
VPAVFSEKCMKGVDGIRGPIRVGWGGLVSRQALYGCGAPDALVSTRGPPVRVAPCETATDVDLGSRMGN

SEQ ID NO: 273848 - protein, 224 aa, Glycine max
  Clone ID: PAT_MRT3847_89305C.1.pep
MVPFIVFCVFSMAVLPSSSSSLELTISVPGFASSPTLLPSSSVKELDINQVPLEEDWMASNMEDEEESSNGEPPRKKLRLTKEQSLLLEESFRQNHTLNPKQKESLAMQLKLRPRQVEVWFQNRRARSKLKQTEMECEYLKRWFGSLTEQNRRLQREVEELRAIKVGPPTVISPHSCEPLPASTLSMCPRCERVTSTADKPPSAAATLSAKVPPTQSRQPSAAC

SEQ ID NO: 273849 - protein, 347 aa, Glycine max
  unsure (1)..(347): unsure at all Xaa locations
  Clone ID: PAT_MRT3847_89306C.1.pep
NLKVRSGPKSSAVDLHQLPQEKGVSGTVGRSVFELDYTPLYGFISLCGRRPEMEDAIATVPLLLKIPIHMLIGDRVIDGINKCFNQQMTHFFGVYDGHGGSHLANYWRDRNHXALADEIGGFQVLLVDSPLNYATKWSLFKKFVSVVDSYQWPSFAPETVGSTAVVAVICASHIIVANCGDSRAVLCRGKEPMALSVDHKPNRDDEYARIEAAGGKVIQWNGHRVFGVLAMSSLLXDRYLKPWIFQXPEVTFVPRTKDDECLILASDGLWDVMTNEEVCDLARKRIILWYKKNGLEQPSSKRGEGIDPAAQAAAEYLSNRALQKGSKDNITVIVVDLKPYRKYKSKT

SEQ ID NO: 273850 - protein, 32 aa, Glycine max
  Clone ID: PAT_MRT3847_89307C.1.pep
QWSSRNISSKISIHSPKFKNLEARAYNIDHLV

SEQ ID NO: 273851 - protein, 105 aa, Glycine max
  Clone ID: PAT_MRT3847_89308C.1.pep
LIIINITIITRECALACDALRCLRFRQLMVDVSPSLELTKVDEVDNAREGCGVALSLAIYDCNFSKNGSLDSLMLTGSEYPISLSPPFSYSSCLASPEFASPFVL

SEQ ID NO: 273852 - protein, 102 aa, Glycine max
  unsure (1)..(102): unsure at all Xaa locations
  Clone ID: PAT_MRT3847_89309C.1.pep
LRFSPKRSQVQMIVMIVAIWRMKLVLPEVIPPIQDREGESPMLDMISQNRSTLVAGDEELTMEIEEDSXSFEGDQFVDSSCSLSVVSENSSVCGEEXFCFEA

SEQ ID NO: 273853 - protein, 83 aa, Glycine max
  Clone ID: PAT_MRT3847_8930C.1.pep
ERENEYAIFYSLETHRSIAFTEQTETPFPRCQKPQLAQHVIKQNSIPFPITLQQDSHPSCFSYLHATPSSHAKIPNITQTLAT

SEQ ID NO: 273854 - protein, 72 aa, Glycine max
  Clone ID: PAT_MRT3847_89310C.1.pep
KKTKYSSREECIIRVHQLTDKPIAYLQLVTLRITWNITTLCTGIPFIVPKKNKGTVILLRHPCLSLSPTIIA

SEQ ID NO: 273855 - protein, 221 aa, Glycine max
  Clone ID: PAT_MRT3847_89311C.1.pep
MDKTVKDNSAWNDIVLQGVMVLVMVLSYFFMHDVPKKLWAKLRLSNRADIQAKRHFVQGAQLLARARASKSKALAKEAQAQAQRAIALDPSDAAPHLLKALALDFLGLRSAALDSLDEALSPAAAKSLSDSERGDALLKRAELRLGTSQRGRVDSALADLTESVRLSPNNAKAFFALGDCYERKKMNDDAIRAYGTALELEPQFHAAEQALNRLDSSPMNN

SEQ ID NO: 273856 - protein, 355 aa, Glycine max
  Clone ID: PAT_MRT3847_89312C.1.pep
MYAFSLNMVLHHRKLLLFPPPPPPLCRSACPEKFNDPLPPPNSPDDYLTQSPTKNIKISKYLIISFSIVATAFIVLSFYAIYAKFFSPRNRSIRRTLSRPETEQDFLDEEEQQQHGPVVDHPIWYIRTTGLQQAVITAITVCNYKKDEGLIEGTECSVCLSEFQEDESLRLLPKCNHAFHLPCIDTWLRSHTNCPMCRAPIVTDPTRVPSSMDPTAFETSSFVEEIFENSAENTQNSSDDLLRGEEEERVQEDEACEENLASELVVTVQQPRRSVSLDSSSAAKISLALATVVSGESHGDHSKRVGGNGNLATKGGSSSCSSTSSVKRSRSFNAKHLLSWYSRSQRKPNAPLRSF

SEQ ID NO: 273857 - protein, 130 aa, Glycine max
  unsure (1)..(130): unsure at all Xaa locations
  Clone ID: PAT_MRT3847_89313C.1.pep
VPRVRGFQWRRCPLLLWCLRVGNCNCNSVCDNPTIVPHMDVSRFKLMADTGLLSNSVTKVFTETVASLDDCHDSGNLEDEVGIAEVIPPKQDREGESPMLDTISQNRSTLAAGDEELTTEIEEDXIVVGR

SEQ ID NO: 273858 - protein, 297 aa, Glycine max
  Clone ID: PAT_MRT3847_89314C.1.pep
MLIQTSVLSSVEAGLCYVSDDGKDVLCDRMPSGETWQVGLKCNKYPLDWCRKAEPVEEDKRNADDPRAASARGSFGQPSTASIMTENTTPNMVYRRKKLCKDSNFDLGPTNVQASANCPSVISSAAHLSSAEDQPTGFQVKHEIEMVKDPTMPSVLFDRVAKDSTHKNLGINSVNDSCSSSKPNMETEMDETGECSSSIIVMDCTREEVTEKDFCINILRSHGLLKEDSPVDNVASGEDAVTTGNNCCSRSCKICGDLDSSLNMLLCDHCEDAYHLSCYNPRLKKLPIDEWFCHSCR

SEQ ID NO: 273859 - protein, 64 aa, Glycine max
  Clone ID: PAT_MRT3847_89315C.1.pep
GKSPPFPFLILNCHREAVVRRNFYDVGFILLNEAQSTRSDLVGIRSQDDNCFQRQLVFILILIS

SEQ ID NO: 273860 - protein, 69 aa, Glycine max
  Clone ID: PAT_MRT3847_89316C.1.pep
CYENRGCTFHVVISRGITSRDGISNRIFPHAENRVCQVHDNSLLCTSLFCSTGYSQVFWDFEILCIMWN

SEQ ID NO: 273861 - protein, 53 aa, Glycine max
  Clone ID: PAT_MRT3847_89317C.1.pep
VFYLINIRLWVFNTGKKEITVYSCMPSANVSLEAHNPYYTILSHVLSQLSDEG

SEQ ID NO: 273862 - protein, 120 aa, Glycine max
  Clone ID: PAT_MRT3847_89318C.1.pep
KSKMTKPRSGKYTCRYELIHRPKINKTQQPLYTDELKPFSFLFKPHRMCKTKNKQLQEKDKKNEIKRKVLEKWVILSLLSPSLFLATSGTPLVHGIPRNTHLDEAPILSPLSLSLSLSLS

SEQ ID NO: 273863 - protein, 78 aa, Glycine max
  unsure (1)..(78): unsure at all Xaa locations
  Clone ID: PAT_MRT3847_89319C.1.pep
SISLLXCNFNFLIHCSILLHRNGXFKVKRFHIDQVILKSSFTLTHKHQFHTLIHKPSSILYLLVLTYSKSYKLTDSKI

SEQ ID NO: 273864 - protein, 118 aa, Glycine max
  Clone ID: PAT_MRT3847_8931C.1.pep
PSPLVQTLPQYTAPPKTAHSLLCQYIFFSPALQILPEYYISITPLPRYPPHRCGPLLNFTMLILLVPYLHHTPNHNPPTQLDLTLFSLHSDFALLVLCGFLHGFTPDGSLYIWPVYSL

SEQ ID NO: 273865 - protein, 43 aa, Glycine max
  Clone ID: PAT_MRT3847_89320C.1.pep
AKVGHIMEAKIYQNLAIRSGSYRYSGGEQKIISKHLTGVQGRI

SEQ ID NO: 273866 - protein, 93 aa, Glycine max
  Clone ID: PAT_MRT3847_89321C.1.pep
AFLQSFPLRPNDGQSEKLNTTHRDRGIPSSEPFCQDAKFLNPTLYTKQTQLCEQVYDTYSGRGGKSVTPLKDPSLLSGFPGGGCHIRSFLMEK

SEQ ID NO: 273867 - protein, 52 aa, Glycine max
  Clone ID: PAT_MRT3847_89322C.1.pep
VIMESYIPGGGLIRKKVLGGINEHINYSTSLLKLGKFFFPPKNFWRKALVAE

SEQ ID NO: 273868 - protein, 59 aa, Glycine max
  Clone ID: PAT_MRT3847_89323C.1.pep
SIFYLPITSNHLSYLFFSLFYLNRCQLSFFVQKSFVFQIGSTLVLLREKKVILFQRKNI

SEQ ID NO: 273869 - protein, 143 aa, Glycine max
  unsure (1)..(143): unsure at all Xaa locations
  Clone ID: PAT_MRT3847_89324C.1.pep
CLCRGFEQSFYSDLFAFADGIGCFSALNAKLWAIFIGICVAWARDFHXLYVESDSLINIQLLKLKYTTTHPAYGIVKMIPDFIDDGVHITWSRALREANQVVDCFANYAHSLGVQIRGLDFIPIFASNVLLADLTATAFPRDF

SEQ ID NO: 273870 - protein, 58 aa, Glycine max
  Clone ID: PAT_MRT3847_89325C.1.pep
SSSPLSMNWVQAVIRYLTAQSRVICSSVMKVQISLSSRHRMTSETSFPGMRTRPRKCG

SEQ ID NO: 273871 - protein, 93 aa, Glycine max
  Clone ID: PAT_MRT3847_89326C.1.pep
EVTARELKEATGADLTGGRVVNFVGLSGIAGGLTIAIRFEYKMKTHIAWIKQLTGTARVTWILRRAWIPHHLLTKNTDSKSSLFNMDAAIRSD

SEQ ID NO: 273872 - protein, 52 aa, Glycine max
  unsure (1)..(52): unsure at all Xaa locations
  Clone ID: PAT_MRT3847_89327C.1.pep
LDVLVLYFLTQVPMFTASGLRVRFLKVWEKSGYNTXEWVRYITKAGSYEVRC

SEQ ID NO: 273873 - protein, 178 aa, Glycine max
  Clone ID: PAT_MRT3847_89328C.1.pep
MSLVTAEIKAKAEVYHGDELCQEKSKLLLKEVGLPNGLLPLKDIEECGYERDSGFVWLKQKKSTNHKFEKIGKLVSYAPEITAYVEVGKIKKLTGVKTKELLVWITLSEIFVDDPPTGKITFKTPSGLFRTFPVSAFEIEEPVKEVKEKEEEHKEVKQVKEELKEVKPVASAVEVQEV

SEQ ID NO: 273874 - protein, 63 aa, Glycine max
  Clone ID: PAT_MRT3847_89329C.1.pep
EGISGIFFLNGTKLFFTTQAKKPWMRQMSICLPKRFFNLKLVGGRKKFRNLKAFKNTPLQPPP

SEQ ID NO: 273875 - protein, 168 aa, Glycine max
  unsure (1)..(168): unsure at all Xaa locations
  Clone ID: PAT_MRT3847_8932C.1.pep
RANGQVSSAHGVPPPLFVFGGPYGPGXIPPQGIPPLVKGGFFFRAGVVPPPLGFQRGGNGGVFNPFAWGPFGQDGPCFPWGVVEPLKGGPGPGLTLWGFPPFGKGPFPFFWLFFFCLLKFFFFFLPPYPILFFFFWDFLRNSPLFLWTCLCSFKTNNILYKKTKKNDL

SEQ ID NO: 273876 - protein, 116 aa, Glycine max
  Clone ID: PAT_MRT3847_89330C.1.pep
ALEYDPGSSLMYEMPLSASEKAEGSKGKTKSIRQCGKYEREIVKSGAKNAEAPLPMSIFLVASVLKDKSAKLLQEARGLDDVVKILNDTTGNIDAKKACSGAMKLHKKYLKKAKKP

SEQ ID NO: 273877 - protein, 99 aa, Glycine max
  Clone ID: PAT_MRT3847_89331C.1.pep
MAISNSMDFLQLFIAVFIAFSIAFRAHRKKSLSTSGAIAGFFVMALHIFVGYRFGAMLLAFFYSSSTLTKVGEDIKRIVDPEFKEGGQRNWIQVLANSG

SEQ ID NO: 273878 - protein, 40 aa, Glycine max
  Clone ID: PAT_MRT3847_89332C.1.pep
MYSSLVLCVVCQVLDSKAGRLCCLLHQYLPFEVVVLLSSM

SEQ ID NO: 273879 - protein, 137 aa, Glycine max
  Clone ID: PAT_MRT3847_89333C.1.pep
MLRFSPFLATPPTPSSLSFSSNCHVSSSAQATLQQQHEQQPLPQSSQLVALEYADLNLSYNLDLGHVRIRQHVNPLSSSFSVPAQVPDWNHAFADPTLPLMVDIGCGSGRFLMWLAKRTPKERNFLGLEIRQKIVKR

SEQ ID NO: 273880 - protein, 87 aa, Glycine max
  unsure (1)..(87): unsure at all Xaa locations
  Clone ID: PAT_MRT3847_89334C.1.pep
MVARSRTNQRITRKRAHLQPSNFQEGSDVLFKRGQCRAKGXGTPDSKDPVLHRAGGNRQYHPLLMKINPLSTDRQLYDGDNTSGVTA

SEQ ID NO: 273881 - protein, 142 aa, Glycine max
  unsure (1)..(142): unsure at all Xaa locations
  Clone ID: PAT_MRT3847_89335C.1.pep
FPDYHETPPGVHFIHCTVLNGLSNHFVIRHGRPSVSKTEQETVRELSRFTQYVQNNFSKVTAPXFSLAHGTSDGVTCPSSSRLLYEKGSSEDKSLKLYDGMYHSLIQGEPNESANLVLGDMRKWIDERVRRYGPNKNPQSNN

SEQ ID NO: 273882 - protein, 71 aa, Glycine max
  unsure (1)..(71): unsure at all Xaa locations
  Clone ID: PAT_MRT3847_89336C.1.pep
TEEFNTEPLSVLMMSVNNNTQVLINCGNNTKLLCHVRAFDRHCNMVLENVRXMWTDVPNTVIGKKKAQPFN

SEQ ID NO: 273883 - protein, 199 aa, Glycine max
  Clone ID: PAT_MRT3847_89337C.1.pep
MRGRSCSYSPSPSPPRRYSRRRHSLSPRGRYRGCDRDLPTSLLVRNLNRDCRPEDLHGPFGQFGPLKDVYTREPRGFGFVQYVDPADAADAKYHMDGRILLGREITVVFAEENRKKPAEMRAREHRRDRSHDYRRSSRTYSPSPDYSPSPRRRRHYRSISPRDRKYRDRSYSRSSYASRSRSRSRSYNRSLSRSPGYSR

SEQ ID NO: 273884 - protein, 70 aa, Glycine max
  unsure (1)..(70): unsure at all Xaa locations
  Clone ID: PAT_MRT3847_89338C.1.pep
XATYXSSEFGXRCPSRXLILSLSXXXFSXXTXLSXXXLWYFCXCXYPXLXPSAQAQQSFPFSXKLTNTHT

SEQ ID NO: 273885 - protein, 209 aa, Glycine max
  Clone ID: PAT_MRT3847_89339C.1.pep
MSKITITSPKHCADKEGLKIKNYKKIYFTFSAFFITILLLILVIWLILHPAKPQFSLKEVDIFQLNLSGPNLNSSIQLTLLSKNPNQKVGIYYDEIQLYATYKGQQITGDTPVPPFYQGQEESNLITASLVGNALPVAPSLGYELGRDQIVGRLVLNLKANGKLRWKVGTWVSGRYRFNVNCVAINAFGPSIPAGPLTSKQGAQCSTTL

SEQ ID NO: 273886 - protein, 267 aa, Glycine max
  Clone ID: PAT_MRT3847_8933C.1.pep
ARRLEGHSFEGLTLWTLNPNTSTRIGSAPAILLDCMEVLSKGVHRAMVPVDGQAENMSAGVELVESASSYQMLTQMDVLRFLHDRAGEADRELQSILSRSVQDLGADTEQIYAITDRTKLVDAIKCLKAAMLNAVPIVRASDVGQDDHKQHINGRCRKLIGTFSATDLRGCHVATLKSWLGISALAFTEEVASSPLYTESDTQINRRELVTCFAESPLSEVIEKAVTRHVHRVWVVDHEGLLVGVVSLTDVIRVTRHSMLSSDSDDL

SEQ ID NO: 273887 - protein, 46 aa, Glycine max
  Clone ID: PAT_MRT3847_89340C.1.pep
SLDTIDIVKAKIQNKEGIPLYQQTLIFAGIQFDDGRTLADYNIQKE

SEQ ID NO: 273888 - protein, 28 aa, Glycine max
  Clone ID: PAT_MRT3847_89341C.1.pep
LSRGVEHNFSETFLRCADNYEELLDIRG

SEQ ID NO: 273889 - protein, 74 aa, Glycine max
  Clone ID: PAT_MRT3847_89342C.1.pep
VVSLLLSSLVPKVVDPAVDPDAYRNVVFTVTLFAGIFQAAFGIFRLGFLVDFLSHAGLVGYMACTTIMTGLHQL

SEQ ID NO: 273890 - protein, 32 aa, Glycine max
  Clone ID: PAT_MRT3847_89343C.1.pep
RCKREKTECANLLNCIVTKGGSYRSMAYVFAY

SEQ ID NO: 273891 - protein, 122 aa, Glycine max
  Clone ID: PAT_MRT3847_89344C.1.pep
LEVNVSLSRLHMCSTFHYQFLGITQCLCNVLCKRPTLRMHSGHHQQFQKLNQPRKARPTKHPHSLRLLQHNNQQVRLLQQNNLPLRLLPQNQPPKHQRKKPPMHLQTRWKKHTTEVCPEEPR

SEQ ID NO: 273892 - protein, 50 aa, Glycine max
  Clone ID: PAT_MRT3847_89345C.1.pep
AFSYINPSNYFISYCNDIKNQANRESSVAVIHGFLFKLCITVWISNTLTL

SEQ ID NO: 273893 - protein, 42 aa, Glycine max
  Clone ID: PAT_MRT3847_89346C.1.pep
NLRSNYQHVSSKTAGALTRDVTVSKEAMWNRYTSTEVYASVT

SEQ ID NO: 273894 - protein, 108 aa, Glycine max
  Clone ID: PAT_MRT3847_89347C.1.pep
KPMTLIITIVSYLCDEEHPVSLTCSLYTGHIYEDWLHLNKLRDPPEIQGRCLCVERILLAELLKHFSPYAPSLLHPIHNRFLQKSIIPYIKTLYFKPKRMLSLALMEG

SEQ ID NO: 273895 - protein, 57 aa, Glycine max
  Clone ID: PAT_MRT3847_89348C.1.pep
MFHKLIDGLLFQIFIPENIFFQEIFLKMRFFPRELPNAVFDYIFLIFSRKNNYNLIL

SEQ ID NO: 273896 - protein, 94 aa, Glycine max
  Clone ID: PAT_MRT3847_89349C.1.pep
HALPFAILTVCSNNAPPMDSCFVYIPKRHIRYYETPPKVRGHAGLSDPLQKHKLLAARYRTLHRPTFKLCSTKTRLTDGRGSEGDEDGAAAERE

SEQ ID NO: 273897 - protein, 82 aa, Glycine max
  Clone ID: PAT_MRT3847_8934C.1.pep
YRDWLHFFSYSLSDGIDYSDNRSNSRANTCNKPRLLEGMHLLDKRSTQALPVALMIHDNSSDRTAFVPATHQSNFCPNNFPW

SEQ ID NO: 273898 - protein, 75 aa, Glycine max
  Clone ID: PAT_MRT3847_89350C.1.pep
LIKVLCNNVIYHYDLSSTYLIIDPNTIELHNSSLPADLSKNINNSLSIRHSWDELLDVLHDLFDAILIKLIITHV

SEQ ID NO: 273899 - protein, 45 aa, Glycine max
  Clone ID: PAT_MRT3847_89351C.1.pep
LKVNPRGFPRGPKIFSLSFLKFSYELLEAFFPKFSFFNFTMFVHQ

SEQ ID NO: 273900 - protein, 110 aa, Glycine max
  Clone ID: PAT_MRT3847_89352C.1.pep
RIAGKSIIHSVLTVRQKRKGHLFAKRIHPYKIHNVQNTTNKDSANLTIKTTAGKSKIHSVLTVRQRRRDIYMQNQTKGGFILIKIHKFRTLKKLQSNNNNKNGIVVIISS

SEQ ID NO: 273901 - protein, 86 aa, Glycine max
  Clone ID: PAT_MRT3847_89353C.1.pep
PHASRHFITSFPNYPLLINSSLHSSLPYVCKLSKSWDFVLAQYHHLISLILDLINFSSKNCFTNCLLNVSNYDYYCLYDTQQTLGE

SEQ ID NO: 273902 - protein, 189 aa, Glycine max
  Clone ID: PAT_MRT3847_89354C.1.pep
MDNDCFFEEEIRSLSEMETNWLMEIIAVVLRQFEVLSWKYVQNNDSFGDEQVYTNPVEDADLIVSNDFVEALDSFKRWLHTMKISLNKKDFLDLWRSIAEGLDHYISCSIVRSENWFSKMGVSQFEADMQALIFIFQPYCARPQAFFPCINEILKLLKLKKEEVKLMQAFLSSNQNGSECLHLYGISHL

SEQ ID NO: 273903 - protein, 62 aa, Glycine max
  Clone ID: PAT_MRT3847_89355C.1.pep
IKPRTCWKIDCRRSSVINYRMFIPFGRLMISKDPFLFLRNSGWGMSGRPSRFLIFAICKPAG

SEQ ID NO: 273904 - protein, 98 aa, Glycine max
  Clone ID: PAT_MRT3847_89356C.1.pep
MPGLMVCAITFNFEINLSILKIVCGTNNVYATVHRKIVEDVPRGVHVNFLKAERSLHRWALEDLQRIHAAEELAVEEGGGVEMHVLEDAGHWVCTIVP

SEQ ID NO: 273905 - protein, 126 aa, Glycine max
  Clone ID: PAT_MRT3847_89357C.1.pep
WCGCKETSQFGVANFFGGREDFHDVDSLRDRGKLDAKSWGLVHGAHALTLQKISLKLLRQPSSSSCRERNWSTYNFIHSLKRNKMAPKRAKDLVYVHSNLRLIPRNSSNYIEEETRMVGYKRKVFT

SEQ ID NO: 273906 - protein, 117 aa, Glycine max
  unsure (1)..(117): unsure at all Xaa locations
  Clone ID: PAT_MRT3847_89358C.1.pep
LDGLIHMLPACVVMKAIVLGKYRQVLTFLVXAKQPRMLLTENEIFKRQPVPVCVAQAVNDGGQSVRQXSIAAFQTHSTRVLRAXGTGRXLPTKKSIPQSPNGEGFVILKDNPEYRKE

SEQ ID NO: 273907 - protein, 65 aa, Glycine max
  Clone ID: PAT_MRT3847_89359C.1.pep
EESSNCFLLLGGRLMKGKKITLCAGHRLGESFSCTLLVYSLNTLLFEIGLRARYKQLLNLYKKLA

SEQ ID NO: 273908 - protein, 338 aa, Glycine max
  Clone ID: PAT_MRT3847_8935C.1.pep
FGVGIISYTVPVYIAEISPPNLRGGLVSVNQLSVTIGIMLAYLLGIFVEWRILAIIGILPCTILIPGLFFIPESPRWLAKMGMTEEFETSLQVLRGFETDISVEVNEIKRAVASTNRRTTVRFADLKQRRYWLPLMIGIGLLILQQLSGINGVLFYSSTIFRNAGISSSDAATFGVGAVQVLATSLTLWLADKSGRRLLLIVSATGMSFSLLVVAITFYIKASISETSSLYGILSTLSLVGVVAMVIAFSLGMGAMPWIIMSEILPINIKGLAGSVATLANWLFSWLVTLTANMLLDWSSGGTFTIYAVVCALTVVFVTIWVPETKGKTIEEIQWSFR

SEQ ID NO: 273909 - protein, 170 aa, Glycine max
  Clone ID: PAT_MRT3847_89360C.1.pep
MALVSGRSSALNPNAPMFIPAALRQVEDFSPQWWDLVKSSTWFRDYWLSQHKEEEFEEVANDSTNDDMENMLSETFDLGMEEDFNVLENEFEQLVMFSEALDHSVQDDPNTGKGSPQSLNKDVKAFLINLTPKSPRERGPKSPSGLAKHLEKPAQHVNVKCASLRIHQPR

SEQ ID NO: 273910 - protein, 86 aa, Glycine max
  Clone ID: PAT_MRT3847_89361C.1.pep
MALASGRSSALNPNAPLFIPAALRQVEDFSPQWRDLVKSSTWFRDYWLSQHKEEEFEVANDSSNDDIENMLSETSDLGMEEDFNVL

SEQ ID NO: 273911 - protein, 43 aa, Glycine max
  Clone ID: PAT_MRT3847_89362C.1.pep
RIFKLGTYTLIYFLLNYKYFNCEVLSNQTDFYILFQQAHLLKE

SEQ ID NO: 273912 - protein, 73 aa, Glycine max
  Clone ID: PAT_MRT3847_89363C.1.pep
TQLNPEKVNRVILLCPAFDLPQRWIDSMGQDKINYWKSNGSLPFRDFNTGGIANVHYHFFDDFSNHPSFPPIT

SEQ ID NO: 273913 - protein, 107 aa, Glycine max
  unsure (1)..(107): unsure at all Xaa locations
  Clone ID: PAT_MRT3847_89364C.1.pep
KXXCXCXXXMXXXXXXXPXXVXCHPXXVXXXXXEXXXPNXXXCXRXFXSXMAXLXAXXEXXXXXXXXXNTXAFTXPXCXXXQXHXTSGISTTAXSSXNXELTYXXAR

SEQ ID NO: 273914 - protein, 72 aa, Glycine max
  Clone ID: PAT_MRT3847_89365C.1.pep
QVFYPIKGPRWEILIFGDNCCVHHQCGLIFLASSNNTLYLQQIIIPSEQLSFIHCLYFDKTMPIYHMHVCSF

SEQ ID NO: 273915 - protein, 70 aa, Glycine max
  Clone ID: PAT_MRT3847_89366C.1.pep
APPYYWSQPWKMVAPHRPPATHRGLAKWLVHLARLAGSLVCVHYAYCNTCWFAHVVSPFRHDAFLVRVAC

SEQ ID NO: 273916 - protein, 80 aa, Glycine max
  Clone ID: PAT_MRT3847_89367C.1.pep
TLNHNGLMTQWGVTKNKGSSPQHILLKKKLKKTPLKCIQKFIFGQWKKLSKFLFKNLKPLTIPRGGNGPTTRFFYDQIPF

SEQ ID NO: 273917 - protein, 86 aa, Glycine max
  Clone ID: PAT_MRT3847_89368C.1.pep
RLIVSCDLSHVPYNFCYWCMFSSQPACDGPAQGSHLVLSNRSGRHACPNDPCLVIVMCIDNFLETFLDIILIMQKYGYPPLPISAN

SEQ ID NO: 273918 - protein, 246 aa, Glycine max
  unsure (1)..(246): unsure at all Xaa locations
  Clone ID: PAT_MRT3847_89369C.1.pep
MKASSTSSVVVAVAMGEEEPEVLESESNVVNANGNSSNSNEEYSFPVLRFDVSPHRTYHFHRQFITPSNPNNFFKAVKWSPDGSCFLTSSDDNTLRLFAPPGTESDAPVAASGHGDGNHESSLFVADSFAANVVMHEGESIHDFCWYPYMSSSDLVTNVFATTTRDHPIHLWDATSGQLRCTYRAYDAMDEITAAFSIAFNPAGTKIFAGYNXCIRLFDLHRPGRDFELYSTVKDKKKANRYYICY

SEQ ID NO: 273919 - protein, 65 aa, Glycine max
  Clone ID: PAT_MRT3847_8936C.1.pep
SSADIYMDIYIYRYILIYLYMSICINAHTELNIWLEANVLLTTSTTLWMRYPNNSMHLRGISLDE

SEQ ID NO: 273920 - protein, 60 aa, Glycine max
  Clone ID: PAT_MRT3847_89370C.1.pep
GVREGVKRRTNELVLHRVPLQAIAPWSDVTGFSQNDSLKRVIAIPYTENFTQLMDYFNAC

SEQ ID NO: 273921 - protein, 111 aa, Glycine max
  unsure (1)..(111): unsure at all Xaa locations
  Clone ID: PAT_MRT3847_89371C.1.pep
HILQTFSKFPPHIXRLFGMFAGHRTLPNTTNXSIIKKNFDLYDWPILXYFYTNITIIKQEMLLKANFLIHNTYFSYISIEDFLHAQLLAIYIFYTMKNTFLLHQNYSFLIP

SEQ ID NO: 273922 - protein, 51 aa, Glycine max
  Clone ID: PAT_MRT3847_89372C.1.pep
KTRILRVKSPSFSHDKLRPMLRVIRASSLCTLSTHAVLISQGHGDERNYSD

SEQ ID NO: 273923 - protein, 144 aa, Glycine max
  unsure (1)..(144): unsure at all Xaa locations
  Clone ID: PAT_MRT3847_89373C.1.pep
MALTLRSSISLVNQKETKLPKAKDEVPTKVFYFGKTNPSFRLRAKSSMQQTHVTRNNSFNSEVTMINEKREKVHAPSVAHSHNDSMRVPVFVMLPLDTVTMGGTLNKPRAMNASLMDLESAXVEGVMVDAWRGXAEKDVPLKYN

SEQ ID NO: 273924 - protein, 60 aa, Glycine max
  Clone ID: PAT_MRT3847_89374C.1.pep
KRISSGFSHSSSLLEKTFVLGSYELIMYSPSPHLNERVFSHPYGINVVPHLSLLNGQLQW

SEQ ID NO: 273925 - protein, 34 aa, Glycine max
  Clone ID: PAT_MRT3847_89375C.1.pep
RLLQPPGEALYSNAVHLSYGPLQASEVRVIACVP

SEQ ID NO: 273926 - protein, 200 aa, Glycine max
  Clone ID: PAT_MRT3847_89376C.1.pep
MFSFSSSFSSSSSSHSSSVIKWNSLAQFLFLVFFLFFASRNDAVSDKSTLLRLKASFSDPAGVLSTWTSAGAADSGHCSFSGVLCDLNSRVVAVNVTGAGGKNRTSHPCSNFSQFPLYGFGIRRTCSGSKGSLFGNVSSLSLIAELTELRVLSLPFNALEGEIPEAIWGMENLEVLDLEGILISGLPSSRVDGLKNLRVL

SEQ ID NO: 273927 - protein, 57 aa, Glycine max
  Clone ID: PAT_MRT3847_89377C.1.pep
SWLYVSFNDLVQQGCFQLVVHCNVWIILLELDKRHALSKCLCAQLVKVYELSHHCVL

SEQ ID NO: 273928 - protein, 44 aa, Glycine max
  Clone ID: PAT_MRT3847_89378C.1.pep
RRARADLRFDEKYKTKKGTHHDFRCWIHTPNMHLTLKFFITASH

SEQ ID NO: 273929 - protein, 88 aa, Glycine max
  Clone ID: PAT_MRT3847_89379C.1.pep
HPCQFEFEFSPAWSLLLGRGRPFFFFLLVTHFLVTSTCVCSPMSYTIHSSLNNRASNGPNSYGFYVGEPHMLCHGHYVMHHSSYLYLP

SEQ ID NO: 273930 - protein, 229 aa, Glycine max
  Clone ID: PAT_MRT3847_8937C.1.pep
MPEEVHHGEEEVETFAFQAEIAQLMSLIINTFYSNKEIFLRELISNASDALDKIRYESLTDPSKLDSGKELKIDIIPNPQERTLTLVDTGIGMTKADLINNLGTIAKSGTKAFMEALQAGADISMIGQFGVGFYSAYLVAEKVVVITKHNDDEQYAWESSAGGSFTVRADHGEPIGRGTKVILHLKEDQTEYLEERRVKEVVKKHSQFIGYPITLYLEKEREKEISDDE

SEQ ID NO: 273931 - protein, 64 aa, Glycine max
  Clone ID: PAT_MRT3847_89380C.1.pep
HTRGENNQQGVFRSKPRTRKQGELSNSCKSRKRNTTEAIGRNPKDQTLNPIVTQRNYHLKKRTA

SEQ ID NO: 273932 - protein, 64 aa, Glycine max
  Clone ID: PAT_MRT3847_89381C.1.pep
LRWNGWKATTLHSVRKAPCLETRSYISLSLFQPKIRLAPLLNCGKTLAVLKEGSTSWPHIWSWA

SEQ ID NO: 273933 - protein, 51 aa, Glycine max
  Clone ID: PAT_MRT3847_89382C.1.pep
MHVTMGRRSTHQRICSLQSMTSFFNQFKWRRYFMDAVLATKEIRRPLFARP

SEQ ID NO: 273934 - protein, 88 aa, Glycine max
  Clone ID: PAT_MRT3847_89383C.1.pep
NETYLERIRCTMDNKRTFYLHIAPPTVRINKTLFEEQSNYQKDMHYLNTKQKEQVITTNELTSKDCVEERTWFQTSYTLHAILPEQGA

SEQ ID NO: 273935 - protein, 52 aa, Glycine max
  Clone ID: PAT_MRT3847_89384C.1.pep
ICSKLQLVWHGFQLIFKKEKEKKIASHCVETFFPPYLIITLPLVGLGEICIC

SEQ ID NO: 273936 - protein, 227 aa, Glycine max
  unsure (1)..(227): unsure at all Xaa locations
  Clone ID: PAT_MRT3847_89385C.1.pep
MSLLKSLTSNPSAFNFKPTQSSMAQTSPYRVLLRTACSSSRRTNSIDLFYSWGISSVKVVPFSNISNYCTYSRDNICASKRRSRGPVMAGKKASEGIKQEDGKYKHTVDLPKTAFGMRANSSVREPEIQKIWEENQVFKKVVEKNSGENFILHDGPPYANGDLHIGHALNKILKDIINRYKVLXNYQVNFIPGWDCHGLPIDLKVLQSLDXKCXNELTXLKLRGKGC

SEQ ID NO: 273937 - protein, 67 aa, Glycine max
  Clone ID: PAT_MRT3847_89386C.1.pep
DDFSNEIVVSFSKLANIFVEASTYKHTICSTEIFRIIMICWGVLEKKNWTCEKVVQNFCKFFFFNLF

SEQ ID NO: 273938 - protein, 120 aa, Glycine max
  Clone ID: PAT_MRT3847_89387C.1.pep
SPWCGLVGPSFFLWEVGGLWHWLLLFPKGGLGFLIGLSFWPGARLFFFYPPSVGVWPPFGPLVFPPLWAFFLLPPPWGLFLPILFFPPKASAFFKHKFFFPPFPQWGFFFLLCTSLFAWV

SEQ ID NO: 273939 - protein, 60 aa, Glycine max
  unsure (1)..(60): unsure at all Xaa locations
  Clone ID: PAT_MRT3847_89388C.1.pep
SFTVNAEGVHKNAPAECHNTXLMTRMTYTLDEIDGPXEVTTDGTETFEEIDGIDYAVVAV

SEQ ID NO: 273940 - protein, 149 aa, Glycine max
  Clone ID: PAT_MRT3847_89389C.1.pep
AANYLILGKLINATGGKYSFITPRSFSILFIFSDFCCLVVQGAGGGIAGTANTVDGANTGAYIMTAGVILQLVITVLFVVLLADFIRRYRSDRPAASQIHPLPNKGFFARDYARRGSAQTAASDPYPMQAIESGNNTPRKVENGFPASQ

SEQ ID NO: 273941 - protein, 162 aa, Glycine max
  unsure (1)..(162): unsure at all Xaa locations
  Clone ID: PAT_MRT3847_8938C.1.pep
FVTMNFCGPHSNFIPHSPLSYSTSYSPISPLKEQQQVKCADPSVADLGKTNVGFGPTNKSILKNPTTLFFKEQHXKFMKSNENLVDSVKKATETTAARKEALKTVAFGLTTRLGDTVLANKSVPSSSRLGKTVIFSMKRNLCIKLYWLNKQXIADSEGRSKN

SEQ ID NO: 273942 - protein, 105 aa, Glycine max
  unsure (1)..(105): unsure at all Xaa locations
  Clone ID: PAT_MRT3847_89390C.1.pep
RKLYDFSDSPWHFRIFNARVKQYPLSSFVLNCKKLDFPASGPPFGQRIGSGHIVPRSYGAPYKQHSFPILSRVKAKEGXPLPPLCPLVIKGRLLFIDVGVMNHIG

SEQ ID NO: 273943 - protein, 415 aa, Glycine max
  Clone ID: PAT_MRT3847_89391C.1.pep
MLNFNRIRSQPRTTRSMSLGGMDYVDPKRKGNFVGKVFLAAALTALCIIMIKRSPSLNPPSPFSIHEPGVTHVLVTGGAGYIGSHATLRLLRENYRVTIVDNLSRGNLGAVRVLQDLFPEPGRLQFIYADLGDKESVNKIFSENKFDAVMHFAAVAYVGESTLDPLKYYHNITSNTLLVLGPMAKYGVKTLIYSSTCATYGEPEKMPIIETTEQKPINPYGKAKKMAEDIILDFSKNSKMAVMILRYFNVIGSDPEGRLGEAPRPELREHGRISGACFDAARGITTGLKVRGTDYKTPDGTCIRDYIDVTDLVDAHVKALEKAQPAKVGIYNVGTGKGRSVKEFVNACKKATGVDIKVDYLPRRPGDYAEVYSDPSKINRELNWTAQYTDLEKSLQVAWKWQKAHRNGYGISSAI

SEQ ID NO: 273944 - protein, 72 aa, Glycine max
  Clone ID: PAT_MRT3847_89392C.1.pep
KYDFSQLERVNNSCLKPKPNDKGKKYPEAYSDDLKFDLSFKESIKRYLGVIHHPYLSIMNFMSLACLHLLIL

SEQ ID NO: 273945 - protein, 423 aa, Glycine max
  Clone ID: PAT_MRT3847_89393C.1.pep
MATNSSNGATKQPPMPSPLRFSKFFQSNMRILVTGGAGFIGSHLVDKLMENEKNEVIVADNFFTGSKDNLKKWIGHPRFELIRHDVTEQLLIEVDQIYHLACPASPIFYKYPVRLELSRGNLGANRVLQELFPEPGRLQFIYADLGDKESVNKIFLENKFDAVMHFAAVAYVGESTLDPLKYYHNITSNTLLVLESMAKYGVKTLIYSSTCATYGEPEKMPIIEITEQKPINPYGKAKKMAEDIIFDFSKNSKMAVMRLRYFNVIGSDPEGILGEAPRPELREHGRISGACFDAARGITTGLKVRGTDYKTPDGTCIRDYIDAHVKALEKAQPAKVGIYNVGTGKGRSVKEFVNACKKATGVDIKVDYLPRRPGDYAEVYSDPSKINRELNWTAQYTDLEKSLQVAWKWQKSHRNGYGILSAI

SEQ ID NO: 273946 - protein, 89 aa, Glycine max
  Clone ID: PAT_MRT3847_89394C.1.pep
MLNFNRIRSQPRTTRSMSLGGMDYVDPKRKGNFVGKVFLAAALTALCIIMIKRSPSLNPPSPFSIHEPGVTHVLVTGGAGYIGSHATLR

SEQ ID NO: 273947 - protein, 63 aa, Glycine max
  Clone ID: PAT_MRT3847_89395C.1.pep
KPCARKLIRTATTEALGRNRTQGYMASARASEIRPNVASVPCTHAQRQSQSTTEGGKTFCARV

SEQ ID NO: 273948 - protein, 93 aa, Glycine max
  unsure (1)..(93): unsure at all Xaa locations
  Clone ID: PAT_MRT3847_89396C.1.pep
DQRLSGYNYMKNGLLRDSSLDYSNVHYXRTVPNSWKMKIKIVSGCSXAIQYPDIHATPSIIHRDLNSFYILLEVSWTRRRFNFELSPYLPSLQ

SEQ ID NO: 273949 - protein, 155 aa, Glycine max
  Clone ID: PAT_MRT3847_89397C.1.pep
NSARELLLDRAETLLQLIKIRYPNLPQTFLDATKVQYGKDIGHSILEAYSRVLGNLAFSILSRIGDILQEDALSNPNTPISASCSPGINLSEAWVVGSRIRHSLIDKMNEADGQYCASSCGSTSDIELSSTQANATSSVPPTPSRGRLWCIGRGL

SEQ ID NO: 273950 - protein, 68 aa, Glycine max
  Clone ID: PAT_MRT3847_89398C.1.pep
LLRFMRDSEMIPVVHGTYLLFKCDIIYMGNTLHNDLINGLYFFLFFFGNLCILVVGEVFLSNFRKCKM

SEQ ID NO: 273951 - protein, 76 aa, Glycine max
  Clone ID: PAT_MRT3847_89399C.1.pep
KKKLTLNVSIYTYMTTNHGFVINILVVFALIIDVSLLSVSEILILEEPWKTCKGCDCSTCQKCKIVQTRTHSKKNP

SEQ ID NO: 273952 - protein, 44 aa, Glycine max
  Clone ID: PAT_MRT3847_8939C.1.pep
TASDQSQGGGAREPLSLSEGKDLNHDPNNHHRRLLVRAAPYRDA

SEQ ID NO: 273953 - protein, 66 aa, Glycine max
  Clone ID: PAT_MRT3847_893C.1.pep
KLLMQLLSQYMSPVHSWSQWHQGRIGFFCYSSRSLCTTSSIFLTSKLHIKPIYIHKCLTEKASRII

SEQ ID NO: 273954 - protein, 59 aa, Glycine max
  Clone ID: PAT_MRT3847_89400C.1.pep
TNSIAYTHQFTKGLTIFNHTIYHLYIYTHKHLYLIFDYSTYTNMTMYITLITFAFILII

SEQ ID NO: 273955 - protein, 61 aa, Glycine max
  Clone ID: PAT_MRT3847_89401C.1.pep
ATRCPWDSQSLQLGGVLTSRLTDTYFTTGRFQLYSHKGDSHVMLCPLGWPSQIALRILSYN

SEQ ID NO: 273956 - protein, 57 aa, Glycine max
  Clone ID: PAT_MRT3847_89402C.1.pep
NPGSEVMKKLNKAKFLDELGQKWIYLTVEEAVGACNFMLHTYKPNTMKDESEGWNNA

SEQ ID NO: 273957 - protein, 71 aa, Glycine max
  unsure (1)..(71): unsure at all Xaa locations
  Clone ID: PAT_MRT3847_89403C.1.pep
SHEQRHLXXNQVVCLHCYSCYSSYXXXLFDSFLPGGCXTXKKXXXKKKPXXAEGGGTIFIXXRXXXXKRPE

SEQ ID NO: 273958 - protein, 414 aa, Glycine max
  Clone ID: PAT_MRT3847_89404C.1.pep
QTHEWRCESAVLGCCCIFFLLVTRYFSKRQPKFFWVSAMAPLTSVILGSLLVYVTHAEKHGVQKGLNPPSLTNLVFVTPYMTTAVKTGIVVGIISLAEGIAVGRSFAMYKNYNIDGNKEMIAIGTMNVVGSFTSCYLTTGPFSRSAVNYNAGCKTAASNIIMSIAVMLTLLFLTPLFHYTPLVVLSAIIVSAMLGLIDYEAAIHLFKVDKFDFVVCMSAYVGVVFGSVEIGLVIAIAISVLRVLLFIARPRTFVLGNIPNSVIYRNVEHYPNAKHVPGMLILEIDAPIYFANASYLRERITRWIDEDEERIKATGETSLQYVIIDMSAVANIDTSGISMLEEVKKIIERRELQLVLVNPVSEVMKKLNKSKFQNHLGKKWIYLTVEEAVGACNFNLRASKTNPKKDETEGWNNV

SEQ ID NO: 273959 - protein, 397 aa, Glycine max
  unsure (1)..(397): unsure at all Xaa locations
  Clone ID: PAT_MRT3847_89405C.1.pep
FYLRDIVFSQTHEWRWESAVLGCCFIFFLLVTRYFSKRQPKFFWVSAMAPLTSVILGSLLVYVTHAEKHGVQVIGNLKKGLNPPSATDLVFVSPYMGTAIKTGFVTGIIALAEGIAVGRSFAMFKNYHIDGNKEMIAIGTMNIFGSFTSCYLTTGPFSRSAVNYNAGCKTAASNIIMAIAVMLTLLFLTPLFHYTPLVVLSAIIVSAMLGLIDYEAAIHLFKVDKFDFVVCMSAYVGVVFGSVEIGLVIAIAISVLRVLLFIARPDXVLGNIPNSVIYRNVEHYPNAKHVPGMLILEIDAPIYFANASYLRERIXRWIDEEEERIKAGMFDMSAXCMLGEIPRSEVMKKLNKSKFLDELGQKWIYLTVEEAVGACNFMLHSYKPNPMKDESEGWNNA

SEQ ID NO: 273960 - protein, 98 aa, Glycine max
  Clone ID: PAT_MRT3847_89406C.1.pep
HSLNFSPIPISISSLCTSFASYFSTSQNGTHATSHTSLILSLLTPSLMLIKIDMIKICFSTTPFLLIETSLYSVLYVHSLQRVINYISHMQYDIISFR

SEQ ID NO: 273961 - protein, 41 aa, Glycine max
  Clone ID: PAT_MRT3847_89407C.1.pep
ARSSLFQPITPNSNGPLNNRVASSVFSAIWTLAPGTDFVFS

SEQ ID NO: 273962 - protein, 84 aa, Glycine max
  Clone ID: PAT_MRT3847_89408C.1.pep
FFYLGNSILFLRGFLAIEDAERNLIIRQWRSKPYLLSVTSGFPNTRFRTYKPGLIIFELPRYQKTCLPGVDAECTGSAGALFGE

SEQ ID NO: 273963 - protein, 56 aa, Glycine max
  Clone ID: PAT_MRT3847_89409C.1.pep
HISTITFLNHHNSNFFFSNNFISFNTIHFTHNIKFHNTLFFIFPTIIKTNFSLIFL

SEQ ID NO: 273964 - protein, 52 aa, Glycine max
  Clone ID: PAT_MRT3847_8940C.1.pep
SQINYLEARKCILLKTCELKYTTFGIYLINSRDISPFHTLSRSRVYPTPVSL

SEQ ID NO: 273965 - protein, 107 aa, Glycine max
  Clone ID: PAT_MRT3847_89410C.1.pep
EEEQIRKMASKVPKKANLLDHHSIKHILDESVSEVVTSRGYVEDVRLSNARLFIGAIIIVIALFAQFYKKKFPENRDFLIACIALYPVPTFYFIYLCLVVLILVCMR

SEQ ID NO: 273966 - protein, 229 aa, Glycine max
  unsure (1)..(229): unsure at all Xaa locations
  Clone ID: PAT_MRT3847_89411C.1.pep
FPLTPHAQRQIPWFLRRWVTPWEPPGHNVVLTVGALHQADSAALRVAASAWHNELATLPKPLLVVNVGGPTGNCPYDVDLVKKLVVMLQNVLWSCGSIRISSXYPFVLQISKILVKEFATNPKVQIWDGEGSNPHMGHLAWADAFVITADSVSMLSEACSTGKPVYVIGAERCTWKFADFQNSLQKQGVARPFTGNENMTAESWSYPPLNDTAEAASQVVAAPAQRRWT

SEQ ID NO: 273967 - protein, 87 aa, Glycine max
  Clone ID: PAT_MRT3847_89412C.1.pep
PRLMPKSSFHSSNRSHKFLSSLVTFPSINYTQALLERRHNLYQDIRGCIPRKYQPVQKQSPQKAHPLEGNNTAQSYRPSKKKLAKLL

SEQ ID NO: 273968 - protein, 78 aa, Glycine max
  unsure (1)..(78): unsure at all Xaa locations
  Clone ID: PAT_MRT3847_89413C.1.pep
EKLFKYDIDGMLVHICSEYFPEKEDQDKPKXLMPDXRHRIDPQYSVVQAHMESNLFKSCLDDDAPPKGSMPCSYNFIN

SEQ ID NO: 273969 - protein, 34 aa, Glycine max
  Clone ID: PAT_MRT3847_89414C.1.pep
IALSHHGNGGIGRRTMRSTLNFRDAFGIIDHGSD

SEQ ID NO: 273970 - protein, 58 aa, Glycine max
  Clone ID: PAT_MRT3847_89415C.1.pep
GASSRQRQRVVQDKGSWETRGTTLNLYQPSNYLGKKGEFSWFIHLVQGELPIPKGKGA

SEQ ID NO: 273971 - protein, 57 aa, Glycine max
  Clone ID: PAT_MRT3847_89416C.1.pep
AYTSCFCGHVPPLTQMISPCDRAPFRNSMHPCITSEVCIKCRSHPIWANRSPYFAVF

SEQ ID NO: 273972 - protein, 114 aa, Glycine max
  unsure (1)..(114): unsure at all Xaa locations
  Clone ID: PAT_MRT3847_89417C.1.pep
PIGYSSGGHSYLLSCDFAQXDGSTTKHVMSMMAEMINSLCGGDQKLMRERXHTCCLACCSRMAISKKDVWRCVCGIPFWITAHMFFAIAFLMSRLFDLALKNYRPQVISSYDCF

SEQ ID NO: 273973 - protein, 274 aa, Glycine max
  unsure (1)..(274): unsure at all Xaa locations
  Clone ID: PAT_MRT3847_89418C.1.pep
VLSGLNLGVSLEIDDGELFFSKHEVVSSPNMGKHPCSGSMDSFFDELIKDTHACTHTHTCNPPGPDFSHTHTCYHVHTKIVPAPEEDHVATDDTAESAEKKSSSSKKRSLGNKEAVRKYREKKKARAASLEDEVVKLRALNQHLMKKLKGQAALEAEIARLKCLLVDIRGRIEGEIGSFPYRXAGSYVMNPCNLPCDDRVDCLHPDGRIGETAALNGEEFDGCEFENLQCLASQNLGLKDLRACGVGVGHTGSNVNSSALSKKRKGGSRAATAG

SEQ ID NO: 273974 - protein, 61 aa, Glycine max
  Clone ID: PAT_MRT3847_89419C.1.pep
FLFFIFFFFFFFFFFTIQANFIISLTRFYITQNDIGVSPVHITKYWKMGCVSSFLSSVIQQ

SEQ ID NO: 273975 - protein, 60 aa, Glycine max
  Clone ID: PAT_MRT3847_8941C.1.pep
RFIVPCYLYRNYYELRKQQMMLSFILHCSISVADNAKSKLLFRILSDLLLRKYVSYMSYI

SEQ ID NO: 273976 - protein, 110 aa, Glycine max
  unsure (1)..(110): unsure at all Xaa locations
  Clone ID: PAT_MRT3847_89420C.1.pep
VPGHSQYQGWSQERQEISGCTLYDDYKGHGWRRLVVFLNYWCGWLLHNGGYRNRLCGHRHAYLPAPVYTLADGNDMTDGVRDLRSAYHRCISWTLLSXYCKYYLLDIKLI

SEQ ID NO: 273977 - protein, 272 aa, Glycine max
  Clone ID: PAT_MRT3847_89421C.1.pep
MDDGELDFSNHEVFSSPNMGELPSSGSMDSFFDELLKDTHACTHTHTCNPPGPDFSHTHTCYHVHTKIVPAPEEDHVATDDTAESAEKKSSSSKKRSLGNKEAVRKYREKKKARAASLEDEVVKLRALNQHLMKKLKGQAALEAEIARLKCLLVDIRGRIEGEIGSFPYQKPTPNANPPVANLPGSYVMNPCNLQCDDRVYCHHPDGRIGETAALNGEEFDGCEFENLQCLASQNLGLKDLRACGVGVGHTGSNVNSSALSKKRKGGTPFMP

SEQ ID NO: 273978 - protein, 376 aa, Glycine max
  Clone ID: PAT_MRT3847_89422C.1.pep
NSAPGHIGEEQLPEPCTGFKSPTSTAQKKGQCAGAAHHNRANEPTKASSKPVVLVTNGDGIDPRVRTLLVEALLCDALLDVHVCAPETDRSVCGHSVTTGETLAVCSVQVGGANAYQVSGTPADCVSLALSGALFSWSKPVLVISGLNKGTTCGYDTLYSGAVAGAREALICGVPSLCISLNWEKNVSCESDLKDAVTVCLPLIHAAIRDIQKGIFPKNCFLNIGIPSCPLTNKGVKVTRQSPQRSSLSWQAVSTNKNPSAGHYMSNQQSLGIMLAQLGRDASAAAAARRLNSNRKNVEVESVGVAGKFSSQQTIKKYFRMELTEKEQQDIEEDLDSRELEEGFVTVTPLSLYANVHMEIQSSVSSWLAIALSGDQ

SEQ ID NO: 273979 - protein, 45 aa, Glycine max
  Clone ID: PAT_MRT3847_89423C.1.pep
VAQPRELNALLSRRREIEYLGIRSGQQMSQEMSAEHEPNAERTYA

SEQ ID NO: 273980 - protein, 31 aa, Glycine max
  Clone ID: PAT_MRT3847_89424C.1.pep
TKYKGHYASIVKSTTILTICTPSPGTCLSNI

SEQ ID NO: 273981 - protein, 165 aa, Glycine max
  unsure (1)..(165): unsure at all Xaa locations
  Clone ID: PAT_MRT3847_89425C.1.pep
ARIFSSRFLDEKILVSFALKNFINDPIAQEALRAYAKSIYRIMRKLKKYSTVAADIMKTLLNLNSVDVTELWSCKEVVELDLSSNGEVLCLLYMNGQVLSXHSDGTIKVWDARKRIPRVIQETHEHTKAVTSLCSSDDRLYSGSLDKTIRVWTVKPDEIKCIDVH

SEQ ID NO: 273982 - protein, 62 aa, Glycine max
  Clone ID: PAT_MRT3847_89426C.1.pep
RLLSSERFHWLKEQLLPNHLLLLSVRSWIRDAAALRTDPAPGNWANPWFGPEGWTHIERTGL

SEQ ID NO: 273983 - protein, 88 aa, Glycine max
  unsure (1)..(88): unsure at all Xaa locations
  Clone ID: PAT_MRT3847_89427C.1.pep
LGMPRXFAIASAMAPAPMLILSETSSWTEREVRMWRLERRPARXXXXXXXXXEEEAEGGTEVGGVSGREVRWRSAEEWWRGESAAEHG

SEQ ID NO: 273984 - protein, 37 aa, Glycine max
  Clone ID: PAT_MRT3847_89428C.1.pep
DPGREPEGEQVSPKGSRFKVWGNQGKSCSRGKFVTGS

SEQ ID NO: 273985 - protein, 87 aa, Glycine max
  unsure (1)..(87): unsure at all Xaa locations
  Clone ID: PAT_MRT3847_89429C.1.pep
QGKFFAEKIKIGGGGGVQKWFGIMGRDPLKKKPVXKVVRRIMVXEGARKIRYRAKGFVXMAKGFVGEGGFFFADFNSLFGGLGGGAC

SEQ ID NO: 273986 - protein, 131 aa, Glycine max
  unsure (1)..(131): unsure at all Xaa locations
  Clone ID: PAT_MRT3847_8942C.1.pep
DVFSQLSTSNGAPEFGTEDIGEKQEILYNVAELTEEGQQIVIAHGGEGGLGNVSCSKDSRKPVTVQDPDSDLSSLHAGSPASETLLILKLKSIADVSFVGXNAGKSTLLGAISRAKPAVGDYAFTTLRPNL

SEQ ID NO: 273987 - protein, 94 aa, Glycine max
  Clone ID: PAT_MRT3847_89430C.1.pep
TRTCCCCCNNFSVALQILKKKGDMEVPICHSMLLVHFFSVSVKLLISLLIFNDFPLVYEFIVVVIYDMIAVCVRVRDIQNWYAPAMHTYMKCTQ

SEQ ID NO: 273988 - protein, 76 aa, Glycine max
  Clone ID: PAT_MRT3847_89431C.1.pep
YKRIKIHFIKYFKLHKKILNYFHTFNINIYFSIFNSILCLYTQNKNFYYSLRLRWPNKRQGQGPRWTPELADGKTP

SEQ ID NO: 273989 - protein, 146 aa, Glycine max
  unsure (1)..(146): unsure at all Xaa locations
  Clone ID: PAT_MRT3847_89432C.1.pep
RRTRPRALGFQLSLSTFSICTKFSSRGVFWISGFSTINLGYLNXVWEIRALNRKPAAEEATMMLEKIAKQVQPIMRKHKWRIKLLSEMCPSNPRLLGLNVGAGIHVKLRLLTPNKDLDFYPFDQVLDTMLHELCHNAHGPHNAIFY

SEQ ID NO: 273990 - protein, 53 aa, Glycine max
  Clone ID: PAT_MRT3847_89433C.1.pep
KSPFPEKPKPQVRFKVDVSKDLSVAHELATRKVPLGQHFLHVETLKHPLSLRV

SEQ ID NO: 273991 - protein, 54 aa, Glycine max
  Clone ID: PAT_MRT3847_89434C.1.pep
FLNCAIDLYGKIFGFIPFGAGLRLCPGMNVALAALDFILDNTLYPFDWVFPQGI

SEQ ID NO: 273992 - protein, 92 aa, Glycine max
  Clone ID: PAT_MRT3847_89435C.1.pep
MEENAWWMLPYGLASFRISQAPLVDCHVANPEKTRTPHCKAVTLTSFGIPESSTHLVCVFSFLHLMKCKALKGGSSPVKWPCVKSKMLGKVR

SEQ ID NO: 273993 - protein, 67 aa, Glycine max
  Clone ID: PAT_MRT3847_89436C.1.pep
DAWADAWADAWADAWVVINICGGDGRRLRRQLEVEEIGDTFNRCHPHSLPPPGMTITTTPALHRTMT

SEQ ID NO: 273994 - protein, 187 aa, Glycine max
  Clone ID: PAT_MRT3847_89437C.1.pep
AAPASVRKHHWLVEQKLLQLVHAFHFLVMVQLYHIAWGEPCECMTTAKSLAESIIIHEAYMLPMLRQCFVAPVKQVLSFKLNSCLIFMSVITIDISRTEQRLGCGQVVSSIKARREMVDLRIEKQLDDCIAFLLRVLSLQLNVGHFPHLADLVTRIDYKYFYMSVSKNIMTSSGCGSVTSRLGKAPG

SEQ ID NO: 273995 - protein, 115 aa, Glycine max
  unsure (1)..(115): unsure at all Xaa locations
  Clone ID: PAT_MRT3847_89438C.1.pep
LNLVTSFATKSENQHIYKVGDDGFIGDEYVVLDFDINSGAXSAPVIDNWHTXGDTVXLFSDPWCTKVFKANGFXLIIEHLXQNYLXIKFAQSTENSXINXNVKPNMKKKXVELCS

SEQ ID NO: 273996 - protein, 105 aa, Glycine max
  unsure (1)..(105): unsure at all Xaa locations
  Clone ID: PAT_MRT3847_89439C.1.pep
AAEQKRGAFITXGDNFFTEKTMITCRDLDKLVDYYTIATQLXKVMSHYMRRHLDTXMINKLPSIVTAGTKCXRNVSNIQISGLYDDGRYKFWTKHEENLALTEEE

SEQ ID NO: 273997 - protein, 100 aa, Glycine max
  Clone ID: PAT_MRT3847_8943C.1.pep
APGDFFFPIKVRGPKNGFLLGGFEGANQRWWHFCFLFGDPHQFSDFFFILGISPDFVKGGYTFRPAFFVPQANAGFSPNLGSFAGFGNRVSLPWFVCLIP

SEQ ID NO: 273998 - protein, 54 aa, Glycine max
  Clone ID: PAT_MRT3847_89440C.1.pep
TDHPIIDIRNDHKIIENHTHHAYNIDHLSHNKNFEDFQLMSLQFVCSHSFISIN

SEQ ID NO: 273999 - protein, 382 aa, Glycine max
  Clone ID: PAT_MRT3847_89441C.1.pep
MGVETLTLFGSPHPISQNAVVPRHAMSRSSETSFPTLTTISISFSQLQDKNADLSFKIEEGFGPNGLGILSVTDVPGYSSLRRNLLHLAPRLANLPKEVKEDLEDPHSRYNFGWSHGKEKLESGKPDILKGSFYANPILDTPTTEASLIQRHPSGCGSNIWPRNALPELEVAFKALGKLIFDIGLMLAYHCDQYVSKGMKIHKDEGLESILRCSRCHKGRLLYYFPSQQGVPDGNSLSSWCGWHTDHGSLTGLTCGMFTRDGVEIACPDSAAGLYIRTRNNQIIKVVYGKDDIAYQIGETTEILSGGYLCATPHCVQAPTGEESSGIERSTFALFMQPDWDEKLNFPEEVHIHKELIPSNAALTFGEYSEMLLDKYYHQKQN

SEQ ID NO: 274000 - protein, 40 aa, Glycine max
  unsure (1)..(40): unsure at all Xaa locations
  Clone ID: PAT_MRT3847_89442C.1.pep
GXSDSVQARXLSXLXXXXTXDGELGMLILSLKGXXTLPAT

SEQ ID NO: 274001 - protein, 128 aa, Glycine max
  unsure (1)..(128): unsure at all Xaa locations
  Clone ID: PAT_MRT3847_89443C.1.pep
MQSKSLSLAPALTFFPGLKPPHKTLLFHQICVLVITFLAYASFHASRKPPSIVKSVLGPTVPSNGTQSFXMSSIDAGWPPFNGTRGTHRLGELDLAFLTSYSIGMYLAGHVGDRIDLRLFLVFGMMGV

SEQ ID NO: 274002 - protein, 41 aa, Glycine max
  Clone ID: PAT_MRT3847_89444C.1.pep
MQSKSLSLAPALTLFPGLKPPHKTLLFHQICVLVITFLAYA

SEQ ID NO: 274003 - protein, 72 aa, Glycine max
  unsure (1)..(72): unsure at all Xaa locations
  Clone ID: PAT_MRT3847_89445C.1.pep
KFHTHSSLFSSSPIKSSKYPASHKIHIHSLPSLSSLISHPFIHSILGSSHLSXSPEPYPTVQNSIRSSREMR

SEQ ID NO: 274004 - protein, 50 aa, Glycine max
  Clone ID: PAT_MRT3847_89446C.1.pep
KKKKKKKKKKKKKKKKKKKKKKKKKKKKKKKKKKKKKKKKINKKKQNKIK

SEQ ID NO: 274005 - protein, 121 aa, Glycine max
  unsure (1)..(121): unsure at all Xaa locations
  Clone ID: PAT_MRT3847_89447C.1.pep
QLKSMVCVKNHFKLRHCPMMYSXIGATRSTYQCSQIRDATRNSXYGGEAKWKCMCXTAFSGKDKLFDHIAPFEGHNIAWMKSCYKGSLLILGLSMRAFSEVSPATMQGSSGTTRSSLTTKV

SEQ ID NO: 274006 - protein, 85 aa, Glycine max
  Clone ID: PAT_MRT3847_89448C.1.pep
LASGGSSPSVGGKKNNPPPAFPVAQAKYPQFLLAPERIDFACELLGPQIQGLGQRQEEIRVGVRRDPPPPRRERKVVASAAWVVP

SEQ ID NO: 274007 - protein, 61 aa, Glycine max
  unsure (1)..(61): unsure at all Xaa locations
  Clone ID: PAT_MRT3847_89449C.1.pep
NXFCKFNLSFIPPAPXGGPSITFYFHIHSNXILNFSSQNKTTFHKNKITITNYKGRFSKEN

SEQ ID NO: 274008 - protein, 142 aa, Glycine max
  unsure (1)..(142): unsure at all Xaa locations
  Clone ID: PAT_MRT3847_8944C.1.pep
LAVLWSLYITITVSMWFLVGTWPXLFNPSGFEWQKIVDDWTDWNKWISIRGGIGVLPEKSWESWWEEEQEHLQYSGMRGIIAEILLSLXYQYGLVYHLKFTKRTKSFLVYGISRLVIFLILFVMKVSSKLFCILWGLLKLFI

SEQ ID NO: 274009 - protein, 313 aa, Glycine max
  Clone ID: PAT_MRT3847_89450C.1.pep
MSISNTQLKPLLPNPFNLSNTEIVEKVYVSHTYDDEMFDNEPLFNVVSNIIKLSTRIVGALLKIDEPNGFLGNPITISSFKPEFSTLKLMSCQMMTLPWGPENAHQTTLRILQQLRKYSWDAKALIALAAFALEYGNFWNLQQASDPLGNSLRLLNQIQHRQLPVTDINATVKLVMEAVEKIRRWGTLSSDETYETEDVPALSDALQLIPLLVYWVVASLVACNTNIQGVSNYALSDFRGKLSTALDEFKHHLEICEQQKASIEDYRRRKKAFKKPKDIVDFLKLLINQNGYKSQIYDGNANRNVNVEVLRRS

SEQ ID NO: 274010 - protein, 58 aa, Glycine max
  unsure (1)..(58): unsure at all Xaa locations
  Clone ID: PAT_MRT3847_89451C.1.pep
VKMFPTKPMAGGAFSENPPLGRCSVRNMRHTCGLGVIKSVXKVXPSGAKVPQTAAKKK

SEQ ID NO: 274011 - protein, 62 aa, Glycine max
  Clone ID: PAT_MRT3847_89452C.1.pep
LRFNLKFRSFRSFNQFQGLEKGQFPTQVGGTRGQQRSIRFRPGIAGTLNCEVVVLDGDQKGV

SEQ ID NO: 274012 - protein, 62 aa, Glycine max
  Clone ID: PAT_MRT3847_89453C.1.pep
FSSKFAISMTFGENFRDKLNDHTIKISIVLWSVLKKVLRQDGVGSTSKSDGLWSVFTTTVRL

SEQ ID NO: 274013 - protein, 142 aa, Glycine max
  Clone ID: PAT_MRT3847_89454C.1.pep
DEAFKLASESGFCIMLGSFWNCEFNIFCYGSILPFRKGSITSKVNPDVCAWELPFEINLSGPECHCGSCLLRKEFSKDALPESVDWQLNKEIVLGFGVLSNDLAALLCEPDENGGFTLIRLNVIRKGLNCRDIMPVGLRLET

SEQ ID NO: 274014 - protein, 146 aa, Glycine max
  unsure (1)..(146): unsure at all Xaa locations
  Clone ID: PAT_MRT3847_89455C.1.pep
MAETTQLTRHIESYVDSSSPTHQAASLNAIASLVNTDALTLEALIRELEMYLTTTDNVXRARGILLLAEVMTHIESKPLNSATIHSLVGFFXGQTDWRAVRGALVGCLALIRRKSVVGMVTDSDATTIAQSFLQYMQVQSLGQHYD

SEQ ID NO: 274015 - protein, 105 aa, Glycine max
  Clone ID: PAT_MRT3847_89456C.1.pep
KGPQYVCTNFWTFVCTNCRSTLEDPRVPSSNVSMAKFTSQEVSALQEGGNQRAKEIYFKEWDAQRHSFPDSSNVDRLRDFIKHVYVDRRFTGDKTNDKPPRAQPG

SEQ ID NO: 274016 - protein, 50 aa, Glycine max
  Clone ID: PAT_MRT3847_89457C.1.pep
VHFHTLSAPYTCHLLRMILTICRIRHVHRNHLTTFPNKTTLRVSCLRYEY

SEQ ID NO: 274017 - protein, 92 aa, Glycine max
  unsure (1)..(92): unsure at all Xaa locations
  Clone ID: PAT_MRT3847_89458C.1.pep
TXSPPPXHXPTATXHMTKXXXXSLCDXXXXTLXGSTPXPSHXAEPEPNLNWKXQPAAXXGQXXXAXIRITLFWDXKTGVWCXXDSSXIWWRG

SEQ ID NO: 274018 - protein, 60 aa, Glycine max
  Clone ID: PAT_MRT3847_89459C.1.pep
ICCCRGVRSSAYQIHIQDFSQFLLFSWLQELLPSYNDLLILLPCTLVLDLKPLIPPKRNL

SEQ ID NO: 274019 - protein, 272 aa, Glycine max
  unsure (1)..(272): unsure at all Xaa locations
  Clone ID: PAT_MRT3847_8945C.1.pep
SYTMMGRPGDPLEKGLIPRSLEQIFQTKQSXQPQGWKEEMQVSMLEIYNETIRDLLATNKSSADGTPTRVENGTPGKQYMIKHDVNGNTHVSDLTVVDVQSVKEVAFLLNQAASSRSVGKTQMNEQSSRSHFVFTLRIYGVNESTDQQVQGILNLIDLAGSERLSRSGSTGDRLKETQAINKSLSSLSDVIFALAKKEDHIPFRNSKLTYLLQPCLGGDSKTLMFVNISPDQASSGESLCSLRFASRVNACEIGTPRRHTNGRPIESRLTYF

SEQ ID NO: 274020 - protein, 78 aa, Glycine max
  Clone ID: PAT_MRT3847_89460C.1.pep
GWNLWADLCACSREKMIEGVLIHEDKDGDRTSAGDALRNTPALLRKRSKTTKGLEVKGPGRPRLIKSIKVKVRQLRDS

SEQ ID NO: 274021 - protein, 45 aa, Glycine max
  Clone ID: PAT_MRT3847_89461C.1.pep
LSPAIYLIRWLIDERQKSPCIFIWKRKIPCIFDYFLNHELNLSSL

SEQ ID NO: 274022 - protein, 95 aa, Glycine max
  unsure (1)..(95): unsure at all Xaa locations
  Clone ID: PAT_MRT3847_89462C.1.pep
FFFFFFFFFFFFFFFFFFFFFFFFFFXKKKKGQSITPYSLIKFKTPLFPQNFLFKIKPEPFVLRGSHQGKCKLWNFDFGMRGLLIEKNTVSLFFA

SEQ ID NO: 274023 - protein, 67 aa, Glycine max
  Clone ID: PAT_MRT3847_89463C.1.pep
KGVTLPPIPLLKTGNYGDRALPFGEFYLNLGAFFYVYFFPKLQWKVGGDKNFWQKRKTLGPPFRDRG

SEQ ID NO: 274024 - protein, 64 aa, Glycine max
  Clone ID: PAT_MRT3847_89464C.1.pep
LSFPFKMAYLKVVINMFDLLFVLILSMILATARVPLRIYEPHHNEDGRLLAMDDPRDHHYKFTP

SEQ ID NO: 274025 - protein, 79 aa, Glycine max
  Clone ID: PAT_MRT3847_89465C.1.pep
CCQKIRNTSKMTKNDQLLRKIRKISESFKKKLKRKYKARNGFYRLLQTMFCILYIQFWKISWCLSWFYKMQKAIGGGFD

SEQ ID NO: 274026 - protein, 42 aa, Glycine max
  Clone ID: PAT_MRT3847_89466C.1.pep
HILLCQVTQRLLSLMQKVALSSMALFDVFRGSVRLRRLVSSF

SEQ ID NO: 274027 - protein, 45 aa, Glycine max
  Clone ID: PAT_MRT3847_89467C.1.pep
NHRNGRSKCYIYLWKYGMHHQPIELQEGFTIEMSTPRFGTYIGYA

SEQ ID NO: 274028 - protein, 301 aa, Glycine max
  unsure (1)..(301): unsure at all Xaa locations
  Clone ID: PAT_MRT3847_89468C.1.pep
MASHSNQPGPGAEGQGEKDPFCEISPSPSPSSATAPALVLSNSGKRIDQAGKKKYVKQVTGRHNDTELHLAAQRGDVGAVRQILEDVDSQIMRTLSGGDDDVDLNAEIAEVRACLVNEENEPGETPLFTAAXKGHLDVVKELLNYSNAQTVSKKNRSGFDPLHIAASQGHHSIVQVLLDYKSXLSKTIGPSNSTPLITAATRGHTEVVNELLSKDCSLLEIARSNGKNALHLAARQGHVEIVKALLSKDPQLARRTDKKGQTALHMAVKGQSCDVVKLLLEADAAIVMLPLGLNKLYLLLL

SEQ ID NO: 274029 - protein, 163 aa, Glycine max
  unsure (1)..(163): unsure at all Xaa locations
  Clone ID: PAT_MRT3847_89469C.1.pep
PFCLRVSGPGAEGQGEKDPFCEISPSPSPSSATAPALVLSNSGKRIDQAGKKKYVKQVTGRHNDTELHLAAQXGXDWXAVXADPXRDVDSQIMRTSEXGATNDVDLNAEIAEGACXLVNEENEPGETPLFTAAEKGHLDVVXKELLNYSNAQTVSKKXNRSGY

SEQ ID NO: 274030 - protein, 154 aa, Glycine max
  Clone ID: PAT_MRT3847_8946C.1.pep
GKTQMNDQSSRSHFVFTLRLYGVNESTDQQAQGILNLIDLAGSERLSRSGSTGDRLKETQAINKSLSSLSDVIFALAKKEDHIPFRNSKLTYLLQPCLGGDSKTLMFVNISPDQASAGESLCSLRFASRVNACEIGTPRCHTSGRPVESRLTYF

SEQ ID NO: 274031 - protein, 120 aa, Glycine max
  Clone ID: PAT_MRT3847_89470C.1.pep
MALSSSSSSTSIFALALFTLLLIGSSSAQLSENFYDSKCPKVFYAVKSVLQSALAKEPRQGASIVRLFFHDCFVNLGGPYWKVKLGRRDSTTGFFNLASSGVLPGPGSFLSDLIKRFEFW

SEQ ID NO: 274032 - protein, 182 aa, Glycine max
  unsure (1)..(182): unsure at all Xaa locations
  Clone ID: PAT_MRT3847_89471C.1.pep
MALSSSSSTSIFALALFTTLLLIGSSSAQLSENFYDSKCPKVFYAVKSVLQSALAKEPRQGASIVRLFFHDCFVNGCDGSVLLDGPSSEKIALPNKNSLRGYEVIDAIKSKVEALCPGVVSCADIVTIAARDSVAILGGPNWKVKLGRRDSTTGFXNLAXSGVLSGPNSSLSSLIQRFVIRA

SEQ ID NO: 274033 - protein, 324 aa, Glycine max
  unsure (1)..(324): unsure at all Xaa locations
  Clone ID: PAT_MRT3847_89472C.1.pep
MALSSSSSSTSIFALALFTLLLIGSSSAQLSENFYDSKCPKVFYAVKSVLQSALAKEPRQGASIVRLFFHDCFVNGCDGSVLLDGPSSEKTAPPNNNSLRGYEVIDAIKSKVETVCPGVVSCADIVTIAARDSVAILGGPYWKVKLGRRDSTTGFFNLASSGVLPGPGSSLSDLIKRFDDQGLSTKDMVALSGAHTIGKARCAXYRGRIYNENNIDSLFAKARQKNCPKGSNGTPKDNNVAPLDFKTPNHFDNEYFKNLINKKGLLHSDQELFNGGSTDSLVRAYSNNQKAFEADFVTAMIKMGNIKPLTGSNGQIRKQCRRPN

SEQ ID NO: 274034 - protein, 81 aa, Glycine max
  unsure (1)..(81): unsure at all Xaa locations
  Clone ID: PAT_MRT3847_89473C.1.pep
VLCSAPFPAVGAQWSTXLFPLGAQSTPMSGAAPPILSPASGLKRKGGPAAFLKFLALCLVKFMFLQWPSKKVISLGYPHPP

SEQ ID NO: 274035 - protein, 195 aa, Glycine max
  Clone ID: PAT_MRT3847_89474C.1.pep
PTRPPTRPPTRPTAARRRQKGKFFSDQDQIDFIDSFQKCLFENTHGVEATEANKLKIYGKDFAAWAKPETADDSMWEDAEEAFTKSPTLVRSNQDLKEEFEEASNGGIQSLALGALDNSFLVSDNGIQVVKNFAHGIHGKGAFVNFSDGYQKGGGGSFYCTPKKTLLMRAETNMLLMSPMGGGKLHSTGFISLIL

SEQ ID NO: 274036 - protein, 66 aa, Glycine max
  Clone ID: PAT_MRT3847_89475C.1.pep
THRGMYRAMGFHSIYVWFRSTSYILLSSPSGLWEEFNGLDIRGCVRPRDEGCRKNLSHASMSVRVA

SEQ ID NO: 274037 - protein, 119 aa, Glycine max
  unsure (1)..(119): unsure at all Xaa locations
  Clone ID: PAT_MRT3847_89476C.1.pep
PQGTYRSVKRMPLSIGGGADAKNAILMKMPNAVLSMWRDHVGHLDFEVAXMTAPYIKWTVMFLXIQFGNEGDDTINIEACPHKLWQIGEIQEKGVLXFSQEEYLTAWATQERSTTTMLA

SEQ ID NO: 274038 - protein, 166 aa, Glycine max
  Clone ID: PAT_MRT3847_89477C.1.pep
FGSRPPQVNELDGISLGEWENEKEIDEVAAQCGLQRVGVIFTDLLDADKGDGSVICKRHADSYFLSSLEITFAARYQAKYPRPSKWSETGQFGSNFVTCVISGDAEGQIGISSYQASNSAVEMVRADIIEPSAEPSVMLVQDEAESDTLNRTRYIPEVFYRRINEH

SEQ ID NO: 274039 - protein, 478 aa, Glycine max
  Clone ID: PAT_MRT3847_89478C.1.pep
MEKLHAVCIPYPAQGHINPMLKLAKLLHVRGFHITFVNTEYNHKRLLKSRGSDSLNSVPSFQFETIPDGLSDNPDVDATQDVVSLSESTTRTCLTPFKNLLSKLNSASDTPPVTCIVSDGGMSFTLDAAQELGIPDVILSTASACGYMCYMKYPRLVDMGLTHLKDSSYLENSIDWVPGIKEIRLKDLPSFMRTTNPQDLMMMDFIYSQCERAQKASAIIVNTFDALEHDVLDAFSSILLPPIYSIGPLNLLLNNDVTNNEELKTIGSNLWKEEPKCLEWLNSKEPNSVVYVNFGSIMVMTSDQLTELAWGLANSNKNFLWVIRPDLVAGGINCALPNEFVKETKDRGMLASWCPQEEVLAHPAVGGFLTHCGWNSTLESVCEGVPMLCWPFFAEQQTNCRFCCKEWGIGLEIEDVKREKVEALVRELMEGEKGKEMKARALEWKKLAHEAASSPHGSSFVNMDNVVRQVLMNKIATK

SEQ ID NO: 274040 - protein, 68 aa, Glycine max
  Clone ID: PAT_MRT3847_89479C.1.pep
KKLKKKKKKKEKSGRNVLEVPIWGDVLANSIHHVSGVRRLNACKAEQIRINGTTLDRPWSEITPEIPL

SEQ ID NO: 274041 - protein, 576 aa, Glycine max
  unsure (1)..(576): unsure at all Xaa locations
  Clone ID: PAT_MRT3847_8947C.1.pep
AQREMQSANQKIASLNEMYKRLQDYITSLQQYNGKLHSELSSVEDELKRVEKEKVSVVENITLLRGQLTVSVSSQEEAIKQKDVLATEVSSLRGELQQVRDERDRQLSQVQILSSELEKVKESTKHSSTELDSLTFKANDLEEKCSLKDNQIKALEEQLATAEKKLQVSDISAYETRTEYEGQQIFVNELQRRLADAEYKLIEGERLRKKLHNTILELKGNIRVFCRVRPLLADESSSTEGRIFSYPTSMETSGRGIELTQNGQKHSFTYDKVFAPDTSQEEVFIEISQLVQSALDGYKVCIFAYGQTGSGKTYTMMGRPGHPEEKGLIPRSLEQIFQTKQSQQPQGWKYEMQVSMLEIYNETIRDLISTTTRVENGTPGKQYTIKHDANGNTQVSDLTVVDVHSAKEVAFLLNQAANSRSVGKTXMNEQIRXFQLVFTLRIYGVNERTDQQVQGILNLIDLAGSERLSRSGSTGDRLKETQAINKSLSSLSDVIFALAKKEDHVPFRNSKLTYLLQPCLGGDSKTLMFVNISPDPASSGESLCSLRFASRVNACEIGTPRRQTNGRSIESRLSYF

SEQ ID NO: 274042 - protein, 219 aa, Glycine max
  unsure (1)..(219): unsure at all Xaa locations
  Clone ID: PAT_MRT3847_89480C.1.pep
MSRDANRNGAMSKNAENDEDEAPSRRDSRKSRENSDVDSEFDRKHNNSRRGSSDSEDGDRRRRRNRKSRRRYCSESESGSDSGKAREHSETDRKHSNSRRKSRGGSSDSDEGDRAHRRKRKSRRRYSSESDSDSGSEESESERSGSESESEEERKRREKRRRREKEDERERKRRRREKEKKRRRREKEEEERRKEEKLKKKXEKEEEERGKGAXTNSWG

SEQ ID NO: 274043 - protein, 71 aa, Glycine max
  Clone ID: PAT_MRT3847_89481C.1.pep
FEAQDCTPRLVSFPRNGFPPPKPKHFLPPDESPREDCWNEKASRPQPRSQKHAQKRNHVCRPTKGSNMWLL

SEQ ID NO: 274044 - protein, 83 aa, Glycine max
  Clone ID: PAT_MRT3847_89482C.1.pep
NVKPRKMESVVQKNIAQVGVRYVSPYFHNDSEEKIKGKPLDMESKSGSIALPTFGNSIENKLDGNNSGETIKQHGLDSHIDSV

SEQ ID NO: 274045 - protein, 86 aa, Glycine max
  Clone ID: PAT_MRT3847_89483C.1.pep
GQTREPKDDHAKGELRDTDASIANAQRRGKTAEEPTVFFDRGETEANHAEQKDELNGHRPGHTPHTSERAMTMRKARDSDASDGDG

SEQ ID NO: 274046 - protein, 79 aa, Glycine max
  Clone ID: PAT_MRT3847_89484C.1.pep
FSYLSFWGGVLWAQHQLLLYSLYFSHFFYNPYITSIHFLFLYIIYYNHILYSTSSYSANLFKVIKFIYFLYSFLHYSFT

SEQ ID NO: 274047 - protein, 63 aa, Glycine max
  Clone ID: PAT_MRT3847_89485C.1.pep
IRYMVYSNYIPVLFFQGRYISFNFSLLVLDVFICYFIKVIFFISLRRYGERSSYMDSCFKVFS

SEQ ID NO: 274048 - protein, 147 aa, Glycine max
  Clone ID: PAT_MRT3847_89486C.1.pep
HQGANSLPITLWARSDQSWQTEYGQIPLCFSSSNKRPCEVFTPYMSHMSCLLGVICQYKVYAVSSKPIWIFGRKTAAKNSDVSSTLLSEDSEMLYVTSISWKSQGQKYHGYIDDTLFLAFGREDSAAGGIDLTARDLLVELGMCSGL

SEQ ID NO: 274049 - protein, 87 aa, Glycine max
  unsure (1)..(87): unsure at all Xaa locations
  Clone ID: PAT_MRT3847_89487C.1.pep
XXXXXXGGXTPLDRKKXKXVKKGESKTGVIFGSRGAFLGVPLILKGPKKGGGFFPQIVKGGIKGAGSFQHIGKKKIPLFPLKNLPPL

SEQ ID NO: 274050 - protein, 68 aa, Glycine max
  Clone ID: PAT_MRT3847_89488C.1.pep
ATSSAHGLPFGPLHEKQVQNELVSSKKLRKMLYCTTCTYLMFRSGLCESYLIRSSHVLDPIKHDNDWT

SEQ ID NO: 274051 - protein, 64 aa, Glycine max
  Clone ID: PAT_MRT3847_89489C.1.pep
VQDVAGFEPRVTLPPSTLEVSYVGLRHSLFEICSLEGQQVSQTLADMTLGIVSHKMRLCEKLFK

SEQ ID NO: 274052 - protein, 37 aa, Glycine max
  unsure (1)..(37): unsure at all Xaa locations
  Clone ID: PAT_MRT3847_8948C.1.pep
LVXDLDXPSTCSHSTVLLLKNGFFPILXLATSPLVCC

SEQ ID NO: 274053 - protein, 71 aa, Glycine max
  Clone ID: PAT_MRT3847_89490C.1.pep
FLCISIIFRVVVLKVTILFTRKVLEVTNDLTFKIREMIAIFSNIFFSTHPMLLTEIYYNFYRSYFLFNDFF

SEQ ID NO: 274054 - protein, 114 aa, Glycine max
  unsure (1)..(114): unsure at all Xaa locations
  Clone ID: PAT_MRT3847_89491C.1.pep
YKWMKHCKKEXMSFHLQHXRFQLLHLRVTVAFIKYIQRLQNILVNGACIVYLQANCIINGTHVQFALLLYASHSERFGRINGAVDLFLLLTRFQCRVHRKQCNFTTSIVTDNEE

SEQ ID NO: 274055 - protein, 31 aa, Glycine max
  Clone ID: PAT_MRT3847_89492C.1.pep
AEIDDSNYIFIKDQLSLNRLIRVICFSLYIV

SEQ ID NO: 274056 - protein, 386 aa, Glycine max
  unsure (1)..(386): unsure at all Xaa locations
  Clone ID: PAT_MRT3847_89493C.1.pep
MEHKVATTEGQSIRCKAAFCXKAGEPQSIEEIIVAPRISGEARIRIICSSLXQSDISFRNMQGPPANFPRILGHEAIGVVESVGEDVTEVAKGDVVVPIFLPDCGECIDCKSSKSNLCSKFPFEVSPWMPRYATSRFTDLKGEIIHHFLSVSSFSEYTVVDIAHLIKIDPAIPPNRACLISCGISAGIGAAWRAAGVEPGSTVAIFGLGSIGLAVAEGARLCGATKIIGVDVNPERYEIGKRFGLTDFVHSGECENKSVSQVIIEMTGGGADYCFECVGMASLMHEAYASCRKGWGKTIVLGVDKPGSKLNLSCSEVLVSGKSLRGCLFGGLKPKSHVPILLKRYMDKELNLDEFVTHEMEFKDINKAFDLLIEGQCLRCVIWMDK

SEQ ID NO: 274057 - protein, 79 aa, Glycine max
  unsure (1)..(79): unsure at all Xaa locations
  Clone ID: PAT_MRT3847_89494C.1.pep
RNFKFFVVLVTSGRDRSLTDGPAFVEPVEQKILDATXSENLSLLATDDKYNKALFSTAKRLAVCIHGLSDPGDPTVKDN

SEQ ID NO: 274058 - protein, 270 aa, Glycine max
  unsure (1)..(270): unsure at all Xaa locations
  Clone ID: PAT_MRT3847_89495C.1.pep
VVALGDSLSEEVLKERIRRMRIGLANKGKVPWNKGRKHSARARVRIRRRPXGAPRGPQVRKKMAEHPHSHSDQTKAKISDSLRRVWHERLKSKRLVEQFFLSWAQSIANAARKGGIGQEELDWDSYNKIKQQLELHHLLQSKKKGKEKLMAVAGAKNIIQSWKESIAKAAKKGGSGEQELDWDSYEKIQEEMVHLRQLQRTTEKAKEKEMARVKAEKEAQIKAIKRVILTQKKKDHLERAKLKRNIKSHPCGNAKEGKGSLEVTTVQTLH

SEQ ID NO: 274059 - protein, 291 aa, Glycine max
  unsure (1)..(291): unsure at all Xaa locations
  Clone ID: PAT_MRT3847_89496C.1.pep
MASTVEVQSSYSARKQDDSDFNLTEWAVKARIRREKNKSRRYSGSYMRSFREDTRSXLSNITISSTASSPGYPLKDDIDPTTYSFTTANKAKHGRQGYHXREADLEIEWRETLRTKWVXSYMRNKKGESEKERQSRXTSARRSFRNSINRIAMSAPLVYSSKHIPTKPATYIQEEVALQFPNPEKKKEGITRDVGTQSTPPYLSSTSPSPASTPSITERSKPRISDSLNLNAKTTNSDEEVCATHFSLYLISFNEFIRNSKSYKRSNQDLKHFRFNSYFPFLWSSIMNAIK

SEQ ID NO: 274060 - protein, 166 aa, Glycine max
  unsure (1)..(166): unsure at all Xaa locations
  Clone ID: PAT_MRT3847_89497C.1.pep
SFHISSGRCPGERWQPHPDIVRAVRIAGQIVSWVGDPMHGITIEAPCGVKTRPFDFIKCDNRTAIRRHHSEGSHPGGVHLEMTGQNVTECIGGSRTVTFDDLSXRYHTHCDPRLNASQPLELAYIIAERLRKSMIRSQQPLARLEGKVPSNHKRKNSCPFFFGLIL

SEQ ID NO: 274061 - protein, 113 aa, Glycine max
  Clone ID: PAT_MRT3847_89498C.1.pep
CAAFSVRHSAKRRPRMSQIVRVLEGDVSLDALNHEGVKPGQSSMFSSASREYGAEAYGADMMRFRKLALDSGVGSSEYGGTSEYGLNPSSSSSEQSSAEYARRTTGGGRMHTP

SEQ ID NO: 274062 - protein, 58 aa, Glycine max
  Clone ID: PAT_MRT3847_89499C.1.pep
FSPGAPPALHFPYLFSNFFKVKMVSLLSPGPKYWGCPPGSKTKRYKEKMVRIQVPVRK

SEQ ID NO: 274063 - protein, 46 aa, Glycine max
  Clone ID: PAT_MRT3847_8949C.1.pep
ERYVLTRASRNRELNKHARLGCQVVLAPELQGMVVAIPEPKPWDIP

SEQ ID NO: 274064 - protein, 101 aa, Glycine max
  Clone ID: PAT_MRT3847_894C.1.pep
TGHSLERFTLRMPEEVMKKILEDSERGNVTRMMKRSASYDVVLRSMEEGGEGSSNSGSNSKEKSSTNNNNRWVLSMTPPFVSRAVRGFRECQERTVFHCEV

SEQ ID NO: 274065 - protein, 67 aa, Glycine max
  Clone ID: PAT_MRT3847_89500C.1.pep
TPSPERESPRSDRNRGNASSKPTLCSLANLTFFFFVDSFLFSGFNSVEVLGYYCSFSVRESLFSVKP

SEQ ID NO: 274066 - protein, 46 aa, Glycine max
  Clone ID: PAT_MRT3847_89501C.1.pep
SSRAAAFFFFFFFFFWLSLHSTKFNACCYTLAHVNIYKFLGIFFFS

SEQ ID NO: 274067 - protein, 60 aa, Glycine max
  Clone ID: PAT_MRT3847_89502C.1.pep
LFFFFFFFCFFFFFFFFYSGFGYTDQRRPNFFPTRRYLLQEKKNNIAIIVNYEGTQTIEP

SEQ ID NO: 274068 - protein, 71 aa, Glycine max
  unsure (1)..(71): unsure at all Xaa locations
  Clone ID: PAT_MRT3847_89503C.1.pep
WGVKFLQLKFFPPGIMCPRFHPPFITPLLNKNLLPQRNLPQKTGKTPGPRPGFPLLSVKNXXVQERSXFXF

SEQ ID NO: 274069 - protein, 134 aa, Glycine max
  Clone ID: PAT_MRT3847_89504C.1.pep
GGGPGGNAAPPPRGTARAKGGTPPKRGNFGFNQKLDILTPLLVPEKRGTKKRQRRGHVKRLYVKNTTVMKELSRFGGEKNRVFHLFFFLFPFNRGGLENRSKNNQKFFLGAQCPWGGSWVSEKEKEKKKEKKMQ

SEQ ID NO: 274070 - protein, 319 aa, Glycine max
  unsure (1)..(319): unsure at all Xaa locations
  Clone ID: PAT_MRT3847_89505C.1.pep
LCLQCLPYCYSLSHHFPTLCLDTSSSTSSSLKSNKQLSKKPSSAFDDLNESASLPSTSIKKCDIFTGEWVPNPKAPYYTNKTCWAIHEHQNCMKYGRTDSEFMKWKWKPNGCDLPVFNPFQFLEIMRGKSMAFVGDSVGRNQMQSMICLLSRVEWPIDVSYKRDDYFMRWKYPSYNFTMAAFWTTHLVKSKEADAKGPGPTGLCNLYLDEPDEKWITQIEDFDHVILNGGHWFTRSMVFYEXNKKIVGCHYCLLENVPDLTMYYGYRKNFXRTVFRETNRFFNLKSAXFLRTLAPSQFVYGMWNEXGGNCIRTNPISRN

SEQ ID NO: 274071 - protein, 165 aa, Glycine max
  unsure (1)..(165): unsure at all Xaa locations
  Clone ID: PAT_MRT3847_89507C.1.pep
ARAYQLLARKYYSDVSKDPQAAELFKSIHDAYKVLSNEAARVQYDQELQFGHKPYREKWSYGTEFEDQARFYRWDHLRKKNGXVKDSGRITMSXEDYYTSETDEEEDEVVDLDEERGSFVEVLRSAFVPLFLLQTPGSRFSLTFSSLTALFDKKVDTGFKMGYII

SEQ ID NO: 274072 - protein, 77 aa, Glycine max
  Clone ID: PAT_MRT3847_89508C.1.pep
KISSFTTRFFIKTLTPNTITLEVDTNNTILNVNANIQYKEDIPPHHHHMIFTKKQINYIITLADYNIHIQSTIHILL

SEQ ID NO: 274073 - protein, 74 aa, Glycine max
  Clone ID: PAT_MRT3847_89509C.1.pep
SRPAVLGPNSPTLPSIATSPLSPQGITNVPKGFFLFFKKMDFNPQMDTNKNLICMHCIFFYFFSKSKITFWCEF

SEQ ID NO: 274074 - protein, 85 aa, Glycine max
  unsure (1)..(85): unsure at all Xaa locations
  Clone ID: PAT_MRT3847_8950C.1.pep
MAGHIRPRLFTYSNCRNHVSLHDDIIYKASNGRYGQTFMLCHAMNIVTGPKXDRHLLTGLHTNTDDHCGDCREQLRSESERSYEA

SEQ ID NO: 274075 - protein, 188 aa, Glycine max
  Clone ID: PAT_MRT3847_89510C.1.pep
LEIINPHTEEHSIVTVLFQEIDHSLEIEKFTKMFKTTALPKLHNKLIKLVQLLNKPVKDPNQVVNTLQALYEIATRDLFKEQRNPEQLKEDGLAQQNPAAGLLFETAIQLPDANNENFYRQVRRLYTILTSNDSMQNIPVNLEARRRIAFFSNSLFMNMPHAPQVEKMMAFSVLTPYYSEDVLFSKEQ

SEQ ID NO: 274076 - protein, 80 aa, Glycine max
  Clone ID: PAT_MRT3847_89511C.1.pep
RGGMQIFVKTLTGKTITLEVESSDTIDNVKSKIQDKEGIPPDQQRLIFAGKQLEDGRTLSDYNIQKESTLHLVLRLRGGQ

SEQ ID NO: 274077 - protein, 74 aa, Glycine max
  Clone ID: PAT_MRT3847_89512C.1.pep
ITYFFMKARRGSWPPGFFCACPDLSHVVQGRVFLGSFSYLWEGSLVSPMAVSFLAASARPGGPSFACWLFLVFL

SEQ ID NO: 274078 - protein, 54 aa, Glycine max
  Clone ID: PAT_MRT3847_89513C.1.pep
MFLNDVYDDDHGNFNKIVDVMQKMQECGQQPDDIVQDVDHDCDLASLGRLSTVM

SEQ ID NO: 274079 - protein, 67 aa, Glycine max
  unsure (1)..(67): unsure at all Xaa locations
  Clone ID: PAT_MRT3847_89514C.1.pep
FVGSKDEKLASRKTFDKPTRRCFTIIPKEIDLVARNKNSNXVREMIKKGXRIAGKVXINPYSMEWTR

SEQ ID NO: 274080 - protein, 69 aa, Glycine max
  Clone ID: PAT_MRT3847_89515C.1.pep
QFPKIAQAFPLVALLRFPSVREKEKGLEPQFHCLCVRDISLSTDIMLQILRVEICENEFQRWCLNFRTI

SEQ ID NO: 274081 - protein, 59 aa, Glycine max
  unsure (1)..(59): unsure at all Xaa locations
  Clone ID: PAT_MRT3847_89516C.1.pep
YRCEKTTDRGITVVPYRCGWASASFSYMAFFFFGFXPPRNNGRKRRRSLYSNPSPNHLL

SEQ ID NO: 274082 - protein, 55 aa, Glycine max
  Clone ID: PAT_MRT3847_89517C.1.pep
KIPKNIYNFKHSQLFCFIPFGDPSEFGHVQKRSPVTKTPLKTWFLGVNQSLYFLN

SEQ ID NO: 274083 - protein, 79 aa, Glycine max
  unsure (1)..(79): unsure at all Xaa locations
  Clone ID: PAT_MRT3847_89518C.1.pep
MVTFSVRQYQLAGMSLPTXAHQHPKIYRMNLWPTNKVRAKSNFWYFLRKLRKVKNIIGQLLAINEIFENNPTPIKNHGI

SEQ ID NO: 274084 - protein, 48 aa, Glycine max
  Clone ID: PAT_MRT3847_89519C.1.pep
GYIMYYFVIQVSLAFPGDLFISYIYTFYARCPQSIYSMLEGILSINYM

SEQ ID NO: 274085 - protein, 194 aa, Glycine max
  unsure (1)..(194): unsure at all Xaa locations
  Clone ID: PAT_MRT3847_8951C.1.pep
GTIKHEKQNISSLNLMPXSRDGTIQGGVGRDKSNXTYHLFLXLXPXLLXENGKFLLSAKRTRRTTCTEYIISMDADNISRSNSTYIGKLWSNFLCTKFIIYDTQPPYNNAQLSPPGRSRKFYSKKVSPKVPSGSYNIAQITYELNVLGTRGPRRMNCTMHSIPMSTLEPGCTVPVQPELLPRSLQYSFRSISFA

SEQ ID NO: 274086 - protein, 69 aa, Glycine max
  Clone ID: PAT_MRT3847_89520C.1.pep
ISRELPVVNFECLVILCTSIGQPNEKLCLLEFLENFRCSISSVSIYYAPESNLRLKSYDHLNFLTAFTV

SEQ ID NO: 274087 - protein, 80 aa, Glycine max
  Clone ID: PAT_MRT3847_89521C.1.pep
PPGRVKIILEEDNFLMISPFKKKKKVSGKKRFIKILDQKRAILVTPPFNFKGAGCVLDKISFFFPFSPGKQKKVSLFFSP

SEQ ID NO: 274088 - protein, 92 aa, Glycine max
  Clone ID: PAT_MRT3847_89522C.1.pep
PYYHPQQITCLILEGIRITFDGTDGVGTVTLYVSNSTTSISHYRILNISSYTRPPFHPRPIPISLYPRSTPLEPHTLYVRTPMMASSLLMHH

SEQ ID NO: 274089 - protein, 81 aa, Glycine max
  Clone ID: PAT_MRT3847_89523C.1.pep
VGGGFFFKKMIFLGMKFCFTGKTRGPGIAFPTNLNLPNPFYPCLFLITDIVMTGGALSTFQDPTKIGKRKLWFLGTVYWLP

SEQ ID NO: 274090 - protein, 264 aa, Glycine max
  unsure (1)..(264): unsure at all Xaa locations
  Clone ID: PAT_MRT3847_89524C.1.pep
QEQVQPVAEAKPEEKKEEKAEEKPAEEKKEEKPEEKTEEEKKEEPKPPSPCVLFVDLHCEGCAKKIERYIMKMRGVEGVVIDMAKNEVTIKGIVEPQAICNTITKKTKRRASVISPLPEAEGEPIPEVVNSQVSGPVTVELNVNMHCEACAEQLKRKILQMRGVQTAMTEFSTGKVLVTGTMDANKLVDYVYRRTKKQAKIVPQPEPEPEKKEESKEQTXEEENKPEEXESEEKPKKKSPLYVIERIPPPQLFSDENPNACCIT

SEQ ID NO: 274091 - protein, 31 aa, Glycine max
  Clone ID: PAT_MRT3847_89525C.1.pep
RDALKPEGMMHETHQTSKKIEKLLMRINKVI

SEQ ID NO: 274092 - protein, 299 aa, Glycine max
  unsure (1)..(299): unsure at all Xaa locations
  Clone ID: PAT_MRT3847_89526C.1.pep
QRVEGTDNSTSSSLSLHHQCYCKAPPPHYSLLFWLLLCFLHHPFLLCSHHPLLSLLPLVASPLLSSLWFILFFCRFFSFFALFFLFWFRLWLGNYLGLLFGYTYLPRVRTQSGVSVGSIKTKANVXCVQFPLDSARFLAFVSADHRIYYYDLRNLKMPLCTLVGHNKTVSYIKFVDTVNLVSASTDNTLKLWDLSTCASRVIDSPIQSFTGHANVKNFVGLSVSDGYIATGSETNEVFIYHKAFPMPALSFKFQNTDPLSGNEVDDAVQFVSSVCWRGQSSSTLLAANSTGNVKILEMV

SEQ ID NO: 274093 - protein, 65 aa, Glycine max
  Clone ID: PAT_MRT3847_89527C.1.pep
SVLTLAAYISFKGEYVEDESHCGGLAPVITQGSELSEACALRSGYARGATNQHARHSGTLASHRS

SEQ ID NO: 274094 - protein, 121 aa, Glycine max
  Clone ID: PAT_MRT3847_89528C.1.pep
LRLTITLTIGCTIIHIRCRSRRYVRCIPGGHGLCPLIRSGISAYDQIHDLAYMLHQLFDKVPDWHSDQETCYYVIREPCDYVDLLHAESDHLTAPDSELSATTDTLLAPLIRALLKQSNGA

SEQ ID NO: 274095 - protein, 58 aa, Glycine max
  Clone ID: PAT_MRT3847_89529C.1.pep
IAYIMPPARNNTICNMNITLYAVGIHHKLSVNCYPYINGSIANKALRGPYLHAYIKRN

SEQ ID NO: 274096 - protein, 43 aa, Glycine max
  unsure (1)..(43): unsure at all Xaa locations
  Clone ID: PAT_MRT3847_8952C.1.pep
MPLQVLKFFLLCIVDALLIXGVPDGPTAHFKLSKLVLRKDIKV

SEQ ID NO: 274097 - protein, 68 aa, Glycine max
  Clone ID: PAT_MRT3847_89530C.1.pep
ITLTYCSFCLRCVFNSNNKIFSGYSQMERESLISVYSFRPLRTGSHMLGFCFNSRRTSASCDRVLTYI

SEQ ID NO: 274098 - protein, 52 aa, Glycine max
  unsure (1)..(52): unsure at all Xaa locations
  Clone ID: PAT_MRT3847_89531C.1.pep
XXXRXLYYXQVIMTTLXCXSXMRXLAIFDEXVKXDXKICYDXIKKIQIDDPH

SEQ ID NO: 274099 - protein, 372 aa, Glycine max
  unsure (1)..(372): unsure at all Xaa locations
  Clone ID: PAT_MRT3847_89532C.1.pep
MEAIRKQASKLREQVARQQQAVLKQFGAGGYGGSDNMVTDEVELQLHQKLEKLYISTRAXKHYQRDIVRGVEGYIVTGSKQVEIGTKLSEDSRKYGADNTCTSGNTLSRAALNYARAHAQMEKERXGNLLKALGTQVAEPLRAMVMGAPLEDARHLAQRYDRMRQEAEAQAIEVSKRQAKVRETPPNAENAMKLEAAETKLQDLKTNMAILGKEAAAAMAAVEAQQQRLTLQRLIAMVEAERAYHQRVLQILDQLEGEVTSERQRIETPPTPSLDNSMPPPPSYEEVNGVYASQAHNGSTDSMGYFLGEVLFPYSAVSEVELNLSVGDYVVVRKVTNSGWAEGECKGRAGWFPFSYIERRERVLASKVTEVF

SEQ ID NO: 274100 - protein, 48 aa, Glycine max
  Clone ID: PAT_MRT3847_89533C.1.pep
ARGAGEVNFNMANFTSAHHFDLLDGLPIVYKGDERPNRPIISSCIAMT

SEQ ID NO: 274101 - protein, 94 aa, Glycine max
  Clone ID: PAT_MRT3847_89534C.1.pep
MEAIRKQASKLREQVARQQQAVLKQFGAGGYGGSDNMVTDEVELQQHQKLEKLYISTRAGKHYQRDIVRGVEGYIVTGSKQVEIGEEKGGWYEN

SEQ ID NO: 274102 - protein, 245 aa, Glycine max
  Clone ID: PAT_MRT3847_89535C.1.pep
MALSNRVRSGISLFTKSTFLTSERSTLQRFLVAPSISFASRNYANVPGQKENKVKVPLALFGGSGNYASALYIASVKANAVAKVESELLQFVEAVKNSPIFSQFIRDLSVAKDVRVKVIQDICGEAKFSDVTKNFLVIVAENGRLKNIDTIAKRFAQLSMAYKGEVQATVTTVVPLPPEEEKALKETLQEIIGSGAKVHLEQKIDPSILGGLVLEFSQKVFDMSIKTRAQQMERILREPVSIANI

SEQ ID NO: 274103 - protein, 206 aa, Glycine max
  Clone ID: PAT_MRT3847_89536C.1.pep
MADLKNGNFLTYAYILLYIALSSGQIFFNKWVLSSKEINFPYPLGLTLLHMVFSSVLCFVLTKILKVMKVEEGMTPEIYATSVVPIGAMFAMTLWLGNTAYLYISVAFAQMLKAIMPVAVFVLGVAAGLEVMSYKMLLIMSVISFGVLVASYGEININWIGVVYQMGGVVGEALRLIFMEIFVKRKGLKLNPLSVMYYVSPCNAIC

SEQ ID NO: 274104 - protein, 62 aa, Glycine max
  Clone ID: PAT_MRT3847_89537C.1.pep
ACHNNIYTYRPNYAVRIHMFASQSSFFFSDKYIHTYICVFFINYDAEQPNNNRQNNLVLRSR

SEQ ID NO: 274105 - protein, 76 aa, Glycine max
  Clone ID: PAT_MRT3847_89538C.1.pep
LDTQCPGCDSVSPRYASAHCIKKEISTYLSCIGLTSSTKVVSPHNIACACNYPRNNNGRVVVPKLLLPFANVYDKK

SEQ ID NO: 274106 - protein, 56 aa, Glycine max
  Clone ID: PAT_MRT3847_89539C.1.pep
AYTHLMNEEDIENLKWLKIFSKYDLYSKSKVLVDIEKVKPYYMSLIEKYFPAKLRW

SEQ ID NO: 274107 - protein, 93 aa, Glycine max
  Clone ID: PAT_MRT3847_8953C.1.pep
EKCNRLERPETMLHAYAYKEANPNIIIISHEKKPKINPFFVCIHITAYLQSNKTMITFRNPKNYSAFNTFPLLWTHLHSWLFGFLRLEPKLEP

SEQ ID NO: 274108 - protein, 53 aa, Glycine max
  Clone ID: PAT_MRT3847_89540C.1.pep
MSIIAGNAYLCSPPLCHMLSTISYVMVEILDAVSLVRHAQTFTDGNPHGLPKH

SEQ ID NO: 274109 - protein, 55 aa, Glycine max
  unsure (1)..(55): unsure at all Xaa locations
  Clone ID: PAT_MRT3847_89541C.1.pep
DARIERYFFKNNTSXIADDDRYSEPCFYLCICTRSMPPQCTCQDTTLNSRHLDSY

SEQ ID NO: 274110 - protein, 94 aa, Glycine max
  Clone ID: PAT_MRT3847_89542C.1.pep
IHSYFKVPFPHSLPFGQIHVKVYKDSLLRTQKKKKALDNVPHMVNNPLHMEGMVINFDAFKKLCLAENLHLHGYLPDTTSGAKGVFIFQPDAAN

SEQ ID NO: 274111 - protein, 105 aa, Glycine max
  Clone ID: PAT_MRT3847_89543C.1.pep
YNIDQHDYSVRLKAAQKFLKDGDKVKVIVNLKGRETEFRNIAIELIKRFQSDVGELATEETKSFRDRNMSIVMVPKKAALQKAQEPPKRKDMSAADEVSAGVQHN

SEQ ID NO: 274112 - protein, 286 aa, Glycine max
  unsure (1)..(286): unsure at all Xaa locations
  Clone ID: PAT_MRT3847_89544C.1.pep
KLIDEEPPAIMLLFEPKGRPEDEGNDFYIQSKXICVGCGEGNHYLRYXIIPSCYRTHFPEHLKSHRSHDIVLLCVDFHEVAHAAAEKYKRKVAVEFGSSFYLQRVVHPGQKTXNKLERAVYPLQLQTAAMALLRHGPRMPLNRHEELTEIINRYYGGREISDEDLERALQVGMTPHERRRFKKKRGFSFKHSIGSTATVPKQDNHAGCTTRMNDLDVDTLKVDAHDGSYGNEETSEVDRELFMRKDDFENSTLASDIKVMGVVSATPNRNMITVETTYYNGSSDSA

SEQ ID NO: 274113 - protein, 45 aa, Glycine max
  Clone ID: PAT_MRT3847_89545C.1.pep
CQCAISNCLKLNQCCNFFFYGQGIRWLDCYKLLFLRFRKTFCARF

SEQ ID NO: 274114 - protein, 38 aa, Glycine max
  Clone ID: PAT_MRT3847_89546C.1.pep
ESIKNFGDLVQSTDAWFGCQGHGLRPSMDAFVPEEPNR

SEQ ID NO: 274115 - protein, 51 aa, Glycine max
  Clone ID: PAT_MRT3847_89547C.1.pep
LNKLSSLPPSQRVSKLNKLDQNVSYFLLFSICLAFNILLFSVLFSNTNFHL

SEQ ID NO: 274116 - protein, 380 aa, Glycine max
  unsure (1)..(380): unsure at all Xaa locations
  Clone ID: PAT_MRT3847_89548C.1.pep
MASQPESSDAKGTKRDFSTAILERKKAPNRLVVDEAVNDDNSVVALHPDTMEKLQLFRGDTILIKGKKRKDTICIALADETCEEPKIRMNKVVRNNLRVRLGDVVSVHQCPDVKYGKRVHILPVDDTIEGVTGNLFDAYLKPYFLEAYRPVRKGDLFLVRGGMRSVEFKVIETDPSEYCVVAPDTEIFCEGEPVKREDENRLDEVGYDDVGGVRQQMAQIREXLELPLRHPQLFKSIGVKPPKGILLYGPPGSGKTLIARAVANETGAFFFCINGPEIMSKLAGESESNLRKAFEEAEKNAPSIIFIDEIDSIAPKREKTHGEVERRIVSQLLTLMDGLKSRAHVIVIGATNRPNSIDPALRRFGRFDREIDIGVPDEVG

SEQ ID NO: 274117 - protein, 55 aa, Glycine max
  Clone ID: PAT_MRT3847_89549C.1.pep
DSILKLSCRLFSSHTTTTGKHIIFDEQIILQPPNSTMNLGYAEKYYGIPTSLVLL

SEQ ID NO: 274118 - protein, 68 aa, Glycine max
  Clone ID: PAT_MRT3847_8954C.1.pep
IPIALPLVQRLNYHCFYLLEDVQCLNYLCFTVRVRGFSMYHRRRNTFVSIILNVLLEDLHRQSNMLNT

SEQ ID NO: 274119 - protein, 101 aa, Glycine max
  unsure (1)..(101): unsure at all Xaa locations
  Clone ID: PAT_MRT3847_89550C.1.pep
YVLTHPLTHVRGPAGWPFISLSCPTGKIFIARYFLLFIYVSPTHSVVAVDICVYNPCXTPWGANLFTPLKDPLNLSRGQTYVLSYYPAHCASVMNVAIHAL

SEQ ID NO: 274120 - protein, 53 aa, Glycine max
  Clone ID: PAT_MRT3847_89551C.1.pep
FSFEWVLFIIKITYLGIKTSFFFCFIFHKSEIVFFNLYCHFFIELSLLSRDTH

SEQ ID NO: 274121 - protein, 142 aa, Glycine max
  Clone ID: PAT_MRT3847_89552C.1.pep
MVVQVQHNLLLVITFLMLLWSWWSLLGALGDPQTHLINKGCSQYNATDLSNFNQNLNATLDDLRAQVSNQSKHFATAQEARGADPVYAMFQCRNYLSTADCAACFVVATAQIRNCSAGANGARVIYDGCFLRYESNGFFDQT

SEQ ID NO: 274122 - protein, 74 aa, Glycine max
  Clone ID: PAT_MRT3847_89553C.1.pep
WISTVLLVLRPSTSTQTIIVSSLEGIVYLSTSLRCYFQSVWFGQHQLRANTLGLKPDRTILLPHSHRTKGRRII

SEQ ID NO: 274123 - protein, 60 aa, Glycine max
  Clone ID: PAT_MRT3847_89554C.1.pep
IVKASLVHHGHPPVSFTRIPLHQVPIQAHTLSQPNALKTEGQSWLITLVTYANDAKISFD

SEQ ID NO: 274124 - protein, 133 aa, Glycine max
  unsure (1)..(133): unsure at all Xaa locations
  Clone ID: PAT_MRT3847_89555C.1.pep
KFYLTRLKIFNNNLSGSISPELSQATKLHVLHLSSNHLTGGIPEDFGNLTYLVHLSFNNNNLSGKGPIPIASLQELEXLDLGANYFASLIPNQLGNLVKLLHLNLSQNNFREGIPSEFGKLKHLQSLDLSRNF

SEQ ID NO: 274125 - protein, 79 aa, Glycine max
  unsure (1)..(79): unsure at all Xaa locations
  Clone ID: PAT_MRT3847_89556C.1.pep
SLSASAEGRTXPFXXVYXFGXSFTXXGXTTNAEXPSGFXXXSXSXYGTTFFXXSXXXYSXXRLVIDFXAEALXLPYLPP

SEQ ID NO: 274126 - protein, 219 aa, Glycine max
  unsure (1)..(219): unsure at all Xaa locations
  Clone ID: PAT_MRT3847_89557C.1.pep
MRMEALVFALVAILLCGCDAAKECTNIPTQSHTFRYELLMSTNATWKAEVMDHYHLTPTDETAWADLLPRKLLSEQNQHDWGVMYRKIKNMGVFKSGEGFLKEVPLQDVRLHKDSIHGRAQQTNLEYLLMLDVDSLIWSFRKTAALSTPGTPYGGWEGPESXELRGHFXVGHYLSASALMWASTQNDTLKQXKSSLVAGLSACQEKIETXYLSAFHLSF

SEQ ID NO: 274127 - protein, 78 aa, Glycine max
  unsure (1)..(78): unsure at all Xaa locations
  Clone ID: PAT_MRT3847_89558C.1.pep
ADRRVRLLISPSYPLPSSILTXSSNPEPPIFCSGFLIPKPHSRFFKTPPRCVFTPAFPIPSKNTNFGSQFLNPTSLTF

SEQ ID NO: 274128 - protein, 53 aa, Glycine max
  Clone ID: PAT_MRT3847_89559C.1.pep
ESVGMFVHSLAASHPRNRMATSAYTNASILLNSCYESKTNRTWKHPRSFFFFG

SEQ ID NO: 274129 - protein, 67 aa, Glycine max
  Clone ID: PAT_MRT3847_8955C.1.pep
PPLQLMDPNCSCAAGKRLGMPSVDCSAREAISDPSFFLWSLNFRTGVAPSQRVLGYLSLHPGLFGAP

SEQ ID NO: 274130 - protein, 289 aa, Glycine max
  Clone ID: PAT_MRT3847_89560C.1.pep
MEDGHKFQEVSKPKYDCLLFDLDDTLYPYSSGVSVQIAKNIDEYMIQKLGVEAAKVAELNYSLYKTYGTTMAGLRAIGYDFGYDDFNSFVHGRLPYDVLLKPDPVLRGILQSLPVRKLIFTNADSKHAIRALKTLGLEDCFESIISFDTLNPSNTTNPSHNKDGSESRSTTAEIFDFCEHIRRAESDMVLPRTPVVCKPFDDAFGNAFKLADIDPQRALFFDDSIRNLLTAKRLGLHTVAIGTSVRTTGVDHALESIHNIKEAFPELWDAEVKHEFVQYNVGIETSVKA

SEQ ID NO: 274131 - protein, 61 aa, Glycine max
  Clone ID: PAT_MRT3847_89561C.1.pep
RYVGVTVVPGLVNDKCYIVRHRRTSIYLGVNKCANVYVGIYVIRNITNLRRNNTNLQNKCN

SEQ ID NO: 274132 - protein, 113 aa, Glycine max
  unsure (1)..(113): unsure at all Xaa locations
  Clone ID: PAT_MRT3847_89562C.1.pep
NFXLIVLYQFDHPGIFPLYSTFQNSRFSIHSLLILLXVQLFYQITNKARLSKDDSLFYSXKFLILSNTYIISYSLHHDFNPXNLLLTPKRHTKIPYFSTVIPIHHFQNTFPFK

SEQ ID NO: 274133 - protein, 80 aa, Glycine max
  Clone ID: PAT_MRT3847_89563C.1.pep
AAKRPHIGEIKILGLSFATNSKGTWLNKIWAKLIQITYIIFRYNCRHHSRILCQQRLNSCFTIFLNFTTDTHCLLKLITY

SEQ ID NO: 274134 - protein, 36 aa, Glycine max
  Clone ID: PAT_MRT3847_89564C.1.pep
FLKLNSYRVIREHGTENHLFFYLPKIILNHTCNYLN

SEQ ID NO: 274135 - protein, 139 aa, Glycine max
  Clone ID: PAT_MRT3847_89566C.1.pep
TAARRRQKGLYVDDLLITGNNKVEIDKIKQLLKNQFEMTDLGSLSYFLGIEFKETEAAIVMHQSKYATDLLKKFRMTNCNAAATPAETGLALSLRDEGEPVDETQYRQIVGSLRYLCNTRPDLAFSVGLISRFMQTPKT

SEQ ID NO: 274136 - protein, 125 aa, Glycine max
  unsure (1)..(125): unsure at all Xaa locations
  Clone ID: PAT_MRT3847_89567C.1.pep
PPEGGLPDAPKGFAHFRDVFGKAMGLSAQNMVALFGGPPIGAAPKERFGFEGPWPFNPFIFATSSFPEFFSGXKKGFLQLPFDKVFLFAPVFPPLVDKYPAGENPFFADSAGAPQNLSKLGFVYP

SEQ ID NO: 274137 - protein, 88 aa, Glycine max
  unsure (1)..(88): unsure at all Xaa locations
  Clone ID: PAT_MRT3847_89568C.1.pep
LKVPSYVAGEGEQEALLKMLEGTAVNVTEKGARKHPRGDSIQSDTRNILGIREGAYDDVDKTITERQDDNSIGXGAPIPANMTTAKAT

SEQ ID NO: 274138 - protein, 37 aa, Glycine max
  unsure (1)..(37): unsure at all Xaa locations
  Clone ID: PAT_MRT3847_89569C.1.pep
SPSPQSERASEYXQFPHQWHXPAHLLASLFSGKPKQP

SEQ ID NO: 274139 - protein, 115 aa, Glycine max
  unsure (1)..(115): unsure at all Xaa locations
  Clone ID: PAT_MRT3847_8956C.1.pep
MTPSTATYHHHHFHHHQCHYHQXHCYHHHQCHCHHYCYHHYHXNNSTFYYLYHRRHHHCYHHHXCHHYWLXHHQCCYHHHXRHCHHHLHCRHHQCHLHHNHHCHCHYHRDHHRYL

SEQ ID NO: 274140 - protein, 68 aa, Glycine max
  Clone ID: PAT_MRT3847_89570C.1.pep
SLSEIEPRVSIIRSLLLIVSFFSPQIKGEASGSVFFINSSSNQFIRARSCNSALPSLVLEEAGAVESV

SEQ ID NO: 274141 - protein, 41 aa, Glycine max
  Clone ID: PAT_MRT3847_89571C.1.pep
QGPMPRHMHQLIIIVVHFYLQNTKTVNIKTMKRDKQIILRG

SEQ ID NO: 274142 - protein, 152 aa, Glycine max
  Clone ID: PAT_MRT3847_89572C.1.pep
SELSNDTLNPLSSWNHNSSPGNWTGVLCDKHGQRVTGLDLSGLGLSGHLSPYIGNLSSLQSLQLQNNQLTGVIPDQIGNLFNLRLLNMSTNMLERKLPSNTTHLKQLQILDLSSNKIASKIPEDISSLQKLQALKLGRNSLYGAIPASIGNI

SEQ ID NO: 274143 - protein, 149 aa, Glycine max
  Clone ID: PAT_MRT3847_89573C.1.pep
GTNGGKPPTPPAGRGQKGGGPVRKQGGPPGERAAGGGLSVIPQAGQRGVKPKGVSLVAPRVSPGKGVKNQGPKMGLGKEKKKVSPSNRRAKKTWVPYNRTSPFYFCCSVDLIFVFFISFFLFFFFFFFFFFFFFFFFFFFFFFFFFFFF

SEQ ID NO: 274144 - protein, 133 aa, Glycine max
  unsure (1)..(133): unsure at all Xaa locations
  Clone ID: PAT_MRT3847_89574C.1.pep
VILYVLLAGLLPFQDDNLVALXRRIYRGDFKRPSRISFKARRLMTKLVNVKLTCPITITVLMDSSGIKIPVPNNWMRKKSEEXDPEEKIXLHDPDGTTARNASDMITLSEGLELEAMHKEKNIEESHLLHVTT

SEQ ID NO: 274145 - protein, 67 aa, Glycine max
  unsure (1)..(67): unsure at all Xaa locations
  Clone ID: PAT_MRT3847_89575C.1.pep
INEKNIYCLTRLDHNMALRQISERLTRHESDVKNVIIXGNHSITKNTDVNDATVATSAGEKPVRELI

SEQ ID NO: 274146 - protein, 109 aa, Glycine max
  unsure (1)..(109): unsure at all Xaa locations
  Clone ID: PAT_MRT3847_89576C.1.pep
KAPAAXKVAPITASLGPSSYDGIPSSSASDRITAPFIHFKIEKYDENPSICGELAXRQTPKSMVIACSDITVCPSHVLDSQPGXPLRSKXVANIVPPYDHARYPGTGAP

SEQ ID NO: 274147 - protein, 120 aa, Glycine max
  Clone ID: PAT_MRT3847_89577C.1.pep
MMESTIINQVFFFFCFFLCSLLVSDSSPSASKPTPSFPKEALPTKHGYLPISPTSTSSIFYAFYEAQNSTLPLSQTPLLIWLQGGPGCSSMIGNLYELGPWRITESLTLQRNLGAWNRVF

SEQ ID NO: 274148 - protein, 148 aa, Glycine max
  unsure (1)..(148): unsure at all Xaa locations
  Clone ID: PAT_MRT3847_89578C.1.pep
PEPGLQSLCGVMSPGGPXSMTNIETPGSASQPDEEFKPNAAMEEMIINFLIRVALVIEPKDKEASAMYKQALELLSQALEVWPNANVKFNYLEKLLSSIQPSQAKDPSTALAQGLDVMNKVLEKQPHLFIRNNINQISQILEPCFKHK

SEQ ID NO: 274149 - protein, 136 aa, Glycine max
  Clone ID: PAT_MRT3847_89579C.1.pep
RPTRPYGCENLPEGWRGGVTSNCPANTGVSMCYGTQYDIRGKPYGRLNVHQSCDVQVPAYASLRGRRRTSESKILMTMISSERAYSRTIVSISDEDITKGKDHEALEGPMTTGGLKQAPLVIETRLDICIAAIDDH

SEQ ID NO: 274150 - protein, 104 aa, Glycine max
  Clone ID: PAT_MRT3847_8957C.1.pep
ARATMSDAKEKRKQSVDDDAVPESQQQKKAREEEVVTDEEVEEFYAILRRINTAVKYFKSYGDDVAALEKDIMQHVKEGMKNEKEGHVQGNLSLDLNATPQNPT

SEQ ID NO: 274151 - protein, 97 aa, Glycine max
  Clone ID: PAT_MRT3847_89580C.1.pep
LSITTAHHDPKLWGEDALEFNPMRFVEPRKHLAPYFPFGLGPNYCVGQNLALFEMKIVLVMVLQRYSFVVSPTYAHGPMLLMTVTPQYGMQIVFRRL

SEQ ID NO: 274152 - protein, 71 aa, Glycine max
  Clone ID: PAT_MRT3847_89581C.1.pep
TRPLPPHTPKSFFCSVQVNPHLGFIRYGFALVGFSFFFSFNFSLWVKKSVQLEVSMIHQILFSKCLIVSCD

SEQ ID NO: 274153 - protein, 57 aa, Glycine max
  Clone ID: PAT_MRT3847_89582C.1.pep
STQGRRNMSLFTFTTLFYAISSSQIHSSFSKILSFPVYTQICLSKMTISDFLIVGSL

SEQ ID NO: 274154 - protein, 104 aa, Glycine max
  Clone ID: PAT_MRT3847_89583C.1.pep
DIARRGEYCWCSYEKILYRCWKCVPDVVSPLTRQPFCPISSTVSSKANVAFAANDTHNEKLQKTLVVSNFPSITTSKTTTVVDKRTKLQRSGMERTKKKQNFAI

SEQ ID NO: 274155 - protein, 85 aa, Glycine max
  Clone ID: PAT_MRT3847_89584C.1.pep
KTNQGMKSKFHIDNFVQSPNNHILQFYTQLMQQNMFSFPPFFSLQLTSMSNFLLTEQKSLCNRIESQLSFLLPLIYLLFQCTRNQ

SEQ ID NO: 274156 - protein, 48 aa, Glycine max
  unsure (1)..(48): unsure at all Xaa locations
  Clone ID: PAT_MRT3847_89585C.1.pep
RRGDVEFSQIPHSTALGLVGTLPSDLNSLSQLRXFSLQDNSLTGTLLF

SEQ ID NO: 274157 - protein, 152 aa, Glycine max
  Clone ID: PAT_MRT3847_89586C.1.pep
EAKSNAQNANQRRKWAKKRNKSTVPVPVLTTSVVVPDTPPFSQSDNSEVPKKENNSISEANVSMNIPQKIQSSRPENAPLAPKVEKSVIETDRWMKLPRAMRKSVSPNGGGLPLGDMNASKPDEPVNKESEVIEARTPVKQKRTLEKENNGR

SEQ ID NO: 274158 - protein, 747 aa, Glycine max
  unsure (1)..(747): unsure at all Xaa locations
  Clone ID: PAT_MRT3847_89587C.1.pep
PNTGTVFITLYDLDLATVSLTGPLPDIFDKFPSLQHLRLSYNNLTGNLPSSFSAANNLETLWLNNQAAGLSGTLLVLSNMSALNQSWLNKNQFTGSIPDLSQCTALSDLQLRDNQLTGVVPASLTSLPSLKKVSLDNNELQGPVPVFGKGVNVTLDGINSFCLDTPGNCDPRVMVLLQIAEAFGYPIRLAESWKGNDPCDGWNYVVCAAGKIITVNFEKQGLQDFVSQWQYLIGSIXDSLITXXQLQTLDVSDNNLSGLVPKFPPKVKLVTAGNALLGKXLSPGGGPSGTTPSGSSTGGSGGESSKGNSSVSPGWIAVVLFVSWKCFVNKLQGKFSRVKGHENGKGGFKLDAVHVSNGYGGVPVELQSQSSGDRSDLHALDGPTFSIQVLRQVTNNFSEENILGRGGFGVVYKGVLHDGTKIAVKRMESVAMGNKGQKEFEAEIALLSKVRHRHLVALLGYCINGNERLLVYEYMPQGTLTQHLFEWQEHGYAPLTWKQRVVIALDVARGVEYLHSLAQQSFIHRDLKPSNILLGDDMRAKVADFGLVKNAPDGKYSVETRLAGTFGYLAPEYAATGRVTTKVDVYAFGVVLMELITGRKALDDTVPDERSHLVTWFRRVLINKENIPKAIDQILNPDEETMGSIYTVAELAGHCTAREPYQRPDMGHAVNVLVPLVEQWKPTSHDEEEEDGSGGDLHMSLPQALRRWQANEGTSSIFNDISISQTQSSISSKPAGFADSFDSTDCR

SEQ ID NO: 274159 - protein, 274 aa, Glycine max
  unsure (1)..(274): unsure at all Xaa locations
  Clone ID: PAT_MRT3847_89588C.1.pep
MHAMEFLTLSVTVAAAAFSILFFFLRHAGAGAGSLPPVPAVPGLPVIGNLLQLKEKKPYKTFTQMAHKHGPIYSIRTGASTLIVLNSPLLAKEAMVTRFSSISTRKLSNALKILTSDKCMVATSDYNEFHKTVKRHILTNFLGANAQKRHHIHREAMMENILSQFSEHVKTFSDLAVNFRKIFVTQLFGLALKQALGSNVETIYVEELGSTLSKEDIYKILVVDIMEGAIEVDWRDFFPYLKWIPNRRLEXEIQNLYVRRKAVMKALMNEQKNR

SEQ ID NO: 274160 - protein, 894 aa, Glycine max
  Clone ID: PAT_MRT3847_89589C.1.pep
MSNFLKSLTPPPSGWSETTPFCQWKGIQCDSSSHVTSISLASHSLTGTLPSDLNSLSQLRTLSLQDNSLTGTLPSLSNLSFLQTVYLNRNNFSSVSPTAFASLTSLQTLSLGSNPALQPWSFPTDLTSSSNLIDLDLATVSLTGPLPDIFDKFPSLQHLRLSYNNLTGNLPSSFSAANNLETLWLNNQAAGLSGTLLVLSNMSALNQSWLNKNQFTGSIPDLSQCTALSDLQLRDNQLTGVVPASLTSLPSLKKVSLDNNELQGPVPVFGKGVNVTLDGINSFCLDTPGNCDPRVMVLLQIAEAFGYPIRLAESWKGNDPCDGWNYVVCAAGKIITVNFEKQGLQGTISPAFANLTDLRTLFLNGNNLIGSIPDSLITLPQLQTLDVSDNNLSGLVPKFPPKVKLVTAGNALLGKPLSPGGGPSGTTPSGSSTGGSGGESSKGNSSVSPGWIAGIVVIVLFFIAVVLFVSWKCFVNKLQGKFSRVKGHENGKGGFKLDAVHVSNGYGGVPVELQSQSSGDRSDLHALDGPTFSIQVLRQVTNNFSEENILGRGGFGVVYKGVLHDGTKIAVKRMESVAMGNKGQKEFEAEIALLSKVRHRHLVALLGYCINGNERLLVYEYMPQGTLTQHLFEWQEHGYAPLTWKQRVVIALDVARGVEYLHSLAQQSFIHRDLKPSNILLGDDMRAKVADFGLVKNAPDGKYSVETRLAGTFGYLAPEYAATGRVTTKVDVYAFGVVLMELITGRKALDDTVPDERSHLVTWFRRVLINKENIPKAIDQILNPDEETMGSIYTVAELAGHCTAREPYQRPDMGHAVNVLVPLVEQWKPTSHDEEEEDGSGGDLHMSLPQALRRWQANEGTSSIFNDISISQTQSSISSKPAGFADSFDSMDCR

SEQ ID NO: 274161 - protein, 54 aa, Glycine max
  Clone ID: PAT_MRT3847_8958C.1.pep
SFYLSPSVAVAIIPILTNGFDLIIYINSLLIPRYSSRYDNISYSTLSIYLSTKN

SEQ ID NO: 274162 - protein, 498 aa, Glycine max
  unsure (1)..(498): unsure at all Xaa locations
  Clone ID: PAT_MRT3847_89590C.1.pep
EVWVALAPFLRSAMDGHNVCVFAYGQTGTGKTFTMDGTNKEPGIIPRALEELFRQASLDNSSSFTFTMSMLEVYMGNLRDLLSPRQSGRPHEQYMTKCNLNIQTDPKGLIEIEGLSEVQISDYAKAKWWYNKGKRFRSTSWTNVNEASSRSHCFIYLXLTRISIFRXGKPLLDRSVVSKLWMVDLGRSERLLKTGAKGLSLGGGRAMNLALSALAGGLPACRRTGPHVPYRNSKLTQILKDSLGYGSKVLMLVHISPSEEDVCETVCSLNFAKRARAIESNKEVPVEVKKQKEKKIMELEEDIKEAEKQSQNLREQIQQIELKLNESKKLLFTTYSLVESDHIATSISPKDDVKEVIETPKASKKSIKRNFTNSMPRFMTSTVASRQRQSAAERDIGTVRLKSFRSIASKSSINFSYSQSLSYSDIRIKAILRSSNGKSRYAEADSVPIPKTVLTEKPKCNNDLEPKVTTPRSKMVTSSDQNFRVSLGRHRRRMSDLI

SEQ ID NO: 274163 - protein, 274 aa, Glycine max
  unsure (1)..(274): unsure at all Xaa locations
  Clone ID: PAT_MRT3847_89591C.1.pep
MESLTLSVTVAVVAFSILLFLLLLTRRHAGVGAGAGAGSLPPVPAVPGLPVIGNLLQLKEKKPYKTFTHMTHKHGPIYSIRTGASTLIVLNSPHLAKEAMVTRFSSISTRKLSNALKILSSDKCMVATSDYNEFHKTVKRHILTNLSGANAQKRHRIRREAMMENILSQFSEHIKTFSDLAANFRKIFATQLFGLALKQALGSNVETXYVEELGSTLSKEDIYKILVVDISEGAIEVDWRDFFPSLKWIPXRRMEMKIQNLHVRRKAVMKGLDE

SEQ ID NO: 274164 - protein, 63 aa, Glycine max
  Clone ID: PAT_MRT3847_89592C.1.pep
VPHVLTPLRQHKGEREFLRANSRINKNSPKCDSHGHQHSLSNRIRFLPDMGTECFSDLTFKSH

SEQ ID NO: 274165 - protein, 914 aa, Glycine max
  unsure (1)..(914): unsure at all Xaa locations
  Clone ID: PAT_MRT3847_89593C.1.pep
MFTKLAQNIFHHGFSVDMVSLLCIGTQEVSKNMSLPKTLLSLFLLLTITVVTADDAAVMSNFLKSLTPPPSGWSETTPFCQWKGIQCDSSSHVTSISLASQSLTGTLPSDLNSLSQLRTLSLQDNSLTVTLXFSPTELSLLQTKRLNSKPFSHGLSWQTRRPXSQHSLTSLHTLSLGLSFTTSGXPLSSNKASTIDTVFLPLTFLTISLPFLSSNNLTCYRHSLPSQFCIFLTISKWLHHVCIKPGXKFLAXSSQVSIPKDLVIDYIFMSTYILELLISQCTARXLSDLVLTDPNQLLLVWYQLTQSSCSKKVFLVNIELAQWIPVPGNENVNFTMVLLISVLTNCDXHATHMVLLRIAEAFGYPIRLAESWKGNDPCDGWNYVVCAAGKIITVNFEKQGLQGXTISPAFANLTDLRTLLLNGYNLIASIPDSXITLTQHHTLDEAVDNLTGLVSKFSPKMLLGGGGIASVXRPVEVSKDKSFASFMKFIVVTSGNHTFIRSENLEGXWIASLLKLMKIWXHGLLSKVGRVENNESGSTGSDGIDGPMFVSHLREGLVLGGVRLDXSEENILGRGGWRVYKKQLHDGTKIAVKRMESVAMGNKGQKEFEAEIAVLSKVRHRHLVALLGYCINGNERLLVYEYMPQGTLTQHLFDWEENGYAPLTWKQRVVIALDVARGVEYLHSLAQQSFIHRDLKPSNILLGDDMRAKVADFGLVKNAPDGKYSVETRLAGTFGYLAPEYAATGRVTTKVDVYAFGVVLMELITGRKALDDTVPDERSHLVTWFRRVLINKENIPKAIDQILNPDEETMESIYKVAELAGHCTAREPYQRPDMGHAVNVLVPLVEQWKPTSHDEEEDGSGGDLHMSLPQALRRWQANEGTSSIFNDISISQTQSSISSKPAGFADSFDSMDCR

SEQ ID NO: 274166 - protein, 55 aa, Glycine max
  Clone ID: PAT_MRT3847_89594C.1.pep
TLIPKLQHQQQLAHYNTQLLKFLMLPRAKHADAEPIVVLTLRHTLHNTTKDLTII

SEQ ID NO: 274167 - protein, 158 aa, Glycine max
  unsure (1)..(158): unsure at all Xaa locations
  Clone ID: PAT_MRT3847_89595C.1.pep
LLLDAKFGSLFESIGNFFTGGEQIPWCDRDVIAGCEREVAEAANGDSEERKNESIMRLSWALVHSRQKEDIQRGIAMLETSLGNDKSPLHQREKLYLLAVAYYIINDYGRSRQLEEQCLEIAXDCTQALSLKKIAEDRIATDGVIRIGITATAVPPIL

SEQ ID NO: 274168 - protein, 47 aa, Glycine max
  Clone ID: PAT_MRT3847_89596C.1.pep
ETRTAQLAHELPTQQAINRTGQHASRRTKHPQPATRKKAPSKAQTTH

SEQ ID NO: 274169 - protein, 67 aa, Glycine max
  unsure (1)..(67): unsure at all Xaa locations
  Clone ID: PAT_MRT3847_89597C.1.pep
SILFCITISXLREQHXXSNEXLGFXCEESQHGYNXXXDSRFXSRXMVEXXXIXVXGVXLXSXGXXXA

SEQ ID NO: 274170 - protein, 91 aa, Glycine max
  unsure (1)..(91): unsure at all Xaa locations
  Clone ID: PAT_MRT3847_89598C.1.pep
XXXRXPXRXEXPXKPXPSXXXXQGGPGXXGXGXGXXGEXXXXXXXXKPRXXTXXRKAXXXXXDNPXGTGXXXXEXXXXXAKTDEEATTDPT

SEQ ID NO: 274171 - protein, 159 aa, Glycine max
  Clone ID: PAT_MRT3847_89599C.1.pep
MACLLRARNPCYSLMRRIRIRCMSNVPENTVYSGPTSQSSTKRVTLSQLRQKHRSSQPITMVTAYDYPAAVHLDTAGVDICLVGDSAAMVVHGHDTTLPITLEEMLVHCRAVARGAKTPLLVGDLAFGTYESSSNQAVDTAVRMLKEGGMDAIKLEGGS

SEQ ID NO: 274172 - protein, 54 aa, Glycine max
  Clone ID: PAT_MRT3847_8959C.1.pep
AWTIQGYVHGAKSDGVMAAVNCQNYLLEIIGQVKKLYIDYVRHEMLKTLRPIQI

SEQ ID NO: 274173 - protein, 57 aa, Glycine max
  Clone ID: PAT_MRT3847_895C.1.pep
VPQPPPIPPGTRLPSPPTPLIPPVGLLRPPPSPPLPPYPPRIPAPAPPVGSPLFPIQ

SEQ ID NO: 274174 - protein, 47 aa, Glycine max
  unsure (1)..(47): unsure at all Xaa locations
  Clone ID: PAT_MRT3847_89600C.1.pep
SHLCEKERTLKDSXKMKIDNQLVLXLKLLFEKIEMSSLALPSDVDSQ

SEQ ID NO: 274175 - protein, 104 aa, Glycine max
  Clone ID: PAT_MRT3847_89601C.1.pep
DNALYLLIEGVLAANIFDWGSHACVDLYHKGTILEIYRISHNKMQRPWRVDDFHAFKQRMLGTGDKKPPLHRRALLFVDNAGADTIWILFKKKQYLRIKIIMTN

SEQ ID NO: 274176 - protein, 58 aa, Glycine max
  Clone ID: PAT_MRT3847_89602C.1.pep
YHSICFQLQYIYIYDSSRKQCFYLFTMKYFFLFILFKEKGNRNLTYSGRFIFLILNFD

SEQ ID NO: 274177 - protein, 84 aa, Glycine max
  Clone ID: PAT_MRT3847_89603C.1.pep
LAPADPSVLYHLHSGLQMHLSAYNHLRASYACNVPYSSVWNPSSCGFDSSSGVATGMPNYRSAALAKRSHSFIGRGAASTHQHL

SEQ ID NO: 274178 - protein, 114 aa, Glycine max
  Clone ID: PAT_MRT3847_89604C.1.pep
ITVETTDYNESSDSAINVDDSCLSSRQENGLSEHNSKLSLLGHGPHGKRVVEYLLKEYGEDGIRAFCQRWRQVFVDAVNPRFLPGGWDVKHSGRRDFGKFSVYNPDKRGAAAST

SEQ ID NO: 274179 - protein, 76 aa, Glycine max
  Clone ID: PAT_MRT3847_89605C.1.pep
GVFLWSLIYFGFVACSFIYIFEILRNSFAVNKRCVFFFLVFFFLFYTFVMYVVFFCLVFICLGFFWYLCLCLFYQY

SEQ ID NO: 274180 - protein, 41 aa, Glycine max
  unsure (1)..(41): unsure at all Xaa locations
  Clone ID: PAT_MRT3847_89606C.1.pep
AEMNIRSFKHAWVADKLKANREXXITIDMASWNFESTIILL

SEQ ID NO: 274181 - protein, 52 aa, Glycine max
  unsure (1)..(52): unsure at all Xaa locations
  Clone ID: PAT_MRT3847_89607C.1.pep
FHIWSGVKYXLXLTPLVLLWTPLLGDSPNKGLDFSLPQXHKSGESGGWRVFG

SEQ ID NO: 274182 - protein, 83 aa, Glycine max
  unsure (1)..(83): unsure at all Xaa locations
  Clone ID: PAT_MRT3847_89608C.1.pep
MKWIDVHGTLIEVTEAQNRLLGEKTCGSLLKNVQEIWDEVRAXDEQRDKMLLQLEQELLDVYKRKVEQAAKSRXAQVLQALSD

SEQ ID NO: 274183 - protein, 100 aa, Glycine max
  Clone ID: PAT_MRT3847_89609C.1.pep
MEQRGRGRVCVTGASGFLASWLIKRLLLSGYHVIGTVRDLGKQKKYEYLWCLEGATERLQLVQADLMEESSFDNAIMGCKGVFHVASPVLNTISDPKVLN

SEQ ID NO: 274184 - protein, 42 aa, Glycine max
  Clone ID: PAT_MRT3847_8960C.1.pep
QTQFCVQLYSNGCPLTILTLVAFDYLFTDSYKSKHSKNSASN

SEQ ID NO: 274185 - protein, 51 aa, Glycine max
  Clone ID: PAT_MRT3847_89610C.1.pep
MTPARLLRQLRNSGIERKASTATNAESANEYFERGQTGLLDQIMWMKAGDC

SEQ ID NO: 274186 - protein, 59 aa, Glycine max
  Clone ID: PAT_MRT3847_89611C.1.pep
SMHRVSSLRPYLSISDLIQDNHTALPCPGQLLDRRAPSPLSENLEPREEISLSLLMKPV

SEQ ID NO: 274187 - protein, 74 aa, Glycine max
  Clone ID: PAT_MRT3847_89612C.1.pep
PRPLPSTLASPSLPPLQAATYLAYSCMRATETTFSRVLYLASLRAANPPVHLRAVCLVRATARHNVPFFVKTNA

SEQ ID NO: 274188 - protein, 77 aa, Glycine max
  Clone ID: PAT_MRT3847_89613C.1.pep
KEKSFAKGKPLEESYLSYFLFFYNQQIQSLFPFLNFLFGVPNIKCVTNAVVCIQHKYGVIFNDPVYAYSICRIRYSM

SEQ ID NO: 274189 - protein, 458 aa, Glycine max
  Clone ID: PAT_MRT3847_89614C.1.pep
MEKMKIEEVQSTTKKQRVATHTHIKGLGLEASGKALSFAAGFVGQVEAREASGLVVDMIRQKKMAGRALLLAGPPGTGKTALALGISQELGTKVPFCPMVGSEVYSSEVKKTEVLMENFRRAIGLRIKENKEVYEGEVTELSPEETESVTGGYGKSISHVIIGLKTVKGTKQLKLDPTIYDALIKEKIAVGDVIYIEANSGAVKRVGRSDAFATEFDLEAEEYVPLPKGEVHKKKEIVQDVTLHDLDAANARPQGGQDILSLMGQMMKPRKTEITDKLRQEINKVVNRYIDEGVAELVPGVLFIDEVHMLDMECFSYLNRALESSLSPIVIFATNRGICNVRGTDMTSPHGIPVDLLDRLVIIRTQTYGPAEMIQILAIRAQVEELVVDEESLAFLGEIGQQTSLRHAVQLLSPASIVAKMNGRDNICKADLEEVCTLYLDAKSSARLLQEQQEKYIS

SEQ ID NO: 274190 - protein, 137 aa, Glycine max
  unsure (1)..(137): unsure at all Xaa locations
  Clone ID: PAT_MRT3847_89615C.1.pep
LEQEINKVVNRYIDEGVAELVPGVLFIDEVHMLDMECFSYLNRALESSLSPIVIFATNRGICNVRGTDMTSPHGIPVDLLDRLVIIRTQTYGPAEMIQILAIRAQVEELVVDEESLAFLXEIGTXTSXRHAXQTVSP

SEQ ID NO: 274191 - protein, 398 aa, Glycine max
  Clone ID: PAT_MRT3847_89616C.1.pep
MAASSSLFSSSMHMEMFAPKTSKCPQNFVCCHSKISYIEPNYLKPVCCPNSRSLSMNMSSKWEQTDRRDALHCRALKIEPAPSFSVGQKFQFDDIIEAQQFDRDILSAIFEVARNMENVEKDSPGSQILKGFLMATLFYEPSTRTRLSFESAMRRLGGEVLTTENAREFSSAAKGETLEDTIRTIEGYSDIIVMRHFESGAARRAAAIADIPIINAGDGPGQHPTQALLDVYTIQREIGKIDDIKVGLVGDLANGRTVRSLAYLLAKFKDVKIYFVSPDVVKMKDDIKDYLTSKGVEWEECADLVEVASECDVVYQTRIQKERFGEKIDLYEKARGKYIVNQGILNVMQRHAVVMHPLPRLDEITLEVDADPRAAYFRQAKYGLYIRMALLKLLLVGW

SEQ ID NO: 274192 - protein, 84 aa, Glycine max
  Clone ID: PAT_MRT3847_89617C.1.pep
PGSDELTLVGRPSPLSSLWFLLLFVYILFFFLLFFIFFFTFLFSFLILFFQERGNGHAFFFPKFKNEGLLKKKIKRGRGTRGKL

SEQ ID NO: 274193 - protein, 97 aa, Glycine max
  unsure (1)..(97): unsure at all Xaa locations
  Clone ID: PAT_MRT3847_89618C.1.pep
XXXXXXDIXXARXXXXDTTXLXRXLKPYFXSXRRPEXXHXXTTXFIXXXXLXXXNNXXIRXXXXLNVLXSGXXSFEGHXQIPXHESQAGYXIXVXXF

SEQ ID NO: 274194 - protein, 77 aa, Glycine max
  Clone ID: PAT_MRT3847_89619C.1.pep
QIPIGFPNLPQNPMARQKVAHNKEFSFFWPPLLVGHFPSPKKKCPLGQTILFMDTWGPKKASMQVCIPLKGETKGFP

SEQ ID NO: 274195 - protein, 42 aa, Glycine max
  unsure (1)..(42): unsure at all Xaa locations
  Clone ID: PAT_MRT3847_8961C.1.pep
SHDPEMRYAPWIMAQDLILINYIANHGGSVXNSLTNASGLNP

SEQ ID NO: 274196 - protein, 167 aa, Glycine max
  unsure (1)..(167): unsure at all Xaa locations
  Clone ID: PAT_MRT3847_89620C.1.pep
TKKTLSLSIRVDHTTNKRIEVPENIVTPFTNLFIWMLGNNATWLLLVDLAAIGKTTFTPKLILXNLLPRIPTIXIMSLLRQNKNITSTVEHGVGKDNIRSIXRHYFHNTEWLKDHAQTSNDRERVVNPRDXWHMMLNEGYPTDXALLRFADITDPSNAKNAKQITDK

SEQ ID NO: 274197 - protein, 45 aa, Glycine max
  Clone ID: PAT_MRT3847_89621C.1.pep
LNSTIFSTPPLNLFPLDNITQGRERIKIKTKTHALHFLASLSNNL

SEQ ID NO: 274198 - protein, 55 aa, Glycine max
  Clone ID: PAT_MRT3847_89622C.1.pep
YTASSFIASGNPADDTINPEALPHTLVHPAEIQENAASKPSPRGTPHSPSNTGAP

SEQ ID NO: 274199 - protein, 83 aa, Glycine max
  Clone ID: PAT_MRT3847_89623C.1.pep
GMNYKQKEIQVFRSYQLRKICPNHKSLLYILRDGSKPLHRIHLKHRNGTILNHVQFPKVSLGLSYQQYPLQNVSSSFPFDHQM

SEQ ID NO: 274200 - protein, 432 aa, Glycine max
  Clone ID: PAT_MRT3847_89624C.1.pep
MAYGGSGSASTIKQVKLERESELRIEVGNDAPLRLRLLNGTAEIFGTELPPEIWLNFPPRLKFAVFTWYGATIEMDGATETDYTADETPMVSYVNVHAVLDGRRSRAKASSPDDSGSSQGPRVIVVGPTDSGKSTLSRMLLSWAAKQGWKPTFVDLDIGQGSITIPGCIAATPIEMPIDPVEGIPLEMPLVYYYGHATPSNNVELYKVLVKELAGMIERQFTGNAESRASGMVINTMGWIEGVGYDLLLHAIRTFKANVVLVLGQEKLCSMLKDVLKSEPKVDVVKLQRSGGVVSRNAKVRQKARSYRIREYFYGLSNDLSPHSNIANFSDLFVYRVGGGPQAPRSALPIGAEPAADPTRVVPVNINRDLLHLVLAVSFAKEPDEIISSNVAGFIYVTDVDIQRKKITYLAPSAGELPSKYLIMGSLTWLET

SEQ ID NO: 274201 - protein, 35 aa, Glycine max
  Clone ID: PAT_MRT3847_89625C.1.pep
NFVQISFTEFASMVNLSQEGSRYPLKDSFCCFTKY

SEQ ID NO: 274202 - protein, 47 aa, Glycine max
  unsure (1)..(47): unsure at all Xaa locations
  Clone ID: PAT_MRT3847_89626C.1.pep
PPEGRHPRLGRXQGGRLKTEKRLXRGXXRPLXXXXXXXXTPGRPPFS

SEQ ID NO: 274203 - protein, 42 aa, Glycine max
  Clone ID: PAT_MRT3847_89627C.1.pep
ARSIGVYQIFRTHKCLNGCTLIKTLGFVLGLCITPLIFYSPS

SEQ ID NO: 274204 - protein, 68 aa, Glycine max
  Clone ID: PAT_MRT3847_89628C.1.pep
LCLSYLISQQYTVTTREYACLLVIFPSPLKTHCENPKFYREVPFGPMRFYHHIMQYIKIVLYTFLNID

SEQ ID NO: 274205 - protein, 130 aa, Glycine max
  Clone ID: PAT_MRT3847_89629C.1.pep
PRVRAATFFYIRSYHSTALTFTALLTLRGELSPCFLFLPWKRITSNYTFLNRNTTQRRSTARGCAHGRPYDNKFIGIYSSDFDYHTKAGEGHVGGKEAYPHSRRENTSSSEGSNRSNAESTTDWEHGMRS

SEQ ID NO: 274206 - protein, 69 aa, Glycine max
  Clone ID: PAT_MRT3847_8962C.1.pep
LGGLWFLSQVFRVIPYNFWFLASEIYCKIFHGFAPKKTQSFIFLLFRAGMILCPLTPPSIMRRGKKKKR

SEQ ID NO: 274207 - protein, 49 aa, Glycine max
  Clone ID: PAT_MRT3847_89630C.1.pep
KKGKINNNNNNNKKEREGNNYQNGPFPMPHLTNQPLTLKIPTCFKDPNH

SEQ ID NO: 274208 - protein, 35 aa, Glycine max
  Clone ID: PAT_MRT3847_89631C.1.pep
QRTGTFKRKQRLSPPENKNRMKPRYTNVNDTQRQR

SEQ ID NO: 274209 - protein, 50 aa, Glycine max
  Clone ID: PAT_MRT3847_89632C.1.pep
FSPTRHSLFIFRDQLSFLASGMTNQERRKTFLKECSKQLGKCRKQQSLFS

SEQ ID NO: 274210 - protein, 167 aa, Glycine max
  Clone ID: PAT_MRT3847_89633C.1.pep
VVLVAQLRKSSIITFQIRDKHLYDLLQNESCEAFRYNYTIPPFFHFAALRIQYHTTLFRCNRSLHVSPPTGMLNYTKCPDYDLYYKHIITADDVSRSSLVACTEVQLPIKDVPDAINPFTFVTADIIIRVDLTDECADCNYRHGGQCKLDSTEKFCCANAIKQQGVG

SEQ ID NO: 274211 - protein, 108 aa, Glycine max
  Clone ID: PAT_MRT3847_89634C.1.pep
GVASTFAKSRQIDEQPYSLLRNPLFGLLPLLRICCQDTEDHDERGSNVIPAPDSHGWIVHDDSRMVDEAGEKRPLAEAVEHSCKQNRRTRTFASGASLSLKVTGRSSH

SEQ ID NO: 274212 - protein, 95 aa, Glycine max
  Clone ID: PAT_MRT3847_89635C.1.pep
GARSKVVHMYPRTLGVGNGVLDGLEDDLLGFSKVVRQCVFARYSPGYGSAPLAWRTRSLGLAGPCQGMPAWPLPAEQVALKELLLPALLWSPSGG

SEQ ID NO: 274213 - protein, 86 aa, Glycine max
  Clone ID: PAT_MRT3847_89636C.1.pep
LIITHYIKALFLSFGEPNHSLFVALHRNAQTQYETITVHMNLTTIITTPKKHKHPRFILIMWDKHNSFLKYNQGYNCCYHDRCPTS

SEQ ID NO: 274214 - protein, 44 aa, Glycine max
  Clone ID: PAT_MRT3847_89637C.1.pep
AIFFYSITFQKIYHQFLKSTNKEWAKCAPTNVCSPYTNVPLQKK

SEQ ID NO: 274215 - protein, 86 aa, Glycine max
  Clone ID: PAT_MRT3847_89638C.1.pep
FLQIGFMMVSFCVLLHFFSMLHDKHWLFFSCCMLLGSHGIAIGRIIVSQGVSIMKIHKGYGMEFLIMKIFPMCSMMKQPQRKLVGT

SEQ ID NO: 274216 - protein, 113 aa, Glycine max
  unsure (1)..(113): unsure at all Xaa locations
  Clone ID: PAT_MRT3847_89639C.1.pep
PLPLGRKPLGVGIAGRKMGIGAFXKVLNNLPPEGYTFFNPLFLGTYWAKLGPTKFVPLREIPPRVLWPVMSFSLFVMEIQGVLAKKRLFCWFVGPQFSRSLDILFFFLKKNIK

SEQ ID NO: 274217 - protein, 114 aa, Glycine max
  unsure (1)..(114): unsure at all Xaa locations
  Clone ID: PAT_MRT3847_8963C.1.pep
MRNDVEVADPRSFSGKDYQDHSPTXLIDADELTKWYFYRALIDVLIXTLLLLYITVLTGIRYKHQTDHADAPGDVDILCIAWAFGGMIFILDYCTAGISGGDINPTKTFGLILA

SEQ ID NO: 274218 - protein, 126 aa, Glycine max
  Clone ID: PAT_MRT3847_89640C.1.pep
PTREEIKAAKRELSSLLEELEACRRAAGHARNLPERQDLMDQVVKAGATVLAYYASLPPDLARRILPNDRARRLRDDTVREADECNEVATQIIYELEESRKKAQGVLDSLKDIASPAQLSRLFTSV

SEQ ID NO: 274219 - protein, 34 aa, Glycine max
  Clone ID: PAT_MRT3847_89641C.1.pep
KLVAINAGVTEQTSLFSCPPKVYSTKYLSCVYKI

SEQ ID NO: 274220 - protein, 57 aa, Glycine max
  Clone ID: PAT_MRT3847_89642C.1.pep
DQIGFGRIRYDWDLNQIILLYLVIRITLQLVVLFNFTIDSLFTMLARAQDCQDIESS

SEQ ID NO: 274221 - protein, 285 aa, Glycine max
  Clone ID: PAT_MRT3847_89643C.1.pep
KSQIEQVVGAATAVAIQSLKNRYFGFLISRKKYVVCIDDDCVPAKDNSGILVDAVAQHIVNLQTPATPFFFNTLYDPFCKGADFVRGYPFSLRSGVDCALSCGLWLNLADLDAPTQALKPGQRNLRYVDAVLTVPSRAMVPVSGINIAFNREAVGPALVPALRLAGEGKLRWETMEDIWCGMCVKVICDHLGLGVKSGLPYVWRTERGDAIQSLKKEWEGVKLMEDVVPFFQSLRLPQSATTAEACVVEVAKTVKEHLGKVDPMFSEAAQAMEEWVKLWKSVRSG

SEQ ID NO: 274222 - protein, 384 aa, Glycine max
  Clone ID: PAT_MRT3847_89644C.1.pep
MAVTSPLVVAGSQLRCHNFRRTRHWALTLSWEKQQLKRAQKCGGDENPWKPVKIVMRVVDHHPRDGDVSYGLHKDLVSLPKPLSISDIVAASDDHAKVRISYKGIPGSYSEDAALKAYPNCETVSCNDFEEAFKAVEIWWADKVILPIENTSGGSIHRNYDLLLRHRLHIVGEVQLATNLALLALPGVRTEYLKRVLSHSQAFELSDDFLTKLGVARENVDDTAGAAQIIASNGLYDAGAIASIRAAEIYGLNVLAERIQDDSEIISRYLVLARDPIIPKADKPFKTSIVFTLDEGPGVLFKALAVFALRDINLNKIESRPQRNRPLRVVDDSNTGTAKYFDYLFYIDFDASMTEPRAQTALGHLQEFATFLRVLGCYPIDTTI

SEQ ID NO: 274223 - protein, 44 aa, Glycine max
  Clone ID: PAT_MRT3847_89645C.1.pep
GPYEPCTYMGFQQLPKGSPPPDLKPPQHYSPRLRIIYSKHLFCS

SEQ ID NO: 274224 - protein, 72 aa, Glycine max
  Clone ID: PAT_MRT3847_89646C.1.pep
RAKFLLKKYRKGGGQITRMGHAQFTKPSPPNPLRFTQPIHYFYSLSPYGSDFHFSNNFNLKEKKKNLMKIYT

SEQ ID NO: 274225 - protein, 122 aa, Glycine max
  Clone ID: PAT_MRT3847_89647C.1.pep
FVIESLKIYSDNKLINAGSEQNMTQSYLDVRDMCFVVTREEMENERIHSNKVKNFGMQEEEQLNKNPVHTFELNALQQGKQKTKKISCTGQKQPWKKRGQRRKRGERSGWKMRKWRSVGRPG

SEQ ID NO: 274226 - protein, 55 aa, Glycine max
  Clone ID: PAT_MRT3847_89648C.1.pep
KFFTSGKIKGQPPCYHNENIQKIKFLNLKKITPEPKKGPQTIPNSQKNFSGQGLL

SEQ ID NO: 274227 - protein, 67 aa, Glycine max
  Clone ID: PAT_MRT3847_89649C.1.pep
IGSIPFVWNFLEGHNRIVGNDPTTSPKAIHYTRGGPWFEAWKNCEFADLWLNEMEDYMKQAKKEQSA

SEQ ID NO: 274228 - protein, 98 aa, Glycine max
  Clone ID: PAT_MRT3847_8964C.1.pep
FSATALHLLSGSYSYADQINTGGAGLCGGYCCWHLLSAVLHRACYCRSCHHHRHSGCHCQHDVLHCRYHGQLAAAASNSGASVHQAVLPHMPYHRSGT

SEQ ID NO: 274229 - protein, 149 aa, Glycine max
  unsure (1)..(149): unsure at all Xaa locations
  Clone ID: PAT_MRT3847_89650C.1.pep
RSCFPWVYPRFLPRVRPPVRGRVGITPNGSMLDLKISQCRIALPKHTXGGTILRRDLLSHYMTEGNFRARVDLHRSHRXKGMIQMVATVGIPENTGISLACAMNSSFWGRASSDIYTICSQDCESWNPCLHTHHCLLSSYSNKRYSFCP

SEQ ID NO: 274230 - protein, 43 aa, Glycine max
  Clone ID: PAT_MRT3847_89651C.1.pep
IYIKATFYSFLKIDEILSILFDVCYILYFCWCKKKKKGRPPAI

SEQ ID NO: 274231 - protein, 166 aa, Glycine max
  unsure (1)..(166): unsure at all Xaa locations
  Clone ID: PAT_MRT3847_89652C.1.pep
MAAEEMAPLVGGGDSSSATARAQSSFVKKGDRQMFTVELRPGETTIVSWKKLMKDANKVNNGSASAPEHRAPNANPALESRIAPGQPKEIEEEGAPHTYRFSAVIEKRERLYMGKDSSDEEDALDVPDDHYDTIXPFIDDAELDEYFEVDNSAIKHDGFFVNRGEI

SEQ ID NO: 274232 - protein, 61 aa, Glycine max
  Clone ID: PAT_MRT3847_89653C.1.pep
MLPWFVFFLADFRDTWAFLDARVKDAFDLKKTIQEAQYLAEAVSTGLGNSFQGFVGKVFQR

SEQ ID NO: 274233 - protein, 73 aa, Glycine max
  Clone ID: PAT_MRT3847_89654C.1.pep
RFCVTLRAHRIAEERCGLSALRNPSFANSHLYGSIFIIHSAGHGAPHHFEPPKSNIELSKKKKVFWNSIMARA

SEQ ID NO: 274234 - protein, 267 aa, Glycine max
  Clone ID: PAT_MRT3847_89655C.1.pep
MAAIARLRTAALGLRPNRGFGSAAAVQCYYDDDDYDDEEEMEEERAPRGALDAQGCAPENGVQWVMIGEPGAKRHQFAQRLSKLLEVPHISMATLLSQDLNPRSSLYQQISHTLDHGKLVPEDIIFGLLSKRLEDGYSRGETGFILDGFPRTRIQAEILDHIARVDLVVNFKCSEEELRKKNLGTRKFNAYQEYILMTSSRTTKQLQDDHDQSHADKCKLLEDYYRKQKKLLNFEVAGGHGETWKGLLAALHLRHINALRSSQKLTA

SEQ ID NO: 274235 - protein, 154 aa, Glycine max
  unsure (1)..(154): unsure at all Xaa locations
  Clone ID: PAT_MRT3847_89656C.1.pep
MLCNFRNFNCSSSRHFSLASVLLQQQKFSAVASSPNKNLNAVLIDAVRTPFLQSNTTFRELLAVDLQRHALKALVERTKIPFDEIGHIICGQAVQECITSNIAREAESTAGFPDSIPCNTDTLACISCAVQFIILAXMIFTGYLKAGIAGGVEL

SEQ ID NO: 274236 - protein, 79 aa, Glycine max
  Clone ID: PAT_MRT3847_89657C.1.pep
APRAYVMRNRYRIAIGNSERATPTLRPHSKPTPGRAIGPGSRFQSGTHSPVWLCLTFSFFFFFFFFFFFFFFFFFFSRA

SEQ ID NO: 274237 - protein, 67 aa, Glycine max
  Clone ID: PAT_MRT3847_89658C.1.pep
FSGLRSFPASSLFYTSLRISMLSLPCRPMQCGISGGFNKGVTEALLKVAINGFGRIGRNFLTYWLGR

SEQ ID NO: 274238 - protein, 112 aa, Glycine max
  Clone ID: PAT_MRT3847_89659C.1.pep
VQWALGKAGEDRVHVVVSEELGWLFVGIYDGFNGGDAPEFLMGNLYRAVHNELQGLFWELEEEEQPLPQESNPVVEGTESKRRKLWELLAEDGLDLSGSDRFRFPWTKCVER

SEQ ID NO: 274239 - protein, 73 aa, Glycine max
  Clone ID: PAT_MRT3847_8965C.1.pep
LCTQQTLTWKAPIHIRRSLFPQRKSSTLYIIYNIFITQTFYKDFYNLTRENKNGPDHTCTPRPVRIAWFQVRS

SEQ ID NO: 274240 - protein, 142 aa, Glycine max
  unsure (1)..(142): unsure at all Xaa locations
  Clone ID: PAT_MRT3847_89660C.1.pep
ERAAAERKWYRNVLMYGFHFAVSFIGGIWNIKDTQCGFKLFTRRTAQFLFFNQRLRRWCFDVELLQLFXRHGKIPMVEVGVRWREIPGSKLNLLESSFLMARDLVVIRLAYFLHIWTADQPPSNVTELKQTAASLAARAKAA

SEQ ID NO: 274241 - protein, 117 aa, Glycine max
  Clone ID: PAT_MRT3847_89661C.1.pep
VWTSSAFSALDKVYGSTAEPSALKKDYLLPSSMMSQPDLSKIINSSDVQKVLRPVRGGAVSKRGVVQKKNPLKNFQVQLRLNPYAATFSKEKLGQKKLEASKPEPAADTFLDLLHEN

SEQ ID NO: 274242 - protein, 45 aa, Glycine max
  Clone ID: PAT_MRT3847_89662C.1.pep
GVKFECGLPHSLGYYTPLENAWCRRSAWKFKKKVGVSISESVPRK

SEQ ID NO: 274243 - protein, 55 aa, Glycine max
  Clone ID: PAT_MRT3847_89663C.1.pep
RGRVGGRVGGRVGVNVGDILGVWKNCIILLHNASMYCFHRIVKSSIACDPLNSIV

SEQ ID NO: 274244 - protein, 73 aa, Glycine max
  unsure (1)..(73): unsure at all Xaa locations
  Clone ID: PAT_MRT3847_89664C.1.pep
IFPNPGDPYPGKVFLSSKPGSFGMVFALSTTTRARTSKMHHLAISLYPTIFFSQCNTRYTCLDNCXSPLVIVP

SEQ ID NO: 274245 - protein, 50 aa, Glycine max
  Clone ID: PAT_MRT3847_89665C.1.pep
KHKNSFLELDLSKPWVDFTNFRPHIIGLTFWRTPILVKRPKRLNTFFFWV

SEQ ID NO: 274246 - protein, 81 aa, Glycine max
  unsure (1)..(81): unsure at all Xaa locations
  Clone ID: PAT_MRT3847_89666C.1.pep
ASAHIPPPISTVTKLSPSPTLNYAPLTSINCYHHIDTLKIYPLMHAIDXNKSESEFNSTSFDAKYHHVQRKNYRSSISKFH

SEQ ID NO: 274247 - protein, 57 aa, Glycine max
  Clone ID: PAT_MRT3847_89667C.1.pep
FLFPSEAVSECPHNGMPRSSFFQKRFFRLLNVGGPSRVKLPTPPMVILSLSFSHLAN

SEQ ID NO: 274248 - protein, 96 aa, Glycine max
  Clone ID: PAT_MRT3847_89668C.1.pep
MSKQQQSFAATAAAKRGPSPPSSDQIKKKRRETPTTILSLDPDIVTTIFAFLDMFDLVRCSLVCKLWNAIVESRSLREFCERKMHKSFAEFTKKPL

SEQ ID NO: 274249 - protein, 94 aa, Glycine max
  unsure (1)..(94): unsure at all Xaa locations
  Clone ID: PAT_MRT3847_89669C.1.pep
SSRNAKWTVELIPEFDNIIRLKSCTIYYHVAEXYGGCRSAACPPLLLGVTGRMVVQRVPRRRDAAAGXEGVIGPARDGAQVKLKTRYGNFLRAN

SEQ ID NO: 274250 - protein, 46 aa, Glycine max
  Clone ID: PAT_MRT3847_8966C.1.pep
SQQLSKQPPRFNKKTVEKFMGTDNYKKIARIAFPFFFFFWGGGKGR

SEQ ID NO: 274251 - protein, 53 aa, Glycine max
  unsure (1)..(53): unsure at all Xaa locations
  Clone ID: PAT_MRT3847_89670C.1.pep
DMRKLCGFFFSLLLLAFASQVEVQTDGRVYKXHSHGFHGLCDRYHNCALVCLN

SEQ ID NO: 274252 - protein, 184 aa, Glycine max
  unsure (1)..(184): unsure at all Xaa locations
  Clone ID: PAT_MRT3847_89671C.1.pep
MQNFAESHQLSVMCSSYSSNVDVFDTGKYTAKLLRVESESESYTHNNNFPPPPKSLLIATPLEGGDFPLLLFLHGYLLYNSFYSQLIQHVASHGFIVIAPQLYTVAGPDTSDEIHSAAAITNWLSEGLCKFLPPNVRPNLSKLALAGHSRGGKTAFALALRNXHPTNLKFSALIXVDPVDGMDK

SEQ ID NO: 274253 - protein, 58 aa, Glycine max
  Clone ID: PAT_MRT3847_89672C.1.pep
QKHAHLLSCQLVFIHDQGSLHFQTWGIVQGNSYIETFLMFLDKKLICEGIIIFLLGAV

SEQ ID NO: 274254 - protein, 90 aa, Glycine max
  unsure (1)..(90): unsure at all Xaa locations
  Clone ID: PAT_MRT3847_89673C.1.pep
IPYSPVALYNNSSLNFFFFSKIHCLFFKAALSLFSKGPLPLFKKNTVVLFSPYLPFSIFFFCALKPDVFPFPFVMLVPFPLXNQLSPFSI

SEQ ID NO: 274255 - protein, 50 aa, Glycine max
  unsure (1)..(50): unsure at all Xaa locations
  Clone ID: PAT_MRT3847_89674C.1.pep
IDVKNVGSFRRIILCLEPVSLSDLLHINLSCSLVMCCRTRGSSVGLRXRF

SEQ ID NO: 274256 - protein, 67 aa, Glycine max
  Clone ID: PAT_MRT3847_89675C.1.pep
QQNLTYLQTSDAHKIHIWSIYRKSLEADLLKTFPSSFSRLYICFSQMTRSDCDSNKGPIDSAPCIST

SEQ ID NO: 274257 - protein, 75 aa, Glycine max
  Clone ID: PAT_MRT3847_89676C.1.pep
LFFFFFFFFFFFFFFFFFFFFFFFGGPTQKFKPYEKGGGDQREKKKKKKESIWNRKQTKTTLIKTTPKKTIGKNP

SEQ ID NO: 274258 - protein, 334 aa, Glycine max
  Clone ID: PAT_MRT3847_89677C.1.pep
MTDAASDSRNDAAVQATNDDASASKLSCVKKGYMKDDYIHLFVRRPVRRSPIINRGYFARWAAFRKLLYQFLDVEKKTDGDAPIKKQILSLGAGFDTTYFQLQDEGKTPYMYVEVDFKEVTSKKAALIENYSQLRNKLGEIATISREKGEVVSAHYKLVPADLRDIQQLNNIISVAGMDPSLPTFIISECVLIYLDPDSSRAVVGWASQAFSTAIFFLYEQILPDDAFGQQMIRNLESRGCALLGIYDTPTLHEKEKLFLDQGWQKSVAWDMLRIYNDFIDAPERHRIERLELFDEFEEWYMMQEHYCVAYAINDGMGLFGDFGFVNDNNVLPS

SEQ ID NO: 274259 - protein, 48 aa, Glycine max
  Clone ID: PAT_MRT3847_89678C.1.pep
GGMGVTNSNSLYFVNLHILPDVECYCVWDNSYSHLNFFHDNLFFLVQL

SEQ ID NO: 274260 - protein, 50 aa, Glycine max
  Clone ID: PAT_MRT3847_89679C.1.pep
GCEKTTEGSIDRLIDITCSLVPLQQINKLVTKFNSKNYTFFFINTRSQKI

SEQ ID NO: 274261 - protein, 79 aa, Glycine max
  Clone ID: PAT_MRT3847_8967C.1.pep
SSACPRYLLAFYSLASQVMHTFSSAADTLPSNLSDSKSYPVTSHYQTLLPITKKKKKKKKRAPYKEYKLRRGAILPLNF

SEQ ID NO: 274262 - protein, 49 aa, Glycine max
  Clone ID: PAT_MRT3847_89680C.1.pep
KVQYISEELKISKTFFVPTTNHISFKIFLHFSDKAIYILTGIIISSVYY

SEQ ID NO: 274263 - protein, 39 aa, Glycine max
  Clone ID: PAT_MRT3847_89681C.1.pep
KLVRESAHDFNTDLRFQSHAVLALLEPAEAYLVGLFEGH

SEQ ID NO: 274264 - protein, 66 aa, Glycine max
  Clone ID: PAT_MRT3847_89682C.1.pep
MEVKTNEFGHFDVVSDDSDHHFLGSNNGKCFYDSNSKVYRTIMKEWKILEQSLPESIYVRVYERRI

SEQ ID NO: 274265 - protein, 25 aa, Glycine max
  Clone ID: PAT_MRT3847_89683C.1.pep
MIDLTRATCMNTTILVPDEPTNRLD

SEQ ID NO: 274266 - protein, 54 aa, Glycine max
  Clone ID: PAT_MRT3847_89684C.1.pep
CCIYMLILIFFIKIDVNISSFSYVDVLGFFISISHEEEKEEKHVGRIVNPNEVP

SEQ ID NO: 274267 - protein, 49 aa, Glycine max
  Clone ID: PAT_MRT3847_89685C.1.pep
AFWVFFFFFFYGKRGYNIRLFCGMGMRKQFYWAHSDTKRAITKISNYRT

SEQ ID NO: 274268 - protein, 107 aa, Glycine max
  Clone ID: PAT_MRT3847_89686C.1.pep
AASAYIKDRPSNPQQILLSSLERTCAAQVTTDIYFAQAASKAAFSTFTSYLVKLCTRVHWFRVTTLLIQVDLCWAMNVSILFKLVSVEVLIFTALNSVLIFSVSLWI

SEQ ID NO: 274269 - protein, 88 aa, Glycine max
  Clone ID: PAT_MRT3847_89687C.1.pep
ALTLILHTTNMQFDPRYVLQGATISFFSWVNMSSIANCAISNELFTTFKLLQQSKLPRKYVCVFGLLLCLKCSSQSFFVFMTQCQCHY

SEQ ID NO: 274270 - protein, 43 aa, Glycine max
  Clone ID: PAT_MRT3847_89688C.1.pep
AVAVMIGDDNHFLLCSVKAETLVTYSKGLSYRRLVWLGGPYAW

SEQ ID NO: 274271 - protein, 226 aa, Glycine max
  Clone ID: PAT_MRT3847_89689C.1.pep
MFRSQRFKPLLYLKGLTTPPSLQTPKPNSPFPSTLFPKHISLTSQQHSFAASYLVNTFGLSPETALKVSERVRFDTPQKPDSVIAFFTSNGFTVPQIKSIVKRVPDVLNCNPHKRLWPKFQFLLSKGASYPSDIVHLVNRCPRIINSSLEKNVIPTFELVKRFLQSDKKTIDCVFANRHFLNYNTASENVNLLLDVGVKDSSITYLFRRRASILLSKDLRKNIDEV

SEQ ID NO: 274272 - protein, 94 aa, Glycine max
  Clone ID: PAT_MRT3847_8968C.1.pep
ILFFFFLNASESYQHSFINLEVYHYIFLSFQSMIGHGLGAAGGLEAIATIKAITTGWLHPSINLDNLEASVTIDTVPNVKKKHEVNVGMYFLFN

SEQ ID NO: 274273 - protein, 121 aa, Glycine max
  unsure (1)..(121): unsure at all Xaa locations
  Clone ID: PAT_MRT3847_89690C.1.pep
IQDIHSIPSFHPSPSLHSLVPAGLAAKSLSTMPTXDAHDLLGAHEHVSEGMFLRSDGDAGGRKDPFRCLDLGNNNSYGGCKLNMSVSASSSLNHEKNLENVGNGNSPREGAVEAWICSSEQ

SEQ ID NO: 274274 - protein, 42 aa, Glycine max
  Clone ID: PAT_MRT3847_89691C.1.pep
MMSLRTNLCLLAPPFPEPFPPFPRPNIPGGKSGANLNKDPHK

SEQ ID NO: 274275 - protein, 77 aa, Glycine max
  unsure (1)..(77): unsure at all Xaa locations
  Clone ID: PAT_MRT3847_89692C.1.pep
DQVXWVYSFDCXRXMACXSXPCNTGSFATPTXTXRRYLGVCGGXCTRSFVVXSLGCNXCXKFXXEXVWNXXLGXXGS

SEQ ID NO: 274276 - protein, 188 aa, Glycine max
  Clone ID: PAT_MRT3847_89693C.1.pep
MARGGGLSIDSDPIGSFLPHEPIVLNSFPEDNKDNNNSRQQHKWKLGTNMDATVSRKSSPSSTSNTNTTIPFQDHLTSDDKMPHLDEMNFFPNKSNKDDDDDNNLASASTSAPPSLDHLHHTHDHSSAILGLKVNTGLNLLTTNASSDQSMVVDDDISPNSGDKRAKSEMVVLQVELERMKVENHRLK

SEQ ID NO: 274277 - protein, 51 aa, Glycine max
  Clone ID: PAT_MRT3847_89694C.1.pep
DASSSMNIQDHGKYYTESSFTIDQISAWNAHAESDSVCLQSHHILIRQDQG

SEQ ID NO: 274278 - protein, 117 aa, Glycine max
  unsure (1)..(117): unsure at all Xaa locations
  Clone ID: PAT_MRT3847_89695C.1.pep
FXTGNSSTMCSESIEEQKLVPGGPDPAKEVIYLFKPLSSLPITLSFGKLSGHSFRIGVHNLGDLGMSWCPPCLRKGSLVFLLCFSAPVPPFAVAMSSGKIHKSPFNQFERLLEEENT

SEQ ID NO: 274279 - protein, 79 aa, Glycine max
  Clone ID: PAT_MRT3847_89696C.1.pep
QKETMQSRVLPPEIWCANIIITIHSFIFISFLLSLFFSLIKLFITFFSFTHIYIYIYSKWQHIIITYTSYDFIPYVYFS

SEQ ID NO: 274280 - protein, 60 aa, Glycine max
  Clone ID: PAT_MRT3847_89697C.1.pep
KNLENPFPQLWGESFSFFLGTPEAISRFYGPLVATKNLFLGGTKKKKKGGSFTSLQLKNL

SEQ ID NO: 274281 - protein, 82 aa, Glycine max
  Clone ID: PAT_MRT3847_89698C.1.pep
ELKSAAYREWVPILMGVGDSTLTILLDCPPILIAQKQKDQIQLLKFRIRNIKKKGHFFLSSFSSINTNQSQIVLSHSYCAQN

SEQ ID NO: 274282 - protein, 79 aa, Glycine max
  Clone ID: PAT_MRT3847_89699C.1.pep
LTAHSDLSSLSYNSIVVWFPSLSQCEYSSYSLSTTFSSSPPSLPPSTTTSLTTKTSASSSNPPPRRSTTITTAPMTPIS

SEQ ID NO: 274283 - protein, 48 aa, Glycine max
  Clone ID: PAT_MRT3847_8969C.1.pep
TYFKDGGSHSWKEVLNESFPNPVVTVNIDPVPNVVHQDFVDFVLKCYH

SEQ ID NO: 274284 - protein, 62 aa, Glycine max
  Clone ID: PAT_MRT3847_896C.1.pep
GPHLGQTQIKVGKRRWKLLLQKIMRTVHRKWSNQCLLAGWGGLSHRLAPLVKAPFFYCGVVF

SEQ ID NO: 274285 - protein, 59 aa, Glycine max
  Clone ID: PAT_MRT3847_89700C.1.pep
HPNAKAQFKFLTLCSSLLITYDLRILTNFYSKCKNLSFNLLLKGTPFYLSVHIRTFILT

SEQ ID NO: 274286 - protein, 61 aa, Glycine max
  Clone ID: PAT_MRT3847_89701C.1.pep
IRLELEPHMPTHVNMHSKQETYVEKNDNYVSKPWTRSPKISYYLIPMHCFSFLFCIKDRLV

SEQ ID NO: 274287 - protein, 76 aa, Glycine max
  Clone ID: PAT_MRT3847_89702C.1.pep
GGEKLVTIQSIKRFTSAGVLIQECERTGFNLNAEYTCALEHLNQDYLHLRVIEAITYTGMKLELVDESVCHRRPQH

SEQ ID NO: 274288 - protein, 59 aa, Glycine max
  unsure (1)..(59): unsure at all Xaa locations
  Clone ID: PAT_MRT3847_89703C.1.pep
KIKTTFREILLNTLVXIXTINLMKQICPNFHQVLRRXXCRNLWCPXVCMXEGQGXSYQK

SEQ ID NO: 274289 - protein, 71 aa, Glycine max
  unsure (1)..(71): unsure at all Xaa locations
  Clone ID: PAT_MRT3847_89704C.1.pep
TAARRRQKGIVVSGALSVPVHEGNATIIDVNINKSGLHLLSAATTLVHWKQPITQILGWIXDGRVQMQIVR

SEQ ID NO: 274290 - protein, 91 aa, Glycine max
  unsure (1)..(91): unsure at all Xaa locations
  Clone ID: PAT_MRT3847_89705C.1.pep
VAVNLNIVAYTALLNGLCEDVRMREAEELFGALLVDGCTLNRLIYTYRFRGYIECKMMHKCNEYFXMIHKIKFKRDLLMYGIMIWDVHVTI

SEQ ID NO: 274291 - protein, 106 aa, Glycine max
  unsure (1)..(106): unsure at all Xaa locations
  Clone ID: PAT_MRT3847_89706C.1.pep
SCVCTSHCVHIFTSTPNHPEQDPFVLHHIQKVIKPNRYIPLRDYPTADLPHERFYNNXQTISHNFYHRSYGTLAYYTSTETSTYIFKQLTYYVHTHHVYCKQVDNP

SEQ ID NO: 274292 - protein, 267 aa, Glycine max
  unsure (1)..(267): unsure at all Xaa locations
  Clone ID: PAT_MRT3847_89707C.1.pep
MQLYHHPLDLDSQRVRFALEEEGVDYTSHHVNPITGKNLDSSFFKMNRHGRVPVFQNGSHIIYNTIDIIQYIERIAVVSSGVESISASSREVVEWMQKIQDWDPKIFTLSHIPXNTHFNVPKFIKQVGDCSNVESPELASDYHRKLKEAYETEEKLKEXDVLRRSKEHLVILLDEVERQLSETPYLAGQEFTMADVMLIPVLVRLKLLDLENEYITGRPNIAEYWILVQQRPSTKRXIGRYFNGWRKHKTLLKTWFLVRIRSLLKRY

SEQ ID NO: 274293 - protein, 290 aa, Glycine max
  Clone ID: PAT_MRT3847_89708C.1.pep
PRVRFNPVVSRSFTMSLTRDCICPMVLTRGSDQLPVSTKFDMRSDLGVVRNYGRLLLEMASVVPDGIVCFFVSYSYMDGIVNTWNENGILKEIMQHKLVFIETQDVVETTLALDNYRKACDCGRGAIFFSVARGKVAEGIDFDRHYGRLVIMFGVPFQYTLSKILLARLEYLRDTFQIKEGDFLTFDALRQAAQCVGRVIRSKADYGMMIFADKRYSRHDKRSKLPSWILSHLHDAHLNLSTDMALHIAREFLRKMAQPYDKTGGTGRKTLLSQEDLEKMAVSGLDDMMY

SEQ ID NO: 274294 - protein, 129 aa, Glycine max
  Clone ID: PAT_MRT3847_89709C.1.pep
MIDYEGYMQAMAILARGDNNERLEFIYSLFDQSDDGQVDREDLNTVLGSLFQVFRATRFEHPAMNNLNDKISQIDEDEVDNAFDDLIGDIMDNYAHDPESLTYDEWKAWFVSQKGVFDVLNYKIRRLAA

SEQ ID NO: 274295 - protein, 74 aa, Glycine max
  Clone ID: PAT_MRT3847_8970C.1.pep
RNYNGLSAFTQPWGVCNLANYMAFSLTKNSALLFLTTWCWLVYTYLQHVRCIYYFTKYCTNVLYCTLLLVNCST

SEQ ID NO: 274296 - protein, 54 aa, Glycine max
  Clone ID: PAT_MRT3847_89710C.1.pep
TDKKLCINGKLTCRKKILFNQNIGIRGLVKINKMQVRMDQWNAPRWPHILKIIN

SEQ ID NO: 274297 - protein, 86 aa, Glycine max
  Clone ID: PAT_MRT3847_89711C.1.pep
KGSPLINIAKEGPMFVLKIKIPSAVEEQLINDLAYIEHRLSFGRNNKLQLGSVIASLTRARSALVAAATQPTSEKLLSHTTRAWLV

SEQ ID NO: 274298 - protein, 59 aa, Glycine max
  Clone ID: PAT_MRT3847_89712C.1.pep
MNKGELSKGPGRILREADQASLCWDRDAKAHRANFVGARHARTLLRRTCRSPTPRKAAG

SEQ ID NO: 274299 - protein, 61 aa, Glycine max
  Clone ID: PAT_MRT3847_89713C.1.pep
PRRKSHMCFSTKCSNLFGWNKDSTSVCHHNTPDYGFTQLKTLGEVCDHIVIHDTPVYVPKK

SEQ ID NO: 274300 - protein, 86 aa, Glycine max
  Clone ID: PAT_MRT3847_89714C.1.pep
MPRLTRTRSFGGLKGPPLFGPLRGEFSQGGIFSTGWAPLKPWVFKSRRGGRFFLFKPPFPRGPKPFFFFTLLCFGGFFKYGQPLGI

SEQ ID NO: 274301 - protein, 218 aa, Glycine max
  unsure (1)..(218): unsure at all Xaa locations
  Clone ID: PAT_MRT3847_89715C.1.pep
EKISKLKSLKKTSPSACIVFPPKIFRLLEKPLHEFRGHRGEVLDLSWSSNNYLLSFELXPIICFYHYKLSQSLFVFVNXIVVTCIQFNPVDDNYFISGSIDGKVRIWAIPDCHVVDWIDIKDIVTAVCYRPDGQGGIIGSLAGNCRFYNVSENRLQLDSQLCLIGKKKLPGRGITGFQFLPQDSNKVMVSCADSQVRILDGFNVIGMYKNLITGSPMC

SEQ ID NO: 274302 - protein, 67 aa, Glycine max
  unsure (1)..(67): unsure at all Xaa locations
  Clone ID: PAT_MRT3847_89716C.1.pep
WKTPEVNSRVRESNEHFIVSHTLFEFILLMKTTLQPDSFHCDPCEEKIISINPDLCFSCAGPXVNLP

SEQ ID NO: 274303 - protein, 149 aa, Glycine max
  unsure (1)..(149): unsure at all Xaa locations
  Clone ID: PAT_MRT3847_89717C.1.pep
LYDFVEHMVQGDGNCQFRALSDQLYCEQDEVSYGSLXVVYQHGIHPEIYEGYVPMEYDEYLQKMSKSGEWGDHVTLQAAADSYGVRIFVITSFKDTCCIEILPHFEKPKGVIFLSFWAEVHYNSIYPQGDIPSSESRKKKKWWSFGTKH

SEQ ID NO: 274304 - protein, 154 aa, Glycine max
  Clone ID: PAT_MRT3847_89718C.1.pep
EKISKLKSLKKTSDSACIVFPPKIFRLLEKPLHEFRGHRGEVLDLSWSSNNYLLSSSVDKTVRLWQVNHDRCLKVFSHSNYVTCIQFNPVDDNYFISGSIDGKVRIWAIPDCHVVDWIDIKDIVTAVCYRPDGQGGIIGSLAGNCRFYNVSENR

SEQ ID NO: 274305 - protein, 53 aa, Glycine max
  Clone ID: PAT_MRT3847_89719C.1.pep
FWSTLGRRPHPKGLYEGINTPTMGENALPTIPSELAYGEVWTPTTIAPNATLQ

SEQ ID NO: 274306 - protein, 97 aa, Glycine max
  unsure (1)..(97): unsure at all Xaa locations
  Clone ID: PAT_MRT3847_8971C.1.pep
FAMSGDDAKRNVXHLKGYRKHSGIMAHIDAGKTTTTERXLYYTGRNYKIGEVHEGTATMDWMEQEQERGITILLLQPYFWNKHRIXNIIDTPGHVDF

SEQ ID NO: 274307 - protein, 161 aa, Glycine max
  unsure (1)..(161): unsure at all Xaa locations
  Clone ID: PAT_MRT3847_89720C.1.pep
MAAMKIIAICQSGGKFVTGKDGSLSYKGGDAHAIDIDDLMKFNEFKEEVAEMFSIRADSISIKYFLPGNKKILITISNDKDLQRMIKFHGSYSTVDIYILIEEVAAXSSNMPASRSSRTTLSETVVAVAPAPLNAFHTHVADDVLDVVHDTNQIDTNMDID

SEQ ID NO: 274308 - protein, 91 aa, Glycine max
  Clone ID: PAT_MRT3847_89721C.1.pep
QCKRSLYKKMGRGWSTSIFTKPVTDFDILGFVHSLEQIIHKVQKGSEQIKQNLKIGASLRLQVKRLIKFKQIKMVKPIHIHNKHINQSTPK

SEQ ID NO: 274309 - protein, 69 aa, Glycine max
  Clone ID: PAT_MRT3847_89722C.1.pep
IKPYGFEPLYKNFYVPPGVAPPFKKFDTRPPKGPKGSPLKKFPFEERKVKFFSGGAAFPFPADNDENFG

SEQ ID NO: 274310 - protein, 120 aa, Glycine max
  Clone ID: PAT_MRT3847_89723C.1.pep
HQKRLVYTFSAIYNISANLPLSLLLVYYYTAYFYYWYPLLPLSLSVGTLKPPFTLLFCPGGSFIFNTPAPPRPACPPLLLLQPPLSVIYLLCANQHHLHFATAPPPPPPSKVVLQQCSTA

SEQ ID NO: 274311 - protein, 49 aa, Glycine max
  Clone ID: PAT_MRT3847_89724C.1.pep
ARRRQKGSRVIFKLNCQQLFSTWSMRPSKGLSYELVRIEDVPPRFGSYE

SEQ ID NO: 274312 - protein, 109 aa, Glycine max
  Clone ID: PAT_MRT3847_89725C.1.pep
QNSRSSPFPRLATMETEATERAEVPDRVVYDVAGRPITVAGYKEPVRSTGGAQNRDSAGGFLWVRNTGERDEVFYSFLSADRPAVTTMSLSNDVGRMNSTMERLMAQVE

SEQ ID NO: 274313 - protein, 41 aa, Glycine max
  Clone ID: PAT_MRT3847_89726C.1.pep
NTSAKNANSPSTNMTHQLAPEANKNIICPAKLNGHKKTRGP

SEQ ID NO: 274314 - protein, 80 aa, Glycine max
  Clone ID: PAT_MRT3847_89727C.1.pep
SQFPLSSMALNLLNLSILFFLLFIVNPFPFVEPRALQLPVFTKTLQNLRGVHKGQKANGVGELRSYLQHFGYLTNGDSSN

SEQ ID NO: 274315 - protein, 80 aa, Glycine max
  Clone ID: PAT_MRT3847_89728C.1.pep
REKGLHVPPWRTASYMQAKWLSVSRKEPSHDVIGYDDHEHADADIIGNWVPPSLKPKKRDLDGGGSGLSSQLSNMSVNCC

SEQ ID NO: 274316 - protein, 56 aa, Glycine max
  Clone ID: PAT_MRT3847_89729C.1.pep
VIYCVLRSVCEFLLCFFFLKSFNIICLFHLIISSNSDNLVLLNDLVLGPNPRPHNT

SEQ ID NO: 274317 - protein, 59 aa, Glycine max
  Clone ID: PAT_MRT3847_8972C.1.pep
MNGATKNASDPFANMESHDFMAPSVIEAKTDDATLYSRTQGTQIASEGLKRPALEVSLA

SEQ ID NO: 274318 - protein, 92 aa, Glycine max
  Clone ID: PAT_MRT3847_89730C.1.pep
RGKAQNGRESKGRRLRGGNRAPAGAQVQLGVSPALAEFFRPVQGEFYLPLRGRNCWQGQFVGASSLCPPVVKREFSQGNLVGFCRVFPFPRV

SEQ ID NO: 274319 - protein, 89 aa, Glycine max
  Clone ID: PAT_MRT3847_89731C.1.pep
CGVLRSARCLAPVPRFVCPLFRVSSGPFFFWERCYLFFCSRVMLLVSRSPSGRGSCHPIGGVLVFPFVVLWPFCVHPPCPVLCCPPWPF

SEQ ID NO: 274320 - protein, 60 aa, Glycine max
  Clone ID: PAT_MRT3847_89732C.1.pep
PGKCLLRNLNLYQRKLWNHNLCRKARTQADLQNPKVIGRPNLGLNRFQFPRLNPRMSKFD

SEQ ID NO: 274321 - protein, 117 aa, Glycine max
  Clone ID: PAT_MRT3847_89733C.1.pep
AKYIMLDCDNTLVQSERFAFEACADLTNQVMERHNIDARYTAESLLEDFVGHNFRGMLKGLQEKHKFKMPDDEMEDFVAQELGAVTLKLSQKAVECPGVTEQLTKLKEEGYPMSVVS

SEQ ID NO: 274322 - protein, 59 aa, Glycine max
  Clone ID: PAT_MRT3847_89734C.1.pep
PKKGGGRVLKGNPNRLPDGGKRAAKLEIGENMDQNFLQFDPAPRQIEPDTTRKTPDYFL

SEQ ID NO: 274323 - protein, 39 aa, Glycine max
  Clone ID: PAT_MRT3847_89735C.1.pep
LDDKLIGNRKRGERKIVCGVLLRSLSYRKDTTVIAMSCG

SEQ ID NO: 274324 - protein, 195 aa, Glycine max
  Clone ID: PAT_MRT3847_89736C.1.pep
MTAIAGTHVFGVVSFQLKQAEMPFACSCLIRKRIGDSPQRNVALRRRVNGTILPQIRAQNLPDYVPKSEFYKVEAILRPWRVPQVSAALLKMGIRGVTVSDVRGFGAQGGSKERQGGSEFSEDNFVAKVKMEVVVRKDQVEAVIDKIIEEARTGEIGDGKIFLIPISDVIRIRTGERGEQAARMTGGRSDMLSAV

SEQ ID NO: 274325 - protein, 196 aa, Glycine max
  Clone ID: PAT_MRT3847_89737C.1.pep
MAAIAGAHVFGVVSFQLKQAEMPFACSSLIRKHIGDSPQRNVALRRRANGTILPQIRAQNVLPDYVPKSEFYKVEAILRPWRVPQVSSAMLKMGIRGVTVSDVKGFGSQGGSKERQGGSEFSEDNFVAKVKMEIVVRKDQVEAVIDKIIEEARTGEIGDGKIFLIPVSDVIRIRTGERGEQAERMTGGRSDMLSAV

SEQ ID NO: 274326 - protein, 75 aa, Glycine max
  Clone ID: PAT_MRT3847_89738C.1.pep
AYNVCHLLSEIGGFYITHAAIIRLDGSVWAHTTNSPHYIPDEITVITNDFNDPGSLASTGSYIGGTKYIVIHCEP

SEQ ID NO: 274327 - protein, 57 aa, Glycine max
  Clone ID: PAT_MRT3847_89739C.1.pep
HSKCQYLIIMWNWYSTRNSDLMSFGFRIDLIRIAIAPIHIYPCPLHDDPTYSDKPRP

SEQ ID NO: 274328 - protein, 83 aa, Glycine max
  Clone ID: PAT_MRT3847_8973C.1.pep
YKTLAKSRYNSCYNAGKCSNSSSLSKSVVLLHLHDGGSWKQWREWASCDGMWDESETKQCRLKQNEGHDGACDKLRRSPPSQE

SEQ ID NO: 274329 - protein, 52 aa, Glycine max
  Clone ID: PAT_MRT3847_89740C.1.pep
FKEFDNAIAQLQVSRVEKKRNSPAQSIIRVSDYQLVAKDQAQFMERNHFGND

SEQ ID NO: 274330 - protein, 80 aa, Glycine max
  Clone ID: PAT_MRT3847_89741C.1.pep
EGSFIKRKPFSPYQTTHRNKLSSPANPLDRQPSTANGDIDEHNGLFCLLVSIQSYAVFPGGLSSKSSASGARLLLQFEKI

SEQ ID NO: 274331 - protein, 208 aa, Glycine max
  unsure (1)..(208): unsure at all Xaa locations
  Clone ID: PAT_MRT3847_89742C.1.pep
FFFFFFFFFFVFYFVVFLFSFWFWVWQKKKNGGANPGGGGAFQHKTQGKLGAQTEKTPRQKKQSWQVSPPRPRAVTINKKKKRNPSLRGKKNPHPKTGAGIFWGPPPRKNRTGLMKPRGLEGKGPYNHPGGKGLKDQPKEGAPPKNPGNPPPRGLVGKXPPPRPRGGGTPRPGNGGASYGTKNPANPKGKGAQKGTRKPPGVTGGLGG

SEQ ID NO: 274332 - protein, 34 aa, Glycine max
  Clone ID: PAT_MRT3847_89743C.1.pep
MHVISAHTSFRDRTQEFLSVAKSMKISGSGPIGP

SEQ ID NO: 274333 - protein, 39 aa, Glycine max
  Clone ID: PAT_MRT3847_89744C.1.pep
KFMNFFGKIPFHNLNIFVTNKLKKKDQSLLRSKKIYFRH

SEQ ID NO: 274334 - protein, 70 aa, Glycine max
  Clone ID: PAT_MRT3847_89745C.1.pep
MMMKSDMCAVVVVAVLLLAEVGLMAEAVICTPTELRYSLPAITSGAKPSNACCTKLKQQEPCLCGYLKNG

SEQ ID NO: 274335 - protein, 195 aa, Glycine max
  Clone ID: PAT_MRT3847_89746C.1.pep
MQPLRRKTPLFTSEMGTMKGRKNNNLSIFVVVFSIFLFGLFMYNEDVKSIAEFPFSSPKAHETQEGGEPNKHVDSVQDSVVVQRESEKKDVEDTVTVKISSKRSTSRAQLEKSGAEDEDSDERVDLKTVVEKEKKIEMPRAEEEEEVEEEEEDEKVELPPEDCDLFTGEWVLDYVTHPLYKRDKCEFLTSQVTCM

SEQ ID NO: 274336 - protein, 82 aa, Glycine max
  Clone ID: PAT_MRT3847_89747C.1.pep
CRASTRSLYLCQSIDAPALLFLPHSPSSLPRQGVYTINLPAPFSFNVLYQLFSPGMVLSPLIPRREPSVSLLSPKKKKKPHP

SEQ ID NO: 274337 - protein, 41 aa, Glycine max
  Clone ID: PAT_MRT3847_89748C.1.pep
NTSFYLYAIQSTNIYLSASSHTFPSTSNSKTLSTINTYPLI

SEQ ID NO: 274338 - protein, 51 aa, Glycine max
  Clone ID: PAT_MRT3847_89749C.1.pep
HNYSYRYRNFLAPLLHHVLLLVWESPTKLWSLEKEIPPLYGRDVKAASINT

SEQ ID NO: 274339 - protein, 297 aa, Glycine max
  Clone ID: PAT_MRT3847_8974C.1.pep
MKTLNKASLILFPLLFLSLFKHSHAAGIAIYWGQNGGEGTLAEACNTRNYQYVNIAFLSTFGNGQTPQLNLAGHCDPNNNGCTGLSSDIKTCQDLGIKVLLSLGGGAGSYSLSSADDATQLANYLWQNFLGGQTGSGPLGNVILDGIDFDIESGGSDHYDDLARALNSFSSQRKVYLSAAPQCIIPDAHLDRAIQTGLFDYVWVQFYNNPSCQYSSGNTNNLINSWNQWITVPASQIFMGLPASEAAAPSGGFVPSDVLTSQVLPVIKQSSKYGGVMLWNRFNDVQNGYSNAIIGSV

SEQ ID NO: 274340 - protein, 59 aa, Glycine max
  Clone ID: PAT_MRT3847_89750C.1.pep
GKSRILSHHYHEPSPSMLIHKMTLSIPSRAKFCHFQCVTHSAQTYLQQPRSSKHHVLLF

SEQ ID NO: 274341 - protein, 51 aa, Glycine max
  Clone ID: PAT_MRT3847_89751C.1.pep
RGNSSTGGVLKTTRPVYGHEETDNHSVSEKSGTIHLLWIISLSLSVSQAFL

SEQ ID NO: 274342 - protein, 53 aa, Glycine max
  Clone ID: PAT_MRT3847_89752C.1.pep
YINNLITTLSKTNYIYLPLHNDLIHPIINTLTLPDNFPPFHLFHTIISYIIHL

SEQ ID NO: 274343 - protein, 40 aa, Glycine max
  Clone ID: PAT_MRT3847_89753C.1.pep
NISALVIFRAPDLFFWNRHSIFSSTERPGDHASPPILFLV

SEQ ID NO: 274344 - protein, 57 aa, Glycine max
  Clone ID: PAT_MRT3847_89754C.1.pep
IQLLNKNCMIFVKSLFRLFLKNSTLEMLHDNCENTGFLEARVSQTVRHESQREKRLA

SEQ ID NO: 274345 - protein, 148 aa, Glycine max
  Clone ID: PAT_MRT3847_89755C.1.pep
IQDEHFVLRSSELRMPNGASSSPNLDFKEVLKNPKVPNDCFIVSQRDGGNEGGSKLDEYVDNCGPVTKSRDNIGEEMLLSHRSKEPGRNELGDPLSTFAADSLQTKGRAADDWFIVDNWEKMRSPDPTIGPAGLDGDYTSSVDGSLPF

SEQ ID NO: 274346 - protein, 75 aa, Glycine max
  unsure (1)..(75): unsure at all Xaa locations
  Clone ID: PAT_MRT3847_89756C.1.pep
NWPDLSLYEVASGFTKVLXIAAIVALSRYSIVGFKENAIAMVSHCGLHENRNRGRLTHHXISLCRGCCIVGFRKG

SEQ ID NO: 274347 - protein, 96 aa, Glycine max
  unsure (1)..(96): unsure at all Xaa locations
  Clone ID: PAT_MRT3847_89757C.1.pep
NLPNACPSMWRDWVIDLGFEVSKMTSPYIKCTVSFFIAFGNLADDTINFEAFPHKLVQFGEIQEKVVLKFSQEEFXLTTWSTHVRSSTTSVADGCP

SEQ ID NO: 274348 - protein, 68 aa, Glycine max
  Clone ID: PAT_MRT3847_89758C.1.pep
RTLLDVGMVRPPLGLLASFSFFRLILPHLVFLLFYQDLNCVSSYSSFPFLFYNLAPFGVSFPLFLPPA

SEQ ID NO: 274349 - protein, 86 aa, Glycine max
  Clone ID: PAT_MRT3847_89759C.1.pep
DPRVRKKKKKKKKKKKKKKKKKKKKKKKKKKKKKKKKKGGHVLKDPGFRFSGLAGFLTFFLGGPNFFSWAGVFHCRGRGFPWGYPV

SEQ ID NO: 274350 - protein, 140 aa, Glycine max
  Clone ID: PAT_MRT3847_8975C.1.pep
FDYVFDWTILKYQQSQKNPVPGASNSRATPIDVDIHQGLNAYSGHVKERIRAGDATGSGVKIQFKSPVGKNLSYENPLDKNIFGEANIPSTSFSPASTSKRNSLKQSLSAEASNPGHAQGSKMGPSSSWMSSLQRMSSAK

SEQ ID NO: 274351 - protein, 165 aa, Glycine max
  Clone ID: PAT_MRT3847_89760C.1.pep
RVGGVGTNQQLRRFDRSNLWEFLGAIYLVRRNFDCTACNWMDGALPCLSGRAVAYRSEILQDPNFTYGFTHETWGSDHFLNADDDNFITRWLFSHDWKIQMQNHRECEVDTTLENDSKYLRQCLRWVRSNWRSNLTSLSELHMWVKYPWSLYAVFQTTLTQWAFL

SEQ ID NO: 274352 - protein, 75 aa, Glycine max
  Clone ID: PAT_MRT3847_89761C.1.pep
QPVSPLERTMWISDGHYLAEAINRWAIKLVKESVEIHARSTHCFVRASARTMMVRSVVIWLMRPLHHSSCIWRHK

SEQ ID NO: 274353 - protein, 114 aa, Glycine max
  Clone ID: PAT_MRT3847_89762C.1.pep
PEIDFVDFFNNHPKLRKFDIHGAMFAALCQRNSLKHVDPGFLIPCLEEVVITVRSPLNAEQKMSTLESLLKYGKNLRTMVIKILQMKSSHSSADDFFDEICRLRYMNHGIVRIE

SEQ ID NO: 274354 - protein, 73 aa, Glycine max
  Clone ID: PAT_MRT3847_89763C.1.pep
ILGISIAVYLLFKTTTRSRGIEREYAAMLYTSLAVLATSALIGHRRGSARREGQTSSSANPPTTLNSASPPPS

SEQ ID NO: 274355 - protein, 55 aa, Glycine max
  Clone ID: PAT_MRT3847_89764C.1.pep
RSIEQDRRIERLVRGLLVAKEASDVGKGTSSSRHVCTALSWIYEYPLQKAIKVVG

SEQ ID NO: 274356 - protein, 140 aa, Glycine max
  unsure (1)..(140): unsure at all Xaa locations
  Clone ID: PAT_MRT3847_89765C.1.pep
TSANLSSRRPVAARRXWLTAELEVLYAVPMETVQCVVKVTCCGKVGGAMHVREVSLTMEDTEGRHVMGRDGVVILQDAMENGKREKLDAEKAKERFEKFSIVKREIRERKMRRDRAMDMVAMLIAFAVFALLFCFMAFGV

SEQ ID NO: 274357 - protein, 159 aa, Glycine max
  unsure (1)..(159): unsure at all Xaa locations
  Clone ID: PAT_MRT3847_89766C.1.pep
EKVDELCDRYCLDRFLDIKVPETSNLQGRYLHLDELLVDSIIWVDEVEGLLDATRHIKGFKVIGLDCXWKPNYVKGSKPNKVSIMQIASEKMVFIFDLIKLHKEVPDILDDCLSCILLSPRILKLGMKILNSFDFEYIGKPNFWWSRLIPNFCNMIILT

SEQ ID NO: 274358 - protein, 80 aa, Glycine max
  Clone ID: PAT_MRT3847_89767C.1.pep
NLMAIYLLSNRVFVSPCTSMTSGHQDSVFPSPSYGFDFVVSVVSLSISNPLSSSILELVYYYLIMNLTQIFVAFGSVYEV

SEQ ID NO: 274359 - protein, 70 aa, Glycine max
  Clone ID: PAT_MRT3847_89768C.1.pep
LEDQCLGSVGEHHLQLLIKHKLTSGRNKAWHSHWWKDLRRLYNQAFFHRMQYNMVWKVGCGDIIKLWEDS

SEQ ID NO: 274360 - protein, 68 aa, Glycine max
  Clone ID: PAT_MRT3847_89769C.1.pep
NIFHYFAFIVHCILIIYLNVFFLKFFFQNFILFIKFYISCFNHIISNYFIIYSYFNIIIFLINIIYSY

SEQ ID NO: 274361 - protein, 375 aa, Glycine max
  unsure (1)..(375): unsure at all Xaa locations
  Clone ID: PAT_MRT3847_8976C.1.pep
SVRNHTLGHKIGGGSFGDIYLGTHFDTFEIVAGRVENGKTKHHXLLHEAKLYNILQGRRGLPTLKWGGVDXEDTVLGMDLLGPIIEDLSVYXGRKFSFKSVLMLADQMMTRIEYVHSKGFLHRDIKPDNFLMGLGRKANQVYIIDFGLAKRYSXSLPWQGLRAATKKQKYDKICQKKLSTPIEVLCKSHPVEFASYFHYCHSLTFDQRPDYGFLKRLFRDLFAREGYDFDYVFDWTILKYQQSQKNVMLPPLSPVPGASNSRATPIDVDSHQGLNAYSGHVKERIRAGDATGSGVKIQFKSPVGKNLSYENPLDKNIFGEANIPSTSFSPASTSKRNSLKQSLSAEASNPGHAQGSKMGPSSSWMSSLQRMSSAK

SEQ ID NO: 274362 - protein, 35 aa, Glycine max
  Clone ID: PAT_MRT3847_89770C.1.pep
DGPHHVGWCMTTCGWRPLEDKRQSVQYDLVFGGPH

SEQ ID NO: 274363 - protein, 67 aa, Glycine max
  unsure (1)..(67): unsure at all Xaa locations
  Clone ID: PAT_MRT3847_89771C.1.pep
DLXGRLFYFSFLLDSLLLTDPHCRSKWSHLKNTWALVQMFASVTFSGDNRLTVKTIFTRRDVDILVV

SEQ ID NO: 274364 - protein, 62 aa, Glycine max
  Clone ID: PAT_MRT3847_89772C.1.pep
LLYQIVQYLIILFANDRTEKDITPMGGFPHYGVVKDDYIMVNPSVVFSHPYGRVGGRVGGRV

SEQ ID NO: 274365 - protein, 93 aa, Glycine max
  Clone ID: PAT_MRT3847_89773C.1.pep
MVIRELSGMILSRALKQCNFVEWRGHKVVYKRYASLYFCMCIDQDDNELEVLEMIHHFVEILDRYFGSVCELDLIFNFHKAYYILDEILIARE

SEQ ID NO: 274366 - protein, 161 aa, Glycine max
  Clone ID: PAT_MRT3847_89774C.1.pep
MINFVLLISRQGKVRLTKWYSPYSQKERSKVIRELSGMILSRAPKQCNFVEWRGHKVVYKRYASLYFCMCIDQDDNELEVLEIIHHFVEILDRYFGSVCELDLIFNFHKAYYILDEILIAGELQESSKKTVARLIAAQDSLVENAKEEVSSLSNIIAQATK

SEQ ID NO: 274367 - protein, 161 aa, Glycine max
  unsure (1)..(161): unsure at all Xaa locations
  Clone ID: PAT_MRT3847_89775C.1.pep
WAFHILEFIPVKRKWEADESIMRHMLSTFKDPQDPLWLALFPEGTDFTEQKCLRSQKYAAEHKLPVLKNVLLPRTKGFCACLQELRSSLTAVYDVTIGYKYRCPSFLDNVFGVDPSEVHIHIHRFPLDSIPYQIDRILMWLINRFQTKESVXFPIFKTSRS

SEQ ID NO: 274368 - protein, 225 aa, Glycine max
  unsure (1)..(225): unsure at all Xaa locations
  Clone ID: PAT_MRT3847_89777C.1.pep
QGNHLDLRLVRNQWLLIDPKIQFLMSQANEDKTSGDFREMGFRLAQEVILFLKKKMDKASRNGNLKDIKLSFVGHSIGNLIIRTALTESVMEPYLRYLHTYVSISGPHLGYMYSSNSLFNSGLWILKKLKGTQCIHQLTFTDDPDLENTFIYNLSKEKTLANFQNVLLLSSPQDGYVPYHSARIEPCPAASLDFSKEGXIFLEMLNNCLDQIQAHTNDGGHALRH

SEQ ID NO: 274369 - protein, 34 aa, Glycine max
  Clone ID: PAT_MRT3847_89778C.1.pep
MINFPSIFVPLVGLIFPAIAMTSLFLHVQKNKIF

SEQ ID NO: 274370 - protein, 81 aa, Glycine max
  Clone ID: PAT_MRT3847_89779C.1.pep
RFICLHSKGCSPLLTCFYYGKNDYSVSTCFIRKNGSTIGKTVWVPKGSLHKTNIQGPKKIWVSKSKYDYMNDGLLESKLAH

SEQ ID NO: 274371 - protein, 51 aa, Glycine max
  Clone ID: PAT_MRT3847_8977C.1.pep
KAALVVERASKEAAHDAQLTEEFLHKVEELKNDLDDLEAFVEPVIDKIVKM

SEQ ID NO: 274372 - protein, 40 aa, Glycine max
  Clone ID: PAT_MRT3847_89780C.1.pep
FELGLVIHGFFFNMCIACLSKKGARCLGLIIALFTHPWIV

SEQ ID NO: 274373 - protein, 63 aa, Glycine max
  Clone ID: PAT_MRT3847_89781C.1.pep
NNSKQFTIRNKKKKIIIKKKRAKSKKISNSTYCFVFNKPLTTKKTIYLTTIKNRKIPNFSPNE

SEQ ID NO: 274374 - protein, 34 aa, Glycine max
  Clone ID: PAT_MRT3847_89782C.1.pep
ICTIKYHPFNPRWLGSVCTAELCVLPVLYRSLPS

SEQ ID NO: 274375 - protein, 48 aa, Glycine max
  Clone ID: PAT_MRT3847_89783C.1.pep
CTQNRFHKMLNCIFHNRNFLQLSQLRYFLHQLYLMMHVHISIPSNMIL

SEQ ID NO: 274376 - protein, 64 aa, Glycine max
  Clone ID: PAT_MRT3847_89784C.1.pep
YRKGGNDSVTHQDREREREGKKRELYILSSRLSYSSSEITSSSSSSGVPRYSFTFFARLDLIRA

SEQ ID NO: 274377 - protein, 51 aa, Glycine max
  unsure (1)..(51): unsure at all Xaa locations
  Clone ID: PAT_MRT3847_89785C.1.pep
MFGXAPKXSDNTXYYEILGVSKNASQDDLKKAYKKAAIKXHPDKXGDPEKF

SEQ ID NO: 274378 - protein, 136 aa, Glycine max
  Clone ID: PAT_MRT3847_89786C.1.pep
MDLTLSLSPSSSSLVTSRLGYSSSLATNSNANSRKARISTRRSKALTCNALFGLGLPELAVIAGVAALAFGPKNLPQVGRSLGKTIKSFQQAAKEFESEIKKEPDSTEENPTAAEKPIAASKQEEQETKVSTKDNV

SEQ ID NO: 274379 - protein, 46 aa, Glycine max
  Clone ID: PAT_MRT3847_89787C.1.pep
RHPSHLYISLHSLNRICSDCLLKLHTQNHCTTSTKFSCIHHLSDTT

SEQ ID NO: 274380 - protein, 58 aa, Glycine max
  Clone ID: PAT_MRT3847_89788C.1.pep
GFVVSGSIVFEAIRSNCTSNIMLTLLHLRWHNSHFSIWIIPSFGLRWGQKKKKKEKTK

SEQ ID NO: 274381 - protein, 62 aa, Glycine max
  Clone ID: PAT_MRT3847_89789C.1.pep
LLRLAMPGFGCAKGIIFRLPEIGNGRRRNGFSAARSNHGFGKRRIKNQRKQTKSKKKKNLRE

SEQ ID NO: 274382 - protein, 90 aa, Glycine max
  Clone ID: PAT_MRT3847_8978C.1.pep
PCQIEYIDWVNGKSELAGSLEVFHMPALSLYLIRLPSIRKDCRDCEDYSKASCFSMRKTTSVRCTFQNLISRECFAGISGMLNVIQIIPM

SEQ ID NO: 274383 - protein, 64 aa, Glycine max
  unsure (1)..(64): unsure at all Xaa locations
  Clone ID: PAT_MRT3847_89790C.1.pep
KQTNPPXXGRGREPKERAAENRRLAAHSIYIIPQNNMFVSPKEQTNTEWPAIMIFIYRESGGHG

SEQ ID NO: 274384 - protein, 71 aa, Glycine max
  Clone ID: PAT_MRT3847_89791C.1.pep
NCSPFIDHKKIVFKWFYLNVAFSHNGKFQEFQTLRCQTGAETFSFYIPRKACLMDTTRNFLCPKGTCLSLC

SEQ ID NO: 274385 - protein, 62 aa, Glycine max
  Clone ID: PAT_MRT3847_89792C.1.pep
TLSPQGASGSPGLEPQRRIQKKFGFIPPLEISMEVKVYFLKGIAAREGLRDSLHIETCCERP

SEQ ID NO: 274386 - protein, 74 aa, Glycine max
  Clone ID: PAT_MRT3847_89793C.1.pep
TLLHIKMLMLPFPITTIDYKCVYYLQLSTLWELYRIYIGSSTATVYIVAASATCLQSLNASTSCLPMQEQKREP

SEQ ID NO: 274387 - protein, 156 aa, Glycine max
  Clone ID: PAT_MRT3847_89794C.1.pep
MNCFVLLGQCARPLNTEGGEDLVTATCKHTLHFELCISTLRSVPASKTSDLKVLAEIALNLSTTYAADTLSYVHELQSNSSAANYGSNNIIYASRCLSDCAEEYSEAIENLKDSKEALADGDCDQMDTLVSAAMSDAETCDDGFKDMQTGISDSTS

SEQ ID NO: 274388 - protein, 75 aa, Glycine max
  unsure (1)..(75): unsure at all Xaa locations
  Clone ID: PAT_MRT3847_89795C.1.pep
MATQGRVITCRAAVACXAIKSLHVQHVHVVPPHAVEVRVDLLLSALRHTDAYTWGGEDPKGPFTCILGHEAAGIV

SEQ ID NO: 274389 - protein, 48 aa, Glycine max
  Clone ID: PAT_MRT3847_89796C.1.pep
GLSPVIGNLSVLMLVGNIEIVIRRYVYSYIVYFLLLSEECCKCFLCDL

SEQ ID NO: 274390 - protein, 126 aa, Glycine max
  unsure (1)..(126): unsure at all Xaa locations
  Clone ID: PAT_MRT3847_89797C.1.pep
KKIPRPTLTGAAKMGLGPPNPGGFTPKKNRQKKIFYVFKTRGENQKRFPXKKSSWGPNKPGEAKMGTPGGPPGRVITGXFFIKKFFHKKVQRRQIHRGGPGGKKKKPWAKKLGGPPLGKRVLRNPF

SEQ ID NO: 274391 - protein, 72 aa, Glycine max
  unsure (1)..(72): unsure at all Xaa locations
  Clone ID: PAT_MRT3847_89798C.1.pep
WGVGKEKGRSKFGXVKGGRVEEERVMVRVRVRVRVRARWWWWLGVKEGVHVEGNGGXEGLWLFGEAIVNQSD

SEQ ID NO: 274392 - protein, 75 aa, Glycine max
  Clone ID: PAT_MRT3847_89799C.1.pep
GKFFGEGSGRESQMEYIFLGELFFLKNNKLFGIFKSLGLGNGKKNSDLLRENTKLKNAEGIEGNVEFNEEKIKSK

SEQ ID NO: 274393 - protein, 193 aa, Glycine max
  Clone ID: PAT_MRT3847_8979C.1.pep
MAPRDSRATAFAGPGPGPSPAHKEIRYRGVRKRPWGRYAAEIRDPGKKTRVWLGTFDTAEEAARAYDTAAREFRGAKAKTNFPTPSELILNNNIRSPSQSSTLDSSSPPSPPPPLDLTLTPLSVAVTVFPVARPVLFFDAFARADAMIAVSRREMCGFERPAADFRRNDSDSDYNRRVLLDLDLNVPPLPEVA

SEQ ID NO: 274394 - protein, 52 aa, Glycine max
  Clone ID: PAT_MRT3847_897C.1.pep
PMAELQHINLLTFYASQMKFIMTIILIASSIWPQLHRRICHKNMHISRGCIY

SEQ ID NO: 274395 - protein, 100 aa, Glycine max
  Clone ID: PAT_MRT3847_89800C.1.pep
IKKSATTQESAPAMAWPRIVRGSPFPSARFSRHPFPRGIPGAFRARPPIKLGARSMQWKRDAQGSDSISSVNTGSVTAPVARGFTYIRTESKPEGSLSTT

SEQ ID NO: 274396 - protein, 136 aa, Glycine max
  Clone ID: PAT_MRT3847_89801C.1.pep
GLFEVVGFRDAWHGLVLLAPKGHGTRLAQTSRIRFEFHKGAADCTFMRIDGEPWKQPLPKDDDAVVVEISHHDQVSMLATPLCRSKSIYDPSSPSDDREEDDSSEEEPSEDWEERRKFGAAETFKYPDGIDIAQVS

SEQ ID NO: 274397 - protein, 47 aa, Glycine max
  Clone ID: PAT_MRT3847_89802C.1.pep
VIATEVEFFCRSVKCFIYQPCIHTNIYFFLLFKASPYSNENVRVSSS

SEQ ID NO: 274398 - protein, 134 aa, Glycine max
  Clone ID: PAT_MRT3847_89803C.1.pep
FEVVGFRDAWHGLVLRAPKGHGTRLAQTSRIRFEFHKGAADCTFMRIDGEPWKQPLPKDDDTVVVEISPHGQVSMLPTPLCRFKSVNDPSSPSVGREEDDSSEEELSEDWEERRKFGAAETFKYPEGIDIAQVS

SEQ ID NO: 274399 - protein, 378 aa, Glycine max
  unsure (1)..(378): unsure at all Xaa locations
  Clone ID: PAT_MRT3847_89804C.1.pep
MEQLQTPTITHNNTNPETNNGESLFFQDFDSTCSTPYVSAPSSPGRGPLPGFFYSAPASPMHFAITAASSYEKTPSSAPMGFEFEFSARFGCSGSAGSGSMSSADELFLNGQIRPMKLSSHLERPQVLAPLLDLEGNEDEEDEEVVEEGVNVNVSVVRGRDLRLRDKSVRRRTRXVEDSLDLGLETTPSVSXRPRPLGLPPIRLAMISSSEAEKVEDGFGLETTPSASSSRSSSAGRSSKRWVFLKDFLRSKSEGRSNNKFWSTISFSPTKDKKNQNPPNTNKNVASSETTQKPKGTSSSQTWARRISGKPTNGVGKRRVPASPHELHYKANRAQAEELRKKTFLPYRQGLLGCLGFSSKGYGAINGFARALNPVSSR

SEQ ID NO: 274400 - protein, 385 aa, Glycine max
  Clone ID: PAT_MRT3847_89805C.1.pep
MEQLQTPTTTHNNTNPETSNSNNGDLFFEDFDSTCSTPYVSAPSSPGRGPLPGFFYSAPASPMHFAITAASSYENTPSSAPMGYEFEFSARFGCSGSAGSGSMSSADELFLNGQIRPMKLSTHLERPQVLAPLLDLEGEEDEDEEVVESVNVNVSVVRGRDLRLRDKSVRRRTRSMSPLRSNTPLEWAENEDEEDHVHDKNVTKPNQTNIISSSEAEKVEDGLGLGLETTPSVSGSASSSRSSSAGRSSKRWVFLKDFLRSKSEGRSNNKFWSTISFSPTKDKKNQNPPNAKSETTQKTKGSSSSSSQTWARRMSGKPTNGVGKRRVPPSPHELHYKANRAQAEELRKKTFLPYRQGLLGCLGFSSKGYGAMNGFARALNPVSSR

SEQ ID NO: 274401 - protein, 65 aa, Glycine max
  Clone ID: PAT_MRT3847_89806C.1.pep
VSCSSQVWCHTPCKIGFSICITKILPDSLKELSHTMYKKILRFPCPAEQRKQKPNITPSVQNYII

SEQ ID NO: 274402 - protein, 63 aa, Glycine max
  Clone ID: PAT_MRT3847_89807C.1.pep
PVFPTFKSSLFKVYSPPLLKWGEPPRFCSRLFQSLKTPFFTKGPTHQRKGRFYYFAPFFCPPL

SEQ ID NO: 274403 - protein, 193 aa, Glycine max
  unsure (1)..(193): unsure at all Xaa locations
  Clone ID: PAT_MRT3847_89808C.1.pep
MFFHRVLSRVSTNICRTSLLSASQTPQHLSSFANINLHSLLPHSPNKVIPVQLNLLLPPINSLSAPRFGFSSSASTENNDKKNRNNVHNGDSTNADPAKANEEAKNNDQARQDKPADKTEESDSESECDLSRDDLIKLVAEKEELVMLKHXEIEKMQDKVLRTYAEMENVMERTRREADNSKKFALQNFAKSY

SEQ ID NO: 274404 - protein, 48 aa, Glycine max
  Clone ID: PAT_MRT3847_89809C.1.pep
KKNNNRPQHRGKPYSTKSKQFGNHPNNQRTIAMEFAGGNGSKPTTFLT

SEQ ID NO: 274405 - protein, 42 aa, Glycine max
  Clone ID: PAT_MRT3847_8980C.1.pep
NKTHIVAKNDFLAENDYHLLIYETGLCVYIRGDAWPPPERMM

SEQ ID NO: 274406 - protein, 65 aa, Glycine max
  Clone ID: PAT_MRT3847_89810C.1.pep
HTLLIGALNFKHWNRRSHIIYNHYNTFNNAKKVGPRDNATTPFQKLLTKSDPTNKTENKTLYDSS

SEQ ID NO: 274407 - protein, 115 aa, Glycine max
  unsure (1)..(115): unsure at all Xaa locations
  Clone ID: PAT_MRT3847_89811C.1.pep
MVVDGGTSQVAYSSHYPTACMAASATPAVAAPSPSDAPAGLCTSAHQLDYHQAQNVHHQQLKHQQQHVQMFIGQPYCXIDRTIDYGNHTLPLARIKKIMKTDEDVRMILAHSPCI

SEQ ID NO: 274408 - protein, 57 aa, Glycine max
  Clone ID: PAT_MRT3847_89812C.1.pep
MLRYVGHLKYEYNCRPCLGCPVFQRHGLTDTRSLAGDPPDASILVEVYTVRTHLSTK

SEQ ID NO: 274409 - protein, 72 aa, Glycine max
  Clone ID: PAT_MRT3847_89813C.1.pep
SSFLGNLFSRQSLKSPPSSGKCCSQNWVFDRRWQNCFYLTVFKCVVFVGTPDYIFVKHSEFQDLAAMCCFGL

SEQ ID NO: 274410 - protein, 57 aa, Glycine max
  Clone ID: PAT_MRT3847_89814C.1.pep
SQEIFYITIVTGNSLSKKVYTPPPNSIAPLWDKKIVTCIRNHGNYEIQQVDTLVFKN

SEQ ID NO: 274411 - protein, 68 aa, Glycine max
  Clone ID: PAT_MRT3847_89815C.1.pep
FVTMPYGYPFACLPFPLNYYYNLYGCSPLLNVDGFGLVPLYLVIGNATAFPYAYSSFTSLLVPPPPPP

SEQ ID NO: 274412 - protein, 114 aa, Glycine max
  Clone ID: PAT_MRT3847_89816C.1.pep
MLRQRMITWLKITETLFASMKLCIKGSCKKVHLKFLMRKVNQDSYAEKLHSDNAGLVETVSDGNATVVNNLCDRLIDTNDGQSNYLETASHTTEAVDVSYAHDDDSDHSWMVKS

SEQ ID NO: 274413 - protein, 56 aa, Glycine max
  Clone ID: PAT_MRT3847_89817C.1.pep
FHYWQVFVDDFILSLIHCSNLRVSSPMLCLWEYPVKNFQKKKTLYNCLVFLEKKHF

SEQ ID NO: 274414 - protein, 39 aa, Glycine max
  Clone ID: PAT_MRT3847_89818C.1.pep
PYLSSEFRFWARECPLTTTPLLSHTSPFCSSSNFQVLKR

SEQ ID NO: 274415 - protein, 79 aa, Glycine max
  unsure (1)..(79): unsure at all Xaa locations
  Clone ID: PAT_MRT3847_89819C.1.pep
DSAKKSTKNSRVKVIVKLVNHLXVMPTRFTLDVDLKAPVDPNVFHAKNKKVAALKETKNRLGNRFKTGKKRWFFSKIRF

SEQ ID NO: 274416 - protein, 53 aa, Glycine max
  Clone ID: PAT_MRT3847_8981C.1.pep
FFFFFFFFFSFFFFFFFFLKSPTNLINFNQFGIFLILYIPEYNPFWKSNTNPT

SEQ ID NO: 274417 - protein, 42 aa, Glycine max
  Clone ID: PAT_MRT3847_89820C.1.pep
SAVISEPILTLEKTFGLPCEGLGPLHVPFHSKPCNLRGIVHQ

SEQ ID NO: 274418 - protein, 56 aa, Glycine max
  Clone ID: PAT_MRT3847_89821C.1.pep
IGSTFQIHDEIVNFHHSRSRRVIGRTFGVCKTRRAILQCLISFKHETQIFIIWTYI

SEQ ID NO: 274419 - protein, 103 aa, Glycine max
  Clone ID: PAT_MRT3847_89822C.1.pep
SGGRVDSFEDDPFQNGRPTYTPQNGGLNIPNTVVNQTLSIIPISSCGVFGADPGPTTNLNMGLVYWGTPSSSNIPALGIQVTSTAVAGGMAHCGSRDSANSHL

SEQ ID NO: 274420 - protein, 71 aa, Glycine max
  Clone ID: PAT_MRT3847_89823C.1.pep
MVKMILALAMGMMMMMPWYSLAVDIERVREVAAKHNVSCILVFGELSVDAGNNNALHTTMKSNFPPYGKNF

SEQ ID NO: 274421 - protein, 87 aa, Glycine max
  unsure (1)..(87): unsure at all Xaa locations
  Clone ID: PAT_MRT3847_89824C.1.pep
AKALSFLLISFPLGENIVSTFXATERGSERVSESVSVGAIISDFTPAGPPRGTQRGRGHIFFFHFPQRPSPAAARPPPRPLPPPVPP

SEQ ID NO: 274422 - protein, 53 aa, Glycine max
  Clone ID: PAT_MRT3847_89825C.1.pep
ASATLCVAKPALQANGKGFSKFSGLRSSSGFLPFSTKSSEDFHSSLALLTYTT

SEQ ID NO: 274423 - protein, 51 aa, Glycine max
  Clone ID: PAT_MRT3847_89826C.1.pep
HDRKGFQVSVQKKKKEKKKRQLLDDQDLSIRTCEFKVLPQCHRNPIQWQSS

SEQ ID NO: 274424 - protein, 91 aa, Glycine max
  Clone ID: PAT_MRT3847_89827C.1.pep
KQKRGNKNSLEKNINITFPPLNIKKRVKTGKRIIGNLVKSQGYNIGFLAKGGNKKHGGRLLKPKMGVYGGNSFRFQGYYTRILAEWGTNGL

SEQ ID NO: 274425 - protein, 85 aa, Glycine max
  Clone ID: PAT_MRT3847_89828C.1.pep
KFGRSIMHLYAHSALIKRVKNLNWRYRSYCLKGLEHILRWQFVINWCNVLPSMTYIRLWFLPKAHSFIFAQLCPSVFLLQFYQIM

SEQ ID NO: 274426 - protein, 52 aa, Glycine max
  Clone ID: PAT_MRT3847_89829C.1.pep
FANASLQRGMTNENMIQGNSPATFCNHDQKNQKRFVITRQGKKFVGPLTSDS

SEQ ID NO: 274427 - protein, 113 aa, Glycine max
  Clone ID: PAT_MRT3847_8982C.1.pep
MRIIGAKYKLGRKIGSGSFGEIYLATHIDTFEIVAVKIENGKTKHPQLLYEAKLYNILQGGSGIPNIKWCGVDGEDNVLVMDLLGPSLEDLFVYCGIHFDFGSEGTSNHYPIY

SEQ ID NO: 274428 - protein, 174 aa, Glycine max
  Clone ID: PAT_MRT3847_89830C.1.pep
LCWSLSKVEDHRVVSVPYHSVQVDININPHLPSDYINYLENPLKIINDAERVAEKDIWSLMQFTENLRRQYGKEPRSMEILLKKLYLRRMAADLGITSIYSSGKMIYMKTNMSKKVFKMMTESMASDLHRNSLVLEGDQIKAELLLELPKEQLLNWIFQCLAELHASLPSFIKY

SEQ ID NO: 274429 - protein, 51 aa, Glycine max
  Clone ID: PAT_MRT3847_89831C.1.pep
STSCYTLSFFQVPTTLISEVIGKVEIGINGFGRIGRLVARLALQRDDVELV

SEQ ID NO: 274430 - protein, 106 aa, Glycine max
  unsure (1)..(106): unsure at all Xaa locations
  Clone ID: PAT_MRT3847_89832C.1.pep
TDGNTINCDRGNNFDYGYHQXRTTKYLHRMGNYLSGIIEHDWNMPTSCGYNPDLRYHEDHDWPARPEISNMTDVKLYTDEDGKMIGTHMNDAIDCGYVIGIDGGVF

SEQ ID NO: 274431 - protein, 355 aa, Glycine max
  Clone ID: PAT_MRT3847_89833C.1.pep
MEGTMQLAYETVVKLMLAALERNVLPDVITRRLTRLLLATRLRSAYKPSSQLQLSDLLYFAHSLQEMPIAINTDKPKSQHYELPTAFFKLVLGNNLKYSCCYFSSASMTLDDAEEAMLKLYCERSNLKDGHTVLDVGCGWGSLALYIAKNYTNCRVTGICNSTTQKAYIEEKCRDLQLQNLNIIVADISTFEMETSYDRIFSIEMFEHMKNYKDLLKKISKWMKEDSLLFVHYFCHKAFAYHFEDKNEDDWITRYFFTGGTMPSANLLLYFQDDVTVTNHWLVNGKHYAQTSEEWLKRMDQRMTFIKPIMQSTYGKDSATKWTAYWRTFFIAVAELFGYNNGEEWMVAHFLFKKK

SEQ ID NO: 274432 - protein, 323 aa, Glycine max
  unsure (1)..(323): unsure at all Xaa locations
  Clone ID: PAT_MRT3847_89834C.1.pep
MEGTMQLAYETVVKLMLAALERNVLPDVITRRLTRLLLATRLRSAYKPSSQLQLSDLLYFAHSLQEMPIAINTDKPKSQHYELPTAFFKLVLGNNLKYXTCKSFAAIHKLVLPCVFSLXIMKRVVICKTTLRSLKQGFVFEPMNEKKKLVGMRNPTIGGRPNSLAKRVNTLHLHYCQIKFQXKKNKRIGXLVQSLFILFWXYYFKIKLNKRFKNXSSSFSLKVPLISLLNEDSGTVFLFLFSKLNLAFKKKTDTHYAHVSHVAPLQMDQRMTFIKPIMQSTYGKDSATKWTAYWRAFFIAVAELFGYNNGEEWMVAHFLFKKK

SEQ ID NO: 274433 - protein, 74 aa, Glycine max
  Clone ID: PAT_MRT3847_89835C.1.pep
MDFVEVPLFLQVPKYQRPQELDSSLKTLNAIATSDLPGEATTLQEHVADAAMGNAFLLQAGDRADSFNDLNVNN

SEQ ID NO: 274434 - protein, 95 aa, Glycine max
  Clone ID: PAT_MRT3847_89836C.1.pep
PLSFAHKGLSLVLGEMPIKNAFPFKGVPGAFIKGLVFYFWFPLTGAVLCVMKGSSPILPSFRFPWVKPMSKLFFGNGGAFYPFSFKGFFKKDPFK

SEQ ID NO: 274435 - protein, 317 aa, Glycine max
  unsure (1)..(317): unsure at all Xaa locations
  Clone ID: PAT_MRT3847_89837C.1.pep
IRLEQFDKGYMSPHFITNQEKSIVEFDWVKVLVTDQKISNVKEIXPLLEKAMQLSVPLLIIAEDITRQVLETLVVNKMQGLLRVAVVKCPGFGGAKKALLQDIALMTGADFLSGDLGLTLDGATSDQLGTGLKVTITSNATTIIADPSSLAQFLAAIPRTERDLSLTVFPHLATLLSVSCAYRSGRLPVAXVGAHTELELEDRKLRIEDAKNATFAAISEGIVPGGGATFVHLLDLIPAIRNSMEDLDEQIGADIVAKALLEPAKSIATNAGVDGEHVGRKTRTHDWRTGYYAMTGXYENLXDAGIADSYRVARVAL

SEQ ID NO: 274436 - protein, 84 aa, Glycine max
  Clone ID: PAT_MRT3847_89838C.1.pep
MAHMRRQIFVYLLFAWLLLAASALNHVTASVQAMQSVHFKLRTLEANPKQQNGHVIPSWVEEKKNRKSPSGPNPIGNQHPPSKP

SEQ ID NO: 274437 - protein, 101 aa, Glycine max
  unsure (1)..(101): unsure at all Xaa locations
  Clone ID: PAT_MRT3847_89839C.1.pep
GSRGTRLLLLPLSPALKPWAPEGAESAYGTCIAENGDXVESGWGSIMGRQRGKSMFPLVGGVVHNVPNNQRDILNXQGCIGGENDPLDQTQKQRALAMAYY

SEQ ID NO: 274438 - protein, 53 aa, Glycine max
  unsure (1)..(53): unsure at all Xaa locations
  Clone ID: PAT_MRT3847_8983C.1.pep
FVCXGXFPWLCSFVCCFVLRCFLPLAVVLSVLLRLGRSGXXXRSSPPVSAPLW

SEQ ID NO: 274439 - protein, 179 aa, Glycine max
  Clone ID: PAT_MRT3847_89840C.1.pep
MWSPQARTQPRVSVAEKHRDTAFVLRSLLYVTMATLISRVSGPLSNGFLRLALMDVIVNPVVRFNYFNNLVDMERWANGTRKIVEILGSRALRDFKFSNWFGERDFRFIGLALPLHQTDFPSMSYFYCWTVSSIWHYHGGCHYDEHFYFRVEDGEDDSSDARVKTILISTIPFFYRVLS

SEQ ID NO: 274440 - protein, 59 aa, Glycine max
  unsure (1)..(59): unsure at all Xaa locations
  Clone ID: PAT_MRT3847_89841C.1.pep
FLQFXITLAEVXRRXSXFQISXWVXVEEAXKRVHCLKHWXLTKXGGGXXXKPSXGXXXX

SEQ ID NO: 274441 - protein, 76 aa, Glycine max
  Clone ID: PAT_MRT3847_89842C.1.pep
PTCINIPRQNSVFYLPVPPTSCPPRTFTFQYELVKSSSALKQSNESVSSLVTQREVRVSPCSTNMMHEVGRRHRRR

SEQ ID NO: 274442 - protein, 50 aa, Glycine max
  Clone ID: PAT_MRT3847_89843C.1.pep
AGRVSTCCEGSEKMDSLSNVPINSYQLHHKKACRLQDSSCCIVPDQRVAF

SEQ ID NO: 274443 - protein, 122 aa, Glycine max
  unsure (1)..(122): unsure at all Xaa locations
  Clone ID: PAT_MRT3847_89844C.1.pep
PYNLRNTKVPEYRNGKLVISANSLSHGLSLFKEGKSIGNLKTNESNKENAGKDITGAKNELNCDNQAPENKSETEKSIPVTKKDGENPTPAKAEVPDNEFEKRIRQEVIPANEIXVTFADIG

SEQ ID NO: 274444 - protein, 119 aa, Glycine max
  Clone ID: PAT_MRT3847_89845C.1.pep
MSYRQGKTALALTRVWHRTSCEDRILGRLATRIAHVLIGKHKPTYDPSVDAGDYVIVEHASKVKLSGNQWQDKTYFKHTGYAGSEKFIPISRFKEKDPGEIIRRAESGMLPENSHRKTR

SEQ ID NO: 274445 - protein, 155 aa, Glycine max
  Clone ID: PAT_MRT3847_89846C.1.pep
IIQFSLSSYYLYSIFFFSTFEITPSFCQNRKTKATDPQKFHDWQLQTPHQNSMAWCTDMDTPKSTHKGPGPHHNGHPPQQSVDTALKRSMNGPTPRFGIRRLLTINGYTGHELHVRTKNPAVVTIRKKTKSSTTMTAPMFPKTRPPPRGTTTSGI

SEQ ID NO: 274446 - protein, 120 aa, Glycine max
  unsure (1)..(120): unsure at all Xaa locations
  Clone ID: PAT_MRT3847_89847C.1.pep
KGVPPPPPGVFFFGKPREKGRPPPGXKTPKGSPLPLGLGLRGGIPIFLEALPGGAPPLGGGSSGSFSPVKAKIPAQEGFPPDHPRVFFFGEPLEKGGPLAGFQIPKGTPLPLVPPPRGGG

SEQ ID NO: 274447 - protein, 177 aa, Glycine max
  Clone ID: PAT_MRT3847_89848C.1.pep
DPKLGENISGVILFHETLYQKTDDGTPFVELLAKRNIIPGIKVDKGVVDLMGSENECTTQGLDDLAQRCAQYKKDGCHFAKWRCVLKIGKNTPSYQAILENANVLARYASICQANRIVPIVEPEVLPDGDHDLDRAQKVTETVLAAVYKALNDHHVYLEGTLLKPNMVTPGQSCPKK

SEQ ID NO: 274448 - protein, 56 aa, Glycine max
  Clone ID: PAT_MRT3847_89849C.1.pep
FFIWGTKIKLMGRGLKTYGREKPWCNQIKWLGRKFTFLRWRYKQKGPNIIAFSKYW

SEQ ID NO: 274449 - protein, 41 aa, Glycine max
  unsure (1)..(41): unsure at all Xaa locations
  Clone ID: PAT_MRT3847_8984C.1.pep
NDKPDPLNFHSIIRHKSSPXXRAKAPHPNPPFHPFPTTTFX

SEQ ID NO: 274450 - protein, 128 aa, Glycine max
  Clone ID: PAT_MRT3847_89850C.1.pep
EFGCHFIGFQDRHNKKSNNSDSYMYIFASLFLENVELEFPEEFRSHFLWIQDRLNKKTNNYNSYMNIFASLFLENVELEFREELRYHFVWLQDRPNKKRNNSNSYMNIPASVFLENVEYGIEREDHLQ

SEQ ID NO: 274451 - protein, 79 aa, Glycine max
  Clone ID: PAT_MRT3847_89851C.1.pep
PFNKQTKGKFMFKKLHDPLNLYHNIGETMSPIFFSIYASCIHETQSYRLWENIKLHLFSSSSSVQATCLTAFQDDLSST

SEQ ID NO: 274452 - protein, 339 aa, Glycine max
  Clone ID: PAT_MRT3847_89852C.1.pep
NVINEDSDQNSDNTIEIGSVSEKNINPINSKHWKTPSKLYYQRPTAPDLLLEERGENNFKSFSANNIYEWNIDAQTEYNIMNTLQHMTMVATAYQTSHECSEETIIDILVAGFSGQLKGWWDNYLRLREETEGYGAVKMDLNRKVITNDNNKEIPYVVNTLIFTIAQHFIGDPSLWKDRSAELLSNLKCRTLADFRWYRDTFLTRVYTREDNQQPFWKDKFLPGLPRSLGDKLRDKIRSQSANGDIPYESLSYGQLISYVQKVALKICQDEKIQIQLAKEKAQTKRDLGSFCEQFGLLACPKQKRKQTPRKEIHENKTVHKKRFPRRKYSDKPSTSHSK

SEQ ID NO: 274453 - protein, 260 aa, Glycine max
  Clone ID: PAT_MRT3847_89853C.1.pep
NPARAQKNLTGLVEWYGKNKRLRNLVNLVIVGGFFDPSKSKDREEMAEIKNMHDLIDKYQLKGQFRWIAAQTNRYRNGELYRCIADTRGAFVQPALYEAFGLTVIEAMNCGLPTFATNQGGPAEIIVDGVSGFHIDPLNGDESSNKIADFFEKCKMNQSQWNVISAAGLQRINECYTWKIYANKMVNMGNIYTFWRQVNKEQKEAKQRYIQMFYNLIFKNLVKTVPVPSDEPQQPVGKQPSLKSRSTGRSHSRLQRLFGN

SEQ ID NO: 274454 - protein, 40 aa, Glycine max
  Clone ID: PAT_MRT3847_89854C.1.pep
ITYEFFVLVVLIKYLFVQMLSNVWYDFKYSCIDVHTLHLS

SEQ ID NO: 274455 - protein, 76 aa, Glycine max
  Clone ID: PAT_MRT3847_89855C.1.pep
IITGTCEIFFFVISNKFQQIVKSEKCVEKSALLAISLKKVYCPCFLEFSISVQNTFKQIHNLYDLLAGFSLSILLS

SEQ ID NO: 274456 - protein, 121 aa, Glycine max
  Clone ID: PAT_MRT3847_89856C.1.pep
MDCLVMPVSLIRRRSTGSRMGYMALPKEEPVKVVVGKEKRVFLVEPFILQENPFQILMDISMKKDPAGHFTSNHSQSERRVIFVDVDDILFEHMLWLMHNDASSLIQLNLKEIIDFYTHDI

SEQ ID NO: 274457 - protein, 114 aa, Glycine max
  Clone ID: PAT_MRT3847_89857C.1.pep
CLLYRLGHSASLSGSYGRKSGVAWHGASSSEHRTSERRGGSRQSKQLWRRRRVWAGHWRWSPYRRERPQCHVVDLVRWGLTPWKGVVEQGCCHRRQRPLLQDRDGSDHSASEGG

SEQ ID NO: 274458 - protein, 85 aa, Glycine max
  unsure (1)..(85): unsure at all Xaa locations
  Clone ID: PAT_MRT3847_89858C.1.pep
VRVFQCIVSAIGVRVSEGVSLELCAKDTVGLLSEVTSILXEIGLSVCRPGVSATGXQALNVFHVMNASGNLGDLEFMVALCSEIG

SEQ ID NO: 274459 - protein, 43 aa, Glycine max
  unsure (1)..(43): unsure at all Xaa locations
  Clone ID: PAT_MRT3847_89859C.1.pep
MQINYPFEKGPLSPRFYGEHALRXHPIGEERCIACKLCEAVSL

SEQ ID NO: 274460 - protein, 85 aa, Glycine max
  Clone ID: PAT_MRT3847_8985C.1.pep
YRSFIRYLTKFKTLYRANSRRVVSKATAALGDKKTEKPYERVHTSPHRGRVKVGPRMPQRLASGGGILCQPQRGEQPNIPFHGGA

SEQ ID NO: 274461 - protein, 117 aa, Glycine max
  Clone ID: PAT_MRT3847_89860C.1.pep
MAQAMASMTSLRGSSQAVLEGSLGSTRLNVGSGSRVASVTRAGFTVRAQQQQVNGGEVQSSRRAVLSLVAAGLTTGSFVQAVLADAKPIKVGPPPPPSGGLPGTLNSDEPRDLKLPL

SEQ ID NO: 274462 - protein, 45 aa, Glycine max
  Clone ID: PAT_MRT3847_89861C.1.pep
IRISPRHCFHLLRRTTTSYELLPTQVKIEIIVKMLNLMVHKYSSS

SEQ ID NO: 274463 - protein, 64 aa, Glycine max
  Clone ID: PAT_MRT3847_89862C.1.pep
TRRRQDGTQLHKGIVHSMSLTTSMTFVDSLSLCRAFMGSGHIFSHRRISCSIMKVNLLIHGGIY

SEQ ID NO: 274464 - protein, 311 aa, Glycine max
  Clone ID: PAT_MRT3847_89863C.1.pep
MATTTNAAAAPPRQLSQKEADIQMMLAADVHLGTKNCDFQMERYIFKRRNDGIYIINLGKTWEKLQLAARVIVAIENPQDIIVQSARPYGQRAVLKFAQYTGAHAIAGRHTPGTFTNQLQTSFSEPRLLILTDPRTDHQPIKEAALGNIPTIAFCDTDSPMRYVDIGIPANNKGKHSIGCLFWLLARMVLQMRGTIRPGLKWDVMVDLFFYREPEEAKQQEEEEAPAGDYAITDFNAGAIAADGQWPGTIDQSWSDAVPQPIPAAPGVNWGAPAEAPAAVAEGDWGEAVPPPQQIPVPPSGIDSVQPTGWE

SEQ ID NO: 274465 - protein, 66 aa, Glycine max
  Clone ID: PAT_MRT3847_89864C.1.pep
SIHTLNPFFHLMSTGAQVSHEKSFRTHCAHTTVNIYIEVLYKRLVITHFFPLPIQLKTIMHSTSTL

SEQ ID NO: 274466 - protein, 213 aa, Glycine max
  unsure (1)..(213): unsure at all Xaa locations
  Clone ID: PAT_MRT3847_89865C.1.pep
MMAVRAVTSCSLFRPSSPPLFSSALRFFPYRSRGPPSLSLRYGAHTQTRSVQSLFNSLMEELRAARKRRQKRVSAAASNRMGLLNEELAEDRLVNHSLQKGLLLEFKKDSDRVLLAVAQRPDGKKNWMVSDQNGFTSSIKPQQVTYIVPGIDNFDQADIADFAQKAQDNMDPSLLEFAWVELLEXNKSVTVEELAEIIFGSTEALESYSAHLL

SEQ ID NO: 274467 - protein, 310 aa, Glycine max
  Clone ID: PAT_MRT3847_89866C.1.pep
MATATNAAAAPPRQLSQKEADIQMMLAADVHLGTKNCDFQMERYIFKRRNDGIYIINLGKTWEKLQLAARVIVAIENPQDIIVQSARPYGQRAVLKFAQYTGAHAIAGRHTPGTFTNQLQTSFSEPRLLILTDPRTDHQPIKEAALGNIPTIAFCDTDSPMRYVDIGIPANNKGKHSIGCLFWLLARMVLQMRGTIRPGLKWDVMVDLFFYREPEEAKQQEEEEAPAVDYAITDFNAGAIAADGQWPGTIDQSWSDAVPQPIPAVPGVNWGAPAEAPAAAGGDWGEAVPPPQQIPVPPSGIDTVQPSGWD

SEQ ID NO: 274468 - protein, 57 aa, Glycine max
  unsure (1)..(57): unsure at all Xaa locations
  Clone ID: PAT_MRT3847_89867C.1.pep
TNKXIGXHGGRTKKQNWGCPPPLQSDTRRRLQNPASHTTHKRESMDYMRLLTKEAPE

SEQ ID NO: 274469 - protein, 135 aa, Glycine max
  Clone ID: PAT_MRT3847_89868C.1.pep
MGGERNKVFTLAEVSQHNNAKDCWLVIHGKVYNVTKFLEDHPGGDEVLLSSTGKDATNDFEDIGHSTSAVAMMDEFYVGDIDTSTIPSKVKYTPPKQPHYNQDKTPEFIIRILQFLVPLFILGLAVGIRFYTKST

SEQ ID NO: 274470 - protein, 98 aa, Glycine max
  unsure (1)..(98): unsure at all Xaa locations
  Clone ID: PAT_MRT3847_89869C.1.pep
VEWVCSFMKSSATGGGYSTGFIFDFKAETMQSVILSIGFTPFNRFRISDATSCLPTTIADADSMSVRLEYNFLXEATEEEKEVEKNVEEVLEPHPPLX

SEQ ID NO: 274471 - protein, 42 aa, Glycine max
  Clone ID: PAT_MRT3847_8986C.1.pep
FLFFNTQWTFPKLRLESSRNKLQTREIISFIKRITCGTQKLT

SEQ ID NO: 274472 - protein, 35 aa, Glycine max
  Clone ID: PAT_MRT3847_89870C.1.pep
LWAMLILDHRVQIVCINPPLGEYHVTDPTLKYVST

SEQ ID NO: 274473 - protein, 53 aa, Glycine max
  Clone ID: PAT_MRT3847_89871C.1.pep
LGPKTPQHRGGDSGAGLEQLSPPSPGAQKPRPTPPRSLTRSPPPRSDIRVMVN

SEQ ID NO: 274474 - protein, 130 aa, Glycine max
  Clone ID: PAT_MRT3847_89872C.1.pep
HSPYYESLDIDSTTPLYMGCTKYTRLSAVLGLVNLKARFGWSDKSFNELLLLLKNMLPVDNTLPKNHYEAKKILCPVGMEYHKIHACPNDCILYRHQFAEMRSCPTCGASRYKVKYDESSVDGGTYKDCP

SEQ ID NO: 274475 - protein, 58 aa, Glycine max
  unsure (1)..(58): unsure at all Xaa locations
  Clone ID: PAT_MRT3847_89873C.1.pep
AEKSMRRELKDLQKDPPTSCSAGPRAEDVXHWQGTIDGPGDDGYAGGEYMSTIWKPTD

SEQ ID NO: 274476 - protein, 94 aa, Glycine max
  unsure (1)..(94): unsure at all Xaa locations
  Clone ID: PAT_MRT3847_89874C.1.pep
SPHVXHILKLSLAPLXXMYSXRNLTCLRTCLEWXXRSEXXYXTSWXPRXKGXNKFQSKSFLFFDXPVFTXIMNMGXLXINVSLISALIERWSXG

SEQ ID NO: 274477 - protein, 80 aa, Glycine max
  Clone ID: PAT_MRT3847_89875C.1.pep
VQVLIIKTYKFNATYIRQNCGHWRENIFPGTDFTNDKVGNHLFNSSVFLSLKYDFCNYTKTPRCHCTSTIKSPKNKTANQ

SEQ ID NO: 274478 - protein, 52 aa, Glycine max
  Clone ID: PAT_MRT3847_89876C.1.pep
PLSMATTIRSLIGTNGLMCQVITIRTCVVHGLILIMAGSSATYMLRLYSGDL

SEQ ID NO: 274479 - protein, 60 aa, Glycine max
  Clone ID: PAT_MRT3847_89877C.1.pep
LIDSIVNSKFYRIYLEFIKFTKSLLKKRIYSRVDLLNELTQEPFCRLLAAVRTRGRTRGR

SEQ ID NO: 274480 - protein, 229 aa, Glycine max
  unsure (1)..(229): unsure at all Xaa locations
  Clone ID: PAT_MRT3847_89878C.1.pep
PSSVAVANSLVNMYGKCGDLTAARQVFDEIPDRDHVSWNSMIATLCRFEEWELSLHLFRLMLSENVDPTSFTLVSVAHACSHVRGGVRLGKQVHAYTLRNGDLRTYTNNALVTMYARLGRVNDAKALVGVFDGKDLVSWNTVISSLSQNDRFEEALMYVYLMIVDXVRPDGXTLASVLPACSQLERVRIGREIHCYAFENGDLIEDSFVGTALVDMFXNCKQPKKGRLV

SEQ ID NO: 274481 - protein, 42 aa, Glycine max
  Clone ID: PAT_MRT3847_89879C.1.pep
SWVQGRVLGVTHPTYGCESCFDGSPHAYLLHTLKVRLFFLNK

SEQ ID NO: 274482 - protein, 56 aa, Glycine max
  Clone ID: PAT_MRT3847_8987C.1.pep
IKKSPPPWAFGRLKIYPLGGNHVLCSVANFLLTKGLLYETLIFPSFINKKKGPFFF

SEQ ID NO: 274483 - protein, 38 aa, Glycine max
  Clone ID: PAT_MRT3847_89880C.1.pep
AISYFGDIRILGCLFSFFLQYFWYHDHAISHATISSLF

SEQ ID NO: 274484 - protein, 70 aa, Glycine max
  unsure (1)..(70): unsure at all Xaa locations
  Clone ID: PAT_MRT3847_89881C.1.pep
LRGLKKTEEAPASSPPPPPPVASLEHGTGAHHDVQAKEKXGIFDIIQEKLPGYLSKTEEDKYMVKESGAL

SEQ ID NO: 274485 - protein, 95 aa, Glycine max
  Clone ID: PAT_MRT3847_89882C.1.pep
MQGATISFGLQLANHRVIVSQIASRLGSSDLALQYLEKCLYYVNIGSNDYMNNYFLSQLYPASRIYSLEQYAQTLIEELSLNLLGSNEIFCFTNY

SEQ ID NO: 274486 - protein, 75 aa, Glycine max
  Clone ID: PAT_MRT3847_89883C.1.pep
GCFFFFFFFFPPVPNKIDIKNVQQGSRFINCGGWGLSQELGSMFLVFSKSHNFEELKKCTNHFIVRVKQINGFQP

SEQ ID NO: 274487 - protein, 99 aa, Glycine max
  Clone ID: PAT_MRT3847_89884C.1.pep
QSQGFEVVLLDKATEEHVLVPAMEALYRKDIEGARNLLRIAIHVLLVRAVNLVLLASDDLLGVLPHNDPLLRKCIDPMDALARSTIHWAETMVKVHEKL

SEQ ID NO: 274488 - protein, 147 aa, Glycine max
  unsure (1)..(147): unsure at all Xaa locations
  Clone ID: PAT_MRT3847_89885C.1.pep
MNSGAVLALPPVSNVFRTREPHDFEDDFVEKDPTGRYIRYNEILGRGAFKTVYRGFDEVDGIEVAWNQVKIDGLMHSVDDLAKLYSEVNLLKSLKHENILXFYDSWIDDKQKTVNMITELFTSXKLRLYRKKHKYVEMKAIKXWARQ

SEQ ID NO: 274489 - protein, 68 aa, Glycine max
  Clone ID: PAT_MRT3847_89887C.1.pep
PLIRILPLSILNSLSEIIIARLSNTESAHYFTDKDATRNDVNLSDYKRKVLLLVNVTLQCSLTNSNYT

SEQ ID NO: 274490 - protein, 365 aa, Glycine max
  Clone ID: PAT_MRT3847_89888C.1.pep
RVRSPFVLTFSLLLSLPILFFLAPRILPPKPHSFPPISPSDELDDINLFNRAISHSSNSHSNPSKFFHLSSKNPSLKIAFLFLTNTDLHFSPLWDLFFSSSPSHLFNIYIHSDPSFNLTLPLSPLFRNKFISSKPTFRSSPTLISATRRLLASALLDDPSNAYFALLSQHCIPLHSFKYTYNSLFLSPTFDSENPESSSRFGLRLKYKSFVEILSHAPKLWRRYSSRGRYAMMPEIPFEDFRVGSQFFTLTRRHALVVVKDRTLWRKFKIPCYRDDECYPEEHYFPTLLSMADPDGCTKYTLTSVNWTGTVNGHPYTYRPTEISPELILRLRKSNHSESYLFARKFTPDCLEPLMRIAKSVIFRD

SEQ ID NO: 274491 - protein, 29 aa, Glycine max
  Clone ID: PAT_MRT3847_89889C.1.pep
YNTTKYSKKYITKYYYQFLNHFKILHYTN

SEQ ID NO: 274492 - protein, 66 aa, Glycine max
  Clone ID: PAT_MRT3847_8988C.1.pep
WVYRKGWWVKFLSWKLHLARSIYDYIFNRSMKVLPLTCFVLFMSSIQCNVIMCNWMLLLPIFLFLL

SEQ ID NO: 274493 - protein, 39 aa, Glycine max
  Clone ID: PAT_MRT3847_89890C.1.pep
MKSSSKALEKKDWEDSTCSVCMEVAHNGMLVLCSSYDKG

SEQ ID NO: 274494 - protein, 64 aa, Glycine max
  Clone ID: PAT_MRT3847_89891C.1.pep
PRCPSGWKPHRRQILHSLSPRLPLPLSLSLPQYLFSSSTYTETKQVITYNIIHNHKTNFFLFSF

SEQ ID NO: 274495 - protein, 425 aa, Glycine max
  unsure (1)..(425): unsure at all Xaa locations
  Clone ID: PAT_MRT3847_89892C.1.pep
KKGEPISVLDGVPVAIKDEMDCLPYPTTGGTKWLHRERPCTDDACCVKRLRLCGAILVGKTNMHELGVGISGINPHYGAARNPYDTNKISGGSSSGSATVVSAGLCPVALGVDGGGSVRVPASLCGVVGLKPTFGRVPHSGVLPLNWTVGMVGILAGTVEDALITYAAISGEISSHQPSNMLTKINLPLLPLTKSICDIKLAKYGKWFDDXDDVILCCSRALRKLQDHYGWKTIDVTIPDIEAMRLAHYLTIGSECSTWFDSFGEKHFAEFGWDARVALSIYGAFSGLEYLKAQKMRNRQLQFHKKIFAEADVIVSPTTGVTAYQIQDDALQTGELDYVNGAALVRYSIAGNFLGLPAVTVPVGFDRLGLPIGLQFIGRPWSEATLIHLAFAMQAICMSEYRKPELYYDLLRRKNSSNGMSFDAK

SEQ ID NO: 274496 - protein, 594 aa, Glycine max
  unsure (1)..(594): unsure at all Xaa locations
  Clone ID: PAT_MRT3847_89893C.1.pep
MEFLNGKGVVYTPLKDVDLGPYSTEFYLQANVKAPRMTGLLVKIFTHLLECPILGTLLLFILKGNNLIHRLITNAEFKESPLFVPLHDFEGLKEKEVKCLDSSLSPPEKVQLALDCLPKSSEKTLDGTNSSFCRWTIMDYAKAYSSGDITPSLVAERFIAAIDESTKPPLQMGFFIHYSADDILKQATESTLRYQKGTPISVLDGVPVASRSKYGVLXGGTKWLHRERPCTDDACCVKRLRLCGAILVGKTNMHELGVGISGINPHYXGGSSSGSATVVSAGLCPVALGVDGGACLFXGSVRVPASLCGVVGLKPTFGRVPHSGVLPLNWTVGMVGILAGTVEDALITYAAISGEISSHQPSNMLTKINLPLLPLTKSICDIKLAKYGKWFDDCSDDVILCCSRALRKLQDHYGWKTIDVTIPDIEAMRLAHYLTIGSECSTWFDSFXEKKFGWDARVAQSIYGAFSGLEYLKAQKMRNRQLQFHKKIFAEADVIVSPTTGVTAYQIQDDALQTGELDYVNGAALVRYSISGNFLGLPAVTVPVGYDKLGLPIGLQFIGRPWAEATLIHLAFATQAICLEYRKPKIFYDLLRKN

SEQ ID NO: 274497 - protein, 71 aa, Glycine max
  Clone ID: PAT_MRT3847_89894C.1.pep
LSDLRFSPLTLSHRDFSPRFPSISCPNFPPLHVFFYVYVSIVDSYSFLTALELRALLQSLGKGEIENIIQC

SEQ ID NO: 274498 - protein, 47 aa, Glycine max
  Clone ID: PAT_MRT3847_89895C.1.pep
SRVSIDDLNLYLISVKTTRNGDQLQINCKLKKHLQQDDSEMHDQKHI

SEQ ID NO: 274499 - protein, 98 aa, Glycine max
  Clone ID: PAT_MRT3847_89896C.1.pep
VCLSVNPFPSLLFCGLSISILIFSGSLSRWPPITPPSTTPSTCFKRPVMFSENLAVAVYAYVRHVFLCFNRNLLWSPIIVTFDSYPFSLCVFTIFIAR

SEQ ID NO: 274500 - protein, 48 aa, Glycine max
  Clone ID: PAT_MRT3847_89897C.1.pep
SYRVRVCVTSTMLSTWDPGVLENTMTLRIVFLSNRGNPGRLRLLRPCN

SEQ ID NO: 274501 - protein, 100 aa, Glycine max
  unsure (1)..(100): unsure at all Xaa locations
  Clone ID: PAT_MRT3847_89898C.1.pep
LKPPPGEDPETLGPQKILETKFSGPPPRPSKVPFENWPPPPKTAPKTAPPGLAPWVLERPPPPPTNGGLXLPPRPGKGPPPYPPPFSGLVDSAGEVLPPP

SEQ ID NO: 274502 - protein, 141 aa, Glycine max
  unsure (1)..(141): unsure at all Xaa locations
  Clone ID: PAT_MRT3847_89899C.1.pep
MIQLGTCSYVMLSNKFTLHSYCAGHVCFQGTFTRYLLLITRPKYCQIVSIKSCYPSLPLHQVLKVDHSHEGRGKATXQELRDIDQGNKVTQRMGTDDGCERVYVQEKTFMFMCMDSDGTVVLMDLDTLNQIEVSKDWFNKD

SEQ ID NO: 274503 - protein, 45 aa, Glycine max
  Clone ID: PAT_MRT3847_8989C.1.pep
FLTHTCRKDQISLSRVKLELDLMGGVTCFLGDIELLFHSPTTVGP

SEQ ID NO: 274504 - protein, 111 aa, Glycine max
  unsure (1)..(111): unsure at all Xaa locations
  Clone ID: PAT_MRT3847_898C.1.pep
QDLKVRNRNCVVVSRNSSNSNSNNNNNSSKSVKTSNRNNKKGSNNYINVLKQLVGKGGGLLSGCDCSFETVQPNNIVMIKGGNGNSGGGTXKSTNMTESTTHAAKEKVVEF

SEQ ID NO: 274505 - protein, 40 aa, Glycine max
  Clone ID: PAT_MRT3847_89900C.1.pep
HQRSTRLGRSSSVVNTHILLQITSALIVVCSSLVAFIQFQ

SEQ ID NO: 274506 - protein, 42 aa, Glycine max
  Clone ID: PAT_MRT3847_89901C.1.pep
SKIPSLSLFLNTSSANAFTLQCIACIRYSRETYISLSDQLAE

SEQ ID NO: 274507 - protein, 125 aa, Glycine max
  Clone ID: PAT_MRT3847_89902C.1.pep
VSAFAPIANPINGPWGQKPFSNYLGANNSDGKDSDAPCLVPKFPNVSSPILIVQGKNAKFLLDQLRPPKFDQAAKKAKVPFLFGFHPGYVPLSFLIPPLLNVPFGLQVQVLSFRLGGGPFMKDDL

SEQ ID NO: 274508 - protein, 191 aa, Glycine max
  Clone ID: PAT_MRT3847_89903C.1.pep
EELLDPFRGCVNLKHLYLHRCQYYGGIHRFQIFVPQLTHLSISWMGMNEMFDSDCVVELFTPKLQYFRYHDSDLYDFSIEGNLPFIEQVDIDVGCLTNDTDSLLLLIQLFEMMGSARFVSLSPAIIQALAMIPDLLDGRASPFSRVHTFELNMDRPSSSFVIPPNVMAYLFSGSPAFDFHEWEGSKECKTI

SEQ ID NO: 274509 - protein, 77 aa, Glycine max
  Clone ID: PAT_MRT3847_89904C.1.pep
GTHIMNSMLNAKIIRPSINSYSSPVILVRKKKGLRLYIDYRAQNNASVPNKFPIPPIIKIWIRNNKKMENLFKSRLE

SEQ ID NO: 274510 - protein, 169 aa, Glycine max
  Clone ID: PAT_MRT3847_89905C.1.pep
MAPKKKPESDPHGMFSGMVVFLVPKGVQARRFQIWKERLVQMGAVIEERFSKRVTHVFATHSDALLQQLDRERLSRFKGRVLLYQWLEDCLKSGEILSEDMYLLKLDSQGEHIPEKSLDPGLTNQRTSSDLQQLLNKKSKLSTEDTKIVKNESHDDDGKEKRYFHQQAQ

SEQ ID NO: 274511 - protein, 295 aa, Glycine max
  unsure (1)..(295): unsure at all Xaa locations
  Clone ID: PAT_MRT3847_89906C.1.pep
MEGHHLHHHHRQQQQQQHHHQQQHQQQQHHHHPHHNITTSNVDATDRFPQWSIQETKEFLMIRAELDQTFMDTKRNKQLWEVISTRMKEKGFHKSAEQCKCKWKNLVTRYKIXKGCETMEPEATRQQFPFYNELQAIFAARMQRMLWAEAEGGSNKKKVHLSSEDEEEGNEETSEGDHKGNITSKKKKKGKMVIGGGGSGNNNLESLKEIMDEFMRQQMQMEAQWMEAFEARENERRLKEMEWRQTMEALENERLMMDQRWREREEQRRIREEVRADKRDALITALLNKLRREEM

SEQ ID NO: 274512 - protein, 54 aa, Glycine max
  Clone ID: PAT_MRT3847_89907C.1.pep
VFFGTSLKKVIDSRVPYNYVSGGHSLIVAVKENIEIEETLQTDRDRLTGIEYDI

SEQ ID NO: 274513 - protein, 132 aa, Glycine max
  Clone ID: PAT_MRT3847_89908C.1.pep
MHTRSHSMPFPRLALAYVHLPIWYLAMAHDMGSSDFGEPNLGNERASCTSTPRMRKKSSQLDKPQQPQRGLGAAQSEKIRLHGYHPYVQATYTSNISNEDPRVQIAYSSVPSCAVSYSSSYAAYYGFQRSIM

SEQ ID NO: 274514 - protein, 234 aa, Glycine max
  Clone ID: PAT_MRT3847_89909C.1.pep
MEGHHLHHRQQQLQQHHHPHHNITTSNVDATDRFPQWSIQETKEFLVIRAELDQTFMETKRNKQLWEVISNRMKEKGFHRSAEQCKCKWKNLVTRYKGCETMEPEAMRQQFPFYNELQAIFAARMQRMLWAEAEGGSNNKKKGMHLSSDDEEEGNEEMMSEGDHKGNIIISKKNKKKGKMVIGVGGSGNNNNNSSSSSNNLEREEQRRIREEVRADKRDALITALLNKLRREEM

SEQ ID NO: 274515 - protein, 86 aa, Glycine max
  Clone ID: PAT_MRT3847_8990C.1.pep
KNGATPQKRARTRFPPGEAPGYSKNPPPHLKKEGGGPAPRGGNRTRPLQPSILWAHGPPGVPEKFGASPGGPPTSPKGGEKQEGGK

SEQ ID NO: 274516 - protein, 75 aa, Glycine max
  Clone ID: PAT_MRT3847_89910C.1.pep
FLLRRQGTYHVPKIHRCTLEAIPLTTFSLHSLTPEKGCTALYLRSRLVEEPPVSHTTKAALTEPRSTANRPSFPT

SEQ ID NO: 274517 - protein, 166 aa, Glycine max
  Clone ID: PAT_MRT3847_89911C.1.pep
MDGSALIHFTSQMGTKGKQREDFKTTTIRENKKWMHRETEKQRRQEMTRLCTNFRSLLPLEYIKGKRSISDHMHEGTNYIKYLQNKVKQLQATRDKLMKLSNLSPVGSESGSLSTTHLPVCVIVHPCPGGVQIKCSYSFGKYACPLSRVLDIVLKEGLDVVNCTST

SEQ ID NO: 274518 - protein, 197 aa, Glycine max
  unsure (1)..(197): unsure at all Xaa locations
  Clone ID: PAT_MRT3847_89912C.1.pep
MNDRRISTQVKASAQARQVGRQISISSPGFIYEPYEPREKIPFWKRWFTRSGWRRTKNDIILELKSAYAIAKLRKKGYSKNQFYNEAANMYKENVDDRLCMMLNCTVTLSQTCAHILKSIGVDRKDLNKTFIQLTLEXFLAKQKFEAYDSKGSVVAGDKSKEVLVRDIWVLEKSMFHPGATWHLCGRISPKASQLFP

SEQ ID NO: 274519 - protein, 309 aa, Glycine max
  Clone ID: PAT_MRT3847_89913C.1.pep
MMTPFKRLHLVRTLYRSSQIGESSSYLLGSCKSYSSALSNGSEGNFRSFHSHLLKGQDGFPFAGVKSLTLRSTMAAELSIFMNNRRMLSTQVKASAQARQVGQQISLSSPGFIYEPYEPRDKIPFWKRWFTRSGLRRTKFGFRHDLKSAYAIAKLRKTGYSKNQFYNEAANMYKEINTLIAKGDKRTLRKAVTENMFSALKNEIKQRETAWSRVYWEMVEPAVKIRTLRARLIGVDRKDLNKTFIQLTLEILAKQKFEAYDSKGSVVAGDKSKEVLVRDIWVFEKSMFHAGATWRLCGRISPKASQLSP

SEQ ID NO: 274520 - protein, 117 aa, Glycine max
  Clone ID: PAT_MRT3847_89914C.1.pep
ANPLFPAFWGFFNYVGRTGFFLFKGAVGAAPISGVVSLLGPPPVFAFCVPLLCVLHLSFGFLFSREGRLVRVSSLFYQLPFRECGAPRRGRVGIFWFSHGVVLGAPPGFFRYTIEKI

SEQ ID NO: 274521 - protein, 95 aa, Glycine max
  Clone ID: PAT_MRT3847_89915C.1.pep
VLFPLMAQGHMIPMMDIAKILVHRNVIVTVVTTPHNAARFTPIFDRYIESGFPVRLVQLQFPCEEAGVPKGCENLDMIPSLATATSFFKAANLLQ

SEQ ID NO: 274522 - protein, 57 aa, Glycine max
  Clone ID: PAT_MRT3847_89916C.1.pep
LHIFFSFNCYVVEVERCTLITKIEFSISNILSVRLHEKPYIYRYMMKQNHIYKHHCL

SEQ ID NO: 274523 - protein, 97 aa, Glycine max
  Clone ID: PAT_MRT3847_89917C.1.pep
EIPQLVGRQIISNSEATTVYSPALTLPSLVTEVLPEQCASPASSRPSYPEPPPQQLEEISTTNSNAGIGTFFSVTLRKSSLSHGVAQKNTPQSNRIK

SEQ ID NO: 274524 - protein, 83 aa, Glycine max
  Clone ID: PAT_MRT3847_89918C.1.pep
GARPTTDFELHFYHVGGSSNKKGAIIGGVVGGVSLVVILLALFGLLRRYKKPKRVPRGETIWKVLNLMIFHQRKYRGTHQFTL

SEQ ID NO: 274525 - protein, 97 aa, Glycine max
  unsure (1)..(97): unsure at all Xaa locations
  Clone ID: PAT_MRT3847_89919C.1.pep
KYVSGNGFYIIFSHTDSPYLKGKFITKAVNTXIFVVGVQTYLGTLXHTLFDRNLTVTLRVIVQQXNAPSFSYSHKIVQIAXPITRIPTLAIHLHKTV

SEQ ID NO: 274526 - protein, 85 aa, Glycine max
  Clone ID: PAT_MRT3847_8991C.1.pep
GRIIRGSLRLRVIDFTASDPYLIDQYLTKQGWDCCVQRSIHWRGLIWPVLAMRYPGIPNWENLSSYLFSVRDWIFPAGLRTYRDL

SEQ ID NO: 274527 - protein, 156 aa, Glycine max
  Clone ID: PAT_MRT3847_89920C.1.pep
DAVSRSTTQVYPKSWTAIYIALDNVGMWNLRSEFWARQYLGQQFYMRVYTTSTSIRDEYPVPKNALLCGRASGRHTQASAFEQLTYVLLIFEFICFGAFSYLCYAPMDMYDLNYKLNDPSSRSHSFPEKKKKKKETIYSILFVIFRNFYYYYILMS

SEQ ID NO: 274528 - protein, 36 aa, Glycine max
  unsure (1)..(36): unsure at all Xaa locations
  Clone ID: PAT_MRT3847_89921C.1.pep
AMASXLKELKLXSXPFCLSLXXMQIXLEYKLLHXXI

SEQ ID NO: 274529 - protein, 297 aa, Glycine max
  unsure (1)..(297): unsure at all Xaa locations
  Clone ID: PAT_MRT3847_89922C.1.pep
TLYPLFDVHVGQSSQASVTXADQPAQDYYIVVSSRFSSKVLTTTGILRYSNSAGPVSGPPPGGPTIQIDWSLNQARSIRTNLTASGPRPNPQGSYHYGLINTTRTIILSGSPGIVNGKQRYAINSVSYVAPDTPLKLADYFKIPGVFRVGSISDRPTGGGIYLDTSVLQTDYRTFVEFVFQNDEDIIQSYHLDGYSFFVVGMDGGQWTPASRNTYNLRDAVSRSTTQVYPKSWTAIYIALDNVGMWNLRSEFWARQYLGQQFYMRVYTTSTSIRDEYPVPKNALLCGRASGRHTRPL

SEQ ID NO: 274530 - protein, 494 aa, Glycine max
  unsure (1)..(494): unsure at all Xaa locations
  Clone ID: PAT_MRT3847_89923C.1.pep
TLKTAAVAVAIVCISAFSITVVAEDPYRFFNWNVTYGDIYPLGVRQQGILINGQFPGPDIHSVTNDNLIINVFNSLDQPFLLSWNGVQQRRNSFEDGVLGTTCPIPPGGNFTYILQVKDQIGSFYYFPSLAFHKAAGGFGGIRILSRPRIPVPFDDPAGDYTVLIGDWYKLNHTDLMSLLDSGRKLPFPNGILINGRGSNGAYFNVETRKXTYRLRISNVGVGNXSLNFRLQNHXLKLXEFERTHTFQTTYSPPEVRVDQPYSVLVNPDQPAQDHXLTASGPRPNPQGSSPNGLIITTRTTILSGSPGLVNGKQRFAINSMSYVAPDTPLKPADYFTIPGVFRVGSISDRPTGGGIYLDTSXVLQTDYKHVVAHVFHNYEDXIIQNYHLDGYYVLVVGMDVGQWTPASRNTYNLRDAVSRCTTQVYPKSWTAIYIALDNVGMWNLRSEFWARQYLGQQFYMRVYTTSTSIRDEYPVPKNALLCGRASGRHTRPL

SEQ ID NO: 274531 - protein, 60 aa, Glycine max
  Clone ID: PAT_MRT3847_89924C.1.pep
GHVHAPSSSCPSSSFSFFTSHNLCLRVMSCPYSLYDNPHIGFQPHFFKICREKINNFLFF

SEQ ID NO: 274532 - protein, 408 aa, Glycine max
  unsure (1)..(408): unsure at all Xaa locations
  Clone ID: PAT_MRT3847_89925C.1.pep
HASGQILMSSGSTTFTKIVNKWNTALIGLMTYFREATVHTQELLDLLVKCENKIQTRIKIGLNSKMPSRFPPVIFYTPKEIGGLGMLSMGHILIPQSDLRYSQQTDVGVTHFRSGMSHEEDQLIPNLYRYIQPWESEFIDSQRVWAEYALKRREAQAQNRRFTLEDLEDSWDRDEPRINTLXPKDRHTLAYDKGWRVRTDFKQYQVLKQNPFWWTHQRHDGKLWNLNNYRTDVIQALGGVEGILEHTLFKGTYFPTWEGLFWEKASGFEESMKYKKLTNAQRSGLNQIPNRRFTLWWSPTINRANVYVGFQVQLDLTGIFMHGKIPTLKISLIQIFRAHLWQKIHESVVMDLCQVVDQELDAWEIETVQNVTIHPRRSFKXNSSCARSSAYLLSLLGHGLGLSLQADV

SEQ ID NO: 274533 - protein, 256 aa, Glycine max
  Clone ID: PAT_MRT3847_89926C.1.pep
EELMEVGPERLKEALAALGLKTGGTVQQRAERLFLTKHTPLEKLDRKHFAKGACGVEKNGVAAVPQEDGNSKEIALMEAKMTKLCHLLEETIARTKDNVVKKQALTYEEMEAEREEEETQEDSESEDEEQQIYNPLKLPMGWDGKPIPYWLYKLHGLGQEFKCEICGNYSYWGRRAFERHFKEWRHQHGMRCLGIPNTKNFNEITSIEEAKELWKKIQQRQGVNKWRPDLEEEYEDKEGNIYNKKTYTDLQRQGLI

SEQ ID NO: 274534 - protein, 42 aa, Glycine max
  Clone ID: PAT_MRT3847_89927C.1.pep
HMFVVFGSNDLVHRYKRSLLIGGQNPLNIQNMPLACTMEKPF

SEQ ID NO: 274535 - protein, 62 aa, Glycine max
  Clone ID: PAT_MRT3847_89928C.1.pep
TNERFGHNGQLVYMISPIYYHIQYYTMTITLHQIMRSSLRPLSKGALVIFTFNTNQLLTLYR

SEQ ID NO: 274536 - protein, 314 aa, Glycine max
  Clone ID: PAT_MRT3847_89929C.1.pep
GEVMSSLTSKKDVIPYENSMLTKLFADSLGGSSKTLMIVNVCPNSSNLSETLLSLNFSARARNSVLSLGNRDTIKKWRDAANDARKELYEKEKEIQYLKQDGLRLKQALKDANDQCVLLFNEVQKAWKVSSVLQTDLKSEHVLLSDKHKIEKEQNNQLRNQVAQLLRLEQDRKLQIQEQDSTIQSLQAKIRTLETQFNEAIKSSESRSTFVYETESADQSNSGPTGDGIDSSAVTKKLDEELKKRDALIERLHEENEKLFDRLTQKASTAGSPKLSSPLARGSANVQPRDIGRNGTNNNTSSRSIGGSFFTFGH

SEQ ID NO: 274537 - protein, 49 aa, Glycine max
  Clone ID: PAT_MRT3847_8992C.1.pep
VISGMNYYGCLSMLSLVILTPFAIAVEGPQMWAAGWQTALSQIGPQIIW

SEQ ID NO: 274538 - protein, 59 aa, Glycine max
  Clone ID: PAT_MRT3847_89930C.1.pep
KHEDILLLLGLIDVKILARVLRMTRMTREHLFWCEEKMKKLDLSNSRLERDPCPILFPC

SEQ ID NO: 274539 - protein, 93 aa, Glycine max
  Clone ID: PAT_MRT3847_89931C.1.pep
LSAPVNILNHEQNAQSMKLGKCENKGLKQLELNSLTSSNQNNNGLVAKFTSNASTANAPAVESKPREMVPKNMFKHADTNGVISGKVANGKVT

SEQ ID NO: 274540 - protein, 307 aa, Glycine max
  unsure (1)..(307): unsure at all Xaa locations
  Clone ID: PAT_MRT3847_89932C.1.pep
HFIKTLRYDVKIVESIPENQKNGEKKKIKPFQXSPPRDAPISWYTTDALKKMKAYGAIYLTPFSHRLAEEIDNPEYQRLRCRVNYHALRFKPHIVKLSQSIVEKLREQGPFMSIHLRFEMDMLSFAGCFDIFTPGQQKILKKYRKENFAPKRLVYDERRAIGKCPLTPEEVGLILRALGFDNSTRIYLAAGELFGGDRFMMPFRSLFPRLENHSSVENSEELAENTKGLAGSAVDYMVCLLSDIFMPTYDGPSNFANNLLGHRLYYGFRTTIRPDRKSLAPIFIDRENGRTAGFXEAIXKVMLKTNF

SEQ ID NO: 274541 - protein, 56 aa, Glycine max
  Clone ID: PAT_MRT3847_89933C.1.pep
GRVRPRVRFTVKYSSFPGPVGGWQMGVPHGMGISMQYNNVVPVPSFPQPSKSNIKN

SEQ ID NO: 274542 - protein, 65 aa, Glycine max
  Clone ID: PAT_MRT3847_89934C.1.pep
KRIALIYGGLGTTSPLKRFKKGDKWVKPNGSSPPILRAKVPNAEPDSDPKKVLALLDGLMSVINS

SEQ ID NO: 274543 - protein, 70 aa, Glycine max
  Clone ID: PAT_MRT3847_89935C.1.pep
IECPAILFWWPHKEIFPIPTPGRKVWSLITSAPILRALICLARDCYTCSFFFVFFFFFFFFFFFFFFFFF

SEQ ID NO: 274544 - protein, 75 aa, Glycine max
  unsure (1)..(75): unsure at all Xaa locations
  Clone ID: PAT_MRT3847_89936C.1.pep
PLLILRNVQVLMVGMVSNAEYRYQDVIFXSFGLKRVIXWDFVVFFCLDGFKKPNSYIYDIALDWTGKIALVDIFL

SEQ ID NO: 274545 - protein, 38 aa, Glycine max
  unsure (1)..(38): unsure at all Xaa locations
  Clone ID: PAT_MRT3847_89937C.1.pep
LCPGGXRRPALKSSPVVFSVGLGFYARGGSTQVFRAGP

SEQ ID NO: 274546 - protein, 47 aa, Glycine max
  Clone ID: PAT_MRT3847_89938C.1.pep
IMSSNWIWARTLRQALVEKKRVTCSSTSHSFYILNLPAISRTAIVPI

SEQ ID NO: 274547 - protein, 146 aa, Glycine max
  Clone ID: PAT_MRT3847_89939C.1.pep
PNGPSPQGDPWSPTPFFLNIDQGPFFFLERKPPVPFFFFPRGFKFFFAPNPKGFCINFSRFKGLFFPAPLGAPPSQNKRGGCGGKNLFPPRFPSPPNISQPPQFVLVLKPPPGVGGVPLPLEKQKRFFGVPPSGLLKCLPGAPVFF

SEQ ID NO: 274548 - protein, 138 aa, Glycine max
  Clone ID: PAT_MRT3847_8993C.1.pep
FLARRRQTGLMGDFSVGNSNLLVRFIPSPVEDLCLTTGADSKTKTPTAGGKRLKLTIRDTAGHDRIRTLNTSYFRNTQGTILFSDVTRRETSTYLPKVWSKVAELFSSHYDCVKTLTGTTVDSHPEQGPEHERGFSTY

SEQ ID NO: 274549 - protein, 95 aa, Glycine max
  Clone ID: PAT_MRT3847_89940C.1.pep
RFKNGRGLLRALSYPSLAGKAAKLGPSAPEIARVSMRKTRTKHAFSGSPWYCPDPVKYLCPLCGEPPYYLTGQCPRDYGWDTCGLYADPETLARN

SEQ ID NO: 274550 - protein, 81 aa, Glycine max
  unsure (1)..(81): unsure at all Xaa locations
  Clone ID: PAT_MRT3847_89941C.1.pep
ARGKRQAYLDCLASVRGVLEHLKDQDREYLGIKXKELHEGKGIVDTYTYMTHVRNMSRTPNSITSIQTLSPHMKQHMVRGP

SEQ ID NO: 274551 - protein, 133 aa, Glycine max
  Clone ID: PAT_MRT3847_89942C.1.pep
LIEVITASCLSENGAHVNSKSIDRGLVKYQSGTKPEILSNICDLLCFCILHHPYRIKCNFLPNKVIDKILLLTRRREKYLVVGAVRFVRTILSRHDEHLVDHFVRSDLFKPIVDAFVANGNRYNLLHSVVLGL

SEQ ID NO: 274552 - protein, 46 aa, Glycine max
  Clone ID: PAT_MRT3847_89943C.1.pep
KSKKKKKKKKKKKKKKKKKKKNKKKKKTKKQKKKKKKKKKKKKGGA

SEQ ID NO: 274553 - protein, 148 aa, Glycine max
  Clone ID: PAT_MRT3847_89944C.1.pep
SYRHLLFAIYVFGVGVPLFNHNVRSTHTIKWSLWIIHKLLLAAAYGFILFANFSKWREKLPPRPSFHNYVAVMFVFSVITLFACGLAAIDAGLGNWLYDLTVLCYHSLYLPFLYVTFLADFFQEEDFLLDNAYYSEMKDAGFFDADWE

SEQ ID NO: 274554 - protein, 78 aa, Glycine max
  Clone ID: PAT_MRT3847_89945C.1.pep
KKKAIKNPPQQKGKGPKPLWGVGKFKKSKTFFTIKKKNGPHKKQTGRKMAPRRKKTYFGKVRLQETGKTLKIYLKQNP

SEQ ID NO: 274555 - protein, 55 aa, Glycine max
  Clone ID: PAT_MRT3847_89946C.1.pep
STIILWIVATEIGAPVFARINILYNNLPRKLTHTGCVRLITLSNAFMRSVYIEEP

SEQ ID NO: 274556 - protein, 76 aa, Glycine max
  Clone ID: PAT_MRT3847_89947C.1.pep
ASRKERRSRREGERSGNTVRFCGERSVTYSQDFSPHLRINLKWRSATRNPPRRNRSIIRHTLLRLSRGSITFSIRR

SEQ ID NO: 274557 - protein, 202 aa, Glycine max
  unsure (1)..(202): unsure at all Xaa locations
  Clone ID: PAT_MRT3847_89948C.1.pep
MSRYRGPRFKKIRRLGSLPGLTSKRPTVKSELRNQSRSSKKSQYRIRLEEKQKLRFHYGLTERQLLKYVRIAGKAKGSTGQVLLQLLEMRLDNILFRLGMAATIPQARQLINHRHVLVNGHIVDIPSSLLSSSRSRTAKDEQKSKTLIQNYLDSAPREKLPNHLTLHPFQIXGLINQIIDNKWVXGLKINELLVVEYYSRQT

SEQ ID NO: 274558 - protein, 50 aa, Glycine max
  Clone ID: PAT_MRT3847_89949C.1.pep
TTIFWHFKDLVYHRGQLTHYHYYYLTSFISIVTIIFLKTYLFLFFNLMAT

SEQ ID NO: 274559 - protein, 244 aa, Glycine max
  unsure (1)..(244): unsure at all Xaa locations
  Clone ID: PAT_MRT3847_8994C.1.pep
MSFPTRLRFSVSLSTLKFPSFLPNPSLPKLHSHFHSRPPSFENVDDALFQFHRMLCMRHTPPIIQFNKILDSFAKMKHYPTAVSLSHRLELKGIVPDFFTLNILINCFCRMGQINFGFSVLWPKILKWSYEPDTITLNTLIKGFCLKGRVKKALLIXRILSYGILINGICKTGDTRALVQLLGKIDDSNADLLDEALAMLSKMEGNGCIPNAFTFEILICALFEKDGNDKAEKLLREMIARGLL

SEQ ID NO: 274560 - protein, 30 aa, Glycine max
  Clone ID: PAT_MRT3847_89950C.1.pep
ITDLQYRGQKYKNCMLCIINDVMYYAARIS

SEQ ID NO: 274561 - protein, 48 aa, Glycine max
  Clone ID: PAT_MRT3847_89951C.1.pep
VFLKNQTKSNLFKNDSVNICTIFIKGLVQFFLLLFIQISLIFSTLVSL

SEQ ID NO: 274562 - protein, 108 aa, Glycine max
  unsure (1)..(108): unsure at all Xaa locations
  Clone ID: PAT_MRT3847_89952C.1.pep
QSRWANWPPXWLLNIIQXLESCETSWSARIALVACASVCKLWREITKDVVKTPXQCGSITFPISLQQPVPRDSPIQCFIRRDRMTSTYCLYLGLSPALSGDMSKLLLA

SEQ ID NO: 274563 - protein, 105 aa, Glycine max
  Clone ID: PAT_MRT3847_89953C.1.pep
KGGQQEKVLGERKNPPPPGFWRGGDQKGAGKKKAGAQKGGGEGPKTGGGPHRKTQGPPRECKAPPGPRKERPPGAKKKPPGPKPWEGPEKPTPGAKGETPPPPRK

SEQ ID NO: 274564 - protein, 73 aa, Glycine max
  unsure (1)..(73): unsure at all Xaa locations
  Clone ID: PAT_MRT3847_89954C.1.pep
GTVDNIHNMCAYRVNPGIAGTRSLGQHPQSDSTGTVXEXMATVTKPLXFDSSKQSFCQFSIDLLGGGILVDNL

SEQ ID NO: 274565 - protein, 56 aa, Glycine max
  Clone ID: PAT_MRT3847_89955C.1.pep
FFLLSFNYKSLHISFFFLVIESKVITFEFTVTLKYTKVNKQSIFVLFFFYLFEFKF

SEQ ID NO: 274566 - protein, 44 aa, Glycine max
  Clone ID: PAT_MRT3847_89956C.1.pep
WMIYVDYFKWNEIICFASVFCEYFTACLKSTLTWSIFVGDGLGY

SEQ ID NO: 274567 - protein, 84 aa, Glycine max
  Clone ID: PAT_MRT3847_89957C.1.pep
MPGSLEPVDLGVHIPYHFRCPISLELMRDPVTVCTGQTYDRASIEAWVSTGNTTCTVTRATLTDFTLIPNHTLRRLIQEWCVAN

SEQ ID NO: 274568 - protein, 326 aa, Glycine max
  Clone ID: PAT_MRT3847_89958C.1.pep
KVVWFVVSAVRSLVLLVLCTGLPLAGAPLWAWLILAPDGATIYDVSIVQNIVREFFMKNGNAEIESVGGDELEGIRKPGILSDASKLMVAKLIDEYLAEIAKDPNLPLPEFVNLAELVSSISRPAHDGLYRAIDTYLKEHPAINKGEKKRICKLMDCRKLSVDACLHAVQNERLPLRVVVQVLYFEQLRTAASSGTSTPDIPRGIKDLNNESNGSSRSGTTNPEDELDAVATAEELKALRKELASLRLSNGVGNNDKDGDNKPSMDKAVMSKVKGLLKSKKSFIKIWASKGGQGENSGSDSSESMSSANPEEAKSTPSRNRRHSVS

SEQ ID NO: 274569 - protein, 40 aa, Glycine max
  Clone ID: PAT_MRT3847_89959C.1.pep
KGASGKHSNHGNDALVSILLIPSRRQLAQKEENMLIVNVF

SEQ ID NO: 274570 - protein, 96 aa, Glycine max
  unsure (1)..(96): unsure at all Xaa locations
  Clone ID: PAT_MRT3847_8995C.1.pep
EIPSPIGLVYTVXAPSVVPNTGQLGXIAPMAMGVNEGHNLWMGGAFSGVTMNPSIKIGPELVTGNWPMLCMFXVATLIGGGIPGLIHQDVFFTHSP

SEQ ID NO: 274571 - protein, 52 aa, Glycine max
  Clone ID: PAT_MRT3847_89960C.1.pep
RRRQGKRCLVLMRNHMRPLMKSKEKQISLPRLLPLTHYQHLQRPQWTCTNQQ

SEQ ID NO: 274572 - protein, 51 aa, Glycine max
  Clone ID: PAT_MRT3847_89961C.1.pep
ARVGAIICVSKLYHEILTRLVLSDFYGHHASNSDMFLPPGGIHSRSIIIEE

SEQ ID NO: 274573 - protein, 108 aa, Glycine max
  unsure (1)..(108): unsure at all Xaa locations
  Clone ID: PAT_MRT3847_89962C.1.pep
AHLIHMSCDRIFTHTAVTNHAKDQMAFFSAEEFIGDGVLKELLQMLWEEGWDDVPTLGIMSXDVVGLLLMTQVLMVVLGIRSLFVDCGFLRFVIVVVIVGKLCWCLLX

SEQ ID NO: 274574 - protein, 52 aa, Glycine max
  Clone ID: PAT_MRT3847_89963C.1.pep
PTKDYICGEHCRSNSITPKHHAFFYASERAHHHDDTIIFNIYYTALSNMPYY

SEQ ID NO: 274575 - protein, 97 aa, Glycine max
  unsure (1)..(97): unsure at all Xaa locations
  Clone ID: PAT_MRT3847_89964C.1.pep
LKSRALAYQTIRARHWDRNACNGIEKTAINSTHLNNPDIEXHIYCLYTPGKSHDTSTFSQQLVPKDARVYHAQDHVVGVAYVIPYEKHETDALRQQH

SEQ ID NO: 274576 - protein, 61 aa, Glycine max
  Clone ID: PAT_MRT3847_89965C.1.pep
TKHAQLDLCVKEFACQFTTPHLEKTTEFDCQNCNNRSLVKYIIFPVQGTRNPRLSSYITIS

SEQ ID NO: 274577 - protein, 36 aa, Glycine max
  Clone ID: PAT_MRT3847_89966C.1.pep
QNNVFSWDLLIISVTVTLFSTIIQKCQLPTWNQPLI

SEQ ID NO: 274578 - protein, 95 aa, Glycine max
  unsure (1)..(95): unsure at all Xaa locations
  Clone ID: PAT_MRT3847_89967C.1.pep
SIFLALFLFCASTTXYLPCHSLIFSSILRSTPVDIGCTYYILSDITPFFVIRANPPVNDICPLTVVQSRIELDXGLKQSSXAPFRIRFIVKRNPL

SEQ ID NO: 274579 - protein, 65 aa, Glycine max
  unsure (1)..(65): unsure at all Xaa locations
  Clone ID: PAT_MRT3847_89968C.1.pep
WPNLTPRLMSFCIADPKQFSVFDNLLGISQVFDLAGNPRMPAXCVPQDIARCSENRLLPQDMPPV

SEQ ID NO: 274580 - protein, 48 aa, Glycine max
  Clone ID: PAT_MRT3847_89969C.1.pep
KQKKSQTHCIMKISSCRKRISLAFYNLWTILQETPLVIMHPSHHHSMP

SEQ ID NO: 274581 - protein, 90 aa, Glycine max
  Clone ID: PAT_MRT3847_8996C.1.pep
MVPKVYAGQEMAVVENENCMMNGKWKKRVHVFGERVMRFPNKAWQTTWKVGREDPRRLIHAFKVGLSLTLVSLLYLLEPLYKGIGQSAIW

SEQ ID NO: 274582 - protein, 94 aa, Glycine max
  unsure (1)..(94): unsure at all Xaa locations
  Clone ID: PAT_MRT3847_89970C.1.pep
WKRWSLGAVLVLCTXHPTTXDPFTKPNKXLRXSXSXXXAXLSXTSKWAEASLXIXNSSXTXXLHXXXHXXXXLPSXXXSXLLSATCRXXSTCTA

SEQ ID NO: 274583 - protein, 91 aa, Glycine max
  Clone ID: PAT_MRT3847_89971C.1.pep
LRRRNIAMIMAMTASAAVQVLKLLHHLSIQNVYRTTIPTAVPQFLSLISLSLSLSLFPFSITCYTLISENYTSEMVCVFLVASPSANSLLL

SEQ ID NO: 274584 - protein, 217 aa, Glycine max
  Clone ID: PAT_MRT3847_89972C.1.pep
PREGPRGRFTPLLPFLPSLFFLITCIFSKNQRKKETHTHTPLSLSHSHMAAFSYQYHPFLVDPAFFPNNLNTPSPPPHQFQQLPHETSSFNVTNQETSCVDQSSKITISDNEPSVTENLSPQSSMVVDKLETGEQVTQKVNTPVEKKRKTKNGSSLTSNPQSKDAGTARKNTTRNKGNGGLKDQAPDRRREAETVRVEKISERMLVLCRLVPGSGNG

SEQ ID NO: 274585 - protein, 201 aa, Glycine max
  Clone ID: PAT_MRT3847_89973C.1.pep
MVVDKLETGEQVTQKVNIPVDKKRRTRNGSSFTSNPQSKDTATEGKNKKQRKNNGGLKEEDKAKEEKKDQRKCPEEPPTGYIHVRARRGQATDSHSLAERVRREKISERMKVLQRLVPGCDKVTGKALMLDEIINYVQSLQNQVEFLSMKLASVNPMFYDLATDLDTLLVRPEKLNSMASPSPLPSMSHCNSPNTQATTFC

SEQ ID NO: 274586 - protein, 84 aa, Glycine max
  unsure (1)..(84): unsure at all Xaa locations
  Clone ID: PAT_MRT3847_89974C.1.pep
GSHRFSRNLCAPPFPPGGVFLFLVGWWGXCLSWATRSLNFLPARVTCPLMCFGPPGSVIPGNFFCLACQFFSLSNQVFFKKLFS

SEQ ID NO: 274587 - protein, 54 aa, Glycine max
  Clone ID: PAT_MRT3847_89975C.1.pep
DLCSAFYFSKIWRFEKVPEDVLNNMVVISLPLKVIYSMRKSMQQRWDLRLRSPD

SEQ ID NO: 274588 - protein, 173 aa, Glycine max
  Clone ID: PAT_MRT3847_89976C.1.pep
NRAHTLLVFSTLTTTTMPRRRSWHSSPPLLSPPLLIILFPIVILTLLFLAVPPILSAVTRLLRSASSDVKTSWDSLNILLVVFAILCGVFARRNNDDEQTPNNHVHQHDDDAVSDRNAAFRRLHSEGQSQWFGFAEERKVYGNDTPLNQLQSLDTGGNRLRMRRNSSSYPDLR

SEQ ID NO: 274589 - protein, 83 aa, Glycine max
  Clone ID: PAT_MRT3847_89977C.1.pep
IAKSDIVDTRDMVMTGAPGSRENPQSAKVENMPVTSHTSSICQSEYGNQSVNSSKSHDSDVDHAHEYRENSDLTCKKRLGSRS

SEQ ID NO: 274590 - protein, 124 aa, Glycine max
  Clone ID: PAT_MRT3847_89978C.1.pep
GPKGNGFRRVKVPKGVEEKKKRFTHVGFTPPEEWFLFPANLGGGSPQPVGLPNQFHPYGDLYVVRLKGRGFRSLPFKGYKNGTPPGPHGDLGLCAPKKNDAQGGQDWDKLKGEFQPPLWITCDI

SEQ ID NO: 274591 - protein, 31 aa, Glycine max
  Clone ID: PAT_MRT3847_89979C.1.pep
VAICSVAPRNHRWSMLNISRSQNFVRAMQQC

SEQ ID NO: 274592 - protein, 33 aa, Glycine max
  unsure (1)..(33): unsure at all Xaa locations
  Clone ID: PAT_MRT3847_8997C.1.pep
ILYGEGKCWXAKVFCEEELVXAVASATGPKSGS

SEQ ID NO: 274593 - protein, 63 aa, Glycine max
  Clone ID: PAT_MRT3847_89980C.1.pep
PSIYTLCRNGFKPIVPLNVYTGGLVKLTVSIIRLIDVTRLTLDRLSVDHWMNLLHIHIWVTKS

SEQ ID NO: 274594 - protein, 117 aa, Glycine max
  unsure (1)..(117): unsure at all Xaa locations
  Clone ID: PAT_MRT3847_89981C.1.pep
GQPYFRGSKLKSSLAGHNITISVGIXNTSATLQLRKLSDGDFLKKNFNQXSNVMCVTLEDKASLWSQLHYVSCHYLKMLEAYNVNLVKVLRELSIHSPEEARQLRRKAFYCLHDSKS

SEQ ID NO: 274595 - protein, 82 aa, Glycine max
  Clone ID: PAT_MRT3847_89982C.1.pep
LWFSRYAVSVIHCKFCKRLHWGAFTAWDILPSGFVVLLVVNGGGGGTCCCCLLMLWPLDGVVGICAWLPLMLMLWSISLSSA

SEQ ID NO: 274596 - protein, 58 aa, Glycine max
  Clone ID: PAT_MRT3847_89983C.1.pep
NLFLKFTFVIYFSILLKLCVIYYMTSEHKVPTIQKHTTTTHVLSREGYEFLAPKLMEA

SEQ ID NO: 274597 - protein, 111 aa, Glycine max
  unsure (1)..(111): unsure at all Xaa locations
  Clone ID: PAT_MRT3847_89984C.1.pep
HTLSLSPHSANVPLLKNIDTQTVVEELASENKVDENTNEDNTCTYPSPIDKQLKKVAHKTAGTYAPRAFTVTKNPAAPGSDLXSVYEDQGYLXMYAGGALTFNLIFPSEEP

SEQ ID NO: 274598 - protein, 71 aa, Glycine max
  Clone ID: PAT_MRT3847_89985C.1.pep
HTCSKINYKPIFWKEFYTGGDTWADLPGSQVMGENNGENLHFLKTLFIGLKKRKLGKPIATPWAPGWFSFL

SEQ ID NO: 274599 - protein, 417 aa, Glycine max
  Clone ID: PAT_MRT3847_89986C.1.pep
MSFSEFRPLDDKFLIEYIKSVPALSSKLADNLDDLSVKEVGDGNLNFVFIVSNPAGSFVIKQALPYVRCIGESWPMTKERAYFESLALKEEGRLSPEHVPEVYHFDRTMSLIGMRYLEPPHIILRKGLIAGIEYPFLAEHMADFMAKTLFFTSLLFRSTADHKRDVAEFCGNVELCRLTEQVVFSDPYKVSQYNRCTSPYLDRDAEAVREDNLLKLEVAELKSKFIERAQALIHGDLHTGSVMVTRESTQVIDPEFAFYGPMGFDIGAFLGNLILAFFAQDGHADQANDRKSYKEWILKTIEDSWNLFYKKFTSLWDEHKDGAGEAYLPAIYNNPEVQLLVQKKYMTDLFHDSLGFGAAKMIRRIVGVAHVEDFESIADAAKRASCERRALDLAKMLLKERRKFEGIAEIISAIRQY

SEQ ID NO: 274600 - protein, 86 aa, Glycine max
  Clone ID: PAT_MRT3847_89987C.1.pep
AKTITQASIHTNQTKRDPPPIKEYLSGLDIHLYIYEPPLPWLSALLNDSPPPCLDGRCLTLPDGIRTVYLSNPILPELGDGDYSLS

SEQ ID NO: 274601 - protein, 55 aa, Glycine max
  Clone ID: PAT_MRT3847_89988C.1.pep
HAVCTVIISCLIESRNFIAIEARNCLVCIIHLVSLLHLRLFCLLWIQNTASASRQ

SEQ ID NO: 274602 - protein, 44 aa, Glycine max
  Clone ID: PAT_MRT3847_89989C.1.pep
MNNSAEKKRGKRRKKKKKKKKKKGKNKKKKKKKKKKRKKKKKRC

SEQ ID NO: 274603 - protein, 253 aa, Glycine max
  unsure (1)..(253): unsure at all Xaa locations
  Clone ID: PAT_MRT3847_8998C.1.pep
MRSHVSLSSLFFFPPNKTPSFSSFSPFHWNQTMAFGVRKMPRFVVCAGPKKILFGKECREALQAGIDKLADAVSLTVGPKGRNVILSESGNLKVINDGVTIARSIELSDAIENAGAILIXEVASKMNELAGDGTSTAIILARAMIKSGLLAVAFGANPISLKKGMEKTVKELVKFLKERSVPVEGREHIKAVASISAGNDEYVGNLIAEAMDKIGSDGVISIESSSSSETSVIIEEGMKIETMVRMKRLREKT

SEQ ID NO: 274604 - protein, 90 aa, Glycine max
  Clone ID: PAT_MRT3847_89990C.1.pep
ASKDVFFSSVFFPIKPPLISFVFFFFHHVDIISCRSFGTVFGLRVTICGPRLLPVVWSFSFFTLGLGAPPRSGREPILSASVLFYICSWW

SEQ ID NO: 274605 - protein, 57 aa, Glycine max
  Clone ID: PAT_MRT3847_89991C.1.pep
CLARALRIRFRIVFMHYGVFWLTNILRIKWSSGALEQHQTVSTCDGCGKLVMSSFFS

SEQ ID NO: 274606 - protein, 120 aa, Glycine max
  unsure (1)..(120): unsure at all Xaa locations
  Clone ID: PAT_MRT3847_89992C.1.pep
RRLGVQNHEEAERQKREKPNQRHHALRAAXKNEAKMDTAAHQGDATSYITEQKAKQQTLETDQEGMQKQLKSGKNELEKTTDNETSKHARNSSRRXTNNEKADQKLTDMKEKDKTILGWD

SEQ ID NO: 274607 - protein, 43 aa, Glycine max
  Clone ID: PAT_MRT3847_89993C.1.pep
IHLCCSIKKKKKKKKKKKKKKKKKKKKKKKKKKKKKKKKKKKK

SEQ ID NO: 274608 - protein, 108 aa, Glycine max
  Clone ID: PAT_MRT3847_89994C.1.pep
KTGNFFLEPDLKKPRGGKTKSPFFGGPWKNFQGGGGKTKLGGGRREKTPPPGPGKVLDNKLFRGAAKKLPFFPLGGLAPFPWEGRVLFAEGSICRSFKKPVFPPPFEI

SEQ ID NO: 274609 - protein, 59 aa, Glycine max
  Clone ID: PAT_MRT3847_89995C.1.pep
VASEATVYVVPLASVHSVSDARVMTLDLAAPLQPPETAFSLECDHYRIYSRVEPWDFPP

SEQ ID NO: 274610 - protein, 86 aa, Glycine max
  Clone ID: PAT_MRT3847_89996C.1.pep
PRVRKYGAYVYGYSTIYEAKDWSPTGDVYADGTTGLPIWTVTLLGLLAGGALLVYNTSAYGTINFANLCFKLKLSLMNYLLMNKYS

SEQ ID NO: 274611 - protein, 279 aa, Glycine max
  Clone ID: PAT_MRT3847_89997C.1.pep
MATIQCATTTLILLLLLLLIIPRSNSQQEYVNNKQLDCNNEYNSTKGNLCNSLPSCTSYLTFKSSPPEYTTPAAISFLLNSTPALIAAANNITDVQTLPADTLVTVPVNCSCSGPYYQHNASYTIKVQGETYFSIANNTYQALTTCQALELQNTVGMRDLLKGQNLHVPLRCACPTQKQREAGFKYLLTYLVSQGESVSAIGDIFGVDEQSILDANELSTSSVIFYFTPISVPLKTEPPVTIPRAAIPPEDSPSPPLPPAPAGDGDSDSSKKWVIVGIV

SEQ ID NO: 274612 - protein, 67 aa, Glycine max
  Clone ID: PAT_MRT3847_89998C.1.pep
KSGDILQPPQRLRPLRRFRNPRFPPQQDIFRLEEKPTQTQDHQRRRTPFNHQPSPPMNPPLLSSCNR

SEQ ID NO: 274613 - protein, 142 aa, Glycine max
  Clone ID: PAT_MRT3847_89999C.1.pep
MAERTDTLYAFNGCSLNNARGHVTNLREVVGYTLFYDEKLVKQSTATRPYAMHMQYLHYSINESRNKLLFDYHKINSGREFIKHVECQLFKFKMEDVSMGMWVERYNNTNDNSKVLQNQFARNRIEFCTNVSKKRGDKKEMR

SEQ ID NO: 274614 - protein, 64 aa, Glycine max
  Clone ID: PAT_MRT3847_8999C.1.pep
QVQRDKKRRLKLRETEKIRDTHVRKMETLEVFREKEKKKNRNCEEMEWNHSGFGVTPRDGGGGT

SEQ ID NO: 274615 - protein, 86 aa, Glycine max
  Clone ID: PAT_MRT3847_899C.1.pep
CFFFFFFFFLLFFFFVFFFFFFLGNKKKIMGFYKNKTSISCPPKGGGLTYLPLFRIQNGARTPYGALGAFFSPVSHKKKPKDPPKK

SEQ ID NO: 274616 - protein, 64 aa, Glycine max
  Clone ID: PAT_MRT3847_89C.1.pep
CSSGKSPPDVANYVQRILAATLGFECTNFTRKDKYRVLAGNDGTVSPTYSFFDQMVKVVRTFMR

SEQ ID NO: 274617 - protein, 91 aa, Glycine max
  Clone ID: PAT_MRT3847_8C.1.pep
GFLNSYTTPWTQPPLVQDIKCEIHIHQITGGIILQPIYILENRAKECLYEFFKLKNVFFGGLPLKPCRDFSLFSPLFEKKRGPTPKKCWPE

SEQ ID NO: 274618 - protein, 60 aa, Glycine max
  Clone ID: PAT_MRT3847_90000C.1.pep
IPNYLAVIKIPQIKLCLSPSKPRIEIISKQVLSVSTLSMALVPPSSSGPFRICQHLKMKA

SEQ ID NO: 274619 - protein, 42 aa, Glycine max
  Clone ID: PAT_MRT3847_90001C.1.pep
RDMKKYDKRTRCTDSLASYPKGAEPALLTELMSLTCLSRSAR

SEQ ID NO: 274620 - protein, 46 aa, Glycine max
  Clone ID: PAT_MRT3847_90002C.1.pep
FCQPKNVQSPLIFSHLFCPFGSRYHKHNLPKDRLRNNDEVIIFLLR

SEQ ID NO: 274621 - protein, 87 aa, Glycine max
  Clone ID: PAT_MRT3847_90003C.1.pep
IIVIETPVTLTLRPKSQSRILFVKPCQQFKTASSPQRLRHVIQHTIEEHHEGKKENFDGVQGGSWSKICNFAPWSTLGSETKLSHWF

SEQ ID NO: 274622 - protein, 56 aa, Glycine max
  Clone ID: PAT_MRT3847_90004C.1.pep
MLRQFGGPLQLVDIGSLSRNCGIKCTVDGMHYDGVVYEAGVQILLNALLIESHQRL

SEQ ID NO: 274623 - protein, 127 aa, Glycine max
  Clone ID: PAT_MRT3847_90005C.1.pep
IFAMKTDRSLGNSRRSTEPSYYGWRIDSLIRSNHSRKKNSEISKFSARINNYTWSNYSQMANSTVTRFSKRVTNALGSSSHLSSVSHGYGSRVNFGITSVVASSWGSAPPDWTSRVHSAIRSNTSGT

SEQ ID NO: 274624 - protein, 43 aa, Glycine max
  Clone ID: PAT_MRT3847_90006C.1.pep
VYSWPNGQHFINNPKGDSPHVFSPTSKNYFKTFAAPKKFLKIF

SEQ ID NO: 274625 - protein, 133 aa, Glycine max
  unsure (1)..(133): unsure at all Xaa locations
  Clone ID: PAT_MRT3847_90007C.1.pep
MAESSTSSPVSVDSIPRDNDKFWKGSFAVAGIMVTLITYGKXIMRVPYGTEKEYFKHSLFLVFCNRITTSAVSAGSLLASKKVLDPVAPIYKYCLISGSNILTTTCQYEALKYVSFPVQTLAKCXKMIPVIGW

SEQ ID NO: 274626 - protein, 72 aa, Glycine max
  Clone ID: PAT_MRT3847_90008C.1.pep
NFSSATHYPDTASPVRNQHREDNVVLRRHTGTLLKVAGVHSPTSEYVTRLKCHHSIGLWQSHHTFLTGKTWW

SEQ ID NO: 274627 - protein, 111 aa, Glycine max
  Clone ID: PAT_MRT3847_90009C.1.pep
MQAIQRSAFAGANTRVSVRSRQTTVVVRAVQDVQGTVVSTSMQNTVVVNVERLAPHPKYFKRIRQSKRFLAHVEDSSACGVGDYVRLEGCRPLSKNKRFKVAEVLRAADKN

SEQ ID NO: 274628 - protein, 118 aa, Glycine max
  Clone ID: PAT_MRT3847_9000C.1.pep
TGNTKGEISRGKSGSRTKSNWAQFQKLLIGRGFLGAPLLDYPDFGFSFTGRNLSPQFFEQKRRGPFPFLAGPFFFFFFQKSPVLVLSKFSPIKRFCFPPVWGKGVPEPKAMGHRSKNF

SEQ ID NO: 274629 - protein, 52 aa, Glycine max
  Clone ID: PAT_MRT3847_90010C.1.pep
SGLAVVLLTTGFAVCLFTFSRVTLLAYPIMGLACLSDFTFPLPGTTVEVLLL

SEQ ID NO: 274630 - protein, 167 aa, Glycine max
  unsure (1)..(167): unsure at all Xaa locations
  Clone ID: PAT_MRT3847_90011C.1.pep
MMTELVARTGRHQQRYGHGYRLIAGCVPFRYKEDDCGDSCSEKIVEVLMINSTSGPGLLFPKGGWENDETVEEAAVREAIEEAGVRGDLMDXLGYYEFRSKTLQDECSPEGLCKAAMFALFVKEELESWPEQSTRKRSWLXVSEALGNCRHAWMRDXPACFCNGMRS

SEQ ID NO: 274631 - protein, 89 aa, Glycine max
  Clone ID: PAT_MRT3847_90012C.1.pep
SSRIASRILFLATNTIWIFAFSWAERVPKTSPSYPTILDHYDDELDLPNQSEMDKPHMYVFKISLHDFLTYDPPKPTNKPLINVHSHLQ

SEQ ID NO: 274632 - protein, 78 aa, Glycine max
  unsure (1)..(78): unsure at all Xaa locations
  Clone ID: PAT_MRT3847_90013C.1.pep
GGADCCIDFVNNNASTALGEKSLFFTNLGLPYNVLFLXDNIPNGVDARTISMCNEHLLNAPAVTYSGACGANGSFRFF

SEQ ID NO: 274633 - protein, 96 aa, Glycine max
  unsure (1)..(96): unsure at all Xaa locations
  Clone ID: PAT_MRT3847_90014C.1.pep
ARNSARXDTTEXFXWFXRXXPXPSSSXXYPXXLCXXVXXSSXXITXQSLTNXNXHXXRKDQXXHXVLXXXLXXTGXLXGXXCCRGLFXLSXNXXXX

SEQ ID NO: 274634 - protein, 109 aa, Glycine max
  unsure (1)..(109): unsure at all Xaa locations
  Clone ID: PAT_MRT3847_90015C.1.pep
KGGAGPLETREGSDGRGANKDRPEIIARVRTGGDQKENNNNSDGTPGSPSSIGGRTPQWQKHEEQXVKCKDQVWSPKLETNSEDKNRYSPRRTHRIRVERKRKARGKGY

SEQ ID NO: 274635 - protein, 57 aa, Glycine max
  unsure (1)..(57): unsure at all Xaa locations
  Clone ID: PAT_MRT3847_90016C.1.pep
KKKKERKNKKTKNKKNLPAQLIALNAQHIDSIACGADHTLAYSEXCTELYSWGWGDY

SEQ ID NO: 274636 - protein, 125 aa, Glycine max
  unsure (1)..(125): unsure at all Xaa locations
  Clone ID: PAT_MRT3847_90017C.1.pep
KTGPTARVRKLKNVPSYSFYTEDKQPFIRTLYMIPGPLHVTGNFFHIXLAHKTINTLELSINALKEIQMLLYSDIPPHPQEHLNCLTTPLTTKPTQCIYPICIIKQISLKYTISTYLRFTTYYNI

SEQ ID NO: 274637 - protein, 129 aa, Glycine max
  Clone ID: PAT_MRT3847_90018C.1.pep
SSFIYIGTCVFLLFFSRFFFKKRTGGPAMVLLSGKKPDVILATPRFCDNLLGGQNITLLTKGIPPGGTQTREKINPSYIFRGGITGGNPVGAPGETPAPKSAAPYGERKKGGGSPGRQVYPPFTRASGE

SEQ ID NO: 274638 - protein, 112 aa, Glycine max
  unsure (1)..(112): unsure at all Xaa locations
  Clone ID: PAT_MRT3847_90019C.1.pep
NFPYSIWKPFTXFXXXLXLLXLXSAXFAIXSNKLXKXXLXNXNXLEPXHXXXSEGGXXKXXNSXXXXLKCAXVNXSKLTLXXNXXHLPSXXPYXXMIIXXXGKGXXXVXIPG

SEQ ID NO: 274639 - protein, 58 aa, Glycine max
  Clone ID: PAT_MRT3847_9001C.1.pep
NLSRNQPECKHKNVLRFCFSEPETNHFLMNDWYGHFQKILPPHFLHLACHVSNLLDFL

SEQ ID NO: 274640 - protein, 70 aa, Glycine max
  unsure (1)..(70): unsure at all Xaa locations
  Clone ID: PAT_MRT3847_90020C.1.pep
GDIGVSKSTDKGATWQQLGNDLXEDWHLYXPYVFEHDGQIYMMPDXQQXGDLRLYRAGNFPLQWRLEKVV

SEQ ID NO: 274641 - protein, 41 aa, Glycine max
  Clone ID: PAT_MRT3847_90021C.1.pep
VAFEGKTLSRQLPQPAHALRPVNEVIAPPAADSEAMSMEQQ

SEQ ID NO: 274642 - protein, 52 aa, Glycine max
  Clone ID: PAT_MRT3847_90022C.1.pep
LLLNLLLHMLGVGLFMGLVGYGAVCAFLAARIATDRPMPLSSPVLRAFLACS

SEQ ID NO: 274643 - protein, 164 aa, Glycine max
  Clone ID: PAT_MRT3847_90023C.1.pep
TRPYGTKESTYTMKSQGESTSYSYLLYSSGKIHHVVIGPLEDNTIYYYRCGGQGPEFQFKTPPSQFPLSLAVVGDLGQTSWTTSTLNHIKQCEHDMLLLPGDLSYADYMQHLWDSFGTLVEPLASNRPWMVTEGNHEKEHIPFFESRFQSYNARWKMPYEESGS

SEQ ID NO: 274644 - protein, 63 aa, Glycine max
  Clone ID: PAT_MRT3847_90024C.1.pep
LFNRISLTNIDALGNFVLLNLSFSVDCFLFCYFILGFPDLLLLFDFYLFINIFLRKKICMKYG

SEQ ID NO: 274645 - protein, 63 aa, Glycine max
  Clone ID: PAT_MRT3847_90025C.1.pep
PSRFLTRLQPLSISLYTNITRRWVSLYLTIPLSPILKRKCKLISIINQSFTTCTCNKKSSICS

SEQ ID NO: 274646 - protein, 90 aa, Glycine max
  Clone ID: PAT_MRT3847_90026C.1.pep
GSSFDPTMMNLAKRVTLTKEMGMTSQKWMIYRSRWIFTDDLLHMVVLRFWIISISAELLEFVSSGWTACAHEHSWKSLNSEDRNIFCRAT

SEQ ID NO: 274647 - protein, 60 aa, Glycine max
  Clone ID: PAT_MRT3847_90027C.1.pep
NNLNTYLLYTLTINTRSLYTIFHPIPKLLKNPISTHLILALFRTSIFIISQILSTMNSFS

SEQ ID NO: 274648 - protein, 447 aa, Glycine max
  Clone ID: PAT_MRT3847_90028C.1.pep
MSASEIVRELDSLKDEKTIIEHKISALEAQLREINLQNDAAPPNGLTQDMIHRYSRHLVLPSFGVQGQANLLKSSILVVGAGGLGAPALLYFAASGVGRLGVIDHDVVELNNMHRQVIHTEAYVGKPKVKSAAAACRSINSTIQVVEHEEALRTSNALELLSKYDIIVDATDNAPTRYLISDCCVVLGKPLVSGAALGLEGQLTVYNYNGGPCYRCLFPTPPPRTACQSCAEGGVLGVVPGIIGCLQALEAIKIAASESEPLSQRMLLVDALSKRIRIVKIRGRSMQCEACGENATFTQQQFREFDYEKFTQTPLRVPPLKLNLLPRESRISSKEYSEVIIKKGPHVLVDVRPAHHFKIASLPKSLNIPLSTLEARLPEVSSALKKEEEESGAVSGSSAQLYVVCRRGNDSQRAVQYLHKMGFTSAKDIVGGLESWAHNVDHQFPTY

SEQ ID NO: 274649 - protein, 238 aa, Glycine max
  unsure (1)..(238): unsure at all Xaa locations
  Clone ID: PAT_MRT3847_90029C.1.pep
MSASEILRELDSLKDEKTKIEHKISALEAQLREINLQNDAAPPNASSSSSYPTNGLTQDMIHRYSRHLVLPSFGVQGQANLLKSSILVVGAGGLGAPALLYFAASGVGRLGVIDHDVVELNNMHRQVIHTEAYVGKPKVKSAAAACCSINSTIQVVEHEEALQTSNALEILSKYDIIVDATDNAPTRYLISDCCVVLGKPLVSGAALGLEGQLTVYNYNGXGPCYRCLFPTPPPRTAC

SEQ ID NO: 274650 - protein, 93 aa, Glycine max
  Clone ID: PAT_MRT3847_9002C.1.pep
FEESVDFNDFAAYPRASSLRFDSASVKSTAKIGSCSSSRFYFTVSHHLDSLKPWYLSLADTSASKVGPTSPSAALISPLNARSLSFASPVART

SEQ ID NO: 274651 - protein, 64 aa, Glycine max
  unsure (1)..(64): unsure at all Xaa locations
  Clone ID: PAT_MRT3847_90030C.1.pep
IPDNVIIDLVKDNFYFRPGMVSVNLDLISGGTFWHLKIAAYAHLARKNLGFTWXVISPLKWEEA

SEQ ID NO: 274652 - protein, 158 aa, Glycine max
  Clone ID: PAT_MRT3847_90031C.1.pep
ACEENATFTQQQFREFDYEKFTQTPLRVPPLKLNLLPSESRISSKEYSEVILKKEPHVLVDVRPAHHFKIVSLPKSLNIPLSTLEARLPEVSSALKKEEEEGGVVSGSSAQLYVVCRRGNDSQRAVQYLHKMGFISAKDIVGGLESWAPNVDPKFPTY

SEQ ID NO: 274653 - protein, 42 aa, Glycine max
  Clone ID: PAT_MRT3847_90032C.1.pep
FESSLELLRSLGIHSCDVMSAGFFNDFHIEWGAVLCACVVSK

SEQ ID NO: 274654 - protein, 44 aa, Glycine max
  unsure (1)..(44): unsure at all Xaa locations
  Clone ID: PAT_MRT3847_90033C.1.pep
MMHLSMEDNIRNYVHIXRRDFRTDAGNTMSIALKIQSLVTPLTL

SEQ ID NO: 274655 - protein, 73 aa, Glycine max
  Clone ID: PAT_MRT3847_90034C.1.pep
ICYKERQVRWDLVSPKIFTKWVSMRRIASTSSFFNLTVHSALVVKPCSLKLFVLFNPHPSMPRVHIMIRRFIL

SEQ ID NO: 274656 - protein, 44 aa, Glycine max
  Clone ID: PAT_MRT3847_90035C.1.pep
VIGEHYGLRQICPKFGGVCLGDFDCRNESNSHRKPYIVAVIISC

SEQ ID NO: 274657 - protein, 56 aa, Glycine max
  Clone ID: PAT_MRT3847_90036C.1.pep
NPFVGSTLLKGEGANLSKKILILAVKKAVRLYLIPVTNVRFVCFSFQRTWIERHFR

SEQ ID NO: 274658 - protein, 233 aa, Glycine max
  unsure (1)..(233): unsure at all Xaa locations
  Clone ID: PAT_MRT3847_90037C.1.pep
MLVEPFKEEEIYRAVWSCGSDKSPGPDGFNFRFLKHFWNDLKPEFLRFFSEFYANAVFPKGLNSSFIALIPKIKDPHLISDFRPISLIGCVYKIVAKVLSNRLSKVMNHLIDERQLAFVKGSQLLQGVLIANEVVEEAKRSKKPCLVFKVDFEKAYDSVSWQFLFYMMRRMGFHERWLXWVKGCLTTASISVLVNGSPSEEFKPQRGLRXGDPLAPFLFDLVAEGLTGLMREA

SEQ ID NO: 274659 - protein, 70 aa, Glycine max
  unsure (1)..(70): unsure at all Xaa locations
  Clone ID: PAT_MRT3847_90038C.1.pep
PKEQHRASARTKPTPXLTQTRXPEGPQRSTTTGATPPNSTRPSRATGGPITTIAPPTRHRPPSGHRAQPX

SEQ ID NO: 274660 - protein, 97 aa, Glycine max
  unsure (1)..(97): unsure at all Xaa locations
  Clone ID: PAT_MRT3847_90039C.1.pep
PNNNRQRQWRKIPSRTIAAGRPEKATNPAPLKAVWADLIXTLIFWSAGXGSGLAYNKLTDNGAATLAGLISASIGHCFRLFXVAFSWGANFSGGHLN

SEQ ID NO: 274661 - protein, 67 aa, Glycine max
  unsure (1)..(67): unsure at all Xaa locations
  Clone ID: PAT_MRT3847_9003C.1.pep
XRSSRSSXRDMXECIVHLNDLEHESDCVLLVRHYLAMCVYTAVVSECVKSYKVAVEXRKSRCVIXXX

SEQ ID NO: 274662 - protein, 30 aa, Glycine max
  Clone ID: PAT_MRT3847_90040C.1.pep
DSPSLHFLLTFITYFLYLPLSNRLDSLPFP

SEQ ID NO: 274663 - protein, 103 aa, Glycine max
  Clone ID: PAT_MRT3847_90041C.1.pep
MAVVQDLGRFSVEEHNRMLRQAQKEEEEVTFEEVVEAQSQVVSGIKYYMKISATQGGDGGDSRIFESVVVVKPWLRSKQLLNFAPYIIFGKLKCRLKTSLSKL

SEQ ID NO: 274664 - protein, 307 aa, Glycine max
  Clone ID: PAT_MRT3847_90042C.1.pep
KKTLPWNSARARADSARGSVVAAGSVWESRMKSDEVRGGIKVFNAEENPEENSGAKLKRNPIGCGKRKTWKSESSEGSENNTHNNSCNSKIPIQCKELSNSCSSDGIKKSPIHTRKIAAFGDKFERGPIHTRKMRSEAHKSGELDEGNERTSAQLRKTKSDSISKKKTASSSGGRSIQLRKTKSEATDQKIEVENGKNDDENCVDLDYLCQEKVISSSSDNVAQGCSTELSVDAAAAADVDVVAVADEEEEEEVEIEMVKEISIPEYKVEVAVKEPESNDEVVVVENEQGKKVVVNEPEKKVVVVCE

SEQ ID NO: 274665 - protein, 56 aa, Glycine max
  Clone ID: PAT_MRT3847_90043C.1.pep
RMFLGQRKKKKKKRKKKKKKKKKKKKKKKKTKKQKKKYNTPIFYKHITLPSLIYQI

SEQ ID NO: 274666 - protein, 102 aa, Glycine max
  Clone ID: PAT_MRT3847_90044C.1.pep
AEPSAVTAKHGESEREKLVKPWTLRSVHSVVTRGASHFLRRGYACEPVPERKVAFLGAVGGIGQPLSLLMKRTPLESSHILNDISGTPGEAGDMLHINTMIW

SEQ ID NO: 274667 - protein, 130 aa, Glycine max
  Clone ID: PAT_MRT3847_90045C.1.pep
SSLCRLKEELREKNKMNTIGVMIMIMSMLGFAQANNYNPPFVQVESISETNRLTCPQACRVQCAALAPVEPWYDKCVKECTANCKHDVSVAKDCFTSCALIKSININNDVRDLSTNIVMNSCLQECQNKK

SEQ ID NO: 274668 - protein, 46 aa, Glycine max
  Clone ID: PAT_MRT3847_90046C.1.pep
DERGKYFPLMRIRKRTQGRLMIMKYSIKLNYYHFEHALSLSLGPHQ

SEQ ID NO: 274669 - protein, 72 aa, Glycine max
  Clone ID: PAT_MRT3847_90047C.1.pep
AKQAAEAAKERNKQANKGNEEGRRERGIGGGVHHDAKFETKGEKEKDLVGTERNKEEIQRTIPRGKVEADIA

SEQ ID NO: 274670 - protein, 58 aa, Glycine max
  unsure (1)..(58): unsure at all Xaa locations
  Clone ID: PAT_MRT3847_90048C.1.pep
KTCLKCQASMNYVGDFPVIPPSPNEXXNPPXRSXQATRINAGLFFPFCVFPPSQRIRA

SEQ ID NO: 274671 - protein, 58 aa, Glycine max
  Clone ID: PAT_MRT3847_90049C.1.pep
ICLFYCLSFFFNPCLFVVMPSLLFNLWSSNFILYDRLVLNARSLEGRSNSWIMYLERY

SEQ ID NO: 274672 - protein, 32 aa, Glycine max
  Clone ID: PAT_MRT3847_9004C.1.pep
NPYLKKKPIKFCISNVQIPKFLINKIILNSSR

SEQ ID NO: 274673 - protein, 82 aa, Glycine max
  Clone ID: PAT_MRT3847_90050C.1.pep
WCGKKKGPWDIYILGPFKYKSHIGVLILILYKNKPQVLMFKEILKHSLGIPTLFKPFPTILVFWLKFITTIALEKNFYVFFS

SEQ ID NO: 274674 - protein, 73 aa, Glycine max
  Clone ID: PAT_MRT3847_90051C.1.pep
FLQTPPAHKAKRWSVFFSRGGEKTERGGFLIPLIHPGGVRGGHSIIGCSTIGFLNLRGVLGIPHKNDFFFLNT

SEQ ID NO: 274675 - protein, 131 aa, Glycine max
  Clone ID: PAT_MRT3847_90052C.1.pep
VREEKCWEVQPVPMLCKVRILSHYTACHLTIHHPMQCMCSARTPTILLPFSLKANNPSWGMHPFLNLWERPMKSPGTMHWASSSLTLHMSLRDQHLVACLSPIPWGLSYPNFVRGQLFDGIGRVGRPGNSG

SEQ ID NO: 274676 - protein, 379 aa, Glycine max
  Clone ID: PAT_MRT3847_90053C.1.pep
MEGGSSSSNGTSYLLAFGENNSGGLCPMTMMPLVTSHHAGHHPINPSNNNNVNTNCLFIPNCSNSTGTPSIMLHINHNNNKTEDDDNNNNSGVGYYFLELVHHQHHEGNNTNRGRSSSASSSAAKAKIMSQPHYHRLLAAYVNCQKVGAPPEVVARLEEACASAATMAGGDAAAGSSCIGEDPALDQFMEAYCEMLTKYEQELSKPLKEAMLFLQRIECQFKNLTISSSDFASNEGGDRNGSSEEDVDLHNMIDPQAEDRDLKGQLLRKYSGYLGSLKQEFMKKRKKGKLPKEARQQLLEWWNRHYKWPYPSESQKLALAESTGLDQKQINNWFINQRKRHWKPSEDMQFVVMDPSHPHYYMDNVLGNPFPMDLSHPML

SEQ ID NO: 274677 - protein, 75 aa, Glycine max
  Clone ID: PAT_MRT3847_90054C.1.pep
RTPGGGNPFFKTGFFFFGGWGIWDPQGFFGGLVLNGGFWVLLPQLSPPPLGDKRVLPVGGKRIIAARPGWAPPKN

SEQ ID NO: 274678 - protein, 365 aa, Glycine max
  Clone ID: PAT_MRT3847_90055C.1.pep
SSRIGSSGENSGGLCPMTMMPLVTSHHATNPSNPSNNTNNNENTNCLFIPNCSNSSGTPSIMLHNNNTDDDNNKTSTNTGLGYYFMESDHHHRNNNNNGSSSSSSSSAVKAKIMAHPHYHRLLAAYVNCQKVGAPPEVVARLEEACASAVTMAGDAAAAAGSSCIGEDPALDQFMEAYCEMLTKYEQELSKPLKEAMLFLQRIECQFKNLTISSTDFACNEGAERNGSSEEDVDLHNMIDPQAEDRELKGQLLRKYSGYLGSLKQEFMKKRKKGKLPKEARQQLLEWWSRHYKWPYPSESQKLALAESTGLDQKQINNWFINQRKRHWKPSEDMQFVVMDPSHPHYYMDNVLGNPFPMDLSHPML

SEQ ID NO: 274679 - protein, 44 aa, Glycine max
  unsure (1)..(44): unsure at all Xaa locations
  Clone ID: PAT_MRT3847_90056C.1.pep
LDPIATGLTMDAXQSNQPNLHPXPXXLFXLXXFXXFISKDRNYX

SEQ ID NO: 274680 - protein, 86 aa, Glycine max
  Clone ID: PAT_MRT3847_90057C.1.pep
FPESPSVSFAARDLIRGLLVKEPQHRLAYRRGATEIKQHPFFQNVNWALIRCANPPEVPRQVMKLAQTEKELGVKPSGNYLDIDFF

SEQ ID NO: 274681 - protein, 63 aa, Glycine max
  Clone ID: PAT_MRT3847_90058C.1.pep
MTSFINRIFEKLGQEFFRLARYNKKPPLLLREIQPPVRLVLPGELAKPPVFEGPKGVPKFLSF

SEQ ID NO: 274682 - protein, 69 aa, Glycine max
  Clone ID: PAT_MRT3847_90059C.1.pep
LFFLPAKKKTLPLNGQNFLPGCFWSKLQGGMGQKKGGFFLIKRGNNQKPGGLNFNKKPRPNTRFFKRVG

SEQ ID NO: 274683 - protein, 82 aa, Glycine max
  unsure (1)..(82): unsure at all Xaa locations
  Clone ID: PAT_MRT3847_9005C.1.pep
PLNRRCTFIAFGIRVIADMCTFITYAYLLAVNVIYMATTXIAHVHSKFIGKISIKHPLVKYYIYTIYLPHCDLIKHSHKITL

SEQ ID NO: 274684 - protein, 66 aa, Glycine max
  Clone ID: PAT_MRT3847_90060C.1.pep
LGFPKIRNRFCIIVYNLILHEGNGFIFIFTSYYFSLVFFKKNNFYLGALASVSKALPNFLTRLHYD

SEQ ID NO: 274685 - protein, 64 aa, Glycine max
  Clone ID: PAT_MRT3847_90061C.1.pep
CLLEPGISKPQVRAGKLDPGSPNPPHHLERALPKDESALCLRKRAYATPKPLFSLVKVRVCTLT

SEQ ID NO: 274686 - protein, 54 aa, Glycine max
  Clone ID: PAT_MRT3847_90062C.1.pep
IYYYWFFGTSLASIHITMSSQVLNPMPPSILAFSTSLSFSALDHCHSGCCTLFG

SEQ ID NO: 274687 - protein, 52 aa, Glycine max
  Clone ID: PAT_MRT3847_90063C.1.pep
LLFCYPSLQVEKSGARGPTDKMLMCAQPDDARLNDTLTHRTAYGPAKHNTGL

SEQ ID NO: 274688 - protein, 231 aa, Glycine max
  Clone ID: PAT_MRT3847_90064C.1.pep
MAMHKSSSGSALGPGGLDLTQAFFKSIMNAAASSPTKRHNKISVVGAGNVGMAIAQTILTQDLTDELVLVDAIPDKLRGEMLDLQHAAAFLPRTRIQASTDYSVTLGSDLCIVTAGARQINGESRLNLLQRNVTLFQKIIPPLARYSPDTILLIVSNPVDVLTYVAWKLSGFPSNRVIGSGTNLDSSRFRFLIADHLDVNAQDVQAFIVGEHGDSSVALWSSISVGGCSGG

SEQ ID NO: 274689 - protein, 62 aa, Glycine max
  Clone ID: PAT_MRT3847_90065C.1.pep
LVDTRQKLVVSDNKVRQLEAQVHEEKLANENEMKKVELEQQETRRLRKELESEKVDMKISCH

SEQ ID NO: 274690 - protein, 88 aa, Glycine max
  Clone ID: PAT_MRT3847_90066C.1.pep
AGGPHGRVTYPIYPVDSFDPLGLIDDPQAVAERKVKVLKVERLTMFSKFGFCVQAIVTGKGPWENLADHLTDPVNNTAWAYAPNLVAG

SEQ ID NO: 274691 - protein, 78 aa, Glycine max
  Clone ID: PAT_MRT3847_90067C.1.pep
MEASAELVDGSHNRIELDVIHGHEQPKASNNLDGQVSQTCGDSVILTVNRNMPAACNERGYAVCMPCYEYERRDGSHL

SEQ ID NO: 274692 - protein, 79 aa, Glycine max
  Clone ID: PAT_MRT3847_90068C.1.pep
GSFPKLQIQFLLEIQFSNFSTKKSSVWNFSQCYKTPLKFQHVQVHVCFFFFGGGGGELIIFYLSDFYKFLCLPYLSNDY

SEQ ID NO: 274693 - protein, 120 aa, Glycine max
  Clone ID: PAT_MRT3847_90069C.1.pep
RRLWLAYVYSLIVFPPYKHKQSIIPFSICFLSEASTSPGALERHRLLHAGGDRLSLISVCSSIHRSNSLSGSFLNYSVSEQNGGSVISLVKYWLMWVGQSSMNRRTPSRDHANVEEMEEN

SEQ ID NO: 274694 - protein, 71 aa, Glycine max
  Clone ID: PAT_MRT3847_9006C.1.pep
KKVSSWSIFPPRRESATEVLLVGVKLEQVVQADRVLTDIREQRVHDSFAIRINLLTQNRVYPRFVSTEKGG

SEQ ID NO: 274695 - protein, 76 aa, Glycine max
  Clone ID: PAT_MRT3847_90070C.1.pep
SVRRRVVFRYLGVTDGRVAARTPVVTARLSASPTTPTSNTNTNTNANSYPRAGSETRTRGGDTAVETATGSLGRAT

SEQ ID NO: 274696 - protein, 55 aa, Glycine max
  Clone ID: PAT_MRT3847_90071C.1.pep
GLSNVGDSMVSNEPLTQFFGVSPPLGLRNSDSKFPSFSSSWIGQRGSWHRYLGFV

SEQ ID NO: 274697 - protein, 108 aa, Glycine max
  Clone ID: PAT_MRT3847_90072C.1.pep
QLPPIGDDILDLVVIGCGPAGLALAAESAKLGLKVGLIGPDLPFTNNYGVWEDEFKDLGLEGCIEHVCKDTIVFLDNKDPIFIGRSYGRASRHLLHEELLRRFLIHIN

SEQ ID NO: 274698 - protein, 45 aa, Glycine max
  Clone ID: PAT_MRT3847_90073C.1.pep
ARAPFPNSSTSQSSQLPIRVLKVPITNNTQQILGDFFVNSTKLQV

SEQ ID NO: 274699 - protein, 71 aa, Glycine max
  Clone ID: PAT_MRT3847_90074C.1.pep
MLVADLPQSFSKPSFVGFIATYVAVSDTDAQKWKKKPLLHLEIRENPSFVLCFNRAKLENPLLQLFNCDLC

SEQ ID NO: 274700 - protein, 69 aa, Glycine max
  Clone ID: PAT_MRT3847_90075C.1.pep
YYQGSVTAPLEAVSACSGIFGKGAYPGYTGNVLVDNVTGASYNALGLHGRKFLLPAMWDPVTSTCKTLV

SEQ ID NO: 274701 - protein, 74 aa, Glycine max
  Clone ID: PAT_MRT3847_90076C.1.pep
LLLWDQFRVCLITTGSGAEPTGTATSFHQNFFMLHLNFMENLAKQVIYPNFHLVCLRKTAPPFIFYLFGTGLFL

SEQ ID NO: 274702 - protein, 127 aa, Glycine max
  Clone ID: PAT_MRT3847_90077C.1.pep
YPPLCIFSSMFQTNSSSKFSTRNNHLSCIKISDKFWSPSFFLRFSLHHGAFLACFRKIPALSLRVPTSKFLTCFRLLPLIPLPGNFFPARSHQNCCICQFISPQNLRTIKVKMHFHMLFLGIHGFAC

SEQ ID NO: 274703 - protein, 292 aa, Glycine max
  Clone ID: PAT_MRT3847_90078C.1.pep
MDSQQNNLFETASQPDTGNDAYTFLEFNTQGEDFDYPEFRDPIRSPVAWPTPSDSLADPLERGGGGGGGSDHQSDASPVSAAPGSATKGGRSGSGGGNSSQMVDALAAGMSGLNFEDTGDDDNYEYGKGDFTEHACRYCGVSNPACVVRCNVPSCRKWFCNSRGNTSGSHIVNHLVRAKHKEVCLHKDSPLGETILECYNCGCGNVFLLGFISAKTESVVVLLCREPCLSVNALKDMNWDLSQWCPLIDDRCFLQWLVKIPSEQEQLRARQISAQQINKVEELWKTNPDASF

SEQ ID NO: 274704 - protein, 82 aa, Glycine max
  Clone ID: PAT_MRT3847_90079C.1.pep
EMSVRLPHEVTRIINTRIDCLLALGGCVLEELKAHVTVCKLCYCDTYKNKKRKINVSEISYLACCSLWLGNHMITSKIFFKH

SEQ ID NO: 274705 - protein, 256 aa, Glycine max
  Clone ID: PAT_MRT3847_9007C.1.pep
FDLESVRRIISGFVEKENGNAVFTTAEFKEPCSAAMQRVVKTVDAYLSEIAAYGDLSISKFNGIATLIPKSARKIDDDLYRAVDIYLKAHPQLDEIEREKVCSVMDPLKLSYEARVHASQNKRLPVQIVLHALYYDQLRLRSGAEEREVATEKNQLQMDVTLVRENEELRTELMKMKMYISDLQQNKNTNNGANPQGHGTTSSAANPNPKKATFFSSVSKTLGKLNPFRNGSKDTTHLEDGNVDLTKPRRRRFSMS

SEQ ID NO: 274706 - protein, 160 aa, Glycine max
  Clone ID: PAT_MRT3847_90080C.1.pep
MSSLRNAIPRRAHKERSQPSSRKKFGLLEKHKDYIQRAKAFHKKEDTLRKLREKAANRNEDEFYFKMVRTKTVDGVHKPESEANKYTQEELMLMKTQDMGYILQKIQSERNKIERLTAPLHSIDNQPANKHVFFAEDRCEFLRYHSVTSVDSFFFLNVNM

SEQ ID NO: 274707 - protein, 229 aa, Glycine max
  Clone ID: PAT_MRT3847_90081C.1.pep
MSSLRNAIPRRAHKERSQPSSRKKFGLLEKHKDYVQRAKAFHKKEGTLRKLREKAANRNEDEFYFKMVITKTVDGVHKPESEANKYTQQELMLMKTQDMGYILQKIQSERNKIERLTASLHSIDKQPVNKHVLFAEEREEAEELESQHQKSKIPLTSEDIPAGIKRKTAQSYQELEARRSRLSQLEKIYMDMTMQKELQKKGRKRKLREDEIVCPTSKPVYKWRAERKR

SEQ ID NO: 274708 - protein, 61 aa, Glycine max
  Clone ID: PAT_MRT3847_90082C.1.pep
GWVNITPHLIKLTGKASQLELTQFPILSFFLSNTMRACFLSPNCIKWGTSTSSTTKTTAGI

SEQ ID NO: 274709 - protein, 150 aa, Glycine max
  Clone ID: PAT_MRT3847_90083C.1.pep
FSIGGTLMTTILFAGAFTIPGGNDEKTGVPIFSNNMAFTVFIIADSISVFTSATSVMIFIWILTSRFAERDFRLWLPLKLLLGLVFLLFSVVSMMVAFCAALAIILKAYRAYRYLIIGAAICGSMPITVLVISQVNLIRDILKSTISPIG

SEQ ID NO: 274710 - protein, 119 aa, Glycine max
  unsure (1)..(119): unsure at all Xaa locations
  Clone ID: PAT_MRT3847_90084C.1.pep
MAAASCMALSFPSLAGKAVKLGPSAHEDMRVSMRXTVTKQASSXSPWNSPDRVKYXGPFSGEPSYYLTGEFPGDYYSYTAGLSIDPVTYHRNRELQWIHSRWDMLGALSYVLPELLSRN

SEQ ID NO: 274711 - protein, 83 aa, Glycine max
  Clone ID: PAT_MRT3847_90085C.1.pep
VLTGREASVVGIGRRRIRAAAAEERNVEKASCGEAVSFLQVDKSSKMISCPAKNFSIVSNQSRWMLVASSFTISVKEVPPPEQ

SEQ ID NO: 274712 - protein, 48 aa, Glycine max
  Clone ID: PAT_MRT3847_90086C.1.pep
LIIPNILIIQRNTFISHILYFMGKRTHFILIRFLKIETSLKKAVKSFT

SEQ ID NO: 274713 - protein, 89 aa, Glycine max
  Clone ID: PAT_MRT3847_90087C.1.pep
VDPTFRSNLTSSRNSIAIWISQTSAIRYFIFVTVRLSTAYRCCDHRLIGYERNLGQGSQTVNDAGASEDASDHTILLLNTTDDAKTVYV

SEQ ID NO: 274714 - protein, 567 aa, Glycine max
  unsure (1)..(567): unsure at all Xaa locations
  Clone ID: PAT_MRT3847_90088C.1.pep
MGDKEVKEEEQKGGFRASMFIFVLSALDNMGFVANMVSLVLYFYGVMHFDLSNSANTLTNFMGSTFLLSLVGGFISDTYFNRLTTCLLFGSLEVLALVMLTVQAGLDHLHPDYCGKSSCVKGGIAVMFYSSLYLLALGMGGVRGSLTAFGADQFDEKKNPGEAKALASFFNWILLSSTLGSIIGVTGVVWVSTQKAWHWGFIIITIASSIGFLTLALGKPFYRIKTPGQSPILRIAQVIVVNSARGKLPLPESDEELYEVYEDATLEKIAHTNQMRFLDRASILQENIESQQWKVCTVTQVEEVKILTRMLPILASTIIMNTCLAQLQTFSVQQGSVMNLKLGSFTVPAPSIPVIPLLFMSILIPLYEFFFVPFARKITHHPSGVTQLQRVGVGLVLSAISMTIAGIIEVKRRDQGRKDPSRPISLFWLSFQYAIFGVADMFTLVGLLEFFYREAPETMKSLSTSFTXLSMSLGYLLSTVFVDVINAVTKRVTPSKQGWLHGLDLNQNNLNLFYWFLAILSCLNFFNFLYWASWYKYKAEDNNSKVNLKAPSKRLVKENKMRKRRRI

SEQ ID NO: 274715 - protein, 41 aa, Glycine max
  Clone ID: PAT_MRT3847_90089C.1.pep
RYAFSRCFMGPEVMPLCGRSGAWSSLDRGRFFGQGFIVFVW

SEQ ID NO: 274716 - protein, 86 aa, Glycine max
  Clone ID: PAT_MRT3847_9008C.1.pep
WKELQIFILPIYSLQFIFFLIAQFHLLFCLENFQAHLPKYYLHHIKILISNSNVLPAFTMTVTIFSSILVFEINDQEADMGGYMKE

SEQ ID NO: 274717 - protein, 85 aa, Glycine max
  Clone ID: PAT_MRT3847_90090C.1.pep
QFCQFLVYKKAGIEFKVVGPIRNIYPRMQGYGNLSSLNRTPLFFTCLSFKASTKVGDFSILNIPTPQFSHLFLTDEWANAWSNAW

SEQ ID NO: 274718 - protein, 73 aa, Glycine max
  unsure (1)..(73): unsure at all Xaa locations
  Clone ID: PAT_MRT3847_90091C.1.pep
NRXLCXVSEGLHHXLTRSSXLSLYXTYFNSSELAXLPVERDXSSXXEGQRKXKKXVVCLXQXVGIRIILKLDL

SEQ ID NO: 274719 - protein, 130 aa, Glycine max
  unsure (1)..(130): unsure at all Xaa locations
  Clone ID: PAT_MRT3847_90092C.1.pep
SQIWGALFAPGGLVTALDATGSMPWNXLALLKRAXMGFAIQNLWSNDRLLIIAFSSTGRRLFPLCRMTYFGLXQALQADNSLAANGVPNIPQWLIKGPMIMEDPKEKNPDARIILLSDGQNNYTVNWLWD

SEQ ID NO: 274720 - protein, 118 aa, Glycine max
  Clone ID: PAT_MRT3847_90093C.1.pep
PGVSKDARGQHKGAQVSLLIHTPTHSVISMKVLVIFVATILVARQCHAYDMFPLRMNTGYGARTPEVKCASWTHAVEAHIIFGVETIPEECVEATHEYIHGEQYRSDSTTVNLHAYFY

SEQ ID NO: 274721 - protein, 138 aa, Glycine max
  Clone ID: PAT_MRT3847_90094C.1.pep
DSPFLWSLSDGEACMKRSDRLQRQAVYLLLACSFSLICKRGENANHCNNSTLCSSFTTNPDSEHDYFCRKKGSLELFKWILGHLPTAISIKHEKYMQMCMNFISSLIQLYLREDDLCFAVHLLSRSISSSHSDQSDLY

SEQ ID NO: 274722 - protein, 121 aa, Glycine max
  Clone ID: PAT_MRT3847_90095C.1.pep
PVFPVWACSPGFSFVAPSLALSSFPYASCPFLRVFLCCLALRFPYVFFIVAHFCVEVLLSFFSGFRWRCPPLLLSPSASLPPVPSLLCSRCLWPAVLFLKFKRGCFQVFPVRFLLSFRLFP

SEQ ID NO: 274723 - protein, 53 aa, Glycine max
  Clone ID: PAT_MRT3847_90096C.1.pep
EKIFIKDEDLITIFWEKEKVTKKVKHGKTIGNKREIKTTVNHKVKTSCKRSSR

SEQ ID NO: 274724 - protein, 60 aa, Glycine max
  Clone ID: PAT_MRT3847_90097C.1.pep
SVLYTFRMRSSCVSVVILTMWFNSHWKQTSKHLRHTQLHKTRHMARALMLSSLCDTVMLV

SEQ ID NO: 274725 - protein, 37 aa, Glycine max
  Clone ID: PAT_MRT3847_90098C.1.pep
FIHSMKAADAILFEIRLTLKKRDVYLKEMRPLSSYDF

SEQ ID NO: 274726 - protein, 84 aa, Glycine max
  Clone ID: PAT_MRT3847_90099C.1.pep
QTFTIIKSSDLDEVQTTPLFLGTTWGDPIFSTNQARTWKFVQCRRVITLLLYRLCQFIIDAHVLNLGKAVGNYNGTICSIYWCK

SEQ ID NO: 274727 - protein, 54 aa, Glycine max
  unsure (1)..(54): unsure at all Xaa locations
  Clone ID: PAT_MRT3847_9009C.1.pep
QMFYMTLTGMTMTLEVESSDTMDNDXVMIQDKEGIPPDHHRIIFTREQLEDGRT

SEQ ID NO: 274728 - protein, 67 aa, Glycine max
  unsure (1)..(67): unsure at all Xaa locations
  Clone ID: PAT_MRT3847_900C.1.pep
XNHRNAIKQASIPFFFFFYVVSCPLILKDCFSLALNLVKAQMFFVFISINEHIIHPINPYPPPSEII

SEQ ID NO: 274729 - protein, 97 aa, Glycine max
  unsure (1)..(97): unsure at all Xaa locations
  Clone ID: PAT_MRT3847_90100C.1.pep
LNDACKWTKCSVLFWELIFLIDARGPNNGFKMGSPERTNQTXSWHLNFLIDNPHQSTPFDIHWGILKVKLLKVPCLMPSFQXPQATAQKSKIAEPFY

SEQ ID NO: 274730 - protein, 45 aa, Glycine max
  Clone ID: PAT_MRT3847_90101C.1.pep
SLASAEHDSSEEAMVSSIEYLWHTEKWLRQYKSKVALVLVHGGVI

SEQ ID NO: 274731 - protein, 386 aa, Glycine max
  Clone ID: PAT_MRT3847_90102C.1.pep
MEHKLATTEGQPIRCKAAVCRKAGEPLGIEEIMVAPPMPGEARIRIICSSLCRTDISFRNMQGPPANFPTILGHEAIGVVESVGEDVTEVAKGDMVVPIFIAECGECIDCKSSKSNLCSKFPFKLSPWMPRHATSRFVDLKGEIIHHFLSVSSFSEYTVVDIAHLTKIDPEVPPSKACLLSCGVSTGVGAAWRTAGVEPGSTVAIFGLGSIGLAVAEGARLCGATRIIGVDINSEKYEIGKKFGITDFVHSGECENKSASQVIIEMTDGGADYCFECVGNASLMHEAYASCRKGWGKTIVLGSDKPGSKLSLSCSEILVSGKSLVGCMFGGLKPKSHVPILIKRYLDKELNLDGFVTHEVEFKDINKAFDLMIKGQCLRCVIWMDK

SEQ ID NO: 274732 - protein, 77 aa, Glycine max
  Clone ID: PAT_MRT3847_90103C.1.pep
RALLLGSVSHRWDTVASRTTDPSNPLACVIGASFGPPMCALESQKVGAPTAISKKDELTRRLSSRLCDSRSCRFRSP

SEQ ID NO: 274733 - protein, 60 aa, Glycine max
  Clone ID: PAT_MRT3847_90104C.1.pep
GSIWAHSFFIRGLRLQGDFSYKASVLPQFSLVNLYGVGKMFMWKSTFQKGGLVNSMGVFD

SEQ ID NO: 274734 - protein, 43 aa, Glycine max
  Clone ID: PAT_MRT3847_90105C.1.pep
LILNNPIVRGPTDWGSVFPGPIELSESRVCFMFRFAKLGAGLP

SEQ ID NO: 274735 - protein, 317 aa, Glycine max
  unsure (1)..(317): unsure at all Xaa locations
  Clone ID: PAT_MRT3847_90106C.1.pep
RLKKSGSEPHGPNKNSNSTTAEAQRSAIANQSEFNRRASKIGYGIHQTSRKLAKLAKLAKRTSVFDDPTMEIQELTGVIKQDITALNSAVVDLQLVCSSRNETGNVSADTSSHSSTVVDDLKTRLMSTTKEFKDVLTMRTENMKVHENRRQLFSSSASKDSANPFIRQRPLAARAAASTSSAPALPWANGSPSSSXAFPKKQVDGESQPLLQQQQQQQEVVPLQDSYMQSRAEALQNVESTIHELSNIFNQLATLVSQQGEIAIRIDENMDDTLANVEGAQGALLKYLNSISSNRWLMIKIFFVLIFFLMVFLFFVA

SEQ ID NO: 274736 - protein, 307 aa, Glycine max
  unsure (1)..(307): unsure at all Xaa locations
  Clone ID: PAT_MRT3847_90107C.1.pep
MAIATETQPQQHKDSSEVSGSAAEQRRWTLNDFDIGKPLGRGKFGHVYLAREKTSNHIVALKVLFKSQLQQSQVVHQLRREVEIQSHLRHPHILRLYGYFYDQKRVYLILEYAPKGELYKELQKCKYFSERRAATYVASLELHLRFARALIYCHGKXEVIHFVIHRDIKPENLLMGAEGELKIADFGWSVHTFNRRRTMCGTLDYLPPEMVESVEHDASVDIWSLGVLCYEFLYGVPPFEAKEHSDTYRRIIQVDLKFPPKPIVSSAAKDLISQMLVKDSSQRLPLHKLLEHPWIVQNAEPSGVYRS

SEQ ID NO: 274737 - protein, 123 aa, Glycine max
  unsure (1)..(123): unsure at all Xaa locations
  Clone ID: PAT_MRT3847_90108C.1.pep
RAQINPPXPPKGHKGGHPKPPAPKEKKPTNQADQTPPQRGLKKPSQXGGNPTLKEYSKGTPQGRARLPPGGVPRKPPKTKRSYRLKIFHHGQELPKKRREIAVTKILIPGRGXPAPNKGTRNP

SEQ ID NO: 274738 - protein, 73 aa, Glycine max
  Clone ID: PAT_MRT3847_90109C.1.pep
SKLLLRCQLGVFTRVPRPVLDQQNFLAAQLWYIYPNDVQINHCSFFHQTIPYCCEIVNWISSSIFDINQINFW

SEQ ID NO: 274739 - protein, 226 aa, Glycine max
  Clone ID: PAT_MRT3847_9010C.1.pep
LKVAFLLTALEPSCFLFSPTGGGLSGKKESGQLRFGGKEKPFRAPLKPIPYEELKKLGIPPPPEGRYMSRFQVPSPPRRERNLSDREEDSHSHRRGSNDRNRTEDSHRSSVDIGEGHCRSSSHRDDHSRGRSSLERSGRYHDRSSSEKEHRYRSSTDKDKHSQKRKESDRSSSEKEHQYRSSTDKDKHSRKRKESDRSSPEKEHGLRSSTDKDKHHRKRKERDEQS

SEQ ID NO: 274740 - protein, 212 aa, Glycine max
  Clone ID: PAT_MRT3847_90110C.1.pep
GTIPNEICNISRLQDLLLDQNFITGEIPHEIGNCAKLLELQLGSNILTGTIPPEIGRIRNLQIALNLSFNHLHGSLPPELGKLDKLVSLDVSNNRLSGNIPPELKGMLSLIEVNFSNNLFGGPVPTFVPFQKSPSSSYLGNKGLCGEPLNSSCGDLYDDHKAYHHKVSYRIILAVIGSGLAVFMSVTIVVFAVMIRERQEKVAKCWDVEMFH

SEQ ID NO: 274741 - protein, 52 aa, Glycine max
  Clone ID: PAT_MRT3847_90111C.1.pep
HNCLASNDTRPLLDFLFVFYQTNVLFKLVPCLVVTCGDCTCLVLKLDKPLFL

SEQ ID NO: 274742 - protein, 37 aa, Glycine max
  Clone ID: PAT_MRT3847_90112C.1.pep
YGIVKLVRVFTTGPVPGRKSRKINRHKIREVSLEARA

SEQ ID NO: 274743 - protein, 95 aa, Glycine max
  Clone ID: PAT_MRT3847_90113C.1.pep
KKKESCFSDLGPHSKRVHISPFGLAKGMENVFFGPDAPPKINNFCFYKKDVVMESLKTPREIKTPKGKQNNNKGGNFNSPKGFHFFTLSPAFGNF

SEQ ID NO: 274744 - protein, 100 aa, Glycine max
  Clone ID: PAT_MRT3847_90114C.1.pep
HKAGCMESFCPNALPISSFRFLKLMLTEAGFIQQAPMTSFYKNVSPTVVTVSCEIILFKIGLINGDSRNCSSICVWCKQYYASLKKMVILCVVCCQQLDI

SEQ ID NO: 274745 - protein, 314 aa, Glycine max
  Clone ID: PAT_MRT3847_90115C.1.pep
TCFFRQFGHSVVLADYLTLRKGFIMNHNLSFKYDFHSYMIRSMEEEFQRIVGVSGPLWGFVIAFMLFNIKGSNLYFWIAIIPVSLALLVGTKLQHVIATLALENAGITRFFIEANVRLRDTLLWVKKPVQALSLIHFILFQKTFKLALFPRLRWQSGYYSGYISNNLLLYIRFTLGLAGQFLCSYSTLPLYALVTQMGTNYKAALIPQRIRETIHGWGKAARRKRRHGMFTDDSTIHTDTSTVLSIEEDDQLIDTPEVELQPATAVTATPSPIANETSSRAVTPLLRPSASISSVQCSSKAEAIPRCSSMPSGR

SEQ ID NO: 274746 - protein, 127 aa, Glycine max
  unsure (1)..(127): unsure at all Xaa locations
  Clone ID: PAT_MRT3847_90116C.1.pep
VIPVPFPPPAGDFTILAGDWYKRNHTDLRAILDGGSDLPFPDGLIINGRGSNAYAFTVDQGKTYRFRISNVGLTTSINFRIQGHKMLLVEVEGIHTLQNTXYDSLDIXGQSYSVLVXADQPPQDYYI

SEQ ID NO: 274747 - protein, 90 aa, Glycine max
  Clone ID: PAT_MRT3847_90117C.1.pep
RRHGMFTDDSTNHTDTSTVLSIEEDDQLIDTPEVELHQVKAVTATPSPIANETSSRAVTPLLRPSASISSVQCSSKAEAIPRCSSMPSGR

SEQ ID NO: 274748 - protein, 129 aa, Glycine max
  Clone ID: PAT_MRT3847_90118C.1.pep
FLGALLGRPASGNVPLDTGHKIGPNGVAPLFSGSVAPSVKALNVSPQIDSQLAPQVGRGPGPALLAFFKYFFFLSIFWVGFFSPGLSPMGGLSLFLGQLNQFFFWGPKRALLPRPSFPFAGPDRDFVFC

SEQ ID NO: 274749 - protein, 297 aa, Glycine max
  unsure (1)..(297): unsure at all Xaa locations
  Clone ID: PAT_MRT3847_90119C.1.pep
RTRPIRLAPHTLYRSHTIHTPAANSDPHINSSSHTIEEHGAVSNHHIHYSSHTIEVDGGATVEEVSAVPPLEISINDSSQLTLSFRGQVYVFDAVTPDKVQAVLLLLGGNELTSGSQCAELSSQNQTGEEEYPAKCSLPQRAASLNRFRQIRXRRVAHKKVRYSVRQEVALRMHRNKGQFTSSKNQDGTNSWGSDQESGQDAVQSETLCTHCGISSKSTPMMRRGPSGPRSLCNACGLFWANRGTLRDLSKRNQEHSLAPPEQVDEGSNNNDFDCRSGIPAQHNNLVNDNKALVSDR

SEQ ID NO: 274750 - protein, 84 aa, Glycine max
  Clone ID: PAT_MRT3847_9011C.1.pep
PTLELEGAAINSIPLPGGIPILRVICQITTCLTKLYNSLSATTSTHSLCNYPYEPQIIYTPGPCGLTTDLSYISCAELTELCTF

SEQ ID NO: 274751 - protein, 69 aa, Glycine max
  Clone ID: PAT_MRT3847_90120C.1.pep
MSDPKYAYPYPAQGQGYYQGPPVMAPPQYYAAPPPRTRQTGFLEGCLAALCCCCLIDECCCDPSILCII

SEQ ID NO: 274752 - protein, 137 aa, Glycine max
  unsure (1)..(137): unsure at all Xaa locations
  Clone ID: PAT_MRT3847_90121C.1.pep
ARARRKTINGHALSCLQNLFPIISWLRDYKVSKFKDDLLAGLTLASLCIPQSIGYATLAKVAPEYGLYTSVVPPLIYAMMGSSREIAIGPVAVVSMLLASLVPKVEDPVTNPNAYRNLXFTVTFFTGIFQTAFGVFR

SEQ ID NO: 274753 - protein, 62 aa, Glycine max
  Clone ID: PAT_MRT3847_90122C.1.pep
KVKKRDHPLSPIPPPLPFKGLWFQFMTKRKPGVGILGLVKGWLSTSSWNFPRPRVSWTKLRA

SEQ ID NO: 274754 - protein, 117 aa, Glycine max
  unsure (1)..(117): unsure at all Xaa locations
  Clone ID: PAT_MRT3847_90123C.1.pep
APEKEKFQRTKKKNLKTKEPKKKKKKGRNTRGSGGNRPTPWXXPKNKGKGGKNRKRGKGGAAYEKRELRPQDRRQKILQGRPKTPNGGGGEKRRDGGKPRRPPTKTPGRNTPWPRGG

SEQ ID NO: 274755 - protein, 80 aa, Glycine max
  Clone ID: PAT_MRT3847_90124C.1.pep
KTSAGVSTGPDCDDPCKRTRQLIQLQKCTQQFRTNYLLKYGGEYIPQTLLIMEVKTSVQVLNFKSVGPILTNEVLFIGFL

SEQ ID NO: 274756 - protein, 68 aa, Glycine max
  Clone ID: PAT_MRT3847_90125C.1.pep
LRPFLPLSSHLLKFITINPLKFGFLLIKGGKKYSTYFKYTYTLQPPLFHTTHHLNFNLTINHFLQVNL

SEQ ID NO: 274757 - protein, 129 aa, Glycine max
  unsure (1)..(129): unsure at all Xaa locations
  Clone ID: PAT_MRT3847_90126C.1.pep
QLDLNGLQGIRLLLGYMLMLRGVHHPGVGDLIGYCAHGDQRLLTYXQCNWYPLMNTYITITPSRNXLYCNTQMKISAGAARGLEYLHDKADSTCIYRHVKYSNIFLGEXYHPKLSEFGLAKLGSLGENT

SEQ ID NO: 274758 - protein, 61 aa, Glycine max
  Clone ID: PAT_MRT3847_90127C.1.pep
NAHLPPRIFYNIRDATPLTHWNGILQLLIWGKKKLKLFSILKGCSIQVNNTDFFQKICLWF

SEQ ID NO: 274759 - protein, 97 aa, Glycine max
  Clone ID: PAT_MRT3847_90128C.1.pep
SIHTNAITHSLSFSLLYPITLSTITIVHDQHLILYPNFPQFHQARSITTLPSDQPFICPYILTPNSLNFYTLHLVLDQYLQPSKPDTTPFLLHLLPT

SEQ ID NO: 274760 - protein, 69 aa, Glycine max
  Clone ID: PAT_MRT3847_90129C.1.pep
NLTLPIYVILPRLLTCPTTLAGPFSVEFKVAIVISFQSELSKLHKKSDAKTPRLWLAMETLLLELVRTK

SEQ ID NO: 274761 - protein, 68 aa, Glycine max
  Clone ID: PAT_MRT3847_9012C.1.pep
AGRRGRMSAPLSAEMGTKNNARTIPIRKEDEVHVMRGTYKGREGKVTQVYRKKGVIEMEHNTREKGKG

SEQ ID NO: 274762 - protein, 47 aa, Glycine max
  Clone ID: PAT_MRT3847_90130C.1.pep
EVWILEINQLVRLSYFNLICNVSIHISIKNLYFLSNYVLFINTTFLT

SEQ ID NO: 274763 - protein, 49 aa, Glycine max
  Clone ID: PAT_MRT3847_90131C.1.pep
MERGALDRIINRVLEVIGRPLKHVQHYEADIKQLCLVYKDILMRQTNLL

SEQ ID NO: 274764 - protein, 46 aa, Glycine max
  Clone ID: PAT_MRT3847_90132C.1.pep
ISFSHTPGIENLFSINNIWCRQSLAARSSWTLCQFEASANPRTCPV

SEQ ID NO: 274765 - protein, 39 aa, Glycine max
  Clone ID: PAT_MRT3847_90133C.1.pep
QLTPKIHYLYSFINITLVLLLFILLLVLVSNLVKDLCII

SEQ ID NO: 274766 - protein, 1112 aa, Glycine max
  Clone ID: PAT_MRT3847_90134C.1.pep
MTNDSSKMTSKFAKLDKFEGQDFRRWQKKIHFQCCQEKVVYVLSTPMPVYMEDETLDQTRKRSKWENDDYICRGHILNGMSDSLFDIYQNIESAKELWDSLESKYMAEDASSNKFLVSNFFNYKMSDSRPVMEQYNELLRILGQFTQHDLKMDESIAVSSIIDKLPSSWKDFKHTLKHKKEELTLVQLGSHFMIEESLRAQEIDKVNDKTVAGSSSVNMVEESGTVKQNYNAKGNKRKFQGNKNKGPNKQTKLSCWKCGKPGHLKRDCRVFKGKNKAGPSGSNDPEKRQGQIVVNNFNSNTNSNYVSLISNAFYVQDDDVAWWFDSGATSHVCKDRRWFKEFRPIDDGSIVKMGNVATEPILGLGCVNLVFTSGKSLYLDNVLFVPGIRKNLLSGMVLNNCGFKQVLESDKYILSRHGSFVGFGYRCNGMFKLNIDVPFVHESVCMASCSSITNMTKSEIWHARLGHVHYKRLKDMSKTSMIPPFDMNIEKCKTCMLTKITRKPFKDVKSETKVLDLIHSDLCDLHATPSLGHKKYLVTFIDDASRYCYAYLLNTKDEALDKFKIYKKEVELHQNGLIKTLRTDRGGEYYDPVYFQSTGIIHQTTAPYTPQQNGVAERKNRTLKEMVNSMLSYSGLSEGFWGEAMLTACYLLNRIPNRRNKVTPYELWHKKTPNLSYLKIWGCRAVVRLTEPKRKTIGERGIDCIFIGYAEHSKAYRFYVLESNDSVAVNSVIESRDAIFDEQRFTSIPRPKDMNSMSKVSVNIEDIPLTSTETRKSTRVRKAKSFGDDFQLYLVEGSRNDIEFQYQYCLNVEEDPKTFSEAMASRDAVFWKEAIQSEMDSIMQNNTWKLVDLPPGCKPLGCKMIFRRKMKVDGTVDKYKARLVIQGFRQKEGIDFFDTYAPVARISTIRLLLALAAIHNLLIHQMDVKTAFLNGELDEEIYMKQPEGFVMPGNENKVCKLMKSLYGLKQAPNQWHQKFDEVVLSSDYVLNQADKCLYSKFDTHCKGVIICLCVDDHLIFGIDQHQVDETKTFFSSTFDMQEMGQAAVILGIKIKREHILIFISQSHYIEKILEKFNFIDCSRVRTPIDHKQKLAPMKSVEGSQLKNSGATE

SEQ ID NO: 274767 - protein, 410 aa, Glycine max
  unsure (1)..(410): unsure at all Xaa locations
  Clone ID: PAT_MRT3847_90135C.1.pep
MYHRDDRRSNPQIRDSYLLFRGRPAWEDLRSYLTARGRKRFEVFVCTMAERVDALEMWRLLDPELNLINSKELANRIVWFKSGLKKSLFNVFQNGLCHLKMALVIDDRLKVWDEKDQPRVHVVPAFAPYYTPQAEASNAIPFFCLARNVACNVRGGFFKEFDDXLLQKIPQIAYEDDIKDIPSPPDVSNYLVSEDDGSISNGHRDPFLFDGMADAEVERKLKDALSAASTIPVTTANLDPRLTSLQYTMVPSGSVPPPTAQASMMPFPHVQFPQPATLVKPMGQAAPSEPSLHSSPAREEGEVPESELDPDTRRRLLILQHGQDTRDHASAEPPFPVRHPVQTSAPHVPSSRGVWFPAEEEIGSQPLNRVVPKEFPVDSGPLGIAKPRPHHPSFFSKVESSIKHLADIFV

SEQ ID NO: 274768 - protein, 88 aa, Glycine max
  unsure (1)..(88): unsure at all Xaa locations
  Clone ID: PAT_MRT3847_90136C.1.pep
MNPYDNRYSDAASFRGRRSDFVGPIPPPSFVGRGGAVPYGVPGPNGFGSAPVAPVPPFVPPSGGFNVXRGGGRAGNGPVSDRKHDMGR

SEQ ID NO: 274769 - protein, 85 aa, Glycine max
  Clone ID: PAT_MRT3847_90137C.1.pep
LDESTGTSGPDMLDKTATLFRPILIGAGARAYPRDMDYPRMGKMADEDSALVMRDLRPICGLSAWYVLYRRSVYGDTETTTTLMA

SEQ ID NO: 274770 - protein, 128 aa, Glycine max
  Clone ID: PAT_MRT3847_90138C.1.pep
NVSASEHTTNKDVNNNVENGESSRRFECHYCCRNFPTSQALGGHQNAHKRERQHAKRHLQSTLISDANAYSFMNYRFGSTAMSNYSYSSYPTWNSSNSSSAMLGNTGGTGRIYGNSYSQQLQTINGSP

SEQ ID NO: 274771 - protein, 50 aa, Glycine max
  Clone ID: PAT_MRT3847_90139C.1.pep
FTHSITDSFMWNCDYAENYRPSSAFMLYTSTLFKLSPHNEYLFFNCSEDF

SEQ ID NO: 274772 - protein, 54 aa, Glycine max
  Clone ID: PAT_MRT3847_9013C.1.pep
GAGFWCGPFIGGDTFWFISLFRSWPPLFLCLLWGKISSFPLLGKGSLVFLFAGE

SEQ ID NO: 274773 - protein, 74 aa, Glycine max
  Clone ID: PAT_MRT3847_90140C.1.pep
NWNILVNYTTNCLIGTYGIMRSDAYRYMNTADANFEYGNNIFSAESALSLTIEDSDANISQSEMLYHEAYCESY

SEQ ID NO: 274774 - protein, 52 aa, Glycine max
  Clone ID: PAT_MRT3847_90141C.1.pep
IFFCQMWIGPLSPRTMQGGFGLKITSMLRMRVSLGGFTRIPHSTHKVNFKVG

SEQ ID NO: 274775 - protein, 121 aa, Glycine max
  Clone ID: PAT_MRT3847_90142C.1.pep
MATYFHGSTSEIPSSAEGLQTLYLMNPNYVPYSDAAQHPTQNMLLVNPNNNNTSNTSPTYTNALNLGNFSHAPSPSSPNNNNNHREQQQHHLIGVTIPSSNILGSNAATDPARSSFLRQHE

SEQ ID NO: 274776 - protein, 185 aa, Glycine max
  Clone ID: PAT_MRT3847_90143C.1.pep
MMEMEEAETIDLYELQYSDLSSPSTSSIVDSIMEALGPTGPGLLAVTNVPNASNLRSHLLPLARNLALLDRESRKLVLKEHNLGSDVPLRNPDRTVSSFAMQLKYAKSQHVQQTVSECYGMEFENLGSSFKELGLCMMELGLCLARICDRAIGGNELEQSLLDSCAAKGRLIHYHSHLDALLLKH

SEQ ID NO: 274777 - protein, 128 aa, Glycine max
  Clone ID: PAT_MRT3847_90144C.1.pep
PPGVGVRGGAPLFAPGPFLAGFVGPGRSFGPPVGRGGLGAPWVSLVGPLFGGGLAGFVLWAVFLGGFAPVPAFCAFPWASPSLGCSPPRGACSPVPVLGLLGFCLFLFPFFVFPRLPFFCPFFFGPSP

SEQ ID NO: 274778 - protein, 436 aa, Glycine max
  unsure (1)..(436): unsure at all Xaa locations
  Clone ID: PAT_MRT3847_90145C.1.pep
MMEMEEAETIDLYELQYSDLSSPSTSSIVDSIMEALGPTGPGLLAVTNVPNASNLRSHLLPLARNLALLDLDSRKLVLSFVGMLIVLELRSFPSXEHNLGSDVPLRNPDRTVFSFAMQLEYAKSQHVQQTVSDCYGMQLENLRGSFDELGLNMIELGFCLGRICPSTISCNELEQSLLDSCAAKGILIHHHSHLDALLLRQRERKVGLCKRRPGNIKPLEGLESNSIANDANSGGIHSNLRQQWHXXYGGFTVLTTPLFILPSLVETSKTEDPFPASCFDECPSPTRHTCLQIYDPNKKRAIMVNAPPESFIIQVGEAADIISKGKLRSALHCVHRPSKFENLSRETFVVFLQPAWTKTFSISDYPHANSSFNGQCLVATDEEQQQSGQDSDNLSQEINKIVPPLSSRLKEGMTFAEFSRETTKQYYGGSGLQSNR

SEQ ID NO: 274779 - protein, 174 aa, Glycine max
  unsure (1)..(174): unsure at all Xaa locations
  Clone ID: PAT_MRT3847_90146C.1.pep
LGIFSSSVVSPPEELVAAGIITPSPNTTGGKLLNQFLEIKASTVSLRVXEHIHVTFTRHIKSPYHARSFTINDEIFYLFKETLYNGGRLXQHYELSESANKLILMMGTYKTVRDRAPYPTNRLRYHLSNSWAFIIXDXCTCTLFFTFNQAVKSPLYYKMTASDDGASADHGDWL

SEQ ID NO: 274780 - protein, 98 aa, Glycine max
  Clone ID: PAT_MRT3847_90147C.1.pep
SATGVTQKYRPEYRSLVEIGVASNGELCTPVSLNLSSLALLSSITLLSLTSPDLNSANLNLSLYDDASQSADRFSFCSCTFKFNPFSKRHYPTQASPS

SEQ ID NO: 274781 - protein, 105 aa, Glycine max
  Clone ID: PAT_MRT3847_90148C.1.pep
EHNLGSDVPLRNPDRTVSSFAMQLKYAKSQHVQQTVSECYGMEFENLGSSFKELGLCMMELGLCLARICDKAIGGNELEQSLLDSCAAKGRLIHYHSHLDALLLK

SEQ ID NO: 274782 - protein, 103 aa, Glycine max
  unsure (1)..(103): unsure at all Xaa locations
  Clone ID: PAT_MRT3847_90149C.1.pep
PYAIVRPWALIEEPAGAIFIFGQGDNISGXISREEIAFMWVAALYSPYACGKTFGVKSVLPFREPFFVGPTNPPPKKGYGVFFKNLKKGLSGKEAFPQNPVFV

SEQ ID NO: 274783 - protein, 63 aa, Glycine max
  unsure (1)..(63): unsure at all Xaa locations
  Clone ID: PAT_MRT3847_9014C.1.pep
XHTYXXNXXRRXKQXXXSXXXXXXXNSXXXPXGXPXFPIXXRIXXWRNHXHXXXXXXXXIXSQ

SEQ ID NO: 274784 - protein, 48 aa, Glycine max
  Clone ID: PAT_MRT3847_90150C.1.pep
RPLCQSTRFNPTPNSYPLNLTSNSVSFHQLRIISYSLLIVIQYLLVHQ

SEQ ID NO: 274785 - protein, 51 aa, Glycine max
  Clone ID: PAT_MRT3847_90151C.1.pep
RSLILERKVMLIHWVAIRGCFWIELLKDRLFMKSFLCNSRYPNVGIISLCT

SEQ ID NO: 274786 - protein, 144 aa, Glycine max
  unsure (1)..(144): unsure at all Xaa locations
  Clone ID: PAT_MRT3847_90152C.1.pep
FRTELSAIGKTSHKNLVRLIGFCDQGINRLLVYEFMSNGTLADILFGHSKPNWNTRVGFALGIARGLVYLHXECDTPIIHCDIKPQNILIDKHFNTKISNFRLTKLLLSNQSRTNTMIRRTRRYIAPKXFKNIAITIKINIYSC

SEQ ID NO: 274787 - protein, 173 aa, Glycine max
  Clone ID: PAT_MRT3847_90153C.1.pep
TRPVSNELGASHPRVAKFSVFVVNGTSILISVVFCTIILIFRVSLSKLFTSDSDVIDAVSNLTPLLAISVFFNGIQPILSGVAIGSGWQALVAYVNLDPRVRVGLTVGCVLGFKTSLGVAGIWWGMILGVLIQTVTLIILTARTNWQAEVEKAVVRINKSAENDTLDQLVADT

SEQ ID NO: 274788 - protein, 79 aa, Glycine max
  Clone ID: PAT_MRT3847_90154C.1.pep
PSQTTTPDGPIKQAEVHPHPPKISGGPSTKSSEVESTFPKKSGNPTIQNSGDPPKWRHDRQRRRGPIFLSLGQTNPRPT

SEQ ID NO: 274789 - protein, 125 aa, Glycine max
  Clone ID: PAT_MRT3847_90155C.1.pep
VSLTYVRSPLNSVKTNSRACALSPSSSSPCRNRNPRPAVLFSAPPSLSRPCQPSSTILVAGRLPRIGLGSGARGTCKDPPQQEPSPMKTVDTASKPCFELGLRISNSLPREPNLDPPPSSDYFAP

SEQ ID NO: 274790 - protein, 60 aa, Glycine max
  Clone ID: PAT_MRT3847_90156C.1.pep
RYGRTGMYKTLMFGNPSVIVTTPETCKRVLTDDDKFTTGWPQSTIELPGKRSFISMSNEE

SEQ ID NO: 274791 - protein, 78 aa, Glycine max
  Clone ID: PAT_MRT3847_90157C.1.pep
KQGQGSFFFPDANKQFATLFMASNENTGKYYISYISNHSLPPYLMSKPFKLTTVTRIGGKRNRTVNELHSNKHTLILR

SEQ ID NO: 274792 - protein, 44 aa, Glycine max
  Clone ID: PAT_MRT3847_90158C.1.pep
KFFFFFWVKFSPPPPPPPPPPPPPPPPPPPPPPPPPPPPPPRRW

SEQ ID NO: 274793 - protein, 31 aa, Glycine max
  Clone ID: PAT_MRT3847_90159C.1.pep
TINADVMGLTWLSLKCGSILRTNCSPICNSP

SEQ ID NO: 274794 - protein, 80 aa, Glycine max
  Clone ID: PAT_MRT3847_9015C.1.pep
MAPSRKSRSVNKRFSTVREAASSKDKITENASKNRLKASPGIQNKRKLADMLGPQWNKEELEHFYEAYRKYGRDWKKDVL

SEQ ID NO: 274795 - protein, 96 aa, Glycine max
  unsure (1)..(96): unsure at all Xaa locations
  Clone ID: PAT_MRT3847_90160C.1.pep
VIKVCRPLKPRTKLTVSRRQDPLNDLIPECERLLKGKKITHCAGHKLRESLRFACEAYMREHPTIRYRTFVTDSNXEQDVEDELSTDQGHGGARPN

SEQ ID NO: 274796 - protein, 56 aa, Glycine max
  Clone ID: PAT_MRT3847_90161C.1.pep
LYCITLLISYFSLLSISLLIVKTDVKKRLGITLFIYILNHDLKLNDAEVVSTRLEP

SEQ ID NO: 274797 - protein, 99 aa, Glycine max
  Clone ID: PAT_MRT3847_90162C.1.pep
LLLVKALSHFPTNSSIMKLYLLISSFLGRTSLLYNEVYLTPSPIFKRKKLKHLRGKCFYFLVMMVMWFIVVSCIYFGYQTINGDTSSLALFSSIEKGIK

SEQ ID NO: 274798 - protein, 92 aa, Glycine max
  Clone ID: PAT_MRT3847_90163C.1.pep
RVKVGTSISKWLPKKWVITEHAKVPWKTATHQTATNPPLIEKSCKMSAACDPDNIISFPELTSPICRLVTNMINPDYHSLHNLCTNNSIVLL

SEQ ID NO: 274799 - protein, 84 aa, Glycine max
  unsure (1)..(84): unsure at all Xaa locations
  Clone ID: PAT_MRT3847_90164C.1.pep
LHLCDSQXSXSXNHQSMRXKXPCPYXFPLDXFXFDFXXLLXENXIXXXXXXXXQIPFXFFXFHSXXXXXDXLWFXKLIRWLNYS

SEQ ID NO: 274800 - protein, 133 aa, Glycine max
  Clone ID: PAT_MRT3847_90165C.1.pep
KLKIGYVSSDFGDNALPHLLGSVFGMRNKKNVEVFCYALNANDGSEWRLRIQDETQQCEDVYGLTSDAIATMSNEDQIHILVNLIGYTNGARDERSSMRPAPIQVIYMGLHRTTAATDIDYVVTDEFDNLVRL

SEQ ID NO: 274801 - protein, 148 aa, Glycine max
  unsure (1)..(148): unsure at all Xaa locations
  Clone ID: PAT_MRT3847_90166C.1.pep
GKGSPVKGFVNAFKKAPGGGTKVESLPRGPGDYSRGESAPFKIPRGFNWAPQTPALXKSFRVAWKRQKALCTGSGFFFPIWVFTPSPNQLAPNGFFTGGPGIFFFFSFGGPQGGWGVDLLNFQGVSPPHGAIIIKKIMPPPGGGKLFF

SEQ ID NO: 274802 - protein, 61 aa, Glycine max
  unsure (1)..(61): unsure at all Xaa locations
  Clone ID: PAT_MRT3847_90167C.1.pep
MGCVASKLEEEEEVVAICRERKXLLKQAVEKRYALAEAHCKYFHSLNAVAAAIKLFVARHS

SEQ ID NO: 274803 - protein, 91 aa, Glycine max
  Clone ID: PAT_MRT3847_90168C.1.pep
TGYWTHGVATNVYQERMNGSRGPSFESVFVKFQWRTFMTTVHDEIYEQRAVKPFEQAKEHCCRHVNRHMITASCSCDEMMTMEGFCRGMGL

SEQ ID NO: 274804 - protein, 345 aa, Glycine max
  Clone ID: PAT_MRT3847_90169C.1.pep
LEVFEAGLKRFMHEPVYILEYADFLIRLNDDQNIRALFERALSSLTPEESVEVWKKFTKFEQTYGDLASMLKVEQRRKEALSGAEDGTALESSLQDIVSRYSFMDLWPCSSNDLDHLARQQWLAKNINRKVEKSIMPNGTTLLDKTSMASISTMPSKIVYPDTSKMVIYDPKHTPGAGTNAFDEILKATPPALVSFLANLPAVEGPMPNVDIVLSICLQSDLPTGQSVKTGIPTQVQSGKAGIPALLPAGSAPAAAASELSGSSKSHPAPSGGVSLKPGRNRQYGKRKEPDRQDEDDTTTVQSQPLPRDAFRIRQYQKARASSASQTGSVSYGSAFSGDLSGSTG

SEQ ID NO: 274805 - protein, 69 aa, Glycine max
  Clone ID: PAT_MRT3847_9016C.1.pep
LMAFSPLLVYFLMVDCQFCLVKEVTANTLAVGSSIFPSPWMPQFQNYCPRYCSFLALYSCVSIIILSYP

SEQ ID NO: 274806 - protein, 218 aa, Glycine max
  Clone ID: PAT_MRT3847_90170C.1.pep
MQEEKVTLSMSMSMSMSMNRGMMVHCNNNNNVNNTNNVCNCKHSPSATLDLLILLLVLFSGAFLLSSYLCYIFNSLSLLLPSVPLSYLLPFLLFFALSLATADFCCGARSRRCQRQGCKGLKKAMEFDLQIQRFGSSVPSSAEIDKLPWKGGTEANPDYDCLRSELRKMAPPNGRALLLFRAPCGCPVAKLEASGPKKAKRHKRTPPSATLNGGGDHR

SEQ ID NO: 274807 - protein, 45 aa, Glycine max
  Clone ID: PAT_MRT3847_90171C.1.pep
GRALLLFRAPCGCPVAKLEASGPKKAKRHKRTPPSATLNGGGDHR

SEQ ID NO: 274808 - protein, 162 aa, Glycine max
  unsure (1)..(162): unsure at all Xaa locations
  Clone ID: PAT_MRT3847_90172C.1.pep
FIFNGVARRTQPSWNTNHXIRYIQCDISDQSDAESQLSSLTDVTHVFYVCWTRKPTEAXNCQANGAMLRNXLRALIPNAPNLRHVSLQTXHYLGPFELFGKIEVAHDPPFTEDLPRLDAPNFYYTHEDVLYVEVRKKEGLITWFVNRPHFIFGFSPYSLMNL

SEQ ID NO: 274809 - protein, 64 aa, Glycine max
  Clone ID: PAT_MRT3847_90173C.1.pep
GYQALKMHFGRKLCFITFLTYGIPKRGTFGAWTCPLVLMGATNKMLARTPIKKMPTKIQSNNML

SEQ ID NO: 274810 - protein, 74 aa, Glycine max
  Clone ID: PAT_MRT3847_90174C.1.pep
ICPPKFLPLKGIRITPPPPPQKFPPKLKKEKGVLSFFFNKKKKKKKKKKKKKKKKKKKKKKKKKKNKKKKNKPP

SEQ ID NO: 274811 - protein, 59 aa, Glycine max
  Clone ID: PAT_MRT3847_90175C.1.pep
KKSEKKFTQSNILLNKRRHSITKTKRIKIVLIKKIDKPYYNKLGQVNQFYISLTRHPTI

SEQ ID NO: 274812 - protein, 40 aa, Glycine max
  Clone ID: PAT_MRT3847_90176C.1.pep
PEMVLKLVYRDRCDNRADLIINMCTISKSGYNICTYLESD

SEQ ID NO: 274813 - protein, 51 aa, Glycine max
  Clone ID: PAT_MRT3847_90177C.1.pep
DLLTGISSQLRLAPLTQSLFCRIMSNANDQSRERGHKVNFPLQWSNANAIM

SEQ ID NO: 274814 - protein, 80 aa, Glycine max
  Clone ID: PAT_MRT3847_90178C.1.pep
SSQTMKQSPTLADKLVAFPSSLKNKASSLTTMLIKELTLTSQQPKPPQPHKNSEPLLALVSKLRNLHGEGREKWKMEEKL

SEQ ID NO: 274815 - protein, 256 aa, Glycine max
  unsure (1)..(256): unsure at all Xaa locations
  Clone ID: PAT_MRT3847_90179C.1.pep
MCALRALTRSVCNSSSYVKTSKPYLILNLITHQHQTRRNLILESSASEFVRLHKLTGPDSGIVEISLDRPQAKNAIGKEMLRGLSHAFELINQKSYANVAMISSSVPGVFCAGADLKERRTMSQSETKIFVNSLRSTFSSLEDVRVPTIAVIEGVALGGGLEMALACDIRICGNXALSGLAERGLAISRGGGGTQCGDSLVVNAKARVVGLTGRAGTGGSTCVGACKKGWGAGRVWTGTVIWKIRGRWNKISMSRL

SEQ ID NO: 274816 - protein, 91 aa, Glycine max
  Clone ID: PAT_MRT3847_9017C.1.pep
MGNCLRRQSRIGYSTDDDEDWEDFRAAAAASGGVKKSTREVKIKITKKQLVELVGKVEVKELRMEQVLAHLMNHSLQRPWRPALQSIPEDH

SEQ ID NO: 274817 - protein, 105 aa, Glycine max
  unsure (1)..(105): unsure at all Xaa locations
  Clone ID: PAT_MRT3847_90180C.1.pep
LTFLPMSHHRFPXYNNFFNXTXXXXXXFSFFXXFSVVWNXERIXISHXXXLXPXXRXALXXLXIXXXGTXXMXPSXIXXXXHYLXXQXPFYRLLXRAEFXLTXDX

SEQ ID NO: 274818 - protein, 84 aa, Glycine max
  Clone ID: PAT_MRT3847_90181C.1.pep
NTLNPRMYFSNYIFEAIGKNPSPTLTRDSVKIKYISGAQSSPYELAFGVELGPNSSKMVSKSILDPFKGPPTMLSTLQAPKCWT

SEQ ID NO: 274819 - protein, 46 aa, Glycine max
  unsure (1)..(46): unsure at all Xaa locations
  Clone ID: PAT_MRT3847_90182C.1.pep
XLLMXLLXFQILLXXXFFCXXXXQTXXGCASYLGNKGIRXXXFLPI

SEQ ID NO: 274820 - protein, 136 aa, Glycine max
  Clone ID: PAT_MRT3847_90183C.1.pep
FFLLLSVIGFCWAQYAPNTKPGRTSIVHLFEWRWADIALECERYLAPRGFGGVQISPPNENVVINNPSRPWWERYQPISYKLCTRSGNEDEFKDMVTRCNNVGVYIYVDAVINHMCGNAVSAGTSSTCGSYFNPGN

SEQ ID NO: 274821 - protein, 58 aa, Glycine max
  Clone ID: PAT_MRT3847_90184C.1.pep
EYEDEDGDDQDDDDEDVDIDSKEDEAGQEEDEDGAKDEENEEDEEDEEALQPPKKRKK

SEQ ID NO: 274822 - protein, 63 aa, Glycine max
  Clone ID: PAT_MRT3847_90185C.1.pep
VVYFLWFGDCYLGACDYDVIPVNKFVSILASCLSFKWRAYLICLGALYPYLKCMTMIVQTLRK

SEQ ID NO: 274823 - protein, 78 aa, Glycine max
  Clone ID: PAT_MRT3847_90186C.1.pep
KGPLKPKFEALVPFPVLFFCWREPISFLVTESLERNYCFQSPLGKCFSSTTNFSVNIYFECSSSWPWCFFFLSPLLWF

SEQ ID NO: 274824 - protein, 61 aa, Glycine max
  Clone ID: PAT_MRT3847_90187C.1.pep
ATRLWILHKINQSFSCTCMTRKLLLSRPFLPYRFIIHRSISLPYHDCIFSLRLRNFLCLLF

SEQ ID NO: 274825 - protein, 42 aa, Glycine max
  Clone ID: PAT_MRT3847_90188C.1.pep
YYHIVQLHSPHRLPTRTDQTLSLIGSYPNLRFENRSLGFLSF

SEQ ID NO: 274826 - protein, 63 aa, Glycine max
  Clone ID: PAT_MRT3847_90189C.1.pep
KAPGLDPHESLTYISLLCGRFLRVRKFTLCAAHRLRDPFSLALLVYSQHTLLLDRGLSARSKL

SEQ ID NO: 274827 - protein, 68 aa, Glycine max
  unsure (1)..(68): unsure at all Xaa locations
  Clone ID: PAT_MRT3847_9018C.1.pep
RILPHSTSIIAPKYNALYLVLQRXDWQNPGHTQHNPLAXHATFASSNNSENAHTDAPSQQLLILNGKW

SEQ ID NO: 274828 - protein, 81 aa, Glycine max
  unsure (1)..(81): unsure at all Xaa locations
  Clone ID: PAT_MRT3847_90190C.1.pep
MATCPSPPSPSSGSSIPCPRSTMFYCTGSEDYYAEPHFLQACCLCREPLGQDRDIFMSRWNTRSXSNXCRQEQREIDEAKV

SEQ ID NO: 274829 - protein, 38 aa, Glycine max
  Clone ID: PAT_MRT3847_90191C.1.pep
YRGLVLVLFPCLLNRARFVENSLYNRFVAYNLQALTLL

SEQ ID NO: 274830 - protein, 231 aa, Glycine max
  unsure (1)..(231): unsure at all Xaa locations
  Clone ID: PAT_MRT3847_90192C.1.pep
MAGIISGPSGSEGVNILLNHDFSSELNSWHLNNCTGYVISAESGNQGGISMESNVNYVVITDRKECWQGLEQDITNRISIGSTYTVSACVGVSGLSQRSSDVIATLKLEYHDSATRYLFIGRTSVNKDSWEKLEGTFSLSTMPHRVIFYLEGPAPGVDLLIRSVEINCSTPNNSTTSTGCVSAGDDNIIINPXFDDGLKTGLXRLQDYVHDFMNDGKNVPKSGKXFASATE

SEQ ID NO: 274831 - protein, 44 aa, Glycine max
  Clone ID: PAT_MRT3847_90193C.1.pep
ATSRLKSSPWRESSSCGLFTSISMTQVQAIGHEAPSVMNMKVEA

SEQ ID NO: 274832 - protein, 108 aa, Glycine max
  Clone ID: PAT_MRT3847_90194C.1.pep
DHHEIQIQITMVGSILSNMNHIHITSQSHCNIQKAPHHKIHFSFSSSSKIKSNENRHVALCVSHFRRQRDRFTKPPRDPLFVLHGLRLVGTPGAEFGTRNDRAALYTI

SEQ ID NO: 274833 - protein, 76 aa, Glycine max
  Clone ID: PAT_MRT3847_90195C.1.pep
SHTTVVLGKDLSFLFVPIGPKIPPRNGRPGWTPDNLNFGPIDYFFWQLALLSGVNLKASLGGFMLKTKKRPVGPFP

SEQ ID NO: 274834 - protein, 75 aa, Glycine max
  Clone ID: PAT_MRT3847_90196C.1.pep
TEHASSYLDRTVQGPVTIHNKIQARAAAVILLFALMVAIITVLGLNTRPSLRSPACHCNNHPSLCLCPVFYPWSR

SEQ ID NO: 274835 - protein, 82 aa, Glycine max
  Clone ID: PAT_MRT3847_90197C.1.pep
KVLLQSRQKNQLFHQNKPKPNTHLIILKKYVYALPLLFISMYLCSSISLFYSIFWYASLCMIVKITSTNQRSGQGNFLFFLK

SEQ ID NO: 274836 - protein, 173 aa, Glycine max
  Clone ID: PAT_MRT3847_90198C.1.pep
MSDAPPSPTHESGGEQSPRGSSSGAREQDRYLPIANISRIMKKALPPNGKIAKDAKDTMQECVSEFISFITSEASEKCQKEKRKTINGDDLLWAMATLGFEDYIEPLKVYLARYREAEGDTKGSARSGDGSATPDQVGLAGQNSQLVHQGSLNYIGLQVQPQHLVMPSMQSHE

SEQ ID NO: 274837 - protein, 55 aa, Glycine max
  Clone ID: PAT_MRT3847_90199C.1.pep
SDNSRCIWCVFHTECKSWGQFLIFQIGNCPQLERLEKLVFNRTVTLKGSYSKGGK

SEQ ID NO: 274838 - protein, 321 aa, Glycine max
  Clone ID: PAT_MRT3847_9019C.1.pep
RMDQYEIMEQIGRGAFGAAILVHHKAEKKKYVLKKIRLARQTERCRRSAHQEMALIARIQHPYIVEFKEAWVEKGCYVCIVTGYCEGGDMAELMKKLNGAYFPEEKLCKWFTQLLLAVDYLHSNYVLHRDLKCSNIFLTKDQDVRLGDFGLAKTLKADDLASSVVGTPNYMCPELLADIPYGFKSDIWSLGCCIYEMAAHRPAFKAFDMAGLISKINRSSIGPLPPCYSPSLKTLIKGMLRKNPEHRPTASEILKHPYLLPYVDQYRSSFCTPTAGSPERPISAVHHPRKNKPESQNSSSSLSPEKDSFMLSEKNTAKEVK

SEQ ID NO: 274839 - protein, 125 aa, Glycine max
  unsure (1)..(125): unsure at all Xaa locations
  Clone ID: PAT_MRT3847_901C.1.pep
MVGLSLGEKHFIQGGIGQDLRCDGRKRFTYKPISVETEVIPQTNGSARVRMGATDVIASAKAVLGKPSLLQPDKXKVSIYIDCSSTAEPAFEVAYSIAFPPSCFSTLHTMNIDNKTNKLILKSFN

SEQ ID NO: 274840 - protein, 174 aa, Glycine max
  Clone ID: PAT_MRT3847_90200C.1.pep
MSDAPASPSHESGGEQSPRGSLSGAAREQDRYLPIANISRIMKKALPPNGKIAKDAKDTMQECVSEFISFITSEASEKCQKEKRKTINGDDLLWAMATLGFEDYIEPLKVYLARYREAEGDTKGSARSGDGSARPDQVGLAGQNAQLVHQGPLMHIVLQVQPQHLVMPSMQGHE

SEQ ID NO: 274841 - protein, 145 aa, Glycine max
  Clone ID: PAT_MRT3847_90201C.1.pep
MPAKDDGSDKEKCLDLFLKIGLDERTAKNTVANNKVTANLTAVIYEAGVIDGCSRAVGNLLYTVATKYPANALPHRPTLLQYIVSLKVKTTAQLDAALSFLAITGSENLDLNKFEEACGVGGEVSIEDIKQAVNEVVEENKATIL

SEQ ID NO: 274842 - protein, 334 aa, Glycine max
  Clone ID: PAT_MRT3847_90202C.1.pep
ENITHSLCTLEFETRRASYYWLLHALSIYQPYVWEYSRLNVSNTVMSKRKLNRLVTEKWVDGWDDPRLMTLAGLRRRGMTPTAINAFVRGIGITRSDGTLISVERLEYHVREELNKTASRAMVVLHPLKVVITNLEANSVIEVDAKKWPDAQADDASAFYKISFSNVVYIEHSDFRMQDSKDYYGLAPGKSVILRYAFPIKCTEVILADDNETILEIRAEYDPSKKTKPKGVLHWVAQPSPGVDPLKVEVRLFERLFLSENPAELDNWLGDLNPNSKVIIPNAYGVSSIQNAKVGDNFQFERLGYFVVDQDSTSEKLVFNRTVTLKDSYSKGGK

SEQ ID NO: 274843 - protein, 504 aa, Glycine max
  unsure (1)..(504): unsure at all Xaa locations
  Clone ID: PAT_MRT3847_90203C.1.pep
MDFTPPPIEDGFTAEKLFTQGFSYTYDDVIFLPHYIDFAADVVDLSTRLTRRLPLAVPFVASPMDTVSESAMASAMASLGGIAVVHSNVPAAVQAAILRKAKSRRVPILSDPAFAAPSAVVEHDDAFGASPFLLVTDTGTSAGKLLGYVAGRVWTNHTDKGLRVGDYMAPPPKPVPWNADLNKINEIFESEKSGAVALEKDGEVXVVDLVVREEVERVRGYPKLVAPATVGADGEFMVGAAVGTREDDKERLEHLVKAGLNVVVLDSSQGNSIYQLEMVKYVKRVYPELDVIGGNVVTMYQAENLIQAGVDGLRVGMGSGSICTTQEVCAVGRGQATAVYKVSSIAYKSGVPVIADGGISNSGHIVKALSLGASTVMMGSFLAGSLEAPGAYVYQNGQRVKKYRGMGSLEAMTKGSDARYLGDTAKLKIAQGVVGAVKDKGSVLNFIPYTLQAVRQGFQDIGASSLQSAHDLLRSRELRLEVRSGAAQVEGGVHGLVSYEKKYF

SEQ ID NO: 274844 - protein, 795 aa, Glycine max
  unsure (1)..(795): unsure at all Xaa locations
  Clone ID: PAT_MRT3847_90204C.1.pep
MPAKDDGSDKEKCLDLFLKIGLDERTAKNTVANNKVTANLTSVIDEAGATDGCSRTVGNFLYTVATKYPANALPHRPTLLQYIVSLKVKTTAQLDAALSFLATTGSENLDLDRFEEACGVGVEVSEEDIKQAVSEVVEENKATILELRYRTNVGELLGHVRKRLPWGDAKXLPRQLVDAKLYEXLGDRTAADDEKPSRKKKEKPAKVEDKAAPVSTPEKSPEEDLNPFLIFPNPEENFKVHTEVPFSDGSILRCCNTRDLLDKHLKATGGKVLTRFPPEPNGYLHIGHAKAMFIDFGLAKDRDGGGTSRYDDTNPEAEKKEYIDHIEEIVQWMGWKPFKITYTSDYFQELYELAVELIKKGHAYVDHQTPDEIKEYREKKLNSPWRDRPISESLKLFEDMKNGSIEEGKATLRMKQDMQSDNYNMYDLIAYRIKFTPHPHAGDKWCIYPSYDYAHCIVDSLENITHSLCTLEFETRRASYYWLLHALGIYQPYVWEYSRLNVSNTVMSKRKLNRLVTEKWVDGWDDPRLMTLAGLRRRGMTPTAINAFVRGIGITRSDGTLISVERLEYHVREELNKTAPRAMVVLHPLKVVITNLEANSAIEVDAKKWPDAQADDASAFYKIPFSNVVYIEHSDFRMQDSKDYYGLAPGKSVILRYAFPIKCTEVILADDNETILEIRAEYDPSKKTKPKGVLHWVAQPSPGVDPLKVEVRLFERLFLSENPAELDNWLGDLNPNSKVIIPDAYGVSSIQNAKVGDNFQFERLGYFVVDRDSTSEKLVFNRTVTLKGSYSKGGK

SEQ ID NO: 274845 - protein, 91 aa, Glycine max
  Clone ID: PAT_MRT3847_90205C.1.pep
RGELYKLGGDNGRPNGHGRAIFEIGTAFCHRHLLIGTSDANPNPKRSGKNQRRMKKDTVESQVFENRKCLFSNLPINLVLNSFIHFLGEHF

SEQ ID NO: 274846 - protein, 124 aa, Glycine max
  unsure (1)..(124): unsure at all Xaa locations
  Clone ID: PAT_MRT3847_90206C.1.pep
ARRHYESSNNLEKREACLVNPVSVXRVLDLHSPDEARLMKRRALCRIERLEKAXCPTIVQIEAFYSTQTVMNATDIHDSMDLLTIIDLLSLQSASKVFSMKLVFDDKLVWANTHDCLDGNITAD

SEQ ID NO: 274847 - protein, 69 aa, Glycine max
  Clone ID: PAT_MRT3847_90207C.1.pep
GARAIIYSTLQVFTGEHLWRDELHCLITSLVSQGGITISEDYRRGCCSLSLSEMDYFMFYKSIYRSHRG

SEQ ID NO: 274848 - protein, 77 aa, Glycine max
  unsure (1)..(77): unsure at all Xaa locations
  Clone ID: PAT_MRT3847_90208C.1.pep
XMXXRLXXVNXXXXGRPXXAXXLMXXXXETXQXLLXXQAXXXXTXXLXXXXXXSXXXXXXLXSSRIXEALRYAXAML

SEQ ID NO: 274849 - protein, 76 aa, Glycine max
  Clone ID: PAT_MRT3847_90209C.1.pep
PNSNHLKLHPTSHPQPPLTPPPPTYIYTPQSPYPQNHKKKKEKKKTHNPFSHSSPPQKLPCISREVFHCIIYYYSF

SEQ ID NO: 274850 - protein, 47 aa, Glycine max
  Clone ID: PAT_MRT3847_9020C.1.pep
HPFITKTSTLLSPLPHNQYSLLLPHHTLLHPIIHNRRGRVYSLPHNF

SEQ ID NO: 274851 - protein, 89 aa, Glycine max
  unsure (1)..(89): unsure at all Xaa locations
  Clone ID: PAT_MRT3847_90210C.1.pep
IRQSFVLTNPRXSDMPXXXASXAFLXXTGYAKTXXLGRNCRFXGGTDXDTSXIHXIRESXKTXQXXTVRILNYXKDKXHFGFXHISPFV

SEQ ID NO: 274852 - protein, 95 aa, Glycine max
  unsure (1)..(95): unsure at all Xaa locations
  Clone ID: PAT_MRT3847_90211C.1.pep
RYQQATMFRGVKYDYWKERIITHFESIHIDLXDVVENGNHIPYDDELNEIPRSQWTEQQKQRLVLDSKACSALLCALSKEEYTKVHNFKSAKQMW

SEQ ID NO: 274853 - protein, 112 aa, Glycine max
  unsure (1)..(112): unsure at all Xaa locations
  Clone ID: PAT_MRT3847_90212C.1.pep
GTQKRXXLPGXXPVASGGIHVWHMPALTEIFGDDSVLQFGGGTLGHPWGNAPGAVANRVALEACVQARNEGRDLAREGNEIIREASKWSPELAAACEVWKEIKFEFEAMDTL

SEQ ID NO: 274854 - protein, 53 aa, Glycine max
  unsure (1)..(53): unsure at all Xaa locations
  Clone ID: PAT_MRT3847_90213C.1.pep
VYDDGNNLLVSKLINLATGLYTYKFPPNKRRKINTCCQKKKKXXXXXKKKKKK

SEQ ID NO: 274855 - protein, 113 aa, Glycine max
  Clone ID: PAT_MRT3847_90214C.1.pep
HSGITPDKAANAAELNNDVPKQDPLHELIKTLVEIYDKPVEFVWDLTKFGIPNVNSLLFLTYTNVSEITSGEKCLNIAILQFWTMYMNEWSNGLGHRSVYGFLGPSSFTHCKG

SEQ ID NO: 274856 - protein, 110 aa, Glycine max
  Clone ID: PAT_MRT3847_90215C.1.pep
MVLFVELVQVFLTIMSFLGPRGVWAIKADHMGSYGPAFYQSYDASGQFTHEFDGEQIFSVDLKKGEVVWRLPEFADFAYSDFQSGLMSISMIRAHLDVLVERSNRTRAVS

SEQ ID NO: 274857 - protein, 167 aa, Glycine max
  unsure (1)..(167): unsure at all Xaa locations
  Clone ID: PAT_MRT3847_90216C.1.pep
IYKSLLDSDISFAVSVVRKFLXFYLLRPLRCVIQILKYIXSAPGKGLTYEDREHTQIVGYLDVDWAGSAIHKRPTCRYCVLIRGKLISWNSKKHNVVTRSRTKVEYRAMALICQLIWFKQLRKQLQFEDTMQMTLICDNQAALYIASNQFSTRTKHIEINCHFVREK

SEQ ID NO: 274858 - protein, 94 aa, Glycine max
  Clone ID: PAT_MRT3847_90217C.1.pep
KHHRLGSSGWIVMQAFVLKKYSAPLTVSAFTCFFGVVQFLTIAAFFETDSKAWQFNSSGEIFSALFSGLVTSGLASAIQIWTIGQGRPVLASFF

SEQ ID NO: 274859 - protein, 89 aa, Glycine max
  Clone ID: PAT_MRT3847_90218C.1.pep
VRVDSKENSMQMTYYGVITNSSGEDWKDVKLFLSTAAPNVGGTPPLLPTAKVTFKSDYIPPPVARTFHEQQARRNMNFLENNMQQAHWG

SEQ ID NO: 274860 - protein, 143 aa, Glycine max
  unsure (1)..(143): unsure at all Xaa locations
  Clone ID: PAT_MRT3847_90219C.1.pep
GGVGGTGGQPKEEGGLRYPXVVIEWATANPDDQKRALGIGGGVXNFTEXASTLXGIIRDWREGGKLRAARGRIFVRGXGXQLPXGVXXMRGVGREIGIPIXGRDVGPILGMRRGIQVITGSRLRGTTPSFIGFSWGMLGTSNS

SEQ ID NO: 274861 - protein, 390 aa, Glycine max
  unsure (1)..(390): unsure at all Xaa locations
  Clone ID: PAT_MRT3847_9021C.1.pep
MRYLNLCAAVLSNPERVMGTVCCCINKFATLSNIRSRPFFSSHFPSHHFPSTTTSINFSIASSSFSSATSSFTWDDVFRISESQSATQDRSRYLQGFSHKLQLCNRASEKQSEFLPFVIEDHVFGFIHNGFVEHLRDFGDVFVFPIDKNNGGPYGDFVSLHPTLKTADERTIAVGYVVERLGAXQLLVIRDELSYVXPSFGAPIFFSLERAAAPYFGIKAYGXSHMNGYVEVDGQKHMWVGKRSDTKQTFPGMLDHLVAGGLPHGIDCQENLIKECEEEAGIPRSISVKAIPVGAISYMDIDGYRYKRDVEFCYDLKLPKSFLPKNEDGEVDSFKLIPVTQVAEVIRKTEFFKPNCSLVIIDFLFRHGYITPEYLGYLDLLRNLRIGDCS

SEQ ID NO: 274862 - protein, 260 aa, Glycine max
  unsure (1)..(260): unsure at all Xaa locations
  Clone ID: PAT_MRT3847_90220C.1.pep
IYVCLGSKIPHEKKKSKQEKNKKKKNRKRNNKKKNKKKKKIPDQKNRKKAKXKIPNQRGGESKKERKFPDQKLRGSKKKKRNKVPDQRSKENRNMRKGLWTRQQLNNTELSPSKQEKRKPRPKVVLPLXLPTKSCALATFSPRTKQKQKRKRQKHSKPNSPPKNHSQNKRSEKKEKEEMERKKKKRNENKEKNKRKKRKDSRSKIERKXKGKRSKRRRRKKKKKKKNKRGGAGWCSHQPAKKKTTVMKQCLQTILCSVTE

SEQ ID NO: 274863 - protein, 80 aa, Glycine max
  unsure (1)..(80): unsure at all Xaa locations
  Clone ID: PAT_MRT3847_90221C.1.pep
SGWKNAILLWFSVFKDQKCYIMGHVCQPNKEFNDRTASNFLFAPQRDFWLVKPPANILKKESGXKKPNSEYIHHPGGRSS

SEQ ID NO: 274864 - protein, 101 aa, Glycine max
  unsure (1)..(101): unsure at all Xaa locations
  Clone ID: PAT_MRT3847_90222C.1.pep
QPKPCRNPXRHHLLLRFFKNKETYWLVQGXHTKYNNSLXSPKMSAGRAKYPVVRTEMVAHPQAEWIWWVDSXAMLTDMEMMLPLERYTEHNLADHGWAHLI

SEQ ID NO: 274865 - protein, 58 aa, Glycine max
  Clone ID: PAT_MRT3847_90223C.1.pep
EEGPQAPGDGAGSPQIELSVLCGDDGRSSPVIEVSVRAPPIIRHAVRANLIPYTQRYD

SEQ ID NO: 274866 - protein, 76 aa, Glycine max
  Clone ID: PAT_MRT3847_90224C.1.pep
TVGFFLWLNNVFLFLINYFLVMINIFLLLLRDSIKIFLLKHCNGGGQERILSPQFPTPTPTPQHGPYPYPISDGLK

SEQ ID NO: 274867 - protein, 88 aa, Glycine max
  unsure (1)..(88): unsure at all Xaa locations
  Clone ID: PAT_MRT3847_90225C.1.pep
RAASAREFFSMPLNAKDTAEYPKPFGTGSXSIGHNGDVGXVEYLLLNTNHEHNFSFYGKNAEQSRCLLYSYMSSVRTMACEILELLAE

SEQ ID NO: 274868 - protein, 36 aa, Glycine max
  Clone ID: PAT_MRT3847_90226C.1.pep
TSEDCESRIIVHISVVSRICSACSKTKGPYSNLYSS

SEQ ID NO: 274869 - protein, 220 aa, Glycine max
  Clone ID: PAT_MRT3847_90227C.1.pep
MAITAISNSSQNMNEVAAGGVKPKRSNSRGVRIVGSRIYDSANGKTCHQCRQKTRDFAVSCKNMKKGKPCPINFCHKCLLNRYGEKAEKVEQLGNWMCPKCRNFCNCSFCRKKQGELPTGQLFHTAKASGFKSVSEMLVSKTAESNDLESTKVNRVFPSKEATEVKKQKRVNKSSSDKVPVSKAVSPMKQIASDKELVVLLSGEIGKENSSDGKLDPVLV

SEQ ID NO: 274870 - protein, 63 aa, Glycine max
  Clone ID: PAT_MRT3847_90228C.1.pep
IFLTQLCAQPYPMGRRNNEPNSILSHRLILPLVCFRFVRFGLRVPLCGAHKQQKQSFRVWEAS

SEQ ID NO: 274871 - protein, 337 aa, Glycine max
  Clone ID: PAT_MRT3847_90229C.1.pep
MGRRNNEPNSILSHRLILPLVCFASCGLVYAFLSAVLTNSRNRVSEFQRLVEDGVASENDGGCCRGIENLELWGAAVKWGSEFKFNSSEECCNACKSMCSGKDGPCLCDTWVFCGDRKACGSKFGECWLKKQKDSLAPERQEGTPPGEVIGWTSGLIFGKGEGIIGLETEYGTLHIKLLPDCAPHSVDYILELLALHHCAGCRFYRAESRGQSWDSEGNHIENAAFGPPYALIQGTLEAQGTAFNKLPVEDCPTLKRGSVAWIGSGPEFFISLADHSEWKNEYTVFGSVLPEDMHFAEKITTLPTIPDVWNNVNVTVLEKPVPLLLRRIQKSHLDEM

SEQ ID NO: 274872 - protein, 55 aa, Glycine max
  Clone ID: PAT_MRT3847_9022C.1.pep
KKKPWEGVFISGPFINSFKLYFLNHLLNILMAHLIFLTCSIAIFKKTFYGDTIST

SEQ ID NO: 274873 - protein, 86 aa, Glycine max
  Clone ID: PAT_MRT3847_90230C.1.pep
DCPTRRGSVAWIGSGPEFFISLADHCEWKHEYTVFGSILPEDMHIAEKIATLPTIPDVWNSVNVTVLEKPIPLLLRRIQKSHVDEM

SEQ ID NO: 274874 - protein, 240 aa, Glycine max
  Clone ID: PAT_MRT3847_90231C.1.pep
MGFKSSSLLCLALLLACSSAIHAFDITQLLGQYPEFSTFNKYLTETKLADEINSRNTITVLAVEDSAMNSIAAKSPEAIKAIISTHVILDFFDEKKLMEAQANSQQLTTLFQASGIAVNQQGFLKVALVGEGEIAFGSAVSGAPVDATELMRTVTSEPYNISILQVTKPILVPGVDSQTPASSSGAQSSQGANAPVAAQGAKAPMSSLQGAKAPIPTPVAKSPVPAQSAKAPVPSKTRPP

SEQ ID NO: 274875 - protein, 152 aa, Glycine max
  unsure (1)..(152): unsure at all Xaa locations
  Clone ID: PAT_MRT3847_90232C.1.pep
MDFKNSSLLCLALFLACSSAIRAFDITQLLGQYPEFSTFNKYLTETKLADQINSRNTITVLAVEDSAMHSIAAKSPEAIKAIIGTHVILDFFDEKKLMEAQASSQQLTTLFQASGLAVNQQGFLKVALVGEGEIXLRSAASDAPADATELVR

SEQ ID NO: 274876 - protein, 121 aa, Glycine max
  Clone ID: PAT_MRT3847_90233C.1.pep
PAFLPGLVFATWSTLLLCHTTHPPFPSVVYLSFNNNNMWFHFILNASAYITHQPPLLKTLFYAYCALSCSRLLFLWVFPVVGSYLSRHNLQPSSFYRVVLCRHLSITPHHTYPEAPPPPQA

SEQ ID NO: 274877 - protein, 108 aa, Glycine max
  Clone ID: PAT_MRT3847_90234C.1.pep
KKKKKKKKKKKKKKKKKKKKKKKKKKKKEKKKKRKPQLRRIHLFKSWGFLLGCLFFWSLPGFFPGAGLFTPLWRCLPPWGFPTISPLGRCLFSLAAFSVCAFPPCSAS

SEQ ID NO: 274878 - protein, 1038 aa, Glycine max
  unsure (1)..(1038): unsure at all Xaa locations
  Clone ID: PAT_MRT3847_90235C.1.pep
QISPPSQQPPQSSSATHQGGHHRHTSSGHHRSSGMTASSSRAPNRTRTGDDLHIGKYKLLKTIGKGNFAKVKLAKHVPTGVEVAIKIIDKTALNQSSLQKLFREVRIMKQLDHPNIVKLYQVIESETTLFLVMEYASGGELFDYLVAHGRMKEKEARAKFRQIVSAVQYLHSKNVIHRDLKAENLLLDADMNIKIADFGFSNTFSPGNKLDTFCGSPPYAAPELFQGKKYDGPEVDVWSLGVILYTLVSGSLPFDGQNLKELRERVLRGKYRVPFYMSTDCENLLKKFLVLNPIRRGTLEMIMRDKWMNMGYEEDELKPYTEPTKDVRDERRILKLQAFGYTLQQIHESLERERFDEIFGTYLLMKEAKKHDAQGQSLGGSGPNATAESPFNQSMGPTVPQSHGPTVSNAKNSRRSSSNAEQIQPQQHAITSHSVINQQSAAPIQQISATPQAIPSRQSQTAPGQVTFRTAQFTSRQPTLSVQPQAYIHPIQSANVRNITATSSASSGGRKGSAPAGRVPLPNLGLRHGINQPGVSYRYAPPVPGSGSSEKPNGGSSSARGAPPPTFFNQQLQTPIAPNPISAKLVAKATHQMNSNLISTSSVMQXSISHAPREPSIKEEPMGGDTAKDDDNGSDKFWSMATKTTSQHGEAPAIPTXPKKRTSIELCEATQIGHREELGQLVSPKPATDRTAPTADFIRMGLHQSPSMPPMVMKALAANDNDFTISSTASDEAATTTEGKLTKSATGAHISADPTLSHIVDIGAQTSTAVQNANFPRGSRNRQTFHGKTEHTKSATDDPESDHDEGITNAQNTIPPNAQRGSFLSKLTKLTKRTGMDPASPAAQSLSGSNSQQPPLKTHGVMRAGTIGSAAGTAFTQPQQQQQQHVQQLFQQQQPPSAFSAPNTPNQQQQNISQQQLTPAAAQLGTANSPCPLGIEEVKPRSLRFTWSMKTTSSLAPDEIMKEIRKVLDSNGCEYEQRERYLLLCAHGDPSKDSLIQWEMEVCKLPRLSLNGVRFKRISGSSIGFKNIASKIAQELNL

SEQ ID NO: 274879 - protein, 50 aa, Glycine max
  Clone ID: PAT_MRT3847_90236C.1.pep
LQDPLETPICRVKRAMIYFTMMLLEVRTVRIWGMKERALDRGAFRPRRRI

SEQ ID NO: 274880 - protein, 57 aa, Glycine max
  Clone ID: PAT_MRT3847_90237C.1.pep
SPLHSLLAGETIQFGAVASPTVLPSINRVVTHRIGRPRSSISHVPMTHNLTASDNDC

SEQ ID NO: 274881 - protein, 59 aa, Glycine max
  Clone ID: PAT_MRT3847_90238C.1.pep
IGFWNQRIYLVRNISSILGFASCGGKKSFWILLYLLMYLSLLNVIVHNWPSSIFPRAFS

SEQ ID NO: 274882 - protein, 90 aa, Glycine max
  Clone ID: PAT_MRT3847_90239C.1.pep
WQMVAASVMTTSTWWSRAFCKGHFCYIREIRKGISKSQASSCGFLFNLQFLLQQLAGDWTHLRLCMFISLIFPVSGFASLSLFYILCFCL

SEQ ID NO: 274883 - protein, 193 aa, Glycine max
  unsure (1)..(193): unsure at all Xaa locations
  Clone ID: PAT_MRT3847_9023C.1.pep
MGKPFFTLSVSSLCXLLLPSACLAITSSKFSGCQLNNLNALEPDHLFESEGGLMETWNSQHPELQCAGVTGSKRTLNRNGLHLPSXSPYPLVIIVGQGRGALGFAFPGCPETFEKPHHLSRXRGSRSLRQLQDRRPKIRHFRDGDVLVLPPGVPYWTYNSGDEPGVALWLLAPPNSNSGLDPNPWXXYLAGTP

SEQ ID NO: 274884 - protein, 163 aa, Glycine max
  Clone ID: PAT_MRT3847_90240C.1.pep
MVGLLSNSAMVRGRDEVYVAAMPLRATKGPPQLLMSAAYSLNLWDFQHFMVIIKPSSLSQVLVFDFQPKDPEDIYVALAALYGRAVPGTVLVRQLKKLPRNKCWLVGYSKAEADAMEIAREFNKEWETNLRIGLHDCRDYTNSLVRQLTGEKDVLKRLRNVGS

SEQ ID NO: 274885 - protein, 137 aa, Glycine max
  Clone ID: PAT_MRT3847_90241C.1.pep
LIRSQRKSSRWFKLWAFTSLGQVLHLLKTSKVKDMNEDACNRLQGLWEELVKHSGFQLSWLEPYVQSALDMKTHLDKTDEVNKLKDSVVALEIKMKKLREELVAAEAEFEVARRALAEARKGFIEMDLNADLGYAMF

SEQ ID NO: 274886 - protein, 84 aa, Glycine max
  Clone ID: PAT_MRT3847_90242C.1.pep
AALYGRAVPGTVLVRQLKKLPRNKCWLVGYSKAEADAMEIAREFNKEWETNLRIGLHDCRDYTNSKNLFQTLCCLSPFMERTIC

SEQ ID NO: 274887 - protein, 181 aa, Glycine max
  Clone ID: PAT_MRT3847_90243C.1.pep
MKEGIYRLSTKVSTSSIPDSVTREDPTTKYELLNELGKGSYGAVYKARDLRTSEMVAIKVISLSEGEEGYEEIRGEIEMLQQCNHPNVVRYLASYQGEEYLWIVMEYCGGGSVADLMSVTDEPLDEGQIAYICREALKGLDYLHSIFKVHRDIKGGNILLTEQGDVKLGDFGVAAQLTRTM

SEQ ID NO: 274888 - protein, 104 aa, Glycine max
  unsure (1)..(104): unsure at all Xaa locations
  Clone ID: PAT_MRT3847_90244C.1.pep
GLQIHLTIFKNQPQPNWAGPIVRVQGLSQNLINSIPXKYIKPSTYXTFIRNSNFYYSNIPIIHPCCLFCAYQRFLNIILKQISKACKKLGFFQINYHCVNPYFI

SEQ ID NO: 274889 - protein, 91 aa, Glycine max
  unsure (1)..(91): unsure at all Xaa locations
  Clone ID: PAT_MRT3847_90245C.1.pep
YVGVHSHIFIPASPGNTHNALVGHRTDXTVSTIRPFLGIDGSXPVLNSPIQCLEFQDAVGDGHQNRQGDLRLRHPNQAIYMYPAPFCMCRA

SEQ ID NO: 274890 - protein, 125 aa, Glycine max
  Clone ID: PAT_MRT3847_90246C.1.pep
TCLNCLSLAFRLMQISTKNFKRKESSLGRKEKNLYQNLPKTESGGRKKRAKAANRAFPPPRGKKKRTPERPKTPEEGKRAPPGKTPKKTKLVVKGGALPSRNPTTPKGDSPPRTKVKKKKRPPLP

SEQ ID NO: 274891 - protein, 76 aa, Glycine max
  Clone ID: PAT_MRT3847_90247C.1.pep
KGPIFYLMFIFDCTITFLLLIVIFLPLSNKKKNLKQSLPSSMSTSTFLISLLVFITNLTLLLLLTSASCTEFIYNT

SEQ ID NO: 274892 - protein, 95 aa, Glycine max
  Clone ID: PAT_MRT3847_90248C.1.pep
KKKKIFLSFFFTEDPPNRANPITQKKKKPPLTRGKTNNFFFPSKLILHRPPPHFLFSKPSVPPPPIGVETQNLNQITRVPPNFLIIIFNNPKKSF

SEQ ID NO: 274893 - protein, 59 aa, Glycine max
  unsure (1)..(59): unsure at all Xaa locations
  Clone ID: PAT_MRT3847_90249C.1.pep
GKRRGTGVVSLKGNCTXXGFSQVHGRXFLGFFVRXACLLGDWKVGSQGRVXEGSHLAAG

SEQ ID NO: 274894 - protein, 64 aa, Glycine max
  Clone ID: PAT_MRT3847_9024C.1.pep
NWRLVKPSPLWACCLFLRVYKIESPLPWPQLAEPLHVAVYWTILGQRAPPEPEADCSELMEHKG

SEQ ID NO: 274895 - protein, 146 aa, Glycine max
  Clone ID: PAT_MRT3847_90250C.1.pep
RNLSDQNDAVLVLFTKDDENQSDLASDFNLATLANAAPTVDSDSQSDSESESDSDSDSGSERNGSRKRRKKNPEDDDEDPIKLYRKLKKGYYRLGTFHGKPSGCLMYELADKLRKNTNELLWLACISLTDQFLHDRLSDERYHDGV

SEQ ID NO: 274896 - protein, 57 aa, Glycine max
  Clone ID: PAT_MRT3847_90251C.1.pep
RTCSQAKGRLAHMARLAPQPLTRAQRVVAKSQTQEGFLCEKRREERELVQKIENPKA

SEQ ID NO: 274897 - protein, 81 aa, Glycine max
  Clone ID: PAT_MRT3847_90252C.1.pep
ISFSPNLNFKLLGAPLFFLLCLCFFLLNFYAFFFYFFFFFYFFFFFFFFFFQKNSRRNCSTLKYVIHTAPVISYIIHTLMT

SEQ ID NO: 274898 - protein, 51 aa, Glycine max
  Clone ID: PAT_MRT3847_90253C.1.pep
ACGLSSGLQISRAYLLSVRRSQNQLGFCPSNSQRSPIALLPPIALNARWAA

SEQ ID NO: 274899 - protein, 45 aa, Glycine max
  Clone ID: PAT_MRT3847_90254C.1.pep
QLVMLILILTNAKKLVFRISFFIILYYKCLLRSLFREYLHMRSDQ

SEQ ID NO: 274900 - protein, 61 aa, Glycine max
  Clone ID: PAT_MRT3847_90255C.1.pep
FSLSLHYVFVYIVSLLLYIFVSRRSFVLLFSPYCKSNFFLVFVFLCILISVTLLNIMNFFK

SEQ ID NO: 274901 - protein, 105 aa, Glycine max
  unsure (1)..(105): unsure at all Xaa locations
  Clone ID: PAT_MRT3847_90256C.1.pep
RLPDRAGFPVSFHAPGYAFLHKAPHRKSAEQEPTTTNXEPXEGKDPAKXQGQGAGAGEALTARXTPTPRXEDGWSKDRGLIVQYVGKKSHAVHNINQPQEKDLLE

SEQ ID NO: 274902 - protein, 82 aa, Glycine max
  unsure (1)..(82): unsure at all Xaa locations
  Clone ID: PAT_MRT3847_90257C.1.pep
MKTQSASLLCLFLSLAILLNNGQEQHNVSFXRSLFPXXFLFGIGXSXYKXEGXXXVXGRGPXIWDTXTXQXXEKIWXHSTXN

SEQ ID NO: 274903 - protein, 203 aa, Glycine max
  Clone ID: PAT_MRT3847_90258C.1.pep
MKVSPLAFSILFLSFTIELFIGIASAAQEPVLDTSGQKLRTGVKYYILPVFRGRGGGLTVSSSGNNTCPLFVVQEKLEVSKGTPVTFTPYNAESGVILTSTDLNIKSYVKSTTCDKPPVWKLLKVLTGVWFLSTGGVEGNPGVNTVVNWFKIEKAEKDYVLSFCPSFAQTLCRELGLYVGDDGNKHLSLSDKVPSFRVIFKRA

SEQ ID NO: 274904 - protein, 170 aa, Glycine max
  unsure (1)..(170): unsure at all Xaa locations
  Clone ID: PAT_MRT3847_90259C.1.pep
MKKVSPLAFSILFLAFTIEPFIGIAAAAPEAVLDTSGQKLRTGVKYYILPVFRGKGGGLTVSSSGNNTCPLFVVQEKLEVSKGTPVTFTPYNAKSGVILTSTDLNIKSYGKTTTCDKPPVWKLLKVLTGVWFLSTGGVEGNPGVNTDVNWFKIEKAEKDYVLSFCPSXAQ

SEQ ID NO: 274905 - protein, 187 aa, Glycine max
  Clone ID: PAT_MRT3847_9025C.1.pep
IGGLEAWLIIPLNTAVTILRPNPSQHITADILSARTKRHLWLRCLSPGKHTSMLSGSGTLLTPTSTTPQAVSGPFIFTTSLPVSSPLPLARPTGHFTSFPSCPFNGLSRISLFFVSWLFSLNNISAIGTPAIFHPHLSSASSSSLYSICLYFALACLPPFLLHFAPPPPPIRPPPPKEGGRHTVMTG

SEQ ID NO: 274906 - protein, 98 aa, Glycine max
  Clone ID: PAT_MRT3847_90260C.1.pep
KNQESASAFWKQRPKYFGGALTKERGGKTTGGKAPRKQLATKAARKSAPTTGGEKKPQTNRPGTDALRETRKHQKSTELLNRRLTCQREARETAQKYK

SEQ ID NO: 274907 - protein, 48 aa, Glycine max
  Clone ID: PAT_MRT3847_90261C.1.pep
VDEPCYLCRVTFMVFSGLRETPSEFDSVFGTYSLQCGQKETITRWVPG

SEQ ID NO: 274908 - protein, 67 aa, Glycine max
  Clone ID: PAT_MRT3847_90262C.1.pep
KSGTPLFFFFFFFFFFFFFFFFFFFFFFFLWNTGALTAPIVIVHNGYQPSNSMAKIRQRPHAAQVFF

SEQ ID NO: 274909 - protein, 44 aa, Glycine max
  Clone ID: PAT_MRT3847_90263C.1.pep
CVAPATTSDHSQDLMLSGCYLNPGGSFTCTRAYTADFLCLTIKR

SEQ ID NO: 274910 - protein, 52 aa, Glycine max
  Clone ID: PAT_MRT3847_90264C.1.pep
CTHVINYYCCSFSLPSCYFSFIHSQCLLVSCLNLFFNLYYILFINVCTTTSA

SEQ ID NO: 274911 - protein, 109 aa, Glycine max
  Clone ID: PAT_MRT3847_90265C.1.pep
MAEKLQYPCLSSLLTLILCISATSTNPHKSQTQALHLHSLPDPFTLSWPESATVERDPEPNTSLSLHQINALTFNKTASQLIHVRLVRDASKVKSLTHLSASKIKTRTA

SEQ ID NO: 274912 - protein, 393 aa, Glycine max
  Clone ID: PAT_MRT3847_90266C.1.pep
MPGLTAPSDYSQEPPRHSSLLINAKEPFNAEPPRAALVASYVTPSDFFYKRNHGPIPIVENINRYSVNVSGLVERPKQLFMKDIWMLPKYNVTATLQCAGNRRTAMSKTKTVKGVGWDVSAIGNAIWGGAKLSDVLELIGIPKLTSVTEFGGRHVEFVSIDKCKEENGGPYKASIPLSQATNPEADVLLAYEMNGEPLNRDHGYPLRVVVPGVIGARSVKWLEDINIIEEECQGFFMQKDYKMFPPSVNWDNIDWSTRRPQMDFPVQCVICSLEDVSTIKPGKVKISGYAASGGGRGIERVDVSVDGGKTWMEASRIQKSGVPYISEHASSDKWAWVLFEVTADILHSTEIIAKAVDSAANVQPEKVEDIWNLRGILNTSWHRVKVQASYSNL

SEQ ID NO: 274913 - protein, 291 aa, Glycine max
  Clone ID: PAT_MRT3847_90267C.1.pep
NSGSTHASADAWADAWVLVGPAFTIDVPSSPPRDGGSENRIFLNGSPEKDDGSNFRISGPPKFFAGGESESSSSIGTPDDSDNEEEEVQSQLKIRTGLGSLDAMEDSLPIKRGLSGHFDGKSKSFSDLSQVSNLSNLKELQKQESPFNKRRRVLIASKWSRRSSFYSWSNPQSMPLLPVDEDQDYDYEEEEEDEEENARKVPSASSSSSSSLAEEKKQEDQVQLRFNRMPESYAAHMRLRLGSFKARSFLLQICKNMMMRKKVMIIKLTFNIGFYFCFILLLLWLLLNKIK

SEQ ID NO: 274914 - protein, 72 aa, Glycine max
  Clone ID: PAT_MRT3847_90268C.1.pep
ANVQESYWINLSKQKRTLKNQQNEKYRTTYKLEHVFVPNLIHYIRTKKSTRLPSLYNFFYLFGQSQLPLTLY

SEQ ID NO: 274915 - protein, 257 aa, Glycine max
  unsure (1)..(257): unsure at all Xaa locations
  Clone ID: PAT_MRT3847_90269C.1.pep
MEVLVGPAFTIDVPSSPPRHAGSDDRIFLNVSPEEGDGSNFRISGPPKFFAGGESESSSSIGTPDDSDNEEEEEVQSQLKIRTGLGSLDALEESLPINDAXRGLSSHFDGKSKSFSDLSQMSNLSNLKELQKQESPFNKRRRVLIASKWSRRSSFYSWSNPQSMPLLPVDEDQDYDYEEEEEEEDDEEKARKVPSASSSSSSSLAEEKKQEDQVQLRLNRMPESYAAHMRLRLGSFKARSFSLADLQEHDDEEEDDD

SEQ ID NO: 274916 - protein, 50 aa, Glycine max
  Clone ID: PAT_MRT3847_90270C.1.pep
ARGETMSSLFFFRGNASTPLQDFFLKNRYHPLQHREKLPHLRNIGYDHTL

SEQ ID NO: 274917 - protein, 317 aa, Glycine max
  Clone ID: PAT_MRT3847_90271C.1.pep
MREGKEISFPQLKKPDDVDVTIELRDWLFALEDAHFTAERWWFSSHVDEGREERSWHASFHGLRVNAKSGPTDVPGGKGQLRRIKQHPVELITHLQVGIQGLQILKPHLQKDIPSSTPIANGGKGFTNTVGGIGVEVRLILGGENVDDEMVNWEVENLKFSVNPRVGAVVTKDEVQHLTFLCKSEIDSIGRITAGIIRLLKLEGSVGQSVIDQLGHLGSEGIDKIFSSEKYSRDGSVGSRGLSPLPNLTINEESHKTSEQTLTLLEEALVDSQAKLNDLISDIGTSESSSSQHLTVIRLSQKIETMHDLLMQLRNQI

SEQ ID NO: 274918 - protein, 34 aa, Glycine max
  Clone ID: PAT_MRT3847_90272C.1.pep
ETGKNVVPEALNHSETQKRSTAILKDDKQGSSLQ

SEQ ID NO: 274919 - protein, 424 aa, Glycine max
  unsure (1)..(424): unsure at all Xaa locations
  Clone ID: PAT_MRT3847_90273C.1.pep
MACTLADSLLLFKGSYQKPVLRRDIAARYSPGIFSLNSNGLIQKRFRRQRNFVTRNKVTVIHAVAIPVQPAPVESAEYRKQLAEDYGFRQVGEPLPDDVTLKDVINSLPKEVFEIDDVKAWKSVLISVTSYALGLFMISKAPWYLLPLAWVWTGTAITGFFVIGHDCAHRSFSSNKLVEDIVGTLAFMPLIYPYEPWRFKHDRHHAKTNMLREDTAWHPVWKDEFESTPLLRKAIIYGYGPFRCWMSIAHWLMWHFDLKKFRPSEVPRVKISLACVFAFIAIGWPLIIYKTGIMGWIKFWLMPWLGYHFWMSTFTMVHHTAPHIPFKYSEEWNAAQAQLNGTVHCDYPKWIEILCHDINVHIPHHISPRIPSYNLRAAHKSLQENWGQYLNEASWNWRLMKTIMTVCHVYDKEQXLCCLRRTCP

SEQ ID NO: 274920 - protein, 127 aa, Glycine max
  Clone ID: PAT_MRT3847_90274C.1.pep
VIPLKKKKKKKKKKKKKKKKKKGKKKKKKQKKKTRACKKKKKKKKRGGPPFKGPNLSTPGGAGKTLFLRAPKTNSPAPLFTSWGGEKQGGTQINSLGRHPPFWRGGKTQKGPTQPPFQSGSPLKGKW

SEQ ID NO: 274921 - protein, 267 aa, Glycine max
  Clone ID: PAT_MRT3847_90275C.1.pep
HASGGWKFWADSNLKGKFWGRSIQLDPVGVLTLQFEDGETFQWSKVTTSIYNIILGKIYCDHYGTMHIKGSGNYSCKLKFKEQSIIDRNPHQVHGFVQDNRTGEKVAMLIGKWDEAMYYVLGDPTTKPKGYDPMTEAALLWERDNHLPKTRYNLSPFAISLNEILPGLSEKLPPTDSRLRPDQRHLENGEYELANAEKLRLEQLQRQARKMQERGWQPRWFKKEEDGCYRYIGGYWETREKNNWDGIPDIFGQSCDLPSCSEETASY

SEQ ID NO: 274922 - protein, 74 aa, Glycine max
  Clone ID: PAT_MRT3847_90276C.1.pep
ASINNIACARERWQELFLHYLNCNMRMSAVHMHYITSYNAPFITTVISKRPRKDPIHIQILHAYLPCSHSPSLI

SEQ ID NO: 274923 - protein, 93 aa, Glycine max
  Clone ID: PAT_MRT3847_90277C.1.pep
HNRSRDITQIRKLIERPYRFTKFFTPITTNLLMKPYLLRFLKPIYNLYKDALLFERVRINLILVMRIRTIDTTPGTKLDVIATMPDTHSELVR

SEQ ID NO: 274924 - protein, 93 aa, Glycine max
  Clone ID: PAT_MRT3847_90278C.1.pep
MEGRMGLLFLLVLGGAWACDGRELANCNQLSKLSRKPDVCALCEEYTTNALDYLNENKTQLEIIDILHNTCYQLHSFKQKCITFVDYYAPLFF

SEQ ID NO: 274925 - protein, 59 aa, Glycine max
  Clone ID: PAT_MRT3847_90279C.1.pep
FPRGLCMNITLYRLFDRPTQCFLPPLCSGQNIVMLHLVLGNLHMLVVCNNGGRCFPKKK

SEQ ID NO: 274926 - protein, 97 aa, Glycine max
  Clone ID: PAT_MRT3847_9027C.1.pep
AVFVECSYFLHLEKIGTSLITLRLICFLCWKISNSKSGHGSIPCLISSIHEVTQSLGLHKGLKGGAAVCFWSGEQAVKMMNLRDRILLGFIYVHTNL

SEQ ID NO: 274927 - protein, 281 aa, Glycine max
  Clone ID: PAT_MRT3847_90280C.1.pep
MASLSLSSPPSLSSAHHNASTRLILRTPNSLKLRTPPHSLPAIRAITLTQDDLKRLAADKAVESVKSGMVLGLGTGSTAAFVVAKLGALLASGQLSDIVGVPTSKRTEEQARSLGIPLSVLDDNPRLDLAIDGADEVDPDLNLVKGRGGALLREKMVEAASDKFVVVVDDTKLVDGLGGSGLAMPVEVVQFCWKYNLDRLQELFKEEGVEAKLRLEESGKPYVTDNSNYIVDLYFKTPIRDALAAGAEISALEGVVEHGLFLNMATSVIIAGKSGVEVKAK

SEQ ID NO: 274928 - protein, 55 aa, Glycine max
  unsure (1)..(55): unsure at all Xaa locations
  Clone ID: PAT_MRT3847_90281C.1.pep
KNVFHAPAGIFEQKGKNGLXKGLAPSCIKLDPPPGIFFMCFKAFKRILLKNHQEV

SEQ ID NO: 274929 - protein, 51 aa, Glycine max
  Clone ID: PAT_MRT3847_90282C.1.pep
TTKNNSYKTRFDASNYFKFKCNINFSHPLGGSFWGGKEVKPKKHYCQKMRS

SEQ ID NO: 274930 - protein, 55 aa, Glycine max
  Clone ID: PAT_MRT3847_90283C.1.pep
NILFSYHIKMDPMGWHLAFDIWHLALSRQILEIQCTFCLLLIFIALCFIIYRCNG

SEQ ID NO: 274931 - protein, 58 aa, Glycine max
  Clone ID: PAT_MRT3847_90284C.1.pep
PRCSSNIYFPYENNKHFATMTRLLPYNCMICSTYIISWIDVRVWKWLVRRFSCVQRLH

SEQ ID NO: 274932 - protein, 83 aa, Glycine max
  Clone ID: PAT_MRT3847_90285C.1.pep
IHISTTLNDLKSLHHYICQTSTLRNAKVNGLSDTILCPIYIHFESSFSTLKASIKKSNTKCSTKVSCVPYHRRDTYFSQSTYT

SEQ ID NO: 274933 - protein, 40 aa, Glycine max
  Clone ID: PAT_MRT3847_90286C.1.pep
PVFLKKFLFGFLGLREFIVYYLGGFLKLEGITSFGSTDLP

SEQ ID NO: 274934 - protein, 67 aa, Glycine max
  unsure (1)..(67): unsure at all Xaa locations
  Clone ID: PAT_MRT3847_90287C.1.pep
KTSFGTTGRKGIVISYTAFSSQVFCAVNISNTVXEVAPSLXAWTKCTTLNYIPFSHTFSSHLMLMDQ

SEQ ID NO: 274935 - protein, 129 aa, Glycine max
  unsure (1)..(129): unsure at all Xaa locations
  Clone ID: PAT_MRT3847_90288C.1.pep
GGSVVESSHGKKKGMVFPFEPHSITFDEVAYSVDMPQEMKEHGVQEDRLALLKGVSGAFRPGVLTALMGVSGAWXTTLMDVLAGTKTGGYIDGNIKFSGYPXKQETSARISGYCEQNDISSPYVTVYEI

SEQ ID NO: 274936 - protein, 86 aa, Glycine max
  Clone ID: PAT_MRT3847_90289C.1.pep
NSPDKLYFIDYEYASYNYRGYDIGDHFAEYAGFECDYDLYPNMNEQYHFLRHYLKPERPQEVLITVKGLNISYSILFHCLQLVNHL

SEQ ID NO: 274937 - protein, 81 aa, Glycine max
  Clone ID: PAT_MRT3847_9028C.1.pep
NSSYKFRNSKKEKKKKLVFEFKILDSHDYRINPLSLLGGVCHGCLFENKPFYEPCILQEFLSIKYSRAPKKKLEKNSSLTG

SEQ ID NO: 274938 - protein, 46 aa, Glycine max
  Clone ID: PAT_MRT3847_90290C.1.pep
SRKRKIIYLVDGNRKLIKVFYDEEIGDYNSWVPSSWSTHYRNKFFN

SEQ ID NO: 274939 - protein, 174 aa, Glycine max
  unsure (1)..(174): unsure at all Xaa locations
  Clone ID: PAT_MRT3847_90291C.1.pep
NFGSLLALCLITQILTGLFLTIYYTAXIEIXFYRVNYICRNVNYGXLIRTLHANGASFFFICIYLHIGRGIYYESFNLKYTXXVGVIILFLLIATPFIGYVLPXGQISFXGATVITXLLSAIPSLGVKIVXXIXGGFAVXNATLTRFYTFHFLLPFIVLIITIIHLLFLHQTGX

SEQ ID NO: 274940 - protein, 66 aa, Glycine max
  unsure (1)..(66): unsure at all Xaa locations
  Clone ID: PAT_MRT3847_90292C.1.pep
RPNVLLFQPLFFAAKARPEEAXCPLLMGLNYICRYDHQQNVLLGCASSFDFENCMEWPLQCGAFPS

SEQ ID NO: 274941 - protein, 116 aa, Glycine max
  Clone ID: PAT_MRT3847_90293C.1.pep
KAETIHTMFIFLSHGHPHTGLEYNVTLTVGAVWEPPRFLCQTASRKWEVSMLWVKQTISQGIYTKILIIHMLEFSYNNQQVALLKKPFSPDNIPCSELAGATVILAVLTVTAKDDT

SEQ ID NO: 274942 - protein, 56 aa, Glycine max
  Clone ID: PAT_MRT3847_90294C.1.pep
YFLWSSDQKGGVSPNKLFSFSTLDKVIKFFLKIFGLVCKKNPFSFSRGNFFPPLFN

SEQ ID NO: 274943 - protein, 503 aa, Glycine max
  Clone ID: PAT_MRT3847_90295C.1.pep
ITTLDPTHPTATNPLKSQPISPQTHIKLELHSLPLYSLDPRVRSIAFKSFVGLRQSSPEAPHFAAQSRPATPHRKFRVVAGKFSPRLNGRNLRVAVVGGGPAGGAAAETLAKGGVETFLIERKMDNCKPCGGAIPLCMVGEFDLPLDIIDRRVTKMKMISPSNVAVDIGRTLKPHEYIGMVRREVLDAYLRDRAKENGANVINGLFLKMDIPKDNNSPYVLHYSSYDGKTNGAGEKRTLEVDAVIGADGANSRVAKSIDAGDYEYAIAFQERVKIPDDKMVYYENLAEMYVGDDVSPDFYGWVFPKCDHVAVGTGTVTHKGDIKKFQLATRKRAEDKILGGKIIRVEAHPIPEHPRPRRLLGRVALVGDAAGYVTKCSGEGIYFAAKSGRMCAEAIVEGSENGKRMVEEGDLRKYLEKWDKTYWPTYKVLDILQKVFYRSNPAREAFVEMCADEYVQKMTFDSYLYKTVVPGNPLEDLKLAINTIGSLVRANAIRREMNKLNV

SEQ ID NO: 274944 - protein, 61 aa, Glycine max
  Clone ID: PAT_MRT3847_90296C.1.pep
NHNLPNQKPTYHISNFTRYDETTPCILSQTYLCLLPPTTGPLTPSTTDPSTDSTSTPTPTA

SEQ ID NO: 274945 - protein, 48 aa, Glycine max
  Clone ID: PAT_MRT3847_90297C.1.pep
KRGHNHPVTVSLLDIRIYHMSTFLLIRKLPSTCWFVSLPMTLRLICVS

SEQ ID NO: 274946 - protein, 96 aa, Glycine max
  unsure (1)..(96): unsure at all Xaa locations
  Clone ID: PAT_MRT3847_90298C.1.pep
FMGGIQKSATPMRPVDEQILYEAAQDMGEEWIHWVDEEDLFAEDCSWAGLPGVRGLDYVERNAFATYKPXRHVLSLEKGGKGKMTXRSGDGEDMTL

SEQ ID NO: 274947 - protein, 70 aa, Glycine max
  Clone ID: PAT_MRT3847_90299C.1.pep
SHGGVYPCDFAKFELLPKGFFTSSFGTFQREPSCPSWETPCWTALWTKTPSSFTPETLISFIPTFGLQFA

SEQ ID NO: 274948 - protein, 87 aa, Glycine max
  Clone ID: PAT_MRT3847_9029C.1.pep
YHKIQNSISTTTPRGRSKGCLSFVFVPTLSMMWSSTCAIRIPSGKLLKICGSGVWLHLINHSIFYSSKVDRQSLLSSSRSIEPIRLE

SEQ ID NO: 274949 - protein, 49 aa, Glycine max
  Clone ID: PAT_MRT3847_902C.1.pep
IRIANVYLLFLKKYFCIDICRVYFKKFEIIFLFAEENLKLYFTQVLLKK

SEQ ID NO: 274950 - protein, 110 aa, Glycine max
  unsure (1)..(110): unsure at all Xaa locations
  Clone ID: PAT_MRT3847_90300C.1.pep
MADVLPKRRILMRYEKSHGDQETAAYTTTPDHNIQSTAQSMIQALRASEHLXTWVQFYISPYARIXSTLRELTRYFLKKRIIGVREESRVRKRDIENFQVGERMKVIKEM

SEQ ID NO: 274951 - protein, 49 aa, Glycine max
  Clone ID: PAT_MRT3847_90301C.1.pep
PLWKKASNFSPLPHQSLFAPVCTLCYKMVCSLCIATIPKYSLKIKNQNN

SEQ ID NO: 274952 - protein, 64 aa, Glycine max
  unsure (1)..(64): unsure at all Xaa locations
  Clone ID: PAT_MRT3847_90302C.1.pep
MSTKQGRKXXPXKKPQCDKQXFEQVDMXNIPKEKEEENALKQFKTKAQQKGSFGGFGLNKSGKK

SEQ ID NO: 274953 - protein, 91 aa, Glycine max
  Clone ID: PAT_MRT3847_90303C.1.pep
FLLTHGAAYGFIFLSFPSLFFFSSHSFSLIFINTGHMFCKWAGPQGENNFVKMFNGEKRSSIYKFFSPVSFLKQFSRGTAPRKTGDSSKKQ

SEQ ID NO: 274954 - protein, 93 aa, Glycine max
  Clone ID: PAT_MRT3847_90304C.1.pep
FPDSDFDEKSSDLSDSAVAPGTETDGSENSSLTERTTSSDKRSKPIRKTIQVMRKLNRTSSIATTPVKDPLKKSPGIKKSVSIGNLKPPKLWK

SEQ ID NO: 274955 - protein, 49 aa, Glycine max
  Clone ID: PAT_MRT3847_90305C.1.pep
NGNLNGDVFISNNQTCESSKLREDVRVGDLSLIVIHVRMRVIKQLRRDL

SEQ ID NO: 274956 - protein, 105 aa, Glycine max
  Clone ID: PAT_MRT3847_90306C.1.pep
SVGSAQTYLGSPWKEYSSTVYMQSFMNSFINPSGWHEWSGDFALSTLYYAEYNNTGPGSNTANRVTWPGYHVINATDAANFTVSNFLDGDSWLPQTGVPYVTGLI

SEQ ID NO: 274957 - protein, 136 aa, Glycine max
  unsure (1)..(136): unsure at all Xaa locations
  Clone ID: PAT_MRT3847_90307C.1.pep
IASGCPLFFLISPFILYLSYLLLYIYNILFHLNSYTSIXHTTYYTKFTYKDIPNALDIFSNIFHNSKFXNKRLSSIFTLFLYKFNKFICKFIXLIFYHLHSTAFQYTPLFITIIFPSHNIITITINHLQNYIHTHY

SEQ ID NO: 274958 - protein, 55 aa, Glycine max
  Clone ID: PAT_MRT3847_90308C.1.pep
GEKEVMSISVLATTGVICKSRGRVPSVLSPVGIQRVTVRQSVTTELNHAYNRNVK

SEQ ID NO: 274959 - protein, 56 aa, Glycine max
  Clone ID: PAT_MRT3847_90309C.1.pep
AQDGLLYYHNGTSFAVMLSCASGWQVIPDLSRKHACIRDSSEHVETCRGDGSVRVT

SEQ ID NO: 274960 - protein, 80 aa, Glycine max
  Clone ID: PAT_MRT3847_9030C.1.pep
AMEASLTEDKEKASTSASKMLRFLYTSSLSFSFSATTAAAATTPLFFSSFFCGFGLFFFLGLFISEIGQNGSGGLRKERN

SEQ ID NO: 274961 - protein, 59 aa, Glycine max
  Clone ID: PAT_MRT3847_90310C.1.pep
LCSDFLSLFSISCLQQRPSLIVFRCHFTSIKLVSPLCSCFQPFMCFSIIVNFLIHSILY

SEQ ID NO: 274962 - protein, 61 aa, Glycine max
  Clone ID: PAT_MRT3847_90311C.1.pep
KPGLGGQKFLPKMVDKARFLREEVPPPPKKVYGGLGPPPKKGAAPKGANGIFFGSSGFGAP

SEQ ID NO: 274963 - protein, 78 aa, Glycine max
  Clone ID: PAT_MRT3847_90312C.1.pep
HLGCVPYDCPLALSLALITRNTPSHKVLHGLLRRTCSHTQSHALPAIPGSKIQGWIDRVTVERLSSQLRNHIINNNDP

SEQ ID NO: 274964 - protein, 152 aa, Glycine max
  Clone ID: PAT_MRT3847_90313C.1.pep
CLPRHMPCGTPTYGRLTCKPFATTLLLTSPTMFLLHSGTLVRPTRIRLPTVIAPFPLTSTQAHDQNKDRNFLYTVVKYALCKNAGPKFLAVKLSLSLSLSLSLSLSLSPCLVIQRAILTSSSYLLSTPLTQPPPPPKEGGRHTVMTGNLPGT

SEQ ID NO: 274965 - protein, 37 aa, Glycine max
  Clone ID: PAT_MRT3847_90314C.1.pep
GSLPRNKHTIIFSSRSVYSPLVYVNSNILQFYKNHFF

SEQ ID NO: 274966 - protein, 66 aa, Glycine max
  Clone ID: PAT_MRT3847_90315C.1.pep
PLIRGLGYLIETLNFMATVIKKKMIDFQFEKMIHNSRGQNINKDLTTMKGKDHFSFGCCHVCYTFF

SEQ ID NO: 274967 - protein, 65 aa, Glycine max
  Clone ID: PAT_MRT3847_90316C.1.pep
LKILFTRLQILFSNKLIASHNIMASGPKIVHIETRYVETDAIHFRDVVQHLTGKNSSTTNWVGNG

SEQ ID NO: 274968 - protein, 64 aa, Glycine max
  unsure (1)..(64): unsure at all Xaa locations
  Clone ID: PAT_MRT3847_90317C.1.pep
KGFCWLKGKEPKTGRWAMFSKFGFLVQPIVPGKGPLKTLVDXLGDPVNNNAWAYAPKLVPGKWA

SEQ ID NO: 274969 - protein, 37 aa, Glycine max
  Clone ID: PAT_MRT3847_90318C.1.pep
IFLVIYPTAISFFLEEFKILFLHHTNRQQLTVPRAEF

SEQ ID NO: 274970 - protein, 60 aa, Glycine max
  Clone ID: PAT_MRT3847_90319C.1.pep
VEFYNKKVFVQHVETISSSEVTFDIVQSFVDLGSSGASDSKSKIKERKKFFNRDNKQDQL

SEQ ID NO: 274971 - protein, 74 aa, Glycine max
  Clone ID: PAT_MRT3847_9031C.1.pep
EASTHRGVLYNHGGVIHFPDTSLTIPLFFYNPSVFCTCMKHLIKPIIFIPVNIPTTLETWITILYWPYTFMFNS

SEQ ID NO: 274972 - protein, 74 aa, Glycine max
  unsure (1)..(74): unsure at all Xaa locations
  Clone ID: PAT_MRT3847_90320C.1.pep
TSHTSYVSHTLYSKQGGKCNRLKTIKSDNQRYXHVEIAKIQKINEEEKALKELKAKGYQNGNFGRSGLIRSGGK

SEQ ID NO: 274973 - protein, 699 aa, Glycine max
  unsure (1)..(699): unsure at all Xaa locations
  Clone ID: PAT_MRT3847_90321C.1.pep
MATVTQPCPSWTRGSVPLSKRVLPRRRFTTRLTTYPQAALVQAPPPPPPSSPRDSSSSIQLLTLSRANDLQAEARAMARAANATVYNPQLIASMYGSQPIKVVRRTLQILTALGSFGLKLLLNKINGALDKNRRVRAVELKDIFTKLGPTFVKLGQGLSTRPDICPPEYLEELTELQDGLPTFPDEEAFACIERELGLSIDFIFSTISPTAVAAASLGQVYKARLKYSGKLVAVKVQRPDIEEAIGMDFYLIRGLGIFINKYIDIITSDVVALIDEFARRVFQELNYVQVRXQNARRFKKLYADKEDICVPDVFWDYTSAKVLTMEWVDGVKLNEQEAIERQGLKVLDLVNAGIQCSLRQLLEYGYFHADPHPGNLLATPEGKLAFLDFGMMSETPEEARYAIIGHVVHLVNRDYEAMARDYYDLNFLSRDVDVSPIVPALRNFFDDALNYTVSELNFKTLVDGLGNVLYQFPFNVPAYYALILRSLTVLEGLALYADPNFKVLAASYPYFAKRLLTDPNPYLRDALIELLFQDGRFRWGRLENLLAQGRMDRDFSAKEALQPVLKVLLSPDGEEIRTLVIKEAVRVTEAFTLSTISDTYKSVPDFMRVLVFNGNANGPIITSETEMQNLIELRDQVIRIWELLRSSNDYDPDLLLPILQVLQQPEARRLGERVMGGITQRLAARFLQQVLRVPMPASS

SEQ ID NO: 274974 - protein, 77 aa, Glycine max
  Clone ID: PAT_MRT3847_90322C.1.pep
WVLSHMWTESLISRCIRRSQLGVRLLSWELSHQLLVRDREHSSQPLLVQLTSQSSMWIPEKKQFCRQTLQPILFIWA

SEQ ID NO: 274975 - protein, 177 aa, Glycine max
  Clone ID: PAT_MRT3847_90323C.1.pep
MAITTNPLVVGRVIGDVLEPFASSIPLRVVYNNNKEVINSGELKPSQIINPPRVEVGGDDLRTLYTLVMVDPDAPSPSDPNMREYLHWLVTNIPATTSASFGQEVVSYESPRPTSGIHRFIFVLFRQPRRMSIPAPGWRQNFITRDFAEYYNLGLPVAAVYFNCQRQGGSGGRRLML

SEQ ID NO: 274976 - protein, 167 aa, Glycine max
  unsure (1)..(167): unsure at all Xaa locations
  Clone ID: PAT_MRT3847_90324C.1.pep
LNAYPYYGYTKGDGIFPIEYALFRPLSPVKQIVDPNTLFHYNSMFEAMVDATYYAIEAFNFNNIPIVVTETGWPSFGGANEPDPTTKNSETYNNNLIKRVINGSSPPSQXPKIAINTYLYELFNEDKRKGPISEKELGCFFYANGSRVYSLSFSASNMSNANSQGSF

SEQ ID NO: 274977 - protein, 46 aa, Glycine max
  Clone ID: PAT_MRT3847_90325C.1.pep
MKSTGTTGNPASFSGVQRESRLVVQHSGHPRNYFHGTNSPKCRLLV

SEQ ID NO: 274978 - protein, 52 aa, Glycine max
  Clone ID: PAT_MRT3847_90326C.1.pep
DAMMRGSAVQLHDLDNEIVYTSEGSQVRQYRVDIGVLWAMAVLGQQERGPCS

SEQ ID NO: 274979 - protein, 43 aa, Glycine max
  Clone ID: PAT_MRT3847_90327C.1.pep
STRNGKGFFNAIWSVKKPLFYAIHEEELPVTAQTENEILRLTS

SEQ ID NO: 274980 - protein, 66 aa, Glycine max
  Clone ID: PAT_MRT3847_90328C.1.pep
FQPPTIRLSSCLSNLLTSPTPLNLTKPFLLPCLFQFLAMKTSRTSPHFLNSYHKSFSFISSRNLVK

SEQ ID NO: 274981 - protein, 71 aa, Glycine max
  unsure (1)..(71): unsure at all Xaa locations
  Clone ID: PAT_MRT3847_90329C.1.pep
LAYHDNYHEFCRLLGRFRVNYQSSELVNVGRYASWIRLVAEFTLKSLQSWQWASNSVYYLVXLWSRLVSSV

SEQ ID NO: 274982 - protein, 57 aa, Glycine max
  Clone ID: PAT_MRT3847_9032C.1.pep
DIEIELGCYREIQMVISVHFDVRFRRIRYRDARNRATEALWKFKWSYLLTQRCDSCA

SEQ ID NO: 274983 - protein, 208 aa, Glycine max
  unsure (1)..(208): unsure at all Xaa locations
  Clone ID: PAT_MRT3847_90330C.1.pep
TRPERVSCSAATTGSGVGSNGAVSRALQGLSNNSNTALEQLDIERGVCIPFRKYSPEXDEEVVPYRARQLRNLLCDLGPSFIKAGQVLANRPDIIREDYMNELCILQDDVPSFPNQIAFRIIEXRIWVNPXEAVFSKISSGTIAAASLGQVYRATLRATGEXDVAXKVQRPGIEPIILPRSFSYSALWASFLNGIXVYQNWGCNAELI

SEQ ID NO: 274984 - protein, 91 aa, Glycine max
  Clone ID: PAT_MRT3847_90331C.1.pep
LLFFCSQSLSPVYLNTGYTLTHNERNCESSTSIYAELYILIFIIDHITSSSSSLIVNAIINKTYYCWILGFVFTSPVHRVPGTHILRLPHA

SEQ ID NO: 274985 - protein, 596 aa, Glycine max
  Clone ID: PAT_MRT3847_90332C.1.pep
FLLWKQFGRTLLEKDCHILIFVVSQESVPSWFTIIPFESQKGFHLYRVLFSPVIASVFPPFLASNFVSKFWALMFMILGLASFLIIPARGYFFAVAGCKLIQRIRQMCFEKVVNMEVSWFDEPENSSGAIGARLSADAASVRALVGDALGLLVQNFATVLAGLIIAFVASWQLALIILVLIPLIGVNGYVQMKFMKGFSADAKMMYEEASQVANDAVGSIRTVASFCAEDKVMELYKNKCEGPMKTGIRQGLISGSGFGVSFFLLFCVYATSFYAGARLVDAGKATFSDVFRVFFALTMAAIGVSQSSSFAPDSSKAKSATASIFGIIDKKSKIDPGDESGSTLDSVKGEIELRHVSFKYPSRPDIQIFRDLSLTIHSGKTVALVGESGSGKSTVIALLQRFYNPDSGQITLDGIEIRELQLKWLRQQMGLVSQEPVLFNETIRANIAYGKGGDATEAEIIAAAEMANAHKFISGLQQGYDTIVGERGTQLSGGQKQRVAIARAIIKSPKILLLDEATSALDAESERVVQDALDKVMVNRTTVVVAHRLSTIKNADVIAVVKNGVIVEKGKHEKLINISGGFYASLVQLHTSASTV

SEQ ID NO: 274986 - protein, 65 aa, Glycine max
  Clone ID: PAT_MRT3847_90333C.1.pep
TKSLAYTKTCLGCWDGCIFIFSFSPRTGKKRTIGILKIESKDQKHPSQVSTWVVQLLNFNYRIKE

SEQ ID NO: 274987 - protein, 51 aa, Glycine max
  Clone ID: PAT_MRT3847_90334C.1.pep
NTRMFWELNKAPNVILTFKSPYYFNNVHPQIKLGISNRCPPKWLCYIYPLS

SEQ ID NO: 274988 - protein, 58 aa, Glycine max
  Clone ID: PAT_MRT3847_90335C.1.pep
HMAMKGNEGVQEREKFIHSLAWVSSNNRRVSNPEKKIKPPSFPSFLSVKFYIKLHDMA

SEQ ID NO: 274989 - protein, 117 aa, Glycine max
  Clone ID: PAT_MRT3847_90336C.1.pep
SPQPIALNVKNIKKVAYPLFKEKVQCFINFTCLSKTLFQGHNGTAPIHIYLMTGQNKNRLPSKRHLLASANIFMDHLFLLKSTLAKTATISYTDQHQPVGPPIPCLNKGLGYHYIFI

SEQ ID NO: 274990 - protein, 41 aa, Glycine max
  Clone ID: PAT_MRT3847_90337C.1.pep
IGWHLAISYNIKDCSKTMTTTTSSTSKIFIFFPLKFLTIDN

SEQ ID NO: 274991 - protein, 71 aa, Glycine max
  Clone ID: PAT_MRT3847_90338C.1.pep
FQFFFLSNQIKETTSDIVIHVFFPSSIFSSKRTIKFSTSPMIQGPCEPGSEELLASAQYLVLNRTDDWLPI

SEQ ID NO: 274992 - protein, 34 aa, Glycine max
  Clone ID: PAT_MRT3847_90339C.1.pep
PVPFWPSQSNALTKESGVCNCTCVVFCSALRNQP

SEQ ID NO: 274993 - protein, 167 aa, Glycine max
  Clone ID: PAT_MRT3847_9033C.1.pep
PASVLPQNFRRIAPTILLDARRDSLIMGEEIFGPLLPIITVNKLEESIDLINSGTKPLAAYVFTTNNKFKEQFVMNVSAGGLLVNDTVLHLVVDTLPFGGVGESGMGAYHGKFSFDAFTHKKAVLYRSFAGDSAIRYPPYTDTKLRLMKALVGGRILGIIRALFGWS

SEQ ID NO: 274994 - protein, 57 aa, Glycine max
  Clone ID: PAT_MRT3847_90340C.1.pep
KHSNARDGEESALSLSLSQINGKVEMAPTICLTHNWRLRMLPLSMIYQSLCVPVRGE

SEQ ID NO: 274995 - protein, 73 aa, Glycine max
  Clone ID: PAT_MRT3847_90341C.1.pep
YFGICLASGEVPPARLIDQAQHVRNPSMCQRHRIVSIGAHSRSRMVSCHHQVLGLILINRLWKVRVHELVIKL

SEQ ID NO: 274996 - protein, 69 aa, Glycine max
  Clone ID: PAT_MRT3847_90342C.1.pep
CGVELLTRIFKVVEALGPFPNFFLGPPIQVRAELWAASLGGFTMNDFFVAAKINWIKPSVFVPRKRVWG

SEQ ID NO: 274997 - protein, 51 aa, Glycine max
  Clone ID: PAT_MRT3847_90343C.1.pep
PLSKTCETTYTTIEPNLTLLRYTLNNTSPPFYSIHHSKTHLSHVFNNNNYS

SEQ ID NO: 274998 - protein, 176 aa, Glycine max
  Clone ID: PAT_MRT3847_90344C.1.pep
TRPQNSPSPSLLFLASLTPGVLSKLLDNAGSKVTAPHRQALLQVTEIVPRLSSTSPLQSRGYFLKLSDSLHSAYVSVPDADADLISAGKLNLGQFVYVTRLDAASPVPLVRGLNPLPKRRPCVGNPIELVPSERLRVTTTTTKKKKKKVEVFKRGKGSPEWKKEKGLERERSFGFF

SEQ ID NO: 274999 - protein, 86 aa, Glycine max
  Clone ID: PAT_MRT3847_90345C.1.pep
CMCVCVCEREEGLTYTKSTLWELLLILTIHFLMFVSHAWRAPVNLLLISRARTCVIYLDIDYSFVLSVQIKEDQNGQIKNRTKNKI

SEQ ID NO: 275000 - protein, 165 aa, Glycine max
  unsure (1)..(165): unsure at all Xaa locations
  Clone ID: PAT_MRT3847_90346C.1.pep
RTSSXAPPGCNQGTHISLQKLPFSIPLCLCGSYYRXYWCIHGRYGLNNYTPRSTNRSVSCNFIKFWYPQIFRPSGGWLPSRKIHFLVFIRCGRRALTTRTIYTSCCRCLSGCFSHLRGRTWQVPLYIFNVDGISPLLYTPGWRIGLLMFPTPTGWSTLILSYNTW

SEQ ID NO: 275001 - protein, 74 aa, Glycine max
  Clone ID: PAT_MRT3847_90347C.1.pep
RLPRPKKISKGPFCLQGSLKGPPLESPTGMFLPGELFPPFKGGGKQPCQVKIFFFKGCVFPSVKNFLGPGGDPF

SEQ ID NO: 275002 - protein, 73 aa, Glycine max
  Clone ID: PAT_MRT3847_90348C.1.pep
NKEWVGFIVYLLFGENFRKCGSRLNREHIIGRQKDQNEYVILLTGHLNKGKIEIKIEISKKLLNVKTGKKKRT

SEQ ID NO: 275003 - protein, 587 aa, Glycine max
  unsure (1)..(587): unsure at all Xaa locations
  Clone ID: PAT_MRT3847_90349C.1.pep
MADEPLYPIAVLIDELKNDDIQLRLNSIRRLSTIARALGEERTRRELIPFLSENNDDDDEVLLAMAEELGVFIPYVGGVEHASVLLPPLETLCTVEETCVRDKAVESLCRIGSQMRESDLVEYYIPLVKRLAAGEWFTARVSACGLFHIAYPSAPETSKTELRSIYSQLCQDDMPMVRRSAASNLGKFAATVEYAHLKADVMSIFDDLTQDDQDSVRLLAVEGCAALGKLLEPQDCVAHILPVIVNFSQDKSWRVRYMVANQLYELCEAVGPEPTRTELVPAYVRLLRDNEAEVRIAAAGKVTKFCRILNPDLAIQHILPCVKELSSDSSQHVRSALASVIMGMAPVLGKEATIEQLLPIFLSLLKDEFPDVRLNIISKLDQVNQVIGIDLLSQSLLPAIVELAEDRHWRVRLAIIEYIPLLASQLGVXFFDDKLGALXCMDMVHSIRVASTSNLTRLAEELGXSELCRAWTPQHIIPQVLEMNNNPHYLYRMTILRAISLLAPVMGPEITCSNLLPVVLAASKDRVPNIKFNVAKVLESIFPIVDQSVVEKTIRPCLVELSEDPDVDVRFFSNQALQAIDHVMMSC

SEQ ID NO: 275004 - protein, 86 aa, Glycine max
  Clone ID: PAT_MRT3847_9034C.1.pep
MCILLFLVQLVVDTLPFGGVGESGMGAYHGKFSFDAFTHKKAVLYRSFAGDSAIRYPPYTDTKLRLMKALVGGRILGIIRALFGWS

SEQ ID NO: 275005 - protein, 287 aa, Glycine max
  Clone ID: PAT_MRT3847_90350C.1.pep
LRYRSAHSRIDPRVRPRVRPRVRPRVRSSDSSQHVRSALASVIMGMAPVLGKEATIEQLLPIFLSLLKDEFPDVRLNIISKLDQVNQVIGIDLLSQSLLPAIVELAEDRHWRVRLAIIEYIPLLASQLGVGFFYDKLGALCMQWLQDKVHSIREAAANNLKRLAEEFGPEWAMQHIIPQVLEMNNNPHYLYRMTILRAISLLAPVMGPEITCSNLLPVVVAASKDRVPNIKFNVAKVLESIFPIVDQSVVEKTIRPCLVELSEDPDVDVRFFSNQALQAIDHVMMSS

SEQ ID NO: 275006 - protein, 115 aa, Glycine max
  Clone ID: PAT_MRT3847_90351C.1.pep
MDWCQDVMIEEMKTLKRLHRLQTTNANLPTEKVLSKIRNYLQLLGRRINQIVLEHEEEPYKQDRMTTRLWKYVSTFSHLSGERLCQIYSKLKVEQNVAGVGPSHANGSISDPFST

SEQ ID NO: 275007 - protein, 50 aa, Glycine max
  Clone ID: PAT_MRT3847_90352C.1.pep
LGHLCTLTNCLSWCQILCSCFILSTSDFPLVTDNFYFKFHLVFDRQFVLG

SEQ ID NO: 275008 - protein, 57 aa, Glycine max
  unsure (1)..(57): unsure at all Xaa locations
  Clone ID: PAT_MRT3847_90353C.1.pep
PKAKVRYIANQKANYHAKGGSPGKLEEAAPRVNDPLVGGGWWFVVPFCRLLATVRTX

SEQ ID NO: 275009 - protein, 99 aa, Glycine max
  Clone ID: PAT_MRT3847_90354C.1.pep
GGGKMTRQYIFFIKNPGWAFFLGQGKKDPAENHTHFFLIKGPTLVYNSRKQGIFPHIWAKGKKNFLLFCFWKKFWHHFFQPRGGANKKLFYIGFLKNFS

SEQ ID NO: 275010 - protein, 129 aa, Glycine max
  Clone ID: PAT_MRT3847_90355C.1.pep
GLPCTTTLVVCPISPFPRVYIFTISIYLSGSISTFWLNCDATHRMTSFLSKRRVLLKNLFFPTLTRAQGIFTVTYAMCANLHLEPRTIFSLFGSQRNFSKLGGWHPHCSDVYMSWRHLSDHYDYTHHAT

SEQ ID NO: 275011 - protein, 44 aa, Glycine max
  Clone ID: PAT_MRT3847_90356C.1.pep
APAPPPGTNNEPWCQRLEGWATKTAEHYKQGARDAKWTTAASIP

SEQ ID NO: 275012 - protein, 27 aa, Glycine max
  Clone ID: PAT_MRT3847_90357C.1.pep
GPCFLGEEPNFVCCNLSFQFPSKIGYC

SEQ ID NO: 275013 - protein, 60 aa, Glycine max
  Clone ID: PAT_MRT3847_90358C.1.pep
YNKLNNNSIIIITNFRHIIHYVFNFVYFSIFEYLYVCDINYVYCFLNFTIAATLLSANPL

SEQ ID NO: 275014 - protein, 174 aa, Glycine max
  unsure (1)..(174): unsure at all Xaa locations
  Clone ID: PAT_MRT3847_90359C.1.pep
MCESKSEQMHDTEKQTELGGLLTRRGSTRTIMWDVIGEAKSLWEVAFPTALTGLIFYARSMVSMLFLGHLGDTELAAGSLAIAFANITGYSVLSGLSLCMEPLWSQAFGAKRPKLLSLTLHRXVIFLLFSSIPIFLLRLNMSKIFILLNQHTHMTQMAQTYLLFLLPNLLINSF

SEQ ID NO: 275015 - protein, 269 aa, Glycine max
  Clone ID: PAT_MRT3847_9035C.1.pep
GIIKNPSTVLQSDSGEQLQGAEGYNCNVATKSYRPSDDRTLPLRGFQRAMVKSMSLAAKVPHYHYVDEINCDALVELKTSFQKNNPYPDVKYTFLPILIKSLSMALSKYPFMNSCFKEDALEVILKGSHNVGIAMATSHGLVVPNIKNVQSLSIMEITKELARLQQLASNNKLTSEDICGGTITLSNIGAIGGKFGSPLINLPEVSIIAVGRIQKVPRFADNGNVYPASLVNVNIGADHRVLDGATVARFCNEWKQLIENPELLTLHLK

SEQ ID NO: 275016 - protein, 187 aa, Glycine max
  Clone ID: PAT_MRT3847_90360C.1.pep
EQNELSLLEILQPLTPQIAEDVEDMPAIEHMTVHGALASEGHRASVGEVKDTVDAAFRCANSRPMFCHLSVALSPLPIPVPFPSIFGNNVGQHGELMSGQITNSSPKGSLDIHSIPMAARLRSSSIVLPLLESKLRNLHQFGIQRGAAGAELLRSWGFGQEELVEMEEMLSKMVAALHPPQLSSDSD

SEQ ID NO: 275017 - protein, 123 aa, Glycine max
  Clone ID: PAT_MRT3847_90361C.1.pep
RKVMTSSVKSSEEYKEVSHDFELEEEEELFEIDLEAVNCIPPPHFLESCYYTSTGNIALLANCLLPISDVSKAIPAVSFEERTNVVLITEPTSLGEYLMLPFLGTLGVIHEKMEAQFHFQFQR

SEQ ID NO: 275018 - protein, 236 aa, Glycine max
  unsure (1)..(236): unsure at all Xaa locations
  Clone ID: PAT_MRT3847_90362C.1.pep
MKLLGWMHRKFRQNSAEVPFKDLIIGGGNSCDEEHNNYPKASFGNYKHVKQQSHLQKEVRKSLDHDEYEEDSAGAMYELFHGFLAIGTLGSEASTTPTFAISVENITEKEDEVTENELKLINDELEKVLVLGADHDESSSISCGRSSHGSIITLSGGGGKPAAATLLEDQSNGNAVCPLQGYLFGSAIELSETTXTVAKKEHRTSLGGAVPENQTQIRRTNTDHQRIKQINLPCIS

SEQ ID NO: 275019 - protein, 83 aa, Glycine max
  Clone ID: PAT_MRT3847_90363C.1.pep
VEYEILENFIDNVELSREETAQAAFDANRLAKVRNKKISCGDRNRVVLRELPRVKLTEMSNNESVLRGMTCYGRHQLPGRFDR

SEQ ID NO: 275020 - protein, 43 aa, Glycine max
  Clone ID: PAT_MRT3847_90364C.1.pep
WLFMDNSPWITTSLDFIINRHRVHEKLPKKQVLNNFYSLDWEV

SEQ ID NO: 275021 - protein, 80 aa, Glycine max
  Clone ID: PAT_MRT3847_90365C.1.pep
FWLAPTNFEGILRRFVNEFAICLACTSSDTILSKENRLFFLLCEKRGSGGSSAPIKAGLGAHVGHKITRTLDYFRFMLFG

SEQ ID NO: 275022 - protein, 84 aa, Glycine max
  unsure (1)..(84): unsure at all Xaa locations
  Clone ID: PAT_MRT3847_90366C.1.pep
SRLRNLKKDXDGYCKWFAGNLASGGAAGAFFLLFDYSLDYARTHVAYDAKAAKKGVERQFNGLLACIRKTIKSDRIVGLYRAST

SEQ ID NO: 275023 - protein, 80 aa, Glycine max
  Clone ID: PAT_MRT3847_90367C.1.pep
SGFGSRLSAPAASWLASVGRWHASCSHLQIGELCLLPSALLRRGGVRGPLGLIILSLWRSSYHCFPYCSSSLMVLLLLGV

SEQ ID NO: 275024 - protein, 35 aa, Glycine max
  Clone ID: PAT_MRT3847_90368C.1.pep
FPALDNLPTYIFKVQDSMNMCIHINARYYCLIINT

SEQ ID NO: 275025 - protein, 70 aa, Glycine max
  Clone ID: PAT_MRT3847_90369C.1.pep
TYESCMLLIPNTRIASMSSLCGECRNINVFMEIHLQLHLKLQISHRHHRRVHRHCHLQTLHRIRWRWRSI

SEQ ID NO: 275026 - protein, 488 aa, Glycine max
  Clone ID: PAT_MRT3847_9036C.1.pep
MSGEETQRNVFGAETASSLVKELRDNFGKGTTRSYEWRVSQVKALLKAVVENEDQIVGALCSDLAKPPLETVVYEIGMFKNSCEVILKELKHWMTPEKVKTSIRTFPSSAEIVPEPLGVVLVISAWNYPILLSLDPVVGAIAAGNAVVLKPSEIAPASSSLLLKLIEKYMDNSFIRVVEGAVDETTALLQQKWDKIFYTGNGKVGRIVMTAAAKHLTPVVLELGGKSPVVVDSNVDLQIAARRIISGKWGLNNGQACISPDYVITTKDYAPKLVDALKTELESFYGRNPLESEDLSRIVSSNHFARLSKLLNDDKVSGKIVYGGEKDEKKLRIAPTILLDVPQDSSIMGEEIFGPLLPIITVNKLEESIDVINSGAKPLAAYVFTTDNKFKEQFVKNVSAGGLLVNDTALHLVVDTLPFGGVGESGMGAYHGKFSFDAFTHKKAVLYRSFAGDSAIRYPPYTDTKLRLMKALVGGRILGIIRALFGWS

SEQ ID NO: 275027 - protein, 54 aa, Glycine max
  Clone ID: PAT_MRT3847_90370C.1.pep
FNVLNSQCQVEKHYYSTFHSGLHARDFVSIIHTLPLYRGMRLTEITNILLFKIM

SEQ ID NO: 275028 - protein, 44 aa, Glycine max
  unsure (1)..(44): unsure at all Xaa locations
  Clone ID: PAT_MRT3847_90371C.1.pep
FEGNFFLDIESYSKLAKVYCTIAQFVSGQNFQSXIIGASSHFSR

SEQ ID NO: 275029 - protein, 86 aa, Glycine max
  Clone ID: PAT_MRT3847_90372C.1.pep
PPLRMPFHFCRNLRKCIGYEGCHGGTKSRTRQLGEGLILLTYGKDEAGWQLAWSGGTDCPAGPPGPQPGASNIPLMGGAGRGKATA

SEQ ID NO: 275030 - protein, 161 aa, Glycine max
  unsure (1)..(161): unsure at all Xaa locations
  Clone ID: PAT_MRT3847_90373C.1.pep
MSNIHTATGSMKRLSSYLHSLSQTPHRLRKRMLATWTPEQEFNQVRHRSGADMKRKLKWHDLVALGVGGMLGVGVFVTTGSVALHHSGPSVFISYIIAGISALLSSLCYTEFAVQVPVAGGAFSYLRLTFGEFLGYFAGANILMEYVFSNXAVARSFTEYL

SEQ ID NO: 275031 - protein, 133 aa, Glycine max
  Clone ID: PAT_MRT3847_90374C.1.pep
HEKAQIKCNNQKRQFGSWGVQQEGSNEFVSALAAGMKAKLIVEVASRASPSTIALAAAARQTGGRLVSILPVPVLDESQEVIKNSGLKDQVEFRTEDPSKILPYCENIDFSLVDCKDENYARLFNLLDVNPTR

SEQ ID NO: 275032 - protein, 35 aa, Glycine max
  Clone ID: PAT_MRT3847_90375C.1.pep
IGGCNQVQAYGKCESYCHEHYIRKVIYVFKKRKKK

SEQ ID NO: 275033 - protein, 82 aa, Glycine max
  Clone ID: PAT_MRT3847_90376C.1.pep
LRWARSRSPESEDAGFGWGVGGSERKGGRLAVVVIFWAKKLLPKRKLLLLCVARRKVAALHRKRPQWGEVACAADIPSQTLT

SEQ ID NO: 275034 - protein, 114 aa, Glycine max
  unsure (1)..(114): unsure at all Xaa locations
  Clone ID: PAT_MRT3847_90377C.1.pep
MFQYSAGDMEFKQNRFLSAEKQMVTANPDINTVELCDEDEFIVLACDGIWDCLSSQQLVDFVRQQLLLESXLSAACERVLDRCLAPTITVGDGCDNMTMILVQFKKLAQTSAPA

SEQ ID NO: 275035 - protein, 359 aa, Glycine max
  unsure (1)..(359): unsure at all Xaa locations
  Clone ID: PAT_MRT3847_90378C.1.pep
MIIWVFLDYGVYYLLSIMGTNLSTPKTEKSSDDGENEHLRYGLSSMQGWRATMEDAHAAHLDLDASTSFFGVYDGHGGKVVAKFCAKYLHQQVLKNEAYIAGDIGTSLKESFFRMDDMMRGQRGWRELAVLGDKIDKFNGKIEGLIWSPRSRHSKEQDDTWAFEEGPHSNFAGPTSGSTACVAIIRNNKLFVAXNAGDSTVVXVCREGSKRMDLSIDHKPDLEIEKERIVKAGGFIHAGRVNGSLSLARAIGDMEFKQNRFLSAEKQMVTANPDINTVELCDEDEFIVLACDGIWDCLSSQQLVDFVRQQLLLETKLSAVCERVLDQCLAPTITVGDGCDNMTMILVQFKKLAQSSAPA

SEQ ID NO: 275036 - protein, 76 aa, Glycine max
  Clone ID: PAT_MRT3847_90379C.1.pep
MPDCMKQYLGRIQSPHGEDIVAACMLMTTVDEMIVHSKAKVHIDAYYEVLRSLSKNMNESPTLMFMLKDVIDLRKN

SEQ ID NO: 275037 - protein, 90 aa, Glycine max
  Clone ID: PAT_MRT3847_9037C.1.pep
MSNLLRHSLSKFTFSPNGTPTGREKVTPKHKHLRPFQCVLTQDNRSIAVKNGNDSLVICRVVNGMWQTSGGWGRIDRDDAVDAMLKYADA

SEQ ID NO: 275038 - protein, 39 aa, Glycine max
  unsure (1)..(39): unsure at all Xaa locations
  Clone ID: PAT_MRT3847_90380C.1.pep
LXSPDFVSSXXFXXXPXPIXITQLXXIGXPGPISRSXHG

SEQ ID NO: 275039 - protein, 105 aa, Glycine max
  unsure (1)..(105): unsure at all Xaa locations
  Clone ID: PAT_MRT3847_90381C.1.pep
SSCLHSPEEARRRKXKALCRIECLKKADVLPIAQMEKFHSWQRMLNAPDXNDNFDLLLSIDWLGFQGAGKVFPIRYVFDDXLVLANTQECVGGNFPDGFFGYQIL

SEQ ID NO: 275040 - protein, 69 aa, Glycine max
  Clone ID: PAT_MRT3847_90382C.1.pep
ANTNLKKLLNRIENIHYSTACMQKFKGPSIEFLPQILNCINNTSPHSVLGDSMAYHIWQMTDKQTNKKR

SEQ ID NO: 275041 - protein, 51 aa, Glycine max
  Clone ID: PAT_MRT3847_90383C.1.pep
LRKRLGKEPLSLGRPYAPNVKTKLWSLTKRDYHTQWTILASIVTGGITFIP

SEQ ID NO: 275042 - protein, 136 aa, Glycine max
  unsure (1)..(136): unsure at all Xaa locations
  Clone ID: PAT_MRT3847_90384C.1.pep
DSYGDINCDTGWTAARTDDVQDAVEGTIDWQECVHRSYCVTYPQKTSEKNRGMEKLTVQQGTSQGANRMAICMGGGVGAGTAALMAMLKAVLSAGRXMGGDLVGDVAKMTSTYTKCSVYCSIAFGIAADDTIDDAV

SEQ ID NO: 275043 - protein, 77 aa, Glycine max
  Clone ID: PAT_MRT3847_90385C.1.pep
LELRPCYHFLIYFSQRNKNTGSRGDTASIVKYQRTTFLSSLLCRRLRYAIVPTYPYANPTAQDKSPELLETTIADAF

SEQ ID NO: 275044 - protein, 40 aa, Glycine max
  Clone ID: PAT_MRT3847_90386C.1.pep
ALDFFILFFLLKCSHSIRNPHFQDYAFCLFWLAHDTYQSH

SEQ ID NO: 275045 - protein, 75 aa, Glycine max
  Clone ID: PAT_MRT3847_90387C.1.pep
IVKEEWTNEVFDLELMRDAPAIGDELLNTLKLALHCVDPSPAARPEVQQVLQQLEEIKPDLAAGDDDGAKVQTTE

SEQ ID NO: 275046 - protein, 372 aa, Glycine max
  Clone ID: PAT_MRT3847_90388C.1.pep
GSRVAGILLLILLVLCCFLLCCLIRRRAASSRKSSKTAKAAASARGVEKGASAGGEVESGGEAGGKLVHFDGPFVFTADDLLCATAEIMGKSAFGTAYKATLEDGNQVAVKRLREKTTKGQKEFETEVAALGKIRHPNLLALRAYYLGPKGEKLLVFDYMTKGSLASFLHARGPEIVIEWPTRMKIAIGVTRGLSYLHNQENIVHGNLTSSNILLDEQTEAHITDFGLSRLMTTSANTNIIATAGSLGYNAPELSKTKKPSTKTDVYSLGVIMLELLTGKPPGEPTNGMDLPQWVASIVKEEWTNEVFDLELMRDAPAIGDELLNTLKLALHCVDPSPAARPEVHQVLQQLEEIKPDLASGDDDGAKAQETE

SEQ ID NO: 275047 - protein, 71 aa, Glycine max
  Clone ID: PAT_MRT3847_90389C.1.pep
RRFSKTVLIGIIRRISSRTNTLWHSIFLSLSYNTEPKSYLTAPLLVYISPAIKNELNSGYVSLLQSPCIEP

SEQ ID NO: 275048 - protein, 37 aa, Glycine max
  Clone ID: PAT_MRT3847_9038C.1.pep
VSFFCLFVELGLSELKSVLNPFIVNFIIHNKLNLYDP

SEQ ID NO: 275049 - protein, 108 aa, Glycine max
  unsure (1)..(108): unsure at all Xaa locations
  Clone ID: PAT_MRT3847_90390C.1.pep
QEEQRTAGPTQARPATTQKADGRPYKKAMVHDSSASTIPGDYVIGVKLATINNMCAYGLNPGISGSRLXGTIPQAIXSQQTVSESMATVRTPVNWDPSKQSLWQFSID

SEQ ID NO: 275050 - protein, 110 aa, Glycine max
  Clone ID: PAT_MRT3847_90391C.1.pep
FNESSLTTSSSPMTFVYMAHQNPYGIRRAAFASAQLSGVVADGASSGPGYECSALASSSHGASTMSAMRESESTSLGSLTLPSGNAALDVVRLQGNVASKRFVDVLIGGG

SEQ ID NO: 275051 - protein, 117 aa, Glycine max
  unsure (1)..(117): unsure at all Xaa locations
  Clone ID: PAT_MRT3847_90392C.1.pep
GLLCWDREKKLQNIWCAKLLSCNSNNGTGQSHPERTXFSGGVHDVPIMSGESNYVRMQDVPIEYDARAITKNCRSVFEAKVGKYIKLVAIHADGDNEQLAYGSLLPYDQPDRLAEHA

SEQ ID NO: 275052 - protein, 62 aa, Glycine max
  unsure (1)..(62): unsure at all Xaa locations
  Clone ID: PAT_MRT3847_90393C.1.pep
FCPSKECPWEKKHHCPKSQKKGSYFXKTKPCVVMGPPPWAQENFAMFGKEKKFGTAHWVCHF

SEQ ID NO: 275053 - protein, 86 aa, Glycine max
  Clone ID: PAT_MRT3847_90394C.1.pep
LFALEEAGSVPTRAELYKLDPVPQLQAAAMASDSNQSENRGVYGKMREAPQRAGSGRDMGLWVRSGGNGPGEAVLVSKRESPGMAI

SEQ ID NO: 275054 - protein, 46 aa, Glycine max
  Clone ID: PAT_MRT3847_90395C.1.pep
KHTGRPTLFHLAHINDAIVVNNPFVISITHQPFMNDYHKGTPLSTS

SEQ ID NO: 275055 - protein, 57 aa, Glycine max
  Clone ID: PAT_MRT3847_90396C.1.pep
SRVLGAVPMFLKNLSLSLCLLNGLLVYWKEYIEQALCQVNFWYLHLWWNEELCCSFI

SEQ ID NO: 275056 - protein, 65 aa, Glycine max
  Clone ID: PAT_MRT3847_90397C.1.pep
GLQKRRTALSTIAGRRKAHGLALALVEELPCLRRTISATDINDQIDLLGHIEFFGQQSASKALPH

SEQ ID NO: 275057 - protein, 132 aa, Glycine max
  unsure (1)..(132): unsure at all Xaa locations
  Clone ID: PAT_MRT3847_90398C.1.pep
MLSLTKVREACTKIVQRISPKTTHGALGDIDHGQTLIYNMRVKAGRGLSLEELRAAGIPKKLAPTIGIAVDHRRENRSLECLLADVRRLKTCDAVLGVYPRRSQXAKACDSTPEERATAMLAPGATLPMVGE

SEQ ID NO: 275058 - protein, 92 aa, Glycine max
  Clone ID: PAT_MRT3847_90399C.1.pep
NQLFQNLVTIIGSYSLTLMSSFFLFFWTCRPPVSFLCPLFVSVRVMKSDSRSSNQRCLAFWVLYSLCMIMEGELSVLFNCLPWWPHVKSIAT

SEQ ID NO: 275059 - protein, 66 aa, Glycine max
  Clone ID: PAT_MRT3847_9039C.1.pep
GIETKMRQSIGTLAVSPQDPYKIFLTKESMFFVPGKLGLYIKLVFILKKNYGNVFRSVFLLHERWS

SEQ ID NO: 275060 - protein, 69 aa, Glycine max
  Clone ID: PAT_MRT3847_903C.1.pep
FLESGEYCHRIINSREGIDNDVIWFRSDGHVAKRGDMADDFTSFGAKSKLELMLLVEWRIQTHLNCPFF

SEQ ID NO: 275061 - protein, 55 aa, Glycine max
  Clone ID: PAT_MRT3847_90400C.1.pep
LELSWSLSGDNLYRIIFMLSSSSNLRLWERLTHPRALMTERPMIMRRRSSGAASV

SEQ ID NO: 275062 - protein, 155 aa, Glycine max
  Clone ID: PAT_MRT3847_90401C.1.pep
SHFELAIAPTHRVLKLLNNFQVNSIDVDNDDDSADILFNTPLLPPPHAAPKYVYIAGSCRGFILLELVSDLNSIHLVVWNPSTGLVKRIHHVNHLNLFDIDSHLCGIGYDSSTDDYVVVTMACQRPGRVGNCLSLRTNSWSFTEKKQLTAAYDDN

SEQ ID NO: 275063 - protein, 88 aa, Glycine max
  unsure (1)..(88): unsure at all Xaa locations
  Clone ID: PAT_MRT3847_90402C.1.pep
GSLLIDITRDHGINMKGLAFFVPTNLVTXQCHAYDMFPIRMNTAYRALTPKAKCATWMLAVQAHNMFVFETIPEECAPSTXEYIHGEH

SEQ ID NO: 275064 - protein, 214 aa, Glycine max
  Clone ID: PAT_MRT3847_90403C.1.pep
MGSYATWSCLKYLPHRLAGLALIAPVINYRWPSFPKRLIREDYRRKLVQWCMWLANHWPRLLHWWVTQKWLPSTAVIEKNPAFFNKSDVDILKTIPGFPMLTKDSLREKAVFDTLRHDWRVAFGKWEFDPMKLSNPFPHNTGSFHIWHGYEDKVVPSELQRFVSGKLPWIQYHEVPDGGHLIIYYRGLCEAILKALLLGQENVAYRSKAPLFES

SEQ ID NO: 275065 - protein, 41 aa, Glycine max
  Clone ID: PAT_MRT3847_90404C.1.pep
EKANFAIEDSQKANSKSAGQYQLLCMVMESNFDINSWTSNN

SEQ ID NO: 275066 - protein, 193 aa, Glycine max
  unsure (1)..(193): unsure at all Xaa locations
  Clone ID: PAT_MRT3847_90405C.1.pep
MLALKSILFLLPLFIAGRANAAPAPVPSRGVGARMNDTPPVYEVVSDFDYQSFVVGLNQEWIELDLFNYGVARFSPEEFAEAGLGPDDISLIQFMANQEIGHAALLTNIINNGGRPAPKQCQYKYDFDTVRDFVNFCQRLTRWGESGVYGFLPHLDSRPAAQLLLQSITTEARQQMVFRQFFGAHPMXVWFES

SEQ ID NO: 275067 - protein, 57 aa, Glycine max
  Clone ID: PAT_MRT3847_90406C.1.pep
RHQVIVRSEMTLALLFFNLVTSEESDSPDQSNFEHLPSVPPPNVSSKVVAYMLSPEN

SEQ ID NO: 275068 - protein, 423 aa, Glycine max
  Clone ID: PAT_MRT3847_90407C.1.pep
QIAIPYIFLLIPPSQVFPFLLTPTKLITHQHTIKEEKKRSFKISMQFAEKMQPLKMGFREYIEALEEERKKIQVFPKELPLSLELVTQAIEACRQQLSGTVAEYNLNAQSECSEQTSTDGPVFEEFIPIKKRASQESVEEEDEDEEHFHKHKKTATDKKKSDWLRSVQLWNPNPPPTKEDVVVPRKTDVVEVKRNGGAFQPFQREEKSGDAKASINNDASAIGKAPSSPPVPATSSTGPVRVENKKEEKGQAQRKQRRCWSQELHKRFLHALQQLGGADSATPKQIRELMKVDGLTNDEVKSHLQKFRLHTRRSPIIHNNASSQAGPLFLVGNIFVQPSEYAAVATTSTASGEELTTVTTTTAPTGIYAPVAAHPPAVTHTLPIMKQKEHSHSEERPNHSVLSNSPASSSSTHTITTSPPVPN

SEQ ID NO: 275069 - protein, 96 aa, Glycine max
  unsure (1)..(96): unsure at all Xaa locations
  Clone ID: PAT_MRT3847_90408C.1.pep
PPPPSPSPPSPYYYHSPPTSKEHVYPPYXYRSRLVPTSHPPADNYVSPLXRSLTPPLTYHSTATPPHSAAPAPKYIYKSSRPPVYIYAHPPAFISS

SEQ ID NO: 275070 - protein, 59 aa, Glycine max
  Clone ID: PAT_MRT3847_90409C.1.pep
VSSSNQDSNYLSRSQRRKICNLWSLSLLDELVNSRQLVQSSRKFTHVTRINCSSGCFSE

SEQ ID NO: 275071 - protein, 215 aa, Glycine max
  unsure (1)..(215): unsure at all Xaa locations
  Clone ID: PAT_MRT3847_9040C.1.pep
KRTLPERESPKDNCSSGEEDGDAAWRAAIDSIAQTTTYVASTTKHNHPNHHIDDDDHKPNTQQLKHYQLKAQKLLNEILENSIEIVRKPVPVVEXDPESNECGIRLFKHAQPGIVFDHXELQPPRKRPRLLPGGDIDEKSKKFRKQIRSVAVNGIDIIAAANDAYKKSLARLEAKDAAAKAKAKREEERIENLKKIRGERWLPSMAKEMQVKIRH

SEQ ID NO: 275072 - protein, 57 aa, Glycine max
  Clone ID: PAT_MRT3847_90410C.1.pep
TRPWCCPFMDHLVIIFFLLYKCLEVKPVVIVTMIWQLTNIKYDLFYEILHHKLVRRI

SEQ ID NO: 275073 - protein, 82 aa, Glycine max
  Clone ID: PAT_MRT3847_90411C.1.pep
TLSYLPYPNDAQLTNQPNYPPTKRRTPCAEFEDKHNLEYRQHNESPADYNERNCSMRELPMDDSTDASQTLKGLQEAKMTTP

SEQ ID NO: 275074 - protein, 111 aa, Glycine max
  unsure (1)..(111): unsure at all Xaa locations
  Clone ID: PAT_MRT3847_90412C.1.pep
RFFEIGELCIADDEGRMRPLALNNNPPRWCEQXLQCWSLDLRARLTLALVQNFQLIAGTQPAAAAPTPFEPATPVHDMIILLFDILGKDMFTLDYXLSLSAYQAFTICLSS

SEQ ID NO: 275075 - protein, 36 aa, Glycine max
  unsure (1)..(36): unsure at all Xaa locations
  Clone ID: PAT_MRT3847_90413C.1.pep
LKLATYLIFLSHYLLNIKMKIHIVLHXYLWGDRIFY

SEQ ID NO: 275076 - protein, 105 aa, Glycine max
  unsure (1)..(105): unsure at all Xaa locations
  Clone ID: PAT_MRT3847_90414C.1.pep
AGESRLGXLXXTRYPFWGWXPHSKKRPGRILRNYXEXXPXASRXLSRPRLVGLGGRILRPSALTKSMRNFNPSQRRGAPIPLAPYADYLTGPARRESRILALKLG

SEQ ID NO: 275077 - protein, 59 aa, Glycine max
  Clone ID: PAT_MRT3847_90415C.1.pep
KYTAYSDIKKFFIYIQTSTLDGFCRLGSVKRHHFLLFLSHTNTHTLSLSLFLFSSDAYA

SEQ ID NO: 275078 - protein, 254 aa, Glycine max
  Clone ID: PAT_MRT3847_90416C.1.pep
MAEHHEHEEVKGESLLEKISGKIHDHDSSSSSDSDNEKTSASDSLKSKVFRLFGREKPIHHVLGGGKPADVFLWRNKKISASTLGVATAIWVLFELLEYHLLTLVCHFLILGLAVLFLWSNASTFINKSPPKIPQVHIPEKPVLEFASALRVEINRAFALLRDIASGRDLKKFLSVIAGLWVFSILGSWANFLTLFYIAFVLLHTVPVLYEKYEDHVDSFGGKAIAEIKKQYAVFDAKVLSKIPRGPLKDKKKD

SEQ ID NO: 275079 - protein, 38 aa, Glycine max
  Clone ID: PAT_MRT3847_90417C.1.pep
YWHLPHLRTLQVKAFGKHLGEGYPKKCMVPASQTCFLN

SEQ ID NO: 275080 - protein, 254 aa, Glycine max
  Clone ID: PAT_MRT3847_90418C.1.pep
MAEHHEHEEVKGESLLEKISGKIHDHDSSSSSDSDNDKTSATDSFKSNVFRLFGREKPIHHVLGGGKPADVFLWRNKKISASTLGVATAIWVLFELLEYHLLTLVCHFLILALAGLFLWSNASTFINKSPPKIPQVHIPEEPVLKFASALRIEINRAFAVLRDIASGRDLKKFLSVIAGLWVFSILGCWANFLTLFYIAFVLLHTVPVLYEKYEDHVDSFGEKAIAEIKKQYAVFDAKVLSKIPRGPLKDKKKD

SEQ ID NO: 275081 - protein, 106 aa, Glycine max
  unsure (1)..(106): unsure at all Xaa locations
  Clone ID: PAT_MRT3847_90419C.1.pep
LFRSPPVPFPLQFGTLDILGRIDILAHRLGLGYDVKQNCLIVGAXVRGSLIHSKVDPDLLVAFKACSVELLYEICLLSASQRVTATRFLVENHCGRKIVVLCVFRW

SEQ ID NO: 275082 - protein, 128 aa, Glycine max
  Clone ID: PAT_MRT3847_9041C.1.pep
KEGIFIATNPRLLCSHSKANSICRIAILANSHIFYCLQIYNSSSHMRLHTVIKIISYKLIFTYEIAHNNESDVSPSKAGDCLWFHVTAMVVPMAPMIVLAANNGEKVGEKSGNKKEHKGKVREKTHLK

SEQ ID NO: 275083 - protein, 124 aa, Glycine max
  unsure (1)..(124): unsure at all Xaa locations
  Clone ID: PAT_MRT3847_90420C.1.pep
LFRSPPVPFPLQFGTLDILGRIDILAHRLGLGYEYAPLITSLIREGFSSXLEETIDIFSVKQNCLIVGAXVRGSLIHSKVDPDLLVAFKACSVELLYEICLLSASQRVTATRFLVENHCGRKIV

SEQ ID NO: 275084 - protein, 187 aa, Glycine max
  unsure (1)..(187): unsure at all Xaa locations
  Clone ID: PAT_MRT3847_90421C.1.pep
PHGASSPKTYSPTLVPVPTQHLLLFLISXPSSNEFSNQSSSSLKQQILELANSPSTVKWMKRIRREIHEHPELAYEEFRTSAVIRRELDLLGVDYKWPVAGTGVVAKIGYGSPPFVALRADMDALPIQEMVDWDHKSKVDGKMHACAHDAHVAMLLGAAKILQEMKDMLQTTGLPAVQPAAGAGAGA

SEQ ID NO: 275085 - protein, 86 aa, Glycine max
  Clone ID: PAT_MRT3847_90422C.1.pep
KKLGRYKNRHETPKKKGKAKHKRRQKKRPPKQVAKETKGGPNPRKNASAESKHKFLEAHTQIRGEGRKAIKQPTFIGRRKSRHHSP

SEQ ID NO: 275086 - protein, 46 aa, Glycine max
  Clone ID: PAT_MRT3847_90423C.1.pep
RELVSSFFFFFLIMSRTSLYNAAVMYSCLQILNISLSWFSFHVKQL

SEQ ID NO: 275087 - protein, 118 aa, Glycine max
  unsure (1)..(118): unsure at all Xaa locations
  Clone ID: PAT_MRT3847_90424C.1.pep
MDQWDCTHLTMLHDTTDSIANRRINRXALDLHFQSMHERDKXLMVASNISIDIPVNGIFRRNSILAYVDDSQYRTQSTGITKYRTIGVNDIFSTEDSLIEHEGGKEFKTEWHLKACQA

SEQ ID NO: 275088 - protein, 225 aa, Glycine max
  unsure (1)..(225): unsure at all Xaa locations
  Clone ID: PAT_MRT3847_90425C.1.pep
MAKALLASVPLFLLLAVSSSVVAEELETLPPSYPHPHSPTQAPLHPPASAPHPHHHHHHHPSAPAPAPVHPPSPPTHHNYPPTPAPAKSPTHHHHHHPSAPVHPPLNPPVKPPVPVHPPLNPPVKPPVPVHPPLNPPAPVHPFPRSYVAVQGVVYVKSCKYAGVDTLLGATPLLGAVVKLECNNTKYKLVQTSKTDKKNDFDIXAPKSITTYGAHKCNVGFGQCT

SEQ ID NO: 275089 - protein, 93 aa, Glycine max
  Clone ID: PAT_MRT3847_90426C.1.pep
MRRTLLRNATLYTRNLLHHSAPAFDASTRPQLRLFCSNETPPPVPQIDDVDHKELKAQIESYFKGDEQVLPSIMETILKRKLSGKHEDTDDQL

SEQ ID NO: 275090 - protein, 203 aa, Glycine max
  Clone ID: PAT_MRT3847_90427C.1.pep
MLLLHLHSCQPWIIPPTHIHLSSITNNSRRFMPCHFSWIRSSALHVGRLRVHGEGRWEVDSHRSEVKSNSTTYKHVLENLGSEFVWMKKNNNSTQGPQARSMIQFMSLYIILRMTHKQLYNLMIKVGQAVLPHVFQTCSATSLPFACVSNALNKPKPLNLDVSLPSIHDIRWSLARLLYLFNIQLERNVATFFGVLLLACFSF

SEQ ID NO: 275091 - protein, 123 aa, Glycine max
  unsure (1)..(123): unsure at all Xaa locations
  Clone ID: PAT_MRT3847_90428C.1.pep
CLEKREQPLLAQCQGYQPFRPRRGXAPRNSAASAWGGRIDILRSRLGLWYDYAPXINSLSREGLXPLRQSEKRPAVCGVEQNGLIVGAHVRDSLVHSKAEPDLLDALETGGAEVLYENGMLSA

SEQ ID NO: 275092 - protein, 139 aa, Glycine max
  Clone ID: PAT_MRT3847_90429C.1.pep
AWWCWCLHQMLKGDDYLRKRMWISPRPSLDQVEALVGYFQAQAQASASPAWALAHLGFALSLVVAPVLLLCPLFPVLVGHYQYQHMHKEMALVEDLYYYLMLKYPRICLSFNLPFIIIFIFMCMRLLGFVLLGSWLGVI

SEQ ID NO: 275093 - protein, 54 aa, Glycine max
  Clone ID: PAT_MRT3847_9042C.1.pep
LPGACASEGMKEGCWTQRYPTICKRGCCPDSEPMSLHSHSRPQLYRCEQGSPLR

SEQ ID NO: 275094 - protein, 80 aa, Glycine max
  unsure (1)..(80): unsure at all Xaa locations
  Clone ID: PAT_MRT3847_90430C.1.pep
XVGXLLLRXXHXWXXXXSFIXVXXXFXFXXFXFFFFFEVLKKIKLXXLLVYXSVVFSQPYSSRFGSXSSRIPSLRTRXCD

SEQ ID NO: 275095 - protein, 90 aa, Glycine max
  Clone ID: PAT_MRT3847_90431C.1.pep
TAAAGGVVRLFVRYLNVSTVATFRENGGGGQCGTPWWTALEGAKSKDLGSLSSVRSPGCWNFCLQRPLYRYLLRTFLFCPMAASVKDVSQ

SEQ ID NO: 275096 - protein, 74 aa, Glycine max
  Clone ID: PAT_MRT3847_90432C.1.pep
GIRHINFQDMKPVHNIKQREVIPTVLRPCIYIKSLRGCRNGSNCSYQHDVSAQEGTANISMSQTAKILILAGEN

SEQ ID NO: 275097 - protein, 65 aa, Glycine max
  Clone ID: PAT_MRT3847_90433C.1.pep
RGNVQNVLSVQNHLIEFYCVSIFVKLLTETGAYITGILLHKTFSYHQETLLTEYNWHDIMLSLHL

SEQ ID NO: 275098 - protein, 178 aa, Glycine max
  Clone ID: PAT_MRT3847_90434C.1.pep
ARYKYLRVLHLSDSSFETLPNSIAKLEHLRALNLANNCKIKRLPHSICKLQNLQVLSLRGCMELQTLPKGLGMLMSLRKFYITTKQSILSEDEFARLRNLHTLSFEYCDNLKFLFKVAQVSSLEVLIVQSCGSLESLPLHILPKLESLFVKRCERLNLSFNSESPIQKLRMKLLHLEH

SEQ ID NO: 275099 - protein, 128 aa, Glycine max
  unsure (1)..(128): unsure at all Xaa locations
  Clone ID: PAT_MRT3847_90435C.1.pep
DVIGLQLNWSNTTICLTYPSLAGAVTQIXNAQWAFNTTTFVAQDPADLHVLLETNAPDNSVRTITLPXSLMNNLPAHDMDLASKGQFNPFESPALIQVKPLLTAVGLGFIRRRGHFIYFSAPIFLRLP

SEQ ID NO: 275100 - protein, 83 aa, Glycine max
  unsure (1)..(83): unsure at all Xaa locations
  Clone ID: PAT_MRT3847_90436C.1.pep
MGAKGLTFLAVXICVSALSLSSTVAGEGQNNGLVMNFYKESCPQAEDIITXQVKLLYKLHKNTVFSWLMDIFHDLSFHKCDAF

SEQ ID NO: 275101 - protein, 55 aa, Glycine max
  Clone ID: PAT_MRT3847_90437C.1.pep
RDTFLTSYIILTPASHNDQCTRRLLKSFKPCRLFGSKACPNPHKDPSKRLPLRSG

SEQ ID NO: 275102 - protein, 97 aa, Glycine max
  Clone ID: PAT_MRT3847_90438C.1.pep
IPCSNHSATKVRARKRSHHTWAITHSFLHDHAHATPARLPCPHIIGSPNPNQLASVAHKHDDSYVSRSSRRSARRVRIGAAAVGSQVHPDEATYRDT

SEQ ID NO: 275103 - protein, 112 aa, Glycine max
  Clone ID: PAT_MRT3847_90439C.1.pep
TGCCIVVVCQVLVLASHTCKLCSRSFSNGRALGGHMTAHLAYLPLPFPPKFHSCFSSSDSHHDQSSREIPPQPLRLLDPAYPQSETYPPMPPPRHLSKLTFTFSMPPLILFP

SEQ ID NO: 275104 - protein, 95 aa, Glycine max
  unsure (1)..(95): unsure at all Xaa locations
  Clone ID: PAT_MRT3847_9043C.1.pep
NFAGXEGRGRLDDFKPGGGLHISLDYVEREFNHVKNDGELLVWFTYCLIACPLSNKICIFDTLPLNSFSSLHCQKLLSFIYDHFITYLLYQTIFT

SEQ ID NO: 275105 - protein, 87 aa, Glycine max
  Clone ID: PAT_MRT3847_90440C.1.pep
RFSVFVGASSLQGRVIPTVVMLFFFVASVCQVVSSHVFDIVSKCISHYFCHPFFGWVLSLLGDPLRWSRFHFKLIVGIFVRENAGHV

SEQ ID NO: 275106 - protein, 53 aa, Glycine max
  Clone ID: PAT_MRT3847_90441C.1.pep
VNKRRKKVFFKKKKKKIKPTKKKGGRKRKKKKLFPKKGGGENTNKMGGGNRRG

SEQ ID NO: 275107 - protein, 459 aa, Glycine max
  Clone ID: PAT_MRT3847_90442C.1.pep
MAQYGYAYRSAQISTYNTSNVRNIETGAKPFAPYVPKFSNGNGYSDGIVTKKKIIPVASRPYYEDESDNDHDDDEGKHPHQTSPRKFDDFLTKVHNEANRSPPRSSGHVTSPDWRHSSQPKPYNGGYADYGTNKPIGGANKHDGPGYGNNKEGNKPLYGGNTKNFDNHDGYTSPAKKNNFDHAYDGYNKNGPKPKPMSKPTGSPVYNSSYGGDYGAPKPINHDGYTSPYDHDYDSYGDYYNKDGSKPTVSPVYNSGYGGDYNNIEGPKPKPKPTGSPVYNSGYGDNYDNYNNGEGGKPKPKPTGISVNKNGYGGGYGSGSASPTRHGNYDHEGDYGNYHNKHGGSKPASGWSDSPRKGIQLTKATNNIDEAMELLMKEAAKLREYENKAHQNGPGQFGSRPAPPPASTCDRTMNPVRQRFNFGDGGKRPDYDYDKRRGYGVMNHKEAEKKFNGVTLDHN

SEQ ID NO: 275108 - protein, 63 aa, Glycine max
  Clone ID: PAT_MRT3847_90443C.1.pep
VSELGAAWKHSGCQCEDVTDMLEHVEYEHHQVVVCKKSICLTRLGPRQYHSCRSWSNSFRDGH

SEQ ID NO: 275109 - protein, 1421 aa, Glycine max
  Clone ID: PAT_MRT3847_90444C.1.pep
MVQRERVQEESIGCYEGQSIKCCSTFSSSREFDSRIAFMTDHCLLQHYMSDNNLSGVSCIIIDEAHERSLNTDLLLTLLKSLLCRRVEMRLIIMSATADAKQLSDYFFACGIFRVLGRSFPVDIKYVPSDYAGDSGSAVVASYVSDVVRMATEVHKTEKEGTILAFLTSQIEVEWACEKFQAPSAVALPLHGKLSSDEQFRVFQNYTGKRKVIFSTNLAETSLTIPGVRYVIDSGLVKDSRFDPGSGMNVLKVCWISQSSADQRAGRAGRTEPGVCYRLYTEADYQSMDLNQEPEIRRVHLGVAVLRILALGVKDVQGFDFVDAPSPSSIDMAIRNLIQLGAIELNNDVHDLTSEGWCLVRMGIEPRLGKLILGCFKHGLGREGIILAAVMANASSIFCRVGNEFDKQRSDCLKVQFCHCDGDLFTLLSVYKEWEALPRERKNKWCWENSINAKSMRRCQDTILELETCLEREHDVVTPSYWRWDPCMPSNHDKNLKRVILFSLAENVAMYSGCNQLGYEVAQTGQHVQLHPSCSLLVFAQKPSWVVFGELLSISNQYLVCVSAFDFQSLYDLCPAPLFDVSKMEERKLLMKTLSGLGCILLKRFCGKANCNLLALVSRIRKACMDERIFIEVNVDNNEIHLYASSNDMDIALGLVNDVLEYERKWLRTECMDKFLYHGSGFSPPVALFGSGAEIKHLELEKRSLSVDVCHPNINEIDDKELLMFFEKNTSGCICAVHKFTGNTRDEDRDKWGRITFMSPDIVRRAAELDGREFCGSSLKVVPSQLGGDKTFSFPAVKARISWPRRLSRGFAIVKCDIKDVDYILRDFYNLAVGGRYVRCEVGKKSMDSVVINGLDKELSEAEISDVLRTATTRRILDFFLVRGEAVGNPPCSALEEALLKEIYPFLPKRNPHISPCRVQVFAPEPKDAFMRALITFDGRLHLEAAKALEQIEGKVLPGCLSWQKIKCQQLFHSSLTFPTPVYRVIKEQLDEVLASFRNLKGLECNLDRTFNGSHRVKITANATRTVAEVRRPLEELLRGKTIEHDSLTPVVLQLMLSRDGFSLKNSLQQETGTYILFDRHNLNLRVFGSPNMVALAQEKVIQSLLSLHEEKQLEIHLRGRDLPPDLMKQMIKNFGPDLHGLKERVPGVDLTLNIRRHIIILHGSKELKPRVEEIVFEIARSSHHLVERFGNGPSCPICLCEVEDGYRLEGCGHLFCRMCLVEQFESAIKNQGTFPVCCTHRDCGDPILLTDLRSLLFGDKLEDLFRASLGAFVATSGGTYRFCPSPDCPSIYRVADPGSAGEPFVCRACYSETCTRCHLEYHPYLSCERYKEFKEDPDSSLIEWCRGKEQVKCCSACGYVIEKVDGCNHVECKCGKHVCWVVTFLLCKLYIMCSKAVQYGCIYPLNEPEERIDYKSISTN

SEQ ID NO: 275110 - protein, 1730 aa, Glycine max
  Clone ID: PAT_MRT3847_90445C.1.pep
MKKSSYPNPTPRRHDFHRPPPPTHGCGWAPRPAYHRPYHQWRPRFHPHAARIDRPPEPYFRVELRLGSSPLHRDDVEALIDECHSRHDTFTFYPVDDVAAVLSYRSWEQARDAVVWFWEARLAEKHDFTPTLDSNVVVVKDDVDCRLRPVFARHVKGLTEGKEVKRWMEESERLSKEISRLSSSLSKPLRLGVHNELVEKKKGLVDEKNLVERRLKEFESAMQCLLKYLEGGVDVEGVTVFRFDGGFDWKRIHCLIKRECRRLEDGLPIYAYRSDILQEIHYQQIMVLIGETGSGKSTQLVQFLADSGIGTDESIVCTQPRKIAAKSVAQRVQEESIGCYEGQSIKCCSTFSSSREFDSRIAFMTDHCLLQHYMSDNNLSGVSCIIIDEAHERSLNTDLLLTLLKSLLCRRVEMRLIIMSATADAKQLSDYFFACGIFRVLGRSFPVDIKYVPSDYAGDSGSAVVASYVSDVVRMATEVHKTEKEGTILAFLTSQIEVEWACEKFQAPSAVALPLHGKLSSDEQFRVFQNYTGKRKVIFSTNLAETSLTIPGVRYVIDSGLVKDSRFDPGSGMNVLKVCWISQSSADQRAGRAGRTEPGVCYRLYTEADYQSMDLNQEPEIRRVHLGVAVLRILALGVKDVQGFDFVDAPSPSSIDMAIRNLIQLGAIELNNDVHDLTSEGWCLVRMGIEPRLGKLILGCFKHGLGREGIILAAVMANASSIFCRVGNEFDKQRSDCLKVQFCHCDGDLFTLLSVYKEWEALPRERKNKWCWENSINAKSMRRCQDTILELETCLEREHDVVTPSYWRWDPCMPSNHDKNLKRVILFSLAENVAMYSGCNQLGYEVAQTGQHVQLHPSCSLLVFAQKPSWVVFGELLSISNQYLVCVSAFDFQSLYDLCPAPLFDVSKMEERKLLMKTLSGLGCILLKRFCGKANCNLLALVSRIRKACMDERIFIEVNVDNNEIHLYASSNDMDIALGLVNDVLEYERKWLRTECMDKFLYHGSGFSPPVALFGSGAEIKHLELEKRSLSVDVCHPNINEIDDKELLMFFEKNTSGCICAVHKFTGNTRDEDRDKWGRITFMSPDIVRRAAELDGREFCGSSLKVVPSQLGGDKTFSFPAVKARISWPRRLSRGFAIVKCDIKDVDYILRDFYNLAVGGRYVRCEVGKKSMDSVVINGLDKELSEAEISDVLRTATTRRILDFFLVRGEAVGNPPCSALEEALLKEIYPFLPKRNPHISPCRVQVFAPEPKDAFMRALITFDGRLHLEAAKALEQIEGKVLPGCLSWQKIKCQQLFHSSLTFPTPVYRVIKEQLDEVLASFRNLKGLECNLDRTFNGSHRVKITANATRTVAEVRRPLEELLRGKTIEHDSLTPAVLQLMLSRDGFSLKNSLQQETGTYILFDRHNLNLRVFGSPNMVALAQEKVIQSLLSLHEEKQLEIHLRGRDLPPDLMKQMIKNFGPDLHGLKERVPGVDLTLNIRRHIIILHGSKELKPRVEEIVFEIARSSHHLVERFGNGPSCPICLCEVEDGYRLEGCGHLFCRMCLVEQFESAIKNQGTFPVCCTHRDCGDPILLTDLRSLLFGDKLEDLFRASLGAFVATSGGTYRFCPSPDCPSIYRVADPGSAGEPFVCRACYSETCTRCHLEYHPYLSCERYKEFKEDPDSSLIEWCRGKEQVKCCSACGYVIEKVDGCNHVECKCGKHVCWVCLEFFSTSNDCYDHLRTIHLTII

SEQ ID NO: 275111 - protein, 75 aa, Glycine max
  Clone ID: PAT_MRT3847_90446C.1.pep
QIRGGMDIMWASVHYLSTVRSLKTNGGLFEEQQWILFNGCALLVTTVQLYCYYCPNSAAVDESTKQRSIYDSHPC

SEQ ID NO: 275112 - protein, 169 aa, Glycine max
  unsure (1)..(169): unsure at all Xaa locations
  Clone ID: PAT_MRT3847_90447C.1.pep
MGDQLNKKNDLTSFLIDFLMGGVSAAVSKTAAAPIERVKLLIQNQDEMLKTGRLAEPYKGIGDCFKRVIAEEGFGSLWRGNLANVLRYFPTQALNFAFKDQFKRMFGYNKDRDGYWKWFAGNLASGGAAGASSLLFVYSLDYARTRLANDNKSAKXGGERQFNGLLDVY

SEQ ID NO: 275113 - protein, 195 aa, Glycine max
  unsure (1)..(195): unsure at all Xaa locations
  Clone ID: PAT_MRT3847_90448C.1.pep
GMGGIGKTTIAHAMYDKYSPQYEGCCFLNVREEVEQRGLSHLQEKLISELLEGEGLHTSGTSKARFFDSAGRKMGRKKVLVVLDDVNTSDLIEXLVGKPICFGPGSRVLITSRDKRVLTSGGVYQIHKVKEMDPRDSLKLFCLNAFNESHPKMGYEKLSEEVVKIAQGNPLALKVLGADFHSRSMDTWECALSKI

SEQ ID NO: 275114 - protein, 98 aa, Glycine max
  unsure (1)..(98): unsure at all Xaa locations
  Clone ID: PAT_MRT3847_90449C.1.pep
WGRSHTQKPKLKTRATKKKSSSYGPQKIIHRPPFKNPEKRKTPGSPKKKTGGETPLLPQGENTKKAHLLSFYKNWXPPKGKGTPPLMATKNRGCGDHP

SEQ ID NO: 275115 - protein, 74 aa, Glycine max
  Clone ID: PAT_MRT3847_9044C.1.pep
MDAIVQTRGLLSLPTNPKTRVSHHLHLSHGLKHRFLSLKPKPLSTPSLSAAAAVKFHPFGPKPQNLFICRAEAA

SEQ ID NO: 275116 - protein, 99 aa, Glycine max
  unsure (1)..(99): unsure at all Xaa locations
  Clone ID: PAT_MRT3847_90450C.1.pep
GAPPPQTTTPPRPPVLTLLTVLTLFPTPXSTNPINIPCSSSTTLXPCLTKPSFPTLPTTPPCGCCPIPCTSVPSFPPCSSISLNFPDGCPNSTLSPPDP

SEQ ID NO: 275117 - protein, 69 aa, Glycine max
  Clone ID: PAT_MRT3847_90451C.1.pep
PIHSCYLADAVGSLLRYCAVIPTPTKGLGPNRFIYTSINTLFRPRTFSTQLLAILSRHTWAVYGTLAHS

SEQ ID NO: 275118 - protein, 65 aa, Glycine max
  Clone ID: PAT_MRT3847_90452C.1.pep
SIFPSLSITRITLSLVLIIHQWIADGVRCGACIGICYHHPLLACSSDQATCCLFFSGTRFRELSP

SEQ ID NO: 275119 - protein, 56 aa, Glycine max
  Clone ID: PAT_MRT3847_90453C.1.pep
MMSSVVVDAAATSSSEKKTSWPEVMGMSIKEATETILKDMPNAYIQVLPVGSPVTL

SEQ ID NO: 275120 - protein, 44 aa, Glycine max
  Clone ID: PAT_MRT3847_90454C.1.pep
PFLHLRSRKNFPRAMPVQTKPTPTTPLFKLQPAPLENGFKYGET

SEQ ID NO: 275121 - protein, 182 aa, Glycine max
  Clone ID: PAT_MRT3847_90455C.1.pep
IDDLPVLNGLWLYRLPELASLFPRCLPSTLQFLSVDVGMLSSMSKLELGLLFQRLTSLSCLRICGVGEEDLVNTLLKEMLLPTSLQSLCLHGFDGLKLLEGNGLRHLTSLQKLHVWHCRSLESLPEDQLPPSLELLSINDCPPLAARYRGRERKYKFWSKIAHWSKIAHISAIQINDDVTIR

SEQ ID NO: 275122 - protein, 57 aa, Glycine max
  Clone ID: PAT_MRT3847_90456C.1.pep
VGHIGTLRLTRNLHSCTVSRNPSWFMNEPGFGKCGNTWGAVIRYLCSCILFSTLSGR

SEQ ID NO: 275123 - protein, 38 aa, Glycine max
  Clone ID: PAT_MRT3847_90457C.1.pep
YFKNQTRKVQERDSKAPPVKSTTALILKLNKYNGGCSI

SEQ ID NO: 275124 - protein, 132 aa, Glycine max
  Clone ID: PAT_MRT3847_90458C.1.pep
MLPALCLRSPNTTPAPGIGKESHTNPKHFGVNYAFQVPIATKYRYVITKAAKDNQSTNRNTKPNSVICADCDGNGAVLCSQCKGSGVNSVDIFNGQFKAGDSCWLCGGRKEMLCGNCNGAGFVGGFLSTYDQ

SEQ ID NO: 275125 - protein, 71 aa, Glycine max
  Clone ID: PAT_MRT3847_90459C.1.pep
ADGYSSSLFLAIFPDFTKILESSSNSSSLFLAIYPNFANIPELSFKLLFFLVELNFMFFLGNKFSCNKLIA

SEQ ID NO: 275126 - protein, 136 aa, Glycine max
  Clone ID: PAT_MRT3847_9045C.1.pep
RGDAVKYVKQLQERVQTLEEQAAKRTLGSGVLVKRSIIFADDETSDSHCEHSLPEVEVRVSGKDVLIRTQCDKHSGHAAMILSELEKLYFIVQSSSFLPFGNSKTDVTIIAQMNKENCMTAKDLLGRLRQALKQLI

SEQ ID NO: 275127 - protein, 124 aa, Glycine max
  unsure (1)..(124): unsure at all Xaa locations
  Clone ID: PAT_MRT3847_90460C.1.pep
MSTTYIRAHAEDYKSWTCLAASTAGGCLTTSQLLEHPINLTEATRTTSSACNPAYFKTVPLCSKLKAAPPTEAATAATANDELDQCYGPDRTNFXPDGLXDRSDIPXYLTGEVSGDYGYDPSGT

SEQ ID NO: 275128 - protein, 57 aa, Glycine max
  Clone ID: PAT_MRT3847_90461C.1.pep
RERKTLFVLDTDFVNQFFFPLLGYLLNTLLFDIGLCVRFKLSSESFSEICSISSSCW

SEQ ID NO: 275129 - protein, 41 aa, Glycine max
  Clone ID: PAT_MRT3847_90462C.1.pep
SRTQLYSRASIDHQSFSSCLALCFTMSFTTLSAIFLSYGFE

SEQ ID NO: 275130 - protein, 68 aa, Glycine max
  Clone ID: PAT_MRT3847_90463C.1.pep
YLSLLLIISFKFFLIMISFKFLSFTFYHIFFVLFCYSKIVFFFSAYYIDTLWVFVKFLLLVLHFLFLH

SEQ ID NO: 275131 - protein, 122 aa, Glycine max
  unsure (1)..(122): unsure at all Xaa locations
  Clone ID: PAT_MRT3847_90464C.1.pep
HFQHLISMSLSTSTLSHLNVILNTNIISSQYHSQHQHHFISMTLSTTTTSSLINIIITNNIISYQHNHKHQHSLVSIIINIIFNNNIILYQHYHKLQRHLISINIINNNVISKSHSAYTXHI

SEQ ID NO: 275132 - protein, 97 aa, Glycine max
  Clone ID: PAT_MRT3847_90465C.1.pep
WSSTSCNKVSILKVSQMHARINYKDGAFFLTDLRSLHGTWITDNEGRRYRVPPNYPARVRPSDVVEFGSDKASYRVKVTRSASSESEKEGTKLYQKV

SEQ ID NO: 275133 - protein, 90 aa, Glycine max
  Clone ID: PAT_MRT3847_90466C.1.pep
MAFTQLIPSPSSSLNPITLSLNPKSPTSPPQHFNLDFLRHRRRRPASTLRCSASSFSEKHHTNSSNSDDVLELPLFPLPLVLLPGAILTL

SEQ ID NO: 275134 - protein, 60 aa, Glycine max
  Clone ID: PAT_MRT3847_90467C.1.pep
TCILRESEPPIIYVSFNYITACIPRRRLTCIPSLYSFLHAQNMNCMTGPYLYKVQTMKGK

SEQ ID NO: 275135 - protein, 123 aa, Glycine max
  unsure (1)..(123): unsure at all Xaa locations
  Clone ID: PAT_MRT3847_90468C.1.pep
ASTLVKVVTFKIPTSLKIGLSQMQKVLAFAFGPYKVVAPGIATSGAKTSGIMKAAVSAEKIXAVAHGVIASAEKNSISVMRRAFYEIMGKRKVQPVGFLPWATFAGSIGTCTSLLLYGDGIEC

SEQ ID NO: 275136 - protein, 44 aa, Glycine max
  Clone ID: PAT_MRT3847_90469C.1.pep
HFKQYYIIFMNLIGMHYSVKVFYAVINHKLSPMISLLTYIITTL

SEQ ID NO: 275137 - protein, 80 aa, Glycine max
  Clone ID: PAT_MRT3847_9046C.1.pep
ASVLMNPVEPSIGSRLRILGILSGCMIRPNPLITKEAHQYKRILILQVEWLSILPTEVAWEHMPICVLFFPKKKKKKKTK

SEQ ID NO: 275138 - protein, 46 aa, Glycine max
  Clone ID: PAT_MRT3847_90470C.1.pep
GKIEKPSRCCGRSRRTEKCSGLFNLVVEVWKMSRVYVSTRLDPNSE

SEQ ID NO: 275139 - protein, 36 aa, Glycine max
  Clone ID: PAT_MRT3847_90471C.1.pep
NLPKKIRGAPITSSSAARGYLSPLTLFRIPILTGGT

SEQ ID NO: 275140 - protein, 151 aa, Glycine max
  Clone ID: PAT_MRT3847_90472C.1.pep
HARRKIASDLTTADERLIGTAHAASDPVVAGIQIYATPMMPLYDEILSKVAQDTDDAWPDCADEEDSFEAVTLSAPLNGVTGSDSMERIPLATYEGFPHVLTRTNGEKGKRRYVSGDGEEMTLIPGTTAAEAYNKLIVELEKSVHTLVGIE

SEQ ID NO: 275141 - protein, 215 aa, Glycine max
  unsure (1)..(215): unsure at all Xaa locations
  Clone ID: PAT_MRT3847_90473C.1.pep
EDFVTDIVISFILAGKDTTSAALMWFFWLLSKNPGVEKEVLKEIMEKPETPAYDEVKDMVYIHAALCESMRLYPPVSIDSXKEAVDDDVLPDGTVVKKGTLVTYHVYAMGRMESIWGEDWAEFKPERWLEKVETGKWKFVGRDSFTYPVFQAGPRICLGKEMAFMQMKRLVAGILRRFTVVPAMAKGVEPHYFAFLTSQMEGGFPVKIIDREASC

SEQ ID NO: 275142 - protein, 44 aa, Glycine max
  Clone ID: PAT_MRT3847_90474C.1.pep
MASFDEAPPGNSKNGEKIFKTKCAQCHTVDKGAGHKQGSRVTLY

SEQ ID NO: 275143 - protein, 53 aa, Glycine max
  Clone ID: PAT_MRT3847_90475C.1.pep
YAWHWSYSGGQNGYFTEMSRLSCAPLSYAAISKGDTMSYASLCGSEPDSPPQV

SEQ ID NO: 275144 - protein, 90 aa, Glycine max
  unsure (1)..(90): unsure at all Xaa locations
  Clone ID: PAT_MRT3847_90476C.1.pep
VXRRYIYLNXEILKENPNMWAYVAPSLDAKQNIVVVYVPKLGKKASYIAIKELGQPKSKNTHFILFTTNGVYIPCAYYQLTKQIGLFPYF

SEQ ID NO: 275145 - protein, 162 aa, Glycine max
  Clone ID: PAT_MRT3847_90477C.1.pep
LPYLIGLIFRDRIHQWLKRWPKNAAMIRLAGEGSWFHQFQVVALFRVSPFPYTIFNYAVVVTNMRFWPYLCGSIAGMVPEAFIYIYSGRLIRTLADAQYGKHQLTTVEIIYNIISFIVAVVTTIAFTVYAKRTLNELKIAEANEEAASVSGSSNLEMGKGSH

SEQ ID NO: 275146 - protein, 63 aa, Glycine max
  Clone ID: PAT_MRT3847_90478C.1.pep
LSAWVHCSSLFVCGALSLSRVILFTLTVSGGSYYMRSFTSLTTPKSEYGTVFRAELCLTRPLA

SEQ ID NO: 275147 - protein, 205 aa, Glycine max
  Clone ID: PAT_MRT3847_90479C.1.pep
MLLCFGFLFLFAFGEGRTMSQQGPRKAHPIEKTLPCTLEELYKGTTKKMKISREIADASGKTLPVEEILTIDIKPGWKKGTKITFPEKGNEQPNVIASDLVFVIDEKPHPVFTRDGNDLVVTQKVSLEEALTGHIVHLTTLNGRVLKIPINNVFHPTYEEVVPREGMPIPKDPSKRGNLRIKFNIKFPAKLTSEQQAGIKKLLPY

SEQ ID NO: 275148 - protein, 57 aa, Glycine max
  Clone ID: PAT_MRT3847_9047C.1.pep
RPTHTPLNHYKTLLHSFTTTPTYQRLILHIVFSHIYLNTSMLTYPSSTNTFITSTLS

SEQ ID NO: 275149 - protein, 59 aa, Glycine max
  Clone ID: PAT_MRT3847_90480C.1.pep
KFSHEEIFTAWSTYVRPATTLLSDGLPYLYSMVHDCVVSSILGDNVNGVMLSTINIMSA

SEQ ID NO: 275150 - protein, 41 aa, Glycine max
  Clone ID: PAT_MRT3847_90481C.1.pep
FFFFFFFFFFFFFFFFFFFFFFFLRQKRKKKQKHPPNNANN

SEQ ID NO: 275151 - protein, 56 aa, Glycine max
  Clone ID: PAT_MRT3847_90482C.1.pep
EPNIGPSSNWPASNICLTQQALLLVHFQLGISQPEPNYYSKSCPQDAAIIHRNKSH

SEQ ID NO: 275152 - protein, 116 aa, Glycine max
  unsure (1)..(116): unsure at all Xaa locations
  Clone ID: PAT_MRT3847_90483C.1.pep
AYSFSLAQYEEVVDNPQLFMFTLEKLHADMGTKXMIPIGGGRELYLHPLFDEVTSRGGIVKIIRERKWKDVPSVLNFPSTATDALIELRKYYAALLYHYEQIDFFKAREWDPTAPD

SEQ ID NO: 275153 - protein, 113 aa, Glycine max
  Clone ID: PAT_MRT3847_90484C.1.pep
MANINIGYFPAALFSNMTSADQVGWGGRTRTPPNTPSPPMGSGHFPDHTFHHACYFTFVSFQNEATRNYGIGPHGAQTFSDRSDCFGVRYLGYIAEEVGYSLQFGGPGGSCGN

SEQ ID NO: 275154 - protein, 224 aa, Glycine max
  Clone ID: PAT_MRT3847_90485C.1.pep
MTGGTSGGIEARSKQWDDKKIEGLNKKKEQYESELEELGSIRDMHLKESEASGKISGLEKKIQYAEIEKRSIEDKLSNLSQEKKTIKERIECISPELQKLNDAVNKSNADVRKLERRINEITDRIYRDFSKSVGVANIREYEENRLKAAQSIAEERLNLSSQLSKLKYQLEYEQNRDMTSRIQELEASLGTLEKDLKRVQDREAAAKLAAENATEDCEKEIQEW

SEQ ID NO: 275155 - protein, 69 aa, Glycine max
  unsure (1)..(69): unsure at all Xaa locations
  Clone ID: PAT_MRT3847_90486C.1.pep
AGSSTQXASLXPTRFLPSSPWQQQLAXVLGKTTGNSLXXKXVRHPXQRQFLEKNGSIXXXSSSGSXAXL

SEQ ID NO: 275156 - protein, 130 aa, Glycine max
  unsure (1)..(130): unsure at all Xaa locations
  Clone ID: PAT_MRT3847_90487C.1.pep
AGRGNASSGMGVARPSVNTFLEXRRRKFISSEIFKICEIKIEALVEITGGPAESYDXDFTASLPENESRYTVFNFDSVTHENCQKSKIFFIRXXPSVTHIRPKMLFATSKDRFRKELQGIHLETQATDPT

SEQ ID NO: 275157 - protein, 51 aa, Glycine max
  Clone ID: PAT_MRT3847_90488C.1.pep
VIACFWSDHPLVYAVKNFSIGRVGLDNCIARDRVYGFSFYYAVIIMLFKLG

SEQ ID NO: 275158 - protein, 75 aa, Glycine max
  Clone ID: PAT_MRT3847_90489C.1.pep
SSVVIMGPSFGAFLLCLFGLPLRSALLFGIMPRTMLPSSLFACGLANSFLSLGLLNPNQRGGPGGCCMQPLFLVS

SEQ ID NO: 275159 - protein, 56 aa, Glycine max
  Clone ID: PAT_MRT3847_9048C.1.pep
HTPALIAPHPTATHSASPAIASFPLPPPSVVKLVCITGHSRVKDRPDIVDRTWTIS

SEQ ID NO: 275160 - protein, 40 aa, Glycine max
  Clone ID: PAT_MRT3847_90490C.1.pep
GVLNYLFQKRHNTIPNHVIQNLYIYAILTDFSICNTSIAS

SEQ ID NO: 275161 - protein, 101 aa, Glycine max
  Clone ID: PAT_MRT3847_90491C.1.pep
GRCESVYIPRDESFGHLKSSDFLAYILKSASQNVIPQLQSALRLQFNQPEFTSFDDVRGLYDGGIKLPTDALSKLSPIPLFTELFRTDGEQVLKFPTPKVI

SEQ ID NO: 275162 - protein, 281 aa, Glycine max
  Clone ID: PAT_MRT3847_90492C.1.pep
MAVSYVHMLQCNRGFHKGNLSYPNCSYKARRSHRLVFASMHTPEPKVDSLLDSVKWDTKGLVVAIAQNVDTGAILMQGFANREAIATTISSRKATFYSRSRSTLWTKGETSNNFINVHDVFIDCDRDSIIYLGKPDGPTCHTGAETCYYTSVFDLLKQQEAEENKLALTSLYALESTISQRKTELIGENEKPSWTKRLLLNDKLLCSKIREEANELCQTLENNEDEKRTASEMADVLYHAMVLLAKKGVKIEDVLQVLRLRFSQSGIEEKKSRVSQKSVDD

SEQ ID NO: 275163 - protein, 75 aa, Glycine max
  unsure (1)..(75): unsure at all Xaa locations
  Clone ID: PAT_MRT3847_90493C.1.pep
MAKXVEXAERGXLSXXEYXDPPPAPLLXAEXLTKWXXXRAHIAEFIXTXLXLXILCSTVIGYXXQTDLGWWKSVV

SEQ ID NO: 275164 - protein, 46 aa, Glycine max
  Clone ID: PAT_MRT3847_90494C.1.pep
FNSFPNPFPTYITITPFKLVKHYLLKTIKTDLPHHTLTPSIINHHF

SEQ ID NO: 275165 - protein, 77 aa, Glycine max
  unsure (1)..(77): unsure at all Xaa locations
  Clone ID: PAT_MRT3847_90495C.1.pep
PGGQCFVPLGLAVAPVTFLEFTVXQLKNGRLAMFSMYEFFVQAIVPVKGPLXNLLVHLAVPVADKAWVYASQFAPGC

SEQ ID NO: 275166 - protein, 47 aa, Glycine max
  Clone ID: PAT_MRT3847_90496C.1.pep
SFSVKFCYRTQYSFLDTLKTTSFSCKTTQKPYVFRFHTPTTSKYTAR

SEQ ID NO: 275167 - protein, 102 aa, Glycine max
  unsure (1)..(102): unsure at all Xaa locations
  Clone ID: PAT_MRT3847_90497C.1.pep
MTDSTSPNLITSLHTNSHKTKFPSLPGKKTLYTKLNFSFSIPFNKSIRVKSIDTTIYDQLIAYQDLYNIITLQNSSYIIRVTLXSENCRTLDLTPTAFDAIS

SEQ ID NO: 275168 - protein, 459 aa, Glycine max
  Clone ID: PAT_MRT3847_90498C.1.pep
MTRGIKHRQKAKSKKKGGSSSSLAPEIPAKVWQPGVDKLEEGEELQCDPSAYNSLHAFHIGWPCLSFDILRDSLGLVRTEFPHTVYFMAGTQAEKPSWNSIGIFKVSNITGKRREPVPKLGTDDTEMDGEDSDSDDDSEEEDEGGAQGPRCVNRIRSMPQNPHICAAWADTGHVQVWDLNSHLNVLAETETEGVQGVAAVFNQDPLYKFKHKDEGYAIDWSPLVPGKLASGDCNNCIYLWEPTSAGTWNVDNAPFIGHTASVEDLQWSPTESHVFASCSVDGNIAIWDTRLGKSPAASFKAHNADVNVMSWNRLASCMLASGSDDGTISIRDLRLLKEGDSVVAHFEYHKHPITSIEWSPHEASSLAVSSSDNQLTIWDLSLEKDEEEEAEFKAKTKEQVNAPEDLPPQLLFIHQGQKDLKELHWHTQIPGMIVSTAEDGFNVLMPSNIQSTLPSNGAL

SEQ ID NO: 275169 - protein, 272 aa, Glycine max
  Clone ID: PAT_MRT3847_90499C.1.pep
MASFPIPQLLPSHTNHSLTCFSSNTNTLPLSSSLLRRRRSLDSLRCSASSEKQPHDDALELPLFPLPLVLFPGAILPLQIFEFRYRIMMHTLLHTDLRFGVIYNDAVSGTAEVGCVGEVVKHERLVDDRFFLVCKGQERFRVNDVVRTKPYLVGRVTWLEDRPSEINVGGDDVEGLAREVEGYMKDVIRLSNRLGGKKGENKEIGNLRRNLFPTPFSFFVGSTFEGAPREQQALLELEDTAPRLKREKDTLKNTLNYLTAASAVKDAFPSSS

SEQ ID NO: 275170 - protein, 51 aa, Glycine max
  Clone ID: PAT_MRT3847_9049C.1.pep
PEIVPVHKELIPSNAAITGESSHSLLLAAMTTLNSINLSCICQQAYLVEKS

SEQ ID NO: 275171 - protein, 126 aa, Glycine max
  Clone ID: PAT_MRT3847_904C.1.pep
GFYRCFIRDFSKVALPLSNLLQKEVEFDFNDKCKEAFHCLKRALTTTPTIQAPDWTTPFELMCDASNYTLGVVLAQKISLLQLTSFPISSFTFITFVRFYLMIYLLLITCATLRTMCCLSMVHSVL

SEQ ID NO: 275172 - protein, 500 aa, Glycine max
  Clone ID: PAT_MRT3847_90500C.1.pep
MTRGIKHRQKAKSKKKAKKKNQGSKKEGGSSSSLAPEIPAKVWQPGVDKLEEGEELQCDPSAYNSLHAFHIGWPCLSFDILRDSLGLVRTEFPHTVYFMAGTQAEKPSWNSIGIFKVSNITGKRREPVPKLGTDDTEMDGEDSDSDDDSEEEDEGGAQGPSLQETSSSFEFLLFDLLTASNLILRKVAHQGCVNRIRSMPQNPHICAAWADTGHVQVWDLNSHLNVLAETETEGVQGVAAVFNQDPLYKFKHKDEGYAIDWSPLVPGKLASGDCNNCIYLWEPTSAGTWNVDNAPFIGHTASVEDLQWSPTESHVFASCSVDGNIAIWDTRLGKSPAASFKAHNADVNVMSWNRLASCMLASGSDDGTISIRDLRLLKEGDSVVAHFEYHKHPITSIEWSPHEASSLAVSSSDNQLTIWDLSLEKDEEEEAEFKAKTKEQVNAPEDLPPQLLFIHQGQKDLKELHWHTQIPGMIVSTAEDGFNVLMPSNIQSTLPSNGAL

SEQ ID NO: 275173 - protein, 46 aa, Glycine max
  Clone ID: PAT_MRT3847_90501C.1.pep
TGPFLQQVDKPCVLGFLVVFVNDDQCAFLSNPPFMLEFFSLKVTLS

SEQ ID NO: 275174 - protein, 537 aa, Glycine max
  Clone ID: PAT_MRT3847_90502C.1.pep
AGGKEGVLVIWRLDTKKNYCLPRFGSPLLYFVDSPDRSLFSISHADNQMLILKKPSKPMEIISCISGIKPPLSSQDICEGLSSRVAFDCTSGLLAVQTENYAIQFYSLFANREVYEVQVCERNHQPVDEVTVVVSLVELSVDGSMMGTVDVKLPEDGIGGFICLKFWDLDDNKRFSLSTLIYEPHRDAHISAVAFHPTRPMAVSTSYGGDFKIWVCREEIQQKGQMVRSSGWRCHAVGSYKNKAMRAAAFSADGSVLAVAADTVITLWDPNNNVLIAVIGETQMPIMRLVFAGKSDYLLSVCHFSKPQLSVWSMSKLAASWSYRLQIEAVSSAIDLSYFAVLALLPKSNECTFKGDGIILLFKVTDPVPVASWSVTKAKGGRLAFIQGDPFERAVIDGKPTQTLLAYINGDHEYVIFHPSGRKACELSMTKQDDLAFEETGQFGYASIYGELPKFDLKRKMDSSISSAASASKRHWFTIFSGLSQSLPPLTKLCSEFLESLLEKRSSTVECHATTSSRDFCYFVGPLAEFKRPKDRT

SEQ ID NO: 275175 - protein, 117 aa, Glycine max
  Clone ID: PAT_MRT3847_90503C.1.pep
MEKSSSSLKKKRSKKLSKVKASSTIKKSRKSKSKKVRRREVSLSSSDYEDSKKLDTLASSSSEDSYRRKRDRSRTRKEVKGLKRKARGRSYSSDSSEDSHYARKRKKAKRQNERDQV

SEQ ID NO: 275176 - protein, 185 aa, Glycine max
  Clone ID: PAT_MRT3847_90504C.1.pep
MGKSSSSLKKKRSKKLSKAKASSKSKRSRKSKSKKVRRRKVSPSSSDYDDSKSLDTLASSSSEDSYRRKRDRSRTRKDVKGLRRKARGRSYSSDSSEDSHYARKRKKAKRKNERDEVMKKSSQKKKIKREASVDLMSSRSWSCSTCQDGSASSDDSQCKSRRGRSEEKRKTEEGREERFGSKKSS

SEQ ID NO: 275177 - protein, 336 aa, Glycine max
  Clone ID: PAT_MRT3847_90505C.1.pep
IPAARPHNEWLQTVQSEPDVISMSFIPITSVLNGVPGSGFLSHAINLYLRYKPPIVELHQFLEFQLPRQWAPVFSDLPLGPQRKQRSSASLQFSFMGPKLYVNSTQVDVGKRPVTGLRLYLEGKKSNRLAIHLQHLSSLPKIFQLEDDPNENFWRKSYDRRFYEKVQWKNFSHVCTAPVESEEDLSIVTGAQLQVENYGIKNILFLRLRFSTVLGAKAVKHPEWEGSLKLGAKSGLISTLISQHFTSTFQKPPPRPADVNINSAVYPGGPPVPVQAPKLLKFVDTTEMTRGPQESPGYWVISGAKLVVDKGKISLRVKYSLLTMVLPDEEEMLDDQ

SEQ ID NO: 275178 - protein, 111 aa, Glycine max
  Clone ID: PAT_MRT3847_90506C.1.pep
QGFLFFYIHFFNTRFPPLTHYQYLNKNQTIFCFPKNRTLGQKLNQTLDHNRNPPCCGFSAPTPPVPTPGKKRGPLPSGNAKIKQPKGPPFTYGKKKETTCTFKGPLGTMPT

SEQ ID NO: 275179 - protein, 39 aa, Glycine max
  Clone ID: PAT_MRT3847_90507C.1.pep
CEMSCLSEACHLCSSNFLEHMCTIICQLEVYMTRYINVL

SEQ ID NO: 275180 - protein, 65 aa, Glycine max
  Clone ID: PAT_MRT3847_90508C.1.pep
KSKRKFDSGRISRLLDKEPMSTFCINYARLTTAYSCLSYATRDTHLKLAVCFNMTLVFNAMLRHN

SEQ ID NO: 275181 - protein, 97 aa, Glycine max
  unsure (1)..(97): unsure at all Xaa locations
  Clone ID: PAT_MRT3847_90509C.1.pep
VAPAXSDGLSRASXSCWTLXXPSIVETGRGGVSSSLSKITPPSAATRVIPSSHVLSHPPTPMDRVCIIHANKILSVFLLLWWWWLYDHFDFCLFSDP

SEQ ID NO: 275182 - protein, 474 aa, Glycine max
  Clone ID: PAT_MRT3847_9050C.1.pep
MSLLLLSFLLIIPILLLLRRKRKPSKRVPPGSLGIPVVGQSLGLLRAMRANTAEKWVQERINKYGPISKLSLFGKPTVLIHGQAANKFIFSGGGNAIANQQTQSIKMILGDRNLLELTGEDHSRVRGALVPFLKPESLKRYVGKMDEEVRKHLEMHWQGKQQIKVLPLMKTLTFNIICSLLFGVERGKQRDQFLDSFQEMIQGMWSVPINVPFTRYNRSLRASARIQNILKEIVQKKKIELKQNAASARQDLISFLLGMVDEDGKQVMSEKEIFHNIKLVMVAGHDTSAVLITFIIRLLANEPAIYAAVLQEQEEIAKGKLSGEALTWEDLSKMKYTWRVAMETIRMFPPIFGGFRKAATDIEYDGYFIPKGWQIFWVTAMTHMDENIFPEPSKIDPSRFENQASVPPYCFIPFGGGARICPGYEFSRLETLVAIHYLVTRFSWKLCSDNFFSRDPMPVPTQGLLVQIWPRKLS

SEQ ID NO: 275183 - protein, 95 aa, Glycine max
  Clone ID: PAT_MRT3847_90510C.1.pep
SHRRRHSFGEDELAYLPDRKRETWINDDTGSHASVPSPEEKDDITNLDELGKDYKRSKRRGMLGWLKLRKPDNIDGLSPNVDSEGSGNGSPASAL

SEQ ID NO: 275184 - protein, 51 aa, Glycine max
  Clone ID: PAT_MRT3847_90511C.1.pep
ILLSFVLIAQIGSTFNRYHYTHQQPTNIHLLLIQVAVYVVSSDALLALKVY

SEQ ID NO: 275185 - protein, 119 aa, Glycine max
  unsure (1)..(119): unsure at all Xaa locations
  Clone ID: PAT_MRT3847_90512C.1.pep
VGKTKRGTPKNFGKKGGDPKTFFLFGRGKWARPLWGGGAGNKTKKNHPKKKFLLFFLKIKNPYGGGKARGSRGGKRETPKLSTGEEKWGGTKKSPLQIFRXARDNGEGPKNSGGREGGV

SEQ ID NO: 275186 - protein, 115 aa, Glycine max
  Clone ID: PAT_MRT3847_90513C.1.pep
WKGVLFSMIVAHCLGDLDALSNYDPLLFLHCCSYVVEDCSHRTLYLPACNVLYAEIQFVLTIERGIVKPEFGPKFAFSSTSRLGSLVSDLRLPPYLNLLTKVMKGNWLCFTRRNL

SEQ ID NO: 275187 - protein, 192 aa, Glycine max
  unsure (1)..(192): unsure at all Xaa locations
  Clone ID: PAT_MRT3847_90514C.1.pep
HQILPESSTVGKVPQGTLVGQFTIGGMTCAACVNSVEGILRNLPGVRRAVVALATSSGEVEYDPSVISKDDIVNAIEDSGFDGSFIQSNEQDKIILRVVGVYSLIDAQVLEGILSSTKGVRQFHFDQVSXELDVLFDTENLXSRSRVDASQKEAMENLITCQKPYTRMVLXTLQKPRPYFSFYSQLFLKILF

SEQ ID NO: 275188 - protein, 206 aa, Glycine max
  Clone ID: PAT_MRT3847_90515C.1.pep
MQMAILLRGGALGDSSFRLCSLTSTSSLHVSQNVAIPTSSSSPILPLIASKFKTASRNRITCSAVQESSPSTAATTAETKEEVKEAPKAAAPAKKPPAKAPAKPLPQMMEEDVIPSLKAIFEAQEDFSNIELVFKDNKLEGSFLKKGNPYSFWAFFPTGNLIGPKGFSLSSYNSRASTVEPFLVDEKKITKPLANISQAQNKNITA

SEQ ID NO: 275189 - protein, 59 aa, Glycine max
  unsure (1)..(59): unsure at all Xaa locations
  Clone ID: PAT_MRT3847_90516C.1.pep
XHXQRLRLHSHKILTLSQFKNXNPTXTHXPXXIKXKNANSNXXLSXHSLPXSLLLNNNR

SEQ ID NO: 275190 - protein, 178 aa, Glycine max
  unsure (1)..(178): unsure at all Xaa locations
  Clone ID: PAT_MRT3847_90517C.1.pep
MGSLLPPKSSVSEWEXYLTSKIWDLWDEDCEIIPALFLSYHNLPTSLXELFGFFALFPQEFLVFQGGLIQLWMAENLLQFPQQNKSLKEVGEQYYDDLLSKSFFQQSSEDEALFFMHDLLNDLAKYVCGDIYFRFGIDDKARRISKTTRHFSLAINHVKYFDGFGSLYDTKRLRTFMP

SEQ ID NO: 275191 - protein, 64 aa, Glycine max
  Clone ID: PAT_MRT3847_90518C.1.pep
MAGPRIAHATLKGPSVVKEIIIGITLGLAAGSVWKMHHWNEQRKTRTFYDLLEKGEISVVAEEQ

SEQ ID NO: 275192 - protein, 60 aa, Glycine max
  Clone ID: PAT_MRT3847_90519C.1.pep
SPRVSIANPPYLQPGRVQRAFKASEDQNVTCTLWKPGFRRASIRRRKGLSEVTANLIELT

SEQ ID NO: 275193 - protein, 80 aa, Glycine max
  unsure (1)..(80): unsure at all Xaa locations
  Clone ID: PAT_MRT3847_9051C.1.pep
ETIVSMIPADRGSVSAGFLXRLLSISSPLGVSPVTKTELIKXSQLQFEEATVSDLLYPSTSPLDQNFYDTELVLAVLEIT

SEQ ID NO: 275194 - protein, 110 aa, Glycine max
  Clone ID: PAT_MRT3847_90520C.1.pep
MTNGGARAAPDDFGRAAVRLAVAQLCDAAGFQGATDYALDAFTDVDVRYLLDQGRTAESHANHAGRSQCTVFDAIRGMEDLEAPRAFSAPAARHQRDYSFVDPQTKSVRP

SEQ ID NO: 275195 - protein, 356 aa, Glycine max
  unsure (1)..(356): unsure at all Xaa locations
  Clone ID: PAT_MRT3847_90521C.1.pep
ADVKGTLHLDKSLLADNPSLSLHHDKQDCYIDICSPEVLSLFTDNFDYQHLRRHFVKGLLLDDIMGYKIFVHEIHSDYAARIDNFRSYDTVSKDIIHRWTYPLVPDVMNFGDTATKLERQGIYRASEISQSQSAVIGPFTVIGSGTKIGHNTKILNSVIGEGCKIGSNVIIEGCYIWDNISIEDGCKLQHAIVCDGVIIKSGAVLEPGVILSFKVVVGPEFVVPPYSNVSLLQQPIEEDSDEELEYADSTSVIGSQVDKSDVEIASKVLETHFSPASELGMGGAGHVWSTCEGSHEEEWRHSVAPIPKDKVXEAIKTMKDDLENDDSFLPASGELKPNSNYSDDDDHEDSRDDSYY

SEQ ID NO: 275196 - protein, 55 aa, Glycine max
  Clone ID: PAT_MRT3847_90522C.1.pep
RRKSIMIWKHHQETHVTLKPIFCPILLQHDPVPVPLTNTVSWQTIHKNFGLRLLK

SEQ ID NO: 275197 - protein, 56 aa, Glycine max
  Clone ID: PAT_MRT3847_90523C.1.pep
DIRKKKLLVSNHVCSSKLETVSREVNRFFLKVYYHASVFVQVCMIINSFNGTFHAS

SEQ ID NO: 275198 - protein, 87 aa, Glycine max
  unsure (1)..(87): unsure at all Xaa locations
  Clone ID: PAT_MRT3847_90524C.1.pep
PKHHRRYGHNMNFFLHHISRSPXHANPQLCSLYKPAHKVFFFLSKARGIKGPLFAFFQLWSVVIRSIWNKPKSYPFLFNTNVKQSVN

SEQ ID NO: 275199 - protein, 197 aa, Glycine max
  unsure (1)..(197): unsure at all Xaa locations
  Clone ID: PAT_MRT3847_90525C.1.pep
KNIKIAVSCRRKSINLSIMMPQSDDIAAAQARYDGERVEAQAMHRNQSAWMAHWKQTDYKSTTPACNRLRIDCEVKEEKEDNGAEQRDLLGGLDSSMHAGAVGEAARATSVTFTNEADDEKSKKESSDSKSFPTFKFSRKLDGGLSLQREQHDREGGKSETEPCSGDEDDNISLNRNWTSGAXLSSTSAHASXKIET

SEQ ID NO: 275200 - protein, 62 aa, Glycine max
  Clone ID: PAT_MRT3847_90526C.1.pep
WGNWAAHPSVKKKKGVGKKEIGLIILVHTPLSHYFGGEVLLIHQGTPFYPKNCPHEEQKIFF

SEQ ID NO: 275201 - protein, 67 aa, Glycine max
  Clone ID: PAT_MRT3847_90527C.1.pep
NNAVHLDSKSFLFFHGLCINSSNPYRYFPFQLHYFCLNTVPDGVKTWSPTLGIYAPTKKKKCYIKKS

SEQ ID NO: 275202 - protein, 403 aa, Glycine max
  Clone ID: PAT_MRT3847_90528C.1.pep
MSWACKKCTFVNPPSQKGECEICFSPASPSASGPSSSSSPPKWSCKACTFLNPYNNPSCEVCGTRCPVLSLSNLTDLNDATDHDSSVGSVFFPLRTCKKRKAIDDDDDSSEVKVKPSDKATDITGDENIDSGKAFKILSYNVWFREDLELHKRMKAIGDLVQFHSPDFICFQEVTPNIYDIFKRSTWWSGYRCSVSSEMDYSRPYFCMVLSKLPVKSFSKKPFSNSIMGRELCIAEVEAASGKPLVIATSHLESPCPAPPKWDQMYSKERVVQANEAINLLKKQPSVVFGGDMNWNDQQDGQYPLQDGWVDAWSQLRPNESGWTYDTKSNQMLTGNRTLQKRLDRFICQFTDFKITSVDMIGMEAIPGVSYNKEKKVRKEIKQLVLPVLPSDHYGLLLTISSK

SEQ ID NO: 275203 - protein, 132 aa, Glycine max
  unsure (1)..(132): unsure at all Xaa locations
  Clone ID: PAT_MRT3847_90529C.1.pep
VIVIDEMNTVIYTVSDHYPKRGAKQWGXVHYLXLRMIVLKIVATFLSGFNNVLENIATYVYNSXAIYKKPSGSTNQPPKPMIAHXLDSHDYLDYLKRGIGSDENNNNLLDKLQDAIGKSQNPMKFFLQSIRT

SEQ ID NO: 275204 - protein, 226 aa, Glycine max
  Clone ID: PAT_MRT3847_9052C.1.pep
RWSKNKDLKHLGFVRIAAIQTFVIVSNLYEYAKQNSGPLRSVVGTVENTVTTILGPVCNKFKDVPDDVLVFVDKKVDEASHKFDEHAPPFAKHIADQAKGVIQKVTCEAGKVASEAQSGGPRAAVHYVATESKHFVLINSVKLWNGLNHYPPFHALSEMAIPTVAHWSEKYNHVIKAMTQKGYSFVGYLPLIPIEEIAKAFKQGEANLKGDNAASEEQRSESSDSD

SEQ ID NO: 275205 - protein, 194 aa, Glycine max
  Clone ID: PAT_MRT3847_90530C.1.pep
HAVRKIQTLGIPSTTMSWACKKCTFVNPPSQKGECEICFSPASPSASGPSSSSSPPKWSCKACTFLNPYNNPSCEVCGTRCPVLSLSNLTDLNDATDHDSSVGSVFFPLRTCKKRKAIDDDDDSSEVKVKPSDKATDITGDENIDSGKAFKILSYNVWFREDLELHKRMKAIGDLVQFHSPDFICFQVSIFMQL

SEQ ID NO: 275206 - protein, 147 aa, Glycine max
  unsure (1)..(147): unsure at all Xaa locations
  Clone ID: PAT_MRT3847_90531C.1.pep
GPPKWDQMFSKERVVQANEAINLLKKXAXNVVFGGDMNWNDNLDGQYPLQDGWVDAWSQLRPNENGWTYDTKANQMLTGNRTVQKRLDRFICRLTDFKITSVDMIGMEAIPGVSYNKEKKVRKEIKQLVLPILPSDHYGLLLTISSK

SEQ ID NO: 275207 - protein, 166 aa, Glycine max
  unsure (1)..(166): unsure at all Xaa locations
  Clone ID: PAT_MRT3847_90532C.1.pep
QILGKTLTGKNITLEVEYCDAIENVKAKIQEKEGIASDQKRLIFAGKQLEDGFFLAEDNIQKESALYVALQLRGGMQIIDETLTGKTETLEEESSDTIDNGKDEIQDKEGMPQDQQRLSFGGKQLEDGKTLADYKKRKGTTXHLALTFXEGGGKIFFWPLTGKTIT

SEQ ID NO: 275208 - protein, 242 aa, Glycine max
  Clone ID: PAT_MRT3847_90533C.1.pep
MSCWACKKCTFVNLPSQKGECEICFSPASPLSMGPSCSSSPPKWSCKACTFLNPYNNPSCEVCATRCSVLSLSNLTDLNDATDHDSSVGSVFFPLRTCNKRKAIDDDDSSEVINFKVKPSNITGDENIDTGKAFKILSYNVWFREDLELHKRMKAIGDLVQLHSPDFICFQVSIFMLTIFIFDEIFNLCGFVYFGPLLPQEVTPNIYDIFKGSAWWSVYCCSVSSEMAYSRPYFCMLLSKLP

SEQ ID NO: 275209 - protein, 267 aa, Glycine max
  Clone ID: PAT_MRT3847_90534C.1.pep
ESSTSTSFAQPSGLSLSQDLREIYIADSESSSIRAMDLKTRGSQLLAGGDPMFADNLFKFGDQDGIGSEVLLQHPLGVVCGNDGEIYIADSYNHKIKKLDPTSKRVSTIAGTGKAGFKDGTAVKAQLSEPSGIVEGNKGRLFIADTNNSLIRYLDLNINETELRTLELKGIQPPKPKSRSFKRLRRRASADTMPITIDTISSNEGNLSIKISLPNEYHFSKEARSRFSVDIEPEDAVNIDPLDGFLSPEGSATLHFKRSSNNASVGR

SEQ ID NO: 275210 - protein, 198 aa, Glycine max
  unsure (1)..(198): unsure at all Xaa locations
  Clone ID: PAT_MRT3847_90535C.1.pep
IISVERILQYTCISSEPPLVVDENRPDPSWPSYGEVGIQDLKVRYAPHLPLVLRGLTCKFRGGLKTGIVGRTGSGKSTLIQTLFRIVEPTSGQIMIDSINISSIGLHDLRSRLSIIPQDPTMFEGTVRNNLDPLEEYTDEQIWEALDKCQLGDEVRKKEGKLDSKVTENGENCSMGQRQLVXCLAGVLLKKSTALVLD

SEQ ID NO: 275211 - protein, 88 aa, Glycine max
  Clone ID: PAT_MRT3847_90536C.1.pep
STRFNKFRKKSYKLSHIVRTHKKKKKKKKKKKKKKKKKKKKKKKKKKKKEKNKKKKKKKKKRGGAVLKDQSLFPRAWKVKFFFWGPLN

SEQ ID NO: 275212 - protein, 44 aa, Glycine max
  Clone ID: PAT_MRT3847_90537C.1.pep
GPIAGKYPLISMHVCQHLIIRSEILFIFQLSPKVCLGSFCIIIP

SEQ ID NO: 275213 - protein, 125 aa, Glycine max
  Clone ID: PAT_MRT3847_90538C.1.pep
TPPGPLFVKRLSPRFASFFSSFGPAGFPGLKCSLGPPPFFQLSPSLGPPGFPVFSSGFVGFVDLCSGFHFPPVPPFSHFFPGFSWPFLYAKLVPLRGPVKIFQINPRVPKKKKKKKKKKKKIKKK

SEQ ID NO: 275214 - protein, 923 aa, Glycine max
  unsure (1)..(923): unsure at all Xaa locations
  Clone ID: PAT_MRT3847_90539C.1.pep
LPDTISMIAQTKVSLDRIVSFLRLDDLRSDVVEKLPWGSSDTAIEVVDGNFSWDLSSPSPTLQNINLKVFHGMRVAVCGTVGSGKSTLLSCVLGEVPKISGILKVCGTKAYVAQSSWIQSGKIEDNILFGECMDRERYEKVLEACSLKKDLEILSFGDQTIIGERGINLSGGQKQRIQIARALYQDADIYLFDDPFSAVDAHTGSHLFKECLLGLLCSKTVVYVTHQVEFLPAADLILVMKDGKITQCGKYTDLLNSGADFMELVGAHKKALSTLDSLDGAAVSNEISVLEQDVNLSGAHGFKEKEASKDEQNGQTDNKSELQGQLVQEEEREKGKVGFSVYWKCITTAYGGALVPFILLAQILFQALQIGSNYWMAWATPISEDVQPPVEGTTLIAVYVGLAIGSSFCILARAILLVTAGYKTATILFNKMHFCIFRAPMSFFDSTPSGRILNRASTDQSALDTDIPYQIASFAFILIQLLGIIGVMSQAAWQVFVVFIPVIAISVLYQQYYIPSARELSRLVGVCKAPIIQHFAETISGTTTIRSFDQQSRFQETNMKLTDGYSRPKFNIAGAMEWLCFRLDMLSSITFAFSLIFLISIPQGFIDPGLAGLAVTYGLNLNMVQAWMIWNLCNMENKIISVERILQYTCIPCEPSLVVDDNRPDPSWPSYGEVDIQDLKVRYAPHLPLVLRGLTCKFRGGLKTGIVGRTGSGKSTLIQTLFRIVEPTAASVMIDNINISSIGLHDLRSRLCIIPLDFILFEAIMSLVLAILYSISPRPITLSLSLQSPNHSTXAETISGTTTIRSFDQQSRFQGTNMKLTRVLPRKSKVLVRDEATASVDTATDNLIQQTLRQHFSDSTVITIAHRITSVLDSDMVLLLSQGLIEEYDTPTRLLENKSSSFAQLVAEYTMRSNSSFEKSDDH

SEQ ID NO: 275215 - protein, 219 aa, Glycine max
  Clone ID: PAT_MRT3847_9053C.1.pep
VRGKISKSIRQALDQPLNYARIYLADTIPENVKRVIYLDSDLVVVDDIAKLYGVDMKGKVVAAPEYCHANFTLYFTDNFWSDPVLAKTFRGRKPCYFNTGVMVMDVDTWRKERYTEKVEEWMAVQKQQKRIYHLGSLPPFLLVLAGNIKAVDHRWNQHGLGGDNFEGKCRSLHPGPISLLHWSGKGKPWLRLDSRKPCIVDHLWAPYDLYRSSRHFFEE

SEQ ID NO: 275216 - protein, 83 aa, Glycine max
  unsure (1)..(83): unsure at all Xaa locations
  Clone ID: PAT_MRT3847_90540C.1.pep
TQPSXITIDNNSIYDTGPERMDRQGPGSPRGEPLNLGADAQNCAIQVIPPVWEVMQAWGATTVPQSSTGLHTGRDETLFAHAR

SEQ ID NO: 275217 - protein, 141 aa, Glycine max
  unsure (1)..(141): unsure at all Xaa locations
  Clone ID: PAT_MRT3847_90541C.1.pep
GLKEGPFFFFVFGLAYFLFFVCDPFTMRLSLLAPKKKNPLLVFXMKGGGPGVDDMVFSPIKGTPPFFSQIEGGGAVFFYXKKGVWINLXRGFLSPPAWWAYTFGGGGGAIATPFLCPQGGVQGKFPRAPFLFFFSGGQFWD

SEQ ID NO: 275218 - protein, 45 aa, Glycine max
  Clone ID: PAT_MRT3847_90542C.1.pep
LIMQNMKFLFWLEQFDQVKHEVKLPVIRYSLFLIIAPRDLVGDML

SEQ ID NO: 275219 - protein, 161 aa, Glycine max
  Clone ID: PAT_MRT3847_90543C.1.pep
SRTVEMTILSAENLQMNRKSIRGSTFVTVQSDTSSDTSAATKVDSEGGSYPSWNEKVVMDVPLHARFITVEVKCKTSSSGSNSVGVAQIPVSDSIGGYMPENQLHFLSYRLWDGKVRRNGVINISVRVKVAEHSSCNLNSMSLSAVTGVPVAGNGPTGVVT

SEQ ID NO: 275220 - protein, 100 aa, Glycine max
  Clone ID: PAT_MRT3847_90544C.1.pep
ASSEHGSRLLGHALAGAEAIADLDSTPMDCDRDKGVLDETGLTEKIYQLLPSMAGNPPMDKMMQELDQHGKTTHDIGETRDRTPMDTTTAPDIEGGKCVG

SEQ ID NO: 275221 - protein, 42 aa, Glycine max
  Clone ID: PAT_MRT3847_90545C.1.pep
LQYWQHSYSRASELSAFTKSPVICSGFARFQRNEMLLYELKS

SEQ ID NO: 275222 - protein, 60 aa, Glycine max
  Clone ID: PAT_MRT3847_90546C.1.pep
MDESCYTLYYTLLNTWGTEPTSSQNGVSINLSLEMPPASWHQPMFSDAAATLRYHHWADR

SEQ ID NO: 275223 - protein, 91 aa, Glycine max
  Clone ID: PAT_MRT3847_90547C.1.pep
SQIFDISECPHARSPSDDWMKAGNKHTDNLRNCPILEPYVIASLHLNSPSSHVPFVKSLKLQVAMPGPGSSALGKTHVSIGQLPALNNIKL

SEQ ID NO: 275224 - protein, 51 aa, Glycine max
  Clone ID: PAT_MRT3847_90548C.1.pep
IIFQILLFHVCLSIHAELAGVDKRILNSKNFIIKQLQSPCLQEDAPSVLWR

SEQ ID NO: 275225 - protein, 45 aa, Glycine max
  Clone ID: PAT_MRT3847_90549C.1.pep
ALCLMVSTSFVDLCIISPPSRRSSSCKFSPMSNRSLLTSSVSKKT

SEQ ID NO: 275226 - protein, 58 aa, Glycine max
  unsure (1)..(58): unsure at all Xaa locations
  Clone ID: PAT_MRT3847_9054C.1.pep
LVXXKNXXLXXLPLGXEXXXDYXPXWXVRSWRGVSELXGRREVRGGFLCKQTVHGSGC

SEQ ID NO: 275227 - protein, 64 aa, Glycine max
  Clone ID: PAT_MRT3847_90550C.1.pep
PPARQLNLVKSRGPIGRRMRSGKRSIEPNRTYTRILPGPMIVLAEDVRNAHDYGDNGDHPKYVP

SEQ ID NO: 275228 - protein, 76 aa, Glycine max
  Clone ID: PAT_MRT3847_90551C.1.pep
SQIERWANSSDDTNNKALRLKLDAPKAGETPDPESKTRTGDCIFMTSARIIMVTLPRNRSGYCKGTPGQRGPIFFL

SEQ ID NO: 275229 - protein, 67 aa, Glycine max
  unsure (1)..(67): unsure at all Xaa locations
  Clone ID: PAT_MRT3847_90552C.1.pep
MGKVKIGINGFGRIGRLVARVALQRDDVELVAVNDPFITSVYMTYMXRYDSVHGSTGIMAMSRLRAE

SEQ ID NO: 275230 - protein, 33 aa, Glycine max
  Clone ID: PAT_MRT3847_90553C.1.pep
YSFRHAKTYYWLQININFENLSSNRLFEKSPTF

SEQ ID NO: 275231 - protein, 92 aa, Glycine max
  Clone ID: PAT_MRT3847_90554C.1.pep
MVKVSSMEKEGEKQKLGEGPQISRMEPVTHGAYGGGMYGTEKGQPEKQTKPPASESQSADGPVDKDAIKPKHNPPPSTGDRDLDITGQSYIQ

SEQ ID NO: 275232 - protein, 60 aa, Glycine max
  Clone ID: PAT_MRT3847_90555C.1.pep
GCEKTTEAWTFHASFYPYVPDSVIKRWYGVRGKNELLQNQGFIGCDGMRFINVRRGGASA

SEQ ID NO: 275233 - protein, 81 aa, Glycine max
  Clone ID: PAT_MRT3847_90556C.1.pep
AAVSPATAFSFKDAFILALEFDPAFVVKRVLFGCRKGNGLKKASDEGLLLLITELSQKTHRTRTRSHFGVVLCLLTWLGLK

SEQ ID NO: 275234 - protein, 62 aa, Glycine max
  unsure (1)..(62): unsure at all Xaa locations
  Clone ID: PAT_MRT3847_90557C.1.pep
DRTRPDHRLSXGIFRKHRGFLPDFKNLSISFYLFGDQSLRERKSLLLDGHQLSELIPYPILG

SEQ ID NO: 275235 - protein, 55 aa, Glycine max
  Clone ID: PAT_MRT3847_90558C.1.pep
RWGGQRFTWKGCQGALLRGLTRKNGALFKEKAPTLGLGGNRGVHPMARFRAPSLF

SEQ ID NO: 275236 - protein, 52 aa, Glycine max
  Clone ID: PAT_MRT3847_90559C.1.pep
LFTFKLNSFSLYHSIYYGRFINGSLIIIHLTGKLSGFAPRTFSFALESLASC

SEQ ID NO: 275237 - protein, 56 aa, Glycine max
  Clone ID: PAT_MRT3847_9055C.1.pep
MVRYITVVWCAEAALLHACDGTYWEEDAANPIQMAASRGGGGGPLNWAVPARAGVR

SEQ ID NO: 275238 - protein, 419 aa, Glycine max
  unsure (1)..(419): unsure at all Xaa locations
  Clone ID: PAT_MRT3847_90560C.1.pep
MHAYHTASYNLLVSKNLKNFPLSIINSKKKKISMQAFNWESNKYNWWNNLEGKVSDIAKAGFTSVWLPPPTHSFSPEGYTPQNLYSLNSKYGSERQLKALLQKMKQYKVRAMADIVINHRTGTTQGRGGMYNRFDGIPLGWDERAVTSDSGGLGNRSTGAIFQGFPNIDHTQDFVRKDIIGWXLRWLRHEVGFQDFRFDFXRGFSPKYVKEYIEGAKPLFCVGEYWDSCNYKGSTLDYNQDSHRQRIINWIDGTGQLSTAFDFTTKGILQEAVKGNFWRLRDPQGKPPGVIGWWPSRSVTFVDNHDTGSTQAHWPFPKDHIMEGYAYILTHPGIPTVFYDHFYDWGDSIREQIVKLIDVRKRQGIQSRSSVRILEAKHDLYSAVIGEKVCMKIGNGSWCPTGREWTLSTSGHNYAVWHK

SEQ ID NO: 275239 - protein, 202 aa, Glycine max
  Clone ID: PAT_MRT3847_90561C.1.pep
MYHVQAPRSTRRKESRNDKNPYSNRGLDKFSALLDDLDERRQKVYSQMSPQDISFVRFAYSSNDDFVPIVVKVKKNKDQKKHKSEELKARHITSFSEQLEKSDEEATLKERKQKLNKLESRKKNLSFSWFMLNSGHFYVPAVMMLILVFLVVFGRSVATLCTCVVWYVVPTLSEYYDSSKPRNKSMMNSKKRDYVRGWLMIV

SEQ ID NO: 275240 - protein, 68 aa, Glycine max
  Clone ID: PAT_MRT3847_90562C.1.pep
TNGSSKFQKPGVLKPFPDKIFQETLPGSFLGLMGQRKIKCPGNGFKERLATPIVTPVFFFFLTRLAFV

SEQ ID NO: 275241 - protein, 114 aa, Glycine max
  Clone ID: PAT_MRT3847_90563C.1.pep
LFEKGKKKSFRHYSIMNALPILLFFLFVSALGIVVPFLFFPICKNFQHLFLFIALHSSPHFQSAVTSDLVNFPFQFIIFFLWFLFAVYVFLFCFGVLTFFFWSVFQFMRRKLAM

SEQ ID NO: 275242 - protein, 70 aa, Glycine max
  Clone ID: PAT_MRT3847_90564C.1.pep
FNNIFAQSLFLYLCVYKAGRMLIIELAFLVKTQSSEFFIKVVRNNSKIDPILVEDRIKIDTYLMVLIFFD

SEQ ID NO: 275243 - protein, 97 aa, Glycine max
  unsure (1)..(97): unsure at all Xaa locations
  Clone ID: PAT_MRT3847_90565C.1.pep
PSTPKAVLFKTAAREKLIRQGFNIVGIIGDQWSDFLGGHKGENRTFKLPNXPCNTISSSFTFQQFRLXPIYLKVIKRVQKRALASLYVVSTVGQQVM

SEQ ID NO: 275244 - protein, 89 aa, Glycine max
  Clone ID: PAT_MRT3847_90566C.1.pep
ENPKILEFSFSSSLSISSYFDTGHLVFFFVPFTSRPQIKMQSYFYSVIKIKHNCETWIPSQSKGRSYTRTPSRKQVCTCYKMKINMTLQ

SEQ ID NO: 275245 - protein, 56 aa, Glycine max
  unsure (1)..(56): unsure at all Xaa locations
  Clone ID: PAT_MRT3847_90567C.1.pep
XXPLRXXHAXXXXXTXVXXXCXRIXVXXXXXTGXLXRXAXPXXCXSMXXXXXXXXS

SEQ ID NO: 275246 - protein, 50 aa, Glycine max
  Clone ID: PAT_MRT3847_90568C.1.pep
ADRVLELTVARSFNWIGPLMDFIPGIHGPTEGASPLIACFTYPILTGNPL

SEQ ID NO: 275247 - protein, 95 aa, Glycine max
  Clone ID: PAT_MRT3847_90569C.1.pep
LQHFILQPMLKMLRLGHLKSDNDSLTLMEQYTHHHTYLHSNINLIQDNDKHLQKTQTIIENMHLHNIHIAPKQSRYNNTTFINRTHHKFNNSILF

SEQ ID NO: 275248 - protein, 85 aa, Glycine max
  Clone ID: PAT_MRT3847_9056C.1.pep
YKPLSLSYRSSLPIIYVTKQPRFSPSLWFGFIRSTTPMKNSQSTKIQCKKKKLLCYKQGFYILQTIISHFVPSFSSATFHCIPRA

SEQ ID NO: 275249 - protein, 85 aa, Glycine max
  Clone ID: PAT_MRT3847_90570C.1.pep
HSSLTSSPYPTVQLINIHVASRNTQNTLNSYIYPANLHHLSTPKNISKYISSDATIYLSFGRNDSNALSLRPAPIQSPKKNHFLF

SEQ ID NO: 275250 - protein, 158 aa, Glycine max
  Clone ID: PAT_MRT3847_90571C.1.pep
WIESVVVPLELLQQLKASDFTDHQEYDDWQKRTLKVLEAGLILHPHMPLDKSNSAAQRLRQIVHAALDKPIETGKNTESMQVLRSAVMSLANRSYEGSYADSCHWADGIPLNLRLYEMLLQSCFDANDESSIIEEFDELMEQIKKTWAILGLNQTLHN

SEQ ID NO: 275251 - protein, 56 aa, Glycine max
  Clone ID: PAT_MRT3847_90572C.1.pep
IGGRRIPITPIPKPTETRSQFLIAIPISHQQDLVMQKSTYMNRTHLFTYHSYPLTK

SEQ ID NO: 275252 - protein, 75 aa, Glycine max
  Clone ID: PAT_MRT3847_90573C.1.pep
TQKTYLTRGLTWLRLIYSYKLLPIIQHNSLRKTITINGVLPIPYALCLIQFSLHITLPYQLFLIIQLYTLLLPSI

SEQ ID NO: 275253 - protein, 121 aa, Glycine max
  Clone ID: PAT_MRT3847_90574C.1.pep
YNKIFFFVGFINRQYILFILQGLCLVDWGRGIDLHLFPDHTLFKGDCKTSGFRCIEMLEDKPWKFQVDAYGLCAVVHMMLHNCYMEVVKKEQSDGSYMYLPKLPFKRYVPSVILYANCTSV

SEQ ID NO: 275254 - protein, 144 aa, Glycine max
  unsure (1)..(144): unsure at all Xaa locations
  Clone ID: PAT_MRT3847_90575C.1.pep
MQMDVYTHISLPSFISHRFSSSRFQCSSLSSCSPFKLVCSNRDSKESQRNDDNNNKGDKSSTDWDKAWSKFKKQGGKNXFSKFSDKYVSWNPKRSEFPLSEEVDPIKRTERSNLSFWNSPTFTLGGAIIIVLFLLLYTILAPIK

SEQ ID NO: 275255 - protein, 60 aa, Glycine max
  Clone ID: PAT_MRT3847_90576C.1.pep
LMTNCGIRGRQGTHPCLPQKKKKKKIGRCGRSKGSNLTFPCMRRYIFSIKLTKINLLAQR

SEQ ID NO: 275256 - protein, 71 aa, Glycine max
  Clone ID: PAT_MRT3847_90577C.1.pep
MDIYMYCSNYYGELSEIELCDWCQSEGRNYSRSHSSNSKKLAVAGNDAGTTTRSEYSGEKIKHHDRDQEMS

SEQ ID NO: 275257 - protein, 74 aa, Glycine max
  Clone ID: PAT_MRT3847_90578C.1.pep
WEQLHHCCHPLGQISNPLTPVLSCHFTYYPFVKPLVHRMFESLRSKAQVKAYYKNIIYSCLNIKYNSILIFCYH

SEQ ID NO: 275258 - protein, 72 aa, Glycine max
  Clone ID: PAT_MRT3847_90579C.1.pep
VTNDMSCHQYPYAIKQHVAFHIIYPSHNYSYSFTLPPGISYHARMGAPSATLCFISELRSMVATTIPIVILR

SEQ ID NO: 275259 - protein, 80 aa, Glycine max
  Clone ID: PAT_MRT3847_9057C.1.pep
ININPASCVYLIRGLSENGRLDDAVNIFVYTLDKGFKLKSSVCEQLLKILSQDKKECAIDLVPRMKSAGYCLNGLFLQNT

SEQ ID NO: 275260 - protein, 85 aa, Glycine max
  unsure (1)..(85): unsure at all Xaa locations
  Clone ID: PAT_MRT3847_90580C.1.pep
VHVSFYRIYGXTFNKPRRPYKKEXLDPELKTXWGEYGLRCKRELWRVQYALTRLHINARNLLSLVEKNSLRIFYGEALIRRMLRY

SEQ ID NO: 275261 - protein, 87 aa, Glycine max
  unsure (1)..(87): unsure at all Xaa locations
  Clone ID: PAT_MRT3847_90581C.1.pep
QVLAFKLLSEWVFLDHPSASSSSSSAASCVVDDFGVQNPLLRGGEKLLFXLFSHSKFSYGFFFPFKFVERAYINGFKIFFFTDYDTF

SEQ ID NO: 275262 - protein, 81 aa, Glycine max
  unsure (1)..(81): unsure at all Xaa locations
  Clone ID: PAT_MRT3847_90582C.1.pep
KFFWAKNISSQFRSISSPKVIKKAFAPQFFVIQAQPRGIPPFQKFLKQFVKKFFVIIKKTKPVGQFIFKLNNSNLSPPLXT

SEQ ID NO: 275263 - protein, 90 aa, Glycine max
  Clone ID: PAT_MRT3847_90583C.1.pep
LKVPNYSSGDQTMNINYNHTVNQIYNSDCTSISVLLPIFKTSSSLNPNSNPGSTRRPSNPLINATTDLSNRGHETQRLALILPVGRFLPA

SEQ ID NO: 275264 - protein, 484 aa, Glycine max
  Clone ID: PAT_MRT3847_90584C.1.pep
MEESGDARDLQKPFLHTGSWYKMGSRQSSIMGSSTHVIRDGAVSVLFCVLIVALGPIQFGFTCGYSSPTQGAIVRDLNLSISEFSFFGSLSNVGAMVGAIASGQIAEYIGRKGSLMIAAIPNIIGWLAISFAKDSSFLYMGRLLEGFGVGIISYVVPVYIAEIAPQNLRGGLGSVNQLSVTIGIMLAYLLGLFVNWRVLAILGILPCTVLIPGLFFIPESPRWLAKMGMIDEFETSLQVLRGFDTDISVEVHEIKRSVASTGKRAAIRFADLKRKRYWFPLMVGIGLLVLQQLSGINGILFYSTTIFANAGISSSEAATVGLGAVQVIATGISTWLVDKSGRRLLLIISSSVMTVSLLIVSIAFYLEGVVSEDSHLFSILGIVSIVGLVAMVIGFSLGLGPIPWLIMSEILPVNIKGLAGSIATMGNWLISWGITMTANLLLNWSSGGTFTIYTVVAAFTIAFIAMWVPETKGRTLEEIQFSFR

SEQ ID NO: 275265 - protein, 263 aa, Glycine max
  unsure (1)..(263): unsure at all Xaa locations
  Clone ID: PAT_MRT3847_90585C.1.pep
MTFEFETSLQVLRGFDTDISVEVYEIKRSVASTGKRATIRFADLKRKRYWFPLMVXYDTVVGIGLLVLQQLSGINGVLFYSTTIFANAGISSSEAATVGLGAVQVIATGISTWLVDKSGRRLLLMISSSVMTVSLLIVSIAFYLEXVVSEDSHLLSMLGIVSVVGLVVMAFXFSLGLGPIPWLIMSEILPVNIKGLAGSIATMGNWLISWGITXMTANLLLNWSSGGTFTIYTVVAAFTIAFIAMWVPETKGRTLEEIQFSFR

SEQ ID NO: 275266 - protein, 61 aa, Glycine max
  unsure (1)..(61): unsure at all Xaa locations
  Clone ID: PAT_MRT3847_90586C.1.pep
MASHSPSYDAGHSKGXTEVQANQTMGNIASKAQAVQANTQAMAQAAKAKTQSNSPSCLGLD

SEQ ID NO: 275267 - protein, 216 aa, Glycine max
  unsure (1)..(216): unsure at all Xaa locations
  Clone ID: PAT_MRT3847_90587C.1.pep
IFLAQLEESGDARDLQKPFLHTGSWYKMGSRQSSIMGSSTHVIRDGAVSVLFCVLIVALGPIQFGFTCGYSSPTQGAIVRDLNLSISEFSFFGSLSNVGAMVGAIASGQIAEYIGRKGSLMIAAIPNIIGWLAISFAKDSSFLYXGRLLEGFGVFFCSVXVPVYIAEIAPQNLRGGLGSVNQLSVTIGIMLAYLLGLFVNWRVLAILGKLLIIYLA

SEQ ID NO: 275268 - protein, 361 aa, Glycine max
  unsure (1)..(361): unsure at all Xaa locations
  Clone ID: PAT_MRT3847_90588C.1.pep
VVVQDSSFLYMGSLLEGFGVGISSYXVPVYIAEIAPQNLRGGLGSVNQLSITIGIMLAYLLGLFVNWRVLAILGILPCTVLIPGLFFIPESPRWLAKMGMTDEFETSLQVLRGFDTDISVEVYEIKRSVASTGKRATIRFADLKRKRYWFPLMVXYDTVVGIGLLVLQQLSGINGVLFYSTTIFANAGISSSEAATVGLGAVQVIATGISTWLVDKSGRRLLLMISSSVMTVSLLIVSIAFYLEGVVSEDSHLFSMLGIVSVVGLVVMVIGFSLGLGPIPWLIMSEILPVNIKGLAGSIATMGNWLISWVITMTANLLLNWNSGGTFTIYTVVAAFTIAFIALWVPETKGRTLEEIQFSFR

SEQ ID NO: 275269 - protein, 101 aa, Glycine max
  Clone ID: PAT_MRT3847_90589C.1.pep
QLFVPLSLPKLSTICLLRRFQLQNWGGHFLMDNPKQPGAYGGFQVNKLYGNGAVSWGIHYLEYKNKRPRACKTFPNEIYNGFPIVRVSPHTAGANNLGLFF

SEQ ID NO: 275270 - protein, 68 aa, Glycine max
  unsure (1)..(68): unsure at all Xaa locations
  Clone ID: PAT_MRT3847_9058C.1.pep
SLPPLHQIPPPSLKPSGQTLNSFXNFTFTLSLHHCIIHKYSLQYILHTTHTNISPLQLNSYLLARLLY

SEQ ID NO: 275271 - protein, 127 aa, Glycine max
  unsure (1)..(127): unsure at all Xaa locations
  Clone ID: PAT_MRT3847_90590C.1.pep
AKMGMIDEFETSLQVLRGFDTXSSVEVHEIKRSVASTGKRAAIRFADLKRKRYWFPLMVGIGLLVLQQLSGINGILFYSTTIFANAGISSSEAATGGLGAVQVIATGISTWLVDKSGRRLLLIISSS

SEQ ID NO: 275272 - protein, 89 aa, Glycine max
  Clone ID: PAT_MRT3847_90591C.1.pep
DVYIGQHIRTNRNEPTSFKIRRRVHTKHSICYYSSVSIHNDGFIILNQHYYNMKTDTDNGLTFIERGDMGKLDKTRPRRQKLEEPHTLD

SEQ ID NO: 275273 - protein, 70 aa, Glycine max
  Clone ID: PAT_MRT3847_90592C.1.pep
LGLYRSVQTAGSVPGPFKACMCFRLRLGSCVFVVSGVCVICVYGFLCTLKPSSFDFFTIFCYLSIRVLSF

SEQ ID NO: 275274 - protein, 114 aa, Glycine max
  Clone ID: PAT_MRT3847_90593C.1.pep
VGMMKTCCGAELIYDPHTDSLQPMFASHGKRAVFVLHGDSCGKIKTPPVVSRPHEIYIFDRRYDRHAGDHDENHWRRDEEDAYSLWVEEGRRFAVFYAKGNCWPTQCTIRRGRE

SEQ ID NO: 275275 - protein, 302 aa, Glycine max
  Clone ID: PAT_MRT3847_90594C.1.pep
MPPAAGAIALHSSLCTISSDKPSSPLRSPPIHVSPKPKSLLQNHPLYTPTHTKLSLEFKEKILCLEVMGVDAGKALSQNPDLRTATMESIHSIISFLLSKGLQEKDLPRIFGMCPKILTSDIKTDLNPVFDFILSELKVPENSFRRVVNKCPRLLTSSVKDQLRPCLVYLRRLGFKDLGALAYQDSVLLVSNVENTLIPKLKFLETLGLSKDEVRSMVLRCPALLTFSIENNFQPKYEFFAGEMGRKLEELKEFPQYFAFSLENRIKPRHMEVVQSGIALALPVMLKSTDEEFRELVKQGGG

SEQ ID NO: 275276 - protein, 78 aa, Glycine max
  unsure (1)..(78): unsure at all Xaa locations
  Clone ID: PAT_MRT3847_90595C.1.pep
MGKAKTHINTDVIGHARLXGKSTITGHLIYKLXGIDKRVIERFENEAAEMNEXSFKYAWAADKLEAERDTGITIDIAL

SEQ ID NO: 275277 - protein, 469 aa, Glycine max
  Clone ID: PAT_MRT3847_90596C.1.pep
MEWRMALWSQILCIVTLLLCSDCAASFAKEQQKDRVGRLPGQGFNISFAHYAGYITVNEKAGRTLFYWFIEALEDPHSKPLVLWLNGGPGCSSIAFGQSEEVGPFHINSDSKTLHFNPYSWNRVANILFLDTPVGVGFSYSNNKSDMLINGDERTAEDNLVFLLNWFERFPQYKRSNFFISGESYAGHYVPQLSQVIVKYNSVTKENAINLKGFMVGNALTDDFHDQLGMFEFMWSSGLISDQTYKLLNLLCDFQSVEHPSHSCEKIWEIANEELGNIDPYSLFTPPCQHANVSQLSRLVRRKHRIGRLSAEYDPCTEKHSIVYFNRPDVQTVLHVDPDHKPATWETCSDEVFTNWKDSPRTVLNIYHELIQMGLRIWVFSGNTDVVIPVTSTRYSIKALDLPTVSPWRAWYDDGEVGGWTQEYAGLTFVVVRGAGHEVPLHSPKLALTLFKAFLAGTSMPNLELVGAS

SEQ ID NO: 275278 - protein, 70 aa, Glycine max
  unsure (1)..(70): unsure at all Xaa locations
  Clone ID: PAT_MRT3847_90597C.1.pep
XAXXXXPXFXXXPLXLXPXPXXXPXXDXTXXXXLXXIPMXNCXXXXLXXIXXXXXXXLXXHXXSRPXLNX

SEQ ID NO: 275279 - protein, 87 aa, Glycine max
  Clone ID: PAT_MRT3847_90598C.1.pep
HRYLTVSIGTIPSCSALMALPPGMVLLGRKRLRVIWLRSIVSRQMCSFELTVYVKIYLTITLETWSTRLDSTVVMQFSFRPSTDKVI

SEQ ID NO: 275280 - protein, 66 aa, Glycine max
  Clone ID: PAT_MRT3847_90599C.1.pep
VTWVFSHSWIAWASSLVKNKNLSLIAGDHHVYSLLFTHRGLYITTLREHRSLIHYLANNNRSRSLT

SEQ ID NO: 275281 - protein, 84 aa, Glycine max
  unsure (1)..(84): unsure at all Xaa locations
  Clone ID: PAT_MRT3847_9059C.1.pep
MCVGFFSYQNMSCCGGNCGCGSARTXGSGCGGWNIYPXDVSYTXSTRIETLIIAVASVXAQFECTVLGVLAQNDRCACGANCQM

SEQ ID NO: 275282 - protein, 113 aa, Glycine max
  Clone ID: PAT_MRT3847_905C.1.pep
GSNFCSPGLQNIIFFFGAPKLIYLAGFLKSGAWKNPGFTKFNAFEKKSLFPNLGKKKKAPTNPLFKKLATLNGKWDPPFNGPLNPGVGVVPPQVTLFFFGALRPGSLVFFPFF

SEQ ID NO: 275283 - protein, 76 aa, Glycine max
  Clone ID: PAT_MRT3847_90600C.1.pep
PVLYHTPLGLVPTILRFFFLSVSRIFHSVSPNVHPGRIFFLSKHLNWVFFPLFYHVHTQSSAHVSYTLIQNQQLIH

SEQ ID NO: 275284 - protein, 83 aa, Glycine max
  Clone ID: PAT_MRT3847_90601C.1.pep
SGLSWWFGISSTSVHWMGLFHDQGRRPLRHWMSFRVELNNNTRLCAALASHGEMSSNRIAKRTRNCSSFGPVLGCQFERSEVY

SEQ ID NO: 275285 - protein, 125 aa, Glycine max
  Clone ID: PAT_MRT3847_90602C.1.pep
VKTSRIIHSVACPKTGANFQYCILSPPKEIGFHSSVPISFFLEAMHFNHGITLTCHNKANITSDDDAHLKLIERVGGLILGKDGLLDDLTGLGNLVLDARGRGGLLGHTISLHTLSGGLLLGNGD

SEQ ID NO: 275286 - protein, 50 aa, Glycine max
  Clone ID: PAT_MRT3847_90603C.1.pep
TKHPILLHTHKLNWRMIRFHHAKLPYNMKRPRQQAATAVLLIQVKHAKLL

SEQ ID NO: 275287 - protein, 78 aa, Glycine max
  unsure (1)..(78): unsure at all Xaa locations
  Clone ID: PAT_MRT3847_90604C.1.pep
LGLHGAGKAFRSKSAFEDQVVLTNTHKSLDGNAXRGYXLPPHASGLYSASEVPGEADGVNVTCGRGRSENSKACEYSY

SEQ ID NO: 275288 - protein, 63 aa, Glycine max
  Clone ID: PAT_MRT3847_90605C.1.pep
MARIKQGGRKSTGGKALTKHLATNAARKSAAIIGGVMNPHHDCRGSVEHPNIKNYSSSTDLLI

SEQ ID NO: 275289 - protein, 99 aa, Glycine max
  unsure (1)..(99): unsure at all Xaa locations
  Clone ID: PAT_MRT3847_90606C.1.pep
RLPPRDVLPXQQPPPPNNYLPPGGGGGPLFLNNTPLTPHFSPRPPPPPPPPSLLSPHPPPPPTFPTLSPYLLHLFHNSPPPPRPFPPTPPPQTPPPSPP

SEQ ID NO: 275290 - protein, 117 aa, Glycine max
  unsure (1)..(117): unsure at all Xaa locations
  Clone ID: PAT_MRT3847_90607C.1.pep
NPGRIFIFYTRRAITWGPATINQPPLLLTWYLHDTIRHLLXHHLPLDRTNSGHXLGVNSGAGHSLSSVATFSSLYKFVRDFYMYSNTTIDTLEASSSEIWQMHLDPNGAILPDAGGG

SEQ ID NO: 275291 - protein, 233 aa, Glycine max
  Clone ID: PAT_MRT3847_90608C.1.pep
ERLEGNAGNLSLDKVMTEFMLRLDATPACIKNMPLDDDDPARGLTFAMTKLKYELCYSRGKQKYTFESKRDILDLVYQGLDLHMIKAFLNKKECASVAKVVNMILKSSQSLSMDKVSCKKGYMTEKNCDDGFLLSSDYFTIRRQSPKADPARLLAWQEAGRRTIEMAYVRSEYDNGSETDDHMRSDPSDDEGYNVVVADDCQSVFVYGLKLLWTIGNRDAVWAWVGGLSKAFE

SEQ ID NO: 275292 - protein, 87 aa, Glycine max
  unsure (1)..(87): unsure at all Xaa locations
  Clone ID: PAT_MRT3847_90609C.1.pep
SIPWTTLGHKNRPSGYLCYKTSTSPLLSRKWEDWXLLCCVTSLLTIRMTGRGLNAQLCLTMRTXCHEKWLERVKMRNWMTADGNKNN

SEQ ID NO: 275293 - protein, 67 aa, Glycine max
  Clone ID: PAT_MRT3847_9060C.1.pep
RLLVISPLFLIIIVHWLSTATQISFPMPGSEPSAIHRAGGSPWGVAFVLLLLFLLISYQPSLHDLIS

SEQ ID NO: 275294 - protein, 89 aa, Glycine max
  unsure (1)..(89): unsure at all Xaa locations
  Clone ID: PAT_MRT3847_90610C.1.pep
LFFQFILLIPLVTLPSLFLPTTTAXGFSIEEATVYDLQLAFRRNQLTSRQLVEFYHKQIQTQNPVLRGVLELNPDXLAQADKADHERKA

SEQ ID NO: 275295 - protein, 53 aa, Glycine max
  Clone ID: PAT_MRT3847_90611C.1.pep
FVRVSARREVLGSSTNGDFVQGNALHMVEATAAWAAAGWHMRYTSTCLLESGL

SEQ ID NO: 275296 - protein, 81 aa, Glycine max
  Clone ID: PAT_MRT3847_90612C.1.pep
MESAGEWLEKALVELCSKIETGLGLGLDQDIIKGLVSYCDLAEPRDAKEYLDVTLFLFSFLFFSISLGINYTSLTIANCIL

SEQ ID NO: 275297 - protein, 66 aa, Glycine max
  Clone ID: PAT_MRT3847_90613C.1.pep
WSGVMDMGLASASAPCILKHQAYMMFKLSKSRSRCGSVVVNLVLHAREGMRGRKEERKGKTLFVYA

SEQ ID NO: 275298 - protein, 99 aa, Glycine max
  unsure (1)..(99): unsure at all Xaa locations
  Clone ID: PAT_MRT3847_90614C.1.pep
KVTETTQTGLSRGPGFVAFSTPEEASRALXRMNGKMVVSKPLYVTLAQRKEDRRARLQVCLILNAELFLTLSLLVELCITNAGLNLCSRLFKLMHAQAI

SEQ ID NO: 275299 - protein, 54 aa, Glycine max
  Clone ID: PAT_MRT3847_90615C.1.pep
STHKPEQNQAQTACALLVICVTSNQPHSHTPLHNKNHFHALFFTPTKTNRFAFA

SEQ ID NO: 275300 - protein, 84 aa, Glycine max
  Clone ID: PAT_MRT3847_90616C.1.pep
PRVREREAQWAHAQRTLHGLQPPETSGIFNEKNSYRELSEIAEQAKRRAEVARLRELHTLKGHVESVVKLKGLDIDTIQQHYTV

SEQ ID NO: 275301 - protein, 82 aa, Glycine max
  Clone ID: PAT_MRT3847_90617C.1.pep
QLYWAQKIFWPKKPGGGTQPFFAYHPPFNLLARGGANSREIRGKSPRKVLGFWAPPGKLNFFFWPLESQGALPPPPLNGLSG

SEQ ID NO: 275302 - protein, 112 aa, Glycine max
  Clone ID: PAT_MRT3847_90618C.1.pep
GQPWPLRSGQSFLAQTWMGLHDRITDDYVQNYKCVVGFVCSPTLQYFLFCKRGHSSMLSLLIMYSVSWGPVFYTSAYEVQTWWAVVRCVNIVGSPYQRPLRFLSFVSSNQKY

SEQ ID NO: 275303 - protein, 152 aa, Glycine max
  unsure (1)..(152): unsure at all Xaa locations
  Clone ID: PAT_MRT3847_90619C.1.pep
KGSHTSIRFPRQLIHSSGRLTHVESILTIQINRGAKKGLTIIFLRQGHDHRGVILSDFVFIIDETLHGVFKRDGNDLVITQNIFLVEVLIGYIVXLMILDGRNLIVSINSIISLTYEEVIKGEGMSISKELSKKGNLRIKFNIKFPSRLISE

SEQ ID NO: 275304 - protein, 182 aa, Glycine max
  Clone ID: PAT_MRT3847_9061C.1.pep
SERMNYLQDLVPGCNKVTGKAGMLDEIINYVQSLQRQVEFLSMKLAAVNPRLDFSMDDLFDKDVFPTCAANFPNIGMSSTSSDITNPAYLPFNSPQQIFQYDGLDTGINPSDVGLRRTISAPVSMPETYLQSSCFTQMLPSSTWEGDFQNLCNFDVDQARATSFPSQLLSGLVEAGNLKMEM

SEQ ID NO: 275305 - protein, 94 aa, Glycine max
  Clone ID: PAT_MRT3847_90620C.1.pep
THIQPIEPMEMPGLIPIQPTSSMTIAVVSPPTQQTLTMEMPSEQPPSLEFMKQRLEMMASTMETSGHTLSPQMRAQLDSGIKNLLRRVNARLNA

SEQ ID NO: 275306 - protein, 70 aa, Glycine max
  Clone ID: PAT_MRT3847_90621C.1.pep
LYVIMMETGMEMGYDSHIRSFYDSWQNAVPHAPFAASYTAVKSGSLSQRPLALLHAALTDNQKGMAMGFS

SEQ ID NO: 275307 - protein, 77 aa, Glycine max
  Clone ID: PAT_MRT3847_90622C.1.pep
MARNKEALLLLLDVGPSMHPALSEIEKVCSMLVHKKLIYSKYDEVGIVLFGTEVLDAVIVGMDVLVKKFGVTNKGKK

SEQ ID NO: 275308 - protein, 130 aa, Glycine max
  Clone ID: PAT_MRT3847_90623C.1.pep
MGTTSCEYVSWEEVFMSNDKGRREVHYLLKRRGGGSDLAVLGKEKSLKHMSYRYAIRNTSSFRPVVNWLDSIVSDSSSGDAAMVGKHGYEPEIGALKDNQLQRMRNCTKEFSWIGLPWACKKRRKHYQAY

SEQ ID NO: 275309 - protein, 355 aa, Glycine max
  Clone ID: PAT_MRT3847_90624C.1.pep
MGTTSCEKKSVVYVSWDEVFVSNDKGRREVHYLLKRRGGGSDLAVLGKEKSLLRHMSYRYAIRNAALFKPYLKLRSRREVVDWLDSIVSGRDFRWLDLKLNDSSSGDAVMVGKHGYEPEIGALKDNQLQKMHSCTKEFSWIGLPWTCKKRRKHYQAYKRNGFQISVHDFVFVLAEEDKRLVAYLEDLYEDSKGNKMVVVRWFHKIDEVGIALPHSFSDREVFFSLYLQDLSIECIDGLAFVLSPGHYEKFQNEARCTHLEPFICNHQFDNDDVKPFDITQIKGYWKQEILRYMYTQLDSKSSGSSRQSDDDLELDENHMTTVFIRPKKRLRLTKADDAKEAVDLVGLKTENVNNS

SEQ ID NO: 275310 - protein, 160 aa, Glycine max
  Clone ID: PAT_MRT3847_90625C.1.pep
MGIFRCGTLFFHVLLLFRTCLAKDQHVSQIYPGFSASQPDWSDHNGFFLLSNSSAFAFGFFTTLDVSSFVLVVMHLSSYKVVWTANRGLLVGTSDKFVLDHDGNAYLEGGNGVVWATNTRGQKIRSMELLNSGILVLLVENGTTILQSFSHPTDTLLPDK

SEQ ID NO: 275311 - protein, 639 aa, Glycine max
  unsure (1)..(639): unsure at all Xaa locations
  Clone ID: PAT_MRT3847_90626C.1.pep
MGTTSCEYVSWEEVFMSNDKGRREVHYLLKRRGGGSDLAVLGKEKSLKHMSYRYAIRNTSSFRPYFKLRSRREVVNWLDSIVSDSSSGDAAMVGKHGYEPEIGALKDNQLQRMRNCTKEFSWLGLPWACKKRIKLYEAYKRNVFQISLYDFIFLLEYYEKRLVVYLELVFHXSQTFMSILVSSVLVNDGLMVIKKSXGIRYMCTQLESQSSGLSCETDDDKYFDITHMSXFVKNRIKGTFLPKWTRSLVGVPGNQMXDLELDENHMTTVFIRPKKRLRLTKADDAKEAVDLVGLKTENVNNSKNNTKINTGNNSGKLIGHTNMTATIKGTNEHASHHLVVGSLVEVLSQDGGMRGCWFRASVIKKNKDKVKVQYQDIQDAVDETKKLEEWVLASRIAVPDNLGLRMRGRTMVRPAPPSNKRELSWVGDVGFVVDAWWHDGWWEGIVVQKDSESNCHVYFPGEKVVSVFGPGNLRESQDWVGNEWVFVRERPDLVASVLSSLKTKQNSCKSNSNNIQSTGAITRDGIQFGQSDTCLDSDKDRPRKAEVVPDLLKNVLSSQLRWKTTRKRKRGRSSASYQKPRCTDTHQKRSPNVMKSNAPDSFLIPASLKVDHDDCKYVGDPSIFSSSVVPSLTNMVMCR

SEQ ID NO: 275312 - protein, 100 aa, Glycine max
  Clone ID: PAT_MRT3847_90627C.1.pep
SFFFFFFFFFFFFFLKKTSKLLCFFYRKRLTQITLDLSHMKKKKKKTLFYPTSQSHPRLFHYVTLFPMPKLGWHHPCLLGFDAINHKTNERLGKKKTNLR

SEQ ID NO: 275313 - protein, 64 aa, Glycine max
  Clone ID: PAT_MRT3847_90628C.1.pep
INLPHARCHSYPYVQQAHYPYSISLHQTNVGMADCKWQSYQKLSQNWQRKPFKLGKSHKPSEAG

SEQ ID NO: 275314 - protein, 113 aa, Glycine max
  Clone ID: PAT_MRT3847_90629C.1.pep
NLLWGLGEAVLLYPFVAFPQTGLLGSRFFFLSGQTRRGVLSWCLLLFPTVWVGMSFSAWGPVCQPVFVLLLCVLPRLSHGGFVVFLGDTAGHFPKKTLQGRMTAKPVGKRRKE

SEQ ID NO: 275315 - protein, 45 aa, Glycine max
  Clone ID: PAT_MRT3847_9062C.1.pep
SIYFNLYLPPKSKLKNFYSHRSMYQINTILLPLNKTNYLFMDLFL

SEQ ID NO: 275316 - protein, 87 aa, Glycine max
  Clone ID: PAT_MRT3847_90630C.1.pep
SAYSPIFWGRARGLGNLPSHFEPSQPCLEKFTGLRNGSGPAPVEVRGWTEGILGEGSHCRVPPTPDHHGRYTVTGTQSRSQTQPEST

SEQ ID NO: 275317 - protein, 50 aa, Glycine max
  unsure (1)..(50): unsure at all Xaa locations
  Clone ID: PAT_MRT3847_90631C.1.pep
MCNSPQSIMAKLWINNQKLIPSTAIPKTASLNVXIHIQXSSSLLSXXKQQ

SEQ ID NO: 275318 - protein, 93 aa, Glycine max
  Clone ID: PAT_MRT3847_90632C.1.pep
VQGTCKYGTRVDYILASPNSHYKYVPGSYSVISSKGTSDHHIVKVDIMKVNASAQKNAIRQCRKLKRKVVKITPPCSATGVRESTPPPKIFVP

SEQ ID NO: 275319 - protein, 51 aa, Glycine max
  Clone ID: PAT_MRT3847_90633C.1.pep
RLFKPVTICSHLIIVTVGCLFATVALCSLLATVPLGRHLASPAICRLRGPV

SEQ ID NO: 275320 - protein, 56 aa, Glycine max
  Clone ID: PAT_MRT3847_90634C.1.pep
RNEPNILLYLHYCSSILTSWRIWFRIFLNIRITLLSFSVYFSTCIRSFCLGALLGV

SEQ ID NO: 275321 - protein, 68 aa, Glycine max
  Clone ID: PAT_MRT3847_90635C.1.pep
REIPRCNCDRKRGLKPFQMSQAIRFILQSPWVFWIWLQLRTPSQLMNPLDSLLPDRVNIMPNSFPIRF

SEQ ID NO: 275322 - protein, 115 aa, Glycine max
  Clone ID: PAT_MRT3847_90636C.1.pep
NLCDLIKLQKESNIMWEEATKYLSSTKSDVESKRSATETRLNNVEAVLSEVDAISSKIISVKEAGAVKVALLVRKCEELVEAFHNYANPIARVIESEQRRLGATKGGGFGISDPV

SEQ ID NO: 275323 - protein, 72 aa, Glycine max
  unsure (1)..(72): unsure at all Xaa locations
  Clone ID: PAT_MRT3847_90637C.1.pep
TNWLKEPKKEKIFNIVTSLGTVYNKKSMKEPHICMSSSNKKNLEFLKPXCPRGHIVKHFALHFYIVIIKINY

SEQ ID NO: 275324 - protein, 92 aa, Glycine max
  unsure (1)..(92): unsure at all Xaa locations
  Clone ID: PAT_MRT3847_90638C.1.pep
PWRDTHPLTPNKQNTLVNHSLKNPTPPPCFFIRRSRSTRPTSKGLSDQTHQRTLRVAMQHSNHNSYNINLHVFYKLLDTXSRLDLKNKLAIS

SEQ ID NO: 275325 - protein, 113 aa, Glycine max
  Clone ID: PAT_MRT3847_90639C.1.pep
KYKLNLNFLSIIVIFTNEMPCHHLIDEQGNTKKVSLTKPSVFVMPRGERLVVPFDSQLRVYGEAATLLSSACGRIAMDSKNIPNNFDSWSNVPKSYKDGCFNIVKVYAYTKIV

SEQ ID NO: 275326 - protein, 183 aa, Glycine max
  Clone ID: PAT_MRT3847_9063C.1.pep
VRREKISERMKYLQDLVPGCNKVTGKAGMLDEIINYVQSLQRQVEFLSMKLAAVNPRLDLSIDDLFDKDVFSTCATNFPNIGISSTSDISNPAYLQFNSPQQIFSYDGLDPSDMGLRRTISAPVSMPETYLQSSCFTQMLPSSTWEGDFQNLCNFDFDQARATSFPSQLLSGLVEAGNLKMEM

SEQ ID NO: 275327 - protein, 84 aa, Glycine max
  Clone ID: PAT_MRT3847_90640C.1.pep
FTRSTCQPGFFFSFLKTIFCKRFLKSFSKALFLATTTRGTSLVNERVAQVENKEAKARVPLTKWKLLLETSTSLVGILGGNFGG

SEQ ID NO: 275328 - protein, 83 aa, Glycine max
  Clone ID: PAT_MRT3847_90641C.1.pep
ENVCAESLGTAIGFAISKLGKNIDVLSTTFVNKHDPYTAEGVRNLRYMPVMCHGLNIRTATFYCHPDRDTAPFMVALVAGDGT

SEQ ID NO: 275329 - protein, 125 aa, Glycine max
  unsure (1)..(125): unsure at all Xaa locations
  Clone ID: PAT_MRT3847_90642C.1.pep
DCDLWNPACSNAMTXSFNPNXPSSDAWRMQFMKRLGCHRDIISLTGWTRPPMQDVQVTIDGFISSHECVPRTYCVRNPQNPSAXNKCMGKLTFPXGTSRSDKRVPLSIGGGLWSKECIXMNMPNA

SEQ ID NO: 275330 - protein, 199 aa, Glycine max
  unsure (1)..(199): unsure at all Xaa locations
  Clone ID: PAT_MRT3847_90643C.1.pep
STHPTPQEQIAARTTALNSQGTPTTVSLNQPXDPSIFHHLEHPAGDKDRNFAPKDQLGHRWNRRLLFDLVDEVLREILESQEGEREKRLWFLKGGICNQRGRSVEGLVKRVWKRVEEFPRAKCEVLEDIDELIDLQREKDGERMEEEGEELVAEIEGNIWDTLVHETVIVMDCWENAKKEKLLLYDDSKISSHVCSSQH

SEQ ID NO: 275331 - protein, 179 aa, Glycine max
  Clone ID: PAT_MRT3847_90644C.1.pep
HPLVPLYPFTSTALSTLCGHLYAWVGAYLNGTSYAQPLPISTYCLGSFPKPRPSYWATFRAPLCCGCPTCLLLALCCPVSGCFTICFLWFRAISRGSNYCPNKLIPYRLLILGNYQCCFSPPILNRIFVAFSSNIADFAADRTLDSSIEIANTFTTMLRNLNIFIGPQLRPPVRCNQTS

SEQ ID NO: 275332 - protein, 161 aa, Glycine max
  unsure (1)..(161): unsure at all Xaa locations
  Clone ID: PAT_MRT3847_90645C.1.pep
METGFDTAHDEEEENCRSERCVLILLVAMEVAAAVCISYGPKRPRNVVTRSLNMNRTIMLMCGMRDYSKTCRMSVANAFGASDLKELIIAAFNGTXEEIASHIIDSTLYHELDSDHVTXXAMDICNEVLGYTGYYVPRSVHTMEKLDLNKLNDYPYDLRSG

SEQ ID NO: 275333 - protein, 53 aa, Glycine max
  Clone ID: PAT_MRT3847_90646C.1.pep
PQRNSVRELKKNEGLRAATSWDESHILLKYFMDRQSNRGERSLSPRCNKLTIA

SEQ ID NO: 275334 - protein, 67 aa, Glycine max
  Clone ID: PAT_MRT3847_90647C.1.pep
HVHLSLFKMLSIQSLDNLEHILFLRTTNQEKRKTKQNQGTDPATLVLQSSFKWFRYLRRMICNEQDT

SEQ ID NO: 275335 - protein, 63 aa, Glycine max
  Clone ID: PAT_MRT3847_90648C.1.pep
MIMAVLTCLLQITQVYGFYDECLRKYGSANVWKIFTDLFDYFPLTALVSILLHYFGKDCGIFC

SEQ ID NO: 275336 - protein, 322 aa, Glycine max
  unsure (1)..(322): unsure at all Xaa locations
  Clone ID: PAT_MRT3847_90649C.1.pep
FELRKEAVVFYPAPLIGHLVSTIELCKFILTHQPSLSIHILITIAPYDTSSTSNYISTVSTTLPSITFHTLPTFTPPQTLLSSSLNHETLLFHVLHHNNPHIHQTLLSLSQTHTLHALIVDILSSQSISVASQLNLPCYLFVPASASLLAAFLYHSTLHETYHKSFKDLNNTFLNIPGVPPMPARDMPKPLLERNDEVYKNFLSCSLAAPKAAGLIVNTFEALEPSSTKAICDGFVLTEFPNLTPLLIWVLLVTTTEQNQNNLXDHESLGSLDVRXWLDWRPPLCGVLLCFGSLGVFSREQLSEIAIGLEKSEQRFLWVVRN

SEQ ID NO: 275337 - protein, 88 aa, Glycine max
  Clone ID: PAT_MRT3847_9064C.1.pep
TSRNQFNLLKKEQHQRGAANGFVMTCMSAFKTVGPASGGAILTWSEKHIHSFFLPGTHIVFLALNVVEGLGVLLMFKPFLSVKKKTPS

SEQ ID NO: 275338 - protein, 200 aa, Glycine max
  Clone ID: PAT_MRT3847_90650C.1.pep
SATRLTQDEQRTQMTLWCMAKSPIMYGGDLRNIDAWTLGLITNPTLLDINTFSSNNQEFLDITTLNDVKTEGHNVTKVPFTYSLAITECTDPKVSGWSSEKYNQDLERICYKSSTQDQEEPFCVHKRELPIASPKQSSIQSEQIWKLKSNGTLVNGYSGKCATVGRVLDVGDLNPIRSWVATHTERGLTLVILTPSITIF

SEQ ID NO: 275339 - protein, 47 aa, Glycine max
  Clone ID: PAT_MRT3847_90651C.1.pep
ENYKDTLDATRLLLGVCRCKVAAPSSAHVFVNHRKAIIENEWKKKLE

SEQ ID NO: 275340 - protein, 49 aa, Glycine max
  Clone ID: PAT_MRT3847_90652C.1.pep
AHSHIPSKFYQTVPNLFVFESHTSHTSTFSLELKPTMWIKGHQIKAPIH

SEQ ID NO: 275341 - protein, 111 aa, Glycine max
  Clone ID: PAT_MRT3847_90653C.1.pep
MLTQQLANSEKESLPAHGSLGLSHPSHLSNLSTNPYLPHVNPLSSSGVTNASYAHYPMTADWMPCQPRPTYLDGSTPEDFKIYPGQLGEIPENLERFKESELIHCKLAMLS

SEQ ID NO: 275342 - protein, 63 aa, Glycine max
  Clone ID: PAT_MRT3847_90654C.1.pep
QEATTVVIIGAGASGIVTAGCLTTQSITYIMIERRDCFASLCQKYTYDRLHLHMRKQVCELSH

SEQ ID NO: 275343 - protein, 95 aa, Glycine max
  Clone ID: PAT_MRT3847_90655C.1.pep
HPDACVVVFSETVELDFFKDSFVKDGYKVAVAMPNLDELLKDMPAHIFASVWFEWKKTNFYSTHYSELIRLAALYKYGGIYLDSDIIVLKPISFL

SEQ ID NO: 275344 - protein, 119 aa, Glycine max
  Clone ID: PAT_MRT3847_90656C.1.pep
MESQPLEKAKPKYRKGLWSPEEDNKLRNHIIKHGHGCWSSVPIKAGLQRNGKSCRLRWINYLRPGLKRGVFSKHEEDTIMVLHHMLGNKWSQIAQHLPGRTDNEIKNYWHSYLKKKEIK

SEQ ID NO: 275345 - protein, 65 aa, Glycine max
  Clone ID: PAT_MRT3847_90657C.1.pep
QVEVSADTHQKLAELNDSPRSLKWRFNLWNTALKQANTLLSQPLPRKNNRCLLSCKGVKRELWGE

SEQ ID NO: 275346 - protein, 68 aa, Glycine max
  Clone ID: PAT_MRT3847_90658C.1.pep
DIKSPSLLLQHYATHPGIPLPTYTTDTTLYFKNTSSHTYIHMLKQSRMIKEARKSGCDLHNASPRSLI

SEQ ID NO: 275347 - protein, 104 aa, Glycine max
  unsure (1)..(104): unsure at all Xaa locations
  Clone ID: PAT_MRT3847_90659C.1.pep
QNGLAFSYGPRFQGVPLPGGFDPLFFSPIRGGPPPFFSQDGFRASWQFFPPLLPKIFEGGFKPFPSKPGNKGFPKPVPFFXKTGFVLPPGPIGVPPPLWGVLML

SEQ ID NO: 275348 - protein, 55 aa, Glycine max
  Clone ID: PAT_MRT3847_9065C.1.pep
LVLLCLYLSPKVRIIYNDDTQIRTYNLMHYDISFFTKSNKLSWLYDVFYQYFYTK

SEQ ID NO: 275349 - protein, 27 aa, Glycine max
  Clone ID: PAT_MRT3847_90660C.1.pep
GTFAYYEDLKTYTSSTLILVTHLILLR

SEQ ID NO: 275350 - protein, 38 aa, Glycine max
  Clone ID: PAT_MRT3847_90661C.1.pep
PPTPGVLPYPVFIVLRNTYGCFRKASSVSSAMMKGGVG

SEQ ID NO: 275351 - protein, 68 aa, Glycine max
  Clone ID: PAT_MRT3847_90662C.1.pep
SNNLAKCTLNMTPKSLTEEKMYRSQSLPRSDHMTNEEDALPTQYGGNDYRRHSYHPASAHSDIKFDES

SEQ ID NO: 275352 - protein, 162 aa, Glycine max
  unsure (1)..(162): unsure at all Xaa locations
  Clone ID: PAT_MRT3847_90663C.1.pep
PPRPARAKEPVPQRAGPLDQRPSXNYAWSPRMRDKYGLDTSEFAYNPSESPRSQQVDSQPTEEGSPCAIMGSLCISPEPQRIEFQYMFLRENGSSAKFARKHYSFCIECGSVPLYCFSFSFFSLHGINFFTVLCVAFPRVTIRSYFSLLCPQCPGVKQVVFG

SEQ ID NO: 275353 - protein, 41 aa, Glycine max
  Clone ID: PAT_MRT3847_90664C.1.pep
ATFAFFSHIQKSVVNIKCIPCKIMLLTWILFWDWSQCEPML

SEQ ID NO: 275354 - protein, 42 aa, Glycine max
  Clone ID: PAT_MRT3847_90665C.1.pep
ITLLYYLFYSSIFIHIIFSFQYLLKFIFTLISLYFILSLIII

SEQ ID NO: 275355 - protein, 67 aa, Glycine max
  Clone ID: PAT_MRT3847_90666C.1.pep
MDDRGGSFVAVRRISQGLDRSNTCHSSSAEFVTGSTAWLGRSLSCVCAQRRKSDARPSFDLTPAPEE

SEQ ID NO: 275356 - protein, 53 aa, Glycine max
  Clone ID: PAT_MRT3847_90667C.1.pep
RTRGVTAGYDGKWIWAKKVLPADWKNGLIYDSGLQITDIAQEGCSPCDDGTWS

SEQ ID NO: 275357 - protein, 265 aa, Glycine max
  unsure (1)..(265): unsure at all Xaa locations
  Clone ID: PAT_MRT3847_90668C.1.pep
MGNCCGTRCKVDDTLNSNHSSADVTKVHRRSTHLLVHSELTNGCFYGDEGKPEIILPTPRSEGDILSSPHLKPFTLHDLKKATRNFQLDSLIGEGGFGYVYKGLINDGKSFGPTMPKSGTVVAVKKLKPEGFQGHKEWLSEVNYLGQLRHPNLVKLIGYCLEGDNRLLVYEYMPNRSLEDHIFRKGTQPLPWATRVKIAIGAAQGLSFLHDSKQQIIYRDFKASNILLDSEFNAKLSDCGLAKAXPTGDRSYVSTQVLGTHGYAA

SEQ ID NO: 275358 - protein, 112 aa, Glycine max
  Clone ID: PAT_MRT3847_90669C.1.pep
TELYLFLSRTNRNAEWDTCIPVPDFEWKQIAEPVMQLYMETTDGSNIEAKESALVWNYEYADRDFGSCQAKELFDHLESVLANEPVSVKSSPNIVEVKPQVSKKKNSTFSHF

SEQ ID NO: 275359 - protein, 78 aa, Glycine max
  Clone ID: PAT_MRT3847_9066C.1.pep
TGKPQGRRITGKATPEKAGCPQKPKASPKDPKTTSRANMVPCQKCLTSERTRKISPGLTGGIPGGTPWGPHLPKEGGQ

SEQ ID NO: 275360 - protein, 359 aa, Glycine max
  unsure (1)..(359): unsure at all Xaa locations
  Clone ID: PAT_MRT3847_90670C.1.pep
MGEEAMEGVISSKGMGFGENTSSSGVCPMMMMPLVTSHHVGHHPLNHPILNNPNPNEHTNTLFLPMACTNNNHHPNRNNXHSNATELGYFMEIPNNNYGGSSSSAIKAKIMAHPHYHRLLAAYVNCQKVGAPPEVMGRLEEACASAAVTMAGGTASIGEDPELDQVMEAYCEMLIKYEQELSKPFKEAMLFLQRIECQLKSLTISSSLDTTACNEAIDRNGSSDDVDVQTNIIDPQAEDQELKGQLLRKYRGYLGRLKQEFTKKRKKGKLPKEARQQLLEWWSRHYKWPYPSESQKLALAESTGLDQKQINNWFINQRKRHWKPSEDMQFVVVDPSHPHYYMENVLGNPFPMDLSHPML

SEQ ID NO: 275361 - protein, 314 aa, Glycine max
  unsure (1)..(314): unsure at all Xaa locations
  Clone ID: PAT_MRT3847_90671C.1.pep
VSSLVQRMEIPVIDFSNLNGDKRGDTMALLHEACEKWGCFMVENHEIDTQLMEKLKQLINTYYEEDLKESFYQSEIAKRLEKEQNTSDIDWEXPFIWHRPTSNINEISNISQELCQTMDEYIAQLLKLGEKLSELMSENLGLEKDYIKKAFSGSGEGPAVGTKVAKYPQCPXRPELVRGLREHTDAGGIILLLQDDKVPGLEFFKDGKWVEIPPPKNNAVFVNTGDQVEVLSNGLYKSVVHRVMPDNNGSRTSIATFYNPIGDAIISPAPKLLYPSNFRYGDYLKLYGSPKFGEKAPRFESMKNMINGHKIIPA

SEQ ID NO: 275362 - protein, 48 aa, Glycine max
  unsure (1)..(48): unsure at all Xaa locations
  Clone ID: PAT_MRT3847_90672C.1.pep
MRISENKRVKERTVIEQSTHEVLYQIGEXGSTNPRFHQLELVIKQRFE

SEQ ID NO: 275363 - protein, 59 aa, Glycine max
  Clone ID: PAT_MRT3847_90673C.1.pep
MVELLYNTFLRGKILIIKSFVTSVYHIIKVLMKINIVDVRLGLFSDYLVGSILYLPITV

SEQ ID NO: 275364 - protein, 60 aa, Glycine max
  unsure (1)..(60): unsure at all Xaa locations
  Clone ID: PAT_MRT3847_90674C.1.pep
KCRISIXSRASTFSFFXGYNWPFPFEDLLYFXQREPSLLFQSRXXFLSPFXLSXFLSWXR

SEQ ID NO: 275365 - protein, 63 aa, Glycine max
  Clone ID: PAT_MRT3847_90675C.1.pep
ENPKQSPVFNIFLGISQFFQIAGNILNTAFSVPQAWAIFYENAESSACFEICVFFGLFVCLIQ

SEQ ID NO: 275366 - protein, 53 aa, Glycine max
  unsure (1)..(53): unsure at all Xaa locations
  Clone ID: PAT_MRT3847_90676C.1.pep
WWPPWLVCGRRSFFXFGGPLPPPFGGALXVVVGVVASPSFVRGLQNRFSVLGV

SEQ ID NO: 275367 - protein, 84 aa, Glycine max
  Clone ID: PAT_MRT3847_90677C.1.pep
FFTGAPSKGNFSFCLPREKPPFFFRRNLAQGFPLCGKGPFFLFLPQGLKPLRGRGFFPPAPAQEELRSPPPHGGFSLNPPPLGV

SEQ ID NO: 275368 - protein, 82 aa, Glycine max
  unsure (1)..(82): unsure at all Xaa locations
  Clone ID: PAT_MRT3847_90678C.1.pep
MSSLGGIQEAHGLYLLIXEGAAVHAQSELKPPTYSLHALEPVMCLETLASYWRKTPLTYVLYPNKQVVGTDHDGKALQEIIV

SEQ ID NO: 275369 - protein, 66 aa, Glycine max
  Clone ID: PAT_MRT3847_90679C.1.pep
AVGRQSGYTRRNRGLRSSVRCIVMLVVTWLRIGIQLLDRPRIEAWAMTHSTSRRDLRNQSKPQLPI

SEQ ID NO: 275370 - protein, 57 aa, Glycine max
  Clone ID: PAT_MRT3847_9067C.1.pep
SPKRPLGQSLSKPPGGAGFFQRVLLACVYRGKTAPTKPRVMPPYFFYPKFLPMMENN

SEQ ID NO: 275371 - protein, 161 aa, Glycine max
  Clone ID: PAT_MRT3847_90680C.1.pep
GPMGALKRKMEEETGARMSVGDGTLTIVAKNQSVMDKILEKIDFIVGRQIEVGGIYTGIVTTIKEYGAFVEFNGGQQGLLHISELSHEPVSQVSEVVSVGQKLSLMCIGQDVHGNIKLSLKATSPRPGGLETNDAVEESVASAKETANIWAPVGNVSSTQE

SEQ ID NO: 275372 - protein, 46 aa, Glycine max
  Clone ID: PAT_MRT3847_90681C.1.pep
GRLPVFHKSNITGFFFFCHICLIIVASSHLFSFVKILYEAFGEPKN

SEQ ID NO: 275373 - protein, 45 aa, Glycine max
  Clone ID: PAT_MRT3847_90682C.1.pep
WLSTILVILGFSFEVERTLFYYTISNCMRFVSESHTFEKPVKIYN

SEQ ID NO: 275374 - protein, 45 aa, Glycine max
  Clone ID: PAT_MRT3847_90683C.1.pep
GTTQHNKLSIAAKGLKSNAAALEGPCLRTRCMRLHQSSMMSPTLN

SEQ ID NO: 275375 - protein, 46 aa, Glycine max
  Clone ID: PAT_MRT3847_90684C.1.pep
DFVYFLSKLYSHFPCFFQIAFDILLFLPYRKSLNSLVHIIPTSPLS

SEQ ID NO: 275376 - protein, 152 aa, Glycine max
  Clone ID: PAT_MRT3847_90685C.1.pep
MLRDTKPYTTGVRVGKGFQAEVLDWSGPMKSDEDALPEPLEISPSEFYKLLGENMRNPTKLSSIGNWIKCQEVLDRANETICGKWRRAPLFEVQTDDWDCFCAIHWNPSHADCAVPQELETDQVLKQLKYIEMLRPRLAAKRKKSDCTHNSE

SEQ ID NO: 275377 - protein, 167 aa, Glycine max
  unsure (1)..(167): unsure at all Xaa locations
  Clone ID: PAT_MRT3847_90686C.1.pep
KFHPCFRRGIFGNIPTGAAGERKKRSQPLFFKKAEKTKKKTKANYKTLARIKTKFXKKKRHKINKGKQKKRGAKGAQQNSQKKPKSRKTKKXKKKKNPERKQKEKNKKEGKAKKRNNGGTRNENNHNEKKFGNQKKQGKKTRGTTKKAHQNDPTNPWGATGEKTPTP

SEQ ID NO: 275378 - protein, 210 aa, Glycine max
  unsure (1)..(210): unsure at all Xaa locations
  Clone ID: PAT_MRT3847_90687C.1.pep
MIHMETDEFSRVIPFQLQFDKPLASQIKIAEWNPEKDLLAMVTDDSKILLHRFNWQRLWTITPGRCITSLCWRPDGKAIAVGLDDGTLSLHDVENGKLLRSLKSHCAAIICLNWEEESQLITDDFGHTSKYEDRTSRFFPPAPRVPRMPGLVSGDNGFMDDSEDSFQELSNSSHQRFNILCSADKDGNICFSIFGIFPIGKXYIHNLTFP

SEQ ID NO: 275379 - protein, 85 aa, Glycine max
  unsure (1)..(85): unsure at all Xaa locations
  Clone ID: PAT_MRT3847_90688C.1.pep
GNYGKTLKKPRTSYEKXRLDAELKLVDENCLRCKRELWRVHYALSRIRNNARNLLTVYXKNQGRIFEGEALLLRMFRYGXLDETQ

SEQ ID NO: 275380 - protein, 149 aa, Glycine max
  unsure (1)..(149): unsure at all Xaa locations
  Clone ID: PAT_MRT3847_90689C.1.pep
LEVIPICLITRFFTLSSLPLEPGVLITAKNRLMRDCKRMKQDPCAGISGALPDNNLLLLNAVIFGPDDTPWNAGSDLQALQYTEDYADKPPSVRCVSPMSHPDISAEGSIRSDISQNLRSSIYDVAAILTYNQAXLCDPNPNSTAYSEA

SEQ ID NO: 275381 - protein, 67 aa, Glycine max
  unsure (1)..(67): unsure at all Xaa locations
  Clone ID: PAT_MRT3847_9068C.1.pep
MEGKRGHALMCSARVSLFLCALTLXADHGSTTDQDISRQLKLGDNELLRTERKFTVFMENSWRSYYR

SEQ ID NO: 275382 - protein, 84 aa, Glycine max
  Clone ID: PAT_MRT3847_90690C.1.pep
KIILLSVSRRLFKGLILYLIRATYSYFWKGCIYYTKIQHRLFLLLLLLKITPLIILPFFSLHIIQISPLSTFHCSIVFYHFCYS

SEQ ID NO: 275383 - protein, 135 aa, Glycine max
  unsure (1)..(135): unsure at all Xaa locations
  Clone ID: PAT_MRT3847_90692C.1.pep
PHPRPCPRSPSPNPNPNPHAPHAPHFNFLRPHRNRLQPLPPLPPLPPPRAXPPRSPPRLLPNPKPYQPHPKRLRSRRPPLPCPPEPXPDSTPSPSPAPTPPTSKRSSIAASRNCCRDSASLGASSAAPPYLSPPS

SEQ ID NO: 275384 - protein, 41 aa, Glycine max
  Clone ID: PAT_MRT3847_90693C.1.pep
HDNTSYFQLTKKLTTLSKITLFTTFTLYSFLITQYSYLSFS

SEQ ID NO: 275385 - protein, 53 aa, Glycine max
  Clone ID: PAT_MRT3847_90694C.1.pep
SQPHIFTHEAKLFRVNEAIYGTIKPILTPQVMISELLNEFKYFIFKKYYCKKV

SEQ ID NO: 275386 - protein, 63 aa, Glycine max
  Clone ID: PAT_MRT3847_90695C.1.pep
VAFLIDFGVLHISAKDTHRQVLLAVNHEEPERKTYTPLATKPRAEVEGGQAEERPSMSAYQNF

SEQ ID NO: 275387 - protein, 91 aa, Glycine max
  unsure (1)..(91): unsure at all Xaa locations
  Clone ID: PAT_MRT3847_90696C.1.pep
DKEASSARTHTPLKKKNNMSNSTCTEMEKDHTMTAQRSSYIAGCMISPSCLPIHKEYEYSRIYYSPRKRVRRWRNILRRFMRESKXXCRSK

SEQ ID NO: 275388 - protein, 78 aa, Glycine max
  Clone ID: PAT_MRT3847_90697C.1.pep
MVVGCLFAGAVIGTWFNFISVIYIGFVAAHTLPVLYEKYEDEVDNFVYKVLGQMQNQYRNLDTSVLSKIPKGKGKKHE

SEQ ID NO: 275389 - protein, 249 aa, Glycine max
  unsure (1)..(249): unsure at all Xaa locations
  Clone ID: PAT_MRT3847_90698C.1.pep
MSEKTTAENLIENLVDTFVDKKKSVSFFEDDKSDSVSSQINRLFGRQKPVHHVLGGGKSADVLLWRNKKISASVLACATIAWVLFEWLNYNFLTILCLWXLVLVMLAQFLWSNAYSMFNSSASNVPRLVLXRVNLSEHCQLWLIVKVIMCXLMFLQXLLCGGNLNQFLFVVXMSVLLVPVIGQVGAIFISVIYIGFVAAHTLPVXLYEKYEDEVDNFVYKVFGQMQNQYRNLDASVLSKIPKGKGKKHE

SEQ ID NO: 275390 - protein, 122 aa, Glycine max
  unsure (1)..(122): unsure at all Xaa locations
  Clone ID: PAT_MRT3847_90699C.1.pep
LHNPINSECLSLVAKVKSLEKDKEHLRLNLHKAEEEVKLLFDENNVLEKENKRLLRIYKERNHPDSGXEYTNSPSAKSNKRKSSPRTSSPMQRKIDFDDQEVARRPLSPLRHNSPDCRMHKK

SEQ ID NO: 275391 - protein, 80 aa, Glycine max
  Clone ID: PAT_MRT3847_9069C.1.pep
MEEYLSPLAVTHLLQQTLRSLCIHQNSQWVYVVFWRIVPRNYPPPKWESEAANDKSRGNRRNWILVWEDGFCNFATSSAP

SEQ ID NO: 275392 - protein, 108 aa, Glycine max
  Clone ID: PAT_MRT3847_906C.1.pep
IGFHVGFNYKEKPDLAAALKRFFPQGIDDYFHNVGGNTLDFVLLNMTVPGSLHPCAMISHHNLTQHEGDTNLPPILYNRIRLPSFNFLDFHHLYPNLLQLLLPNIIEG

SEQ ID NO: 275393 - protein, 69 aa, Glycine max
  Clone ID: PAT_MRT3847_90700C.1.pep
KQCIGKGEQKVIEDIQGKKPSRFWWGVYQQPISQGKLVLRCILAAPVQIHFFFVGDDIFIKHLLCIITT

SEQ ID NO: 275394 - protein, 44 aa, Glycine max
  unsure (1)..(44): unsure at all Xaa locations
  Clone ID: PAT_MRT3847_90701C.1.pep
GXLLVDXLAXRPTPFSPLQTSXNXXAXPRIXLXYTRITXXXXAR

SEQ ID NO: 275395 - protein, 73 aa, Glycine max
  Clone ID: PAT_MRT3847_90702C.1.pep
IHQLMDEYAAYSDIIQPIQVAVYEMKFGLSLVLSSTWEKKCLNELGQEDINVIMVCYFMSVVMLDFILYLFRN

SEQ ID NO: 275396 - protein, 41 aa, Glycine max
  Clone ID: PAT_MRT3847_90703C.1.pep
QEKDRFKKMASTGTKPLSRPSKKTYITHSNIHPNNLTKSLN

SEQ ID NO: 275397 - protein, 61 aa, Glycine max
  Clone ID: PAT_MRT3847_90704C.1.pep
PENYLKRGKYTTPLFWEKRVLFGTPGVHIPLKICVGLFKNAPQMRAGGSQFIRAPQGAYYP

SEQ ID NO: 275398 - protein, 55 aa, Glycine max
  Clone ID: PAT_MRT3847_90705C.1.pep
HRNYFEHLWQCNGLRTFLKLVKGYLCAYQCLNLPSSWLDSNRFISSSMHRSMLRK

SEQ ID NO: 275399 - protein, 62 aa, Glycine max
  Clone ID: PAT_MRT3847_90706C.1.pep
INCFLEKEENLGSRHQHLFKENVEKIREIRNGLRFEEKRIQESFTHEEGVSTPHARHENDKL

SEQ ID NO: 275400 - protein, 52 aa, Glycine max
  Clone ID: PAT_MRT3847_90707C.1.pep
NEQPAAYGEPVAIGGLNPSVNNELSAAIASILGTKLSLPNSRFLLKVYDTQG

SEQ ID NO: 275401 - protein, 74 aa, Glycine max
  Clone ID: PAT_MRT3847_90708C.1.pep
IYIFGGWGEGGKGGGIPPKAAPGPSRAPSGGEAGAGGTPGKTGNPRKNPSQKTPPKQPAPQEDETGPEETPEKG

SEQ ID NO: 275402 - protein, 64 aa, Glycine max
  Clone ID: PAT_MRT3847_90709C.1.pep
ELYGGRMKTQFGMRLYYKQVAGNGYAVDKSEFWEVVTDSNNDVQKQIVHLGSGSVQLSDFSESK

SEQ ID NO: 275403 - protein, 93 aa, Glycine max
  unsure (1)..(93): unsure at all Xaa locations
  Clone ID: PAT_MRT3847_9070C.1.pep
SKAMSVAAEKIATAARRQAVSLTDAAASRIRQLLQQRQRPFLKLGVKARGCNGLSYTLNYADXEFIFVNPNSKGQCGCGESFMTTGSSGSSKP

SEQ ID NO: 275404 - protein, 137 aa, Glycine max
  Clone ID: PAT_MRT3847_90710C.1.pep
MISLRPYNTCLETTKFLFNPSKLGISTQTCLIAPRKTSRRIQVKCSGAENKGERRTFLTLEEAGLVEISGLSTHERFLCRLTISSLNLLRVISEQEGCPIEELNAAKICDWFLKDKLKREQNLGSAVLQWDDSEFQF

SEQ ID NO: 275405 - protein, 50 aa, Glycine max
  unsure (1)..(50): unsure at all Xaa locations
  Clone ID: PAT_MRT3847_90711C.1.pep
KRGVGATALKWWGEGGHVSXXIEIIISLIRHRTFIILNSYFSGSSARARA

SEQ ID NO: 275406 - protein, 113 aa, Glycine max
  unsure (1)..(113): unsure at all Xaa locations
  Clone ID: PAT_MRT3847_90712C.1.pep
YSDILSQYRASVYSGXSWMAARGAFKMVMIIGWHPYFYNKFWAIEPWLLHGFNRHFYGXESRLDIVGYKRPQVNFSSLQRVVAQIHEIEQMPIGLLILPLYSSFKNDSYSKSS

SEQ ID NO: 275407 - protein, 123 aa, Glycine max
  unsure (1)..(123): unsure at all Xaa locations
  Clone ID: PAT_MRT3847_90713C.1.pep
QTICSLSVQTTSVVIIAMSIGLATTWKLTIAMITGHPLTILRSYTRKAVLSTLSTKFDTAQNQSTQIAAEAVYTHRIVTPFASITNVLQLFDEAHEAPTKEARMKSXLADIRMDAAQSITFMS

SEQ ID NO: 275408 - protein, 84 aa, Glycine max
  unsure (1)..(84): unsure at all Xaa locations
  Clone ID: PAT_MRT3847_90714C.1.pep
QSTLFTRPAPPLACTIGALLATTHSSVNILRAQHSIAGHPSPPAPYRTEKPTIGRQDLRLXPLKSPRAKLATPLPHQPKHHGRR

SEQ ID NO: 275409 - protein, 58 aa, Glycine max
  Clone ID: PAT_MRT3847_90715C.1.pep
GSSEKTTEGVCFTVITTETNLHLEKQNLASMFCLLESVNGLKSAFQWFSKHTIIVYFY

SEQ ID NO: 275410 - protein, 76 aa, Glycine max
  Clone ID: PAT_MRT3847_90716C.1.pep
NPPESLTKGQKIIFLPYSPKDPLSSNSFPTPAGVKPGGNLGGYPARTHPGGSPGKHPSFGPPPPLSLISPPIKKNP

SEQ ID NO: 275411 - protein, 297 aa, Glycine max
  Clone ID: PAT_MRT3847_90717C.1.pep
MKDFPSCFGENGVQVADSSSSSANKSAQNVVTCVYQCRIGGISCLITVTWSKNLMGQGLGVGIDDSSSQSLCKVDIKPWGFSKRRGCKSLEVHSCKVDVYWDLSSAKFGSGPEPLGGFYVGAVVDGQMVLLLGDLRKEAFKKTNANPLPHNAVLVAKKEHVFGKKLHGTKAVFCDNGQIHDLVIECGTASVGDPSLVIRIDSKTVMQVKRLRWKFRGNHTILVDGLAVEVFWDVHNWFFGTSLGNAVFMFRTCLSAADKLWASQPPSDLAWSFSERFPETKLQGLSFSLILYAWKNQ

SEQ ID NO: 275412 - protein, 112 aa, Glycine max
  Clone ID: PAT_MRT3847_90718C.1.pep
AHDLLLGAKKRPATRDSHGKRSLVNKEEVTRRISHAESREKGQHKAKRSDGKLALDLEKKMVIRGDNEDIGSEKLRGAKEQRMSSSKSDLDTKKNIQRARSKKSEHGRERGR

SEQ ID NO: 275413 - protein, 59 aa, Glycine max
  unsure (1)..(59): unsure at all Xaa locations
  Clone ID: PAT_MRT3847_90719C.1.pep
MAMHNHQTDEYPSFKLVIVGEXATSKETFVXKHLTSEFEKKYAPTIGMKVHPLDLCTSC

SEQ ID NO: 275414 - protein, 134 aa, Glycine max
  Clone ID: PAT_MRT3847_9071C.1.pep
MASKAMSVAAEKIATAARRQAVSLTDAAASRIRQLLQQRQRPFLKLGVKARGCNGLSYTLNYADEKGKFDELVEDKGVKILIDPKALMHVIGTKMDFVDDKLRSEFIFVNPNSKGQCGCGESFMTTGSSGSSKP

SEQ ID NO: 275415 - protein, 120 aa, Glycine max
  Clone ID: PAT_MRT3847_90720C.1.pep
VDNEIILWEPKVNEQTPGKGVVDVLHKYPIPDCNIWFIKFSCDFHFNIVTVGNREGKIFVWELQSSPPVLAAKLSHPQSKSPIRQTATSFDGSTILSCCEDGTIWRWDVSKPSTSTSTAA

SEQ ID NO: 275416 - protein, 72 aa, Glycine max
  unsure (1)..(72): unsure at all Xaa locations
  Clone ID: PAT_MRT3847_90721C.1.pep
TSLASQGQPMKGILRQIKLWYNQYMVSCQSFRTLDRLGSDVTHNPTFITVQAHSLSFRKKKKXKKKKSARAL

SEQ ID NO: 275417 - protein, 38 aa, Glycine max
  unsure (1)..(38): unsure at all Xaa locations
  Clone ID: PAT_MRT3847_90722C.1.pep
GLXNXGMVHRAISXLSLPGKTQATSSCTTGATSTVTCQ

SEQ ID NO: 275418 - protein, 84 aa, Glycine max
  Clone ID: PAT_MRT3847_90723C.1.pep
KKAKPGCRGLLFAGAGGPPGIQARPRRGNQFSLRGVMRELAHIKGNGRHCPEKACQPHGPNESTQGPKGGERGFVYWGPTHIYW

SEQ ID NO: 275419 - protein, 144 aa, Glycine max
  unsure (1)..(144): unsure at all Xaa locations
  Clone ID: PAT_MRT3847_90724C.1.pep
LWAPLALGFLCLCPVGGLPCLFRLLLPHSGLFGAFSVCVVGVLCPSIVCVVLLGARFSCPVFLCFRCVLRMTRVFLDLSCGASGSRCFVLGCPLRLXPLERCVVLLLCSLGLMLLGVGGAVWGLLRLLGLWGGRFFLFPSTPVP

SEQ ID NO: 275420 - protein, 123 aa, Glycine max
  Clone ID: PAT_MRT3847_90725C.1.pep
KNTVATQYIKFVYAFYTHFLLRIRLFPNHWNTFLNPPQIQIQIQFELNLGFVPSYCLHGSRILLKFPKREKENAREIGAVVVPGSDSGIPQHHREVEEVRIRAQWAQQQHFFHQIGRTAIRDR

SEQ ID NO: 275421 - protein, 128 aa, Glycine max
  Clone ID: PAT_MRT3847_90726C.1.pep
GSRRKKMKGQTQATKLVNLYRFCVSSSSSSISRFNHFTLTTTDYNKFKFACAKAKHLQLSLNSHSFNAPSFFFPPVTLPLITRVFIAFLAITYILGVSIASAPIIAHAMDAGDALVDDHVPTMNPPTY

SEQ ID NO: 275422 - protein, 77 aa, Glycine max
  Clone ID: PAT_MRT3847_90727C.1.pep
SSKRDKTNRGPTPLLCCFHQDASNSISEKRECFPKWQMQYRPPTTKNSNQSELLISHFNISQAKKLIVLHFDFAGIK

SEQ ID NO: 275423 - protein, 160 aa, Glycine max
  Clone ID: PAT_MRT3847_90728C.1.pep
AAYLIAGDALVDDHESQDLSEEEINVHHLLRLARKLWLPAFFFLTVCQTWTTQLQILFIKLTLFLLSTKPNPFSVYVFVDKLCQRYMHQETRFFKVKSLYASKIEVQDYKLLCLADVEVRDQKFTLVGILGSWWPILHLPFWEAFSFFRNRIGSILVKTT

SEQ ID NO: 275424 - protein, 85 aa, Glycine max
  unsure (1)..(85): unsure at all Xaa locations
  Clone ID: PAT_MRT3847_90729C.1.pep
NILKILRRILRFILLXXXSXXSXCFPLXXXXXXXNSXXQFCFFLXVIPPLFRKSIVISFGFFLVLPLLGGGACNWGCPACLTCSR

SEQ ID NO: 275425 - protein, 125 aa, Glycine max
  unsure (1)..(125): unsure at all Xaa locations
  Clone ID: PAT_MRT3847_9072C.1.pep
GHTHPKTRRAPKPPTQKNPRANPPTXRKGPKQPIQPRPPTQNHRQRQQQHQPHNHTQTPTPETPAEATGTRNPTTPPPKNKLAPPTETQGTATGKSGRTRPPTTRGEGTHGTATRPRTTRPGNRG

SEQ ID NO: 275426 - protein, 53 aa, Glycine max
  Clone ID: PAT_MRT3847_90730C.1.pep
FFYIIIMVFVFIVKFFFIIFIFYVGGGNLFIYFFYNLFLKYSLILFILFNFFL

SEQ ID NO: 275427 - protein, 72 aa, Glycine max
  Clone ID: PAT_MRT3847_90731C.1.pep
WVNHVTGSKIVVSSFYKLSFGTPTKKSFWQFYHLEVTEKYKGCKYNDLTWTMIELFFFISFLYYISVLVEHG

SEQ ID NO: 275428 - protein, 37 aa, Glycine max
  Clone ID: PAT_MRT3847_90732C.1.pep
YVMSNSQRKRIRIRKKAARSVRLKMVPFYERSVWSLV

SEQ ID NO: 275429 - protein, 86 aa, Glycine max
  Clone ID: PAT_MRT3847_90733C.1.pep
SIKSTLVCITNTQIGSTDITDTSEPLKQGLLTYGSLPLLCYLIQYYISADASRYVGTRIRAQFGHYSACYNDHSYLDRERIGHIIL

SEQ ID NO: 275430 - protein, 786 aa, Glycine max
  Clone ID: PAT_MRT3847_90734C.1.pep
PRVRSYFMIEDRDMYDASSGSRFQCRSLNINEDLGQIRYVFSDKTGTLTENKMEFQRASVHGKNYGSSLPMVDNTAAEDVIPKRKWKLKSEIAVDSELMTLLQKDSNREEKIAANEFFLTLAACNTVIPILSDDGFSSLGTNELNEDTRRIDYQGESPDEQALVSAASAYGYTLFERTSGHIVIDVNGEKLRLDVLGLHEFDSVRKRMSVVIRFPDNAVKVLVKGADTSMFCILENGSESNIWHATESHLNEYSSQGLRTLVVASRDLSDAELEEWQSKYEDASTSLTDRAAKLRQTAALIECNLKLLGATGIEDKLQEGVPEAIESLRQAGIKVWVLTGDKQETAISIGLSCKLLSADMQQIIINGTSEVECRNLLADAKTKYGVKSSSREQQNLKCKIDSRHGGPDIPNDTKSLSMPKWNPGKEEETTAPLALIIDGTSLVYILEKELQSELFDLATSCRVVLCCRVAPLQKAGIVDLIKSRTDDMTLAIGDGANDVSMIQMADVGVGICGQEGRQAVMASDFAMGQFQFLKKLLLVHGHWNYQRVGYLVLYNFYRNAVFVMMLFWYILCTAFSTTSALTDWSSVFYSVIYTSIPTIIVGIQDKDLSHRTLLQYPKLYGSGHRQEAYNMQLFWITMMDTVWQSLVLFYIPLFTYKDSSIDIWSMGSLWTIAVVILVNVHLAMDINRWVLITHVAIWGSIIITYGCMVVLDSIPVFPNYWTIYHLARSPTYWITILLIIIVALLPRFTCKVVYQIFWPSDIQIAREAKLMRKWQDNLQPRQQVSS

SEQ ID NO: 275431 - protein, 83 aa, Glycine max
  Clone ID: PAT_MRT3847_90735C.1.pep
VFFTSSRLSDSCWNKKWRLSNGRSYVTFCGWLLTTRPGYGHNSFIFPLIIWESKKLNLSISLMRGRACLNLILVGAICLSSFY

SEQ ID NO: 275432 - protein, 332 aa, Glycine max
  Clone ID: PAT_MRT3847_90736C.1.pep
MVTDQDIAKGVESLLRHSDPNSITTVNGVVQQLEAKLGLDLSHKASFIRDQIDHLLRSQPQAFAPHPPPLHKDYFAPHPQPHFPTTHFPSHFALHDEINFQQHPRAPPPCKVETFPPQNAHTVAPPQVPKESVQTGAKRRGGAGGLNKVCGVSPELQAVVGEPAMPRTEIVRQLWAYIKKNNLQDPGNKRKIICDDALRLVFETDCTDMFKMNQLLAKHIIPLGPTKESQAKRVKLDAEIKIESAEPASSTVAISEALAKFLGTEGREMQQAEAIRLVWEYIKLHHLEDPLNSMVILCDAKLQELLGCESISALGIPEMLARHHLFKQSDTC

SEQ ID NO: 275433 - protein, 188 aa, Glycine max
  Clone ID: PAT_MRT3847_90737C.1.pep
MASHFLKSLLLLSTYALTISAEYTGFVGTLDPKSIGIHHKKTLSHFRFYWHEVFSGENPTSVRIIPSLPKYNATTTFGSVGIFDTPLTVGPEVYSKVVGKAEGLFASTSQTQFDLLLIYNFALTQGKYNGSTITFTGRSPLSEKVRELPIVGGSGVFKFATGYVESRTLSFDPQTRNNTVQFDVYIYY

SEQ ID NO: 275434 - protein, 188 aa, Glycine max
  Clone ID: PAT_MRT3847_90738C.1.pep
MATQFLKSLLLLSTLTLTISAEYTGFVGTIDPKSIGIKHKKTLSHFRFYWHEVFSGENPTSVRIIPALPKYNTTTTFGSVGIFDNALTVGPEVYSKVVGKAEGLFASTSQTQLDLLLIFNFALTQGKYNGSTITFTGRSPLSEKVRELPIVGGSGVFKFATGYIESRTLSFDPQTRNNTVQFDVYIYY

SEQ ID NO: 275435 - protein, 114 aa, Glycine max
  unsure (1)..(114): unsure at all Xaa locations
  Clone ID: PAT_MRT3847_90739C.1.pep
LVPVRRPGVXFRGFGVXCVSCCPRXAGSGGXGSGVAWXSCCGAWFRGVGAXSFSRXPVVGAAPLFLGGGGAVWPVLCAPRLXLLSCRCWKAEALWARARALAGSGCLRGLPLSL

SEQ ID NO: 275436 - protein, 113 aa, Glycine max
  Clone ID: PAT_MRT3847_9073C.1.pep
MPGELQLPPGFRFHPTDDELVNHYLCRKCAAQTIAVPIIKEIDLYKFDPWQLPEMALYGEKEWYFFSPRDRKYPNGSRPNRAAGSGYWKATGADKPIGKPKALLEAGSQDSRL

SEQ ID NO: 275437 - protein, 111 aa, Glycine max
  unsure (1)..(111): unsure at all Xaa locations
  Clone ID: PAT_MRT3847_90740C.1.pep
RFPLLAVVVNVTGGGGRGGLPSTAWISSAVTNRSSYNYLTDYHTXLGKGKKIVXFLTRVDPFPVASLAVFFGVKNEIXLSTNATNSMLTQLFENCXSSKYLVDECPFVYVN

SEQ ID NO: 275438 - protein, 114 aa, Glycine max
  unsure (1)..(114): unsure at all Xaa locations
  Clone ID: PAT_MRT3847_90741C.1.pep
KTLTPNTITLKVHNIDTIYNVNANIQDKECIPPHHHPLIFAGKHLEHXRTLSDYNIHNESTLHIFLTLLPVIIEPSLIALTRKYNXDKIICRKFYSRLHSITLNCLKKNCTILT

SEQ ID NO: 275439 - protein, 140 aa, Glycine max
  unsure (1)..(140): unsure at all Xaa locations
  Clone ID: PAT_MRT3847_90742C.1.pep
MHQCLSLFLQEGKIQEAFHLGKTISLIVXIPPNKSVKQLLEAQHHTCAGCHKHFDDGKTLIRDFVQTFGWGKPRLCEYTGXLFCSSCHTNETAVLPARVLHHWDFTHYPVSQLAKSYLDSIYEQVNLILMFVFYNIVFAL

SEQ ID NO: 275440 - protein, 208 aa, Glycine max
  Clone ID: PAT_MRT3847_90743C.1.pep
VVIHRDVKTSNILIDAHLNARLGDFGLARLYNHGQLSHTTSVVGTIGYIAPELTRTGKASTSTDVYAFARGLLEVATGKRPLDSDQFFLVEWVIEKYHLGQILEVVDPKLDSLYDEEEIELVLKLGLLCTQHRADYRPTMKQVTRYLNFDEPLPDIVDWGHGVSGSSRLSSGFLEVTYSMGTVETLGYLSSISMSTKSIDAGRQQIII

SEQ ID NO: 275441 - protein, 228 aa, Glycine max
  unsure (1)..(228): unsure at all Xaa locations
  Clone ID: PAT_MRT3847_90744C.1.pep
ACLHPAVLVETYEKGESVSYYVDDLQGHERVKSALAHIGTHALLKMLLVDNFIHADMHPGNILVRVSQNKSRKRLFKSKPHVVFLDVGMTAELSXSDRVNLLEFFKAVARRDGRTAAECALNLSKQQNCPNPEAFIEEVEESFTFWGTPEGDIVHPAECMEQLLEKVRRHRVNIDGNVCTVMVTTLVLEGWQRKLDPGYNVMQTLQTLLLRADWAKSLSYTIDGLMAP

SEQ ID NO: 275442 - protein, 57 aa, Glycine max
  Clone ID: PAT_MRT3847_90745C.1.pep
PRVRSCITRYWANTILLLVHELRHTTTASALTRYYALETTPSPLDVPHLRPGLGRPL

SEQ ID NO: 275443 - protein, 180 aa, Glycine max
  Clone ID: PAT_MRT3847_90746C.1.pep
MDFLHTLLSLIALSFLGIFLVFCFIMLTIIIGKSIGDPDYAPVKGTVFNQLLYFNTLHDYHAQLAKTNPTFRLLAPDQSELYTADPRNVEHILKTNFDKYSKGKYNQDIMTDLFGEGIFAVDGDKWRQQRKLASFEFSTRVLRDFSCSVFRRNAAKLVRVISEFSHQGQVFDMQDILMRC

SEQ ID NO: 275444 - protein, 180 aa, Glycine max
  unsure (1)..(180): unsure at all Xaa locations
  Clone ID: PAT_MRT3847_90747C.1.pep
LIAFTLGEIGMGTHEQSKSLATLAQDNLHFLFFSAIGEDGXILILGNLSCQYAFALADLSDTEVMTGCITDVXRTLNYFLDDXNNTAEILFPXKVSFLIAVFILSVVNTFNADAYKAKLINVSADYXKMDTPIICKDGDICKSEDLEGGSDSADSVEQVTAVVLMVLEEERAINGDEKST

SEQ ID NO: 275445 - protein, 66 aa, Glycine max
  Clone ID: PAT_MRT3847_90748C.1.pep
LLGLFYSVFIARPGRAREAASEVKWKNYQRHSILHGCTSVSSRWNGDCKRFYCNCPTIKKLILQPI

SEQ ID NO: 275446 - protein, 77 aa, Glycine max
  Clone ID: PAT_MRT3847_90749C.1.pep
ATATLSCRPQRSRRRSLSSKTRAELSHLLCSTTISWLISNFNFKNRSFRLTSFHTYENAGCLCCTISSTKMHRIQVF

SEQ ID NO: 275447 - protein, 96 aa, Glycine max
  Clone ID: PAT_MRT3847_9074C.1.pep
RVRFSPSVPSFSSLFFTPSIPLSLSSRLLSSFSLPSFSLQTKPFLITTTHTHTHQAFFMVAICKQLYFHIFLSLFLSYESLKRVPFLATSLAPKQI

SEQ ID NO: 275448 - protein, 53 aa, Glycine max
  Clone ID: PAT_MRT3847_90750C.1.pep
AIKLCGLDSTVKGAVSSHNIGIICRQGHSSYILCAIGLTVFLPIIRPPAEGRL

SEQ ID NO: 275449 - protein, 31 aa, Glycine max
  unsure (1)..(31): unsure at all Xaa locations
  Clone ID: PAT_MRT3847_90751C.1.pep
YVNITNISYNIYNTCILVQLHEPDLTHINKX

SEQ ID NO: 275450 - protein, 96 aa, Glycine max
  unsure (1)..(96): unsure at all Xaa locations
  Clone ID: PAT_MRT3847_90752C.1.pep
ARKHHIGSYLQTNYQLYLLILKDTSASIQTKAVTQEDVXLSGIVGSPFVCTVQIALKLKGVEYKFLEENWGHKRDSLLKYNPGHKIVPVFGHNEQT

SEQ ID NO: 275451 - protein, 57 aa, Glycine max
  unsure (1)..(57): unsure at all Xaa locations
  Clone ID: PAT_MRT3847_90753C.1.pep
SVALRQIQVGPNQVFMDLSHPRRALPPLATIASRRMLPASTLGSHXTLLLRRLDLGS

SEQ ID NO: 275452 - protein, 72 aa, Glycine max
  Clone ID: PAT_MRT3847_90754C.1.pep
SHLASILTNRLPSGVYARLGCLFHAKTCVIHAEIDHLNFWSDSTLRNPRRRQRDLSPQQAPHDRNEVLAFPP

SEQ ID NO: 275453 - protein, 67 aa, Glycine max
  Clone ID: PAT_MRT3847_90755C.1.pep
KNFCVWSYLSVFLSPQCSLICQHHHKIHHVVLMLQSLPLLHWHLVKYNFIFTSRVLIDTIIVVVYED

SEQ ID NO: 275454 - protein, 166 aa, Glycine max
  Clone ID: PAT_MRT3847_90756C.1.pep
LSFSKLKVKADLKQGDLLHSSNLVCSLSFDRDGEFFATAGVNKKIKVFECDSIINEDRDIHYPVVEMASRSKLSSICWNTYIKSQIASSNFEGVVQLWDVTRSQVISEMREHERRVWSIDFSSADPTMLASGSDDGSVKLWSINQGVSVGTIKTKANVCCVQCWLI

SEQ ID NO: 275455 - protein, 130 aa, Glycine max
  Clone ID: PAT_MRT3847_90757C.1.pep
KIKVFECDSIINEDRDIHYPVVEMASRSKLSSICWNTYIKSQIASSNFEGVVQLWDVTRSQVISEMREHERRVWSIDFSSADPTMLASGSDDGSVKLWSINQAIPFLHLGVSVGTIKTKANVCCVQCWLI

SEQ ID NO: 275456 - protein, 92 aa, Glycine max
  unsure (1)..(92): unsure at all Xaa locations
  Clone ID: PAT_MRT3847_90758C.1.pep
MDPLKTYLRFQITSFNGRHFGLHADSAQLVAYIPQGNLXQLDKPDYRGFNHPYISFLCYGMDSTGDFIPIKQLREKYNKPRHEIPIDPPNDE

SEQ ID NO: 275457 - protein, 47 aa, Glycine max
  Clone ID: PAT_MRT3847_90759C.1.pep
SCFLLTGDRNGLLCRCHVLLLECPFGGLAHLSFSLACVYPKRLKKTP

SEQ ID NO: 275458 - protein, 77 aa, Glycine max
  Clone ID: PAT_MRT3847_9075C.1.pep
NLTRRNDYLNFPRLIYYDCNVRITCGFFLNVTDQTQLSCAMLLFLRYFKGPELLVDLQDYDYSLDMWSLGCMFAGMV

SEQ ID NO: 275459 - protein, 52 aa, Glycine max
  Clone ID: PAT_MRT3847_90760C.1.pep
GFGVQNRLLLFGKLPQKQTTTLESMKMELSRMGHIRTGAQTNCFRSTALFFY

SEQ ID NO: 275460 - protein, 94 aa, Glycine max
  unsure (1)..(94): unsure at all Xaa locations
  Clone ID: PAT_MRT3847_90761C.1.pep
PTAGTDPEADLYHDLPQWDFLTDRERHFVTHALAFFAVCDGIVLENLSGRFTKEIHLRKARALYGSQIAIENIHSQMYGLPLKXYRKDSCQKNQ

SEQ ID NO: 275461 - protein, 132 aa, Glycine max
  Clone ID: PAT_MRT3847_90762C.1.pep
MLRFLPTESNIFQSFPHFAVVKALRVFTSATCSTIGLTQTQVEFEDDKNKCSDAAELLSKWGCSDDDLVRIFSRCPSLRNADPMQVQSKLCLLSDLGLCASELVKIVNCRPRFFRARINSCLEEKMAPPTSL

SEQ ID NO: 275462 - protein, 77 aa, Glycine max
  unsure (1)..(77): unsure at all Xaa locations
  Clone ID: PAT_MRT3847_90763C.1.pep
MSNIGRCYDLAVTTFARDGRIFQLEYAAAAVSTSGTVSVIKCKHSVVLTVDKLIXSKMMLPGSTRTRHSVHRHSGMA

SEQ ID NO: 275463 - protein, 117 aa, Glycine max
  unsure (1)..(117): unsure at all Xaa locations
  Clone ID: PAT_MRT3847_90764C.1.pep
MLLLSPVTPGQVSFLLGIIPVVVAWIYSEMLEYRNNYVPSRAQSDINLVEIGSDVVKDEDRAAXLEGGAXQSGSPXARSLTASPSIIRFLLMDEYXLLENRLTLRAMSEFGLILAYF

SEQ ID NO: 275464 - protein, 53 aa, Glycine max
  Clone ID: PAT_MRT3847_90765C.1.pep
ALHFIHSLTHSSPFGGSSLLDVGDHDLVNRPVVSDAEDHHLLNAEHHFYGFKT

SEQ ID NO: 275465 - protein, 363 aa, Glycine max
  unsure (1)..(363): unsure at all Xaa locations
  Clone ID: PAT_MRT3847_90766C.1.pep
FEKTEPSRTKQTRATVLASAKALVGVGGPEPLLQRIPSLLTFFISSGPSLYLSHTHTHTHAHTHTRTRLCFPISTFYWTDSYKLGRGGYGPVYKGTFPGGQDIAVKRLSSVSTQGLEEFKNEVILIAKLQHRNLVRLRGFCIGGAEKILLYQYMPTKSVVSFIFDRTRTSLQDXQYDNILPEEVLNPXRSDFGLPEIVGGKETEACTGRVMGTFGYMAPEYALDGFFSTKSDVFSFGVVLLEILSGKKNTGFYQSKQISSLLGHAWKLWTENKLLDLMDPSLCETCNENEFIKCAVIGLLCVQDEPSDRPTMSNVLFMLDIEAASMPIPTQPTFFVKKHLSSSASSSSKPDIGQFESSYQEGR

SEQ ID NO: 275466 - protein, 313 aa, Glycine max
  Clone ID: PAT_MRT3847_90767C.1.pep
YKLGRGGYGPVYKGTFPGGQDIAVKRLSSVSTQGLEEFKNEVILIAKLQHRNLVRLRGYCIKGDEKILLYEYMPNKSLDSFIFDRTRTLLLDWPIRFEIIVGIARGMLYLHQDSRLRVIHRDLKTSNILLDEEMNPKISDFGLAKIFGGKETEACTGRIVGTYGYMAPEYALDGFFSTKSDVFSFGVVLLEILSGKKNTGFYQSKQISSLLGHAWKLWTEKKLLDLMDQSLGETCNENQFIKCAVIGLLCIQDEPGDRPTMSNVLYMLDIETATMPIPTQPTFFVNKHFSSSASSSSKPEISLQFESSYQEGR

SEQ ID NO: 275467 - protein, 186 aa, Glycine max
  Clone ID: PAT_MRT3847_90768C.1.pep
LGPGRRIRTAPNQTGVNQQNDYLSVVSQGFGKLSLAAANVVQAGTKEFSAKVKEGGYDYKVNETVNVVSQKTSEIGQRTWGIMKGVMALASQKVEEFARDNPNWMSDNWQRNESDRNGFYQEFNRENNGRNSSTREGQHSSGGQTNTFHSSSWDDWGHNDSRKEETAKGSAPQSSGWKDNNITQAL

SEQ ID NO: 275468 - protein, 486 aa, Glycine max
  Clone ID: PAT_MRT3847_90769C.1.pep
MAASRRLRDLQSQPANKICVDCSQKNPQWASVSYGVFMCLECSGKHRGLGVHISFVRSVTMDSWSEIQIKKMEAGGNDKLNAFLTQYGIPKETDIVAKYNSNAAAVYRDRIQALADGRPWRDPPVVKEAVRSSASKGKPPLSAGNNNNGGWDNWDPDDGFGSARGGADLRRNQSTGDVRGFGGGGNVSRSKSTQDMYTRAELEASAANKEDFFARKRAENESRPEGLPPSQGGKYVGFGSGPAPNQTGVNQQNDYLSVVSQGFGKLSLAAANVVQAGTKEFSAKVKEGGYDYKVNETVNVVSQKTSEIGQRTWGIMKGVMALASQKVEEFARDNPNWMSDNWQRNESDRNGFYQEFNRENNGRNSSTREGQHSSGGQTNTFHSSSWDDWGHNDSRKEETAKGSAPQSSGGKFDNNYNSSSWDDWDQEDTRKKEPAKGSAAHSSDGWAGWDNAKDDGFDDIYGSASNNKGGAHNDKSGAAWTGGGFL

SEQ ID NO: 275469 - protein, 345 aa, Glycine max
  Clone ID: PAT_MRT3847_9076C.1.pep
MEVSLLEEVENILRYRFRNKKLLEEALTHSSFLDGVSYERLEFVGDPVLSLAISNYLFLAYPDLDPGQLSALRAANVSTEKLARVAVRIGLHRFVRHSAPPLVDKVERFVDAVKLEINPVAHGGSVKAPKVLADVVESVAAAIYVDVNFDLQTLWVIMRGVLEPIVTPDALEKQPQPVTMLYEMCQKKGKQVDIKPSREGDLSVAKVFVDGEFVASASSSQKDHAKLEAAKIALGKLAHLVPSTDKKSATNMKLNFAADENGTWVVEAPKNKLRELCAVKKWPIPEYIIEKDSGPSHEKKFVCAVQIPTADGILQMSGDEKSRVKDAENSAASLMIRALQQYNYL

SEQ ID NO: 275470 - protein, 174 aa, Glycine max
  unsure (1)..(174): unsure at all Xaa locations
  Clone ID: PAT_MRT3847_90770C.1.pep
GFGNVYKGILPDGTLVAVKRLKDGNAIGGEIQFQTQVEMIRLTLHQNLLXLYRFYMTPSKKLLFYPYMSNDNIASRLERKRILDXNTKKHITCKSRRKLLYLHKQCYPKIMHINMKSTNILLNNYYKADIKYVRLANLLNRRYSHITTAVENTMYHISPEYLCTRASCDKTNIC

SEQ ID NO: 275471 - protein, 89 aa, Glycine max
  unsure (1)..(89): unsure at all Xaa locations
  Clone ID: PAT_MRT3847_90771C.1.pep
RGGPGVHDGPFFXTIVIIFNSIDIIDRFFLMKAVDINTSXYSIVRLTRXIVPFMIVTGMDVAXIDGSPSICPYFFCYDDIMSQFLFIFI

SEQ ID NO: 275472 - protein, 109 aa, Glycine max
  Clone ID: PAT_MRT3847_90772C.1.pep
LRRERKEESFGVCLSYLNSHHSPPLFCLLFSKGRIFLHCCCVKFLPFLLFCSFNAGLASLELLRSSKEDGLIEHFYISWCLDPFKCSRSLPETLLQFSVLVDAFFPFEL

SEQ ID NO: 275473 - protein, 489 aa, Glycine max
  Clone ID: PAT_MRT3847_90773C.1.pep
MAASRRLRDLQSQPANKICVDCSQKNPQWASVSYGVFMCLECSGKHRGLGVHISFVRSVTMDSWSEIQIKKMEAGGNDKLNAFLLQYGIPKETDIVAKYNSNAASVYRDRIQALADGRPWRDPPVVKEAVRSSSAAFKGKPPLSASSNNNGGWDNWDADDGFGSARGGSDLRRNQSTGDVRGFGGGGNVARSKSTQDIYTRAELEASAANKEEFFARKRAENESRPEGLPPSQGGKYVGFGSGPAPPQRGNQQNDYFSVVSQGLGKLSLAAASAANVVQAGTKELSAKVKEGGYDYKVNETVNVVSQKTTEIGQRTWGMMKGVMALASQKVEEFARDNPNWTSDNWQRNESDRNGFYQEFNRENNGRNSSTREGQHSSGGQTNTFHSSSWDDWGHNDFRKEEPAKGSAPQSSGGKFDNYNSSSWDDWDQEDTRKKEPAKGSSARSSDGWAGWDNAKDDGFDDIYGSASNSKGVTHNDKSGAAWTGGGFL

SEQ ID NO: 275474 - protein, 69 aa, Glycine max
  unsure (1)..(69): unsure at all Xaa locations
  Clone ID: PAT_MRT3847_90774C.1.pep
GQXASGILKXFTIKLIFKPIPPFLARYLNTGGGITKNPIITLKSPSDFKGHNQSNNPATKHGLKIKILY

SEQ ID NO: 275475 - protein, 56 aa, Glycine max
  Clone ID: PAT_MRT3847_90775C.1.pep
PKPRCRGSRVQDMVTFGLTITKLLPGIGVFPGGKVSCFNLTSCWFFFHFSCPARSS

SEQ ID NO: 275476 - protein, 105 aa, Glycine max
  Clone ID: PAT_MRT3847_90776C.1.pep
MRFLAHNLSPELNLVIILYEDDEGVKIVLATNSDLVSAVSYARSAGVKALKLHLDFGSSTKATTPKSCTDPRQKTSALSMRSSIFASAIVITSIGVLVYLKRSKQ

SEQ ID NO: 275477 - protein, 52 aa, Glycine max
  Clone ID: PAT_MRT3847_90777C.1.pep
RHCPLSTSNISYILVEQQHYLCNKNWYWHGRVLDVLCKRFKLLKFESLAKEL

SEQ ID NO: 275478 - protein, 59 aa, Glycine max
  Clone ID: PAT_MRT3847_90778C.1.pep
VLLRLLVLWEIAVTIVVVEIPATLTLWPKLMDCKPIEGGHRICIFRLFEVFVRVGDCGC

SEQ ID NO: 275479 - protein, 73 aa, Glycine max
  Clone ID: PAT_MRT3847_90779C.1.pep
MNGTVLVTHAAPILVTWFSFASNLCPRQIILEHGDPSQEVNCASWKLAVEGHIIIGFEPIPDNLVAATSDCLY

SEQ ID NO: 275480 - protein, 105 aa, Glycine max
  Clone ID: PAT_MRT3847_9077C.1.pep
PFLHFQPCRPPPFLSNSTPSTRFPGRTSFPVLFVLPHSSFFFRLLFTAGIPTVSTPLSAARKLLTNLPTNTRCRMPRTILFLLFPILCIHLFCPPPPPKTEDVIQ

SEQ ID NO: 275481 - protein, 51 aa, Glycine max
  Clone ID: PAT_MRT3847_90780C.1.pep
KGFKVFKFQMKMVRMHIFGVDIEYVCNVMSGYKGIVDSFKLIVIPLKGNSG

SEQ ID NO: 275482 - protein, 89 aa, Glycine max
  Clone ID: PAT_MRT3847_90781C.1.pep
SMAYSLLVSRQRHYMASDDAYLFIIVHTSTMKRPNEKKHLTLQGCLSSSTHKERSSSKSGKKPIVTTSSLLATDNAKAGNRISHLTTTI

SEQ ID NO: 275483 - protein, 100 aa, Glycine max
  Clone ID: PAT_MRT3847_90782C.1.pep
FSCASFSLPIFFYVFFFYLYLHLYAFFFLVFCFLFACSLFLLKLSFLSQKALIVISKLHEHGFVFLLYLKKLQFLSPNSMNTGLFSYFISKSFDFCLYPC

SEQ ID NO: 275484 - protein, 60 aa, Glycine max
  Clone ID: PAT_MRT3847_90783C.1.pep
YATEEFYEACRILNTLQSQYNDAVPMLVVMISTFGYTNMLLNTQHVVPPMCVCTLETQAR

SEQ ID NO: 275485 - protein, 75 aa, Glycine max
  Clone ID: PAT_MRT3847_90784C.1.pep
WPPFSSSQRHLQLLPYQKRFQKKKKGHHNPPYDQRVKVPNGAIRFPTDHSLPPSCYLHAEQMLPYRLARMTYILV

SEQ ID NO: 275486 - protein, 64 aa, Glycine max
  unsure (1)..(64): unsure at all Xaa locations
  Clone ID: PAT_MRT3847_90785C.1.pep
TKKQLFHFFNXVFSLNGTNDFLFIFCLGCYNDRKSFFGLLMRQIEEDXFGVNHGYPNDNVLQVD

SEQ ID NO: 275487 - protein, 92 aa, Glycine max
  Clone ID: PAT_MRT3847_90786C.1.pep
MLQSMEVPDCVYRRQPLIIPPSAPTPKHSLYLSSLDDQQFLRFSIKYLHLFETASSLNIMKSSVARGLVDYYPVTGKMRSVDDHTHKLEVDC

SEQ ID NO: 275488 - protein, 38 aa, Glycine max
  Clone ID: PAT_MRT3847_90787C.1.pep
MGDQLTDEQISEFKEAFSLFDKDGDGLFSLYLSHVLCI

SEQ ID NO: 275489 - protein, 66 aa, Glycine max
  Clone ID: PAT_MRT3847_90788C.1.pep
CSRWLQNELLIFEVPTQILIPKNREDSFEQLHEKPMDANNKSTSTHVKNSGLTRWSSSSQMKMLFP

SEQ ID NO: 275490 - protein, 115 aa, Glycine max
  Clone ID: PAT_MRT3847_90789C.1.pep
TPNWLRTMTLIITLCNSTQAMMHGYVAVLLVCILDEPYCLRVTISLYPSYHTVGYTLAELGRGVSGSCVGANECTVSRTLAPAVNVGPHSMTRAVTVCQGVLCAVTGPWTPPFGV

SEQ ID NO: 275491 - protein, 56 aa, Glycine max
  Clone ID: PAT_MRT3847_9078C.1.pep
YRDSQDIDWSFSLRAARNMLGVGWTYCSMHASYRLKLKAWANALYIVHLCWMKMPL

SEQ ID NO: 275492 - protein, 45 aa, Glycine max
  Clone ID: PAT_MRT3847_90790C.1.pep
HQRPLLNIFLFPPSYVWVLQRKNCVIEIYNSLRWSMNEVIRHSGH

SEQ ID NO: 275493 - protein, 299 aa, Glycine max
  Clone ID: PAT_MRT3847_90791C.1.pep
MEAIVPVVDFQRLSEEEERKKLRKTCEKPGCFRIINHSIPLTLMADMKSVVKYLHDLPTEIKMRNKPSVPESGYRAAMPTSPLYEGMGIYDMHASPQAFEDFCSNLNVSPRHRQIIKEYGQAIHDLASNLSQKMAESLGIMDNDFKDWPFILRTIKYSFTPDVIGSTGAQLHSDTGFITLLQDDEHVSGLEMMDDFGSFKAVPPIPGAFLCIVGDVGHVWSNGKFWNARHRVICKETGTRYSFGAFMLSPRDGNVEAPKKLVEVDHVQRYRPFKYEDLRDFRITTGKRDGEVLDQYRIC

SEQ ID NO: 275494 - protein, 88 aa, Glycine max
  Clone ID: PAT_MRT3847_90792C.1.pep
TERAPLKNISSVDVWRCRIWSPEKLSRRSRRRTWCRYRLFKAVELMSRVLLVAGSPVSPQVLTQKRHRFGFPRRRIHRFRFYEHRDRP

SEQ ID NO: 275495 - protein, 263 aa, Glycine max
  Clone ID: PAT_MRT3847_90793C.1.pep
MATFSKERENFVYVAKLAEQAERYDEMVDAMKKVAKLDVELSVEERNLFSVGYKNVVGSRRASWRILSSIEQKEDSKGNELHVKHIRDYRNKVELELSNICSDIMIILDEHLIPSTNIAESTVFYYKMKGDYYRYLAEFKAGNEKKEVADQSLKAYQTASTTAESELQPTHPIRLGLALNFSVFYYEILNSPERACHLAKQAFDDAVSELDTLNEDSYKDSTLIMQLLRDNLTLWTSDIPEEGEDLKMESAARVDQGEDELGR

SEQ ID NO: 275496 - protein, 64 aa, Glycine max
  unsure (1)..(64): unsure at all Xaa locations
  Clone ID: PAT_MRT3847_90794C.1.pep
VSFVWANQTSWHLCFLIDNPKQSTVFDILLGISQDLEXPGDSLMPATPVLQATDRSSENAESCA

SEQ ID NO: 275497 - protein, 248 aa, Glycine max
  Clone ID: PAT_MRT3847_90795C.1.pep
MCLSGGVWCAEMVEAMKKVAKLDVELSVEERNLFSVGYKNVVGSRRASWRILSSIEQKEDSKGNELHVKHIRDYRNKVELELSNICSDIMIILDEHLIPSTNIAESTVFYYKMKGDYYRYLAEFKAGNEKKEVADQSLKAYQTASTTAESELQPTHPIRLGLALNFSVFYYEILNSPERACHLAKQAFDDAVSELDTLNEDSYKDSTLIMQLLRDNLTLWTSDIPEEGEDLKMESAARVDQGEDELGR

SEQ ID NO: 275498 - protein, 121 aa, Glycine max
  Clone ID: PAT_MRT3847_90796C.1.pep
AYGMNIFDLHAWRRTNIREIYHSWLKENLKSNLTMWKLGTLPPALIAFKGLVHPIDPSWHMLGLGYQNNTNIESVKKAAVIHYNGQSKPWLQIGFEHLRPFWTKYVNYSNDFLRNCNILES

SEQ ID NO: 275499 - protein, 532 aa, Glycine max
  unsure (1)..(532): unsure at all Xaa locations
  Clone ID: PAT_MRT3847_90797C.1.pep
HHRPIIADPEQRRANAFDYGSGFVNPARVLDPGLIYDLKPADFVAFLCSLGYDPRSLHQVTRDNSTCDRAFSTASDLNYPSISVPNLKDNFSVTRIVTNVGKAKSVYKAVVSPPPGVRVSVIPNRLIFSRIGQKINFTVNFKVTAPSKGYAFGLLSWRNRRSQVTSPLVVRVAPGIIRLECFLQEVSELLYPLYIVLWQLRSHPNXAQMGSQSYFKALIICLIALIGSTQAQLQLGFYAKSCPKAEQIILKYVVEHIHNAPSLAAALIRLHFHDCFVNGCDGSVLVDSTPGNQAEKDAIPNLTLRGFGFIEAIKRLVEAECPGVVSCADILALTARDSIHATGGPYWNVPTGRRDGFISRAADPLRSLPAPFHNLTTQLTLFGNVGLDANDLVLLVGAHTIGIAHCSSISTRLYNFTGKGDTDPTIDNGYAKNLKTFKCKNINDNSLIEMDPGSRDTFDLGYYKQVVKRRGLFQSDAELLTSPITRSIIASQLQSTQGFFAEFAKSMEKMGRINVKLGSEGEIRKHCARVNN

SEQ ID NO: 275500 - protein, 179 aa, Glycine max
  Clone ID: PAT_MRT3847_90798C.1.pep
DPSLQIQNKERANAFDYRAGFVNPARVLDPGLIYDLKPADFVAFLCSLGYDPRSLHQVTRDNSTCDRAFSTASDLNYPSISVPNLKDNFSVTRIVTNVGKAKSVYKAVVSPPPGVRVSVIPNRLIFSRIGQKINFTVNFKVTAPSKGYAFGLLSWRNRRSQVTSPLVVRVAPGKNGLVR

SEQ ID NO: 275501 - protein, 162 aa, Glycine max
  Clone ID: PAT_MRT3847_90799C.1.pep
EARLQYVDFTVPYAESGLSMIVTEKSNESTWMFMKPFTWQMWVATGAVLTYTMVVVWYLEREPNPEFQGNWKSQVSTALMFTFSSLFFAHREKIHNDLSRVVMVSWLFLVLILNSSYTASLSSMLTIQRLQPNVTDILCLKKYNMKIGCDGDSFVRTYLEKV

SEQ ID NO: 275502 - protein, 99 aa, Glycine max
  Clone ID: PAT_MRT3847_9079C.1.pep
DIKEMCKRMRVRGGMLKSKLNRIAWECHARKLLELTKRQSIGGFHTAWCGRNVTSSVYETCCWSLGLVWDSFDNSMLFSITWNSMVTKNIKSLLKYMVR

SEQ ID NO: 275503 - protein, 147 aa, Glycine max
  Clone ID: PAT_MRT3847_907C.1.pep
CFTEKSTLLPLAESAMKFLEPTLSNSNLSPFPTSFFSDKLRTSFLSAPCSKTLSSEPFLSETKPPFTLLCIPFFLPCPTSSTTIGICTYCTVAMKAEELENPETVPVGGFRTVKYFGVECNESLTLSYFWGTEDHGAFPSPYGTNID

SEQ ID NO: 275504 - protein, 129 aa, Glycine max
  unsure (1)..(129): unsure at all Xaa locations
  Clone ID: PAT_MRT3847_90800C.1.pep
SARVKFSHHCLGSLALLLFSLLGLSSSSSLSTDRSILDDDLTVFTRQXRRRHVDQQQKREHGRIYHIHEEEANRLEIVKNNLNYIRDMNANRKSPHAHREGLNKFADITPQELSKKYLHAPKDVSHHIK

SEQ ID NO: 275505 - protein, 74 aa, Glycine max
  Clone ID: PAT_MRT3847_90801C.1.pep
KSENEGHPDKLCDQMFDAELHTRLEQDPHRKNVCETCTKTNLIMGFGEMTTIANVDYKKIVRDTCRNIRLVSMM

SEQ ID NO: 275506 - protein, 92 aa, Glycine max
  unsure (1)..(92): unsure at all Xaa locations
  Clone ID: PAT_MRT3847_90802C.1.pep
PVNTQSVNELVTVCESNIGNTLDRVYVPDVLLVXKLNXAAPSVNVILSISHSSYVKGDPPNFGYESAFPGKAAAKYPDANFIAVDQSRKQYA

SEQ ID NO: 275507 - protein, 76 aa, Glycine max
  Clone ID: PAT_MRT3847_90803C.1.pep
VLEILLIMIYSKKVQLNKGPFSFLIVLARVNGPNHPEERKRYLHHLDNLRLDLFKRGRINSPSGCQLLVLNLIDLA

SEQ ID NO: 275508 - protein, 50 aa, Glycine max
  unsure (1)..(50): unsure at all Xaa locations
  Clone ID: PAT_MRT3847_90804C.1.pep
VSSFFFFFFFYSINGVVREGRFSAGXTINWDIXKYCRXSITIFSSFKKIS

SEQ ID NO: 275509 - protein, 38 aa, Glycine max
  Clone ID: PAT_MRT3847_90805C.1.pep
LSFSSMLLMFILLNYRFVLCANYKVIQVALTKIVLLQQ

SEQ ID NO: 275510 - protein, 69 aa, Glycine max
  unsure (1)..(69): unsure at all Xaa locations
  Clone ID: PAT_MRT3847_90806C.1.pep
MEDDVALLDFWPNTFGMNVRNALAENGIKYKSKXDDLHNKIPLLLKXNPVHKIIPVLIHNGKPISESLV

SEQ ID NO: 275511 - protein, 161 aa, Glycine max
  Clone ID: PAT_MRT3847_90807C.1.pep
GAARRRQKGGLEPNNGLTWEMTKRRGDKEVHMVTEEKPGWCSDPHLPPCAAFVEIMAPVFSREAWRCVWHMIQNDLVHGWGLGFALRRCVEPAHEKIGVIDSQWIVHQVIPSLGNQGESDKGKMPWDSVRARCKSEWAQFQLRVTNADKSYLEGHKRNGKD

SEQ ID NO: 275512 - protein, 125 aa, Glycine max
  unsure (1)..(125): unsure at all Xaa locations
  Clone ID: PAT_MRT3847_90808C.1.pep
RWNSYDSGTGSGAKSGGVSSTPSMRGTVFYVAPEYGYNGDASEKCDVYSFGVLLLVIVSGRRPLXLTGSPVSEFQRANLVSWARQCARRGKLLEMVDESVEGMDKEQASMCVTAALMCLLKSPAR

SEQ ID NO: 275513 - protein, 26 aa, Glycine max
  Clone ID: PAT_MRT3847_90809C.1.pep
SRVVPFSVPRPLCTMFLSIQKVTIYI

SEQ ID NO: 275514 - protein, 55 aa, Glycine max
  unsure (1)..(55): unsure at all Xaa locations
  Clone ID: PAT_MRT3847_9080C.1.pep
SQIPLSFVLASGGGGGGXTKLAGAPPDPVXLRLXRPAASHCRXGRRPLLFYSPAP

SEQ ID NO: 275515 - protein, 61 aa, Glycine max
  Clone ID: PAT_MRT3847_90810C.1.pep
TKLNTSLCKTKQNKGGVFIATSWCRIPHNTGPFILRPASCSNKQKALHFLNTSVNPFTQHF

SEQ ID NO: 275516 - protein, 58 aa, Glycine max
  Clone ID: PAT_MRT3847_90811C.1.pep
GRASDPKMHTSTDATNHNKTKNCCLTISGKVYDQTTVMDYHNRIDKLLLTNTTYNHFL

SEQ ID NO: 275517 - protein, 59 aa, Glycine max
  Clone ID: PAT_MRT3847_90812C.1.pep
IFFPSFAGFFFKRAVTWGFSTRIRPKVLERLPFWEGLRFWGSVNKGRLQRVWGCFGKPR

SEQ ID NO: 275518 - protein, 69 aa, Glycine max
  Clone ID: PAT_MRT3847_90813C.1.pep
TLSRTRTQESEYCSRAREEIYIFFESTNTPYFFQGDQCAQAAVNKVLCTFVGQLIMLTQTVRGVMLHIP

SEQ ID NO: 275519 - protein, 55 aa, Glycine max
  unsure (1)..(55): unsure at all Xaa locations
  Clone ID: PAT_MRT3847_90814C.1.pep
GHRRLQIERINAYYRSAXTGERDVIRAPLMDLEPCTMDSIISGPYGKIFHHDNFF

SEQ ID NO: 275520 - protein, 37 aa, Glycine max
  Clone ID: PAT_MRT3847_90815C.1.pep
TIYCRVCYPQLISRTPLSVSRGEEIWGCTFHRAEFEL

SEQ ID NO: 275521 - protein, 104 aa, Glycine max
  unsure (1)..(104): unsure at all Xaa locations
  Clone ID: PAT_MRT3847_90816C.1.pep
FKIQGFVMARRHSRSSESSEDDVRKRRGSESEDEERDRRYRRGGWSNKKSSGHRSSRENGDGSDSGEERNGAKRDGEKLSFSLLLVIVICDSVNWVLLXXFKXV

SEQ ID NO: 275522 - protein, 69 aa, Glycine max
  Clone ID: PAT_MRT3847_90817C.1.pep
VDRFTDTSRHDTACTVISALLTAMHVKTTHATIKLAMTQTNTFRDKSVTTMYAIVIRNVVPFCRLGRLG

SEQ ID NO: 275523 - protein, 67 aa, Glycine max
  Clone ID: PAT_MRT3847_90818C.1.pep
SEFVKPRSWVAYHYVINFKVVRASNIRVGSFIAALLLLWKVFSRSALQLSHRNSSHFTLFTPHFVKP

SEQ ID NO: 275524 - protein, 85 aa, Glycine max
  unsure (1)..(85): unsure at all Xaa locations
  Clone ID: PAT_MRT3847_90819C.1.pep
AICQRRRKMTPKGLEEIERQVKELKEVGFIREVRYTDWLTNIVLVKKXNVKWKMCVDSIDLNKHXSKDSYMLPNIYKLMDGSFVY

SEQ ID NO: 275525 - protein, 87 aa, Glycine max
  Clone ID: PAT_MRT3847_9081C.1.pep
YSSRIGSSGSSGSSFTQKSNPILLGLLPVEKASIFSLQQFTFASCVGGNFAFVLSILWMHFDLCFFYEFYLNGYKGFLYCHPIYLLL

SEQ ID NO: 275526 - protein, 81 aa, Glycine max
  Clone ID: PAT_MRT3847_90820C.1.pep
GSNQCDCLHIITLGFIISPSVSLNQALWHPTDSRPFATSGRSLFSKCKMQLRSFKPSCECWFNFVTLFSIHVSPFQNKSQQ

SEQ ID NO: 275527 - protein, 93 aa, Glycine max
  unsure (1)..(93): unsure at all Xaa locations
  Clone ID: PAT_MRT3847_90821C.1.pep
SNNVFSIINHICLPHILLVKEGSXLLVQAGHRIPTKTELLTRNLETGENTTTAEKAVKKKDVYTCAYASFSKTGXHDDMEHKAIVKGYKCKIE

SEQ ID NO: 275528 - protein, 216 aa, Glycine max
  Clone ID: PAT_MRT3847_90822C.1.pep
LDLGLADVNHKNYRGYSVLHVAAMRKEPKIIVSLLTKGAQPSDLTLDGRKALQISKRLTKAVDYYKSTEEGKVSCSDRLCIEILEQAERREPLLGEASLSLAMAGDDLRMKLLYLENRVGLAKVLFPMEAKVIMDISQIDGTSEFPSTDMYCPNISDHQRTTVDLNDAPFRMKEEHLVRLRALSRTVELGKRFFPRCSEVLNKIMDADDLTQLTCM

SEQ ID NO: 275529 - protein, 88 aa, Glycine max
  Clone ID: PAT_MRT3847_90823C.1.pep
KWGDANFMDEIDCRSCSDHIDDLLESTARDADGSADTLPYINVRNRNSVASIQAFEHDLTPAYDLVLTGHSASELSDELFVPDEDILL

SEQ ID NO: 275530 - protein, 58 aa, Glycine max
  Clone ID: PAT_MRT3847_90824C.1.pep
TIRLAMLTLYIMGGRGHHFWRTNHIVQMLNGSSRWCFNTTRQCMQCPTNHEYRGWSLE

SEQ ID NO: 275531 - protein, 49 aa, Glycine max
  Clone ID: PAT_MRT3847_90825C.1.pep
GLMIFYERFYVSLTKFSSDYVLEITKAISRFALKGDKRPILLAIGFLFM

SEQ ID NO: 275532 - protein, 115 aa, Glycine max
  Clone ID: PAT_MRT3847_90826C.1.pep
RFFFFLLSLSNGFFYSSLSTNQHLILQHPVQRFAPWHSAAPLKIKRLAHDPQRFAWAVGIAQSRCINMQTRIGALNQEANMLIPYADMLNHSFEPNCFFHWRFKDRMLEALINAG

SEQ ID NO: 275533 - protein, 348 aa, Glycine max
  unsure (1)..(348): unsure at all Xaa locations
  Clone ID: PAT_MRT3847_90827C.1.pep
MRRPWKHSKNKHDLFECLPDDLVVLILSKLSATASSPSDFINIILTCKRLNRSGLHRLVLSKAGPKVFAIKPKNWSEYAHSFLKHCVNAGNVDACYTLGMIRFYCLKNRGSGLSLMASLRNRSGFPVLYASAVIQXNGSGGSKRDKDLRAGVALSARASLLGHIDALRELGHCLQDGYGVRQNVTEGRRLLVQANVRELAYVLRAVAPPSRCCDESSSLLTWGALRCQRKNNNAVSSLACPLLSDYGYSVAPPEVQPANWFLREWFESGKGKLEEGLRLCAHIGCGRPETRPHEFRRCSVCGKVNYCSRGCQALDWKLRHKIECSPVEMYGDGGVDVENEFVVPNDAV

SEQ ID NO: 275534 - protein, 508 aa, Glycine max
  Clone ID: PAT_MRT3847_90828C.1.pep
AASHHSLLLRTHALTLRFFPFSISNGSLLFIFINQPTPYSPKPSSRARAVGFLWKPSYSFGSRAENRARPIRASVGAPPFPLFQPPQVEETTSSELEPADPDFYKIGYVRSMRAYGVQFKEGPDGFGVYASKDVEPLRRARVIMEIPLELMLTISKKLPWMCFPDIIPLDHPIFDIINSTNPETDWDLRLACLLLCAFDCEGNFWQLYGDFLPSADECTSLLLASEEELLELQDPDLASTIRKQQQRSLEFWENNWHSDVPLKIKRLARDPQRFAWAVGIAQSRCINMQTRIGALNQEANMLIPYADMLNHSFEPNCFFHWRFKDRMLEVLINAGQQIRKGDEMTVNYMSAQKNDMFMQRYGFSSPVNPWDKIKFSGNARIHLDSFLSIFNISGLPEEYYHNNCLSKAGDSFVDGAVIAAARTLPTWSDGDVPPIPSMERKAAKELQDECQKMLAEFATTSKQDQKLLDSMADATRTLEAAIKYRLHRKLFMEKVFQALEMYQEQILF

SEQ ID NO: 275535 - protein, 103 aa, Glycine max
  Clone ID: PAT_MRT3847_90829C.1.pep
MRRPWKHSKNKHDLFECLPDDLVVLILSKLSATASSPSDFINIILTCKRLNRSGLHRLVLSKAGPKVFAIKPKNWSEYAHSFLKHCVNAGNVDACYTLGMVSH

SEQ ID NO: 275536 - protein, 119 aa, Glycine max
  Clone ID: PAT_MRT3847_9082C.1.pep
REVDSFAPPQFLAIFLKMESVKPSAVTPRKKLARNFAKVLHVKALIGIASVDGLKNVISDANLKDEGNIGKSKATLNWSESFNEDDDEDLQEREANEALLAKLLLHFNCKAAYAEQCSL

SEQ ID NO: 275537 - protein, 82 aa, Glycine max
  Clone ID: PAT_MRT3847_90830C.1.pep
HIFRPFVGYREVRLVSKESKHRGGDPLILCFVDFANPACAATALSALQGYKVDELNPESSHLRLQFSRFPGPRSGPGPRGKR

SEQ ID NO: 275538 - protein, 73 aa, Glycine max
  Clone ID: PAT_MRT3847_90831C.1.pep
REVRLVSKESKHGGGDPLILCFVDFANPACAATALSALQGYKVDELNPESSHKRLQFSRFPGPRSGPGPRGKR

SEQ ID NO: 275539 - protein, 82 aa, Glycine max
  Clone ID: PAT_MRT3847_90832C.1.pep
SNKRPTLNNTRIKTRERNITTPLNPTTFSNTIIQSYLNNTSNLKLITNNIKSSHLNFAKYNNTFFNITFTRDHTQPRTTRPN

SEQ ID NO: 275540 - protein, 56 aa, Glycine max
  Clone ID: PAT_MRT3847_90833C.1.pep
AHTLIETIQYEKEVSNFVDEHPSNCADPLLFINNPCCQENHPPFSDYSSPDNTVVT

SEQ ID NO: 275541 - protein, 90 aa, Glycine max
  unsure (1)..(90): unsure at all Xaa locations
  Clone ID: PAT_MRT3847_90834C.1.pep
SLTRLPLNELTDRTPLNVTTGVFTXASTLIHCSSPENFAMLNRYGDTTESHINANPKASYLEVDRTILTPGSLKSVDHHSDHPNPLSIFE

SEQ ID NO: 275542 - protein, 56 aa, Glycine max
  Clone ID: PAT_MRT3847_90835C.1.pep
VVHNILLQSDALYQYIVETNVYPKEPGCMKELCELSAEHPWYMMTTCADERQLLNM

SEQ ID NO: 275543 - protein, 60 aa, Glycine max
  Clone ID: PAT_MRT3847_90836C.1.pep
LGRGPSRCPWVPGQRPRAVAVCLPERACALRSAALGALCPSPGAFWGAGSRPVRVSLHRP

SEQ ID NO: 275544 - protein, 50 aa, Glycine max
  Clone ID: PAT_MRT3847_90837C.1.pep
YLRETIENSMTFLSKSSNQDFILNNHGHTPCYTTDTNNNLSKKLKLFPGV

SEQ ID NO: 275545 - protein, 37 aa, Glycine max
  Clone ID: PAT_MRT3847_90838C.1.pep
HIGFSILSRQIDSGLVPTRVTRPILSSLIDFNKIVFE

SEQ ID NO: 275546 - protein, 68 aa, Glycine max
  Clone ID: PAT_MRT3847_90839C.1.pep
EAASMSQDNNWGVFFEGISYHVTKAKTESSSNAGAIITTGNRRFSMEGCRFLLVWPQPPRIISSLLAK

SEQ ID NO: 275547 - protein, 71 aa, Glycine max
  Clone ID: PAT_MRT3847_9083C.1.pep
ASVMLCYCPIYPYRLLQCGARTVSGLEHNRSVTLRFQRSLARAGGHAAVKSLGDPVALAEPPDSDGLVGDL

SEQ ID NO: 275548 - protein, 226 aa, Glycine max
  Clone ID: PAT_MRT3847_90840C.1.pep
HVNASDSTPQTTSALEVNASPKSWKWLNSARKVLVIHLWGAVISLLPFFLCQVPNTTPTMNFVLWGLLSAFSLLILYLILGSPIFEAAASLHEKNKWASLKSVTISTAFIGLSLMSVINFATAEIGALLIVPICLMARPLKLDFQARSWRTLLRASCNIALGFIVFPPVAFVLLKGAFEDFYGMNFGDYWNWVESLWVWNSATYLYVGVVHLPCWALCIHILFHPC

SEQ ID NO: 275549 - protein, 110 aa, Glycine max
  Clone ID: PAT_MRT3847_90841C.1.pep
MEKGGGGKTPKEINNPQKGNNNEKGAKNTFLNLYKNGPPDDRPGGPPNTGPAPPGGPPAPNKRRIKTRGTKGDRSFPRRKSIRGQSPTTNYPGAKKVKPGGPPKGGNPPQ

SEQ ID NO: 275550 - protein, 74 aa, Glycine max
  Clone ID: PAT_MRT3847_90842C.1.pep
VCSYIGLLLCCYIESCFRPMRGSLACLSSTLAASYRGNVKAFPKDFYFLTPKLTAFLGYKAGMTHIVIKVYKPI

SEQ ID NO: 275551 - protein, 87 aa, Glycine max
  Clone ID: PAT_MRT3847_90843C.1.pep
MITVETTSYNGSSDSAVNVDDSCLNSRQENGLGEHNSKLSLLGHGPHGKQVVEDLLKEYGEDGIQAFCQRWHPSVSSKKEDTKSTHS

SEQ ID NO: 275552 - protein, 188 aa, Glycine max
  unsure (1)..(188): unsure at all Xaa locations
  Clone ID: PAT_MRT3847_90844C.1.pep
RLLPASTACGSVPPCRSASPSSFPPPPPSSLSALAPLLVPPPSPLCSLLPAPVGPAAVPPPSGRGPPRSPARXSPPSPTSPPLPPSPGSGGEWWLWRCGCVSWCGSLRGGGLLPQCPPSCASSSALAWWCCSRPWRLLGRGPCILCSCGCSRGFLLLWTQKMRRGCGCVCVFQSLVLFLGGELRRRFL

SEQ ID NO: 275553 - protein, 39 aa, Glycine max
  Clone ID: PAT_MRT3847_90845C.1.pep
SSCSFTRSSHYGFASTSLYLVCEKVIGMHDTKCYCIRAS

SEQ ID NO: 275554 - protein, 77 aa, Glycine max
  Clone ID: PAT_MRT3847_90846C.1.pep
FVRFLSLNSRAVEAGLSPSVSLLDFHCGPFSSQELAKVGSTMVETVLIVENGLDKATRSLRVIEHARKLVNDKTNVV

SEQ ID NO: 275555 - protein, 52 aa, Glycine max
  Clone ID: PAT_MRT3847_90847C.1.pep
GIRHEGERERERERERERERERERERERERERERERERERDIVGVGNVIVFV

SEQ ID NO: 275556 - protein, 46 aa, Glycine max
  Clone ID: PAT_MRT3847_90848C.1.pep
QVQTACALLVICDASKQPPSHTHTHTHLHKSLLFFTPTKQTRFAFA

SEQ ID NO: 275557 - protein, 67 aa, Glycine max
  Clone ID: PAT_MRT3847_90849C.1.pep
CTQLSRSAKRCLSQTPNSSVFYDQRGSVIRVRQAGILLRLDYGLKWDATSVGDPPVEAFDPKVDCPL

SEQ ID NO: 275558 - protein, 71 aa, Glycine max
  Clone ID: PAT_MRT3847_9084C.1.pep
HTKGKIDKSQMNKQISLQSLMFITIYSPFLSNFLFSALRAPPEPKSRSAERKSEYPLLNGKEFNANDESRR

SEQ ID NO: 275559 - protein, 64 aa, Glycine max
  Clone ID: PAT_MRT3847_90850C.1.pep
NIYPHSQPSHQKLKQTKKSTTKINFTCIYKSKTRLISRNSTILIRYASSRNLRSADDIESSPTI

SEQ ID NO: 275560 - protein, 130 aa, Glycine max
  unsure (1)..(130): unsure at all Xaa locations
  Clone ID: PAT_MRT3847_90851C.1.pep
TSECDILCANNCGFFCSTTPMNLCSKCYGSILLNEQEESLTKSTIETALSSSSMNPTFYTSPPTLVDVLIESPSPSLAEVAVTVAVDATSNVCTTYRLVAQPNLCATCRKLESLTWFKCRCXLTICGDHR

SEQ ID NO: 275561 - protein, 59 aa, Glycine max
  Clone ID: PAT_MRT3847_90852C.1.pep
MKVVLHHKLTAAKKGPVKLHMNLFRHWHVPIHSPIDVIAMNDTVGVKQSFYLLIDDPIL

SEQ ID NO: 275562 - protein, 118 aa, Glycine max
  unsure (1)..(118): unsure at all Xaa locations
  Clone ID: PAT_MRT3847_90853C.1.pep
HAYAFTAGLALSSIVLXAGLRGGADISTLTPCKESKQLPNREKQSIKNLESPLKLYEAGSALALAINASVENTNRRFDNYAKQGLLCGGYGLPHLIVSGDQKHCGEFNTLRILYLDIS

SEQ ID NO: 275563 - protein, 488 aa, Glycine max
  unsure (1)..(488): unsure at all Xaa locations
  Clone ID: PAT_MRT3847_90854C.1.pep
MEVDGRFLNTGLLLVATILVVKLISAFIVPKSRKRVPPIVKGWPLIGGLIRFLKGPIFMLRDEYPKLGSVFTLKLFHKNITFLIGPEVSAHFFKASETDLSQQEVYQFNVPTFGPGVVFDVDYSVRQEQFRFFTEALRANKLKGYVNQMVAEAEDYFSKWGPSGEVDLKYELEHLIILTASRCLLGREVRDKLFDDVSALFHDLDNGMLPISVLFPYLPIPAHMRRDQAXRAQNSARVASIITSRKSASKSEEDMLQCFIDSKYKDGRSTTEAEVTGLLIAALFAGQHTSSITSTWTGAYLLSNNQYLSAVQEEQKMLIEKHGDRVDHDVLAEMDVLYRCIKEALRLHPPLIMLMRSSHTDFSVTTREGKEYDIPKGHIIATSPAFANRLGHVFKDPDRYDPDRFAVGREEDKVAGAFSYISFGGGRHGCLGEPFAYLQIKAIWTHLLRNFELELVSPFPEIDWNAMVVGVKGKVMVRYKRKELSVNQ

SEQ ID NO: 275564 - protein, 132 aa, Glycine max
  Clone ID: PAT_MRT3847_90855C.1.pep
MAREKIVLKLEIHDDKTKKKAMRAVSGISGVETVSVDMNDLKMTIIGNVDAVIVVGKLRKCCDHADILSVGPAKEEKKEEPKKDEKKPDDKIDPKEEYAELLNAFYNQTRQQQSPPYYHRTVEEDPTSCVIC

SEQ ID NO: 275565 - protein, 133 aa, Glycine max
  Clone ID: PAT_MRT3847_90856C.1.pep
MEKDIIDLSPTWDCDNGNSTEKRLRLFGFELNPSSKEGCAKESGEGDESVNSSNSASSGGDKTVQEKTSAKDPDERKSECQYCYKEFANSQALGGHQNAHTIERMKKKRLQLQSINRYLQHPFQSNHGLAYPS

SEQ ID NO: 275566 - protein, 98 aa, Glycine max
  unsure (1)..(98): unsure at all Xaa locations
  Clone ID: PAT_MRT3847_90857C.1.pep
KNKTFSYYQSKMNKHVFTKKYHNHCQPSVAQNKSKTNKNMSTEKIPPDRGRHILCGTKYLILADLHHIKFFTLLPEKLFFGQFWCLYQLGIDRXIIPH

SEQ ID NO: 275567 - protein, 48 aa, Glycine max
  Clone ID: PAT_MRT3847_90858C.1.pep
WIIFIYTVNEGTSYDLEKGAVASGLIYSASSSCSIMRNFSYGSPSVTV

SEQ ID NO: 275568 - protein, 42 aa, Glycine max
  Clone ID: PAT_MRT3847_90859C.1.pep
QLPGSILPLKCKLVKLNTTWGVELEGYQFVLAVSVVKARVIP

SEQ ID NO: 275569 - protein, 75 aa, Glycine max
  Clone ID: PAT_MRT3847_9085C.1.pep
CRSCDENQSLGRAHIYHRNEILSLCTLSTITAYTLFIIPLINGYHYYSTISHHQLQKPTPPTLSQLHILSCPHQF

SEQ ID NO: 275570 - protein, 155 aa, Glycine max
  Clone ID: PAT_MRT3847_90860C.1.pep
KSDYLWYSISIDVEGDYGFQTVLHIESLGHALHAFINGKIAGSGPGNSGKAKVNVDIPVPLVAGKNSIDLLSLTVGLQNYGAFFDTWGAGITGPVILKGLKNGSPVDLSSQQWTYQVGLKYEDLGPSNGSSGQWNSQYALPTNQSLIWYKMTFDV

SEQ ID NO: 275571 - protein, 69 aa, Glycine max
  Clone ID: PAT_MRT3847_90861C.1.pep
LSQFSYYKEVKGASQKRQEREQAQEAGKVVKLVERISPGLEIHRALARPHRTQTKSKRIRMTARGRKRK

SEQ ID NO: 275572 - protein, 318 aa, Glycine max
  Clone ID: PAT_MRT3847_90862C.1.pep
TRRTPSCDKSGMRKGTWTLEEDRKLIAYVTRYGSWNWRQLPRFAGLARCGKSCRLRWIEYLRPDVKRGNFTQQEEEFIIRMHKKLGNRWSTIAAELPGRTDNEIKNHWHTTLKKRSQQNTLTKEEARASKSKDKVLPNKGVTVTLPATSSQISDNSSLSPASSTSSEFSNITSDPSTAASMQNLVFEDDDEFGFLDSYIDPMNNESFWKELTLDDISFNNVPIVSEDTNGCFQSTSSSNSNTLDSLHKSTSESIVADNDFGGFFDAYAEATVDNFWTQPYVAGMSSHVPTELLAPSVAESEYFTPIYDDLWGQTHLYY

SEQ ID NO: 275573 - protein, 105 aa, Glycine max
  Clone ID: PAT_MRT3847_90863C.1.pep
CYSNIKCYIQLNKSNIRSFICTLLILNLLSLTVTRCVKCEGVGCRNKCTCKIINDLVQEHLINQCTWNLIKVNHHSKIINDDLLSLQSFSEEFKKKGCEKDIGLG

SEQ ID NO: 275574 - protein, 83 aa, Glycine max
  unsure (1)..(83): unsure at all Xaa locations
  Clone ID: PAT_MRT3847_90864C.1.pep
LPTRGLGETCDAFLRFGVPVTNLWTEHERDLEWHKKCKVXLLRNRHRSAVELAKRAPEFEKHVAHKSLKDQIPAVVKCDSTKV

SEQ ID NO: 275575 - protein, 105 aa, Glycine max
  unsure (1)..(105): unsure at all Xaa locations
  Clone ID: PAT_MRT3847_90865C.1.pep
MNAPDRYERFVVPEGTKKVSYERDTKIINAASFTIEREEHTIGNILRMQLHRDPNVLFAGYKLPHPLQYKIIVRIHTTSQSSPMQAYNQXVNDLDRELDHLKSGL

SEQ ID NO: 275576 - protein, 126 aa, Glycine max
  Clone ID: PAT_MRT3847_90866C.1.pep
TTAIQDKYCVEDCGWPSQDYASECKINFLTGKTHQIRAQFAAYKAPLIGDSMYMPAAIADVSNPGLNPFGKYKKDFSSESEKETAVVNWMAQHGKEPSVAIGLQACQISWDDDEHFYEAGLPWWRC

SEQ ID NO: 275577 - protein, 43 aa, Glycine max
  Clone ID: PAT_MRT3847_90867C.1.pep
VIESPQKLKHCECIKIRPQYVFFILLYLLRYYDLFIVMGTSAA

SEQ ID NO: 275578 - protein, 69 aa, Glycine max
  Clone ID: PAT_MRT3847_90868C.1.pep
FFLYKNCLPFLIMKINVVGFEIYTFFTYIYIMKCELQSYCQWDWLHKLKREHEASTLPKQDELSVHLIS

SEQ ID NO: 275579 - protein, 46 aa, Glycine max
  Clone ID: PAT_MRT3847_90869C.1.pep
FRLLGTSYSPFVLLCLFFLLGYYGTRLFPSDYIRYEIKYLIAKVSA

SEQ ID NO: 275580 - protein, 88 aa, Glycine max
  Clone ID: PAT_MRT3847_9086C.1.pep
HEDFLSERKFSPKLLNVVHVPAMDQPADILTKALSPSSFLSFRSKLRVVERHSSNPSWACGGIIREYTLLAVFLFLFLSVNFFSNYCS

SEQ ID NO: 275581 - protein, 70 aa, Glycine max
  Clone ID: PAT_MRT3847_90870C.1.pep
AAGDYRLGKDELEGALEQEAGKQHSSYRSSTRTDEESSLHIIPLLVGGIIIRLITQQLGGLSYRILLRRF

SEQ ID NO: 275582 - protein, 175 aa, Glycine max
  Clone ID: PAT_MRT3847_90871C.1.pep
MASFHLRRLVSSVLNSRVQTNPLLTFRCFCSPPVTPFTSHASYDPNSIHLSNQESKRRLFNRLLYRSKQRGFLELDLVLGKWVEDNIHSLDEYRVRALILLLDLENPDLWKWISGQEQPPESIHINPVFAAVREGVMKNLESHSAPETRATPGKPWVRGWDDIKKFPGGSITGNQ

SEQ ID NO: 275583 - protein, 100 aa, Glycine max
  Clone ID: PAT_MRT3847_90872C.1.pep
PNFPRGFKKALTRITLGKREIFPPKKPCLPLIPNPKKPFFKGGKKSLWPLLGPPFKAPNFPPPRPKPPNFPKKKPLLPQFPPKKFFPKKAPLYGSPWGAL

SEQ ID NO: 275584 - protein, 38 aa, Glycine max
  Clone ID: PAT_MRT3847_90873C.1.pep
MLRVELSFKNRTCYSICTLIELILNSILLTNPNRTNLD

SEQ ID NO: 275585 - protein, 50 aa, Glycine max
  Clone ID: PAT_MRT3847_90874C.1.pep
KTWVPSMHMRRCYSVQHLFPYYILILRLCSKAHQTKEPTLSFFHQAESFC

SEQ ID NO: 275586 - protein, 121 aa, Glycine max
  Clone ID: PAT_MRT3847_90875C.1.pep
YNTGHWGTDDKPFKGLDYHQDGLHVYPELNLLDALKKPLNTCSKRLDANIHADTTMVFLTGYSGSHARGGQWKSRTHCDCQTDSLDNENCLADYRDLMKVMAKALKNIETHVIYRNITKKT

SEQ ID NO: 275587 - protein, 45 aa, Glycine max
  unsure (1)..(45): unsure at all Xaa locations
  Clone ID: PAT_MRT3847_90876C.1.pep
IXXGXAXXXXXXXXXXXGNEXXVSIXRVRWXLEPNXXLXXAXXQL

SEQ ID NO: 275588 - protein, 55 aa, Glycine max
  Clone ID: PAT_MRT3847_90877C.1.pep
QNKMAKNKNRNLKKEKIMSCTILLMHTEQWTVSCRSTLWFGTITTTGQLFWLISM

SEQ ID NO: 275589 - protein, 75 aa, Glycine max
  unsure (1)..(75): unsure at all Xaa locations
  Clone ID: PAT_MRT3847_90878C.1.pep
PHLPEKINELEKVDFALNSLIVANLSKNAEAXKIQFAHGRLKALVVALYEIENGLECLFKRLIKKKGSFLKKFSP

SEQ ID NO: 275590 - protein, 55 aa, Glycine max
  Clone ID: PAT_MRT3847_90879C.1.pep
IMINLSMSDNLVFNYFEMPPFNPSVHLNCPNITLPSPHSYSIMTPVILKFCHKFK

SEQ ID NO: 275591 - protein, 51 aa, Glycine max
  Clone ID: PAT_MRT3847_9087C.1.pep
IVLIKLLSPIKIFRPNIAYSNLFFPLFYFGGTIHITCVYTVHHNISQNGAQ

SEQ ID NO: 275592 - protein, 298 aa, Glycine max
  Clone ID: PAT_MRT3847_90880C.1.pep
MSASEAEKKVEEEEKNQEVKGGELLFCGATCWDIIGRRKGAVDGNLVSPTRPPTRPMDDGNSLAFGWNKHGQLGSGSVRNEIESSPVRCLVSEVKHTACGGDFTVWLSSIEGASILTAGLPQYGQLGHGTDNEYNSKDSSVRLVYEPQPRPRAIAALAGEAIVKVACGTNHTVAVDKNGFVYTWGFGGYGRLGHREQKDEWVPRRVEVFQNRNVLPPDAIISAGSVNSSCTAGGGQLYMWGKLKNTGDDWMYPKPLMDLSGWNLLCMDSGNMHHFVGADSSCISWGHAQNGELGYGPT

SEQ ID NO: 275593 - protein, 565 aa, Glycine max
  unsure (1)..(565): unsure at all Xaa locations
  Clone ID: PAT_MRT3847_90881C.1.pep
MSASEAEKKVEEEEKKEEVKGGELLFCGATCWDIIGRRKGPVDGNLVSPSRLRPLVGVDIRYVASGCVSCHCVALDVEGRCYTWGRNEKGQLGHGDTIQRDRPTVVSELSKYKIVKAGSGRSHTVVVTDDGNSLAFGWNKHGQLGSGSVRNEIESSPVRCLVSEVKHTACGGDFTVWLSSIEGASILTAGLPQYGQLGHGTDNEYNSKDSSVRLVYEPQPRPRAIAALAGEAIVKVACGTNHTGGCYSLLDLGYITLFTTFPXCFCFGYLVAVDKNGFVYTWGFGGYGRLGHREQKDEWVPRRVEVFQNRNVLPPDAIISAGSVNSSCTAGGGQLYMWGKLKNTGDDWMYPKPLMDLSGWNLLCMDSGNMHHFVGADSSCISWGHAQNGELGYGPTGQKSSAVPKKVDLLEGMHVISVACGMGHSMVIVDRANVADRLDQLDIYDGKAVGEGNEAVNTTPVPKQAAKKGAKGADNSKKRKQSKDSSDSDEDAEESEEDSEDQINGEAEAKRPRGSGKGRGKTPKKSGAKGKGSVSGRGRGGTAANKNSSKSPQVKSGKRGRPRKS

SEQ ID NO: 275594 - protein, 56 aa, Glycine max
  unsure (1)..(56): unsure at all Xaa locations
  Clone ID: PAT_MRT3847_90882C.1.pep
SAKFFPITPXTWICEDVLLRSKDSKSKGARRGHEAHASPGMEHVCIIYLLEFYVFM

SEQ ID NO: 275595 - protein, 117 aa, Glycine max
  unsure (1)..(117): unsure at all Xaa locations
  Clone ID: PAT_MRT3847_90883C.1.pep
ETXASAVQYNLLANLGAFLSLXRLNXXLXXSASPTLATSHSLNWLLPFPHNPFPKSLPRELLSLHLEREIKQWPTKVSIFNIXKYKETWQFGEPFSTKRTFGGKPGKALRKSFVLST

SEQ ID NO: 275596 - protein, 296 aa, Glycine max
  Clone ID: PAT_MRT3847_90884C.1.pep
MTNRTKGLLCAILGPLLWGINSVVVDMLFAQGVNARWFATFRLIVAGAVLLVWAYLKQGNQIFAPFKRWRDAGHLLIFSFFGMLFVQYTYIMAIEAGNAATATVLQFTNPIMIAIFLAIRHWQLPARQDVIAIIFAVVGTVLIATHGQIGTLAMSTPALVWGLLAGVGAVFYTLLPHQLITKFGAVTVSAWAMAISGIGINFVNPVWVDAPDWRLPVIGLLSFSILIGTAFAYVVFIQSLAWIKPTVASTLGALEPLMGTILSILIFHIAFGVADMIGSILIISTVFIQALRRTIF

SEQ ID NO: 275597 - protein, 51 aa, Glycine max
  Clone ID: PAT_MRT3847_90885C.1.pep
DDGEDQNDFVDILLSIQETNTTDFQIDRTFVKTLVMVRRSILVMYSLKPIF

SEQ ID NO: 275598 - protein, 61 aa, Glycine max
  unsure (1)..(61): unsure at all Xaa locations
  Clone ID: PAT_MRT3847_90886C.1.pep
GFHHTCITSVCIRERGAGIFIKEIGKYPKRWFSICSFSSTGRXXVLHPPYLFSHRFLSLFQ

SEQ ID NO: 275599 - protein, 39 aa, Glycine max
  unsure (1)..(39): unsure at all Xaa locations
  Clone ID: PAT_MRT3847_90887C.1.pep
IPIDDRDKLFICXLNRATWGNYIICKPTPKKKSLPELLN

SEQ ID NO: 275600 - protein, 93 aa, Glycine max
  Clone ID: PAT_MRT3847_90888C.1.pep
SHFRWPSELKLYITVKQAGFTSPALFLLIEEQTCSKQMPSKQRVSRKLIELTAAHGYNIATFYYQSLILPHNFPAYVTRTIWHLLCQRIKLAS

SEQ ID NO: 275601 - protein, 143 aa, Glycine max
  Clone ID: PAT_MRT3847_90889C.1.pep
ALVAFFNNLQGTANSNPLSATFEDCGYNEVPGNWNANKFPKAPEIHGTGCQPYSSLANLDPNEWTSSNLANMANHANHSSSFSKELSLSLATSTTTGQCSEVSCSNVTPCMNGTMSGLEQAFCGSSRELSMNLGGDKYVQFLT

SEQ ID NO: 275602 - protein, 121 aa, Glycine max
  Clone ID: PAT_MRT3847_9088C.1.pep
VNDYFGKDVWRSVHELSYSNVGTWIYREPLTGFTINAMEQVRSRRPMKHLDGFLAWKPFVGHLSNFSFWDYFLVIFYFYICLWIEYSLELGNLHAFLSEDKLVGLFLACLTLLFFPFDFFV

SEQ ID NO: 275603 - protein, 162 aa, Glycine max
  Clone ID: PAT_MRT3847_90890C.1.pep
TRPLLSSETLSGTGSVNQPAEGMPVPPANPVVEQAGPANPEDTTEIIGGDSIDSIRNRLLQSYGNPSAEQISRASYDADDLFQVKVEIIRGMTPLDPEGDWPGRGARALDNPRTSTGEDSLENLYRLKDDLNENGRDSETFKRLKDKVFRRPRPLEDANSTT

SEQ ID NO: 275604 - protein, 325 aa, Glycine max
  Clone ID: PAT_MRT3847_90891C.1.pep
MGRVKLPIKKIENTTNRQVTFSKRRNGLIKKAYELSVLCDVDVALIMFSPSGRATFFSGNKSIEEILERYVNLSEGEHGRMHNKEHIQKLLSKLKDEAGQICQAPSSMTSDSQIEDLRREIFTCKSQLEEMEKRLRIFEGDPSEITTLSEAEYREYVLRDTLKQVQLRKCVLEEYNSHATHSPQVHAAKTVDVNGFISRASKNPVDWFPQGDPLHVQTLNFANVYDTALVRDQQSHHCTVVDMLTPTSTLLHSANMDLNGQMNPRSSLDAGISNTLHPQFGQAIHTNSSSWQHLNPLGSRTLSIAETREVQLLNSVFLNLPGQTS

SEQ ID NO: 275605 - protein, 61 aa, Glycine max
  Clone ID: PAT_MRT3847_90892C.1.pep
DRLSIKTTDIHRMHENGSCTIQQWGEVPLTGLLETRTAGLTYFQSATSQDHAFTRRKLAYL

SEQ ID NO: 275606 - protein, 75 aa, Glycine max
  Clone ID: PAT_MRT3847_90893C.1.pep
RLHSKVNFRATISLIKIIKFQQFVQPTNSNIKFRNHHEVYLGVTMHVNHEWYTHSVTIRCGHVMYHTNAQLGLTL

SEQ ID NO: 275607 - protein, 109 aa, Glycine max
  Clone ID: PAT_MRT3847_90894C.1.pep
HFPLQEALSNLGAPLSFFILDDPQDCVFSGTPSAGHRFSMWGLFFLWRQIERLHIRRLSLPPLRRRRYSRERHVLCFIGRTKSPAMYEGTELLITVASHGGQWWVMVFY

SEQ ID NO: 275608 - protein, 111 aa, Glycine max
  Clone ID: PAT_MRT3847_90895C.1.pep
QHSSDSKPKKRKKVMVSEDLGQKAMHLHSPLVLTPVVSSHISTAVATSTPVGSVPITTVEKSVLSVPPLSLADHLKSEWNVEKRILSDKSLTKIKEARVNAEEASALSVLL

SEQ ID NO: 275609 - protein, 47 aa, Glycine max
  Clone ID: PAT_MRT3847_90896C.1.pep
VNPIKCIGWATRILYHDLFNVVINIHNNYGQEKPIVRSREMKNLENS

SEQ ID NO: 275610 - protein, 47 aa, Glycine max
  Clone ID: PAT_MRT3847_90897C.1.pep
TTEKALLTFLGYYNSFVKIFLYRPNNMFCTNTFSGLTLCFFKIEPSY

SEQ ID NO: 275611 - protein, 42 aa, Glycine max
  Clone ID: PAT_MRT3847_90898C.1.pep
LFFYSTQKMPSIPHKIVVVTKISKLTIQLHRIAGEKGGNRCS

SEQ ID NO: 275612 - protein, 61 aa, Glycine max
  Clone ID: PAT_MRT3847_90899C.1.pep
LIIFSLFNSILKLRFHVLNIYLHKLQKISATHIIAYVRALFYALFSSFFSVLELIWTNDHQ

SEQ ID NO: 275613 - protein, 374 aa, Glycine max
  Clone ID: PAT_MRT3847_9089C.1.pep
MYLSEKPRPIDFYKEEGARDMMIEVVSNGDLPPPPPPPPMILGESSGEDPEVEIKAPKKRAETWVQDETRSLIGLRREMDALFNTSKSNKHLWEQISAKMREKGFDRSPTMCTDKWRNLLKEFKKAKHQDRGSGSAKMSYYKEIDEILRERSKNVQYKSPTPPPKVDSFMQFADKGIDDTSISFGPVEATGRPTLNLERSLDHDGHPLAITTADAVAASGVPPWNWRETPGNGGESQSCCGRVISVKWGDYTRRIGIDGTPEAIKEAIRAAFRLRTKRTFWLEDEDQIIRSIDREMPLGNYTLHIDEGMAIKLPLYDEPDHIPVHTEDKIFYTEDDFRDFLTRRGWICLREFDSYRNIDNMDDLRPGAIYRGVS

SEQ ID NO: 275614 - protein, 108 aa, Glycine max
  Clone ID: PAT_MRT3847_908C.1.pep
LWSSEGVMMVLQHNPLRDCHEWPEFVMRAIDVSCFSHRSSALFPRCISCKDYLHVRLSIRTIISVLWLCLSISTYRVLAIIEVTRCNYLAICYRRFLSMQSSSVSKFF

SEQ ID NO: 275615 - protein, 65 aa, Glycine max
  unsure (1)..(65): unsure at all Xaa locations
  Clone ID: PAT_MRT3847_90900C.1.pep
NWARANRPWLAALHPAGIDLLIEFLNARDDPKAVSSPEISXFYCKIMVSQADDVLGITSSKVGVQ

SEQ ID NO: 275616 - protein, 42 aa, Glycine max
  Clone ID: PAT_MRT3847_90901C.1.pep
ERGRKSGNSEVGGKDAACQGFETPNRKFLFWTFKENGTIGLN

SEQ ID NO: 275617 - protein, 117 aa, Glycine max
  unsure (1)..(117): unsure at all Xaa locations
  Clone ID: PAT_MRT3847_90902C.1.pep
RQYLFYIVGPIFIARKGPAPDVLHLRMNTGCGAPSTQVKSASRLLVVXAHTISCFETIPKECVEASNEYIHGEQYLSDFKTGNQHAYFYAIDLXIHPKDTFVFHIIWTGLSNIPYYK

SEQ ID NO: 275618 - protein, 63 aa, Glycine max
  Clone ID: PAT_MRT3847_90903C.1.pep
ELSKIEGGRLSIAHGLTGISRKQKAALKEADQKKKHWPLDLLPKKTRAIRRRLTKHQAPMKTD

SEQ ID NO: 275619 - protein, 107 aa, Glycine max
  Clone ID: PAT_MRT3847_90904C.1.pep
RERRTMAGGRFQSLLHATSRSSLVKSSSSRPFFNNIMNYGQASNGTGNRSNRLMEERAPSTAEEFQRVAEEKAKETKEEVANQNVEKSYDGAQEEGTKVQSVQNSYK

SEQ ID NO: 275620 - protein, 498 aa, Glycine max
  Clone ID: PAT_MRT3847_90905C.1.pep
MSFFSSSNLATAKTVLSAAASVAATAMVVRSVASDLLPSELRSYITNGIHSMFWRFSSEITLVIDEFDGLLNNQIYEAAETYLGAKISPNTRRLKVSKPETDTTFALTMERNESLTDVFRSMKFNWVLVCRQVESRGFHNPRDLNATMKSEVRSLELTFNKKHKDMVLQTYLPYILNEAKSMKQATKALKIFTVDYQNMYGNISDAWVGMKLDHPATFDTLAMERGAKEFVMRDLERFVKRKEYYRRVGKAWKRGYLLYGPPGTGKSSLIAAMANYLKFDVYDLELTELNANSELRRLLIAMANRSILVVEDIDCTVEFHDRRAEARAASGHNNDRQVTLSGLLNFIDGLWSSCGDERIIVFTTNHKDKLDPALLRPGRMDVHIHMSYCTPCGFRQLASNYLGIKEHSLFEKIEEEMQKTQVTPAEVAEQLLKSSHIETSLEQLIDFMRKKKETQKLEAKKKEQEAKEEQQRKEIDDGGKGEKVDSDDNNNEKKSTTT

SEQ ID NO: 275621 - protein, 57 aa, Glycine max
  Clone ID: PAT_MRT3847_90906C.1.pep
VQALIQNEQSFLSSQTCMVHLFPSCMVGLSSCSSDTLTVPTMFVRWTAMMRGLLYVP

SEQ ID NO: 275622 - protein, 48 aa, Glycine max
  Clone ID: PAT_MRT3847_90907C.1.pep
PPQWYVIETTNMTEGSHLFRKDNLFYTLFTQEGNCNQSPISNPQNPPP

SEQ ID NO: 275623 - protein, 70 aa, Glycine max
  Clone ID: PAT_MRT3847_90908C.1.pep
FFLVLWCATTPHPQPGRNAPPQVGRNNPSQACHPRDSPAKIGVFFCEQEKNRGRPRIGKTRRSERPKKAG

SEQ ID NO: 275624 - protein, 89 aa, Glycine max
  Clone ID: PAT_MRT3847_90909C.1.pep
LLPAGKSYPYTNTRPHIIPEELWGRSAVPHEGAYYNQLRRANCWLLRRVACCANCFIEASNNPREAACLLFPTKVAFQMNNACMPIVAL

SEQ ID NO: 275625 - protein, 155 aa, Glycine max
  Clone ID: PAT_MRT3847_9090C.1.pep
MYLSEKPRPIDFYKEEGARDMMIEVVSNGDLPPPPPPPPPPMILGESSGEDPEVEIKAPKKRAETWVQDETRSLIGLRREMDSLFNTSKSNKHLWEQISAKMREKGFDRSPTMCTDKWRNLLKEFKKAKHQDRGSGSAKMSYYKEIDEILRERSK

SEQ ID NO: 275626 - protein, 128 aa, Glycine max
  unsure (1)..(128): unsure at all Xaa locations
  Clone ID: PAT_MRT3847_90910C.1.pep
FLCRILDTATGQYYTGWAPTNXRVHRQPIHITDGXVAKMQDVSLEYDASRISNDMWHIVXVGNAVNYKQNEGFHAAGSKCRLRXATSIPYAEPFAQALSAEVYFDFYPVEGDSQEGPAHNGEPKSDAY

SEQ ID NO: 275627 - protein, 60 aa, Glycine max
  Clone ID: PAT_MRT3847_90911C.1.pep
HGNILSAQIISHYIMIGYIHPLFIRIDEHVFKTQCYIEKTPTYPCFFLLVKKRLQTYASS

SEQ ID NO: 275628 - protein, 192 aa, Glycine max
  unsure (1)..(192): unsure at all Xaa locations
  Clone ID: PAT_MRT3847_90912C.1.pep
MARPSKLHSSSDEALSNASSSSDEEEQVNEQINEEEDEEELEAVARPASSADDDDEIAGDNPPDSDEDPAADDADDDQDGDNVDPEISKREKARLKEMQKMKKQKIHEILDVQNAAIDADMNNRGKGRLKYLLQQTELYAHFAKGDQSXSLRISKXRGRHACNFTEDQEDEEYLIGEXDGLAYTRLVTQPSC

SEQ ID NO: 275629 - protein, 58 aa, Glycine max
  Clone ID: PAT_MRT3847_90913C.1.pep
CFCDLILQLCQRYMHQETRFFKVKVHDYLIYLVMYGNLINYFSFPPYILILFHDKLVE

SEQ ID NO: 275630 - protein, 42 aa, Glycine max
  Clone ID: PAT_MRT3847_90914C.1.pep
CKMFVFEPLVGSIGPLLLPSLRLSINKKMRSCQKMKGLKIRK

SEQ ID NO: 275631 - protein, 114 aa, Glycine max
  Clone ID: PAT_MRT3847_90915C.1.pep
KGFVEVSFPPPPKWFPALVSGGSFPGGKGYSGKGGSFPGGGFFDGALEGSPPVFESYPGNVFFPLGVNAHVRVRYQSFGVFPILEGLLGWPPFSPPFFFPQGGGGETQYPLRGG

SEQ ID NO: 275632 - protein, 391 aa, Glycine max
  unsure (1)..(391): unsure at all Xaa locations
  Clone ID: PAT_MRT3847_90916C.1.pep
DRRNAVAEYRKKLLQHKELESRVRSVRENLRASKKEFNKTEDDLKSLQSVGQIIGEVLRPLDNERLIVKASSGPRYVVGCRSKVDKEKLTSGTRVVLDMTTLTIMRALPREVDPVVYNMLHEDPGNISYSAVGGLSDQIRELRESIELPLMNPELFLRVGIKPPKGVLLYGPPGTGKTLLARAIASNIDANFLKVVSXSAIIDKYIGESTRLIGXICGYARDLHPFNVFDDESGSPXYRWVNEGSCADREINRAVMXLLCQLEAFXNIKMLIAKWPTNLPDALDPALRRPGRLDRKIEIPLPNEQSRMEILKIHAAGIAKHGEIDYEAVVKLAEGFNGADLRNVCTEAGMAAIRAERDYVIHEDFMKAVRKLNEAKKLESSAHYSADFGKD

SEQ ID NO: 275633 - protein, 134 aa, Glycine max
  Clone ID: PAT_MRT3847_90917C.1.pep
NSARAEVRGLARRIIVEKKKEFQEKETLDTLDLLSRFLCSGHSDEEFVMDIIISFILAGRDTTSAALTWFFWLISKHPKVEEEVVKEVMEKDAAYTHVYDEVKDMVYTHAALCESMRLYPPVPVDTKEAGEDDV

SEQ ID NO: 275634 - protein, 382 aa, Glycine max
  Clone ID: PAT_MRT3847_90918C.1.pep
AATNNTTAPFPFPFLSLLSLSTTSNVPSLLHCLLPRPLSPVVVGKKGRVFTLAAMEGEPSQLKRAAIDASAGAISGGISRTITSPLDVIKIRFQVQLEPTSSWTLLCKDLSTPSKYTGMLQATKDIFREEGIRGFWRGNVPALLMVMPYTAIQFTVLHKLKTFASGSSNTENYINLSPYLSYMSGALAGCAATVGSYPFDLLRTILASQGEPKVYPNMRTALVDILQTRGFRGLYAGLSPTLVEIIPYAGLQFGTYDTFKRWTMAWNHRQYSNPTAESLSSFELFLCGLAAGTCAKLVCHPLDVVKKRFQIEGLQRHPRYGARVEHRAYKNMLDAVKRILQMEGWAGLYKGIVPSTVKAAPAGAVTFVAYELTVDWLESFLT

SEQ ID NO: 275635 - protein, 64 aa, Glycine max
  Clone ID: PAT_MRT3847_90919C.1.pep
VVELEPATVVAHVQSAGLFACLSCQVEVQGPAVAVTQGHYYPAVDAYLIGAFADLLTVAAAGLK

SEQ ID NO: 275636 - protein, 68 aa, Glycine max
  Clone ID: PAT_MRT3847_9091C.1.pep
FPIATPKPIPYYQTYIYDLYSTSSKQNIAELKMPTKTINELYYEVASHVYELKFKLYFPRPSKTSHCG

SEQ ID NO: 275637 - protein, 76 aa, Glycine max
  Clone ID: PAT_MRT3847_90920C.1.pep
STFMFKLTFYFLCYKSLELLFQYFDSFLGCIENNATKLLSITITFHIAHLVIYKEHVNKVEFRAFRTFKSSELLFL

SEQ ID NO: 275638 - protein, 89 aa, Glycine max
  Clone ID: PAT_MRT3847_90921C.1.pep
TFNIVSTYCENHFIRHMNISTLVTKVLKQENSHYRTRMLNYNLHLKNIQQQSWKDLLTARSYQTYITQGGKLTMVSLPNQRKKMALGKN

SEQ ID NO: 275639 - protein, 82 aa, Glycine max
  Clone ID: PAT_MRT3847_90922C.1.pep
FSQNRLTSLKKLLCMPDSYTQSQLRLTGHTAPIHSGFMTIILNHTIYRLVNTQPVQRYLGATCQRSHKKRECIRWNPLHSPC

SEQ ID NO: 275640 - protein, 111 aa, Glycine max
  unsure (1)..(111): unsure at all Xaa locations
  Clone ID: PAT_MRT3847_90923C.1.pep
PFPLIXXSSSXSXXLLLSXXXXPXVXXSXHPLPXXXLLLXXXXIXXXXXXXXXXTXFXLPXFXXSLSXXXXXXHHXXXILXXXXFXVXYXXXLXXRXXXXFXSXXFXLXXX

SEQ ID NO: 275641 - protein, 179 aa, Glycine max
  Clone ID: PAT_MRT3847_90924C.1.pep
LEVEGYQSINDMLISKATGPWGNRITFLHVPIPKLNETRTTNPLEFIWDTHNIIKRKKQSLGVVLTGTLLKIEGKLRGQEAVAKRIRGTLTKSSAVISNLAGPIQQMALANHPVKGLYFTLAGGPESLVISVMSYMGVLSVTLKTEKDFIDEHKLKLCMQSAFEIILQAAMEIPQETKP

SEQ ID NO: 275642 - protein, 69 aa, Glycine max
  Clone ID: PAT_MRT3847_90925C.1.pep
NNSPREEGTPKGGGPIANKEGQRGEGRSDEANWGKRELAQGEWVQRRLSWVKPGVFQTRPWKSTAGEIN

SEQ ID NO: 275643 - protein, 124 aa, Glycine max
  unsure (1)..(124): unsure at all Xaa locations
  Clone ID: PAT_MRT3847_90926C.1.pep
GWRGRGVWGCWWGAEVLKSSGHELPARTTEDLAASGINQKQXAIELNSNIEYFEXCMEFLLSLAEEEQVILVGHSFGGLCISVAMELFPTKIAAAVFVSAWLPSPDLNYLDLLQEVYILAILFC

SEQ ID NO: 275644 - protein, 69 aa, Glycine max
  Clone ID: PAT_MRT3847_90927C.1.pep
QKMARKNPHWSQPRGANINSQSRGRASASAGIFKSVKSADTSAVDLADDSPIIFSRKDSRTPKTKRRRV

SEQ ID NO: 275645 - protein, 71 aa, Glycine max
  Clone ID: PAT_MRT3847_90928C.1.pep
AWMGVIPHGLKIENWFEMAGFFNHFEPGLVNFIKPELDLPPFLGHFLVVEGPALEGNWGFQPLFLWSLLGF

SEQ ID NO: 275646 - protein, 49 aa, Glycine max
  Clone ID: PAT_MRT3847_90929C.1.pep
VLKLWTIRIRTWIHNPSFFAYAPRIYGQIYRKPPSNRSCNLPYFVVEQS

SEQ ID NO: 275647 - protein, 129 aa, Glycine max
  Clone ID: PAT_MRT3847_9092C.1.pep
SKSADLSPDSKSKETGIATRPKSGGTCEECGKHLQDERNRFCSITCKISVHPVETQNQFQSQCSQNHQSARGIITPKPQGIDFTMNDNHNSEPESSISEAEPYGWVEVVNFRKRPRKSIPQRPVFVFTS

SEQ ID NO: 275648 - protein, 51 aa, Glycine max
  unsure (1)..(51): unsure at all Xaa locations
  Clone ID: PAT_MRT3847_90930C.1.pep
SRKVTNKEIQRRMQSRKSSAIYQHACIFLLPXRLGHNCRLLSRSKLYLWQP

SEQ ID NO: 275649 - protein, 55 aa, Glycine max
  Clone ID: PAT_MRT3847_90931C.1.pep
GRERETATSEPGHGGSAVNKFRMSLGLPVAATVNCSEVHAAMNLYIMSVTGITGR

SEQ ID NO: 275650 - protein, 74 aa, Glycine max
  Clone ID: PAT_MRT3847_90932C.1.pep
KNCSQFCLKSFLYVILWGEIFSCLVFRTFVGVQFVNPAICNVKAVHYSVLIIKMFISLPFKRDINAVLIKLIAL

SEQ ID NO: 275651 - protein, 91 aa, Glycine max
  Clone ID: PAT_MRT3847_90933C.1.pep
TNLSDDHFTSLSSHGRRDPRTSMRALRGRLTISVDIDFLGEILVEEYETDPQEVGIDTDDEKVADTNHGENDAGSENNLLRSDTRSEFFER

SEQ ID NO: 275652 - protein, 87 aa, Glycine max
  unsure (1)..(87): unsure at all Xaa locations
  Clone ID: PAT_MRT3847_90934C.1.pep
RLPGMPSESFVGRGRCSRALDXLRQAGESSTEAMQLECSRQLAVLLLSRLRSMDLGXXSRRHKGAVTHHIAHVESHAMFEEECSCVC

SEQ ID NO: 275653 - protein, 83 aa, Glycine max
  Clone ID: PAT_MRT3847_90935C.1.pep
TAFLWLPLPNFEPCTHFTLLLNLIQDCAGTSIRNVTIKHMSGFLRAINLLGCHQSSCTGVHLPTPGVSTHLLMIIITLSNQHG

SEQ ID NO: 275654 - protein, 73 aa, Glycine max
  Clone ID: PAT_MRT3847_90936C.1.pep
IHSKIIYAILVFLLITSRMSYVFLYIKWLKEFSPNLSCESTSGGHFLSIMEGKPVYNILQLRHVIRRQIKYFS

SEQ ID NO: 275655 - protein, 94 aa, Glycine max
  Clone ID: PAT_MRT3847_90937C.1.pep
KSPPDGFSPPGTGIFLKLTPLRGFLFFAPKLFLAKRICFYGPGTRDNFFPGGRFFGPQVSGCWGPYPLFKRPPRFLGMIFIPGDFKPPFLNPFF

SEQ ID NO: 275656 - protein, 95 aa, Glycine max
  unsure (1)..(95): unsure at all Xaa locations
  Clone ID: PAT_MRT3847_90938C.1.pep
LSRELYRXXWQLXHLVLXKSXRVLPXLSGXNXXPXXLATAIGXKXVLLLLLLVXXDSCGSCCCTKEVXAPXCQRWWXPRRTRMXDXXYQWXXFXH

SEQ ID NO: 275657 - protein, 66 aa, Glycine max
  Clone ID: PAT_MRT3847_90939C.1.pep
GPPRVGGKKNPPGGMGSPLERGSQVGKPLNQIPPVGPLLTPPANVIPGAKNAVKKATDPVFPPGVI

SEQ ID NO: 275658 - protein, 179 aa, Glycine max
  Clone ID: PAT_MRT3847_9093C.1.pep
MGGQNLSPKERSRDWIGVLMNSSFGYCTYHHDLRSNEMNVFCVDCALRMCRHCKEAHSLHRRFQIYKYSYQDVFRHAELQKYFDCSKIQTYISNNERIVHLKPRPSITKSKSADLSPDSKYKETGIATRPKSGDLQDERNRFCSITCKISVHPVETLNQLPVEYPIPRSKSMFTKPPKC

SEQ ID NO: 275659 - protein, 63 aa, Glycine max
  Clone ID: PAT_MRT3847_90940C.1.pep
KIHDISTKRVRALNYKPIIIIIISHNLLLTSEYICHIFILSKTKFCIFIFQEHICQRDEKTKN

SEQ ID NO: 275660 - protein, 69 aa, Glycine max
  Clone ID: PAT_MRT3847_90941C.1.pep
GQTQALASPLDAFWLEINERPLKRPLLDFGNLSISSNSAQKVEFYNKKVFVQHVETISSSEVTFDIVQS

SEQ ID NO: 275661 - protein, 39 aa, Glycine max
  Clone ID: PAT_MRT3847_90942C.1.pep
ATVPNCIPGTAYIQTISGIFGYSPKLLGPEDPNPKLSLV

SEQ ID NO: 275662 - protein, 413 aa, Glycine max
  Clone ID: PAT_MRT3847_90943C.1.pep
MMLRIRSRDGLERVSVENPHSTTVSYLKRIIETQLGIPVHNQTLSTNQNLLLAKSLEDLHRFTDMSNPDAPLSSLNLGHGSMVFLAYEGERRVAGPAFNPAGSFGRKMTMDDLIAKQMRVTRQENPHCELVSFDRDCANAFQHYVNDTLAFAVKRGGFMYGTVSEEGKVEVDFIYEPPQQGSEDNLVFFRDTEEEKFVEAIAVGLGMTKVGFIFTQTITQDKKDYTLSNREVLQAVEYHAESGLKEWVTAVVKLEANEEMGGADVHFEAFQMSDVCVRLFKEGWFETEIKEDDDPKLSKMKKDVVVGVKDTREVDNDFFLVVVKIADHQGPLSSSFPIENRNTQVPMKALKNHLDRTKNLPFVKRISDFHLLLVLARVLDLNADVPALTECVQTQTSVPEGYQILIESMASTA

SEQ ID NO: 275663 - protein, 413 aa, Glycine max
  Clone ID: PAT_MRT3847_90944C.1.pep
MMLRIRSRDGLERVSVENPLATTVSDLKRIIQTQLGIPVHNQTLSTNQNLLLAKSLEDLLRFTDMSNLDASLSSLNLGHGSIVFLAYEGERRVAGPAFNPAGSFGRKMTMDDLIAKQMRVTRQENPHCELVSFDRDCANAFQHYVNDTLAFAVKRGGFMYGTVSEVGKVEVDFIYEPPQQGSEDNLVFFRDPEEEKFVEAIAVGLGMRKVGFIFTQTITQDKKDYTLSNREMLQAVEYHAESGLKEWATAVVKLEVNEEMGGADVHFEAFQMSDVCVRLFKEGWFETEIKEDDDPKLSKMKKDVVVGVKDTREVDNDFFLVVVKIADHQGPLSSSFPIENRNTQVTMKALKNHLERSKNLPFVKRISDFHLLLVLARVLDLNADVPALTECVQTQTSVPEGYQILIESMASTA

SEQ ID NO: 275664 - protein, 96 aa, Glycine max
  Clone ID: PAT_MRT3847_90945C.1.pep
FTRPMPTKTDLEVTPREWPLDLPWDTMPSVLTTTDERLIGTEHEGYEPLLGALQKYATPMMPVDEEILSKGAQDMVEEWFDCADVEDTFEEVTLSA

SEQ ID NO: 275665 - protein, 148 aa, Glycine max
  Clone ID: PAT_MRT3847_90946C.1.pep
MATRAAASAVIPAPIETVWTAIRNFNFPVKLLPHVVASCQLVSGSSPHEVGAVREVVWKSGEKKKQRLIELSDQFRRITWETVEADPPTETSAAITGVKLYRITETNGTLIEWATDFSADVSPAVIKFESKAIAETLVDIRKALVHTA

SEQ ID NO: 275666 - protein, 71 aa, Glycine max
  Clone ID: PAT_MRT3847_90947C.1.pep
RFHVGLHCRRALVPCCQITQGSPSSSPSNHICISNTLICVLACPSWLDHSNSFFSLYMIYLKFSYWIYSTY

SEQ ID NO: 275667 - protein, 85 aa, Glycine max
  unsure (1)..(85): unsure at all Xaa locations
  Clone ID: PAT_MRT3847_90948C.1.pep
IPPDQQILIFAGKQLEDGRTLADYNIXKESTLHSEFRLSGASSIXSXTLSGPQITLDVESSDTIDNVXAKMQDSEAVPPDEPLLI

SEQ ID NO: 275668 - protein, 68 aa, Glycine max
  Clone ID: PAT_MRT3847_90949C.1.pep
INLGVKTQRRSMKNSPYTFISNTMDVHHSMSKCEMEVMMANLHQASQRPHFPTAFPSFIPLTDVNKRP

SEQ ID NO: 275669 - protein, 92 aa, Glycine max
  unsure (1)..(92): unsure at all Xaa locations
  Clone ID: PAT_MRT3847_9094C.1.pep
RAPAGCALFLFCAFTTSYLPSAIADFVLDSEGSRLDNGGTXYWLGRRAAFRGIGAAPTGNARCPLTVGQWGSELDVWIGSIISSAYRVRFIA

SEQ ID NO: 275670 - protein, 96 aa, Glycine max
  Clone ID: PAT_MRT3847_90950C.1.pep
PLGGYKMVFFLHLGASGLLFFFKLFVFVPGQCCFPMRGGACFFNMYPRNFLLTVFWGPFKVGGEPLNKAKVCFPLEGFYAPAFFLIGGFFRIPVCG

SEQ ID NO: 275671 - protein, 102 aa, Glycine max
  Clone ID: PAT_MRT3847_90951C.1.pep
MMINVKESTMVRTAEEVARRMVWNSNVDLEVHNWHTPSVYFYRHNGATHFFDSKVMKEALTKGLEPLYQMAGRIMHDDDGRVEIDWDGHGVLVTEVVTGGVI

SEQ ID NO: 275672 - protein, 41 aa, Glycine max
  Clone ID: PAT_MRT3847_90952C.1.pep
FKKISSAIKIRIQNSLPNLSKSQIFSYLEILTQKLITRKKN

SEQ ID NO: 275673 - protein, 57 aa, Glycine max
  Clone ID: PAT_MRT3847_90953C.1.pep
YCYLNYTLDSTVHLNYFILNFIDFLLSSIMLNYSNFPRTGNSPCTWEQIIRAWEELA

SEQ ID NO: 275674 - protein, 102 aa, Glycine max
  unsure (1)..(102): unsure at all Xaa locations
  Clone ID: PAT_MRT3847_90954C.1.pep
LDFSSDSLHPEGEAGIYTGTGEGKYPLGTLADRHTGAGERIYLSLVAKPRHXWQAGTHLGPDKTAATQDHPLDERILGKTCGATIHGQGRSARQSEVYENLH

SEQ ID NO: 275675 - protein, 177 aa, Glycine max
  Clone ID: PAT_MRT3847_90955C.1.pep
MVMGSFRNAAINVVRVINSNKATIAASTNPLHTLRFTPFSSHTQNQTLEIDLSNEESKRRLFNQLLYRSKQRGFLELDLVLGKWVEDNIHSLDEIRIKALIHVLDLENPDLWKWISGQEQPPESVSTNPVFAAVRERVMKNLDNHSAPEVRATPGQPWVRGWDDIKKGQDGPVSGNQ

SEQ ID NO: 275676 - protein, 182 aa, Glycine max
  Clone ID: PAT_MRT3847_90956C.1.pep
MASFRNAAINVFRAINTNKATIAASTNSLHTLRPLFCYSRSTPFSSHTEAESLQIDLSNEESKRCLFNRLLYRSKQRGFLELDLVLGKWVEENIHSLDENRIKALIHVLDLENPDLWKWISGQEQPPESVSANLVFAAVRERVKKNLDIHSAPEVRATPGQPWVRGWDDIKKGQDGPVSGNQ

SEQ ID NO: 275677 - protein, 96 aa, Glycine max
  unsure (1)..(96): unsure at all Xaa locations
  Clone ID: PAT_MRT3847_90957C.1.pep
KNQCLLKPKGTYVRSATTXKADGCTYLNAMVHDNSVSTIPGDFVIRVNLTTINNLCTYVLNTGIXGSRLLGTIPQSISQQTVWNQIATVXTPLNFY

SEQ ID NO: 275678 - protein, 69 aa, Glycine max
  unsure (1)..(69): unsure at all Xaa locations
  Clone ID: PAT_MRT3847_90958C.1.pep
KAKPADVQADLQQIAEALQQKKVHVVDKITTTIAAIYKEXAETTVIIQVKKGEDLFKVEEXAVKYRATG

SEQ ID NO: 275679 - protein, 61 aa, Glycine max
  Clone ID: PAT_MRT3847_90959C.1.pep
NGAKKKKAFWLTPRIGAEGRRIRPKHSPQKKRGFVFITGTTQIIWVLLSFGIEKLWILLLC

SEQ ID NO: 275680 - protein, 167 aa, Glycine max
  Clone ID: PAT_MRT3847_9095C.1.pep
MESTKEQSGMLHKILPPRLEDAGLEDPALPPDSIHEAFLKAAAAVKSRAASIFSSTDDDNDGGCVSDPWPSAKDASDAVIGVESENELPGSCIVERGVEPVADEVKVAGEGGDASADVVVEGGDKLGEDVEACVDELQGLDIKDVKKGGEEDDEEENKKPTLVEGYV

SEQ ID NO: 275681 - protein, 47 aa, Glycine max
  unsure (1)..(47): unsure at all Xaa locations
  Clone ID: PAT_MRT3847_90960C.1.pep
QXRKSGPTARVRXFIHNILSDFYTIVVLRSKKRVLMYCNFKSIATEN

SEQ ID NO: 275682 - protein, 74 aa, Glycine max
  Clone ID: PAT_MRT3847_90961C.1.pep
DFGNFLESSNTLTMILIFNQHPHDKFGLRLEKGASSSKSQFVLDKCDFYGKSGNFKFRCIHKKKKMSKGTNAYG

SEQ ID NO: 275683 - protein, 53 aa, Glycine max
  Clone ID: PAT_MRT3847_90962C.1.pep
TQMQMQTQMLTPTTGVPKLRPRSGRTPLQLKNSPADPIQPSANSSRSHILRFR

SEQ ID NO: 275684 - protein, 65 aa, Glycine max
  Clone ID: PAT_MRT3847_90963C.1.pep
TRYLLDYNFRTLHKSDIISTMFEASSTRLQSYSACWHSSSCGHHPPCLQHRVSTYSCCYPKRTRG

SEQ ID NO: 275685 - protein, 76 aa, Glycine max
  Clone ID: PAT_MRT3847_90964C.1.pep
APGLLLFFCNQNIITRDGDYHQGSRTGFPTNCDHIYSLFKPSWEHYKETNCDPTHLNLLRIACLCGTERNFPYYRI

SEQ ID NO: 275686 - protein, 363 aa, Glycine max
  unsure (1)..(363): unsure at all Xaa locations
  Clone ID: PAT_MRT3847_90965C.1.pep
MGIAYLNMPGFMRAMFIMLCAMMILPELTHAKHARVTRHYKFNIKMQNFTRLCQTKSIVTVNGRFPGPRIIAREGDRIVVKVVNHVQYNVTLHWHGIRQLKSAWADGPAYITQCPIQTGQSFVYDFTVIGQRGTLWWHAHISWLRTTLYGPIVILPKRHVPYPFPQPFREVPIILGEWWKADTEAVINQAMQTGLAPNISDVHTINGLPGPVSNCAAKETFQLKVKPGKTYLLRLINAALNDEMFFSIANHTLTMVEADAVYVKPFSTKIGLITPGQTVNVLLKAKSKAPNGTCAISTRPYATGPASFDXTTATGFLEYKKTSHXEHKSNTKKLPLLRAVFPKFNDTVFAMNFHNRGRSLANA

SEQ ID NO: 275687 - protein, 46 aa, Glycine max
  Clone ID: PAT_MRT3847_90966C.1.pep
FLKQLITPKKESGADQTIFFFKAPYGQWPFFLFWITYIIILSQSYE

SEQ ID NO: 275688 - protein, 41 aa, Glycine max
  Clone ID: PAT_MRT3847_90967C.1.pep
RFAMHEREEMEAKFLSFVFHIKYVKLLFSMIGLDTWLKSLV

SEQ ID NO: 275689 - protein, 59 aa, Glycine max
  unsure (1)..(59): unsure at all Xaa locations
  Clone ID: PAT_MRT3847_90968C.1.pep
FNTDLSEGSGKTRLHTHAXESGKKAXXGAXKKDIWLQEGPRASXMGLSXACARGLYLMP

SEQ ID NO: 275690 - protein, 36 aa, Glycine max
  Clone ID: PAT_MRT3847_90969C.1.pep
IRILAFVSIIWVIFWNLVQTKIFSPASPTTSIHLLN

SEQ ID NO: 275691 - protein, 47 aa, Glycine max
  Clone ID: PAT_MRT3847_9096C.1.pep
LFETKHCENYTHNAYLLNFIIKIIKICDLMIIFFLHYEYIYYLFFLY

SEQ ID NO: 275692 - protein, 75 aa, Glycine max
  Clone ID: PAT_MRT3847_90970C.1.pep
CLASCCAACSCNACNTVVSGDSRRSARIAYMVLFAYSLVRRWIIRDVAARLMESLRWINHFIHTRSREWFETDAV

SEQ ID NO: 275693 - protein, 110 aa, Glycine max
  Clone ID: PAT_MRT3847_90971C.1.pep
SLRPDFCVSRRICLQKRRATSGFMSSGFILAVIGAPLKLFIVYAFVSFFLTLFVCYCCCMLHCILSHNTVNLPVSMRLRPKRTCCGVECFGGFHIQRFSYLFIFLRGDFT

SEQ ID NO: 275694 - protein, 110 aa, Glycine max; identical to SEQ ID NO: 275693
  Clone ID: PAT_MRT3847_90972C.1.pep

SEQ ID NO: 275695 - protein, 41 aa, Glycine max
  Clone ID: PAT_MRT3847_90973C.1.pep
QSNWRPRSNHKPTTWDTTSTFVKSRRSQLMEETTQIGHANT

SEQ ID NO: 275696 - protein, 240 aa, Glycine max
  Clone ID: PAT_MRT3847_90974C.1.pep
TDSSEDETEKVQSPRRVKRNVSEISLPPLPPPFTTTPETSSCQPQSKKRVLTHPPSTRRNTSGKFRGVRQRKWGKWAAEIRDPFQSTRIWLGTFNTAEEASQAYEARRLEFEAMAEAQAYKTSSVSEPLATISDNKSNCCNSSAAAISAAAVSAADVSVSEKFSTTFDDLEESPNFGLDFDWLSFNDYGQGFDDFGGLEDIHIGGFDDNEPTELPDFDFGDFGADEFAGWIEEPLNIPCA

SEQ ID NO: 275697 - protein, 176 aa, Glycine max
  Clone ID: PAT_MRT3847_90975C.1.pep
TRLFLFFGYIYQFLSPVDALFSPACDGCEKTTEGGDRGERNQERQRSLLFPSEKQTSGERADKSLRLDFCVSWRICLQKKKGQQWIYVVWVYSGSDWGSVEALHCLCFRFFLPDSLRVLLLLYATLHPEPQYCEPICFNAIETKKDLLWSGVFRRLSHTKIFLSLHILKRGFHLIP

SEQ ID NO: 275698 - protein, 61 aa, Glycine max
  Clone ID: PAT_MRT3847_90976C.1.pep
MADEVVLLDFWSSPSGMRVKIALAENGINYEYTDEDLRYKSTVLVPLNPVHKTTPVLIHHG

SEQ ID NO: 275699 - protein, 99 aa, Glycine max
  Clone ID: PAT_MRT3847_90977C.1.pep
KGNQHRNGKALKLGGLNKNVLRGSPKPTTLKQNDKGGLATGDQKPNFGNKSCKMMGETSNYVRKTSSLKTKTQGQETNIFCNHKKRHSLMNQTGRFTFF

SEQ ID NO: 275700 - protein, 79 aa, Glycine max
  Clone ID: PAT_MRT3847_90978C.1.pep
MSEKGRPLPKFGEWDVNDPASAEGFTVIFNKARDEKKTGGNPESPGKTATDPHSKPAVEPGKTQTKKWFCCMQNPSAES

SEQ ID NO: 275701 - protein, 48 aa, Glycine max
  Clone ID: PAT_MRT3847_90979C.1.pep
MRKWDMDRYSDLISVVFRIGLNKKTYSVNSYMDIYVCIFLENVELESQ

SEQ ID NO: 275702 - protein, 170 aa, Glycine max
  unsure (1)..(170): unsure at all Xaa locations
  Clone ID: PAT_MRT3847_9097C.1.pep
MRNCIRCCISCIFPCGALDVIRIVHSNGRVEEISGTVKASDVMKAHPKHVLKKPCSSPADAAGISGGVHKIVVVPPDAELQRGKIYFLMPLPPTPPTQEKKNRQRKKKRKEHRERTMNNTNNASMITSMTSLLVSDRYLNDILSEKVSSQRDRRRGRXAVWRPHLESXYE

SEQ ID NO: 275703 - protein, 44 aa, Glycine max
  unsure (1)..(44): unsure at all Xaa locations
  Clone ID: PAT_MRT3847_90980C.1.pep
WPPFWXFLXCGGCAXXXLLLXGCPVSXGLSNVPCAGWFLXXVGK

SEQ ID NO: 275704 - protein, 70 aa, Glycine max
  Clone ID: PAT_MRT3847_90981C.1.pep
KFGTLVKVGIPHPPFYSKPTLGVKKVFLNNVKIRGATKARAGFNGPKIHGNQVGSVFYPQKKFAQGDYEG

SEQ ID NO: 275705 - protein, 169 aa, Glycine max
  unsure (1)..(169): unsure at all Xaa locations
  Clone ID: PAT_MRT3847_90982C.1.pep
LCEMKREKLFSKMQQLQLVGERFLACRPTGRANRSPIVIVLCYQIVKESFLIEGDITXIQGIFIVSFIGMXLPEGIKVYDIFCRVGKQYEELDLLYSWSKSVGVARYTEYPEIERVSAKKLEVMDQYIRDKARHKKLYIQEEDNEEEEPEEDMNAIKAVPAPEYFHEDP

SEQ ID NO: 275706 - protein, 141 aa, Glycine max
  unsure (1)..(141): unsure at all Xaa locations
  Clone ID: PAT_MRT3847_90983C.1.pep
EFCPRKALAMLEELQNKEKVTTPNCWSIVAGGYIHKGEMEKAFKCFKTALSLYVENKGWKPNAKVIAELLCXIGDNGSVEDAEVLVSLLRNAVPVNRQMYHTLIKTYIRGGKEVDDLLGRMEKDGIDENKETKKIINKKNA

SEQ ID NO: 275707 - protein, 92 aa, Glycine max
  unsure (1)..(92): unsure at all Xaa locations
  Clone ID: PAT_MRT3847_90984C.1.pep
VYPSLXXSHVSVEQPXXHAVXXPPLAPXRTFSTYLPCHXSTRGRXVFFTRRPXNLXXAENPRQGDXGIXXFSLGQRVVSSYRWPXDRVKQNS

SEQ ID NO: 275708 - protein, 88 aa, Glycine max
  Clone ID: PAT_MRT3847_90985C.1.pep
FNNNNSIKNNKSAYFQNLQKIKTNGVQSLLTILLQSTGFVVSIKSHILSLKERDLKMKKKKKEPLIYESKPNSDPLKRERLTYLGKSI

SEQ ID NO: 275709 - protein, 64 aa, Glycine max
  unsure (1)..(64): unsure at all Xaa locations
  Clone ID: PAT_MRT3847_90986C.1.pep
PNQESLNWLVAQEYVVPFPGAKTTKQVEEFMGALGXKLTNKKEPKLRSLPQKIKPVIGFPVEKL

SEQ ID NO: 275710 - protein, 110 aa, Glycine max
  Clone ID: PAT_MRT3847_90987C.1.pep
MEFPSFDHLNVWRECANVRVWILFLLLLLLKSDVCSGSDYLVGLGSYDITGPAADVNMMGYANTGQIASGIHFRLRARAFIVAEPNGNRVVVVNLDACMASQIVKIKVIE

SEQ ID NO: 275711 - protein, 135 aa, Glycine max
  Clone ID: PAT_MRT3847_90988C.1.pep
MEFPSFDHLNVWRACANVRVWILFLLLLLLKSDIACSGSDYLVGLGSYDITGPAADVNMMGYANTGQIASGIHFRLRARAFIVAEPNGNWVVFVNLDACMASQIVKIKVIERLKARYGDLYTEENVAISGNHTHA

SEQ ID NO: 275712 - protein, 48 aa, Glycine max
  Clone ID: PAT_MRT3847_90989C.1.pep
CETQSHQHALDSTVTETAKIVHGIHSATTSLRAVLDVGHLIQLMVSNK

SEQ ID NO: 275713 - protein, 81 aa, Glycine max
  Clone ID: PAT_MRT3847_9098C.1.pep
DWAGNEAYAEYHFRVGSEAECYALQVSSYEGTAGDALIEGSVEEGAEYTSHNNMQFSTFDRDADQWEENCAEVYGGGWWYN

SEQ ID NO: 275714 - protein, 93 aa, Glycine max
  Clone ID: PAT_MRT3847_90990C.1.pep
REIVKEGCYLISTMLNQAIQVKCLEAILCGSFVRWGLSRVCGRSLAKMFQSTMEVYFMVTWLMFYFAARCKDADLHGRRFGQRELEGLVEGHR

SEQ ID NO: 275715 - protein, 82 aa, Glycine max
  Clone ID: PAT_MRT3847_90991C.1.pep
RGRLVFSFWFHKPRDLMGSSRKSYDCRLFKKSDFFFPKFYWALRMKIPWYLFSGFTGEVLGNLCPLLLPPGSWELRESGTFF

SEQ ID NO: 275716 - protein, 41 aa, Glycine max
  Clone ID: PAT_MRT3847_90992C.1.pep
NAGELPCFRSPQFNAFNCKEVYTQVPGVPNVMFYIRDTLQP

SEQ ID NO: 275717 - protein, 141 aa, Glycine max
  Clone ID: PAT_MRT3847_90993C.1.pep
LSLQRGGRAADANMQIFVKTLTGKTITLEVEPSDTIENVKAKIQDKEGIPPDQQRLIFAGKQLEDGRTLSDYNIQKESTLHLVLRLRGGIIEPSLRQLAQKYNCDKMICRKCYARLHPRAVNCRKKKCGHTNNLRPKKKVK

SEQ ID NO: 275718 - protein, 78 aa, Glycine max
  unsure (1)..(78): unsure at all Xaa locations
  Clone ID: PAT_MRT3847_90994C.1.pep
QANTELDTYRGHALMYMVRVTLNLNALILTAAHRITTVHDIAKKFTLQDNDLLMHGXKFKVFIQNYSQNYCTVPESFR

SEQ ID NO: 275719 - protein, 90 aa, Glycine max
  unsure (1)..(90): unsure at all Xaa locations
  Clone ID: PAT_MRT3847_90995C.1.pep
VVATAASAXLPSNAMAIEVLLGGDDGSLAFVPNNFSVASGEKIVFKNNACFPHNVVFDEDEIPSGVDAGKISMSDDDLLIAPVETYSDTL

SEQ ID NO: 275720 - protein, 50 aa, Glycine max
  Clone ID: PAT_MRT3847_90996C.1.pep
QPPNDHRSYEYRPIRETVDTREKTRRYKTDKITYADTDDENDGAGTGGHT

SEQ ID NO: 275721 - protein, 44 aa, Glycine max
  Clone ID: PAT_MRT3847_90997C.1.pep
CIDWRSHDSALLELSLISSSIVLPITTSHQRLDLEALSHYPLST

SEQ ID NO: 275722 - protein, 71 aa, Glycine max
  Clone ID: PAT_MRT3847_90998C.1.pep
VLYELLSLATVDHCHFFLMNIGSGGPHQVRPNLEGFEVQNPKTCPHVSFCDSARRVLLMRQSPELRHNTTV

SEQ ID NO: 275723 - protein, 88 aa, Glycine max
  Clone ID: PAT_MRT3847_90999C.1.pep
PLQVSQDTSYNISSESSAQMSDQLFENIGDQKSWSATLPEQINDNYQKETLPVSASVEGSLLLEQNKSKEGPGNAQKLLTVLTILLKP

SEQ ID NO: 275724 - protein, 223 aa, Glycine max
  Clone ID: PAT_MRT3847_9099C.1.pep
MSFIFGKRKTPAELLRENKRMLDKSIREIERERQGLQTQEKKLIAEIKKSAKQGQMGAVRVMAKDLVRTRHQVEKFYKLKSQLQGVSLRIQTLKSTQAMGEAMKGVTKAMGQMNRQMNLPSLQKIMQEFERQNEKMELTSEMMGNAIDDALEGEEDEEETEDLVNQVLDEIGIDINQELVNAPSSAVAAPAAKTKVPQVETTGNDDGGIDSDLQARLDNLRKM

SEQ ID NO: 275725 - protein, 119 aa, Glycine max
  unsure (1)..(119): unsure at all Xaa locations
  Clone ID: PAT_MRT3847_909C.1.pep
MHYVSSEFGSRADAVLFEFLHTEMVAELWAPDPDPGSGGKKKSLSVLEGLGFRVGQALGERLPRETLAVREELDALKFLXSDLWAAMFXQKHMDGLRTYHQGTYVLQDNSFPLLIPMGS

SEQ ID NO: 275726 - protein, 130 aa, Glycine max
  unsure (1)..(130): unsure at all Xaa locations
  Clone ID: PAT_MRT3847_90C.1.pep
AGQAVSNNIVFDDGLVLANTQEFFAGNVAVDSWLPMLENCLYPVSQLPSXAVGGHVTCGSGRGGLPTTARINAAYNNCSSHFNKRIRTALGKGQKIFFLTRDDPFTVASLAGLLGVHNESLGSHATQPML

SEQ ID NO: 275727 - protein, 117 aa, Glycine max
  Clone ID: PAT_MRT3847_91000C.1.pep
HSVQGRGSDDDDDDDIFPFHPPASSINRFCFCFCFFPTHQEEEPASPQSDSLFIPQINQPKPFQMEPHCLMYPTDGYCNFSGGFFFSFFIIIIILIFSRYNNVLVPWMQTYFVTFYF

SEQ ID NO: 275728 - protein, 54 aa, Glycine max
  Clone ID: PAT_MRT3847_91001C.1.pep
NHPGLPPFELKFCKNLKAHQPSSFKFPPLNYFIFPSLDYNPSFSLPIKYLYPFL

SEQ ID NO: 275729 - protein, 62 aa, Glycine max
  unsure (1)..(62): unsure at all Xaa locations
  Clone ID: PAT_MRT3847_91002C.1.pep
LTTKPNYTKATTQXIQQVKXXXYPXLHITNCLFLXYTQPXLPFFSHPIXYSHXINAPAGXRV

SEQ ID NO: 275730 - protein, 60 aa, Glycine max
  Clone ID: PAT_MRT3847_91003C.1.pep
LTFLLFPCINSCGSISGEGGPSDPHSSLQKNIHDMMMSSQINGIGLMFRVGSLGYDVNNV

SEQ ID NO: 275731 - protein, 134 aa, Glycine max
  Clone ID: PAT_MRT3847_91004C.1.pep
MESTATTVSPDSENDTTNTRVNGYVVYTRRKRTLLTLHSGNDAAKRLRTAEIKVEARNDDDDVVFKRPKLESELTEEELKTTSSSKKIIVVHKKPATVKELFQTGLLDGVPVVYVGCKKDSTTELRGEIKDGGI

SEQ ID NO: 275732 - protein, 265 aa, Glycine max
  unsure (1)..(265): unsure at all Xaa locations
  Clone ID: PAT_MRT3847_91005C.1.pep
MESMTVIKSTFPIFMTNNAPFSLSTRPLRPILKVSVKPPPPDFDYRREISEESRAAIAESHPELLDLADNGSLVLVQKKRFGPVPSWRTEFVEPESIWLIGTTHVSEVSAVEVERVVRALRPDNVXVELCRSRFHFQRLLHXATANDELGKQLRSNMFLLSGTGKENVVGRSINLGGQTALALRLLLATFXSKISSDINRPFGDEFRADREASEEIGALPLNGDRPIEIMFRRAWKAMKWTQKLSLVLSIIRGRKQNWDHVCYWH

SEQ ID NO: 275733 - protein, 80 aa, Glycine max
  Clone ID: PAT_MRT3847_91006C.1.pep
LPRQKVARGNKVKLWYDVWAGIQHLVNKYSRLFLNFMQQKSCLGEVGLATVMEEQVVFLGNTYDGDVYGGSTKFTKNLMK

SEQ ID NO: 275734 - protein, 43 aa, Glycine max
  Clone ID: PAT_MRT3847_91007C.1.pep
FLHNINSTNPIQTRRLYYNGGVKYHYDNCLFCNCELECNILFT

SEQ ID NO: 275735 - protein, 152 aa, Glycine max
  Clone ID: PAT_MRT3847_91008C.1.pep
DSSGTTLMDLITADPTPAPSSSSTAAASSAPTAPASLPSALGKPPAEKKSKRAALMQIQNDTISAAKAALHPVRTNIMPQRQKKKPVSYSQLARSIHELAATSDQKSSQRQLVHHVFPKLAVYNSVDPSLAPSLLMLNQQCEDRSVLRYVYY

SEQ ID NO: 275736 - protein, 73 aa, Glycine max
  unsure (1)..(73): unsure at all Xaa locations
  Clone ID: PAT_MRT3847_91009C.1.pep
GYISPEYAMHCEHSDKAEFYSSRVKSLXIVSIKSNTIHRSKQEALASSILVTLIESXDNLMELVDKRLSSYFN

SEQ ID NO: 275737 - protein, 86 aa, Glycine max
  unsure (1)..(86): unsure at all Xaa locations
  Clone ID: PAT_MRT3847_9100C.1.pep
LAAAGTDMVANIWYIRARMRMHKLVRHTQWIRGLRIFANTIITGSQEWTARLXTASRGTMNAVLDXHAESILCVEDSCLDRGIITR

SEQ ID NO: 275738 - protein, 192 aa, Glycine max
  Clone ID: PAT_MRT3847_91010C.1.pep
MTMALSLGQNSISSLPFVRQHRHTPSPSSTCLSFKPQALPSSPSPSLTCTTKCTRTLSTLMGLALLLMKKAATPVLSINSDSVSTMGTLFFASLRDRPSASGALNTPLTVVAAGLGKWLDIYSGVLMVRVLLSWFPNIPWERQPLSAIRDLCDPYLNLFRNIIPPVFDTLDVSPLLAFAVLGTLGSILQTAM

SEQ ID NO: 275739 - protein, 70 aa, Glycine max
  unsure (1)..(70): unsure at all Xaa locations
  Clone ID: PAT_MRT3847_91011C.1.pep
TXXXTWQXIIASNEXSAKIVSLNXHQVXQGDXXEXAXXXXXLLXXLIDXXWRSXYFXSRCKRLRSTXFSW

SEQ ID NO: 275740 - protein, 96 aa, Glycine max
  unsure (1)..(96): unsure at all Xaa locations
  Clone ID: PAT_MRT3847_91012C.1.pep
MSGGRLCPLLGELWYXCWEALDPDSFDWSFQYEDTLSLLHWICSNLRSSNVLSLVELNYYEHFKHHRKLLYGDDLDFAYYIISAFSDTRHTHDALF

SEQ ID NO: 275741 - protein, 356 aa, Glycine max
  Clone ID: PAT_MRT3847_91013C.1.pep
IEGLWQWFWVYGFGLDFAQQVPCYFIFGDSLVDNGNNNQLNSLAKANYLPYGIDFAGGPTGRFSNGKTTVDVVAELLGFNGYIRPYARARGRDILSGVNYASAAAGIREETGQQLGGRISFRGQVQNYQRTVSQMVNLLGDENTTANYLSRCIYSIGMGSNDYLNNYFMPLIYSSSRQFTPQQYADVLVQAYAQQLRILYKYGARKMALFGVGQIGCSPNALAQNSPDGRTCVARINSANQLFNNGLRSLVDQLNNQVPDARFIYINVYGIFQDILSNPSSYGFRVTNAGCCGVGRNNGQVTCLPLQTPCRTRGAFLFWDAFHPTEAANTIIGRRAYNAQSASDAYPVDINRLAQI

SEQ ID NO: 275742 - protein, 52 aa, Glycine max
  Clone ID: PAT_MRT3847_91014C.1.pep
FCHYLMLSKKYQSNIQIKFTNQYYAYCYVCSNLCSIFYFFSVYCNVMLVTDR

SEQ ID NO: 275743 - protein, 117 aa, Glycine max
  Clone ID: PAT_MRT3847_91015C.1.pep
GAPAQYSWFFPRARSCIQCIALSLGLFQIIDGVFNSKSKSSTLCSKSSHSAVLRMDFLEHNPSSHLESVGDILFPFFYLGVNHVSDTHDSFLTDREREKSNRGYIEIRAPACTLGTG

SEQ ID NO: 275744 - protein, 405 aa, Glycine max
  unsure (1)..(405): unsure at all Xaa locations
  Clone ID: PAT_MRT3847_91016C.1.pep
MSMEHLPGELVSNVLSRLPSKVLLLCKCVCKSWFDLITDPHFVSNYYVVYNSLQSQEEHLLVIRRPFFSGLKTYISVLSWNTNDPKKHVSSDVLNPPYEYNSDHKYWTEILGPCNGIYFLEGNPNVLMNPSLGEFKALPKSHFTSPHGTYTFTDYAGFGFDPKTNDYKVVVLKDLWLKETDEREIGYWSAELYSLNSNSWRKLDPSLLPLPIEIWGSSRVFTYANNCCHWWGFVEDSGATQDIVLAFDMVKESFRKIRVPKVRDSSDEKFATLVPFEESASIGVLVYPXGEQQKSFDVWVMKDYWDEGSWVKQYSVGPVQVNHRIVGFYGTNRFLWKDSNERLVLYDSEKTRDLQVYGKFDSIRAARYTESLVSLHRGNEFSHKCFSCSLVPDPLLHDSEYLFSF

SEQ ID NO: 275745 - protein, 185 aa, Glycine max
  Clone ID: PAT_MRT3847_91017C.1.pep
YGCEKTTEGGRNPKIRTSGTDTKNICSSRSNSLSHFPLCARASHSQSQFMAEEEVVAPAASPVPSDNKRKLEDLQPENTESNANSISISDAENADAAVSAETENKRLRLDDHQDGLANNTNGHQDEQVAEPGKETEERSTLENVTPEHDKTISVDHSEATANEQTSAENNEPADAKEPHVEDSGQ

SEQ ID NO: 275746 - protein, 75 aa, Glycine max
  Clone ID: PAT_MRT3847_91018C.1.pep
SWRGSYKCDYSSQHTQSKLHIGITGRVLCCEHKTRPLEGAYLRRLPGPQQHKLGRAISQARPLNHWLNRGCRCLC

SEQ ID NO: 275747 - protein, 58 aa, Glycine max
  Clone ID: PAT_MRT3847_91019C.1.pep
NTPLGSWDSYHLLTKKIQTNQPDTTDGIPAVYGLRQVLRATPHRNCKPQDIITKLMII

SEQ ID NO: 275748 - protein, 103 aa, Glycine max
  Clone ID: PAT_MRT3847_9101C.1.pep
SLADALKYGRVVRPFSNVVYNRYGSDSCCGSSCLVVVQLGQLVCLPQRMPSLFGLVGANGPYICGVSRDSSAGESLCQCARLIVLFDQQTSSQPYLVFLQHLN

SEQ ID NO: 275749 - protein, 99 aa, Glycine max
  Clone ID: PAT_MRT3847_91020C.1.pep
TTLYESHGLVTFAFSPWSYIISNPMILGAFSAPCFGILEGSTLELSQLSMADHKTFPPLAYPDIEVELLHFYLPHWFLKVSSLNPLLQPSLVSKTNLYA

SEQ ID NO: 275750 - protein, 52 aa, Glycine max
  Clone ID: PAT_MRT3847_91021C.1.pep
ARAHIPQTSTRAVRHGNFYILETAIMIWPVHSLSNPESLSAPDLSCARTFSA

SEQ ID NO: 275751 - protein, 107 aa, Glycine max
  Clone ID: PAT_MRT3847_91022C.1.pep
DEERRVNLSRETCPGFISDGYGRVTGTNEAYEKMMEGDEGQGPVLLVNKVNTVVPHASFTCLVRVVQYACGRERSSLTVPCDVWRMDSGGFAWRLDVETALSLRLGY

SEQ ID NO: 275752 - protein, 135 aa, Glycine max
  Clone ID: PAT_MRT3847_91023C.1.pep
HHVLALSLRGTNHLHVCNIRCHAITSLTPTLAAIRHLTTTRVHCYSISRSSWFCRFLYCSNRSGFFVFYPSVYRYSRCSAFHTPLTMPLFNGLITLRVPPFFIPRMALFHTTYPPHFRSPPPPQRRRTSYSDDGN

SEQ ID NO: 275753 - protein, 122 aa, Glycine max
  Clone ID: PAT_MRT3847_91024C.1.pep
MDPGGAPTARKFFDRGFHMSQKLETGLARPPLFVFKALCDFGVNPKALPAVVQGLKKKNPSLLSSLPAGPFFLPKKKGFFFFIKTPSVYAGGSFFKTPPVYRFLIGVLEILGALIVFLQVFP

SEQ ID NO: 275754 - protein, 56 aa, Glycine max
  Clone ID: PAT_MRT3847_91025C.1.pep
YFALLTRLYTPINFFLLFFCLYTASLKRRSQNFQQQPHDDQICTNSLTILCIPTSF

SEQ ID NO: 275755 - protein, 133 aa, Glycine max
  Clone ID: PAT_MRT3847_91026C.1.pep
NLRVVFSGGGVKPGPIYFQLNWVPLSPLVFSVRGVLGSFLTRSPPFFLFKISFSQAPGERKFKKNSLWGLSPPPFFFWESNLGVFGFFFRHDGGGGKGYLGFSWIPLRFCEMATGGNFCFPQMFFPNCKEPVL

SEQ ID NO: 275756 - protein, 69 aa, Glycine max
  Clone ID: PAT_MRT3847_91027C.1.pep
HAESNHRFCCELVRDLRLLSLDLLWMNPGGNRGFEIHINKGQGTCWRFRCSPGKIYYICSLHMLLLCPF

SEQ ID NO: 275757 - protein, 94 aa, Glycine max
  Clone ID: PAT_MRT3847_91028C.1.pep
LLLSSGGLPFVFPFLACPCCFSSFVFACLCFSFVWGASCLPALAFVGLSPVFVLWWGLRGCPSGLFFRPLLVGSFPAAIKSSGAACSCRLPSFR

SEQ ID NO: 275758 - protein, 53 aa, Glycine max
  Clone ID: PAT_MRT3847_91029C.1.pep
VMREDPARTIEAQAYIRNRLQFHIWCNARHRLFLSRARLRLGHASFHVEYIRK

SEQ ID NO: 275759 - protein, 62 aa, Glycine max
  Clone ID: PAT_MRT3847_9102C.1.pep
AFLSCRMTHVLSCVFLQSSYVLSGPVVKASKLFPFVSTKSCASVHPNYVRTCDRVDGRGYPG

SEQ ID NO: 275760 - protein, 64 aa, Glycine max
  Clone ID: PAT_MRT3847_91030C.1.pep
TQYMAVLGGYWGLPHNQTLEKRLERAKVRARIDSMRALSPTRAKSERSRLEILDGLSPFNSEHA

SEQ ID NO: 275761 - protein, 112 aa, Glycine max
  Clone ID: PAT_MRT3847_91031C.1.pep
QVRHLGTRPSMCWSSHSLLELELELELDGVVNVVKHKQQHNMRLKRNKLEDIPEETELPPIGIDTNPAELEEAGLHLETDLEILRRAMDMGLWALCLGFGYMLSRAHFRPLS

SEQ ID NO: 275762 - protein, 84 aa, Glycine max
  unsure (1)..(84): unsure at all Xaa locations
  Clone ID: PAT_MRT3847_91032C.1.pep
RSVLYDSRYFSFFKSFVGFVSILVXVFXXLSLSRSCRQPGNLWLVSSVRRYILVLSKYLVPFQPTCFLSFKHQSSLLVLFKKKR

SEQ ID NO: 275763 - protein, 62 aa, Glycine max
  Clone ID: PAT_MRT3847_91033C.1.pep
MSSAESSTGFSVTIWVKGAGRLIDSWMVKLHLDKGYTVRGTLRNPDDAKIWHLKNFEGDSQR

SEQ ID NO: 275764 - protein, 48 aa, Glycine max
  Clone ID: PAT_MRT3847_91034C.1.pep
SFFFSPTPHEIWANVTLQCGGHCSNYPLIQSRINDMGSLFLVFCCIQT

SEQ ID NO: 275765 - protein, 219 aa, Glycine max
  Clone ID: PAT_MRT3847_91035C.1.pep
MQDEAVSNFSLMNESMSLENEAEWSEQSSSIVMGDNMASEQSSVMSNSAEFTRSARNMELEYVKDIFSNAELMTEEFVVGETDKIIMPNLFDKLENKGLGAENYEEYSKIERRAIFDTVSECLELRCRQIFVGSCKAWPKWLASVQRKNCLAEEFYKEILSFRSMEEEVEVDELVNKDMSTGWCKWLDFEIEAFEKGSELEFDILTCLINELVSDLLHV

SEQ ID NO: 275766 - protein, 149 aa, Glycine max
  unsure (1)..(149): unsure at all Xaa locations
  Clone ID: PAT_MRT3847_91036C.1.pep
MDHQADTNRTDLMTITRFVLNEQSKYPESRGDFTILLSHIVLGCKFVCSAVNKAGLAKLIGLAGETNVQGEEQKKLDVLSNEVFVKALISSGRTCLLVSEEVEEAIFVPSSHRGKYIVVFDPLDGSSNIDXRVSIGTIFGIYMVKNEAE

SEQ ID NO: 275767 - protein, 58 aa, Glycine max
  Clone ID: PAT_MRT3847_91037C.1.pep
SEGGPLMLDHTYARPPPNSPQDHLKYAGFSIGILSYIPQRDLTGGGDHLNKTRNKHTL

SEQ ID NO: 275768 - protein, 53 aa, Glycine max
  Clone ID: PAT_MRT3847_91038C.1.pep
ATYHTLINSSARTLTMEGRYLCLLNKAPRASMYVYLLNGVTSKCYTIAMPDLF

SEQ ID NO: 275769 - protein, 53 aa, Glycine max
  Clone ID: PAT_MRT3847_91039C.1.pep
LHQHFHSLNAGTIDDVRVQRDKGFGYARYTTHAEAALAIQMGNARILLGNPIK

SEQ ID NO: 275770 - protein, 213 aa, Glycine max
  Clone ID: PAT_MRT3847_9103C.1.pep
MESESEDGFSVVNGGKDVIFSEEVRVKNGVCRVSFGDQEEVGSGKEMYLAKGLGVECCGDGIGGCRGGGGGDHNPLGSGGNDGDRHAVEEYYKKMVKENPGDPLFLRNYANFLYQYKQDCEGAEEYYSRAILADPDDGEVLSQYGKLVWELHHDQERASSYFERAVQASPEDSHVQAAYASFLWDTEEDEDGSNEPQCLPPHSLQGAIATAGA

SEQ ID NO: 275771 - protein, 73 aa, Glycine max
  Clone ID: PAT_MRT3847_91040C.1.pep
TIKDAIIEHGTILNSRILINQSRPLKHSNVHNEHNWSSNILKRTLVMFAIKIYLYIAITIYILSQQTCYENIS

SEQ ID NO: 275772 - protein, 157 aa, Glycine max
  unsure (1)..(157): unsure at all Xaa locations
  Clone ID: PAT_MRT3847_91041C.1.pep
MFGSNPFGQSSSSPFGSQSVFGQTNSSSNPFAPKPFGSTAPFGSQTGGSIFGGTSTGVFGTAQPASPFGASSSPAFGSSQPAFGSSSTPAFGSSSSSFGGSSVFGQKPAFGGFGSTPTQASPFGAAQPSQPAFGSSIFGSSTPFXGASSQPAFGATS

SEQ ID NO: 275773 - protein, 169 aa, Glycine max
  Clone ID: PAT_MRT3847_91042C.1.pep
MPLTNQHQSFPSNTRRKATTAKAELGTAVARTGGAGYQSPSVDVPTHKVTVHDRQRGIVHEFVVPEDQYILHTAEAQNITLPFACRHGCCTSCAVRIKKGQIRQPEALGISAELRDKGYALLCVGFPTSDVEVETQDEDEVYWLQFGRYFARGPVERDDYALELAMADE

SEQ ID NO: 275774 - protein, 56 aa, Glycine max
  Clone ID: PAT_MRT3847_91043C.1.pep
IRNGVLSQTACYMEIVPSKSIEVPFHRYSSPKCQPYVVYSVSQTGHHLGIHAPDAW

SEQ ID NO: 275775 - protein, 50 aa, Glycine max
  Clone ID: PAT_MRT3847_91044C.1.pep
NERVFFYIDFLTEIVFKLDHLPIIDVFIIYNFFPCLLNSKHLLSMIRNLI

SEQ ID NO: 275776 - protein, 47 aa, Glycine max
  Clone ID: PAT_MRT3847_91045C.1.pep
FFFYIYDSNIYDFQYTYLYTESPYPSLHRVIGAVTMMMFPSLLFLWR

SEQ ID NO: 275777 - protein, 288 aa, Glycine max
  Clone ID: PAT_MRT3847_91046C.1.pep
MEEEGIGLVLARATELRLKISNCIQRATANGPSPHADDDDDEATERLLNICDALEALETQLSSLQVLQQQQQYEREIALAEIESSRKMLIDKLREYKGKELEVINEASTFASETVEPNNDLLLPPYPSHPPYSVSMDKEYLSQIPSVNKSGRNGLITLDPMIEANKNLSEKEQNHVENGAKNSRKGLGFFITSAAKAMLTVVGVVSILSLSGFGPKLGVRFSVQGWRHRVENEERSTTKNGGERPNIQCPPGRILVWENGEARCLVKERVEIPFSAVAATPDINYGCG

SEQ ID NO: 275778 - protein, 92 aa, Glycine max
  Clone ID: PAT_MRT3847_91047C.1.pep
MSEMRVSELHLKKELTQIRKAARVLRDPGTTSSWKSPLSSSRSVAAWNNDTASRRLTTISQLGPNNTNDKDKKGGSCTNWEELQNLSSEKYN

SEQ ID NO: 275779 - protein, 46 aa, Glycine max
  Clone ID: PAT_MRT3847_91048C.1.pep
FLRTILFLGTCTRSFYIGIDLCREETIFTIEMSKQRATLVDFHGDN

SEQ ID NO: 275780 - protein, 58 aa, Glycine max
  Clone ID: PAT_MRT3847_91049C.1.pep
EIRISNEYDFHLLTFALRPGKLYSIFMNDFAYYCPKDIAFVIYPIKNAPVTLIVCYSY

SEQ ID NO: 275781 - protein, 150 aa, Glycine max
  Clone ID: PAT_MRT3847_9104C.1.pep
RWWKRGGGYHYSLGSGGNDGERHGVEEYYKKMVRENPGDPLFLRNYANFLYQCKQDREGAEEYYSRAILADPNDGEVLSQYGKLVWELHHNQERASSYFERAVQASPEDSHVQAAYASFLWDTEEDEDGINEPQSLPPHSHQGAVATAGA

SEQ ID NO: 275782 - protein, 30 aa, Glycine max
  Clone ID: PAT_MRT3847_91050C.1.pep
YRISITNAVISFAMIRILTYRGLNQISSLL

SEQ ID NO: 275783 - protein, 117 aa, Glycine max
  unsure (1)..(117): unsure at all Xaa locations
  Clone ID: PAT_MRT3847_91051C.1.pep
TEDDFXKLFNVSGPXLETIHLINDPHYPIFNLGLAFVLYYNNSYAYYSLQKIASSIFKLNGNTPTVTCAYPNNSPYHSAFLQFXTLYVKNIPDNFTTXQFNELIPRHGQITKIFIPP

SEQ ID NO: 275784 - protein, 108 aa, Glycine max
  unsure (1)..(108): unsure at all Xaa locations
  Clone ID: PAT_MRT3847_91052C.1.pep
SAHASDALDPRNKEGIRQEAIVDLADQSLTYKQRVQHLDNSPLEESLWWFGLFPXDELQQXLAKHESIASGPSTKIENNAQSAKXHPAVALVYLDAPLADTGDTRKQT

SEQ ID NO: 275785 - protein, 96 aa, Glycine max
  unsure (1)..(96): unsure at all Xaa locations
  Clone ID: PAT_MRT3847_91053C.1.pep
ATELIIFYIFFETTLIPTLAIITRXGNQPERLNAGTYFLFYTLVGSLPLLIALIYAHNTLGSLNILLLTLTAQELSNSXANNLIXLAYTIAFIVKI

SEQ ID NO: 275786 - protein, 126 aa, Glycine max
  Clone ID: PAT_MRT3847_91054C.1.pep
PSGFVSGLARGSPCLPQASRLWIWHCARTACSASWLKAMDPKISDFGLARMCGGDQIEGETSRVVGTYGYMAPEYAFDGLFSIKSDVFSFGVLLLEIVSGKKNSRLFYPNDYNNWLIGHAWMLWNE

SEQ ID NO: 275787 - protein, 98 aa, Glycine max
  unsure (1)..(98): unsure at all Xaa locations
  Clone ID: PAT_MRT3847_91055C.1.pep
YSLLYLDLKFNTKSVLTPNVLQKESPKADIERLILETGGVKSLIGCLHGISIMHKLKKGDMNLSKDVKSERGERLCPIPDGLPKSADELXEEEPSRMP

SEQ ID NO: 275788 - protein, 39 aa, Glycine max
  Clone ID: PAT_MRT3847_91056C.1.pep
HPGRGLEKRDRNNCCIFTPGKIKQVLCKKASYLKLDSRW

SEQ ID NO: 275789 - protein, 153 aa, Glycine max
  Clone ID: PAT_MRT3847_91057C.1.pep
FTRTGGLSDDSLKPNPWVLSDVCCTSCVNDVHNVESNNSDVGHFHLPSDDLEGFSKDIEGLISELNPAIECCWNLHHQISRKLTIASAECFVFSKCLTSLSQKFHKAEDDDQNSSPTKSFDIFTLHWRFGLPGLCELTVMLKKEVAGKFLVDA

SEQ ID NO: 275790 - protein, 108 aa, Glycine max
  Clone ID: PAT_MRT3847_91058C.1.pep
ALPSTSTHPITSLVRLVFENFSLYFRYIRYMGVVWQRGGPIATCIISVLPGFSRGDLHTCQDSIGWSRSTLCHCSSDVWSLMPCRLRCKSFFVTVPRQSFTTCIVFTG

SEQ ID NO: 275791 - protein, 111 aa, Glycine max
  Clone ID: PAT_MRT3847_91059C.1.pep
MGNIKCELVDPDGLLKQLRVLKSVHVDGVMVDCWWGIVEAHAPQEYNWNGYKRLFQMVRELKLKLQVVISFHECGGNFGDDVCIPLPHWVAEIGRSNPGIFFTNKRGTTLS

SEQ ID NO: 275792 - protein, 103 aa, Glycine max
  Clone ID: PAT_MRT3847_9105C.1.pep
MAEPRISHKIGHGLHAKGHPKEEEHKGEQHQGGENTGEHHGEHRTEYKGEHHAGEHKPEHHGGEEHKEGFLDKIKDKIHGEEGGAHRRGQKKKKKNGKEKQEH

SEQ ID NO: 275793 - protein, 57 aa, Glycine max
  Clone ID: PAT_MRT3847_91060C.1.pep
HELLKEKTFEGEVMLWCVIINDEMLNVSPWSAFNCPDPAWYTVCSANMDYETVDVAL

SEQ ID NO: 275794 - protein, 55 aa, Glycine max
  unsure (1)..(55): unsure at all Xaa locations
  Clone ID: PAT_MRT3847_91061C.1.pep
KGHKFTRGWSVSTDQVAPLPWGDSXVVQYNGRYRQHRARSESCESIEVHVLRSQF

SEQ ID NO: 275795 - protein, 176 aa, Glycine max
  Clone ID: PAT_MRT3847_91062C.1.pep
VGVRGMAQYGYAYRSAQISTYNTSNVRNIETGAKPFAPYVPKFNNGHGYSEGHVTKKKTIPVASRPYVRTIATTPYYDHPRKFDDLTNEASRSPPDWPKPSYNGYADYGTNKPFQGKIKNYDDHDPVKKDNYHHGYDGYGDYNNKDEPKPKPTASPVYNSGYGGDYNNRERAKPKP

SEQ ID NO: 275796 - protein, 51 aa, Glycine max
  unsure (1)..(51): unsure at all Xaa locations
  Clone ID: PAT_MRT3847_91063C.1.pep
LRRLCCCRGLAGLSVVVSLAPACVAXACGLGWFLPVAVLKPPALGVCGRVD

SEQ ID NO: 275797 - protein, 332 aa, Glycine max
  Clone ID: PAT_MRT3847_91064C.1.pep
KGEKELHSLNADRVTQGLSTVWSLILLRPPIRRACLQIALQSAVHHLEEVRMKAIRLVANKLYPLSSISKQIEDFAKEMLFSVMSGDASEATDIECSIADSEKGPDVEKVPNEQSSLSGSTKDVTSDNRQSCTSESVSPDSVSEAQRCMSLYFALCTKKHSLFRQIFVIYRSTSKAVKQAVHRQIPILVRTMGSSSDLLEIISDPPNGSENLLMQVLQTLTDGTIPSKDLICTVKRLHDSKLKDAEVLIPILPFLSHDEVMPIFPHIVNLPLEKFQAALGRILQGSSQSGPVLTPAEVLIAIHGIDPEKDGIPLKKVTDACNACFEQWQTFT

SEQ ID NO: 275798 - protein, 113 aa, Glycine max
  Clone ID: PAT_MRT3847_91065C.1.pep
MNSSSTQLVLTKRMGIYDPFHQVNMWGDSFKIDGSLNSIAPQMLMIKPSMRNKSECTPHESREPSGDDQETNEKADTKALRRQAQNREAARKCRLRKKGVKTEFIGRWPVFII

SEQ ID NO: 275799 - protein, 68 aa, Glycine max
  Clone ID: PAT_MRT3847_91066C.1.pep
PFTLTTMDVEQQSRYNTRCHDNDNQQSAKNRSQQSATRVDTSQELEPQVKTEIVMTTTKEVNLKSMMV

SEQ ID NO: 275800 - protein, 79 aa, Glycine max
  Clone ID: PAT_MRT3847_91067C.1.pep
PRVRPPLATPPLLPPVSPPSLSPPTSPPLLPPVSPPLLPPSATPPLLPPISPPLSPPPATPPLLPPISPPSLSPPTSPP

SEQ ID NO: 275801 - protein, 141 aa, Glycine max
  unsure (1)..(141): unsure at all Xaa locations
  Clone ID: PAT_MRT3847_91068C.1.pep
FDCFALLEVLCGEGYAMRALEVVYELWNGGSVPSLVACIVMVDGLRGLGKIDEARRLVERMLEEGLVLDVVTFNCVLRDICDKRRTNEANRLRLLASSKGFEPDEMTYRILVMGYIXEGGREQGELLVDEMLDIGFIPDLA

SEQ ID NO: 275802 - protein, 50 aa, Glycine max
  unsure (1)..(50): unsure at all Xaa locations
  Clone ID: PAT_MRT3847_91069C.1.pep
PXXCXXXLXSXXRXALVLPPXLXXXXAXXSAXVXXLVPXXXXXLRVXASL

SEQ ID NO: 275803 - protein, 55 aa, Glycine max
  Clone ID: PAT_MRT3847_9106C.1.pep
LAAVITHIHTTALLKFERTITVYSDFSIHFCNLQLILNHGSLLFFNFIAPPCLKI

SEQ ID NO: 275804 - protein, 216 aa, Glycine max
  Clone ID: PAT_MRT3847_91070C.1.pep
GSRGNLIARNGSGSYSSSWSKLVADLYPFSIRTWTCTYCNMEQPPRAKHCHDCDKCVLQFDHHCVWLGNCIGQGNHCKFWWYLFEETALCLWTGVLYISYLKARITRGWWQDAIMIILLITLLVCLVFLLLLLLFHSYLILTNQTTFELVRRRRIHYLRGIPERVHPFSRGVRRNLYNFCCTRSTIYGVEPLPTPEEIEEKSRPYTCLDAVTCRCC

SEQ ID NO: 275805 - protein, 70 aa, Glycine max
  Clone ID: PAT_MRT3847_91071C.1.pep
TAPPPCAALPPVCPGPSPCSLAIYYSSFHTSDTLPCNVEPPKSRAFSFSALNLYKHAWARAWVSGPVRGG

SEQ ID NO: 275806 - protein, 134 aa, Glycine max
  unsure (1)..(134): unsure at all Xaa locations
  Clone ID: PAT_MRT3847_91072C.1.pep
MGEERSGSQNRRVKIYGGVLLGFIIMLICTVQFSLADTDPIDVAAINRLYTALGNPVLPGWVSSAGDPCGEGWQGVQCNGSVIQEIILNGANLGGELGDSLGSFVSIRAIVLNNNXIGGNIPSSLPGTLQHFFL

SEQ ID NO: 275807 - protein, 45 aa, Glycine max
  Clone ID: PAT_MRT3847_91073C.1.pep
QCGGRSNQCRLFVNGHPPQKKQMARRGHNYASCADTGSAGGKKKQ

SEQ ID NO: 275808 - protein, 61 aa, Glycine max
  Clone ID: PAT_MRT3847_91074C.1.pep
FRIHKVEVKQVSFERKDYLEIYHVFLDYVLSIKIFIKIGRIILKMNYGSKDCIIVSLRNVV

SEQ ID NO: 275809 - protein, 64 aa, Glycine max
  unsure (1)..(64): unsure at all Xaa locations
  Clone ID: PAT_MRT3847_91075C.1.pep
RKALSRIEWLQIADVPTIAQIEKFHSRXAIMHAPYSNDNIDLLVSIDLLGLHGAXKAFPNKIGF

SEQ ID NO: 275810 - protein, 61 aa, Glycine max
  Clone ID: PAT_MRT3847_91076C.1.pep
VLNFRVEPSLRTGSRRPPKGIFKTMLEGTVAGSTRHSCIHPIVITKTIYMAFHFELLKINA

SEQ ID NO: 275811 - protein, 52 aa, Glycine max
  Clone ID: PAT_MRT3847_91077C.1.pep
PHGTIPHQQHMQCTPLLKQGSTIKMGPQKELTAHSPSIHHSPLHRLPIFAPI

SEQ ID NO: 275812 - protein, 192 aa, Glycine max
  Clone ID: PAT_MRT3847_91078C.1.pep
MLQSRLITQQFQWMGVSFHDYKTYSRPRLQTCKCQQAESASGITKGDENGSRLVNDGETSNSVSNGMSAKHILEFEDVEAQQLKQEKEVLSSNLTNGSITDSFDTIGRNSIEEEAWDLLRESVVYYCGNPIGTIAAKDPTSSNVLNYDQVFIRDFIPSGIAFLLKGEYDIVRNFILYTLQLQSWEKTMDCHS

SEQ ID NO: 275813 - protein, 88 aa, Glycine max
  unsure (1)..(88): unsure at all Xaa locations
  Clone ID: PAT_MRT3847_91079C.1.pep
KNFPPFLLPQTPKEVFFCLNWPLSLKLKSRCSHRRLLVKKFLVFPRKNGSKYLLVRFLVEINGRVNKKILPXTKTHPHHKKNPKKKKK

SEQ ID NO: 275814 - protein, 112 aa, Glycine max
  Clone ID: PAT_MRT3847_9107C.1.pep
MNSTMSESGAGGFKTLSSPIPYLSGGLAIMLALIASALLILAWSYWIQYYTTSSNSNSDEEKPPQITMVEKEEIVSEPKIVVIMAGEGNPTYLGKAAPFTSHYEQALISKLQ

SEQ ID NO: 275815 - protein, 86 aa, Glycine max
  Clone ID: PAT_MRT3847_91080C.1.pep
GTPDLFQRTYPENEVKSSGLNIHQDTCEEELKIPQKTGLIADPGECIGFSPNNLEASAVKSFQAETYFLPSALEDVGGTCNLKEQR

SEQ ID NO: 275816 - protein, 69 aa, Glycine max
  Clone ID: PAT_MRT3847_91081C.1.pep
MMMMMMIPMDQIPPKAFNFYNNPRSLYVLKIENFGSGNGEAENIRGGSTMFHLLFFLFSISSLRIASLF

SEQ ID NO: 275817 - protein, 135 aa, Glycine max
  Clone ID: PAT_MRT3847_91082C.1.pep
SYVSIVQSTFIHMYVGLLGIFSSLIRFIYSHKRQSSRICVSFRILVSLHSAGLFRFCHVTACPLQQLQYRCNRPLFKSISMPVSKEYLDHLEETPSPSLRSYKFAWGYGQFPSHGVQWRHRQYEPLGSDAQVGQY

SEQ ID NO: 275818 - protein, 229 aa, Glycine max
  Clone ID: PAT_MRT3847_91083C.1.pep
YCNNNKEMILVYDFMTRGNLRDHLYNTDKSPLSWKQRLQICIGAAHGLYYLHKCAGKYMIIHSDVKTTNILLDDDWVAKVSDFGLSRFGPMDSSQAYGSTTAVRGSFGYIDPVYYKRHHLTDKSDVYAFGVVLFEVLCARPPLIRNEDPKQESLAKWVRYCYQSGTMDQIVDPTLKGRIAPECFQRFCHIGVSCLSEVGMQRPSMKDVVFMLESTLQVQESAENVKRGN

SEQ ID NO: 275819 - protein, 230 aa, Glycine max
  Clone ID: PAT_MRT3847_91084C.1.pep
MTSGFGESTRASAPSPSCSGNSSNDAGDFECNICFDLAQDPVITLCGHLFCWPCLYRWLHHHSHSQECPVCKALVQEEKLVPLYGRGKTQTDPRTKSYPGMEIPHRPSGQRPQTAPPPPPPEANPFGSYGFGLMGGFIPMATARFGNFTLSTAFGGFIPSLLNIHFHGFQDATVYGTTSGYPFGFNGFHGGNTRGFTQATGQVQRQEDNVLKNLLMLIGFLVLLTVIFVW

SEQ ID NO: 275820 - protein, 134 aa, Glycine max
  Clone ID: PAT_MRT3847_91085C.1.pep
PTRPLVYNQSSSTHDGGSAATGGVSQRNLLGQGGFGYVHKGVLPNGKENAVKSLKPTGGQGDREPQAEVDIISRVHHRHLVTPAGYRKPESKKLLGNESGPKGTPELQPQGKGPPGKEWKTKPKIGNGTAKGLA

SEQ ID NO: 275821 - protein, 230 aa, Glycine max
  Clone ID: PAT_MRT3847_91086C.1.pep
MTSGFGESTRASAPSPSCSGNSSNDAGDFECNICFDLAQDPVITLCGHLFCWPCLYRWLHHHSHSQECPVCKALVQEEKLVPLYGRGKTQTDPRTKLYPGMEIPHRPSGQRPQTMPPPPPPEVNPFGSYGFGLMGGFIPMATARFGNFTLSTAFGGFIPSLLNIHFHGFQDATVYGTTSGYPFGFNGFHGGNARGFMQATGQVQRQEDNVLKNLLMLIGFLVLLTVIFVW

SEQ ID NO: 275822 - protein, 96 aa, Glycine max
  Clone ID: PAT_MRT3847_91087C.1.pep
ARGENQIWGFASQDLPFPIKILLPSPTNCLSHYRFVSFSLRMLISLSIHVFIFLRFYSETRSVSLLLKYTFLLVLFSRSTNCNVQSLDLYVDYSID

SEQ ID NO: 275823 - protein, 278 aa, Glycine max
  unsure (1)..(278): unsure at all Xaa locations
  Clone ID: PAT_MRT3847_91088C.1.pep
MVGEEVVPMDDKAKRMRDLLSSFYSPDPSISNNTSKHASLDDINSTSFDPDQYMNILAHKSNLEGLLQRHVEMAAEIKNLDTDLQMLVYENYNKFISATDTIKRMKSNISGMETNMEQLLEKIMSVQSRSDSVNTSLFDKREHIEKLHRTCNLLRKVQFIYDLPDRLSKCIKSEAYADAVRFYIGAMPIFKAYGDSSFRDCKQASEEAIAVVVKNLQGKLFSDSESIQVRADAAVLLKQLDXPVNNLKAKLFEKLEQSITDIRLNPEEIIILQGTVLL

SEQ ID NO: 275824 - protein, 97 aa, Glycine max
  Clone ID: PAT_MRT3847_91089C.1.pep
GNFHEVFGENQIWGFASQDLPFPIKILLPSPTNSFSQPICKFLSQISYFVINSCFLIFYFLRFYSETRSVSVSVFLSLKYFSFCFCFLVPLIATFNP

SEQ ID NO: 275825 - protein, 88 aa, Glycine max
  unsure (1)..(88): unsure at all Xaa locations
  Clone ID: PAT_MRT3847_9108C.1.pep
FXFFFFFITEIFLLLYENEELSIQSLAIKNMLSLSIHKCFPYNFRNIFPHLYPCLKTWPLLYHXXERXXXSSQACLRSEAIPLALSFR

SEQ ID NO: 275826 - protein, 126 aa, Glycine max
  Clone ID: PAT_MRT3847_91090C.1.pep
MVGNEIVVPMDDKAKRMRDLLSSFYSLDPSISNTTFKHASLDDINSTSFDPDQYMNILAHKSNLEGLLQRHVAMAAEIKNLDTDLQMLVYENYNKFISATDTIKRMKSNISGMETNMEQLLEKVTV

SEQ ID NO: 275827 - protein, 142 aa, Glycine max
  Clone ID: PAT_MRT3847_91091C.1.pep
NIILSRSEGGIKALLGMGRCRHPDVHAQVARGIANFAKCESRASSQGTKSGRSFLIEDGALPWIVQNANNEAASVRRHIELALCHLAQHEINARDMISGGALWELVRISRDCSREDIKTLAHRTLVSSPTFQAEMRRLRVNY

SEQ ID NO: 275828 - protein, 62 aa, Glycine max
  Clone ID: PAT_MRT3847_91092C.1.pep
LSPAREEVHLTGDIFPGGTTLCRMSVHHRVRGLGSISPSLHIPLDSKCPVNRCQTINTTPQD

SEQ ID NO: 275829 - protein, 95 aa, Glycine max
  Clone ID: PAT_MRT3847_91093C.1.pep
KKKKLKKKKKKKKKRKKKKKKKKKKKKKKKKKKKKKKKKKKKKKKRGRPPLFNPFPPEFISDPFPEGSPISPFGSPFKPGRKNGNTFSLGKIFFP

SEQ ID NO: 275830 - protein, 57 aa, Glycine max
  Clone ID: PAT_MRT3847_91094C.1.pep
SIRFVVFTLDAAGLATGSFVQAVLADAKSIKVGPPSPPSGGLPGTLNSDEARDLQLP

SEQ ID NO: 275831 - protein, 196 aa, Glycine max
  Clone ID: PAT_MRT3847_91095C.1.pep
MSASRAPPAANPPDQIMHSMKRQLPFSSMKPPFVAAGDYHRHDAAEAIVVKTPLLKRKSEVADFEADSGDRMTAGFTEAANSPFQTPVSGKTGKGGKSSRLTKGNRVGTQTPGSNIGSPAGSNLTPAGPCRYDSSLGLLTKKFINLIKQAEDGILDLNKAADTLEVQKMRIYDITNVLEGIGLIEKRLQDRIQWKG

SEQ ID NO: 275832 - protein, 119 aa, Glycine max
  unsure (1)..(119): unsure at all Xaa locations
  Clone ID: PAT_MRT3847_91096C.1.pep
IKDGVYQGFVEPTNERTYVVFIGEGGKRTLVSADRNKIDGTNTYRTVTVTIEGDHYVHINKGLENYDGPYKHHSEQLRDQADKRMISTCSMDGLQDTLYSTHLXRTLYRDCTLKGANYA

SEQ ID NO: 275833 - protein, 117 aa, Glycine max
  Clone ID: PAT_MRT3847_91097C.1.pep
HQQHLFTNMTRSTLPPSSPISLFVSLMCVAFACATSLNKVEHCELDCASSTVEGLNVVGDCEPKCSQGLKIPTQIEKEGQDAIKEYLDTVFSNALFGGGSIETGQNKETQIEDNKGA

SEQ ID NO: 275834 - protein, 46 aa, Glycine max
  Clone ID: PAT_MRT3847_91098C.1.pep
ARGPVLITLLYYSYMDIFFNFILLTPQRFSGSFLRDRAHLNLLSLN

SEQ ID NO: 275835 - protein, 106 aa, Glycine max
  unsure (1)..(106): unsure at all Xaa locations
  Clone ID: PAT_MRT3847_91099C.1.pep
TKGARNKIRLVXAHFPIKASMGTPTQXCESRNFLGERKVKKAHLLDGVSVVRSEKVINXFILEGTAIKLVGSSCAFINHKFYVKKKEIRKFLDGIYVSNNETILFQ

SEQ ID NO: 275836 - protein, 103 aa, Glycine max
  Clone ID: PAT_MRT3847_9109C.1.pep
AHQQVIRFQRIMNVYHSAQADSSNETQVLEQLIPYRIQHGSLIHVDQLSWPSGESMYLPVIHQHSSDANDGGPLIMSSVSAPEPHSPSHAVSARYFPARSSQM

SEQ ID NO: 275837 - protein, 59 aa, Glycine max
  Clone ID: PAT_MRT3847_910C.1.pep
NPHFVQHEEFAQHQMIQHCFQTQKHNVDQHNRHLMAHGHHHHPEHHRENSTEANRHYHN

SEQ ID NO: 275838 - protein, 101 aa, Glycine max
  unsure (1)..(101): unsure at all Xaa locations
  Clone ID: PAT_MRT3847_91100C.1.pep
LPSLAPRGTNTRTTLLLSSLNHFSGSRKSSLLQTTSSTNESSSGDANEEYTQXMNRXDALENKCTLLFYGDGALDAAWVSPNLGGAINSGPLLPEIMDLVG

SEQ ID NO: 275839 - protein, 298 aa, Glycine max
  unsure (1)..(298): unsure at all Xaa locations
  Clone ID: PAT_MRT3847_91101C.1.pep
MEYMNQRPKYDCLLFDLDDTLYPLSTGLAKACGQNIKDYMAEKLGIEKSKIDDLSNLLYKNYGTTMAGLRAIGYDFDYDEYHSFVHGRLPYENLKPDPVLRNLLLSLPYRRLIFTNSDKVHAVKALSRLGLEDCFEGIICFETLNPIHKSTVSDDEDDIEFVGGSGTTNPTTKKDASSFQIFDIIGXHFAQPNPHTVLPKTPIICKPSENAIELALKIANLNPQRTLFFEDSVRNTQAGKRVGLHTVLVGKSQRIKGADYALESIHNLREAVPELWEDDIKSEVAYPGKLAVETSVTA

SEQ ID NO: 275840 - protein, 55 aa, Glycine max
  Clone ID: PAT_MRT3847_91102C.1.pep
LPFPQKGTVKKFPSWFGNPFHSNLVNLMSFYRSFLAKNHPFWLEGNNTFHFNKER

SEQ ID NO: 275841 - protein, 74 aa, Glycine max
  Clone ID: PAT_MRT3847_91103C.1.pep
SSAGDEEAMQEFIARGGMIGTTIGPKGMVKGDKDESDYKKELKDKKFGQEAQKLWMRMRSEVIAELQEKGFDVE

SEQ ID NO: 275842 - protein, 48 aa, Glycine max
  Clone ID: PAT_MRT3847_91104C.1.pep
PLFFIMVGHRFTIFKVRNLIPIRVVKVDIPVEAHVSAKAWADAWADAW

SEQ ID NO: 275843 - protein, 42 aa, Glycine max
  Clone ID: PAT_MRT3847_91105C.1.pep
CGSHFFFPYENGWYNNFFKLKIATKGDPRGAGVYFSQKGALK

SEQ ID NO: 275844 - protein, 74 aa, Glycine max
  Clone ID: PAT_MRT3847_91106C.1.pep
LPNTNNHSNPQIFSLDPKANFSPCTTLICVMKSRKPNTDYYTAEPKLAENNNGYATKATKPTYKDNATKHPNKP

SEQ ID NO: 275845 - protein, 72 aa, Glycine max
  Clone ID: PAT_MRT3847_91107C.1.pep
VTYNDFSSSSLSVDDQLVLLGDPLSDMKNLFQQLPMKRGLSRLYQRMSQCLTSLTNVRSLYDLVKPENPHNK

SEQ ID NO: 275846 - protein, 83 aa, Glycine max
  unsure (1)..(83): unsure at all Xaa locations
  Clone ID: PAT_MRT3847_91108C.1.pep
MNQHFITHWEGXKEVKVYPLVKAFSLTLGCQFFLGIDGPKFASEFENLYFGIYSVPVNFPGSTYHRALKAAAAIRKEIQILIK

SEQ ID NO: 275847 - protein, 317 aa, Glycine max
  Clone ID: PAT_MRT3847_91109C.1.pep
MGSEVSKQVERRKAIHTEGKTLSDLRNSGEDYPGSDYHPSDRKKWMSELNPEKVVIKQIVWPGTHDSATNKIGIPCITRPFAQCQSLSIYQQLVLGTRVIDIRVQEDRKVCHGVLVTYSIDVVIKDLKKFLSETQSEIIILEVRTEFGHEDPQEFDKYLEEQLGDYLVPQDDKVFEKTIAEVLPKRVICVWKPRKSPQPKAGSPLWSAGYLRDNWINTDLPSTKFESNMKHLSEQQPVTSRKYFYRVENTVTPVADNPVLCVKPVTERIHGFARLFISQCFSKGYADRLQIFSTDFIDQDFVDACVGLTRARVEGRA

SEQ ID NO: 275848 - protein, 261 aa, Glycine max
  Clone ID: PAT_MRT3847_9110C.1.pep
MAWSLTLPPPSSLSSSSSPSFPTFHHHHHSLFFNGVVAFTRLRHRRNSNTLSHVPSVGKEDTDLRVSSLQEQQLGEDDDGDDEPTPQDIEYVAQIKRVLELLRKNRDMLFGEVKLTIMIEDPREVERRRLLGIEDLDGPTREDLVDALDEINEGKIPKDRASLQMLAEELASWPNLEDAVPKKKPSKSLYAKATDTGIDPELAAKKLNIDWDSAAEIEETNADDETEVPSVVGYGALYLVSAFPIIIGISVVLILFYNSLQ

SEQ ID NO: 275849 - protein, 77 aa, Glycine max
  Clone ID: PAT_MRT3847_91110C.1.pep
LALQEVVEASLVGFFGGPNLCAIPARGVPFMPKNIQLAKRFCGERALVGGWKNKNDWWLRLVFLFFRFLFFFNKWGC

SEQ ID NO: 275850 - protein, 65 aa, Glycine max
  Clone ID: PAT_MRT3847_91111C.1.pep
ISLNRIRCAVTIYKLIMVLLTEDTCASTETSNLLGWHMRYCPMGALKCSERSNGICFRLRMRGRT

SEQ ID NO: 275851 - protein, 167 aa, Glycine max
  Clone ID: PAT_MRT3847_91112C.1.pep
KTYAIKKCIENRYNTWVMDGSMLLTSDLFLSESEDSNGDFFVANNLELFYAKSSSSSQKIWVDGFVSKVVAMAESLAGKDSATHGSLSFVYVVIKLLEQNGARIRRVDENSFATKIGSGSETSLRDKKLVYWSSEMELNSIQKWLDEFNLWSIDSDLSCTAVVCHKS

SEQ ID NO: 275852 - protein, 218 aa, Glycine max
  Clone ID: PAT_MRT3847_91113C.1.pep
MVSVNPSPAQGFYFFDPSNMVLPGVNNLPPPPPPAPPSHAAVEDPSKKIRKPYTITKSRESWTEREHDKFLEALQLFDRDWKKIEAFVGSKTVIQIRSHAQKYFLKVQKKGTSEHVPPPRPKRKAARPYPQKAPKTPTVSQVMGPLQSSSSFIEPAYIYIPDSSSALGTPVTNMPSSSWNYNNTPQSVNVPQVTRDDMGFTVAGQTAPLNCCCSSSNE

SEQ ID NO: 275853 - protein, 200 aa, Glycine max
  unsure (1)..(200): unsure at all Xaa locations
  Clone ID: PAT_MRT3847_91114C.1.pep
MAAPSSSAAANIMLAISEKKTNSVDLYRPLRNYVAFHYSEREAQNLEDDLQTLKQLRSDVERHSDPSLPARRDLLQSYYKSLCLVETRFPISSDPDHVNALTFVWFDAFKPKQKASQQNIHLEKASVLFNLGAVYSQIGLSYDRNTVDGRRQASHAFIAAAGSFAFLRDNASLKAXRWSSTTVXLSVECAGMLEKLMLAQ

SEQ ID NO: 275854 - protein, 59 aa, Glycine max
  Clone ID: PAT_MRT3847_91115C.1.pep
ASESPLACFPTRNTKIESDVRHFIDEISLGNVLKLWYISFEIKEYYKKVQILFLGSNPL

SEQ ID NO: 275855 - protein, 247 aa, Glycine max
  Clone ID: PAT_MRT3847_91116C.1.pep
MELSFKHQLGLVCVIMLFPALCFCQEYTKSRATFYGTSDGYGTPTGACGFGEYGRAMNWYDGRVAGVSDLWRNGAGCGTCYQVRCLVPELCDTNGAYLVATDQGYGDRTDFVMSPRAFLKLGRDEYSSEELKKYGTVDIEYKRVPCTYTGNVLFHIKETSTNPGYFALVILNVNGIHDVTAVELYQMGQWKSLNRNYGAVFDFPNPPSGEIRLRFRVSGMSDWVDPMIVIPSNWQPGNTYATKVQLK

SEQ ID NO: 275856 - protein, 101 aa, Glycine max
  Clone ID: PAT_MRT3847_91117C.1.pep
AHPVIISYMVQESLPKPNVLTRPGALDLSTVMAVGCWLAELKVQALSFGLDFACVQLWHGCATASGSPPACIRACISFSSMSIHWLIRAILEGSPVRPDTW

SEQ ID NO: 275857 - protein, 71 aa, Glycine max
  Clone ID: PAT_MRT3847_91118C.1.pep
IRIERMREEDRRGRVNSEQNKGKHRHGIEYYEKHFHLHSYLFLQIQTHFINSCSFIIRIHLHHKVCYSNHS

SEQ ID NO: 275858 - protein, 308 aa, Glycine max
  Clone ID: PAT_MRT3847_91119C.1.pep
MALPNLCFVVLILKVSFFLLASTQVRAATSDSSLFREYIGALFNGVKFSDVPINPNVNFHFILSFAIDYDTSSGSPSPTNGKFNIFWDNQNLTPTQVSSIKAKNPNVKVALSLGGDTVSSAFAYFDPTSVDSWVSNAVSSLTNIIKEYNLDGIDIDYEHFKADSETFAQSIGKLIQTLKSRGVITFASIAPFDNDEVQSHYLALWKSYGHIIDYVNFQFYAYDRSTTVSQFIDYFNKQSSNYNGGKVLVSFNSDGSRGLIPDNGFFTACSMLKTQQKLHGIFVWCADDSKANGFSYEKQSQDLLVTAN

SEQ ID NO: 275859 - protein, 90 aa, Glycine max
  Clone ID: PAT_MRT3847_9111C.1.pep
FLTVPRFSDTAYMFLILHTDRVRTKELTHGFDIFSLKFTSFTKPEPHIMTVSYGHYFSSKYDITRALQCSVLLQRMYKNNYCLYNLLNLD

SEQ ID NO: 275860 - protein, 60 aa, Glycine max
  Clone ID: PAT_MRT3847_91120C.1.pep
CHKSYATTAGGCAVDSCTPSMASGSTGEGTRAVLTCGDCGCHRQLHRRHETDGVSECSSP

SEQ ID NO: 275861 - protein, 402 aa, Glycine max
  unsure (1)..(402): unsure at all Xaa locations
  Clone ID: PAT_MRT3847_91121C.1.pep
HASGGGYSRQKMAVPAPRLISSSELEEFRPLIQIKRDRDTGKVFEVLDGLMLKDGYVYKKVSLDSLSLWGVVPTEEELLKFGPCENNESNDLEWLSQLYGDKKKKRVIRPDKGGGGKGESSSGSGVGNGFELYDLVCFGKKDFGVIVGMDKDDIYKILKEGSDGSAAVTIERHEIKSGLFDLKLTALDQQSKTILVNDTVRVLEGPSKGKQGIVKHIYRGIVFLYDGNEEENGGYLTCKSNMCEKVKVAVGDCSGKDSEPAPLVFEDQPSSPRSPLSPKKPWQARENNREFNRGDNNNMFSIGQTLRIRIGPLKGYICRVIALRRADVTVKLDSQQKVLTVKCEHLSEVQGKSTAISSSGDPDSSSSKPFDLLGTEGSSGGWLNGVGNVHXXVADWNAGRAS

SEQ ID NO: 275862 - protein, 41 aa, Glycine max
  unsure (1)..(41): unsure at all Xaa locations
  Clone ID: PAT_MRT3847_91122C.1.pep
TLERRQKRILXNREFSGRSRARKQAFPQELEIKIFRLKKEN

SEQ ID NO: 275863 - protein, 81 aa, Glycine max
  unsure (1)..(81): unsure at all Xaa locations
  Clone ID: PAT_MRT3847_91123C.1.pep
GRFLISGHKFKCREVATMKLIKHPNVVRLCEVMGSKTKIYIVLEFVTXGELFDKIVNHGRMSENEARRYFQQLINAVDYCH

SEQ ID NO: 275864 - protein, 125 aa, Glycine max
  Clone ID: PAT_MRT3847_91124C.1.pep
ATMGDLKLVERPQNYTLAPESSKQIKANIKVSSTETGVIFGNIVYETSSNVLERTVIVLNDIHIDIMDYISPASCADVAFRTMWAEFEWENKVCLFPLSPIGYVFNQKVKKYGAIFSCSKQLHFH

SEQ ID NO: 275865 - protein, 259 aa, Glycine max
  Clone ID: PAT_MRT3847_91125C.1.pep
MSSAAGAPDRRASPPRVAAGAPTRPPLKRHLAFITKPPFAPPDEYHSFSSIGSRRAADEAVVVRSPYIMKRKSGMNDSEGESLAQKWSNSPGYTNVSNVTNNSPFKTPVSAKGGRTQKAKASKGRSCPPTPISNAGSPSPLTPASSCRYDSSLGLLTKKFINLVKHAEGGILDLNKAAETLEVQKRRIYDITNVLEGIGLIEKKLKNRIHWKGIESATSGDVDGDISLLKAEVEKLSLEEQGIDDQIREMQERLRNLSE

SEQ ID NO: 275866 - protein, 71 aa, Glycine max
  Clone ID: PAT_MRT3847_91126C.1.pep
LIGGQTGKKNLILSQKMDPGREEALNPKKNTCIFQPIAIKLWHTMILYFCIRQKDKERRGCLINDREATDY

SEQ ID NO: 275867 - protein, 134 aa, Glycine max
  unsure (1)..(134): unsure at all Xaa locations
  Clone ID: PAT_MRT3847_91127C.1.pep
MKFWDLFFVALMPVLETLLITLLGLLIATQRFNLLRSVEARNYLNNVSXVYFLFSLNPFRNLSGKDHPKLFSVYRSCHVSLISSQLIXSITFNRLVEMWVLVGEYILTLVVGSILGWMLNKIAKTPKHLRGLVM

SEQ ID NO: 275868 - protein, 53 aa, Glycine max
  Clone ID: PAT_MRT3847_91128C.1.pep
GDRRVRKKLKITQFLFLQNHQLHTSAGLYINDTQHFISILLLSLVHHSLHSYN

SEQ ID NO: 275869 - protein, 172 aa, Glycine max
  unsure (1)..(172): unsure at all Xaa locations
  Clone ID: PAT_MRT3847_91129C.1.pep
MNNRRYEVFMSFRGEDTRATFTSHLYAALQNAGIIFFKDDESLPRGDQISDSLLLAIEQSQISVVVFSTNYADSRWCLXELEKIMNCKRTIGQVVLPVFYDVDPSQVRYQTGHFGESFQNLSNRILKDDDEKAVGEGESDKEYMMSRVLISRWRKVLREAASIAGVVVLNSR

SEQ ID NO: 275870 - protein, 39 aa, Glycine max
  Clone ID: PAT_MRT3847_9112C.1.pep
SVDTGIRTRSIVSQPSWIPTKRNICVNNTPALFQADLNN

SEQ ID NO: 275871 - protein, 149 aa, Glycine max
  unsure (1)..(149): unsure at all Xaa locations
  Clone ID: PAT_MRT3847_91130C.1.pep
LILGTGGADELAPGYLKLAYDIIHKAGGVCIADEVQCGFARTGSHFCRLETQGVIPDIVTMAKGLGNGLPLAAVLTTPEIASVMAQNHXYNTFGENPVCFAGGLAELRVLDNERRQCHCADVGSHSIQRLKSMMHVHDIIGYVRGRSLM

SEQ ID NO: 275872 - protein, 96 aa, Glycine max
  unsure (1)..(96): unsure at all Xaa locations
  Clone ID: PAT_MRT3847_91131C.1.pep
LYYFFNLCLIHAHSVLCIFATQVILMCAIECYRIAGCPLGEVTDPIYPCGSFDPLGLAYDPYAFAELNVKELINXLLAMYSMFCFFDQAIFTRKGS

SEQ ID NO: 275873 - protein, 80 aa, Glycine max
  Clone ID: PAT_MRT3847_91132C.1.pep
GLRFPLCSVLLFCYDEHPQKGRTRFLCGTVKMISFLIDMLLGFGGFFKWVSFFGLPNGGGGWVHLMCVYNKRMDSAAGAF

SEQ ID NO: 275874 - protein, 72 aa, Glycine max
  Clone ID: PAT_MRT3847_91133C.1.pep
NIITKFLTKEREVTYINKTNLPALHCLNTSDTNTSITKIRCDRTLQKTKCIVPNYYYCGKSSSTILINKKML

SEQ ID NO: 275875 - protein, 144 aa, Glycine max
  Clone ID: PAT_MRT3847_91134C.1.pep
MASCLMLLTKVSDTETPSRKRVLSGGDFKCKTCNRKFQSFQALGGHRASHKKLKLMASNLSCSTVTQKMHQCPICGIEFAIGQALGGHMRKHRASLNDGLITHDHVVPTSSGTKRLRLCLDLNLAPYENDLNLNLRTPTLNLFV

SEQ ID NO: 275876 - protein, 48 aa, Glycine max
  Clone ID: PAT_MRT3847_91135C.1.pep
NRPLSTSSITIFGIRLTPNAVCGLHVAFFLTSVNIWPVIIFHFQDGDY

SEQ ID NO: 275877 - protein, 172 aa, Glycine max
  Clone ID: PAT_MRT3847_91136C.1.pep
SSEPSGVLSFCDEWKLALDRVPDTVASEAIKSFINVVHVISVKQSEELKIKRRTENSSKEFEKKSSSLRSIERKFYSSYSMVGITPPESGPGNGQGLDARDPLAEKKMELAAHQRRVEDEMVRHSKAVEVTRAMTLNNLQTGLPGVFQALTSFSTLFTEALESVCSRSYAIK

SEQ ID NO: 275878 - protein, 126 aa, Glycine max
  Clone ID: PAT_MRT3847_91137C.1.pep
KTNFLLAQDCCFFQAAGQFEGTPPKRKEPFKKRKWLGCPEISSVEPNPQNLNISPIKKPPSKKKNQPFMKIPPVFNNPKKKNSFPVGWGAPSGKNQEHQPGKMGPSLFLGEKLNTPLGGGKQQPGP

SEQ ID NO: 275879 - protein, 977 aa, Glycine max
  Clone ID: PAT_MRT3847_91138C.1.pep
GLMGDRGSGAAKPIWMKQAEEAKLKSEAEKDAAAKAAFEATFKALENKHDKGGGGGGGGSVAESDSDSEEEEYEDLAHKPIGPVDPSKCTAAGTGIAGGTACAPSSFVVVAKDADERKVSGGGAQIKVRVTPGLGVGGTEQEGMVKDMGDGTYTVTYVVPKRGNYMVSVECNGRPIMGSPFPVFFSAAGNSTGGLLGLAPASSFPNLVNQTMPNMPNYSGSVSGAFPGLLGMIPGVVAGASGGAILPGIGASLGEVCRDYLNGRCAKVDCKLNHPPHNLLMTALAATTSMGTLSQAPMAPSAAAMAAAQAIVAAQALQAHAAQVQAQSAKDSTGSPEKASKDDALKKTLQVSNLSPLLTVEQLKQLFGFCGTVVECTITDSKHFAYIEYSKPEEATAALALNNIDVGGRPLNVEMAKSLPPKPSVANSSLASSSLPLMMQQAVAMQQMQFQQALLMQQSMTAQQAANRAATMKSATELAAARAAEISKKLNPDGVGTEEKETKQKSRSPSPPHGRSRSKSRSPINYRRRRRSRSYSPARHSKDHRSRSPLRSHHYSSYDRERRSFRDIREHSDRYRRRDLDRSLDHHSSASRRNRSRSVSPYTRKSSVSPKRHRETSPHRGRKQSRADSGSPSRRRGSRSSPKIDEKKLRNRRRSRSRSSDDRLHSIKNEEISHGKSKHRERRRSRSLSVDEKPHRRSRSSPRKVDESRSRHKKRLRSKSVDDRHGSPERLDENRTRRSRHSDKRHSRSRSTETRDQTDVREDERKNQKSKHRDTKRSRSKSVEGKHRFKDKSGENRDKKSKRRDRKRSRSISLEDKHDKGDTSPHINFDERNFEPTKSPEGKNHSSDKYGSRGEKSEHQKKTPSKSKSEQFDGSGPLRGNYKEYDSKGKSPSDSGSAEVKHHLSDGENATSEENSKLFGDVFQEPIRTAKDSTILNDNGTLTSVNGNYKSEESSENAGADDNPGWISVEKVGSGKY

SEQ ID NO: 275880 - protein, 86 aa, Glycine max
  Clone ID: PAT_MRT3847_91139C.1.pep
YKTRNDFGELLSWSLYASGSVPCNLTRRVIIVYLKSLFLVLVITYVSLLQYSLSSLYMQYAIKIHPAFVFLFSYKFLPPINLSLHW

SEQ ID NO: 275881 - protein, 106 aa, Glycine max
  Clone ID: PAT_MRT3847_9113C.1.pep
MDTTGNANFELVQLLGDLQALALNPFHGIERKIPSAVQKFFLRFRSLVYQKSLFVSPPTENEAPDVRVTKPPSSVGISDSPDEYVKASPVVKPLKHIVWPDDPTKA

SEQ ID NO: 275882 - protein, 48 aa, Glycine max
  Clone ID: PAT_MRT3847_91140C.1.pep
NEQAILLKQSSASLHRMRYESNDADALDRIICDLQLLLTMDQLHCSAT

SEQ ID NO: 275883 - protein, 187 aa, Glycine max
  Clone ID: PAT_MRT3847_91141C.1.pep
DKSGENRDKKSKHHDRRRSRSISLEDKHDKGGTSLHINLDERNFELTKSPEGKNHYSDKYGNRGEKSEHQKKTPSKSKSGQFDGSGPLRGNYKEDDSKGKSPSDSGSAEVKHHLNDGESATSEENSKLFGDVFQEPIINAKDSAILNDNGTLTSVNGNYKSEGSSENAGADDNPGWISVEKVGSEKY

SEQ ID NO: 275884 - protein, 988 aa, Glycine max
  Clone ID: PAT_MRT3847_91142C.1.pep
GLMGDRGSGAAKPIWMKQAEEAKLKSEAEKDAAAKAAFEATFKALENKHDKGGGGGGGGSVAESDSDSEEEEYEDLAHKPIGPVDPSKCTAAGTGIAGGTACAPSSFVVVAKDADERKVSGGGAQIKVRVTPGLGVGGTEQEGMVKDMGDGTYTVTYVVPKRGNYMVSVECNGRPIMGSPFPVFFSAAGEVGYMDQGHPGNSTGGLLGLAPASSFPNLVNQTMPNMPNYSGSVSGAFPGLLGMIPGVVAGASGGAILPGIGASLGEVCRDYLNGRCAKVDCKLNHPPHNLLMTALAATTSMGTLSQAPMAPSAAAMAAAQAIVAAQALQAHAAQVQAQSAKDSTGSPEKASKDDALKKTLQVSNLSPLLTVEQLKQLFGFCGTVVECTITDSKHFAYIEYSKPEEATAALALNNIDVGGRPLNVEMAKSLPPKPSVANSSLASSSLPLMMQQAVAMQQMQFQQALLMQQSMTAQQAANRAATMKSATELAAARAAEISKKLNPDGVGTEEKETKQKSRSPSPPHGRSRSKSRSPINYRRRRRSRSYSPARHSKDHRSRSPLRSHHYSSYDRERRSFRDIREHSDRYRRRDLDRSLDHHSSASRRNRSRSVSPYTRKSSVSPKRHRETSPHRGRKQSRADSGSPSRRRGSRSSPKIDEKKLRNRRRSRSRSSDDRLHSIKNEEISHGKSKHRERRRSRSLSVDEKPHRRSRSSPRKVDESRSRHKKRLRSKSVDDRHGSPERLDENRTRRSRHSDKRHSRSRSTETRDQTDVREDERKNQKSKHRDTKRSRSKSVEGKHRFKDKSGENRDKKSKRRDRKRSRSISLEDKHDKGDTSPHINFDERNFEPTKSPEGKNHSSDKYGSRGEKSEHQKKTPSKSKSEQFDGSGPLRGNYKEYDSKGKSPSDSGSAEVKHHLSDGENATSEENSKLFGDVFQEPIRTAKDSTILNDNGTLTSVNGNYKSEESSENAGADDNPGWISVEKVGSGKY

SEQ ID NO: 275885 - protein, 60 aa, Glycine max
  Clone ID: PAT_MRT3847_91143C.1.pep
ILWVGAVHCRRSKLTFTCMRQSWSFIVRPKYKIMPVMLNQVDCNNPGVTQVNGRGVHSHF

SEQ ID NO: 275886 - protein, 377 aa, Glycine max
  unsure (1)..(377): unsure at all Xaa locations
  Clone ID: PAT_MRT3847_91144C.1.pep
MGNSEEEKSTKTEKPSSPVTMDQANQTNQTNIHVYPDWAAMQHIMGHHAYXGPHSHGQGVPSSPAAGTPSSVESPTKFSGNTNQGLVKKLKGFDELAMSIGNCNAESAERGAENRLSQSVDTEGSSDGSDGNTAGANQTKRKRSREGTPITDAEGKTELQNGPASKETASSKKIVSATPASVAGTLVGPVVSSGMATALELRNPSTVHSKANSTSAAQPCAVVRNETWLQNERELKRERRKQSNRESARRSRLRKQAETEELARKVEMLTAENVSLKSEITRLTEGSEQMRMENSALREKLINTQLGPREEITLSSIDSKRAAPVSTENLLSRVNNSGANDRPAENENDICETKPNSGAKLHQLLDTNPRANAVAAG

SEQ ID NO: 275887 - protein, 54 aa, Glycine max
  Clone ID: PAT_MRT3847_91145C.1.pep
LYYNLKCLLYLQAYYGPRVTMPPYYNSAVASGHVPHPYMWGPPQVALLSSSRSR

SEQ ID NO: 275888 - protein, 426 aa, Glycine max
  unsure (1)..(426): unsure at all Xaa locations
  Clone ID: PAT_MRT3847_91146C.1.pep
MGNSEEEKSVKTGSPSSSPATTEQTNQPNIHVYPDWAAMQYYGPRVNIPPYFNSAVASGHAPHPYMWGPPQPMMQPYGPPYAAFYSHGGVYTHPAVAIGPHSHGQGVPSSPAAGTPSSVESPTKLSGNTDQGLMKKLKGFDGLAMSIGNCNAESAERGAENRQSQSVDTEGYSDGSDGNTAGANQTKRKRSREGTPTTDAEGKTELQNGPASKETASSKKIVSATPASVAGTLVGPVVSSGMATTLEXLRNPSTVHSKANSTSAPQPCAVVRNETWLQNERELKRERXRKQSNRESARRSRLRKQAETEELARKVEMLTAENVSLKSEITRLTEGSEQMRMENSALREKLINTQLGQREEITLSSIDSKRAAPVSTENLLSRVNNSGSNDRTAENENDICENKPNSGAKLHQLLDTNPRANAVAAG

SEQ ID NO: 275889 - protein, 249 aa, Glycine max
  unsure (1)..(249): unsure at all Xaa locations
  Clone ID: PAT_MRT3847_91147C.1.pep
MISGCFRQPNTPSSSNISYSSQVPQNVVTCTYLTQLCNSPTYLTLSWSRTLLSHSLTISATDIFSITISLNSSTFFFRTRHGXKSINNRKIKLHWNFTRAEFIQNSAEPESRFYLAISHNGKLQFFLGDLVRDLTRRHKKLDVKANNVVDPVLVSRREHVFGRRCYVSRAVFMGSKHVIEIECGGGVLGVKVDGETRLVVKRLAWKFYGGSVVFLYGVEVEFYWDVLSWVVNRDSNNGHGVFVFQVGDG

SEQ ID NO: 275890 - protein, 56 aa, Glycine max
  unsure (1)..(56): unsure at all Xaa locations
  Clone ID: PAT_MRT3847_91148C.1.pep
PAAAFGGICFGAFTVLANFIGALGSRTRIFLSVTIFFQFFXPFXKEKTNELGFFGF

SEQ ID NO: 275891 - protein, 57 aa, Glycine max
  Clone ID: PAT_MRT3847_91149C.1.pep
YHGQSHNRLEPMQIIADLVARSLLFGVYPRLAMINVVREVVNMNMYRLDGGMIKVMP

SEQ ID NO: 275892 - protein, 91 aa, Glycine max
  Clone ID: PAT_MRT3847_9114C.1.pep
GPLKKKFCLKKSWGCLKGPSFRKEIGRVFPFGWVAGGFLPGGRGDFIFPHKGDTWGNRKTDGNRFKIRGFPVMPKKGGGPLFIGRVLRAKC

SEQ ID NO: 275893 - protein, 86 aa, Glycine max
  Clone ID: PAT_MRT3847_91150C.1.pep
RLPSACVGDMVMATVKKGKPDLRKKVLPAVVVRQRKPWRPKDGVYMYFEDNAGVIVNPQGEMKGSAITGPIGKECADLWPKIGSAP

SEQ ID NO: 275894 - protein, 76 aa, Glycine max
  Clone ID: PAT_MRT3847_91151C.1.pep
CCGLLMCVFALVPSCGCGWFCGAVPSCSSVFLRHFCMGLPSLFGLCGPRARLGLLWLPWGSPPPGVVPFLPCPLGL

SEQ ID NO: 275895 - protein, 51 aa, Glycine max
  Clone ID: PAT_MRT3847_91152C.1.pep
IDSKISSNNNLILHNQDYYMKKDYGKPLGSEHCFIQMKLNTSSMTMHKERS

SEQ ID NO: 275896 - protein, 363 aa, Glycine max
  Clone ID: PAT_MRT3847_91153C.1.pep
MPLKLAGGATVGSLLLCVAISLFHIAGAEDPYRFFNWNVTYGDIYPLGVRQTGILINGQFPGPDIHSVTNDNLIINVFNSLDEPFLLSWNGIQQRRNSFEDGVFGTTCPIPPGKNFTYILQVKDQIGSFYYFPSLAFHKAAGGFGGIRILSRPRIPVPFADPAGDYTVLIGDWYKLNHTDLKSQLDSGRKLPLPDGILINGRGSNGAYLNVEQGKTYRLRISNVGLENSLNLRIQNHKLKLVEVEGTHTLQTTYSSLDVHVGQSYSVLVTADQPAQDYYIVVSSRFTYTVLTTTGILRYSNSAGPVSGPPPGGPTIQIDWSLNQARSIRTNLTASGPRPNPQGSYQLITNTAITYEKSCQIHS

SEQ ID NO: 275897 - protein, 110 aa, Glycine max
  Clone ID: PAT_MRT3847_91154C.1.pep
PFVSVLQQGEPVKNGNVGEFCAVFCRRGPDQRLNPVSPTVGLTPENSRNVGLTPENSRPVWVSLFIRKRGFIRKKPKGCSPGKNRGVQLAIGKWGYQKSCLPPLLALKNC

SEQ ID NO: 275898 - protein, 44 aa, Glycine max
  Clone ID: PAT_MRT3847_91155C.1.pep
DIIETHKPGYCDLRREAAYNLHLIYKKSGALDLARQVLRDYCTL

SEQ ID NO: 275899 - protein, 97 aa, Glycine max
  unsure (1)..(97): unsure at all Xaa locations
  Clone ID: PAT_MRT3847_91156C.1.pep
KKQEMFQSPRKFVTPFTKWVSDLNWRLGLTGLIIPLVLFITFFSLHYSSTSNGFSAFYPVQQFLFNIPXKFICEDDPVIFKDELLGSEIAVCLVGGA

SEQ ID NO: 275900 - protein, 426 aa, Glycine max
  unsure (1)..(426): unsure at all Xaa locations
  Clone ID: PAT_MRT3847_91157C.1.pep
MFQSPRKFVTPFTKWVSDLNWRLGLTGLIIPLVLFITFFSLHYSSTSNGFSAFYPVQQFLFNIPFKFICEDDPVISKDELLRSKIAVCLVGGARRFELTGPSIIEMVLKEYPNSDLFLHSPLDKDTFKFSILKFAPNVAAVRIFHPQPLPENEPYVRVLTAHNSPNGIQGLLQYFNLVEGCLTMIKSHQQKHNFTYDWIIRTRVDGYWNAPLGPENFVPGKYLVPPGSSYGGLNDRLGIGDLRTSTVALXRLSLVPNLDSAGFXNLQSEAAFKAQLTTLNVSHVAKRLPFCVVSDRRYDFPPGRFGVPVAALSSPGPLSGAKCRPCREVCEGLCAETVMDSVEKVWSWTHWENGALQLCDAHDAWESGWEKNFDRLAGKKFAAARKRIHSMRMGECVKDFVQLRKRSAHWSAPPVDEICTLGLSPP

SEQ ID NO: 275901 - protein, 172 aa, Glycine max
  unsure (1)..(172): unsure at all Xaa locations
  Clone ID: PAT_MRT3847_91158C.1.pep
MNICGCWVSSMKLPFLGWRFSRPFTSLCSSSFSPRIMTIQSCSSPSSSASLSTSESKEMKKEASPWLIVGLGNPGKKYAATRHNVGFEMVDTIAEAEGISMTTVSFKSLFGKGFIGDVPVILAKPQTYMNSSGESIXDDLDXPFAKLPLLPKGGHGCHNVMKSVINHFKGNS

SEQ ID NO: 275902 - protein, 56 aa, Glycine max
  Clone ID: PAT_MRT3847_91159C.1.pep
AENAKVVNIDGFEDVPPYDENALKKAVAHQPVSIAIEASGRDLQLYQSGVFTGKCG

SEQ ID NO: 275903 - protein, 44 aa, Glycine max
  unsure (1)..(44): unsure at all Xaa locations
  Clone ID: PAT_MRT3847_9115C.1.pep
SAXNXVRKLRNYXXEGXRXCIXVQIGNXXXXXLXDLXXXXNART

SEQ ID NO: 275904 - protein, 243 aa, Glycine max
  unsure (1)..(243): unsure at all Xaa locations
  Clone ID: PAT_MRT3847_91160C.1.pep
MNICGCWVSSMKLPFLGWRFSRPFTSLCSSSFSPRIMTIQSCSSPSSSASLSTSESKEMKKEASPWLIVGLGNPGKKYAATRHNVGFEMVDTIAEAEGISMTTVSFKSLFGKGFIGDVPVILAKPQTYMNSSGESVGAIVSYYKIPLKQVLVIFDDLDLPFAKLRLLPKGGHGGHNGMKSVINHFKGNSGFPRLRIGIGRPPGKMDPVAFVLRTFTKQXREELNFTLRDGLEAVRILTRVALV

SEQ ID NO: 275905 - protein, 46 aa, Glycine max
  Clone ID: PAT_MRT3847_91161C.1.pep
MFWNVIYIGPKRVVRYVCLILEIDVCLFVRCWFREAYIWNASSLMC

SEQ ID NO: 275906 - protein, 77 aa, Glycine max
  Clone ID: PAT_MRT3847_91162C.1.pep
HIGIHGSRRRRTRSTTSLSSSEPRSSAPDLLSSQFLLTNNEISLYLFIYLFSLMELCVCVAYLMSLRFVEWWLCVAS

SEQ ID NO: 275907 - protein, 106 aa, Glycine max
  Clone ID: PAT_MRT3847_91163C.1.pep
DELKAYASLVQITDVLAEIKRFSVKEVYTYYKGVTDELQYGSVKMNSQISPEIYDDLYGEALDIKHTDHYEYSNTLETSRKSYLSRTMVRPSILSERDPNAVQRHH

SEQ ID NO: 275908 - protein, 91 aa, Glycine max
  unsure (1)..(91): unsure at all Xaa locations
  Clone ID: PAT_MRT3847_91164C.1.pep
IPDKGNSLTAASDNLRRWCKNKGRAQPNCPTSITTFXTYYPFPPNNYGCHPIFSTPHTLQKLHNTTFCSLLSALIQHFDPQKKSFSFINSF

SEQ ID NO: 275909 - protein, 90 aa, Glycine max
  unsure (1)..(90): unsure at all Xaa locations
  Clone ID: PAT_MRT3847_91165C.1.pep
QLTTKLHSNFSLKQLGKLDYFLGIEIKLVADGTILLTQSKYIRDLLXKTKIVEAQPISFPMTANYKLTKVGSNXFSDSSLYRSVVGALQY

SEQ ID NO: 275910 - protein, 462 aa, Glycine max
  Clone ID: PAT_MRT3847_91166C.1.pep
RVWEAITKAFASQMKSAFTGSSFVKEIFTMGYPKLYSMIENLLERISHDTDIKGVLPAINLSGKEQIISAVEIFQNAFLAHCLSRLSDLVNSVFPMSSRGSVPSKEQISRIISRIQEEIETVQMDARLTLLVLREIGKVLILLAERAEYQISTGPESRQVGGPATPAQLKNFTLCQHLQDVHTRISSILKGMPSIAADVLSASLGALYGVACDSVTALFQAMLDRLESCILQIHDHNFGVLGMDAAMDNNASPYMEELQKCILHFRSEFLSRLLPSRNSTAPGTENICTRLVQSMASRVLVFFIRHASLVRPLSESGKLRMARDMAELELAVGQNLFPVEQLGAPYRALRAFRPLIFLETSQLASSPLLQDLPPNVILHHLYTRAPEELQSPLQRNKLTPLQYSLWLDSQWEDQIWKGIKATLDDYAANVRSRGDKEFSPVYPLMLQLGSSLIEKDQTSSKS

SEQ ID NO: 275911 - protein, 45 aa, Glycine max
  Clone ID: PAT_MRT3847_91168C.1.pep
ACDIARNVLFGTYFRHYFKEFSNVPKTAGPRKRLIQKKCSTLNSM

SEQ ID NO: 275912 - protein, 49 aa, Glycine max
  Clone ID: PAT_MRT3847_91169C.1.pep
PSEIPQYISSEPCIPPSPMFCPIQCAMLHSFSILKHSTCKVPAIVQEIY

SEQ ID NO: 275913 - protein, 111 aa, Glycine max
  unsure (1)..(111): unsure at all Xaa locations
  Clone ID: PAT_MRT3847_9116C.1.pep
DVPFRRNYVPTWAFDHIXSFSGGSEIQLYLDKFTGSDFQTKGSYXYGHLRMNIKMVSGESAGTXTAIYLSTYNAXEHDEIELELXRNTTRRPYILQTNVHTACAGDSEHRI

SEQ ID NO: 275914 - protein, 25 aa, Glycine max
  Clone ID: PAT_MRT3847_91170C.1.pep
DDDDKYAASFLPCVIPECKFHSLVN

SEQ ID NO: 275915 - protein, 111 aa, Glycine max
  Clone ID: PAT_MRT3847_91171C.1.pep
FFKFTLKLIITLFFPHQEANQTKFQKKKQQKSLFFSSKNPMYNLTKTIRITTTLKQNLPPKVFPFFAFFPQQKHRENTTTTRETVWARQRNLKIQKQITSFKFVSFFSNFD

SEQ ID NO: 275916 - protein, 101 aa, Glycine max
  Clone ID: PAT_MRT3847_91172C.1.pep
MTKFTILLISLRFCIAHTCSASKWQHQQDSCRKQLQGVNLTPCEKHIMEKIQGRGDDDDDDDDEKHKNTITWERKKKRRRMKQIRSLNQEQSKTTNQYLSF

SEQ ID NO: 275917 - protein, 28 aa, Glycine max
  Clone ID: PAT_MRT3847_91173C.1.pep
RNSKLEPNQKAFLKMADSGSHSQLTHGG

SEQ ID NO: 275918 - protein, 62 aa, Glycine max
  Clone ID: PAT_MRT3847_91174C.1.pep
MTLEIQMFMGFNTPFKKKKKKKKKKKKKKKKKKKKKKKKKKKKKKKKKKKKKKGGVDIKDTG

SEQ ID NO: 275919 - protein, 120 aa, Glycine max
  Clone ID: PAT_MRT3847_91175C.1.pep
LCHKTQTGGRVNSLPVQIPPFSGKSSRCVFPGISRSPVPANRFRDRNQRFNLRSIPSPFRFPASSQRGNTKNNNPTSIPSFSHSLTTSLVNLGFQNPSFCRSRALEDSKTCGSNLIYCQI

SEQ ID NO: 275920 - protein, 40 aa, Glycine max
  unsure (1)..(40): unsure at all Xaa locations
  Clone ID: PAT_MRT3847_91176C.1.pep
DIRLTEKTFFTCKNLDILVGFYTISSQFRKXLPHYIRWHL

SEQ ID NO: 275921 - protein, 49 aa, Glycine max
  Clone ID: PAT_MRT3847_91177C.1.pep
KKMVTEHGIKFGVHLITKRFGKIVAKVCEKLFSHGPLTLDQLVRYTDFT

SEQ ID NO: 275922 - protein, 79 aa, Glycine max
  Clone ID: PAT_MRT3847_91178C.1.pep
REEHAARILDILSSKRSGKIERDLWKAFLLQSKGDLRDLIFMKPLHIRLRLSCQDHPKADNGRDFILTDSSIKVDVLLN

SEQ ID NO: 275923 - protein, 167 aa, Glycine max
  unsure (1)..(167): unsure at all Xaa locations
  Clone ID: PAT_MRT3847_91179C.1.pep
CALRPCWIYHHYCAMVMALVSLTWEIKGQPDCAKKQRGVQLLXQWAMMQGVAMLLQNRYQRQRLYTRIALGKAKRMDVVWGETAGVDGQLWLLCPILFTLQGFEAYVGLLLLRTAVVGVVSEWQVIFCGVLLVLMAVGNFANTVQTLMAKSRFKAKMRRSKSKQRLN

SEQ ID NO: 275924 - protein, 67 aa, Glycine max
  Clone ID: PAT_MRT3847_9117C.1.pep
SSLPCGRPFVSCGSVKANAKTFGIFDTYEETLLIKCLSCMHRLIYSWFLLNLEKAVIRSPTRSCQGC

SEQ ID NO: 275925 - protein, 39 aa, Glycine max
  Clone ID: PAT_MRT3847_91180C.1.pep
KRKGHITVIVSGKKMSLIVFQKSRASDCQLSIQQRSFFA

SEQ ID NO: 275926 - protein, 70 aa, Glycine max
  unsure (1)..(70): unsure at all Xaa locations
  Clone ID: PAT_MRT3847_91181C.1.pep
RDYSPTTLFFFFFLKSXFPINDYFGERKTLVSXLHQHTVQLFLRIELLIIQVLKVIFSSHHIHVMIYNSS

SEQ ID NO: 275927 - protein, 67 aa, Glycine max
  unsure (1)..(67): unsure at all Xaa locations
  Clone ID: PAT_MRT3847_91182C.1.pep
ISNTNGSPCPHWHLFILLNLXIYSSSRKLLKLKPLLASNASSFFYKEGFIFQRVKNLSIPILQLIKK

SEQ ID NO: 275928 - protein, 91 aa, Glycine max
  unsure (1)..(91): unsure at all Xaa locations
  Clone ID: PAT_MRT3847_91183C.1.pep
SKFQGLQRKIIEFWDAXNVSLVHRTYFFLLFKGEPSDSIYMEVELRKLSSLTQTFSQGNQTVEDGRTLTPELRNKQPSLSYSKVNGMKILV

SEQ ID NO: 275929 - protein, 122 aa, Glycine max
  unsure (1)..(122): unsure at all Xaa locations
  Clone ID: PAT_MRT3847_91184C.1.pep
MEMGISKTTTKTSTEVTDNNSNSNSNSSSTTQTETDNHISVAAPYAVGEKVLVYHSDCLYEAKLRQAEYHNTKGWHFLVHYLXWDEWLDLDRLMKHTEENMRKKHDLDEKLGNDKNAKIPRG

SEQ ID NO: 275930 - protein, 73 aa, Glycine max
  Clone ID: PAT_MRT3847_91185C.1.pep
NFPVKKESPKKRGCYGPNNQKQGGFAPKTDPPNKPPFILGPSIGGDFPDRAPDFLREEAGAPFFLGGAQRKLF

SEQ ID NO: 275931 - protein, 54 aa, Glycine max
  Clone ID: PAT_MRT3847_91186C.1.pep
QRVLQGHESLVLGGALEEKFILFEQKSSIFLLQPTRQGKLWGLLNFLSFLLTRK

SEQ ID NO: 275932 - protein, 345 aa, Glycine max
  Clone ID: PAT_MRT3847_91187C.1.pep
HRKLVFWFLPIAAVQCTRAWCLFTTAGVLNNTNSQSEEHANEEDIVNEKHKRREKKKAKEEREKQIRAAEERLLEDDVPRTADEFEKLIRSSPNSSFTWIKYMDFMVSMVDVEKARSIAERALRTINIREENEKLNIWKAYFNLENKYGNPREEAVMKVFQRALQYNDPKKVYLALLGMYERTEQHNLADELLNKMTKKFKHSCKVWLRRIQSLLKQNKDGIQPVIDRASLSLPKHKHIKFFSQTAILEFKVGFPDRGRSMFEKILREYPKRTDLWSVYLDQEIQHKDEDIIHALFERAVSLSLPPKKMKFLFKKYLDYEMSQGDQERIESVKRKAIEYVESLNN

SEQ ID NO: 275933 - protein, 48 aa, Glycine max
  Clone ID: PAT_MRT3847_91188C.1.pep
INFIQYDYNPLYITLTKFKNLLKIHLYFTQHLTKNSYNIIFKLLHKEF

SEQ ID NO: 275934 - protein, 40 aa, Glycine max
  unsure (1)..(40): unsure at all Xaa locations
  Clone ID: PAT_MRT3847_91189C.1.pep
XLMXYSVNXVWKLHXTLXXKXLKLVRXFMCYGSTXLXXII

SEQ ID NO: 275935 - protein, 76 aa, Glycine max
  Clone ID: PAT_MRT3847_9118C.1.pep
MSLISAIFKTMFLTSLTIEFRQHTRISHSLSNSIHSLINNFSVEKAKTHTNDMYCLMFSFLLLRWRNLYHWSLSTT

SEQ ID NO: 275936 - protein, 121 aa, Glycine max
  unsure (1)..(121): unsure at all Xaa locations
  Clone ID: PAT_MRT3847_91190C.1.pep
SSSAWKKGXLMVNIVMSGIAPVKRSDWASLVQVFLTNSNSSEHFDACKWTKLEPHSWELIFPIXVCGPYNGFXMWSSVWANQTLWHLSFPIDNSKHSSVLDXLLGVSQDFVIAGITLMSAF

SEQ ID NO: 275937 - protein, 50 aa, Glycine max
  Clone ID: PAT_MRT3847_91191C.1.pep
QELQRKGNPFSLLKRGMESRVAKEYKIGSDTNDPDGDFGQDRGGKLKVGC

SEQ ID NO: 275938 - protein, 60 aa, Glycine max
  unsure (1)..(60): unsure at all Xaa locations
  Clone ID: PAT_MRT3847_91192C.1.pep
MTIADSVFPMDNVASCILLPPEEENRIVSEFLKASELNLKEGNLXYVISNRWFSRWQSYV

SEQ ID NO: 275939 - protein, 179 aa, Glycine max
  Clone ID: PAT_MRT3847_91193C.1.pep
FAWVLVDVRVNVMYAKHRSFGIGRFTDQPMSKLSVKWQGKRVSMPEYFTLRYGITIDFPDFPAVIPNTPVPKGRPVETFPIEQLVIMEDQRVPLEKMDSGLSGKLLKANTVPPNERMDKILQCAFKMNVFNVDNPVLSALGITVDQTSNRVVIGVRSSPRILYAKNQIINPCPDIPDGP

SEQ ID NO: 275940 - protein, 55 aa, Glycine max
  Clone ID: PAT_MRT3847_91194C.1.pep
LRVRPRVCRRVRLRVRTLKKKKTKCMGQGTPFSVHRYDLSGDRKPYGGDTKEKKF

SEQ ID NO: 275941 - protein, 152 aa, Glycine max
  Clone ID: PAT_MRT3847_91195C.1.pep
KVSLAQLCMDGPTIHFFNSLIGEDEDLTWESLKIALLERYGGHGDGDVYEQLTELKQEGSVEDYITEFEYLIAQIPRLPEKQFQGYFLHGLQSEIRGRVRTLATMGEMSRTKLLQVTRAVEKEVKGGNGSGFGRGPKNGPYRSNSHGGNNSY

SEQ ID NO: 275942 - protein, 72 aa, Glycine max
  unsure (1)..(72): unsure at all Xaa locations
  Clone ID: PAT_MRT3847_91196C.1.pep
SGSGRHASARGLSSGSAQQTATGPSXYNRIARTGSTPSSPPPRNRAPLAACRSWPTVFFTLQVGPTNVNLLA

SEQ ID NO: 275943 - protein, 63 aa, Glycine max
  Clone ID: PAT_MRT3847_91197C.1.pep
SVCPIQACTVHFTNARVEPKDCQQIVMSELILAFLVPFTGKIMYFTRLRFLQFWRANSLVSLK

SEQ ID NO: 275944 - protein, 87 aa, Glycine max
  Clone ID: PAT_MRT3847_91198C.1.pep
NCGHSRTRILGERDPIRYAVFVASGLTHRVDAFSLDRRIRPAQAGGLNFVGRSGCHPIRQSYSLHPSCIIIAGGTSFFRVRLVSGQG

SEQ ID NO: 275945 - protein, 103 aa, Glycine max
  unsure (1)..(103): unsure at all Xaa locations
  Clone ID: PAT_MRT3847_91199C.1.pep
QMLTRRERKLCLNCGKFNHGYYNNTSFDPLVVSRTSGVEPHFAPISPSQALTLLHSTAIYCYSSSFTLNANEPYAASMPLSAFPPMWSGRTAXAKWGLMCPSV

SEQ ID NO: 275946 - protein, 49 aa, Glycine max
  Clone ID: PAT_MRT3847_9119C.1.pep
LKLMPTQKAIKTYYLGKGFLNYLGGAKLFQKNGKTLIFLKRQIFLKNCS

SEQ ID NO: 275947 - protein, 51 aa, Glycine max
  Clone ID: PAT_MRT3847_911C.1.pep
APYCSATYLFPRPDFFLKSLTPPYSGLNPKRKKKLDLNMTSPQIGPQSFID

SEQ ID NO: 275948 - protein, 94 aa, Glycine max
  Clone ID: PAT_MRT3847_91200C.1.pep
QGLGVNQIGLSTKHFSNSHVLLFFGNGMKKKNKTKSQSYLGIRVYITSFLSLRCSHIFAKKICSIIAFVKRVMKHYLPFFTQTVTDALEIVAYT

SEQ ID NO: 275949 - protein, 54 aa, Glycine max
  Clone ID: PAT_MRT3847_91201C.1.pep
TPQNPIGAKYRSHSRSMSRPAQLTKMDNTCRSISWYMGHNEKSRTRCLKAIERT

SEQ ID NO: 275950 - protein, 83 aa, Glycine max
  Clone ID: PAT_MRT3847_91202C.1.pep
FLFLNPKNLGLCTILRGACNPLKHILHSPLVTTNNTPSKHLALTIEDPLCNFLTNMTHNHMNFSYLTHLTLTTLLYCIYSLIY

SEQ ID NO: 275951 - protein, 55 aa, Glycine max
  Clone ID: PAT_MRT3847_91203C.1.pep
SLMSSSLMRYIYIYIYIYIYIYIKNERNLNHLILLNNNLTTLKRGRVKDLLILKY

SEQ ID NO: 275952 - protein, 191 aa, Glycine max
  unsure (1)..(191): unsure at all Xaa locations
  Clone ID: PAT_MRT3847_91204C.1.pep
MATVQLQSLTLVRSSALPSATFSPPIAVSGRRNSAALPRYSGLRLRPAAETSFPTHASSRTASRGGGVKCEAGDTAVEVAPVTDANWQSLVIESESPVLVEFWAPWCGPCRMIQTRXFDEPGTRNIRGKSKVLANSNTDESPSXTATKYGIRSIPTVIXFFKNGEKNGTVIGALPHPTLTESIEKFLGGRK

SEQ ID NO: 275953 - protein, 52 aa, Glycine max
  Clone ID: PAT_MRT3847_91205C.1.pep
AGKTMTFHYTLLLLKSRSLPLRSKLSTGSGTSKGKAIIQRGPKPKTLTHFFQ

SEQ ID NO: 275954 - protein, 88 aa, Glycine max
  Clone ID: PAT_MRT3847_91206C.1.pep
YVSKDHDQAKKSCNQDHFVGNLSHVKSTPLPESSFQTGKCPGENTLKKELWTKFEAASTWGCQPKVPTGQKSAHKGFLDLLEEASCDE

SEQ ID NO: 275955 - protein, 69 aa, Glycine max
  Clone ID: PAT_MRT3847_91207C.1.pep
KRRQWDPSSSLHHIHRKLPTHWLPLHHRRQHASPGMLPMLVNPIKVTSARLPSPSASTPASFTTVASFR

SEQ ID NO: 275956 - protein, 106 aa, Glycine max
  Clone ID: PAT_MRT3847_91208C.1.pep
FSSISHTHSFPLLPSSPISNRGVCSRFSSIISLMPLLRFNHYLLPKLLASHFHANNNFSSIALSLHYATSSVFSASYSTTNLRHQTEGKYSNFGNFNDDLRKVGPG

SEQ ID NO: 275957 - protein, 86 aa, Glycine max
  Clone ID: PAT_MRT3847_91209C.1.pep
MLLNTFMQEASSSVMESGTNQQDTKAAFHAMLIACHWGRNRIMMVESGAVFELIEIELLTPEKRTTELTMEILFRLCSCAEVSLLC

SEQ ID NO: 275958 - protein, 43 aa, Glycine max
  Clone ID: PAT_MRT3847_9120C.1.pep
WLTDLTLSCKEVYCIFFFLFLLLKVFLEKLSHTVPDIFTDSVS

SEQ ID NO: 275959 - protein, 91 aa, Glycine max
  unsure (1)..(91): unsure at all Xaa locations
  Clone ID: PAT_MRT3847_91210C.1.pep
MVKSYPTVSADYHVAVENANNKLIGFIADKRFAPLMLRLACHSAGTYYVSSKTGGPFXTIKHSSXLAHGSNNCLDIPVRLLXPLKADFTIL

SEQ ID NO: 275960 - protein, 90 aa, Glycine max
  Clone ID: PAT_MRT3847_91211C.1.pep
LQKVIGGKLLLSGYWGIARHCNYLGDLMLALSFSLPCGISSPIPYFYPIYLLILLIWRERRDEARCAEKYREIWAEYRKLVPWRILPYVY

SEQ ID NO: 275961 - protein, 63 aa, Glycine max
  Clone ID: PAT_MRT3847_91212C.1.pep
MAPNRVHTSSYSSGLICLSVIPYPISFRSPPPPPPPPPPPPPPPPPPPPKKAALHTCSTVNYS

SEQ ID NO: 275962 - protein, 64 aa, Glycine max
  Clone ID: PAT_MRT3847_91213C.1.pep
LWRLCSRTEYFISLAHPSLSTSLNSYFYTFPSPSLPSCPQFRYHHSTCDNYLCVYSLSTVQVKF

SEQ ID NO: 275963 - protein, 144 aa, Glycine max
  unsure (1)..(144): unsure at all Xaa locations
  Clone ID: PAT_MRT3847_91214C.1.pep
EGLSSSSAITQKTWELENNIIPIDTPNNTTTCCTATTTTNADDSIFYYDESEQNKFQRNKPXANNPHYFKHIKISTLALLKMIIHAHSDNTIGIMCLMRSNTNTDAIIVIDAFCLASRNAETRVSTQTGWVGCDVGCAQEKQTG

SEQ ID NO: 275964 - protein, 67 aa, Glycine max
  Clone ID: PAT_MRT3847_91215C.1.pep
DRHTIRICICTSLLANKDQQLPCDNLANRFPHLFSMVLPFPLHLIFIINTFVEIQGRTSHIKNLRIL

SEQ ID NO: 275965 - protein, 107 aa, Glycine max
  Clone ID: PAT_MRT3847_91216C.1.pep
KGQNEPRRKTCPTNTRSCLTDSDHPASPDWGNPPSFPKGPWDPSLIPQGGSPGSVRTPGWAPFQTSYSPPSSQLPSLYGQICSTGNIPRGFAQKPPMSRCTRPSTLA

SEQ ID NO: 275966 - protein, 51 aa, Glycine max
  Clone ID: PAT_MRT3847_91217C.1.pep
MLETKIANAASGIAVHAECKLQFLEINANRTYRYIVFRIEEKSQQVIVEKP

SEQ ID NO: 275967 - protein, 92 aa, Glycine max
  Clone ID: PAT_MRT3847_91218C.1.pep
GAKFKKALFYCKEETGQFCLGIKKEKRWETLFFKNSFLNKFGKNPLVSDQRFLDNSQNLYWNFFLMGLKPFHKKPNIPLDYQPQLVLPWVAI

SEQ ID NO: 275968 - protein, 235 aa, Glycine max
  unsure (1)..(235): unsure at all Xaa locations
  Clone ID: PAT_MRT3847_91219C.1.pep
VESSFWDDMEFALIDDKIGSRVFITTRNKEVPNFCKRSAIVLQHDLQPLTLEQSLNLFYKRAFGSDLGGRCPDHLKDISAEMVKKCGGLPLAIVAIGGLLSRIERDATCWKKFSENLSKELEDDLSPVTKILSFSYHDLPDNLKPCFLYFGVYPEDYEVENVRLIRQWVAEGFIKFEADKTLEEVAEQYLRELIQRSLVQVSSFTGDGKPXICRVHDLVRDMILKIAVDLSFCHF

SEQ ID NO: 275969 - protein, 45 aa, Glycine max
  unsure (1)..(45): unsure at all Xaa locations
  Clone ID: PAT_MRT3847_9121C.1.pep
MEDPNKAPEASFQNKMGXGKIEFKRIENTTNRQVTFCKRRNVLLK

SEQ ID NO: 275970 - protein, 59 aa, Glycine max
  Clone ID: PAT_MRT3847_91220C.1.pep
PDSYTTCSWGCPTKITIIRKKDKLISILHETELNPKRGFEFCTRFHGTALALVQDKYAN

SEQ ID NO: 275971 - protein, 90 aa, Glycine max
  unsure (1)..(90): unsure at all Xaa locations
  Clone ID: PAT_MRT3847_91221C.1.pep
WPLXXCXXLLXAFXAGXXFPXXAXXXXXXPXRXAVXXXXVLLXWPPXPGXXXPXVPLLXGAFASXXXXAXXLXFXXXXGXXPVGLSXVFL

SEQ ID NO: 275972 - protein, 64 aa, Glycine max
  unsure (1)..(64): unsure at all Xaa locations
  Clone ID: PAT_MRT3847_91222C.1.pep
KSARVLVLPAKSKLCRDTHHXDSSKQAQSKKTGFCAIRKPRWKIANFTLGSEVQPWRKKGGVGK

SEQ ID NO: 275973 - protein, 65 aa, Glycine max
  Clone ID: PAT_MRT3847_91223C.1.pep
GALKINSFILEVMHSLVSCAHNIVCACTAGLFKDSCPVPPLTLLWSGKCHRQPEQWPISYISRIQ

SEQ ID NO: 275974 - protein, 71 aa, Glycine max
  Clone ID: PAT_MRT3847_91224C.1.pep
MSFSTNILKNSIMARDSSDSGPFRMLEGNVTIINGGASSLSAATARIFSKHGSHVIIADIQGDLGLSVAIQ

SEQ ID NO: 275975 - protein, 82 aa, Glycine max
  Clone ID: PAT_MRT3847_91225C.1.pep
KTKKNRAPFFFKIIRGSFPLKGPNIFNFNFFKKIFLQIIYPGGRTRPPKLTSFTLTRNIFILNPVLPPGGKRLNTAPYPFLN

SEQ ID NO: 275976 - protein, 123 aa, Glycine max
  Clone ID: PAT_MRT3847_91226C.1.pep
GLSRGGLYILAILSKYGRVGKHNKGYIIGGVSNFTLASILTEPRQASHYNMGSREHIYVQQRGDISTHFNGSWPYHHLLFGLYTGLPRNIYKGGGGFSKGTYTLNIQTIILGGLPNLRVGFPP

SEQ ID NO: 275977 - protein, 42 aa, Glycine max
  Clone ID: PAT_MRT3847_91227C.1.pep
VLSPLLHRGTLGDFILNNPSPHQILPPNHLFFHSLRTNLFLN

SEQ ID NO: 275978 - protein, 85 aa, Glycine max
  Clone ID: PAT_MRT3847_91228C.1.pep
GCILNSGFNTCIMLLGWGRIRPPLTNGNRSKPRRFWGYNHLAACLCPWCPNKLSLFRSYFLNRGEQLCNTGYLSIQLTAHMYRCV

SEQ ID NO: 275979 - protein, 211 aa, Glycine max
  Clone ID: PAT_MRT3847_91229C.1.pep
MPIRSREPAQRPGLLDRQRPLHAVLGGGKLADILLWKDKISSASMVAGFSIIWFLFEVVEYNFLTLLCHILMAIMLILFVWYNAAGLITWNLPQIYDFQIPEPTFRFLFQKLNSFLRRFYDISTGKDLTLFFVTIAGLWIMSAIGNYFTTLNLLYIMFLCLVTLPIMYERYEYEVNYLASKGNQDVQRLFNTLDTKVLTKIPRGPVKEKKK

SEQ ID NO: 275980 - protein, 49 aa, Glycine max
  Clone ID: PAT_MRT3847_9122C.1.pep
NKKKKKKKKKKKKKKKKKKKKKKKKKKKKKKKKKKKKKKKKNKNWGGPF

SEQ ID NO: 275981 - protein, 162 aa, Glycine max
  unsure (1)..(162): unsure at all Xaa locations
  Clone ID: PAT_MRT3847_91230C.1.pep
VMDFSFRSRRKRGXVGIGVVALLASAIWGGALANQIKHDPGVILDFKDSGSRYAGPFVLYFSFGLLDAVFQSMVYWVIGALANDSEILSRYAGFYKGIQSAGAAVAWQIDNHNVSAMAQLIVNWVLTTVSYPLLLILVVLAVKEGDNRGEEEPVKEVAGFAH

SEQ ID NO: 275982 - protein, 73 aa, Glycine max
  Clone ID: PAT_MRT3847_91231C.1.pep
FIKRTVSTFCDDNVVPWPPTYSASHVDQIYTETRARCYSRDYSSVRGATGEPVALTVNYNSALSGFTEKHCKL

SEQ ID NO: 275983 - protein, 69 aa, Glycine max
  Clone ID: PAT_MRT3847_91232C.1.pep
FPKIKLQCGFRGRSASFMHAWGCYTSLVSLGIMVIVGLLHINITVYHVEWCYKNIMTYILYLRLRHRSR

SEQ ID NO: 275984 - protein, 105 aa, Glycine max
  unsure (1)..(105): unsure at all Xaa locations
  Clone ID: PAT_MRT3847_91233C.1.pep
VLVGWIKEIINSGGEKISPIEVDAVFFSHLDIAXVVAFGVLDLKYGQEIYCAVILREGLDIDDVELLRYCKKNFVFFKVPKKVFIMHSLPKIATGKILGCLVAEH

SEQ ID NO: 275985 - protein, 68 aa, Glycine max
  Clone ID: PAT_MRT3847_91234C.1.pep
SRFIWVTLRVTQKVGLEHPQHLQLIKHLRVKKKPVLVGAQLRKKVAHAHVEDFLVLHETYDGCPAKNI

SEQ ID NO: 275986 - protein, 71 aa, Glycine max
  Clone ID: PAT_MRT3847_91235C.1.pep
PFVFGSAPFCFGTLCRFCSCMCCIRCCTRITTQCPTALAHFCIGIECFGCISCCSDICCSGNAGCNISFVV

SEQ ID NO: 275987 - protein, 343 aa, Glycine max
  Clone ID: PAT_MRT3847_91236C.1.pep
MLDLNLNADSASDLQMESSGSFNSSVVNAADTDDSCSYGDAVAYNFAILNNAATSDGLPLGAAGEPSVRTIQLFPAADSGASAPLLLDFSSKVDQHGAPPEQRITPRQQQVKKSRRGPRSRSSQYRGVTFYRRTGRWESHIWDCGKQVYLGGFDTAHVAARAYDRAAIKFRGVDADINFNVSDYDEDIKQMSNFTKEEFVHILRRQSTGFSRGSSKYRGVTLHKCGRWEARMGQFLGKKYIYLGLFDSELEAARAYDKAAIKCNGREAVTNFEPSLYEGDVSSSRAKLGMASPRSLWQGNSCSTLLYCSIIRIPFNNNTISCGYSNSFSKHDIPPLAFSIINH

SEQ ID NO: 275988 - protein, 46 aa, Glycine max
  Clone ID: PAT_MRT3847_91237C.1.pep
SLKFKNDTDFHKIINYDTMLGGTVFSTPNTALNLKPGQGYHENFKF

SEQ ID NO: 275989 - protein, 54 aa, Glycine max
  Clone ID: PAT_MRT3847_91238C.1.pep
LCVCPMVKQCWPLLCRGELKGDPNFGERDPFLYKRGEGGLKNYFQSYIKEGNFF

SEQ ID NO: 275990 - protein, 41 aa, Glycine max
  Clone ID: PAT_MRT3847_91239C.1.pep
ATLTIIHVHYRVQTKHPCLEIYDADSMNLISHWQKNNRPIT

SEQ ID NO: 275991 - protein, 149 aa, Glycine max
  unsure (1)..(149): unsure at all Xaa locations
  Clone ID: PAT_MRT3847_9123C.1.pep
IQALGRGCDATSKMRLTYCRGAPASTLVHTNQDHTESLLITHDLSLPKDYMDVERTPPKEHAXTTTVDSMQQMAKQFSERTRITGHLPLGSKGNMLNRTGSWMADATLTKSLATGGYSMTLPELKLIKLTTDLTEEDQLAEPYTRHTTL

SEQ ID NO: 275992 - protein, 88 aa, Glycine max
  Clone ID: PAT_MRT3847_91240C.1.pep
MMLNNIRYHGKGERFVLASGRDPALVNKGCDFLKDHYLIPPNWRQDANKGMIRSNNGRWMQPERPKLEDHPEDMHHHLTLLGLASSDI

SEQ ID NO: 275993 - protein, 51 aa, Glycine max
  unsure (1)..(51): unsure at all Xaa locations
  Clone ID: PAT_MRT3847_91241C.1.pep
TANVTPQQTLHEISVSXRCVGRNFPGTCLVFGLGHDSLMWPSLNIGGRPVF

SEQ ID NO: 275994 - protein, 46 aa, Glycine max
  Clone ID: PAT_MRT3847_91242C.1.pep
LTSYNQKTVQVFSLNLPKVHRLHIITNTPLTLSLLSYKILNLKILS

SEQ ID NO: 275995 - protein, 156 aa, Glycine max
  unsure (1)..(156): unsure at all Xaa locations
  Clone ID: PAT_MRT3847_91243C.1.pep
AQYEAIANDDTVFTFLTNKDAPKYKIVRVDLKEPTAWADVLQESEKDVLESACAVNGNQLIVSYLSDVKYLLQVRDLKTGSLLHQLPIEIGSVSEISARREDSVVFIGFTSFXTPGIIYQCNLGTEIPDMKIFREIVVPGFDRSEFHVKQDFVTSK

SEQ ID NO: 275996 - protein, 63 aa, Glycine max
  unsure (1)..(63): unsure at all Xaa locations
  Clone ID: PAT_MRT3847_91244C.1.pep
IIIVPKIIGSYIGVSNGKSFNQVRIKPVIIGHYHAEYXISNKPVKLRSAGIGATLSSRFIPLK

SEQ ID NO: 275997 - protein, 53 aa, Glycine max
  unsure (1)..(53): unsure at all Xaa locations
  Clone ID: PAT_MRT3847_91245C.1.pep
ILLPTPRLRLFXXLLGLVLCYTFNGLPFGDLIFHEIYVPYPLLSKNIFIDTPR

SEQ ID NO: 275998 - protein, 48 aa, Glycine max
  unsure (1)..(48): unsure at all Xaa locations
  Clone ID: PAT_MRT3847_91246C.1.pep
VAYNYPXYTTKNFHKVTISHKQLYPHHRHPSNSQTLSPKPLSPLHHLQ

SEQ ID NO: 275999 - protein, 64 aa, Glycine max
  Clone ID: PAT_MRT3847_91247C.1.pep
NLENPPIYSGTGHHKAYLWSGDNLIEPNLSHAEIPLSLFYHKKQSNLGGGTSMEYKCPGRKKGL

SEQ ID NO: 276000 - protein, 30 aa, Glycine max
  Clone ID: PAT_MRT3847_91248C.1.pep
IFFVSLLLTFKAKYRVHSQTRPLTRKCLHL

SEQ ID NO: 276001 - protein, 51 aa, Glycine max
  Clone ID: PAT_MRT3847_91249C.1.pep
SVPTFPIRSRIKTWPNHGHNFFLGENGIPLQFHTTFQPETLRVKAGGAYGG

SEQ ID NO: 276002 - protein, 159 aa, Glycine max
  unsure (1)..(159): unsure at all Xaa locations
  Clone ID: PAT_MRT3847_9124C.1.pep
MAAQALVSSSSLTFSAEAARQSLGPRSLQSPFGFSQKXPFFCKAAGTPPVKQGSERXLWGFAFKQSLPSLGWKPFPVDLGXFDLLGLFLPSKGTGGAFLTPKGAKNLGKIYTGRLIPSLGGNIWALNPPEYFWEGLCVSPPEKQPFPLCLKTGVCVPPW

SEQ ID NO: 276003 - protein, 68 aa, Glycine max
  unsure (1)..(68): unsure at all Xaa locations
  Clone ID: PAT_MRT3847_91250C.1.pep
MRRMSLVANEDFQHILRVLNTNEDGKQKXMFAMTSIKGFGRRFVHIDSKKADVDMNLRAGELTAAEWI

SEQ ID NO: 276004 - protein, 45 aa, Glycine max
  Clone ID: PAT_MRT3847_91251C.1.pep
FLKLSNLKISLEQMNSYRNCLYDQLQPRLFNPYKINFQVKTRVLE

SEQ ID NO: 276005 - protein, 114 aa, Glycine max
  unsure (1)..(114): unsure at all Xaa locations
  Clone ID: PAT_MRT3847_91252C.1.pep
NKTKNQGLLNKRKKGGPQGQGQTKNPGPSPGLPPPGGHQKSSYRGAPKKKPGGKPTQPPTGKTPGETHLKPAGENPPSPRGTNTQKSRPXDPPKKCAPRRAKAPPPGGAQQPGG

SEQ ID NO: 276006 - protein, 49 aa, Glycine max
  Clone ID: PAT_MRT3847_91253C.1.pep
MQSWNFFICNTYHKNHSAEVKLLKLIENDQVTVTRPYLSLTAFARLIKV

SEQ ID NO: 276007 - protein, 40 aa, Glycine max
  Clone ID: PAT_MRT3847_91254C.1.pep
LGIVQHHLRCLKQKRRRVPIIVSLSSLPLGVPFCRFFQPV

SEQ ID NO: 276008 - protein, 172 aa, Glycine max
  Clone ID: PAT_MRT3847_91255C.1.pep
MMDSEMVEAEASSSQPQPQASSSGQNGVVRDLLTLARQLITQGKPSQALQAVVVAMKTKGGDEAVFHSLHRAREVYRSRLQENAAVDQLASLFAECAIAEAEPVVIEPPANNITTPSISPEPDAHGTSILAESGRMQVVLDAVSDGSSFICLKCGGLVSNHRKDEHYAYWCC

SEQ ID NO: 276009 - protein, 102 aa, Glycine max
  unsure (1)..(102): unsure at all Xaa locations
  Clone ID: PAT_MRT3847_91256C.1.pep
PGQNGRVDPCVRPGRTRVRRTTKGLDTNNRGMINIDGLRFRLHKLGHXVPELDVQTLMEAGDVNGDGHLHYGKFVTISAHLRKMGNDXHVRKTFQFFDHYKS

SEQ ID NO: 276010 - protein, 180 aa, Glycine max
  Clone ID: PAT_MRT3847_91257C.1.pep
MRFKSHSVAAAAATFNSRCFRDHNTNRMNRRAKLSLLNAFFRTRRPFHQSPIAAPFTPPTHVASTSKFHSFSNTPHTHFAIRHNPRSFSGGSGVLDHTKEVDTINLKFAEAREEIEMALESKDTVYFDEEAECARAAVNEVLSMFEGLLAKLPERERGVLQRSMGLKIEQLKAELAQLNE

SEQ ID NO: 276011 - protein, 51 aa, Glycine max
  Clone ID: PAT_MRT3847_91258C.1.pep
PLFLSLIKHIINYINYSYLFMGGYLHRKVVNQSFSFMKMPKEKFTKKKASS

SEQ ID NO: 276012 - protein, 75 aa, Glycine max
  Clone ID: PAT_MRT3847_91259C.1.pep
SNCNSSELHSFIVFYFDLCTFIIFTNSIQTTYELIDLGDERVKKKKKMMARKNKRVAPEEALRAIGLGYELTNDL

SEQ ID NO: 276013 - protein, 41 aa, Glycine max
  Clone ID: PAT_MRT3847_9125C.1.pep
LFYRHCQDLLSALSLSCIFWVQLAPTGIISCIPDACSLCGF

SEQ ID NO: 276014 - protein, 69 aa, Glycine max
  unsure (1)..(69): unsure at all Xaa locations
  Clone ID: PAT_MRT3847_91260C.1.pep
MIIVDFVCSXFKSEFPIFXKIEVNGDNSAPLYKFLKLGKWGILGDDIQWNFSKFVGDKNGQVEGRYYPT

SEQ ID NO: 276015 - protein, 91 aa, Glycine max
  Clone ID: PAT_MRT3847_91261C.1.pep
SRKGITNFLGGKKKSLYGGKKKGKAHLAKFNWTIPFCPFALEPFPLNKKLSTLTNLWGGKLSRGAKGRPTSWEGLLPWAKLPKFINLALIS

SEQ ID NO: 276016 - protein, 62 aa, Glycine max
  Clone ID: PAT_MRT3847_91262C.1.pep
YPTVKVHLINTNLCPQAGSHLFYGGTTSPQNSWLNFQDYSNIACSVNGWVVSLPTNKIFFLL

SEQ ID NO: 276017 - protein, 96 aa, Glycine max
  Clone ID: PAT_MRT3847_91263C.1.pep
SSYRPTMDPYSFKCIEALLIVMVGMMMMMMMQVVCAEEDITCIDRDRDALLQFKVAIVDDYGLLSYCTTAECCLQERISLYQPYRASSNARSSRSD

SEQ ID NO: 276018 - protein, 65 aa, Glycine max
  unsure (1)..(65): unsure at all Xaa locations
  Clone ID: PAT_MRT3847_91264C.1.pep
MATQMSRXRKFVADXVFFXELXEVLTRELXXDGXSXVEXRVTPMRTXIIIRXTRTXAXLGEKXRR

SEQ ID NO: 276019 - protein, 89 aa, Glycine max
  unsure (1)..(89): unsure at all Xaa locations
  Clone ID: PAT_MRT3847_91265C.1.pep
DPYHGPGQAMGLSFSVPEGIKVPSSLVNIFKELHQDLGCSIPTHGNLQKWAVQQFSYSIXDGVLLLNAVLTVRKHQANSHAKKGWEQFT

SEQ ID NO: 276020 - protein, 168 aa, Glycine max
  Clone ID: PAT_MRT3847_91266C.1.pep
MELSFKHQLGLVCVILFFPALCNCQEYIGPVDDYWNPIGACGFGEYGKTVNNGIVAAVSEPLWRDGAGCGTCYQVCCKLQCCDEKGVYVVVSDAQGDRRNSSLTLSPGALSILVHNKPGCANRIKHDMGDIVIKRVPCRYPGNIKLRVQESSKNPGYFAVVILDVNGI

SEQ ID NO: 276021 - protein, 86 aa, Glycine max
  Clone ID: PAT_MRT3847_91267C.1.pep
PGPSTLEPPNRIYPRNPMGGKTNGANPPGGKPLKTRGEWVNLIWPNPQTPTFRRFPFKTKGGPPGAGSFAIKTHPQRFLKKRAPKG

SEQ ID NO: 276022 - protein, 41 aa, Glycine max
  Clone ID: PAT_MRT3847_91268C.1.pep
YNYHKIIKLQYIIIYNQMTIVNLLYCEGILISFKYLYYSFK

SEQ ID NO: 276023 - protein, 59 aa, Glycine max
  unsure (1)..(59): unsure at all Xaa locations
  Clone ID: PAT_MRT3847_91269C.1.pep
IHLYTINAYKNSIFCYIQFXRMYWMLNFAMYGCASACYSCPWYSIIFFVWIFKKKKKKK

SEQ ID NO: 276024 - protein, 175 aa, Glycine max
  Clone ID: PAT_MRT3847_9126C.1.pep
MKVLEHIMEGSRKQEICFATSSLLTTITSSFFPTIGAMVVGRGVAHNYRGGGVAHAVIRLGGYDSGGGLGGSDMCIHEFCNEWPRVGFERVGEDKMVGIEELLGLSPNSRDAAIFRNASLRTNSASTAGTPPPLSDIHKGSYGNMLRPVLIADLIAVVWAIFFVVIPIGSVYIYS

SEQ ID NO: 276025 - protein, 36 aa, Glycine max
  Clone ID: PAT_MRT3847_91270C.1.pep
FPAYHSLRSWSLQSVRIPAPTSSCKHEGLTKTISHS

SEQ ID NO: 276026 - protein, 57 aa, Glycine max
  Clone ID: PAT_MRT3847_91271C.1.pep
RHDVASVTDVTTRLILFASDYRGEEILDTEVGYRETAGTSGTRFLAREIKYGASRVK

SEQ ID NO: 276027 - protein, 65 aa, Glycine max
  unsure (1)..(65): unsure at all Xaa locations
  Clone ID: PAT_MRT3847_91272C.1.pep
LEYGLREDDXKGVCNVCHFAYSPSFXLSEMLAVDFRQGFSASYTIVYMRFVPVQLIDGDINQPSS

SEQ ID NO: 276028 - protein, 202 aa, Glycine max
  unsure (1)..(202): unsure at all Xaa locations
  Clone ID: PAT_MRT3847_91273C.1.pep
MALKVSAGKAAEIAIGSIGRGYDISTDIRLKYCKGDSINSRLIEIDETDVREVVLPGGVSIPNVSKSIKCDKGERIRFRSDVLSFQQMSEQFNQELSLTGKIPSGLFNTMFEFSGSWQRDAAHTKSLXFDGVLITLYTVALEKSQMVLCDHVKKAVPSSWDPPALARFIDTFGTHIIVGMKMGGKDVIYLKQQHSSTLQPAD

SEQ ID NO: 276029 - protein, 148 aa, Glycine max
  Clone ID: PAT_MRT3847_91274C.1.pep
PPRVSPHPVSPLGVPKEFPPLDSEKVPKNAPNFCSRGGFKTQSPPSFFVPPQGFFFSRGGASNPSLFPRSGVFVKVVLGVLLLKAPSWGGFSCLTFKPRLCVPRAGKGSPGSLSGGLGFASGPAPFFKISRGVCSPVFCPKACSPPPF

SEQ ID NO: 276030 - protein, 65 aa, Glycine max
  Clone ID: PAT_MRT3847_91275C.1.pep
PSCFQSSQLITSPSSIYICGKPYNTLHRHHPIYLFHFIYYTHISHHRSYPTYADTYIPLTPISLI

SEQ ID NO: 276031 - protein, 179 aa, Glycine max
  Clone ID: PAT_MRT3847_91276C.1.pep
MVTFNLSVEPKPFTNDVVIISDKDTRWGFGGTLLKAFQLCGFRAVLVGAGNELGRKEIEESMVVIPVFSMDLVSSPDHLEELATVVDEKRMCQMFLPFLYKLELKDVRYLMGGKLFEKFYEVLTKVTDLTGFRFGDGVTYEYQCVEKIVQVSAKHAASTIGVISRVTEAMLLLSPESDN

SEQ ID NO: 276032 - protein, 280 aa, Glycine max
  Clone ID: PAT_MRT3847_91277C.1.pep
MEIGPLFPHLAWWQQVNASTCCQDAVFYFLCAVYVLVSSFFLIQLVRIQVRVPEYGWTTQKIFHLMNFIVNGVRAVVFGLHKLVFLLHPKVLISVLLDLPGLLFFSTYTLLVLFWVEIYHQARGLPTDKLKIVYISVNAAMYLIQVCIWIYLWIDDNNVVQFIGEIFIAVVSFMAALGFLIYGGRLFFMLRRFPIESKGRRKKLNEVGSVTTICFTCFLIRCIMGFLSAFDSDASLNVLDHPILDLIYYMLVEVLPSALVLYILRKLPPKRISAQYHPIR

SEQ ID NO: 276033 - protein, 49 aa, Glycine max
  Clone ID: PAT_MRT3847_91278C.1.pep
TANVENAELSETHHSGTLGALEDSCLLLAVRAGHRSSKVSTSVNSLAFV

SEQ ID NO: 276034 - protein, 230 aa, Glycine max
  Clone ID: PAT_MRT3847_91279C.1.pep
MEIGPLFPNLAWWQQVNASTCCQDAVFYFLCAAYALVSSTALIQLVRIEVRVPEYGWTTQKIFHLMNFIVNGVRAVVFGLHKLVFLLHPKVLISVLLDLPGLLFFSTYTLPVLFWAEIYHQARGLPTDKLKIVYISVNAALYLIQVCIWIYLWINDNSVVEFIGESFIAVVSFMAALGFLIYGGRLFFMLRRFPIESKGRRKKLNEVGSVTTICFTCFLIRCIMGFLSAF

SEQ ID NO: 276035 - protein, 331 aa, Glycine max
  unsure (1)..(331): unsure at all Xaa locations
  Clone ID: PAT_MRT3847_9127C.1.pep
MEGSVNERLHFGKMGYGCNHYRRRCRIRAPCCNEIYSCRHCHNDAASLLKNPFDRHELVRQDVKQVVCSLYAIYLPISDTGTISIEEIAELEHHVAMISTYDVIFVPSHCADXRPALLGTNLSGHDVQHVVFLVCDTEQPVAQVCTNCGVKMGEYFCKICKFFDDDTGKKQFHCDDCGICRLGGRENYSHCSKCGCCYSTSLRDNHLCVENSMRHHCPICYEYLFDSLKDIAVMKCGHTMHSECYLEMLKRDKYCCPICSKSVMDMSKAWKRIDEEIEATVMPDDYRYRKVWILCNDCNDTTEVYFHILGQKCGHCSSYNTRAIAPPVLSQ

SEQ ID NO: 276036 - protein, 112 aa, Glycine max
  Clone ID: PAT_MRT3847_91280C.1.pep
LEGLAMCDSGEIAIAISLRNDAPYVLSFVKVIEVSDTKLFRIKFKEGLLLFPGTVTQVGIVYCSHRHLDLHDFVPKVSTLRENCKLLILTNDSTSSLIEIPCEDILYICFEH

SEQ ID NO: 276037 - protein, 51 aa, Glycine max
  Clone ID: PAT_MRT3847_91281C.1.pep
IKLNQHDLNHKQCSIDIKHYSLLFKEIRQENKCLTWIKIELAIIPMMKDRT

SEQ ID NO: 276038 - protein, 81 aa, Glycine max
  Clone ID: PAT_MRT3847_91282C.1.pep
IVDSRLEGDFDINSAWKAVEIAMACVSLNPSERPIMRVIVTELKETLATELARTKHNSADSINSIEPVTMNLDTEFTPLAR

SEQ ID NO: 276039 - protein, 93 aa, Glycine max
  unsure (1)..(93): unsure at all Xaa locations
  Clone ID: PAT_MRT3847_91283C.1.pep
LLYTYAHFRELSARXVLQVTSMKRILRTNERXSAGEESADLILTATGLTVHSRYLRINYPFTHXRALLLHSKCYPWNPDPDIYKTWRQSTTVY

SEQ ID NO: 276040 - protein, 66 aa, Glycine max
  unsure (1)..(66): unsure at all Xaa locations
  Clone ID: PAT_MRT3847_91284C.1.pep
PGEAVKYKSSLHAFHTIVANYGAKSIFKXAGXNILRAVPGAGVAXMAYDNLAXILFGKNYGSGGGR

SEQ ID NO: 276041 - protein, 49 aa, Glycine max
  Clone ID: PAT_MRT3847_91285C.1.pep
GSSAFFKKHMIAFYYTLYTHTDAEAYRMSACTHKHGKHLEVIEASASRH

SEQ ID NO: 276042 - protein, 59 aa, Glycine max
  Clone ID: PAT_MRT3847_91286C.1.pep
IFFLIFLRIEDTTYIKCGDGYHCSPNFEFSNIYVTSYIVLVLVTCKYLGFRNLCFMLFP

SEQ ID NO: 276043 - protein, 91 aa, Glycine max
  unsure (1)..(91): unsure at all Xaa locations
  Clone ID: PAT_MRT3847_91287C.1.pep
PRVRLAAISAFWKKKKKKKKKKKKKKKKKKKKKKKKKKKKKKKKKKKKKKKKKNKKKRARLSKDFNFSKLAXKKKVPLQKLRKMKKKKPER

SEQ ID NO: 276044 - protein, 42 aa, Glycine max
  Clone ID: PAT_MRT3847_91288C.1.pep
WNLAARVILAHLRKNDVDGLMSAIYGRGRRLDTISVTLRNFP

SEQ ID NO: 276045 - protein, 144 aa, Glycine max
  Clone ID: PAT_MRT3847_91289C.1.pep
HDLQNLQESIMKTKQHMDVIIWGTRHQFLEDVRSRFTDSSSWSSVVRTRKSEAIRRAWPDPINQSVESSGHDGSLFIEDAMNNLDLEEGFRNEIVEGLEIASLQKDSESFLGSNTDQILGYYPFKNLRSAVDLLFLRGGSDMVI

SEQ ID NO: 276046 - protein, 300 aa, Glycine max
  unsure (1)..(300): unsure at all Xaa locations
  Clone ID: PAT_MRT3847_9128C.1.pep
MMEWPSFSFGSSQIRKHFLIFPFPVSHPNLMEGSVNERLDFGKMGYGCNHYRRRCRIRAPCCNEIYSCRHCHNDAASLLKNPFDRHELVRQDVKQVVCSVCDTEQPVAQVCTNCGVKMGEYFCNICKFFDDDVEKEQFHCDDCGICRVGGRDNFFHCKKCGSCYAIGLRDNHLCVENSMRHHCPICYEYLFDSLKDTFDXIVMKCGHTMHHECYLEMIKNDKYCCPICSKSVIDMSKTWKRIDEEIEATVMPEDYRNRKVWILCNDCNDTTEVYFHILGQKCGHCRSYNTRAVAPPVLPQ

SEQ ID NO: 276047 - protein, 74 aa, Glycine max
  Clone ID: PAT_MRT3847_91290C.1.pep
MEQSRSWTKIWPYIVGECLLNFVINCKIGGRATDTETDTIDLQGDCKHTDCPIIIPAAYHKRDLSHMHYADRHS

SEQ ID NO: 276048 - protein, 82 aa, Glycine max
  Clone ID: PAT_MRT3847_91291C.1.pep
TLLRGEMPVGACLEAPTTWLETIPEECLSNKGIHLANNKIRLQNSNQQATFMPRPESIQDHCVKKMHRLSNIHTQKNGYGGE

SEQ ID NO: 276049 - protein, 79 aa, Glycine max
  unsure (1)..(79): unsure at all Xaa locations
  Clone ID: PAT_MRT3847_91292C.1.pep
EGRSEQQTQPIPIAGPSTKFFXXXXXXPTETTXKREAGGKHTFSLIPGHGGVLDRADRDVFTGASTYNFNKTGLPLDGV

SEQ ID NO: 276050 - protein, 66 aa, Glycine max
  Clone ID: PAT_MRT3847_91293C.1.pep
IKLHHQGVHINMMMNILLCFTIIIVSRHLLVNVTPKAYATTFSPFDLYPRLFGNNFLSTTINNFFP

SEQ ID NO: 276051 - protein, 50 aa, Glycine max
  Clone ID: PAT_MRT3847_91294C.1.pep
MSSHSHLHQSKLEKKNIINSSYKSTIEMTSWDIVNKKFHKLCNIIFSQAM

SEQ ID NO: 276052 - protein, 50 aa, Glycine max
  Clone ID: PAT_MRT3847_91295C.1.pep
STASSSSPVSSPPPIFSLPGFDDYYYNNSAIVDMFFFLIILLSAPPPDDT

SEQ ID NO: 276053 - protein, 93 aa, Glycine max
  Clone ID: PAT_MRT3847_91296C.1.pep
LRLKRVIRVPAISSKNADIPPDEYSWRKYGQKPIKGSPHPRGYYKCTSVRGCPARKHVERAVDDSNMLVVTYEGEHNHSQITSEVANVILESS

SEQ ID NO: 276054 - protein, 161 aa, Glycine max
  unsure (1)..(161): unsure at all Xaa locations
  Clone ID: PAT_MRT3847_91297C.1.pep
MDLSKTTYHTNVPDHSTFAYRYDPTYLARFKIAEESILKEATIHIIHDELMLDGNSRLDLASXVTTCMEPVRDKVIAADIDKNDVHMDDYAVTTELHNPSXNMIPHLFNAPLYEXHTCRGGGSFGSSEGIMWDVLSLNTRWGNRKNLVWKPYDNPNIVTGA

SEQ ID NO: 276055 - protein, 85 aa, Glycine max
  unsure (1)..(85): unsure at all Xaa locations
  Clone ID: PAT_MRT3847_91298C.1.pep
LARRGDVDEXFTRESREFLRKLLIGKVVSFIMDYNVPSISRDLRTVFLGDKNVPMLIVSQGWVKVSVHEQQKGEASPYLAELLRL

SEQ ID NO: 276056 - protein, 112 aa, Glycine max
  unsure (1)..(112): unsure at all Xaa locations
  Clone ID: PAT_MRT3847_91299C.1.pep
RHLSAGGPQDVYGEDRAXRRDHFVTPWGSVSACQWLYTIVRDPHFNQRGWPSLEDXEXMXHYLRGLLPPSVISXQETQVKKMIQHVRQYQVPLQKYMAMMDLQERNERLFYK

SEQ ID NO: 276057 - protein, 71 aa, Glycine max
  Clone ID: PAT_MRT3847_9129C.1.pep
NYFLKIINKHFYGLFLKKGKPLQLAHMFHHLYIKSLFHVHFLNKEKQQNESHKGKIKRLFLFSSLKQQTHN

SEQ ID NO: 276058 - protein, 64 aa, Glycine max
  unsure (1)..(64): unsure at all Xaa locations
  Clone ID: PAT_MRT3847_912C.1.pep
TLEVESSDTIDNVKAKIQDKEGIPPDQQTVIFAGKQLEDGRTLADYNIPXEYTLHLVLRLRGGI

SEQ ID NO: 276059 - protein, 54 aa, Glycine max
  unsure (1)..(54): unsure at all Xaa locations
  Clone ID: PAT_MRT3847_91300C.1.pep
TAGESINETATHIRASAKASMEKTKATVQETAARMTARDPVLXELATHKKEATM

SEQ ID NO: 276060 - protein, 258 aa, Glycine max
  Clone ID: PAT_MRT3847_91301C.1.pep
MEFDEQEEHEEEEEMGMPEPAVAVAAPQTFDSRSKIGGGEARKSAFGVAAVRYRECQKNHAVSFGGHAVDGCCEFMAAGDDGMLEGVICAACNCHRNFHRKEIDGEMSSFHHRAQPPPPPLHHHHQFSPYYHHRVPQHPTAAGYIHHHLTPPMSQHRPLALPAAASGGGLSREEEDMSNPSSSGGGGGGGGGGSKKRFRTKFTQEQKDKMLAFAEQLGWRIQKHDESAVEQFCAEINVKRNVLKVWMHNNKSTLGKKP

SEQ ID NO: 276061 - protein, 136 aa, Glycine max
  unsure (1)..(136): unsure at all Xaa locations
  Clone ID: PAT_MRT3847_91302C.1.pep
VSNRSXDSIRRGNSMCLINTYIFNFRRLFVIQAVIRTVSLARGSSVLGVAMQLSLYDTLPAGAGQLQDALACQATRWCLSAPELSPLEIHERSIQSEIICTNSKLRRAKCHLLRNESESSSPCPYVTRNSTDRRIW

SEQ ID NO: 276062 - protein, 117 aa, Glycine max
  Clone ID: PAT_MRT3847_91303C.1.pep
LNLCTPCFSRMLHHPFSSSSSLPNTHTPLPSLLFFSPSSLPNPNQSTFISTKASVSESHNETSDDTAANLFDQQLILRLAATAKDADEALLMIADNSSRNDGVVSTSDCCSIIFAAL

SEQ ID NO: 276063 - protein, 95 aa, Glycine max
  Clone ID: PAT_MRT3847_91304C.1.pep
RACGIGAPPSSLLVGGGRPFFLSYHLIFTIIVVTRLFMWGKRPHFILIHVRTVTRAKKVVRGFERRPSEKAVGAPVLASSWSWSVDSGKSNGSSS

SEQ ID NO: 276064 - protein, 199 aa, Glycine max
  unsure (1)..(199): unsure at all Xaa locations
  Clone ID: PAT_MRT3847_91305C.1.pep
SVDLIVCTGLNLLGSALDAVTCGASSICIQLISATKADGGKXKAGKATNGRRKITFPTIGAHEEAYDAQFDWDSDYGITGAFYIKNFMHNELYLKSLIXLEDISNHGTIHFICNSWVYNLKHYRTDRIFFANNTYFPSETPATLVKYREEELKNVXGDGTGERNEWDTIYDYDVYNDLGDPDTGEKYARPVLGGSALPY

SEQ ID NO: 276065 - protein, 210 aa, Glycine max
  Clone ID: PAT_MRT3847_91306C.1.pep
MKSFDTSPGRCFSSPQHDDNLLHKSISVDAYTYTNTEKEIATKGTGKSRSFTHRIHDHVKMGPNLSEILKGKLSLGARIIQEGGRGSIFKSVFGMQEKEQLLKASQCYLYTTAGPIAGILFVSTEKVAFYSERPITFSSATGELVRAPYKVLIPIGRIKEVNESQNVNKAEQKYIEIVTEDDSEFWFVGFLRYEKALKNLNKAISMANQF

SEQ ID NO: 276066 - protein, 68 aa, Glycine max
  unsure (1)..(68): unsure at all Xaa locations
  Clone ID: PAT_MRT3847_91307C.1.pep
LETDDYEGVKVWWVNSKVMSPTRSPMSYYPNQEKRFYKLTFHSXHRDSFSGAYLEHGIRDGKLISFEN

SEQ ID NO: 276067 - protein, 33 aa, Glycine max
  Clone ID: PAT_MRT3847_91308C.1.pep
AYGGGFRAANQAVNKYGLRCTLEHIRLTGNFPL

SEQ ID NO: 276068 - protein, 36 aa, Glycine max
  Clone ID: PAT_MRT3847_91309C.1.pep
MRKNQDYLSPIPNNFPFSLIINRPYVFSHACADAWS

SEQ ID NO: 276069 - protein, 60 aa, Glycine max
  Clone ID: PAT_MRT3847_9130C.1.pep
RLIDQEVVDLTDANTYVNLGDTCRCTCGNTSRSYDHCLNIEHSLIGRCRYYHRCYCTYIH

SEQ ID NO: 276070 - protein, 83 aa, Glycine max
  Clone ID: PAT_MRT3847_91310C.1.pep
RVHVHAQVVPSTMVTTMRFTVLECSHRVSMSHSHEINSHSPFSHKCSQACNFKYTPSLSVILSKHEQYYWPPLPFILLPFIML

SEQ ID NO: 276071 - protein, 103 aa, Glycine max
  unsure (1)..(103): unsure at all Xaa locations
  Clone ID: PAT_MRT3847_91311C.1.pep
SPPCSSSSPSPSSTPASPAPTPTPTTSPVPPSFPTPPPPTSPSPPPTTPSTSSTSSTKPXIPPPSASTLPPTTSSSIPSPPPSAAPFTTVTPTTTINFPFQSF

SEQ ID NO: 276072 - protein, 59 aa, Glycine max
  Clone ID: PAT_MRT3847_91312C.1.pep
ASVPKRVTCNVKEAIAATSRNKKVVLDNGLTVEVPSHIVAGDAIVVSTEHDSYIERAKA

SEQ ID NO: 276073 - protein, 95 aa, Glycine max
  Clone ID: PAT_MRT3847_91313C.1.pep
MVLESILSSSKSPSFRRQFAKHELGSWSTLLKRHRFLLFALALLTVLCTIYLYFAVTFAANDSCSGLNGPLKDSCHMEHVKASVAKSKLKGLRHF

SEQ ID NO: 276074 - protein, 102 aa, Glycine max
  unsure (1)..(102): unsure at all Xaa locations
  Clone ID: PAT_MRT3847_91314C.1.pep
AWARXYVXLGIPSRXXAXPFXFFFFFFXFFFFFFFFFFFFFFWKGSQGNLGEILFKKLGFFKRLNFSTLLGQQGGEAELGFGLKTKTTDRGTGHDTTQQNGT

SEQ ID NO: 276075 - protein, 75 aa, Glycine max
  unsure (1)..(75): unsure at all Xaa locations
  Clone ID: PAT_MRT3847_91315C.1.pep
VSIAGKGDGPAIRIDLGTTSSCLGVWPHDRVXIIPYDQANTTTPCYVAITHTEQLIHDASKNHDHMHPTLTDYDA

SEQ ID NO: 276076 - protein, 67 aa, Glycine max
  Clone ID: PAT_MRT3847_91316C.1.pep
RTDSPSVRASGGLFWPGPRLKFRFPHFRGTCFRPCAFFFFSDLLPSPLFGYTGPIFFFAPCECIPGF

SEQ ID NO: 276077 - protein, 75 aa, Glycine max
  Clone ID: PAT_MRT3847_91317C.1.pep
MGESKCRPLGFLIGLPFAVLSLVLSVVGAVIWIIGSMLSCLCPCCICFSGLANCAVGLVKLPVKVIRWFTHQIPC

SEQ ID NO: 276078 - protein, 86 aa, Glycine max
  unsure (1)..(86): unsure at all Xaa locations
  Clone ID: PAT_MRT3847_91318C.1.pep
MMGLFGRTKVDPKEQVRELQRKLRLENSRLNRQIGAIQREEEKVKREIKTAAKKGDREVCILLAKSIVNSRKXSKLHGTIAQINSI

SEQ ID NO: 276079 - protein, 88 aa, Glycine max
  Clone ID: PAT_MRT3847_91319C.1.pep
SLSWLNISAALPIDPRQHFLHHGSILAGGTRTNRWKCWWPAVTMTIWQKRNKIIFTNESFDSNKLIDDASFLLWTWLSNLEKGFAVLF

SEQ ID NO: 276080 - protein, 77 aa, Glycine max
  Clone ID: PAT_MRT3847_9131C.1.pep
IFAVISTARPVSRPSTLDSSADTCEQTSYHTSTFATMKLHKLWPSLWSSLSIFTPPSMPGTWPQFRPPCCLSVCSDK

SEQ ID NO: 276081 - protein, 515 aa, Glycine max
  Clone ID: PAT_MRT3847_91320C.1.pep
MGKKKQKNPQQSSETDAVSTPSSIFSKLFANAPEQTTATAAASLFSDDNPFRRKSAPLSYSTNRTQNPNNGDHPVNTDSSEEKKRKRTKDKTSAPAPDTVSVIEPLEEPGKKRKRDSDEGKDLSVGAEAIGKRKRKRDEVEKEWEEKKYGAVEEGIENKTVGIKRKTLDDPADMMVSKEGFDNEDKLLRTVFVGNLPLKVKKKTLLKEFKKFGEVESVRIRSVPIQDTKKPRKGAILAKKINDAADSVHAYIVFKTEQSAQASLAHNMSLVEGNHIRVDRACPPRKKHKGESTPLYDDKRTVFVGNLPFDVKDEELYQLFCGISNLESSIEAVRVVRDPHLNVGKGIAYVLFKTKEAAKFVVKKRNLKLRDRELRLSHAKADATPSKRPNPSSAHAPSTPAKRPYPLAHAPSTPAKKFSVASRSPSSSNNMSKSNRKTNTSYQGLRATKSDVHKKIQGGEKPKERKTKRPSVAARKAKANLVKQSDLPKQAGMKRKVDSRTPDSTLRNRKVKKNR

SEQ ID NO: 276082 - protein, 95 aa, Glycine max
  unsure (1)..(95): unsure at all Xaa locations
  Clone ID: PAT_MRT3847_91321C.1.pep
CSVPQTGLCMASTFIGSCTFILEMFRRVSEQVXAMFRRKAFLHWYTNQGMDQMEFTGGDSDMNDLVCEYQHYQEATADHEVYGYIDEQELQDDEA

SEQ ID NO: 276083 - protein, 93 aa, Glycine max
  Clone ID: PAT_MRT3847_91322C.1.pep
HSCSLTNLLLHEGGLKFRWWTQLRRGTHLGQKRIPNPHPDHKDRLLYHIYGIDIYGSMPHDGSNSQLVDLKQPDLQGHHWGNIVTDRAATKVK

SEQ ID NO: 276084 - protein, 79 aa, Glycine max
  Clone ID: PAT_MRT3847_91323C.1.pep
FSTIFFFYLFFIYFGIFFYLIFFLFLFFLFLFFFFLFFFFFFFFIFFFYYFYFFFFLFFFFFCLRGGGPKGRGVVNPSW

SEQ ID NO: 276085 - protein, 180 aa, Glycine max
  Clone ID: PAT_MRT3847_91324C.1.pep
FSAVIECYETLKDIILKLLLDEEDRQAVSSICTKVERCIREETFVKEFKMSGLPSLIEKSEKLLTLLQSDDGKLDSKIANALQDIVEIVIHDVMINGHFFLQKSQQHHVKRGEQFVNINTSFTHNKSVTRKVIRLHLLLTVKESATNVPQNLEARRRITFFANSLFMNMPKAPKVRDMLS

SEQ ID NO: 276086 - protein, 52 aa, Glycine max
  Clone ID: PAT_MRT3847_91325C.1.pep
TFFISLPSPPFSSIFIYTSLKNIKYIHSKSLQNYAALYNPLLYLFFLQHTAN

SEQ ID NO: 276087 - protein, 224 aa, Glycine max
  unsure (1)..(224): unsure at all Xaa locations
  Clone ID: PAT_MRT3847_91326C.1.pep
MASLGTPAHVSSNKKPLHRWSWKAKRVTCAVSPPTWREGRRTVSLSLVLSHLLLIPNRDTALASPFDKYVKRKKLDPLEVYIPAVILTEFQIKDLEKTLEDEEPQFALCRSXLRSGACCITSVVQYAFDSGNGKTAFNDVDECLRSLEELDSLLLHASRNDPEASVKSMKTKINSALGALDSLLQTVPSDVLSKGEVIADSYREPEDEETGSLDPDLKQLESIL

SEQ ID NO: 276088 - protein, 47 aa, Glycine max
  unsure (1)..(47): unsure at all Xaa locations
  Clone ID: PAT_MRT3847_91327C.1.pep
HLLNPFVRHHLRDVCICANGSKGRFSRVGFEGSXWPLPTRFSLVSWH

SEQ ID NO: 276089 - protein, 256 aa, Glycine max
  Clone ID: PAT_MRT3847_91328C.1.pep
MWTLRRASLRLSTSQGLNAGATRASAVKLVPITVEENEAGIPQSRQITHSRFLSADTFCRTGRVSLKFAVGTRELSSQAGASSTKVDDDDLEGGLSELEIQGSNDESDADLSDEDEDGGKPVDEMDLSDADPTKKKSQGRRTQSELFKAIANAPGLSVDSALNKWVEHGKELSRKEILLAVRELRRRKMYGRAFQLFQWLESNKKLEFMESDYASQLDLIAKLRGLPKAEKYIESVPESFRGELLYRTLLANCASQ

SEQ ID NO: 276090 - protein, 68 aa, Glycine max
  Clone ID: PAT_MRT3847_91329C.1.pep
MAKPCCSLDHNLIASTSENEDVLPMKNVEDADPRVTATYKLIDALDDTLKKLAHLQCDVKCKTDGIGL

SEQ ID NO: 276091 - protein, 81 aa, Glycine max
  Clone ID: PAT_MRT3847_9132C.1.pep
LGGSPNLLHKESKILFPLKETRNTTENFGGPNLIPFNPRIGIKKLSPPSFYGWGTSKRGKLKVFFPNWLGKTPYLFEGGTP

SEQ ID NO: 276092 - protein, 63 aa, Glycine max
  unsure (1)..(63): unsure at all Xaa locations
  Clone ID: PAT_MRT3847_91330C.1.pep
LVSQQXEIAIRIDENMDDTLANVEGAQGALLKYLNNISSNRWLMIKIFFILIFFLMVFLFFVA

SEQ ID NO: 276093 - protein, 93 aa, Glycine max
  Clone ID: PAT_MRT3847_91331C.1.pep
MGVKGFVEGGIASIIAGCSTHPLDLIKVRMQLQGENNLPKPVQNLRPALAFQTGSTLHMALYKGFIPTISRQGPFTVVLFVTLEQVRKLLKDF

SEQ ID NO: 276094 - protein, 317 aa, Glycine max
  Clone ID: PAT_MRT3847_91332C.1.pep
MGVKGFVEGGIASIIAGCSTHPLDLIKVRMQLQGENNLPKPVQNLRPALAFQTGSTVHVAAAIPQTRVGPIAVGVRLVQQEGLAALFSGVSATVLRQTLYSTTRMGLYDVLKTKWTDSVTGTMPLSRKIEAGLIAGGIGAAVGNPADVAMVRMQADGRLPPAQRRNYKSVVDAITRMAKQEGVTSLWRGSSLTVNRAMLVTASQLASYDQFKETILENGMMRDGLGTHVTASFAAGFVAAVASNPVDVIKTRVMNMRVEPGATPPYAGALDCALKTVRAEGPMALYKGFIPTISRQGPFTVVLFVTLEQVRKLLKDF

SEQ ID NO: 276095 - protein, 317 aa, Glycine max
  Clone ID: PAT_MRT3847_91333C.1.pep
MGVKGFVEGGIASIIAGCSTHPLDLIKVRMQLQGENNLPKPVQNLRPALAFQTGSTLHVAAAVPPPRVGPISVGVRLVQQEGLAALFSGVSATVLRQTLYSTTRMGLYDVLKTKWTDSVTGTMPLGKKIEAGLIAGGIGAAVGNPADVAMVRMQADGRLPPAQRRNYKSVVDAITRMAKQEGVTSLWRGSSLTVNRAMLVTASQLASYDQFKEMILENGVMRDGLGTHVTASFAAGFVAAVASNPIDVIKTRVMNMRVEPGEAPPYAGALDCALKTVRAEGPMALYKGFIPTISRQGPFTVVLFVTLEQVRKLLKDF

SEQ ID NO: 276096 - protein, 208 aa, Glycine max
  unsure (1)..(208): unsure at all Xaa locations
  Clone ID: PAT_MRT3847_91334C.1.pep
VRIPGSTHASERLRIREERDAPRPPRSATFYTYLITTLINLLEYGGAGSEFAVKRRFRDVVALSKQLAEAYRGFFIPERLDKSMMESQVMQKQEFVGQRRVALEKYLRKLAAHSVIGRSEELRLFLEAKGRLPLAKTTYVASRMLDGTVRLPRQLFSGEAELGEMAQLAKGRRDLLKIFKELKXPLVVEEDKEFMERKDKFVDFVHYL

SEQ ID NO: 276097 - protein, 58 aa, Glycine max
  Clone ID: PAT_MRT3847_91335C.1.pep
VIIFMSVSCLSWVESVFPFILVPSGICSMVWSSFPSLFCKIVRMMISAGIIVLYDTTA

SEQ ID NO: 276098 - protein, 65 aa, Glycine max
  Clone ID: PAT_MRT3847_91336C.1.pep
PDSLGEQLSTAYPTTPHRISSHSRRRPVIKGAHAFISIDNEQSESLTNGYRENERLLGNKRRSER

SEQ ID NO: 276099 - protein, 112 aa, Glycine max
  Clone ID: PAT_MRT3847_91337C.1.pep
PTQTCTCPMFLRTTCSRPSHRFQWHLTPLDMQWMITKAMRQSQKGLSVCSTLGWSLQAQSYMILCKIVSRSLGGCQCRWKCQGSTETTHRPLIIVFMFCSQHNFLYLLHFFV

SEQ ID NO: 276100 - protein, 50 aa, Glycine max
  Clone ID: PAT_MRT3847_91338C.1.pep
LKIRGPLYSPLKHICICICSKKHHAYPLGKSSHSQSKMPVANFYALHLLT

SEQ ID NO: 276101 - protein, 63 aa, Glycine max
  Clone ID: PAT_MRT3847_91339C.1.pep
TTNNNECQCSSPLSSICYKRKGNKNFTKRNSHDSLKLQSSKLLISRKLVQKNQGQPKYTGVKK

SEQ ID NO: 276102 - protein, 90 aa, Glycine max
  unsure (1)..(90): unsure at all Xaa locations
  Clone ID: PAT_MRT3847_9133C.1.pep
XXXXXXLXFXXXXXXXXLGXXXXXXXXXXXAXVXXRXXXXXXXXXXXGXXKXXXXXXXXXXLIXVXXXYXXXKRHVNXXXXGXAEXXXXL

SEQ ID NO: 276103 - protein, 95 aa, Glycine max
  unsure (1)..(95): unsure at all Xaa locations
  Clone ID: PAT_MRT3847_91340C.1.pep
VSHVAVWGXIIITYGCMVILDSIPVFPNYGTIYHLARSPTYWMTILLIIIVALLPRFXCKAVYQIXCPSDIQIAREADTMRKQHGDLQSRLPVSN

SEQ ID NO: 276104 - protein, 101 aa, Glycine max
  Clone ID: PAT_MRT3847_91341C.1.pep
YKVADLLKSSGHEFTALDMAAYGINQKQKGELNSITEYFEPLMEFLLSLAEEEQVILVGHSSGRLCISVAMELIPTQIAAAVFDKTPRGIYINHSFLLNNF

SEQ ID NO: 276105 - protein, 57 aa, Glycine max
  Clone ID: PAT_MRT3847_91342C.1.pep
NKAHYFFSLQNVFISLHVEYFFMLSCSTNHGHTSYSLSVQTNFNSNDIMKIQICLEP

SEQ ID NO: 276106 - protein, 113 aa, Glycine max
  Clone ID: PAT_MRT3847_91343C.1.pep
HASVRLREDDRRGCLSWNKFAKNQIASSDYEGIVTVWDVTTRKSLMEYEEHEKRAWSVDFSRTDPSMLVSGSDDCKVKIWCTNQEASVLNIDMKANICCVKYNPGSGNYIAVG

SEQ ID NO: 276107 - protein, 335 aa, Glycine max
  Clone ID: PAT_MRT3847_91344C.1.pep
LEDFQSVLTTFTRYSRLRVIAELRHGDLTMYIALCSIEFDCDDDLFATAGVSRRIKVFDFSAVVNEPTDAHCPVVEMSTRSKLSCLSWNKYAKNQIASSDYEGIVTVWDVTTRKSLMEYEEHEKRAWSVDFSRTDPSMLVSGSDDCKVKIWCTNQEASVLNIDMKANICCVKYNPGSGNYIAVGSADHHIHYYDLRNISRPVHVFSGHRKAVSYVKFLSNDELASASTDSTLRLWDVKENLPVRTFKGHANEKNFVGLTVSSEYIACGSETNEVFVYHKEISRPLTCHRFGSPDMDDAEDEAGSYFISAVCWKSDRPTILTANSQGTIKVLVLAA

SEQ ID NO: 276108 - protein, 118 aa, Glycine max
  Clone ID: PAT_MRT3847_91345C.1.pep
GEIAKMASESFQALFLYMKNPKSKVFPLLFANSTKKTLFNYFIFNTANSRTGKQKNDKQPLLAKARQVVRWVVNVVHHFFPAARSGKKKLKPTRIAPPYTITTRSEKKKPKIEALLAK

SEQ ID NO: 276109 - protein, 65 aa, Glycine max
  Clone ID: PAT_MRT3847_91346C.1.pep
TETSEHLFTYFTTNSGLHKCKHGLHPHFCGEAPTYCQFNSGVWTPTALTGLRHGSDTCPRMIQEH

SEQ ID NO: 276110 - protein, 126 aa, Glycine max
  unsure (1)..(126): unsure at all Xaa locations
  Clone ID: PAT_MRT3847_91347C.1.pep
CFYVFASPSHMTNCVQQDFKYKACFNSILCQQVGYICSSEWLILDIEIFVAIAMGMRVCVCVLVCTWLHCFNKLLCFYQQEPFWAFVISYVINAIKXRSSYLPTDYCTSSMFHILFLLLTILXCLI

SEQ ID NO: 276111 - protein, 80 aa, Glycine max
  Clone ID: PAT_MRT3847_91348C.1.pep
NTLNNFFILFCNRARSKGDSGMLIYCIVAFNSFTIMFIYLQSHLLDNYLVSSNHYLPYSHFMSVVRFILLIYFSSNTLLY

SEQ ID NO: 276112 - protein, 90 aa, Glycine max
  Clone ID: PAT_MRT3847_91349C.1.pep
CIESQRLQARQKQLLDAFIQLLAGAIDAKSPYTGGHCQRVPVLTLMIAEAAAASQTPAFKGYQPSEDEWEALHVAAWLHDCGKVTTPEYV

SEQ ID NO: 276113 - protein, 43 aa, Glycine max
  Clone ID: PAT_MRT3847_9134C.1.pep
LVFELLFCPPLLGLDERAIVVRVQSHELCTLKPMVWCVSLLKK

SEQ ID NO: 276114 - protein, 261 aa, Glycine max
  unsure (1)..(261): unsure at all Xaa locations
  Clone ID: PAT_MRT3847_91350C.1.pep
HASAHASETIEGAFGRKISEIFENFEEVPVASGSIAQVHRASLKYRYPGQQAKPLVVAVKVRHPGVGESITRDFAIINLVAKSSKFIHALNWVRLDESVQQFAVFMMSQVDLAREAAHLSRFIYNXSARGDVSFPKPVYPLVHPAVLVETYENGESVSHYVDELQGHERIKSALAHIGTNALLKMLLXDNFIHADMHPGNILVRNKPHKRLFKSKPHVIFLDVGMTAELSGSDRVNLLEFXXAVAHRDGRTAAECTLKLSK

SEQ ID NO: 276115 - protein, 111 aa, Glycine max
  Clone ID: PAT_MRT3847_91351C.1.pep
HDTKKSTKFQYNRDPFLSSLLQEKPTKQNRNLNIIRDMVEKNKRSSWFSKRLKRESQRWKYLGAAIFKWKSLSSFPVSFFNHVAFKILSLFEAIFLVLTACFFYLMCGCRF

SEQ ID NO: 276116 - protein, 58 aa, Glycine max
  Clone ID: PAT_MRT3847_91352C.1.pep
KKKHLKGEENRKEKCIEFFPQAKINLYDNGMLVDTITRNIVTTLNCFGYNILVKVVKC

SEQ ID NO: 276117 - protein, 52 aa, Glycine max
  Clone ID: PAT_MRT3847_91353C.1.pep
KEKKAEISPFFREEEFFTGLNKKGLFLLKQVTLLFKAWTNVYCKNFYLFIVL

SEQ ID NO: 276118 - protein, 88 aa, Glycine max
  unsure (1)..(88): unsure at all Xaa locations
  Clone ID: PAT_MRT3847_91354C.1.pep
LINEEYKIWKKNSXFLYDLVITHALEWPSLTVEWXPDRHEPPGKDYSLQKSSWAPHFENEPITMLAXSSSDDMPPYDTPDGFAVQRPV

SEQ ID NO: 276119 - protein, 554 aa, Glycine max
  Clone ID: PAT_MRT3847_91355C.1.pep
MEKNTPLLTLRREEKQENAMGALYMSVMEILLFLFIFICSLTPISQSQGLHQSPPFLFGTSSSSYQYEGAYLSDGKGISNWDVFTHKPGSISDESNGDVAVDQYHRYLEDIDLMEAIKVNSYRFSISWARILPKGRFGEVNLAGINYYNRLIEALLLKGIQPFVTLFHFDIPQELEDRYGGWLSPQSQEDFQLFADICFKSFGDRVKYWVTFNEPNYLVPLAYRLGIFPPLRCSSKFGNCSEGDSEKEPFVAAHNMILSHAAAVDLYRNKYQTEQGGEIGIVLHCDSFEPLSNSTADKLATERAQSFSINWILDPILFGKYPKEMEMILGTTLPKFSSNDKAKLRQGLDFIGINHYASYYVRDCISSVCESGPGVSTTEGLYQRTTIGELTPFDWLSVYPLGMKSILMYLKDRYNNTPMFITENGYGNLYDPDLTEEEYLNDFKRIEFMSGHLDNLMAAIREGADVRGYFAWSLLDNFEWLYGFSVRFGLHHVDFSTLKRTPKLSAIWYEHFIENYKLTDSIVPEHGREKGIWNKPTTQLRTLVSPEPRMNNLD

SEQ ID NO: 276120 - protein, 85 aa, Glycine max
  Clone ID: PAT_MRT3847_91356C.1.pep
VDLLGVVIDKARSSPFLPPPPPRPRWLPSSSSSTKSATCSSSSSSKSATCSSCSSYSSSSSSSMPRRLMPQTQTLGFLECECWCC

SEQ ID NO: 276121 - protein, 41 aa, Glycine max
  Clone ID: PAT_MRT3847_91357C.1.pep
ASTSESPSSYGASEVMYTPIRCHARAYASITNVSIVWTITI

SEQ ID NO: 276122 - protein, 74 aa, Glycine max
  Clone ID: PAT_MRT3847_91358C.1.pep
NAPGAPLAQKIGQFSPLKKGKARFPRKLYVYPSPFAGGTHLTGFWVFKKKKKKKKKKKKKKKKKKKKKKKKKKK

SEQ ID NO: 276123 - protein, 106 aa, Glycine max
  Clone ID: PAT_MRT3847_91359C.1.pep
FPVHITQFGSALLHHLKGKIRTLSLDSRQLYFRRKRGGKRKENMAAEEQTPQIQNTYQPHRQSRNKTAYAITPPNCSSRAPLRMNRILLALMILRLCLNKPNIPLP

SEQ ID NO: 276124 - protein, 78 aa, Glycine max
  Clone ID: PAT_MRT3847_9135C.1.pep
DGHSKTRAASIDSQFSGDFNHVSPPHIYSVGMPQPMYDSYHQFQQYPPYEVDIKTERQMFVNDIPTRRDSTISTFSTS

SEQ ID NO: 276125 - protein, 71 aa, Glycine max
  Clone ID: PAT_MRT3847_91360C.1.pep
MDLKIQHIKWVGNIYQKFEAVCQEVDDIVGQDAVKYLENQVQNVGDSVKKFYSGVVHELLPFPTSADSDES

SEQ ID NO: 276126 - protein, 70 aa, Glycine max
  unsure (1)..(70): unsure at all Xaa locations
  Clone ID: PAT_MRT3847_91361C.1.pep
XXSXKVKPCLVPSXXXLSXFXPRTYRLXRRIXXDLSNNXTTWHQLNHLQVRLILTWLXFNSSSXSAXNSS

SEQ ID NO: 276127 - protein, 162 aa, Glycine max
  Clone ID: PAT_MRT3847_91362C.1.pep
TFSPEAPFHQSFRFQENEINIWREVLELVANLSGWDIRYKQQHAVIEEIVQQIKNILGSKFSTLPYDNLVGMESHFAKLSKLICLGPANDVRVVGITGMGGIGKSTLGRALYERISHQFNSLCYIDDVQFKLPFNRRIQSVTTGSEIPRWFNNQHEGNVSLD

SEQ ID NO: 276128 - protein, 122 aa, Glycine max
  Clone ID: PAT_MRT3847_91363C.1.pep
MVQVVSLSTLATCGNSRLCGSSPSWMAPFEPYKRSQITSSNGRHLVWNNSVQSLFLTRHSDFRAEAAWMFRGGEQGLDASSEHSESANEDILMFFFQLDLATRVQYALNMEQYDIAKQLRNK

SEQ ID NO: 276129 - protein, 73 aa, Glycine max
  unsure (1)..(73): unsure at all Xaa locations
  Clone ID: PAT_MRT3847_91364C.1.pep
RVEHGEGNPGXEAEASFNQLVLRSWEDSLRALXPEMMVWAMPXELHIVKRSIESLAAKAFTGPNLFGWAVLER

SEQ ID NO: 276130 - protein, 236 aa, Glycine max
  Clone ID: PAT_MRT3847_91365C.1.pep
MVSRENTNWLFDYGLIDDIPVPDATFGVNSSAFTWPPNALNASSNVGVEIDGSLGDSDSLKESGSKKRVRSESCAASGSKACREKLRRDRLNDKFVELGAILEPGRPAKTDKAAILIDAVRMVTQLRGEAQKLKDTNQGLQEKIKELKAEKNELRDEKQRLKAEKEKLEQQLKSLNAQPSFMPPPAAIPAAFAAQGQAHGNKLVPFISYPGVAMWQFMPPAAVDTSQDHVLRPPVA

SEQ ID NO: 276131 - protein, 48 aa, Glycine max
  Clone ID: PAT_MRT3847_91366C.1.pep
NGERKIVLGRNIHTTCLEVTEPDIDDEVTAEREAYMAGVLAKYKKFLT

SEQ ID NO: 276132 - protein, 117 aa, Glycine max
  Clone ID: PAT_MRT3847_91367C.1.pep
DLCLITCSTSCLRLTKLGALLASGQLSDIVGVPTFKRTEEHALSLDIPLSVLYNIPRLDLAIDGTYEVDPDLNLVKGRGGSLLREKMVEASSDKFIVCRHDTMLVHVSCGSWLAMQV

SEQ ID NO: 276133 - protein, 107 aa, Glycine max
  Clone ID: PAT_MRT3847_91368C.1.pep
QPKLLVIFVFSLRRIDINYATVPGDYTVFVFDKKKKKKKKKKKKKKKKKKKKKKKKKKKKKKKKKKKKKKKKKKKKKKKKKGGPLLKNPILSPRGGKHIFFFWGPKN

SEQ ID NO: 276134 - protein, 49 aa, Glycine max
  unsure (1)..(49): unsure at all Xaa locations
  Clone ID: PAT_MRT3847_91369C.1.pep
NXDDRXLXXQXXDYFFLQXESGKRKRXRXSNKLGIASELNPXFSEKXXN

SEQ ID NO: 276135 - protein, 89 aa, Glycine max
  Clone ID: PAT_MRT3847_9136C.1.pep
EIQGGICISKGGPRFFFSFNRGNWKKISVFWVGFPHGKPFTYIEKGPFFLLVGKKFLHSLKGGELYVKKLPLFGGVHKKKKVKKGRVFS

SEQ ID NO: 276136 - protein, 69 aa, Glycine max
  Clone ID: PAT_MRT3847_91370C.1.pep
FSDISIYIEGQGLIARAHKVILGIYSVLLTKMFTNGMCESNSPEVCLKDVSSAALNAMLEFMYCMDLKY

SEQ ID NO: 276137 - protein, 79 aa, Glycine max
  unsure (1)..(79): unsure at all Xaa locations
  Clone ID: PAT_MRT3847_91371C.1.pep
FCWIKFTRKNMNHAGRGLVNDTYKMDLILVHPPHLIALACIYIASVLREKDTTAWVEXLRVDMNVXXNISMEILVFMKA

SEQ ID NO: 276138 - protein, 94 aa, Glycine max
  Clone ID: PAT_MRT3847_91372C.1.pep
ASFPLRLRPPILPRRDILRRWQNRNFPRHRRHTSKTLRPGVLVSRKSSDNSVVLQRTQTSFYLISGEIWLPISGHHLINLTSVTLINIFFYISV

SEQ ID NO: 276139 - protein, 367 aa, Glycine max
  unsure (1)..(367): unsure at all Xaa locations
  Clone ID: PAT_MRT3847_91373C.1.pep
TDTAPSHRRKIPFAFLEFAALILYLSRSRKIAPGNVGNRICQTHPTTMEYRNKLVLAPMVRVGTLPFRLLAAQYGADITYCEEIIDHKMLKCERRINELIGSTDFVEKGTNNVVFRTCDEEKDRVVFQIGTSDAVRALATAQLVCNDVAAVDINMGCAKSFSVSGGMDAALLTKPDHIQDFFTTSGRNXVIKSEVMVDLAELYRLXRIPPVSYAGIFLMSFGAQEFRVRICLTWFRIWNTPTIVGTLQEISTTHQLIILEFDLMSGICPGAGDSSVMVARGALWNASMFSPEGKVSYEAVKREYIRKCILWDNDLKSTKHTLKEMIMHYSCLELPEGKAVIKSESMADLAELYGQREYYQLVKPGFF

SEQ ID NO: 276140 - protein, 37 aa, Glycine max
  Clone ID: PAT_MRT3847_91374C.1.pep
SVSKILLGIPGNDKCAECSAPDPYWSSLNLGILLCID

SEQ ID NO: 276141 - protein, 28 aa, Glycine max
  Clone ID: PAT_MRT3847_91375C.1.pep
RYLSWFNYTFTMLLVMFQFLCKCIIKPR

SEQ ID NO: 276142 - protein, 148 aa, Glycine max
  Clone ID: PAT_MRT3847_91376C.1.pep
EFIQFFSSYFSSLEWDNIVNSGTLNDVLTEFYRYWSLKEAYVKAIGSGLTEGLNKVEFSHTRWTNISAKVDGKTMTEWRFWLFELGDRHCVSIARVHPISATTSYKTTLKKVDFTEEEYTLGLHLPNVGIFKLDVEQLISILQKASDF

SEQ ID NO: 276143 - protein, 39 aa, Glycine max
  Clone ID: PAT_MRT3847_91377C.1.pep
NIPQQHRKWSKTLLLLGKLEIFETFFTIKTIFIPHKKQT

SEQ ID NO: 276144 - protein, 79 aa, Glycine max
  Clone ID: PAT_MRT3847_91378C.1.pep
PLAMAYQQHYRGANTSVPTTSSSDPSNTHTNRSNRYNNTGLRRSLARPRSLKDLIRAPIWRFNDCVSVARWWLVQGGDP

SEQ ID NO: 276145 - protein, 57 aa, Glycine max
  unsure (1)..(57): unsure at all Xaa locations
  Clone ID: PAT_MRT3847_91379C.1.pep
MHNYHEEEHREADRTNTPIPTELLELLKPIPAXAKINELSKQMDDTQYPKTFLYNEN

SEQ ID NO: 276146 - protein, 77 aa, Glycine max
  Clone ID: PAT_MRT3847_9137C.1.pep
NLQGVNIKGLWACFITFLGRLFYFFNQKEFGGPGPDNLVQGANIFLVVKPISGNWLPFGEPGFQFLLGGKKIKCGVP

SEQ ID NO: 276147 - protein, 74 aa, Glycine max
  unsure (1)..(74): unsure at all Xaa locations
  Clone ID: PAT_MRT3847_91380C.1.pep
XPXHLGWCXSXPLIXWKCXXXLKVVPVVXXAFMXXKKYYTXXAILDGNLFRQHGLLYXCXNYPILPXARTVVEX

SEQ ID NO: 276148 - protein, 88 aa, Glycine max
  Clone ID: PAT_MRT3847_91381C.1.pep
ATSGSLFFSPVLVVAHSSGGTDLFCFISIVLFSLFLWIIPVRVFLGLDLFVSNLVCFVWGLRFVFFQCVYSPMLIFFYRAVLLQYDKL

SEQ ID NO: 276149 - protein, 45 aa, Glycine max
  Clone ID: PAT_MRT3847_91382C.1.pep
RGVYLIYLRILEFFTIESLLGASRGRILLGASLNRTLLGASTRRT

SEQ ID NO: 276150 - protein, 67 aa, Glycine max
  Clone ID: PAT_MRT3847_91383C.1.pep
AYVSSWLRRYVAGLVHHAGHGRVGGTSLLSDISSRNGLRSHHAAFSRCRCVITGVCASCNRFSLGRA

SEQ ID NO: 276151 - protein, 88 aa, Glycine max
  Clone ID: PAT_MRT3847_91384C.1.pep
SSTTSTPEKEEATRNKRTPSLFPSPSSPYSPAKHKTTKQPTTTLFFKTPPIQNRRWILSPPPLPPPPLPNPTKTISHYTHPPPTYPPP

SEQ ID NO: 276152 - protein, 42 aa, Glycine max
  Clone ID: PAT_MRT3847_91385C.1.pep
RLREDDRRGTTTFKNHLLIKTSPFVVNIVLFNNLIYCSKYFF

SEQ ID NO: 276153 - protein, 75 aa, Glycine max
  Clone ID: PAT_MRT3847_91386C.1.pep
KKKPRRLSGRKQSDNTYSYHFLLFFPVVIKIITQNGKYHYWLTYVPDIRMEYIFSSFLQLLITICCMILFILGPT

SEQ ID NO: 276154 - protein, 55 aa, Glycine max
  Clone ID: PAT_MRT3847_91387C.1.pep
ISRRRTIHWFSFCNPETTGVNQSMSIQGLQIQSVGSRLLKLEESKTPNLERMCAS

SEQ ID NO: 276155 - protein, 65 aa, Glycine max
  unsure (1)..(65): unsure at all Xaa locations
  Clone ID: PAT_MRT3847_91388C.1.pep
MVCNERLFSESDIPTLPYLPAVLXXTLWLHPSTPIFVXEAMRSCHVEGYYSPVIFTSLISIWAIG

SEQ ID NO: 276156 - protein, 182 aa, Glycine max
  Clone ID: PAT_MRT3847_91389C.1.pep
NSARGWTRTGERQAARMRVRYLKAVLRQEVAYFDLHVTSTSEVITSVSNDSLVIQDCLSEKVPNFLMNASMFVGSYIVAFALLWRLAIVGFPFVALLVIPGFMYGRTLMGLASKIREEYNKAGTIAEQAISSIRTVYSFVGESKTIDAFSEALQGSVELGLRQGLAKGLAIGKHGVVFAIWA

SEQ ID NO: 276157 - protein, 45 aa, Glycine max
  Clone ID: PAT_MRT3847_9138C.1.pep
FCRLLETVPCCSFLAPVPCDILVVPVPLCCRIATDAWSSREFVPG

SEQ ID NO: 276158 - protein, 89 aa, Glycine max
  Clone ID: PAT_MRT3847_91390C.1.pep
TWEQSRTTCPDHSRNFTGDMTFIFLSLEGPTKHNTDIPPYLLTPSITYLTSTCLPWKHNLLPRHVILLWASDLLDHLEPQRKDDISIDT

SEQ ID NO: 276159 - protein, 56 aa, Glycine max
  Clone ID: PAT_MRT3847_91391C.1.pep
WSEPIWCRTRSRDTQRRDAVRGAYTASAPWRPYERVSRSHSCSIIFSRCEPPPRYL

SEQ ID NO: 276160 - protein, 43 aa, Glycine max
  Clone ID: PAT_MRT3847_91392C.1.pep
KKKRVFFLFKNKKSPFLSKAANFILLKAKRKANKKGSDQIIEI

SEQ ID NO: 276161 - protein, 61 aa, Glycine max
  Clone ID: PAT_MRT3847_91393C.1.pep
SDIYPWNLRDTPSDVGQLLGMLLKLINAMHAVDFEPFCGYSLLPSVLILHYDGEMYALVVY

SEQ ID NO: 276162 - protein, 360 aa, Glycine max
  Clone ID: PAT_MRT3847_91394C.1.pep
MDYHTTVLLLITFVSATIILIFIRRLFNQTSESEYAKLPPGPRPFPIIGNILELGTNPHIALTKFSKIYGPLMTFKLGRITTIVISSPQVAKEVLLENGQVLSSRTIPHSVHALDHHIYSTVWLPPSAQWRNLRRVCATKIFSPQLLDSTQILRQQKVKDLLDFVKERCKKGGVVDIGEVVFTTILNSISTTFFSMDLSDSTSEKSHEFMNIIRGIMEEIGRPNVADLFPILRPLDPQRVLARTTNYFKRLLKIIDEIIEERMPSRVSKSDHSKVCKDVLDSLLNDIEETGSLLSRNEMLHLFLDLLVAGVDTTSSTVEWIMAELLRNPDKLVKARKELSKAIGKDVTLEESQILKLPFL

SEQ ID NO: 276163 - protein, 104 aa, Glycine max
  unsure (1)..(104): unsure at all Xaa locations
  Clone ID: PAT_MRT3847_91395C.1.pep
MRALTSSSSTFIPKRYSFIVFLSILFALRSSSGGCSEYHHHHAPMATIGCLHDSQGSQDSVQSEAHAQFAXVDEYMKKHNSLLEFSTVVMTHEHVVAGTLHHRT

SEQ ID NO: 276164 - protein, 79 aa, Glycine max
  Clone ID: PAT_MRT3847_91396C.1.pep
MPEEEVLELKFRLYDGSDIGPFRYSPASTIAMLKDRIFADWPRGFFFFFFFFSFFFFFFFLAFLTSSTSIEMVRLGFVC

SEQ ID NO: 276165 - protein, 81 aa, Glycine max
  Clone ID: PAT_MRT3847_91397C.1.pep
NVSLVFPLRNQAPQFITCLGSQCLCFRRRLYKARLFYTAYLNATVWVEQTSSGPRLKLCRLSYMAGSIYHALGTCLARDWF

SEQ ID NO: 276166 - protein, 221 aa, Glycine max
  unsure (1)..(221): unsure at all Xaa locations
  Clone ID: PAT_MRT3847_91398C.1.pep
MTYSLMVPISYINTRKTHKKEFLSQYPTPAKRRPPPLLLSPLPMPVPPPPXPVPLPTPLPIPTPRPCPPPPXTPPLPLPEPIPTPEPPPPFPIPLPPPPPNPIGGGGVGAESVDGSGGVRDVGGAGRERDGGGVEGAKGDIGDGIVEGDGGAGTCAEMMKRRRKRRKRRRKTRMAKLMQRRSRRKKMMGRMMKRRRKRRKSMTKLMQRKSRGKKMMGKMKG

SEQ ID NO: 276167 - protein, 540 aa, Glycine max
  Clone ID: PAT_MRT3847_91399C.1.pep
DIASWNAMLLGFAQSGFLDRLSCLLRHMRLSGIRPDAVTVLLLIDSILRVKSLTSLGAVYSFGIRIGVHMDVSVANTLIAAYSKCGNLCSAETLFDEINSGLRSVVSWNSMIAAYANFEKHVKAVNCYKGMLDGGFSPDISTILNLLSSCMQPKALFHGLLVHSHGVKLGCDSDVCVVNTLICMYSKCGDVHSARFLFNGMSDKTCVSWTVMISAYAEKGYMSEAMTLFNAMEAAGEKPDLVTVLALISGCGQTGALELGKWIDNYSINNGLKDNVVVCNALIDMYAKCGGFNDAKELFYTMANRTVVSWTTMITACALNGDVKDALELFFMMLEMGMKPNHITFLAVLQACAHGGLVERGLECFNMMTQKYGINPGIDHYSCMVDLLGRKGHLREALEIIKSMPFEPDSGIWSALLSACKLHGKMEMGKYVSEQLFELEPQVAVPYVEMANIYASAEMWEGVAAIRRNMKYLQVRKSPGQSIIQVNGKPTIFTVEDRDHPETFFAKKLCEVAIMMFWVLWWPRNEKVWEGAAEAQLLAE

SEQ ID NO: 276168 - protein, 46 aa, Glycine max
  Clone ID: PAT_MRT3847_9139C.1.pep
ICLLSSENEASINDCHSNTILNLCFKNPFSEDLQFFTIFTEMPFVF

SEQ ID NO: 276169 - protein, 291 aa, Glycine max
  Clone ID: PAT_MRT3847_913C.1.pep
ALPYCLKALEIHMKRLGMNSVEVAHDRKLLGIVYSGLEEHEKALEQNVLAQRILKNWNLNADLLRAEIDAANMMIALGRYDEAVCTLKGVVQQTEKDSETRALVLVSMAKALCNQEKFVDCKSCLEVSLGILDKRERISPVEVAEAYSEISMQYETMNEFETAISLLKRTLALLEMQPQEQHSEGSISARIGWLLLLTGKVQQAIPYLESAAERLKDSFGPKHFGVGYIYNNLGAAYLELDRPQSAAQMFAVAKDIMDTSLGPHHADTIEACQNLSKAYGEMGRYGWFLLV

SEQ ID NO: 276170 - protein, 97 aa, Glycine max
  unsure (1)..(97): unsure at all Xaa locations
  Clone ID: PAT_MRT3847_91400C.1.pep
LSSPHMLFFLFFPGTKKSEYIPNPPGGLFSCFFFHCSNYFFLIIGGVRVLGIQMRVGGAIIHNIKIGYIXXRDIYAYINVGETNKKQNLQGSVGNVM

SEQ ID NO: 276171 - protein, 50 aa, Glycine max
  unsure (1)..(50): unsure at all Xaa locations
  Clone ID: PAT_MRT3847_91401C.1.pep
EVINSIECQWLCCFTIWVRVXWEEVDNGSQPVRWLCPLVFIKKECLVNGK

SEQ ID NO: 276172 - protein, 78 aa, Glycine max
  Clone ID: PAT_MRT3847_91402C.1.pep
KILSKKLMALGKSWGSQKQNQKGGLINPFPSKKTKTPLTPDVCSLEKICLLGPGQSCMVQLKIKLFPEKILGPPEKFL

SEQ ID NO: 276173 - protein, 88 aa, Glycine max
  Clone ID: PAT_MRT3847_91403C.1.pep
LARGVHHIDYYKTTSTGRLPVKWMAPEALFDRVYTHQSDVWSFGILLWEIFTLGGSPYPGIPVEELFSLLREGHRMDRPPHCPPELYG

SEQ ID NO: 276174 - protein, 53 aa, Glycine max
  Clone ID: PAT_MRT3847_91404C.1.pep
LISICFFGGNLKGNGVKNAPQQKWAGRMFLAILKSCDKLTFSYPHPQIRKPMN

SEQ ID NO: 276175 - protein, 88 aa, Glycine max
  Clone ID: PAT_MRT3847_91405C.1.pep
ASRRARQVRACGIAPQLSFPWRDSISCPFLAGVRVRLGLQRWRETIVWRSPPKTPTVVSIVVTYPFDPHLPSSPIRRPRKRNAWVWPG

SEQ ID NO: 276176 - protein, 31 aa, Glycine max
  Clone ID: PAT_MRT3847_91406C.1.pep
IIEKFFTIGHPTNYISVGTLRYDIQFTYVIC

SEQ ID NO: 276177 - protein, 183 aa, Glycine max
  Clone ID: PAT_MRT3847_91407C.1.pep
EAKIFVKSLRSTFSFLEDVRVPTIAVIEGVALGGGLEMALACDIRICGENALMGLPETGLAIIPGAGGTQRLPRLVGKAIAKDIIFTGRKIDGKEALSLGLVNYCVPAGEAYSKALAIAHDINQKGPVALRMAKRAINEGVETDLTSALELEEDCYDQVLNTKDRLEGLAAFAEKRKPSYTGE

SEQ ID NO: 276178 - protein, 88 aa, Glycine max
  Clone ID: PAT_MRT3847_91408C.1.pep
MESSLVEDIVIVGAGIAGLATSLALHRLGVPSLVLEYSDTLRVTGFALTTWTNAWKALDALGVGTILRHQHVQLKENVTKSLILRQQT

SEQ ID NO: 276179 - protein, 59 aa, Glycine max
  Clone ID: PAT_MRT3847_91409C.1.pep
LNHHLSMHLANVKALKSRQKQDAFAERSVLFLADIVGVEMRFFVQDNFSFTLSKGVVVT

SEQ ID NO: 276180 - protein, 199 aa, Glycine max
  unsure (1)..(199): unsure at all Xaa locations
  Clone ID: PAT_MRT3847_9140C.1.pep
MTRSFFRPDIGGLRLYWLQTDMMETLCELWGENYSXEPATNEICTKHEGQYLLKHKALTEERIPHCSKLSGXCSHAAIREDIRLNLGPMDELSNLLNGDILXCECEGDNPDDNFSRQLADYIIYIIDEYGGDTNPREGGPEITQADLLERNRTDRAHASEADLGGMQCDALALRDGGPFVIAQTKRKIGVXEIGNLVLS

SEQ ID NO: 276181 - protein, 85 aa, Glycine max
  Clone ID: PAT_MRT3847_91410C.1.pep
MVTIRPDEFSTIIRERIEQYDLEVNIVNQGPVLQLGHGIDRMHGPDEVMAGELVYFEEGTIGIAVSLESKKVGVVVMLYGSMIRD

SEQ ID NO: 276182 - protein, 124 aa, Glycine max
  Clone ID: PAT_MRT3847_91411C.1.pep
TGWTATPWLVFQASTDCFISSEECVPSTYCVLNPQDPCVVNRWMGKLPFPHGPHLSVKRMPLSIGGGAGAKNAILMNLPNAVLSMWRYYAGDLVLEDYKMTCPYIKCTACFFIALGNLADDTIN

SEQ ID NO: 276183 - protein, 198 aa, Glycine max
  Clone ID: PAT_MRT3847_91412C.1.pep
MSMRSIGTSLSLMVWLVIATSALAKSDNPPVLDTQGNPLEPGKDYYIKPAITDVGGRVTLLSRNNPCPLYVGQENSDAAEGLPLFFTPFAEEDDVVKVNRDFKVTFSAASICVQGTNWNLAEKDSESGRRLIAASGRDDYFRITETPIKGSYYIGWCPTDVCPFCRFDCGIVGGLRENGKILLALDGNVLPVVFEKAY

SEQ ID NO: 276184 - protein, 140 aa, Glycine max
  unsure (1)..(140): unsure at all Xaa locations
  Clone ID: PAT_MRT3847_91413C.1.pep
MAPFPTSHYFRAFTFSILFLKTLAFDPIPLFSYAGFGKDLKFKPNVALFGNAKVLNEGSGIHFSGFGSSRGTGRIMYKKPIKLSQGKPRQLVSFSTYFAFSVSLEDXGGLAFVMAPKGSQGNVFYQSSSSGLNDGKIEVG

SEQ ID NO: 276185 - protein, 54 aa, Glycine max
  Clone ID: PAT_MRT3847_91414C.1.pep
VLILEVHLNRGIIVKIVTKYIYMINKKYFNRWFYYALSLLKCTNSLERSQVQSF

SEQ ID NO: 276186 - protein, 69 aa, Glycine max
  Clone ID: PAT_MRT3847_91415C.1.pep
IVSYSYSATFSQQVVLTPYFHILYLSQLTQCDPKFIHPICHRASRHSSCGANGFSLPHACANAWPNEKK

SEQ ID NO: 276187 - protein, 62 aa, Glycine max
  Clone ID: PAT_MRT3847_91416C.1.pep
MLVSCPRYSFLEALFFGHILKFPQSFRNFCSQNWVFDRRRQNPFNHSVLMCCVCKNPLLHFF

SEQ ID NO: 276188 - protein, 96 aa, Glycine max
  Clone ID: PAT_MRT3847_91417C.1.pep
EPSKECFTAQQSTFSHISSNDNAIIVLQSTLIILPFFRPIISILDLNSSKHFISLYTIRQIMQESRSSAVHYKICFLDYINTLSSLESSSESDSDE

SEQ ID NO: 276189 - protein, 64 aa, Glycine max
  Clone ID: PAT_MRT3847_91418C.1.pep
QQLQVSKCSMDLLCSKVFITISLIHTIIFNPCKGFQQANFRRGNLSPDSSNFFRHKKGGRKKCT

SEQ ID NO: 276190 - protein, 68 aa, Glycine max
  Clone ID: PAT_MRT3847_91419C.1.pep
KIYPFSFPFFLRVHPFNGSFYILVRAYNFIIPFTYHEICIKKSFYRLNIILSLSLYLQFIYSLGYQLP

SEQ ID NO: 276191 - protein, 153 aa, Glycine max
  Clone ID: PAT_MRT3847_9141C.1.pep
TLSHSHSLFHFFFLPSFEDDALVLLFSKCRTKMTEMPNEKLKGYASFFLSMCFFVDFFHSMFIVSFKAIIFISKLHECASFSLSMCFFFFTACSLFLLKLPFLSQKASIFISKLHECASFSLSMCFFFHCMFVISSKATIFIAKSFDFYLQTP

SEQ ID NO: 276192 - protein, 76 aa, Glycine max
  Clone ID: PAT_MRT3847_91420C.1.pep
VVKINEPGATNTNGSTSCRYGVSSTECSKAVQRNCRINKVIKLIKFVLQGPLCGTGRPYKGYPLVKGGRCRPKLCH

SEQ ID NO: 276193 - protein, 82 aa, Glycine max
  unsure (1)..(82): unsure at all Xaa locations
  Clone ID: PAT_MRT3847_91421C.1.pep
GTGSKKKIGPKIICLIRGGVKNHLQNPFXLXKVFQKGGPLSRAGSENLKNFTNFFGFPLILRGLNTPPQGFGNPGKCFEGKS

SEQ ID NO: 276194 - protein, 135 aa, Glycine max
  Clone ID: PAT_MRT3847_91422C.1.pep
LSQAPKERGGGSPRGGAPRAGVGLWAPREGEGESPQKSPREFCPLFFHSQPKKQGFDIGKEKRHWLESWQQTTRDKKKQMPRLWKQGKKLPLKKKGWGSPPFRPMLVKPRRGFFFFLKKEKKEENIRKEGGHQGT

SEQ ID NO: 276195 - protein, 116 aa, Glycine max
  unsure (1)..(116): unsure at all Xaa locations
  Clone ID: PAT_MRT3847_91423C.1.pep
DGYIYDDSRGRSRXVDYQYDTRCRSSDRDRYYDDGQHSSXRRADAKAEHQSLDARIERKLSEQNMGAPPSYEEADSESGSPVHSERDEDTIAVPATRDCCTNVNDDPRQTSATTGS

SEQ ID NO: 276196 - protein, 331 aa, Glycine max
  Clone ID: PAT_MRT3847_91424C.1.pep
MLSAINYSLLATIFLVLTLIFPSEGQLSSTFYSSTCSNVSSIVRSAVQQALQSDSRIGASLSRLHFHDCFVNGCDASILLDQGGNITQSEKNAAPNVNSIRGFDVVDNIKSSLESSCPGVVSCADILALAAESSVSLSGGPSWNVLLGRRDGLTANQAGANSSLPSPFESLANVTSKFSAVGLDTTDLVALSGAHTFGRAQCQFFSQRLFNFSGTGSPDPTLNSTYLATLQQNCPQSGSGSTLNNLDPSTPDTFDNNYFTNLLINQGLLQTDQELFSSNGSSTISIVNNFANNQSAFFEAFVQSMINMGNISPLTGSQGEIRTDCKKLNGS

SEQ ID NO: 276197 - protein, 286 aa, Glycine max
  Clone ID: PAT_MRT3847_91425C.1.pep
MLSWCLLDDDKQARSDVYINLPALQKLDTMLIEILDSFKDTEFWYAEQGSISGNSTRSRGGSFRRIVQRKDEKWWLPVPCVHPGGLSDKSRKHLNEKRDCANQIHKAAMAINSSVLAEMDIPETYMSNLRLRRRQKGGDTIYRCMYSADKFSPDHLLDCLKISSEHEALELADKVESSMFTWRRKACLSHSKTSWNKVKDLMADTDRSDKNYILAERAETLLFCLKQRYPELSQTSLDTCKIQYNQDVGKAILESYSRVLEGLAFNIVAWIEDVLLADKSMRNQNV

SEQ ID NO: 276198 - protein, 286 aa, Glycine max
  Clone ID: PAT_MRT3847_91426C.1.pep
MASRHRVHREPLNARRGYPPEGPYARVAPMPRPLPPIPPHPSVLEEELEFQHAEMRRLVADNRRLIDDRMALQRDLGAAKEELHRMNLAIGDIRAEHEAHSRELVEKGMKMEADLRANEPLKNEVMQLRSEVKKLNNLKQELTGKVQTLTQDVARLQADNQQIPMMRAEIDGLHQELMRARTMVDYEKKANMEFMEQRQSMEKNLVSMAREVEKLRAELASADSRHWGAGMSGGPYGTKFGSPEGFPAPYADGYGSVHLGAADKGPMYGAGAASRKEHEKPHMNRR

SEQ ID NO: 276199 - protein, 75 aa, Glycine max
  Clone ID: PAT_MRT3847_91427C.1.pep
VIESMENMKMNNDERFAQKGVPVHSQVMKIKQESEKIVDWSPGKPEIRSVLREISRQISRSPLGISGQPISVGES

SEQ ID NO: 276200 - protein, 118 aa, Glycine max
  Clone ID: PAT_MRT3847_91428C.1.pep
MEAEVLRATMSPPPFPLSGSSTKTHRACFPFNPISWNGKTLGLSLQAFPPSSSGHVPSEKSDDGSENLTLESIRRSLIRQEDSIIYSLLKRAQHLYNAKTYDPENFSMDGFHGSVVEY

SEQ ID NO: 276201 - protein, 90 aa, Glycine max
  Clone ID: PAT_MRT3847_91429C.1.pep
MRREDTCERVEKALRECHRRVPAGPSRDSACRHLNQGLAMCLVSLACPGESEAVRTLCSSAGTAHKRHQCQQAQLSLSLCLSSRQNNSLT

SEQ ID NO: 276202 - protein, 90 aa, Glycine max
  Clone ID: PAT_MRT3847_9142C.1.pep
LSSLFSLHSVCLRLFFSSENSSSKVRKYDYIHHCFELKYSVNLLHLKSMMDSFSENVESLRSLPNQPFTLELNVTSLLSLSIYSQLFPFY

SEQ ID NO: 276203 - protein, 69 aa, Glycine max
  Clone ID: PAT_MRT3847_91430C.1.pep
EFSGVAKVGALISIETCMEIMDLLYEKEEMSILFRSPHSIAASILVYIFPSYFKVPSNISYKQFTISKL

SEQ ID NO: 276204 - protein, 39 aa, Glycine max
  Clone ID: PAT_MRT3847_91431C.1.pep
NLNWVKGCKNKTYSTNQIYQLNKLIFTQIIKSVLFYKIN

SEQ ID NO: 276205 - protein, 82 aa, Glycine max
  unsure (1)..(82): unsure at all Xaa locations
  Clone ID: PAT_MRT3847_91432C.1.pep
VVLHVLSSHKVSISIAELSDMCAGQANEHYTAAHSVIWVQYRXGQHVLWAHMKVLSIRPRAMGRVGVIVHGSKLIGPPSKCP

SEQ ID NO: 276206 - protein, 138 aa, Glycine max
  unsure (1)..(138): unsure at all Xaa locations
  Clone ID: PAT_MRT3847_91433C.1.pep
IKIXNTIFSALFLLCAFTTSYLPLTTGEIYTHRDILHNSHTYFIFYAFPPRGRVXSLPLETXTFPLTVLHTLFWRGFPPILSSXLPIPFICERQLFNILFRIVPXCATTPSKXTIFESFPESPPVKLTLYYNTLPCVV

SEQ ID NO: 276207 - protein, 105 aa, Glycine max
  unsure (1)..(105): unsure at all Xaa locations
  Clone ID: PAT_MRT3847_91434C.1.pep
NKDPYFKTRKKKRGGTPRAHFFRQFSPQGEKTPKGQPPPGSPPIPFGRSHSPPNFSPKNFXRPKRGPLFKPQPPKGGGGGQNPGKGPPKGHKGNPPSGKKGPLSP

SEQ ID NO: 276208 - protein, 70 aa, Glycine max
  Clone ID: PAT_MRT3847_91435C.1.pep
SNSSHSLSQLRIVFLSFRGVDLNSLENPNCSHHSLCFFSSPINDLFGRAKSWQDLHTRDHSLMLVNMISR

SEQ ID NO: 276209 - protein, 80 aa, Glycine max
  Clone ID: PAT_MRT3847_91436C.1.pep
GEEPCFPRTRARVGGGFQLLLPNLLGTIPSTFLPRQMFSYALTLFSVAQFSVFFNPKVYKFVAYAIDPLLGFIHELGCML

SEQ ID NO: 276210 - protein, 77 aa, Glycine max
  Clone ID: PAT_MRT3847_91437C.1.pep
CNHSHGRHRLIPPPPPNCGMIIPLRRRRRCLPQKNDIKYFKSPSYCVVGGRSPACNLRYIIVFLLGSSFALSQVSHC

SEQ ID NO: 276211 - protein, 103 aa, Glycine max
  unsure (1)..(103): unsure at all Xaa locations
  Clone ID: PAT_MRT3847_91438C.1.pep
LVMWNGCSSAFXSREHPHQNECQIQKLNALKPHYRIQSEGGLIETWNPINKPFQCAGVALSRCTLNRNSLRRPFYTNGPHVIYIQQGKGIFGLIYPCCPISFE

SEQ ID NO: 276212 - protein, 47 aa, Glycine max
  Clone ID: PAT_MRT3847_91439C.1.pep
ARKQGFLKFLPKKPTKPPQLLGLQAPHQTLLSTMTSLNKSRLHPQIL

SEQ ID NO: 276213 - protein, 64 aa, Glycine max
  Clone ID: PAT_MRT3847_9143C.1.pep
AGPEFLAFPMRLSILRDRQASGATHRILQGQFHNYKRGLACDNQTPDLTKIPGEHIHGAQRSPI

SEQ ID NO: 276214 - protein, 80 aa, Glycine max
  Clone ID: PAT_MRT3847_91440C.1.pep
KGEKQISLHRKSWCLFGYQDHSYNTSGPRCSCTENIRTLILRTKSTGFTKKLNRVMLTTMFTLNLPIIMQPIADYLPFKT

SEQ ID NO: 276215 - protein, 108 aa, Glycine max
  Clone ID: PAT_MRT3847_91441C.1.pep
TLKFLNTPCYPLKSIGIVGLSPQILTQALQWACRPNPSSYLHILTRDTADPSYLRSLCTRTGLLLNCVGPLQLHGEPVVDDCSAADCYYLDIFCEPEFIERVEAEHHK

SEQ ID NO: 276216 - protein, 128 aa, Glycine max
  unsure (1)..(128): unsure at all Xaa locations
  Clone ID: PAT_MRT3847_91442C.1.pep
SRQRVVPQCNEVQAQMDTTWXKLALDDDETPKGYMLALTIDQSKMALAKDTDGGTILRRDVLANLLTQGYPRAEXDLQPTHRVKGMIEMLATVGIPENTGIAVACAMNRTSRGRARSDIYTIWSEDCE

SEQ ID NO: 276217 - protein, 92 aa, Glycine max
  Clone ID: PAT_MRT3847_91443C.1.pep
TAKGYLYRRCPTSFVLNGLSTTVAPTTNQHTVQYGHYISYYHLVVCIWWFIIYPSPVLWPTTPAPPLIHTRPRPTTLYLRLGHNPRDGVTDL

SEQ ID NO: 276218 - protein, 364 aa, Glycine max
  Clone ID: PAT_MRT3847_91444C.1.pep
MATTRSAPLLKHLLTRLNPSRSVTYMPRPGDGTPRGVTLIPGDGIGPLVTGAVEQVMEAMHAPLYFEKYEVHGDMKAVPAEVLESIRKNKVCLKGGLATPMGGGVNSLNVQLRKELDLYASLVNCFNLPGLPTRHDNVDIVVIRENTEGEYSGLEHEVVPGVVESLKVITKFCSERIAKYAFEYAYLNNRKKVTAVHKANIMKLADGLFLESCREVATRYPGIKYNEIIVDNCCMQLVSKPEQFDVMVTPNLYGNLVANTAAGIAGGTGVMPGGNVGADHAVFEQGASAGNVGNDKVVEQQKANPVALLLSSAMMLRHLQFPAFADRLETAVKKVILEGKYRTKDLGGTSTTQEVVDAVIDALD

SEQ ID NO: 276219 - protein, 56 aa, Glycine max
  Clone ID: PAT_MRT3847_91445C.1.pep
IFFLMSIFPSLQRIDQFNLCCRTSSSYFEPLLFNKSFSFSIVALLLACSNPCAPAP

SEQ ID NO: 276220 - protein, 136 aa, Glycine max
  unsure (1)..(136): unsure at all Xaa locations
  Clone ID: PAT_MRT3847_91446C.1.pep
MQSFPSTLACFTFSTSLVLVLLLFLLPFSRAGLLSEPVSDPNQPLEPGSNTVPAFPVQTQAXPCRLDLSDELFCGVKDACGKDLDRSRCCPVLAAWLFXXHARTALEVFVAPPSFFGDLSMMPDDSQKCVNSLQDS

SEQ ID NO: 276221 - protein, 49 aa, Glycine max
  Clone ID: PAT_MRT3847_91447C.1.pep
YFLGIKPASVKFGPHSGYYCLWSWPFGLCHSCLETRLASQHASFYQFLS

SEQ ID NO: 276222 - protein, 111 aa, Glycine max
  Clone ID: PAT_MRT3847_91448C.1.pep
KMEFWPPTKFFFDFCGKYSGKKEAVGIWGPKDLGKIKTGGAPPFKTPKAVPVGPPPRGLGGPPRGGAFWVRLNFYPINRENISFFFRKLYCFPLPTRGKRLPFLWEKPPFP

SEQ ID NO: 276223 - protein, 54 aa, Glycine max
  unsure (1)..(54): unsure at all Xaa locations
  Clone ID: PAT_MRT3847_91449C.1.pep
LRXGVXRAMXQXGXXPSXVXLKXQXASRXXCXCLACXIDWHHVXCDYKXXTSPA

SEQ ID NO: 276224 - protein, 45 aa, Glycine max
  Clone ID: PAT_MRT3847_9144C.1.pep
MHLVIIYLPNFRQKKNYCSKKIFFLQNNFFFFKYSDWINQINPFM

SEQ ID NO: 276225 - protein, 392 aa, Glycine max
  Clone ID: PAT_MRT3847_91450C.1.pep
MNNDFVWLPSLYSDPELFTYLEPFVFRSSPSSHFLQSMANNSRSFALEEAFGHVSRFAGALLFWLSRASSSNLARSLRGSPPLRFGSVQVKAGSTTNVRVFGFPFGSKWKSSFSSVRLGKISSLAMRMIWREAKRLSLFPVLSLAVALVPPFQNLSSNVLASPLLNPDVQIFGAMDQVPKEVECQGCSFLPCLELSQAKPAVEPKTGIEFPLVLDNLFTGEKNYNLNSEVLVGTGSRTMTIVKIKSLKVYAFGVYVHPYSLCEKLGPKYASISADELNNHHDFYKDLLREDINMTVRLVANCRGMKINSVKDAFEKSLRARLNISIPLGTVIEFKRTVDGRLITKISGNQIGSVHSKDLCRAFFDMYIGDVPVCEQTKKEIGMNAANIIRKC

SEQ ID NO: 276226 - protein, 88 aa, Glycine max
  unsure (1)..(88): unsure at all Xaa locations
  Clone ID: PAT_MRT3847_91451C.1.pep
GKAHTAMAMVQLFNGGYHVITKXXLNXGVNQMRFCVFXXLIXLXILXPLXYIXXKRTRAPLTKHLLVSFLFLLFTWEFFKTTPPFLFA

SEQ ID NO: 276227 - protein, 276 aa, Glycine max
  unsure (1)..(276): unsure at all Xaa locations
  Clone ID: PAT_MRT3847_91452C.1.pep
NWGSIQHVFWVCRIRVPYPFQWGAPTFDAGEAFAMMMASFVALVESSGAFIAVYRYASATPLPPSILSRGIGWQGVGILLSGLFGTGNGSSVSVENAGLLALTRVGSRRVVQIAAGFMIFFSXILGKFGAVFASIPPPIVAALYCLFFAYVGAGGLSFLQFCNLNSFRTIFVLGYSIFMGLSVSQYFNEYTAINGYGPVHKARWFNDIINVPFQSKAFVAGCVAYFLDNPLPKKEAAIRKDRGKHWWDKYRSFKTDTRSEEFYSLPFNLNKYFPSV

SEQ ID NO: 276228 - protein, 85 aa, Glycine max
  Clone ID: PAT_MRT3847_91453C.1.pep
MNSRTLTILCAFQFNDIINVPFQSKAFVAGCVAYFLDNTLHKKEAAIRKDRGKHWWDKYRSFKTDTRSEEFYSLPFNLNKYFPSV

SEQ ID NO: 276229 - protein, 131 aa, Glycine max
  unsure (1)..(131): unsure at all Xaa locations
  Clone ID: PAT_MRT3847_91454C.1.pep
SHXPNWXFAXCTAQXXXXRPLXRXKAXXXHLQXQKGXFXIGLGXQPPXPXHSPGGQLLXSXHXLRFLXXXXHCCXLXHXGTXTSHSXXVXLSRTAQHSTGSTTXTQQGXNAAQASATXAXVXLRXXQSRYX

SEQ ID NO: 276230 - protein, 109 aa, Glycine max
  Clone ID: PAT_MRT3847_91455C.1.pep
REDERQEDAHALAQVLKGLCKGMCIDMNIHLCHVLGHMHMNVCINVGDRDLDRLRVCLHDHDDDDLKHMHEHVRVHDGYRELYGDVPHNHRNSAGLDHDQDGDGDGYVK

SEQ ID NO: 276231 - protein, 540 aa, Glycine max
  unsure (1)..(540): unsure at all Xaa locations
  Clone ID: PAT_MRT3847_91456C.1.pep
MAGGGGAPAPKIDEPQPHPPKDQLPNVSYCITSPPPWPEAILLGFQHYLVMLGTTVLIPTALVPQMGGGNEEKAKVIQTLLFVAGINTLLQTLFGTRLPAVIGGSYTYVATTISIILSGRFSDEPDPIEKFKRIMRATQGALIVASTLQIVLGFSGLWRNVARLFYGARFLSPLSAVPLVSLVGFGLYELGFPGVAKCVEIGLPELILLVFISQFVPHVLHAGKHVFDRFAVLFTIAIVWLYAYLLTVGGAYNHAAPKTQSXCRTDRSGXVKSAPWIRVPYPFQWGAPTFDAGEAFAMMMASFVALVESSGAFIAVYRYASATPLPPSILSRGIGWQGVGILLSGLFGTGNGSSVSVENAGLLALTRVXGSRRVVQISAGFMIFFSILGKFGAVFASIPPPIVAALYCLFFAYVGXGGLSFLQFCNLNSFRTIFVLGYSIFIGLFVSQYFNEXTAINRYGPVHTKARWFNDIINVPFQSKAFVAGCVAFLLENTLHKKEAAIRKDRGKHWWDKYRSFKTDTRSEEFYSLPFNLNKYFPSV

SEQ ID NO: 276232 - protein, 65 aa, Glycine max
  Clone ID: PAT_MRT3847_91457C.1.pep
LGHALIPGTAFKFTLYIPCFIFNLHYFDSVRPGLFKSFVLTEETMFWLFFFAAENSILRVKSLDQ

SEQ ID NO: 276233 - protein, 134 aa, Glycine max
  Clone ID: PAT_MRT3847_91458C.1.pep
PKFPSLKTPSSPAVTTTATHKPLSTTPITTTSNGERREDHSVETAATVAADAEAFGDLGLAEWAVKTCRELGMRRPRPVQRRCIPRVLEGRHVLGIDETGSGKTAAFALPILHRLAEHPFGVFALVVTPTRELA

SEQ ID NO: 276234 - protein, 91 aa, Glycine max
  Clone ID: PAT_MRT3847_91459C.1.pep
WARRWRPSPGALFNVFSLAFGFYSQTPLQVFALYIGRLAPRFPSLAPSIAPPGLRFIRSGLRLSGIFIVILLFRRVCAIALVWPFFIRNPL

SEQ ID NO: 276235 - protein, 64 aa, Glycine max
  unsure (1)..(64): unsure at all Xaa locations
  Clone ID: PAT_MRT3847_9145C.1.pep
GFXYRGEGLRATRRGLGRYGLCRFSVIILYLLSLHGAHGLRCSGELFPCDGMALLDGQRCRSVS

SEQ ID NO: 276236 - protein, 57 aa, Glycine max
  Clone ID: PAT_MRT3847_91460C.1.pep
NLWGPPARGVPPPPVFPRGPPPGGWGPPPFFVSRGDNFFFLPPPRNVGGGETPPLFF

SEQ ID NO: 276237 - protein, 65 aa, Glycine max
  Clone ID: PAT_MRT3847_91461C.1.pep
ITLPVEDIYYFTLAAAHGAARCFRAHLCHFYRHTGPSERLLDLRRASMNPMNTTTSKLEWPDKSH

SEQ ID NO: 276238 - protein, 55 aa, Glycine max
  Clone ID: PAT_MRT3847_91462C.1.pep
YASTLSSRRNSDLNSEGVSVGRSTKTTLIPDSIVSRKPPCVMKLWSWNSPRDQLA

SEQ ID NO: 276239 - protein, 43 aa, Glycine max
  Clone ID: PAT_MRT3847_91463C.1.pep
VADDKIGKVSWRTMKNAMIAFLDPVPSILCYLSYQSTISTHSY

SEQ ID NO: 276240 - protein, 437 aa, Glycine max
  unsure (1)..(437): unsure at all Xaa locations
  Clone ID: PAT_MRT3847_91464C.1.pep
MKKLKNYYMHLRHHHHHHHAAAERKWVFPLAIGSLLSLFLLFLATLTSPEGTPILPFYRSITAASYSVFVESKLRPLPVVSSLPPPPRLAYLVSGSKGDGAAVTRVLLALYHPNNRYVVHLDLGSSREXRSDLVRFVEGHALFKRFGNVRVIKKANLVTYRGPTMVAHVTLAGKIMIGQGLXLLMFINLSAFDYPLVTQDGXDLLHTFSYLPRDLNFIDHTSDIGWKDHHRARPIIVDPGLYMNKKQDVFWITQRRSRPTAFKLFTGSAWMALSKSFIDYCIWGWDNLPRTVLMYYSNFISSPEGYFHTVICNAQEFRNTTVNSDLHFISWDNPPKQHPHYLTVDDMKGMVGSNAPFARKFHREDPVLDKIDAELLSRGPGMTVPGGWCIGKRENGTDPCSEVGDTNVLRPGPGSKRLETLINSLLSNEKFRPRQCM

SEQ ID NO: 276241 - protein, 195 aa, Glycine max
  Clone ID: PAT_MRT3847_91465C.1.pep
MEKKSPEPPEEASQSRDSSRDNQTWITAQNILREKLITEDCFAWKLQAGSKEEEALRYVGGVDISFSKDDPSRACGTLVVLDFHTLQVLYQDFSLVTLQVPYVPGFLAFREAPVLLQLLEKMKRSNNPFYPQLLMVDGNGILHPRGFGLACHIGVEANLPTIGIGKNLHPGGGPSRSFLFSRFIANKFDFSFSIF

SEQ ID NO: 276242 - protein, 94 aa, Glycine max
  Clone ID: PAT_MRT3847_91466C.1.pep
VDDMKGMVGSNAPFARKFHREDPVLDKIDAELLSRGPGMAVPGGWCIGKRENGTDPCSEVGDPNVLRPGQGSKRLETLISSLLSNEKFRPRQCV

SEQ ID NO: 276243 - protein, 94 aa, Glycine max
  unsure (1)..(94): unsure at all Xaa locations
  Clone ID: PAT_MRT3847_91467C.1.pep
VTRTMSLAQTGIGLLSVIAWETKKIVVGALQFERCIRVVARFLISGVQRVMHERVIKIRNEDHNWRRLFTALFFFSSNRESIRLNDRCISRQXS

SEQ ID NO: 276244 - protein, 122 aa, Glycine max
  Clone ID: PAT_MRT3847_91468C.1.pep
KTKKRTFMFPKPGFFIYPKPRREKTRWIKASPYEKHSNQKIKLLFAVFKKKGQGRASQQTKKGKLVGFNKNRDTPGGLTQAHGEGANVVLNLPTKVVEQKTNHVGHLPNGKGGPRENSFSPP

SEQ ID NO: 276245 - protein, 140 aa, Glycine max
  Clone ID: PAT_MRT3847_91469C.1.pep
LFSRSGLARFGFFWRFKICPVRAIPRLWAFKTFWVHRLTWAIPFWARGFKLGGPSPIFPPYFWSGANGPFPELFLLAFYPIGVLSPPVCSIFPPRDPRALAQNCPVVGPPRGAPIFARGQFNQMPNPSRGSPAARSGPAF

SEQ ID NO: 276246 - protein, 100 aa, Glycine max
  unsure (1)..(100): unsure at all Xaa locations
  Clone ID: PAT_MRT3847_9146C.1.pep
SSLDLCGSAPSVPWSFSRSSFLSRLFLPPAPHVLLFLLLLDSSGARGTSRLCFFSVPVARPGVSFSVVGSWFVPAVALGWGCVSHSLVLLCVCAXAWCLV

SEQ ID NO: 276247 - protein, 70 aa, Glycine max
  Clone ID: PAT_MRT3847_91470C.1.pep
KTKPLFFIFSSFKGKKFICPLRVLLCFPALLNWVYKGKKGLNSPFLKRKIMSIKNCLKLPKLKPRLWHSM

SEQ ID NO: 276248 - protein, 85 aa, Glycine max
  unsure (1)..(85): unsure at all Xaa locations
  Clone ID: PAT_MRT3847_91471C.1.pep
GGGWDIFNLNLSDAMARAKAPDIHLQKQLRTYMEYMVALPSIYDPYFIAANQGDRANNFIKVAXYEQVQQIIQDIYESNESTKAD

SEQ ID NO: 276249 - protein, 82 aa, Glycine max
  Clone ID: PAT_MRT3847_91472C.1.pep
SSMGKSACHSVEDASNLLSRFIFLLLLGLVLTSLLVMPRSPSIFCFVSPSVLSSITSPAMVLIVTSKSSFSLVATGSFHELG

SEQ ID NO: 276250 - protein, 59 aa, Glycine max
  Clone ID: PAT_MRT3847_91473C.1.pep
NSARAGINPARSLGAAIIYNRDHAWHNQCILWAAPFKGAALVGVYQKIVIRALPFKTRD

SEQ ID NO: 276251 - protein, 24 aa, Glycine max
  Clone ID: PAT_MRT3847_91474C.1.pep
MKYYLLLHKCKRTLINLMPYKESH

SEQ ID NO: 276252 - protein, 110 aa, Glycine max
  Clone ID: PAT_MRT3847_91475C.1.pep
PKKRKKRFPPFFFKGGGVFFFLKKKIFFKGVRGPLGETQGGAGGLTGKFWPGSWGDTNFFYGGAYKNWGENGKKGFPGKKLFFPKISTKIYSRGILKGKIWGAIGGPNPL

SEQ ID NO: 276253 - protein, 36 aa, Glycine max
  Clone ID: PAT_MRT3847_91476C.1.pep
PFFYKQKFNLLKGYLSTSYDLLLSSSRSRSSRFGSI

SEQ ID NO: 276254 - protein, 52 aa, Glycine max
  unsure (1)..(52): unsure at all Xaa locations
  Clone ID: PAT_MRT3847_91477C.1.pep
ARPAEKAGAPTPAHDNLAKRYKPDRQIFXPKGLXDRSKIPDHLTTEVPRNYG

SEQ ID NO: 276255 - protein, 93 aa, Glycine max
  unsure (1)..(93): unsure at all Xaa locations
  Clone ID: PAT_MRT3847_91478C.1.pep
PNLFVSVHRKHAINDLAIHPSGEVALTISQDKCFAVVDLMHGLVVDCRSFCRPLGXXESLSLVKFNAAGDRFFVAXTXKVSVYVTKTERFLLE

SEQ ID NO: 276256 - protein, 77 aa, Glycine max
  Clone ID: PAT_MRT3847_91479C.1.pep
AGYGYGKVHSFAFYKLYFKTVPLPIQFLTTSSQVNQFHLVLCPNRIGTTKCVRQRETEQGIYIFLSLVIYKRMALQF

SEQ ID NO: 276257 - protein, 53 aa, Glycine max
  Clone ID: PAT_MRT3847_9147C.1.pep
LVLLEDKQDSKFGVLINVKFIGFLYVFCDVYLAFYVLVIFSDFLLIFQQKYPA

SEQ ID NO: 276258 - protein, 110 aa, Glycine max
  Clone ID: PAT_MRT3847_91480C.1.pep
SHIYSDNQNLPSLEDVKTITNHFTKSLICFSFSPPSTLTSLHTSFFFLKNMLSVLKNYGLSTNSLNILIYCLFLLLFFGVSISANASTFSFFCFFPSSAKSEFLSLNLVF

SEQ ID NO: 276259 - protein, 43 aa, Glycine max
  unsure (1)..(43): unsure at all Xaa locations
  Clone ID: PAT_MRT3847_91481C.1.pep
ILNNCPSYSLFDSFVNRNLHRRSXXLKHTLYNILDQFLVFADN

SEQ ID NO: 276260 - protein, 371 aa, Glycine max
  Clone ID: PAT_MRT3847_91482C.1.pep
MASSSVFTSYIVLSLVMALAISGFNFKGAEAARAFFVFGDSLVDNGNNNYLATTARADAPPYGIDYPTRRPTGRFSNGLNIPDFISQELGSESTLPYLSPELNGERLLVGANFASAGIGILNDTGVQFVNIIRITRQLEYFQEYQQRVSALVGDEKTKELVNGALVLITCGGNDFVNNYYLVPNSARSRQFALPDYVTYVISEYKKVLRRLYDLGARRVLVTGTGPLGCVPAELALRGRNGECSEELQRASALYNPQLVEMIKQLNKEVGSDVFVAANTQLMHDDFVTNPQAYGFITSKVACCGQGPFNGLGLCTVVSNLCPNRHEFAFWDPFHPSEKANRLIVQQIMSGTSKYMHPMNLSTILALDSKKY

SEQ ID NO: 276261 - protein, 86 aa, Glycine max
  Clone ID: PAT_MRT3847_91483C.1.pep
MASSSVFTSYIVLSLVMALAISGFNFKGAEAARAFFVFGDSLVDNGNNNYLATTARADAPPYGIDYPTRRPTGRFSNGLNIPDFIS

SEQ ID NO: 276262 - protein, 52 aa, Glycine max
  Clone ID: PAT_MRT3847_91484C.1.pep
NTKPLVHHINISLVTVLPRPSSINFELFLESCCVFIFPLPSTSLSDSEASPL

SEQ ID NO: 276263 - protein, 70 aa, Glycine max
  unsure (1)..(70): unsure at all Xaa locations
  Clone ID: PAT_MRT3847_91485C.1.pep
KNKLVCSNIYYNRCQRSXQVLLRAYHHKCKMKSFGSSLTTDTSHMDLLNCVPSFKEKAENASISSELVTL

SEQ ID NO: 276264 - protein, 92 aa, Glycine max
  unsure (1)..(92): unsure at all Xaa locations
  Clone ID: PAT_MRT3847_91486C.1.pep
MXYTSTIIQNNQGRKINETPVXNTHTESEKQKAEQENFQVILRGAEECCWHVQESHSPQVVFECKWKNSRAAQEKKSESTHQQGLSKNSTHK

SEQ ID NO: 276265 - protein, 84 aa, Glycine max
  Clone ID: PAT_MRT3847_91487C.1.pep
SHARQPGLSSCCRSFAGWDNEDTRTSPRLMLWTIIGDAQLRGIHRKRTYYCAASKILSHHARCGWGHNHTVVISYHGMVNDILN

SEQ ID NO: 276266 - protein, 83 aa, Glycine max
  unsure (1)..(83): unsure at all Xaa locations
  Clone ID: PAT_MRT3847_91488C.1.pep
TTCLPYLNXPXIQTHIWNVQRTNCSNCXRTXYTIXXPNVAXNICSVWPSKVXGETFSSDXPXTXXXVVXHQNVDXILADLYWK

SEQ ID NO: 276267 - protein, 57 aa, Glycine max
  Clone ID: PAT_MRT3847_91489C.1.pep
GWIVNLLFAELSRIFELYLGITGINENVVNVFLRNYCVVSIKVFFIKWGGGRLVSSI

SEQ ID NO: 276268 - protein, 44 aa, Glycine max
  unsure (1)..(44): unsure at all Xaa locations
  Clone ID: PAT_MRT3847_9148C.1.pep
IIVRYVRTHLPIFYPTRSKGSKDYNLTVSLNLRGIRXXPACMRG

SEQ ID NO: 276269 - protein, 139 aa, Glycine max
  Clone ID: PAT_MRT3847_91490C.1.pep
IDVVAGIDLNHADIAGYIPPEIGLLTDLALFHINSNRFCGVLPKSFSKLKLLYEADISNNRFVGRFPEPVLPIPDLKFLDLRFNNFEGELPSELFNKSLDAIFLNNNRFTSTIPQNLGSSPASVVVFANNNLTGCVPSS

SEQ ID NO: 276270 - protein, 72 aa, Glycine max
  unsure (1)..(72): unsure at all Xaa locations
  Clone ID: PAT_MRT3847_91491C.1.pep
NVLSKTKHKPGEGDIKRETTSITXGTSHKMGETFHVGGHIKEEEHNGEHHAGEYKGEHHGEHKYEYKGEHHW

SEQ ID NO: 276271 - protein, 142 aa, Glycine max
  unsure (1)..(142): unsure at all Xaa locations
  Clone ID: PAT_MRT3847_91492C.1.pep
VTFNLWLAACASQNDVETAERVLLELKKAKIDPDWVTYSTLTNLYIKNASLEKAGATVKEMENRTSRKTRVAYSSLLSLHTNMGNKDDVNRIWEKMKASFRKMNDNEDICMISSLLKLGDFAXAEDLYGEWELVSGPNVVRV

SEQ ID NO: 276272 - protein, 144 aa, Glycine max
  Clone ID: PAT_MRT3847_91493C.1.pep
VRFPVDHASAYYSTISESKAFYVFRICIEILPYNIAEKEKMEAPIMLPLERTSSIEREPRTLNINQIQSARELAIYILNTKTIEEASRIFTEGLQPVVSAACCMRSGTTMDMDLGEELEVLNSKDATTQVAPAAAFRDIASAPF

SEQ ID NO: 276273 - protein, 36 aa, Glycine max
  Clone ID: PAT_MRT3847_91494C.1.pep
HTLNIKYSILSFFAYFSKQFILECTFFEAIIYISLN

SEQ ID NO: 276274 - protein, 82 aa, Glycine max
  Clone ID: PAT_MRT3847_91495C.1.pep
KGADAMSLNAAAGATCVVASLEFNTSSSSPKSMSIVVPDLMQQAALTTGCNPSVKILDASSMVFVFNIYIANSCKLIKSTKH

SEQ ID NO: 276275 - protein, 33 aa, Glycine max
  Clone ID: PAT_MRT3847_91496C.1.pep
WTVKSSRVCLNVFFSDVDLRPSAAIFTCNLLCY

SEQ ID NO: 276276 - protein, 171 aa, Glycine max
  Clone ID: PAT_MRT3847_91497C.1.pep
GSNCLLVATMFPRKDNCYISLLDFRDKKMVWCWSDVGAPFAVDEKRVRDAIAMEDNNSICVVNEFEDLGFMDLRSSAANSIRWSSRSRLMKGKMPEEPCYPKLALHGGQLFSSMNDCISVFCGPEWVLTSRLRRSYGGSICDFSIGGDRLFALHSEENVVDIWETPTPPII

SEQ ID NO: 276277 - protein, 157 aa, Glycine max
  Clone ID: PAT_MRT3847_91498C.1.pep
GFFGGKNPIPLCEFFFPPPLWAFLCGYRGLFFSWVESYRPCPLPPPKMLCLAFPGGSWIINFGGVILFGVPVLFLVHFKGFLLVGGPLFFPFCPPFQGGKGLVFFVGDSNGPLPLFFVFFFYFGFFLGVMLFRLFFLGVGGVFSLWGFGLFFFFFSG

SEQ ID NO: 276278 - protein, 38 aa, Glycine max
  Clone ID: PAT_MRT3847_91499C.1.pep
REQMESRGGPSGASTVVIAHLPISSHNTSFLLLDSSFT

SEQ ID NO: 276279 - protein, 108 aa, Glycine max
  Clone ID: PAT_MRT3847_9149C.1.pep
MVVGGSNTGVHGWRDIKSLTVQVITGRWFVVFASFLIMAAAGATYMFGLYSSDIKTTLGYDQTTLNLLSFFKDLGTNVGVISGLINEVAPPWVVLAIGAILNFFGYFM

SEQ ID NO: 276280 - protein, 109 aa, Glycine max
  Clone ID: PAT_MRT3847_914C.1.pep
IKCNFNPQNLFNRHLSSNCRVSFPTTNPYAIIPIASDEPTDTDEHIPLPTTAKPSLKHKDEHTPDAKANTTNEPVPNTVSIPPHPLALILPTNTLFTTLLPNCMLHQLR

SEQ ID NO: 276281 - protein, 30 aa, Glycine max
  Clone ID: PAT_MRT3847_91500C.1.pep
VILFFFSHKNHICVGLQFKVTQYSEKWESI

SEQ ID NO: 276282 - protein, 62 aa, Glycine max
  Clone ID: PAT_MRT3847_91501C.1.pep
VYLVLVLDYCMNSSNFFSLFECNPLFFSFLMSLYIFIYFFFWPAMTSVIFRYAICHICMADF

SEQ ID NO: 276283 - protein, 61 aa, Glycine max
  Clone ID: PAT_MRT3847_91502C.1.pep
SCDNGPFVIEKTHFEILVIFFNGFYTKKKKKKKKKKKKKKKKKKKKKKKKKKKKKKNLGGG

SEQ ID NO: 276284 - protein, 133 aa, Glycine max
  unsure (1)..(133): unsure at all Xaa locations
  Clone ID: PAT_MRT3847_91503C.1.pep
MAYLSSLVLLLAALIVSGHVLANYENPPVYKPPTAKPPVYKPPIQKPSVYKPPFENPPFYMPTVXKPTLYKPLVEKPPVYXASSEKPPLYTPIVEIPPVHXPSLDKPLLLTPSLXRPLVYKRTLVKPPVIMPS

SEQ ID NO: 276285 - protein, 148 aa, Glycine max
  Clone ID: PAT_MRT3847_91504C.1.pep
MGHIMNKGFTQKSYWFPWITKVGFMVLASCACMVTSEEKIEDPLSGSLCISECATCPTICSQPPPPSLATTFSNHPPPSSPLTPESHIPSPPQHTTTSSVPPPPPLLTSYPSPPSSLLTSNPPPPPLLTSFQPPPPLLISYDPPPSPL

SEQ ID NO: 276286 - protein, 40 aa, Glycine max
  Clone ID: PAT_MRT3847_91505C.1.pep
VVTHRFTPTQQFIVRFCINWQASYALYRPLFSLTCSPSFS

SEQ ID NO: 276287 - protein, 63 aa, Glycine max
  Clone ID: PAT_MRT3847_91506C.1.pep
TIGRMSRELVKGTSSVSKSYMHQLNRLSSLRMLECGHHKGDLNGFVTYVIRGPGIRVPPAIVT

SEQ ID NO: 276288 - protein, 61 aa, Glycine max
  Clone ID: PAT_MRT3847_91507C.1.pep
VCVSDDNRRGSDGRCKRVPQMVASLPGQTAGHTGCIWSNLSALCREDTEIAMAGCSVLMLY

SEQ ID NO: 276289 - protein, 81 aa, Glycine max
  Clone ID: PAT_MRT3847_91508C.1.pep
LLKVSSEMNATNLLKRDIVHLNLKLSQLQALLDEKEAQLRQFRSMEGGSTGSSSNLREETARVSKDSSELFPTGIPQVGQT

SEQ ID NO: 276290 - protein, 46 aa, Glycine max
  Clone ID: PAT_MRT3847_91509C.1.pep
LGIRLEKCTNHPYFFQGAAPGPPLGQVNITFPVPVNWLYLISNFIN

SEQ ID NO: 276291 - protein, 76 aa, Glycine max
  Clone ID: PAT_MRT3847_9150C.1.pep
METKRDIHLAFLQCQWKRWTLRCPLSWWMRKFIPFVIIHSNMESTPLTSFQISKKMLLKCLQVFESSLCMIQAVYK

SEQ ID NO: 276292 - protein, 96 aa, Glycine max
  unsure (1)..(96): unsure at all Xaa locations
  Clone ID: PAT_MRT3847_91510C.1.pep
MKTQNVMFVVLVVCLAVCVGTSWGHDFIDDAKTKAGQAKDTAVDAAAPTVNSVIDAAAPTVDAPAPTIDAAAQKSGSFASWAYGKISHGLXFKSGD

SEQ ID NO: 276293 - protein, 72 aa, Glycine max
  Clone ID: PAT_MRT3847_91511C.1.pep
SITRCKCLALLDGSNCARLCANRKRGCISYRGPGRGHYSVLEGFGKEAEAFFALTFSPCLPPPSTSHARTDA

SEQ ID NO: 276294 - protein, 64 aa, Glycine max
  Clone ID: PAT_MRT3847_91512C.1.pep
VLSFPIVSASLLLITCGQGTSAYLLCSSISVSFTSNGLLKAYSLCIYKPYNINKSEIMVVVSLH

SEQ ID NO: 276295 - protein, 127 aa, Glycine max
  Clone ID: PAT_MRT3847_91513C.1.pep
NKENSKPRNFRGKVEAIELSRIESIRGGRFESRKMLATFVSSTPLLSESWRLCSQANATPFRTFVTERVGAAVYVAFSGVHMAGESDPNWRSLIPLDSIGGVPLFSSRRSKEGEEPVMVHAGMHNLF

SEQ ID NO: 276296 - protein, 55 aa, Glycine max
  Clone ID: PAT_MRT3847_91514C.1.pep
LEPFHFIHKLFSSLTINNRLLNSVCRSPIITYNSQIPLDLDYHQSLSLPVYVKYL

SEQ ID NO: 276297 - protein, 86 aa, Glycine max
  unsure (1)..(86): unsure at all Xaa locations
  Clone ID: PAT_MRT3847_91515C.1.pep
XXXFLSLFFSLTATNSLWLTELCTDRLYYAHLLLKGSYPLPTTFIKSWDYVPGTLGPTLATKPALNGATGLFLPHFSPWRKKRPFS

SEQ ID NO: 276298 - protein, 68 aa, Glycine max
  Clone ID: PAT_MRT3847_91516C.1.pep
LAQANLLTSEIAATINEFRSRHLAELTELSETNGTSFGYGYNRITSKARSQSLDSSDDTQVSKGKLAT

SEQ ID NO: 276299 - protein, 55 aa, Glycine max
  Clone ID: PAT_MRT3847_91517C.1.pep
PPGRPTRPITRTSGPIYNSQGSSKPRNRDRLYRTLKPFIILSLPNYGVGFIYTYV

SEQ ID NO: 276300 - protein, 61 aa, Glycine max
  Clone ID: PAT_MRT3847_91518C.1.pep
TATMKAMTATTTFDVSAACFRAPPSCSPNPCHTSFSVINSLNPHKGRRISVAVPPKFPSFR

SEQ ID NO: 276301 - protein, 91 aa, Glycine max
  Clone ID: PAT_MRT3847_91519C.1.pep
LLLLCPFNPIIINPSQTTLPPPLFLSLFLSPNNTASFINATPLTRAPNPNGSIGFNSPSPNSRSKPAARLPIPEFRGALPETARASRFECH

SEQ ID NO: 276302 - protein, 152 aa, Glycine max
  Clone ID: PAT_MRT3847_9151C.1.pep
IWDSRRGVRIKTARGRGAYVRQITYRNITFENVRVGIVMKTDYNEHPDDGYDPMALPILRDISFTTVHGQGVRVPVRIHGSEEIPVRNVTFQDMSVGLTYKKKHIFQCAFVQGRVIGTIYPAPCENLDRYNEQGQLVKHSASQNVTDIDYDI

SEQ ID NO: 276303 - protein, 399 aa, Glycine max
  Clone ID: PAT_MRT3847_91520C.1.pep
MTDAAEDATRRRNAVAEYRKKLLQHKELESRVRSVRENLRASKKEFNKTEDDLKSLQSVGQIIGEVLRPLDNERLIVKASSGPRYVVGCRSKVDKEKLTAGTRVVLDMTTLTIMRALPREVDPVVYNMLHEDPGNISYSAVGGLSDQIRELRESIELPLMNPELFIRVGIKPPKGVLLYGPPGTGKTLLARAIASNIDANFLKVVSSAIIDKYIGESARLIREMFGYARDHQPCIIFMDEIDAIGGRRFSEGTSADREIQRTLMELLNQLDGFDQLGKVKMIMATNRPDVLDPALLRPGRLDRKIEIPLPNEQSRMEILKIHAAGIAKHGEIDYEAVVKLAEGFNGADLRNVCTEAGMAAIRAERDYVIHEDFMKAVRKLNDAKKLESSAHYSADFGKD

SEQ ID NO: 276304 - protein, 136 aa, Glycine max
  unsure (1)..(136): unsure at all Xaa locations
  Clone ID: PAT_MRT3847_91521C.1.pep
MTDAAEDATRRRNAVAEYRKKLLQHKELESRVRSVRENLRASKKEFNKTEDDLKSLQSVGQIIGEVLRPLDNERLIVKASSGPRYVVGCRSKVDKEKLTAGTRVVLDMTTLTIMRALPREGDPVVYNMLHEDPXNI

SEQ ID NO: 276305 - protein, 167 aa, Glycine max
  Clone ID: PAT_MRT3847_91522C.1.pep
ACEQYLSNTSVEQLFFVLDLYGYFGRVSEKIAKAVKRKQLEDIRDKSFSGKLMDKVPSDAAVSLSVKNLQLRFLESSSVNIEGMPLVQFVGDDLFTSATHRTLGGAIIVSSFLRWGSVVIGCVDDEGHLPCENGSFLSSKENALLLSDNGYPQLRTVFGCIRTRNIY

SEQ ID NO: 276306 - protein, 152 aa, Glycine max
  unsure (1)..(152): unsure at all Xaa locations
  Clone ID: PAT_MRT3847_91523C.1.pep
MGGDGATANAEAQYATAKISVWWDIENCHVPKGSDPHAIAQNISSALVRMNYCGPVSISAYGDTTRIPASVQHALSSTGISLNHVPAGVKDASDKKILVDMLFWAVDNPAPANYLLISGDRDFSNALHQLRMRRYNXLLAQPQKASAPLVAA

SEQ ID NO: 276307 - protein, 164 aa, Glycine max
  unsure (1)..(164): unsure at all Xaa locations
  Clone ID: PAT_MRT3847_91524C.1.pep
MDGDGATTIAEAQYATAKTSVWWDIENCHVPKGSDPHAIAQNISSALVRMNYCGPVSISSYGDTTRIPASVQHALSSTGISLNHVPAGVKDARDEKILVDMLFWALDMGSNXKVLNNSCWKDLSNGLHQLRMRRYYILLAQPXKTSVPLIASANRVCHWPRKIA

SEQ ID NO: 276308 - protein, 57 aa, Glycine max
  Clone ID: PAT_MRT3847_91525C.1.pep
RVRRLRLRLDAVLGSLLDHTSFCHHLELLQLTRHPVDLCASRLVSILMLSSMVAMRR

SEQ ID NO: 276309 - protein, 57 aa, Glycine max
  Clone ID: PAT_MRT3847_91526C.1.pep
LEVTFLRRSRVLREISCYISYRHIICYSLWTVTLLNNHSRYLIATTHDIRCHIQIAT

SEQ ID NO: 276310 - protein, 507 aa, Glycine max
  unsure (1)..(507): unsure at all Xaa locations
  Clone ID: PAT_MRT3847_91527C.1.pep
MENSDHDEPEKKRPHLTSVSSRTPRNSINSPTNNKTADAGVLQFQNQQLVQQIDIQKHALHDLEEKIRELKGKQSSYDDLLIALNQLWTQLVDDMILLGIRAGRGKGKDTLQHLTDIDNPQGSVPLCPAEDMFLCRLIQKDSIKGISDDEIISYVEEALALRQSYTRELLKLLKDTIDDQMERAGSIAPVXNSARASEDAIIQMSKIDDMTKEEVDNFREVVDTLHAKHKEYTVAIQNSINEYSQDQSEIKRLAGELDEIVAELEESRRKLVNLEMQKDAAIGMNSPKADAVNGNLSPENIAYRTMGLRELKDSIEEAKIVDADRLSELQDAQEDNQTLTKQFQDLQNELKDDKYVRTSRIYSLANDQLQHWMTELARYKTSVESLQAGSVHVAKWENELNLKLESADSARQILGNSDHRIDDLELQLQKCIIEKNDLEIKMEEAKQDTGRKDIKSEFHVMALALSKEMGMMEGQLKRWKDAAHEAVSLRETAHSLREALSTKTSEL

SEQ ID NO: 276311 - protein, 69 aa, Glycine max
  Clone ID: PAT_MRT3847_91528C.1.pep
KGVSITFVSLVFLGGGFYVGGCSMCGYRSCHPMLLICCDGLIFSLCSVIVGSKHFPSFCIEIRVFKLKN

SEQ ID NO: 276312 - protein, 53 aa, Glycine max
  Clone ID: PAT_MRT3847_91529C.1.pep
GPSLGGPPMLKSFLKGSRLPGSSNMLFRDSRLIFFFSHPAIDFSRCIYALLAL

SEQ ID NO: 276313 - protein, 48 aa, Glycine max
  Clone ID: PAT_MRT3847_9152C.1.pep
CVPTNRLSYINKGSHSHLFMRFKMYVMEGLLFPPWTVLSVEAHFGPSI

SEQ ID NO: 276314 - protein, 96 aa, Glycine max
  Clone ID: PAT_MRT3847_91530C.1.pep
LDAHDLFTLQIDNSWIWGRIRPSAIKLVQLTAEPSITSSPTYFPKHLGILPLDATYEQHREIRCHVCQRHSYQQGYDTHSGATAGHAIRDQSIEET

SEQ ID NO: 276315 - protein, 81 aa, Glycine max
  Clone ID: PAT_MRT3847_91531C.1.pep
SSPPSDTSLSMALLVSSALTTVDPSETPTSFREAVMPPLLWPGELRLYLRQLTLRARAIEASELGDTLRLQKVRWPCAMHA

SEQ ID NO: 276316 - protein, 43 aa, Glycine max
  Clone ID: PAT_MRT3847_91532C.1.pep
WMFFLALRRNILSSHATDLNHTRYLKNSKSLQPLGSRRALSLS

SEQ ID NO: 276317 - protein, 82 aa, Glycine max
  unsure (1)..(82): unsure at all Xaa locations
  Clone ID: PAT_MRT3847_91533C.1.pep
EMNKXSFKYAWVLDXLXAERERXITIDIXLWXXXTXXYYCTVIDAXXGHRDXIKNXITGXSQADCAVLIIXSXTGGFXSWYF

SEQ ID NO: 276318 - protein, 83 aa, Glycine max
  Clone ID: PAT_MRT3847_91534C.1.pep
ARPFCWCISQQCVIKLWGLPPNHSGNGSGHGEFICSTNLVVCDRPSFKGLFAIGQYRIPLSSISKSAVFALVFEHFCESKVIS

SEQ ID NO: 276319 - protein, 94 aa, Glycine max
  Clone ID: PAT_MRT3847_91535C.1.pep
LHVPVQFTVIRCDTCGAAGSTQRSLCHKCHEGAEHTYCMHPDEQSELEANWKFVKIGHVKSACRGKERSNGETSFPGHRLLVSNDNTHKDPNFP

SEQ ID NO: 276320 - protein, 117 aa, Glycine max
  Clone ID: PAT_MRT3847_91536C.1.pep
AGEKGIEKGILQLIHQCTHHCTSQFSTTISMASAMERARQSTGRSAGRKDLRKQVARKSARESGAVTGGVSITQRIMALTETLKENRRYELMIGLLIRQMLVKKLVQDFAHDLRIDI

SEQ ID NO: 276321 - protein, 82 aa, Glycine max
  Clone ID: PAT_MRT3847_91537C.1.pep
ITQASFGGQVGCRKFVDRIVLTPCFQELLLIAISMAAKGVCAASSFRALFEDVLCGLSCMRAQCVTPLLVFDLKSFYFFLPS

SEQ ID NO: 276322 - protein, 125 aa, Glycine max
  Clone ID: PAT_MRT3847_91538C.1.pep
MNENRIDCVGRTQQSYGLNGDWNSEFGNCSSQYFDVRQASNMGTCNQPLAMASGGGVEQEPHIGQNKSSSSIISRFKSPASAFYATEMCMGGFPQYDSQIGNPSLMSHSSKFNDMEFPLYQSLRQ

SEQ ID NO: 276323 - protein, 116 aa, Glycine max
  unsure (1)..(116): unsure at all Xaa locations
  Clone ID: PAT_MRT3847_91539C.1.pep
LAVLARSNYVLSGDYARFDGSTTKQGMSTMAVMINRPCSGDEXLMREKTHLLDASRLMMAICTKDVRRVECGIPSGCAITVICTSTFNDMLIRYDYQKLLRYAKAPSVVPPSFKNL

SEQ ID NO: 276324 - protein, 82 aa, Glycine max
  unsure (1)..(82): unsure at all Xaa locations
  Clone ID: PAT_MRT3847_9153C.1.pep
MVRLDPNEIYIVSIAHSLQNIVKVGNDGFIITKTTSIYSASRAHQMKETRRNXRYSGYGDPKGARDATLTIKILRMRIMRLL

SEQ ID NO: 276325 - protein, 69 aa, Glycine max
  Clone ID: PAT_MRT3847_91540C.1.pep
HTLHASLRQLKEVWKFSNRQSMLNKRVMPNVRDWITQTNERNPPQIPDHAEDADARVDPRGNCGGARPG

SEQ ID NO: 276326 - protein, 114 aa, Glycine max
  unsure (1)..(114): unsure at all Xaa locations
  Clone ID: PAT_MRT3847_91541C.1.pep
GRANPDGGEXEGXXGXGNHXXXEARGGXXPAAQNSPXXGPXGXXAEQXXGTXXXXXRNRNXXXGXKRXKPXGXHEPGKPRXPXKGRXXREXNNXSXXXNPXQXKRKPXGAPXXP

SEQ ID NO: 276327 - protein, 65 aa, Glycine max
  Clone ID: PAT_MRT3847_91542C.1.pep
PNLISLTSLLKRFDCQYLALPKLNPFPSLFLLLTCFYFILCPFPIFLSIHFPNLNFYWTFPFSLI

SEQ ID NO: 276328 - protein, 216 aa, Glycine max
  Clone ID: PAT_MRT3847_91543C.1.pep
MEERVGILLLILLGAAWACDTRELAIISELNRKSDVCELCEEYTAEALDYLNDKENQREIIDSLHNICNHILSFKQQCIELVDHYAPRFFLEIASVQPGELCKQIHICQSAKISSEVEGNSCDSCKDTVSALLVKLNDPDTKLEIMEALLKACNSMDKFSKKCKRMVFEYGPLILVKAEKFLKTADICTTLHACPASTAVSNKEASIMEVPLISDS

SEQ ID NO: 276329 - protein, 839 aa, Glycine max
  unsure (1)..(839): unsure at all Xaa locations
  Clone ID: PAT_MRT3847_91544C.1.pep
DYQDIFAWSYQDMPGLSSNIVHHRLPLNSECSLVKQKLRRMKPEMSLKIKKEVKKKFDTGFLAVAXYPEWVANIVPVPKKDGKVQICMDYRDLNXASSKDNFPLPHIDILVDNMTNFALFSSMDGLSGYNQIKMASEDMEKMTFVTLWGTFCYKVMSFGLKNDGATNQQAMAVLFHDMMHKEIQVYVDDMIAKSKTKEEHLVNLQKLFKRLHKYXLRLNPTKCTFRVKSGKLLGFIVSQKEIEVDPDKVKVILEMPEPHTEKXGMRLXGRLNYIVRFISXLTATCEPLFKLLRKNQFVQWDNNCQVAFERIKRCLMNPPVLLPPVPERSLILYMTVLDESMGCVLGQHDEFRKREQVVYYLSKKFTTCEMNYSLLERTCYALVWAAHRLRQYMLNHNSWLVSKMDPVKYIFEKPVFTGRIARWXVLLSEFDIGYVTQKAIKGNFLADYLAQQSINNYXPMHPEFSDEDIMTLFEEDVEDEDRDKWIVWFDDASNALGHGVGVVLVSLDEQYIPFMTRLGFVCINNVAEYEACALGIQVAIDFKVKLLKIYGDSALVIHQLRGEWETRDHKLVPYQAYIRKLIEFFDDISFHHIPQDENQIVDALATLASMFPLTPHGDFSYIEFRCRGKPAHYCLIEEEQDGQPWYFNIKRYIKDKEYPQDASDNDKRMLXRLAAGFFLSGNILYKRNHDMVLLRCVDVREAEQMLVEVHEGSFGTHANRHAMARKILRAGYYWLTMENDCCIHVRKCHKCQAFTGNVNAPPIPLNVLAAPWSFSMWGIDVIGVIKPKASNGHRFILVAIDYYTKWAEAASNASVTRSVVIRFIKKEIIYRYRLPRKII

SEQ ID NO: 276330 - protein, 87 aa, Glycine max
  unsure (1)..(87): unsure at all Xaa locations
  Clone ID: PAT_MRT3847_91545C.1.pep
PQLLGLGKREDNCRRGWSLGRLLWPGLLWSPLGLLCLVLLLACVFSCLFCVFFSCFGVGGFSCGLFLRLVSLCWFFLXVCCGXCSSS

SEQ ID NO: 276331 - protein, 116 aa, Glycine max
  Clone ID: PAT_MRT3847_91546C.1.pep
AIAWPPPPVEDFFNRLVGILAEVDPDNVFGREQSLPPLPVSCLGLNAAQCKTWASGPESREPGGAFCPRVVSWGPRSQETVAFALFFLDKTKNPHQKKEKKQKQNKKKKKKKKKGR

SEQ ID NO: 276332 - protein, 75 aa, Glycine max
  Clone ID: PAT_MRT3847_91547C.1.pep
QHPKDHNALQSCTIFCRDDREAVTYYTHPLPLGHNNTRHHSSCYSAPSLGILVSHAYPIALLHTLETPCAGSISN

SEQ ID NO: 276333 - protein, 50 aa, Glycine max
  Clone ID: PAT_MRT3847_91548C.1.pep
ILSFFLQRLDHRQIPIISQELSSPHFYSQRSSHCRRWTSSRTCLTRIHPR

SEQ ID NO: 276334 - protein, 266 aa, Glycine max
  Clone ID: PAT_MRT3847_91549C.1.pep
RGFKNSDTTQKREVIDAIEKPNINKPNAVQDNASQHLLTLRQEILAHKRKAVTLKREGKLTEAKEELRQAKLLEKGLEDGSMQPDTASASVKNVVQKKQELSNVSAKPLSSRDRFKLQQESLGHKRQALKLRREGRIEEAEALFERAKAIETQLEELTAQDSNKSDGVDDVTVEDFLDPQLLSALKAVGLDDVSVVSKAPEREETVKSNAKVENSNQERIQLEERIKEEKVKALNLKRSGKQAEALDALRRAKLYEKKLNSLTSGS

SEQ ID NO: 276335 - protein, 116 aa, Glycine max
  Clone ID: PAT_MRT3847_9154C.1.pep
AVPLQCHFTGMGMDKAHLGSSSEPHHGGLNHVFEQRNWAIKFVVAQGLITGSRPKEGQLSFQNHSTGEMSARVNCIYLMKWCYIVVASLCNDEELNNPPCQVVYKGFMFMTQVNLS

SEQ ID NO: 276336 - protein, 192 aa, Glycine max
  Clone ID: PAT_MRT3847_91550C.1.pep
MAAPKLVPLLLLLTIITTTKNVLGQGGTASWCVARSDASSDALQTALDYACGAGGDCLPLQPDGLCFLPNTIQAHASYAFNSYYQRRTRAPGSCDFAATATIATSDPSYGSCVYPSSASAAGGPNTPTTTPPMNNPNVPTSTTTTPIFGGGNTGGLTPGMSTPFPDSSRAHSEATATWFLALCSSLIIFIIS

SEQ ID NO: 276337 - protein, 326 aa, Glycine max
  Clone ID: PAT_MRT3847_91551C.1.pep
MDMVDLLASDDSNMSEIFTQKHTEYKLCSANSSQADPTIHLDTSVNFNQDRGFKNSDTTQKREVIDAIEKPNINKPNAVQDNVFQHHLPLRQEILAHKRKAVTLKREGKLTEAKEELRQAKLLEKGLEDGNMLPDTASSSASATVNYASHASNVVQKKQESSNVSAKPLSSRDRFKLQQESLGHKRQALKLRREGQIEEAEALFELAKAIETQLEELTAQDSNKSEGVDDVAVEDFLDPQLLSALKAVGLDDVSVVSKPHPERQETVKSNAKVENSNQERIQLEERIKEEKVKALNLKRSGKQAEALDALRRAKLYEKKLNSLTSG

SEQ ID NO: 276338 - protein, 52 aa, Glycine max
  Clone ID: PAT_MRT3847_91552C.1.pep
PSKRKPFCRASHKNTFYRGPNLVPMDQSPIKFLGAQTPNQYEGPGTGFLQDQ

SEQ ID NO: 276339 - protein, 48 aa, Glycine max
  unsure (1)..(48): unsure at all Xaa locations
  Clone ID: PAT_MRT3847_91553C.1.pep
CSPAXEHRXXXXXTNXXXHTXRXXEXGGGRPNRXXXXQQEXRXGPXEA

SEQ ID NO: 276340 - protein, 127 aa, Glycine max
  Clone ID: PAT_MRT3847_91554C.1.pep
RFANGWKGQPFGPLPKNNNRPKGEFVPSQLNKEPPGFSQPHLVKRRTREIKLRPPKKKNNTCPSTRSVKPRTPKTDRPLVFTIKYTNMVASSRYVNLYPGERSALFFFFFFCFFFFFFFFFFFFFCF

SEQ ID NO: 276341 - protein, 58 aa, Glycine max
  Clone ID: PAT_MRT3847_91555C.1.pep
LIRQKYRRSDTLTPTPNHITHFFFYQQVNSGNTGVKEGVLLARHKKVGPLIGERPTPE

SEQ ID NO: 276342 - protein, 59 aa, Glycine max
  Clone ID: PAT_MRT3847_91556C.1.pep
HLWAEPSEDKLRVFMRQVVDNLTEATTKGRKARDDMIRRFSPEIVADIVADHIQNILAQ

SEQ ID NO: 276343 - protein, 66 aa, Glycine max
  Clone ID: PAT_MRT3847_91557C.1.pep
SYDPGTARSLELGRPSRFVFVQNRGSATERMTSLISSEDPAIHQPANYYHPLTCEYTVRSPLSRGR

SEQ ID NO: 276344 - protein, 224 aa, Glycine max
  Clone ID: PAT_MRT3847_91558C.1.pep
PRVRAKTLQLFEMGFSENEVSSAIDKLGSEAPISELANFIFAEQNGIDYVMEYNQVNLEETYNDDMVKEEEGIDAFPSYVSDQYLDVVENGRGKRPKYEHDDDSITCLEPSWVEERVDVVVAEMSRRPKPNPSRCLSSVAAKPPFFLFGNVSNISYDSWTKMSKFLYGIEPEFANAQSFSALDRIEGYIHNLPLENRFHILPKPPMTIEDAMPLTKKWWPPWDS

SEQ ID NO: 276345 - protein, 101 aa, Glycine max
  Clone ID: PAT_MRT3847_91559C.1.pep
KEVPKKRTHHKMKKGLLIVLLIIQIHYNVVVNGNELESEFSFDSHVARMLYDVSLSVSGKTGNRYNKAVRCPQSKGYRSCLPSRNGRRGPRQRCADFTRVC

SEQ ID NO: 276346 - protein, 87 aa, Glycine max
  Clone ID: PAT_MRT3847_9155C.1.pep
FYFFFFFFFFFFFFFFFFFFFFFFFKKTLTPLKKGTLFFWPRGSQQCSKDKKNFPTKGFPHKKANPAPQKLTKTYFCPFKTPPGQKV

SEQ ID NO: 276347 - protein, 59 aa, Glycine max
  Clone ID: PAT_MRT3847_91560C.1.pep
KRLLKDLCVSIKVMQLLLFGTCFTREVGMTKSECFRKLYLYVSAYIVFHQNCPSNVTLT

SEQ ID NO: 276348 - protein, 113 aa, Glycine max
  unsure (1)..(113): unsure at all Xaa locations
  Clone ID: PAT_MRT3847_91561C.1.pep
RNAAPGAANFLTDMIFTGHHDNAEFALAMFPTEPYVLIRGXGHIILVXSIVDHITSAVTDIKXDXSIMTLVSQSVESCDRTADEPTVRPPWIYCTHEDTVADATYCPFSAQEF

SEQ ID NO: 276349 - protein, 163 aa, Glycine max
  Clone ID: PAT_MRT3847_91562C.1.pep
MGCRNRDSITENHTSSSSSSSDSLSEALLFTTMCIVGHPVDVHVKDGSVYSGIFHTASVHADYGIVLKKARMTKKGKGNNNVGNEGFVDTLVILSSDLVQVVAKGVMLHADVVGGNITGGDEEAVAHNVCSESLTCEVENHTGPLMDTKQTSRRRQVKLKREN

SEQ ID NO: 276350 - protein, 37 aa, Glycine max
  Clone ID: PAT_MRT3847_91563C.1.pep
SHMHSFVSSNQAIAKKIKNNRMTNFPAIFHPFFSNQY

SEQ ID NO: 276351 - protein, 48 aa, Glycine max
  Clone ID: PAT_MRT3847_91564C.1.pep
FSSLALYFGHPRVLSEQLSPVRPWFCHTVSEGYPFFDRSSAILFVCKP

SEQ ID NO: 276352 - protein, 106 aa, Glycine max
  unsure (1)..(106): unsure at all Xaa locations
  Clone ID: PAT_MRT3847_91565C.1.pep
HRKHVMAVAATTASSPDAAVASAQAAAAVIRXTSTSNATSKSIEHAAAITIQSDFLSHLAKKALCALKRLSKMQALVRGHLWRKQAKATLKCLQALVTTKPELMLR

SEQ ID NO: 276353 - protein, 42 aa, Glycine max
  unsure (1)..(42): unsure at all Xaa locations
  Clone ID: PAT_MRT3847_91566C.1.pep
NCNHSVRIPGIXNRKPPQRPLHMAHVSASPCALSDLVFLIVS

SEQ ID NO: 276354 - protein, 158 aa, Glycine max
  Clone ID: PAT_MRT3847_91567C.1.pep
FLLMLQGLAINDSCDAFLPGDNDPHWLVRMGEGNSVYFTVPENCRMKGMALCVVYLTNPKNTAAECLIYVLMVNYTKCSIKIYKQDTVISFNDVDWQGIISHLEPGDKVKIFVTFGHGFVVKKTAVYLIRTLGEPSGPLTSSKRTLKCWSHYPHHSCS

SEQ ID NO: 276355 - protein, 82 aa, Glycine max
  Clone ID: PAT_MRT3847_91568C.1.pep
MNASTVDRNHIYINVAGTTICDIHHGFRLGRETPMHPSITNLHTYMTAMRDPETTPIHDEMRTPMRDLTWNTYTTLSPAKNN

SEQ ID NO: 276356 - protein, 53 aa, Glycine max
  Clone ID: PAT_MRT3847_91569C.1.pep
ITSIPSINLPYIILNILTLSQYTLSNTIFYLNTTHITLSIPKIPLLHSTTSHT

SEQ ID NO: 276357 - protein, 238 aa, Glycine max
  Clone ID: PAT_MRT3847_9156C.1.pep
MYLYSLTLQRPTGIICAINGNFSGGKSQEIVVARGKVLDLLRPDDNGRIQTILSVEIFGAIRSLAQFRLMGAQKDYIVVGSDSGRIVILEYNKEKNVFDKIHQETFGKSGCRRIVPGQYLAIDPKGRAVMIGACEKQKLVYVLNRDTAARLTISSPLEAHKSHTLVYSICGVDCGFENPIFAAIELDYSEADQDSTGLAASEAQKHLTFYELDLGLNHVSRKWSEQGDNGGQLLVTVP

SEQ ID NO: 276358 - protein, 38 aa, Glycine max
  Clone ID: PAT_MRT3847_91570C.1.pep
SYSVRSASSSSSLFPQLSNYIRRGPQPLGIAPKVDLIE

SEQ ID NO: 276359 - protein, 68 aa, Glycine max
  Clone ID: PAT_MRT3847_91571C.1.pep
LTEQNIKGLRWIRPSHQPFQPLPIIQPFLTCTGNLYLSVPHTISSLMKVSESSNIEFTSFHQRRAFVR

SEQ ID NO: 276360 - protein, 79 aa, Glycine max
  Clone ID: PAT_MRT3847_91572C.1.pep
WWREEEISRTLLCDGVVIVREVLRERVVKMIQTESSNVRYRVSAIFRIDLGRESELYSPLSQARMLCGKERGERGACIT

SEQ ID NO: 276361 - protein, 69 aa, Glycine max
  Clone ID: PAT_MRT3847_91573C.1.pep
PLLQPHIRTLLNYHSSASTVTHQYTGSNRAGRKKRLADPRSLTKTTLILIQYTNRIEITLSLYIDIPST

SEQ ID NO: 276362 - protein, 359 aa, Glycine max
  Clone ID: PAT_MRT3847_91574C.1.pep
MANFTSFSSSLSHLLPLSSPSSSAAFDDSSEDSCSICLEPFSVHDPSTVTCCKHEYHLHCIIEWSQRSKECPICWQSLALKDPASQELLAAVEDEKCMRSRNIANSRAPLGQLNESHDDSCSDDSDFDDQIMKRLVSAARRAHFVQRQERKRSPSAGPSEALGVNSSMHVSEVQTTLTTSSSGGSLPASGVPSTVSIQPPALNTTPESARRPNTSEISFPESFKSKFSAASARYKESISKSTLGLKEKLLAHNVSVKELSKGVQREMNAGIAGVARMIERLDLSSKRSSAPLIAVHSVATSDFPSSGKSVEENGIGGSPSKENGGAVHDVSSDVPPLVTNMQSFRTKTPPFLQSGHGMV

SEQ ID NO: 276363 - protein, 94 aa, Glycine max
  unsure (1)..(94): unsure at all Xaa locations
  Clone ID: PAT_MRT3847_91575C.1.pep
MSHFGGKYHDELITNAAYIGTPGKGILAGDEPTRTIGXRVASINGEIIEHHRRALREHAHTAPGVLQHLSGVILCEETLLPNHRLMAIPFENRL

SEQ ID NO: 276364 - protein, 62 aa, Glycine max
  Clone ID: PAT_MRT3847_91576C.1.pep
IFSHSLRYHIQRCKVILGLSFNSIIGWRVIIQQMGCVISQIRNVSSAMSTYPRELLVIIPLF

SEQ ID NO: 276365 - protein, 117 aa, Glycine max
  Clone ID: PAT_MRT3847_91577C.1.pep
NNLLNWVCDKHWHSPSPVVSPTSSAHLRSTPFELCYYSRRSLSCKIEILVCFPTYVSPQALFLRYSHIFNSPVLGCMGLGTGSPFFILNPPVLHPPPYPPQPPPALARPPPPPPPPQ

SEQ ID NO: 276366 - protein, 33 aa, Glycine max
  Clone ID: PAT_MRT3847_91578C.1.pep
MGGFEQKMKDRAKELKVLLKKGVKIVGNSCKKG

SEQ ID NO: 276367 - protein, 1182 aa, Glycine max
  unsure (1)..(1182): unsure at all Xaa locations
  Clone ID: PAT_MRT3847_91579C.1.pep
MFTPPRVWSGWSLTPNKSGVRGGTGSGSELGPNSGDGASAKGKGVVVVENGGNLDREVLVERVSSLEKELYEYQFNMGLLLIEKKEWSSKYTELSQDLVEVKDALEREKAAHLISLSEAEKREENLRKALGVEKECVLDLEKALREMRSEHAKIKFTADKCFSSCLXSEAKLHSADAKFAEISRKSSEFDRKSQELESQESTLRRDRLSXSAAEKTEGHESTLSKQREDLREWEKKLQEGEERLAKGQRIINEREQRANENDRLCRQKEKDLEEAQKKIDATNVTLRNKEDDVNNRFANITLKEKEYDSLRINLDIKEKELSAWEEKLNAREKVEMQKLLDEQNTILDVKKQEFEVELDEKRKSFEDGLKNKLVEVEKKEAEITHMEEKVAKRKQALGKKAEKLKEKEIEYEQKVKAFSNSQKLIKSEEKSLVTEKGKIESEREELLTHKAEVEKIRANNEEESLRINEEIDRLKVTEEERSEYLRLQSQLKHEVDQYRHQKELLLKEAEDLRQQKETFEREWDELDLKRTDVEKELKSVIQQKEEILKLQQYEEEKLRNEKQDTQAYVQRELETLKLAKESFAAEMELEKSSLAEKAQSERNQILLDFELQKKELEADMQNQLEQKEKDLIERKKLFEEKRESELNNINFLREVANREMDEMKLQRSKLEKEKQEADENKKHLERQRMEMQEDIDVLVDLNRKLKNQREQFIVERRRFIEFVEKLRSCQNCGEMISEFVLSDLQSSVDIENLEVPSLPKLAADIVQGVSNENLASSRQNTGLSPATDPKSPVSGGTVSWLRKCTSKIFKISPIRKIESEDSGTLRDVVTLSVEQTNVEDSPGRIPDAENEAELSFAVVNDSFDARRVQSGNDIIEVEADHDPSVENLNNVDSKAPEDLQAPDSKVGQQKSRKGGGRPRVKRIHTVKAVIKKARDILGESGKALPGESVDHYENEFQNVHNEDSANVNSERKKTHNWRVPERSRKHNKVHSVLQISKLGKSAETASAAARRRQKGQRKRRRQKAAAPPAQTAGESRYNLRRLKTGATTSSARAMSGGGKESQGEVDRVKDTEEGIIDSKTSHSHSVGITNENGESIHLEQSLKGVETRAGYGGDTTETFANNMALSEEVNGTADDVEENDAEYRSESRGEDAGGVDNEDDEEDYLQPGEASIGKKLWNFFTT

SEQ ID NO: 276368 - protein, 45 aa, Glycine max
  Clone ID: PAT_MRT3847_9157C.1.pep
KVYFSWKYGTHILYSCSVESCTLTAFFINFYKRLMRYMGSKQVLT

SEQ ID NO: 276369 - protein, 70 aa, Glycine max
  unsure (1)..(70): unsure at all Xaa locations
  Clone ID: PAT_MRT3847_91580C.1.pep
FCIFGYLGMVYAMISXVGVLGFLVWAHHMFTVGLDVDTSAYFTAATMIIAVPTGIKIFSWFDKIRFGVRF

SEQ ID NO: 276370 - protein, 71 aa, Glycine max
  Clone ID: PAT_MRT3847_91581C.1.pep
FQAAILFKIFVFISLCGMNVDNDDDSRGLLSHYSSIGHLLSLPGSYGDDCRGSMMFGFLRLDSILYCSVCV

SEQ ID NO: 276371 - protein, 294 aa, Glycine max
  Clone ID: PAT_MRT3847_91582C.1.pep
MAHANPMIFVVGILGNLVSFCCFLAPVPTFYRVCKKKTTEGFQSLPYVAALFTSMLWIFYAYIKTGEILLITINAFGCFIETVYLVIYITYCPKKARFFTFKMIFLFNVGVIFLVVLLTHVLAKERTARIELLGWICVVLSTSVFAAPLSIIKVVIRTKSVEFMPITLSLLLTVSAMMWMAYGILLRDIYVTLPNFVGITFGTIQIVLYLIYRKNKPVKDQKLPEHKDDVANDENVNTAVSGENRGANATGFVDIEIGEKKQVQEQADKKQDQQAVNARDQTEHNNNSNKTREG

SEQ ID NO: 276372 - protein, 146 aa, Glycine max
  Clone ID: PAT_MRT3847_91583C.1.pep
KLITTVEQDLSHAGSFLARFVEALHYYSALFDALGDGLGADSLERHTVEQHLLGCEIRNIVAVGGPKRTGEVKLERWGDESKRAGFGPVSLRGNPAAQASLLLGMFPWRGYTLVEENGSLKLGWKDLSLLIASAWQPSDLMITYPD

SEQ ID NO: 276373 - protein, 50 aa, Glycine max
  Clone ID: PAT_MRT3847_91584C.1.pep
QNIFTFKMHHFLKKCTNEWVVSLGFLSGQAESLASFQHGGRRGRDKNIVK

SEQ ID NO: 276374 - protein, 81 aa, Glycine max
  Clone ID: PAT_MRT3847_91585C.1.pep
GHNRCQSATALGFSVNVGLILHKEDEITVLGYDCGCTEESARTSYVGMIQIRRVQNVGMRKQWPRRLYTCNPDLSTGGVRD

SEQ ID NO: 276375 - protein, 35 aa, Glycine max
  Clone ID: PAT_MRT3847_91586C.1.pep
GGWGTTPWRGSADGSASRSQGSFSLKCAVDGRAIT

SEQ ID NO: 276376 - protein, 84 aa, Glycine max
  Clone ID: PAT_MRT3847_91587C.1.pep
HCRVVGLFCSMVGRWTRQAPAVFLHTRGRARMQAWSTLPREWIYHCWFQSHHLCYNPTHIHGCLKEVFKMNGFRHQRADQLRGA

SEQ ID NO: 276377 - protein, 146 aa, Glycine max
  Clone ID: PAT_MRT3847_91588C.1.pep
MEHSASFNNNSLSSQRSLASVPSLNSHSHLFIPSTTSHSCLTTLKPHTSSSVYISCLTLAGNLLYTGSSDREIRSWNHTHFIQKPTTTNNNVVIAGKGAVKSIVVHSDKLFTAHQDNKIRVWRVTNLEHDQNQKYTRVATLPTLGD

SEQ ID NO: 276378 - protein, 54 aa, Glycine max
  Clone ID: PAT_MRT3847_91589C.1.pep
LVQTPETFIAWNKELFSPTAHMRALSPGIIYKALANTLYYETQEPLFYPWSSGC

SEQ ID NO: 276379 - protein, 80 aa, Glycine max
  Clone ID: PAT_MRT3847_9158C.1.pep
IRIGAESGGIRNGKKKKKGVFIFSKGFSSQKKKTPGVFHMVVSPILGTGVGVKIGAFKLALLSINPVLVLRKRRVKELLL

SEQ ID NO: 276380 - protein, 72 aa, Glycine max
  Clone ID: PAT_MRT3847_91590C.1.pep
IKMNSVKVRKKNIKIDAASLGMIHRGLRNLKDYLRSVLELIPLHWDQYRPFKTGLQFHCTSNFRSFPTVKIK

SEQ ID NO: 276381 - protein, 163 aa, Glycine max
  unsure (1)..(163): unsure at all Xaa locations
  Clone ID: PAT_MRT3847_91591C.1.pep
SVDQHLAFVSIEQQSPDIAQGVHGHFTNXEYMPLSHVLATKLGARLTEVRKNGTCAWLRPDGKTQVTVEYYNDNGAMVPVRVHTVLISTQHDETVSNDQIAADLKEHVIKPVIPEKYLDEKTIFHLNPSGRFVIGGPHGDAGLTGRXIIIDTYGGWGAHGGGA

SEQ ID NO: 276382 - protein, 151 aa, Glycine max
  Clone ID: PAT_MRT3847_91592C.1.pep
MELLKISLLKRKHKPDASSRLAATGISTDTRERFALLSIFSANVSHITRNLSSVKELLSLFSVQVSYAIGVPEPLSVFVDTYGTGKIPDKEILQIVKENFDFRPGMIPINLDLKRGGHRFLKTAAYGHFGRDDPDFTWEVVKPLKSEKPQA

SEQ ID NO: 276383 - protein, 709 aa, Glycine max
  Clone ID: PAT_MRT3847_91593C.1.pep
MPELRSGARRSKRLGDLQPGPLPVDQGENWQQPAAPNRTRRRVGGGRGRGGNATAVGKGPSPAVPTRRTAAGRGRGARLIDLDPEPCEVLPEPVALGAPEPVYNNVEVVANNNIVMEGGSGDKVAGAEEEPSTTPVPERVQVGNSPIYKIERKLGKGGFGQVYVGRRLSGGSDRTGPDAVEVALKFEHRNSKGCNYGPPYEWQVYSTLNGCYGIPWVHYKGRQGDFYILVMDMLGPSLWDVWNSVGQQMSPNMVACIAVEAISILEKLHLKGFVHGDVKPENFLLGQPGSAEDKKLYLIDLGLASRWKDASSGLHVDYDQRPDIFRGTIRYASVHAHLGRTGSRRDDLESLAYTLVFLIKGRLPWQGYQGDNKSFLVCKKKMATSPELMCCFVPAPFKQFLEAVTNMRFDEEPNYAKLISLFESLIEPCTPLRPIRIDGALKVGQKRGRMLINLEEDEQPKKKVRLGSPATQWISVYNARRPMKQRYHYNVADTRLRQHVDKGIEDGLYISCVASAANLWALIMDAGTGFSSQVYELSPAFLHKDWIMEQWEKNYYISSIAGAVNGSSLVVMSKGTPYTQQSYKVSESFPFKWINKKWKEGFHVTSMTTAGSRWGVVMSRNAGYSDQVVELDFLYPSEGIHRRWENGYRITSMAATSDQAAFILSIPKRKLLDETQETLRTSAFPSTHVKEKWAKNLYIASICYGRTVC

SEQ ID NO: 276384 - protein, 394 aa, Glycine max
  Clone ID: PAT_MRT3847_91594C.1.pep
MAQETFLFTSESVNEGHPDKLCDQISDAVLDACLEQDPDSKVACETCTKTNMVMVFGEITTKANVDYEKIVRDTCREIGFISDDVGLDADKCKVLVNIEQQSPDIAQGVHGHFTKRPEEVGAGDQGHMFGYATDETPEYMPLSHVLATKLGARLTEVRKNGTCAWLRPDGKTQVTVEYYNDNGAMVPVRVHTVLISTQHDETVSNDQIAADLKEHVIKPVIPEKYLDEKTIFHLNPSGRFVIGGPHGDAGLTGRKIIIDTYGGWGAHGGGAFSGKDPTKVDRSGAYIVRQAAKSVVANGLARRCIVQVSYAIGVPEPLSVFVDTYGTGKIPDKEILQIVKENFDFRPGMITINLDLKRGGHRFLKTAAYGHFGRDDPDFTWEVVKPLKFEKPQA

SEQ ID NO: 276385 - protein, 131 aa, Glycine max
  Clone ID: PAT_MRT3847_91595C.1.pep
QAHSCKIFQRIQMGNPFFFFIEKSITWPLFAPQVRNVSQQVLTPPGGPTSFEVKTTSAKSSKFLSTPPFFFFFRTPFPNIDLYKIISHIYSSGNFFCKGFSSKNLLGGPKDEVSKLKNPIPSTLNWGRRTG

SEQ ID NO: 276386 - protein, 241 aa, Glycine max
  Clone ID: PAT_MRT3847_91596C.1.pep
VSPKIAGLKFLYELDLSNNLFSGAFPTSVLNIPTLSFLDIRFNSFSGTLPPQIFMQTLDVLFLNDNNFMLTLPNNLGNAPVVYLTLANNKFTGPIPRSIGKASSTLIEVLLLNNLLTGCLPYEIGFLKNLTLFDVGGNLLTGPIPWSFGCLKKVEQLNLARNFLYGQVPEVVCALGNLANFSLSYNYFTKVGPLCKMLIQRGVLDVRKNCIFGLPDQRSVRECMAFFLISKSCSDPALFNF

SEQ ID NO: 276387 - protein, 50 aa, Glycine max
  Clone ID: PAT_MRT3847_91597C.1.pep
HFLKNYIWRNISFFLYCVILPNLNSLSSKNHLSFVLLNLQHSKFILDLQI

SEQ ID NO: 276388 - protein, 246 aa, Glycine max
  Clone ID: PAT_MRT3847_91598C.1.pep
EDYLNVKVRRVDVLSAWSGIRPLALDPTAKNTESISRDHVVWEDYPGLVTITGGKWTTYRSMAEDAVNAAIKSGKLTPTSICVTNNLRLVGGEGWEPSSFTVLAQQYKRMKSTYSGKVVPGVMDSAVAKHLSQAYGTLAERVATIAQNENLGKRLAHGYPYLEAEVAYCARNEYCESAIDFIARRTRLAFLETNAARKALPRVIEILANEHKWDNSKQKEELEKATEFLKTFKSSKNAQFHDGKHS

SEQ ID NO: 276389 - protein, 93 aa, Glycine max
  unsure (1)..(93): unsure at all Xaa locations
  Clone ID: PAT_MRT3847_91599C.1.pep
LALPRTHLTIGSAYAYCGELGERIVTAGRYNEDHARYCLQQLISGVSYXHSMVIGHKDRKAANTVLDGNSIPXLKICDFGYHKSALLHSEPKS

SEQ ID NO: 276390 - protein, 96 aa, Glycine max
  Clone ID: PAT_MRT3847_9159C.1.pep
TCWPMFIALTPFSHYSVRDVRDVYYMQEVCYNVCGFMPTVCEECDRANACRPINASSVSYFICMRHRSFEPVALFVCGFNASPYKEASFEKMCFRV

SEQ ID NO: 276391 - protein, 73 aa, Glycine max
  unsure (1)..(73): unsure at all Xaa locations
  Clone ID: PAT_MRT3847_915C.1.pep
LCLITHPKIIKSSNHKFVTPQNYMASETHHHVQGLTPEELXQLEPIIKKYHLXXXXXNNXFXXXXQGXXXXGA

SEQ ID NO: 276392 - protein, 56 aa, Glycine max
  Clone ID: PAT_MRT3847_91600C.1.pep
FLYEFSGRMYFQEVGHTCVGVTEYDEFESRVIHGLVIPPRYDRWREREIECLECRV

SEQ ID NO: 276393 - protein, 65 aa, Glycine max
  unsure (1)..(65): unsure at all Xaa locations
  Clone ID: PAT_MRT3847_91601C.1.pep
YXXLNXXVSPXXXAXLSMPXCXTXRXCXXTAXXFDXRHSRRXXXPVSXXXXXXXXFRXXAXAXXR

SEQ ID NO: 276394 - protein, 90 aa, Glycine max
  Clone ID: PAT_MRT3847_91602C.1.pep
VEGVKEFDTRWIGWAGVNVPDDVGQRALTKALAEMRCIPVFLDEEIVNQYYNGYCNNILWPLFHYLGLPQEDRPSTTRTFQSQFDAYKKA

SEQ ID NO: 276395 - protein, 88 aa, Glycine max
  Clone ID: PAT_MRT3847_91603C.1.pep
MDGIKSAVSTDRSIRLVGKHQYSFNVEAGFSRAINQRWVVLFFVVEVITNNSHLPPEEGRRVPPIVGPTLHYSSIITPLPAGYFPPPL

SEQ ID NO: 276396 - protein, 548 aa, Glycine max
  unsure (1)..(548): unsure at all Xaa locations
  Clone ID: PAT_MRT3847_91604C.1.pep
MGRPWDCIYALEEEDEDGIIAGGIGEDGGGAAGFDLTSLCRAYHIHQTLGLEDRFKQYYFENRKLQLTSDFQVSSMTPFLESHQTFFAQIAGFFVVEDRVLRAGGGLISKMEVENLWDIAVSKMCSVLEDQFSRMQTANHLLLIKDYVSLLGVTLRRYGYPIDALLDVLSKHRDKYHELLLSDCRKLIAEAVAADKFEQMLMKKEYEYSMNVLSFQIQTSDIIPAFPYVAPFSSTVPDCCLTSQVFIGDSVSFMSYISQXDSLDXVSDSVKRFNVNAINGIEVDIRLLESFSVSQAMHMAANMVVLERACDFFFRHAAQLSGVPLRMVERSRRKFPLRKARDATRQWLSGLLKAKVDGFMTLIENVNWMGDEAPQSGNEYVNEVIIYLEILVSTAQQILPSQVLKRVLQEVFAHISEKIVGTLVSDSVKRFNVNAITGIEVDIRLLESFADNQASLFSDGDVDVLRASLASSKQLINLLLSNHPENFLNPVIRERSYNTLDHKKVVIVSEKLRDPSDRLFGTFGSRGARQNPKRKSLDTLIKRLRDVS

SEQ ID NO: 276397 - protein, 75 aa, Glycine max
  unsure (1)..(75): unsure at all Xaa locations
  Clone ID: PAT_MRT3847_91605C.1.pep
NNEKIMHIPYTWTLAELSIFDDVEITGNNSTTLDMFLHDMKHVLFPDGLMRXFTKMLINTDWNSADIYALITKLL

SEQ ID NO: 276398 - protein, 119 aa, Glycine max
  Clone ID: PAT_MRT3847_91606C.1.pep
VNNTLMGDLTALGWKFMLLVSSVKLFMMDTWQCLESRHCVLRVHSNRTMPSLLSDSNCQKRVFWNKTELPVVTSCIGADVSSLACYVMEIWHEAFGGNGTDMLSAPSLFHTNGQILVTG

SEQ ID NO: 276399 - protein, 98 aa, Glycine max
  Clone ID: PAT_MRT3847_91607C.1.pep
NSLRTNKALIPQYDAVITNIKEELRPKPGPSTSNLAEDAEEHDKNPDDTDKGKRQAEQTVSPAAAGATKWAEDSWKTKKALQRTEDPNQEELEVGLRT

SEQ ID NO: 276400 - protein, 461 aa, Glycine max
  Clone ID: PAT_MRT3847_91608C.1.pep
RAGSSCGGGENNNNNDGGKQGVELSTAQRQELQMKKSKLVTMLDEVEQRDRQYHHQMQVVITSFEQAAGVGAAKSYTALALKTISKQFRCLKDAISSQIKTTSKTLGEDNCLGVKVEGSRLRYVDHQQRQQRALQLGMIQHNAWRPQRGLPERAVSVLRAWLFEHFLHPYPKDSDKVMLAKQTGLTRSQVSNWFINARVRLWKPMVEEMYLEEVKQEPNNSSQDNNNTKGSNESSKELWSEANAAAQESGAMRFDQINILQSKAESFKNNQTTSPTEISNSNSLQSGFHLADMQSPNKPKSTSEMHQNSPGSILSVDMEMKPHHHGETNNITREGQNNNTTTKFGIESHGGGFGAFPNMEDIGRFHHHVTEQLAPRFHGNGVSLTLGLPHSTENNLSLSGTTQHGFLSQNMHLGMRNSENDEFCGAINTTPPSSHSGISYESIDIQNRKRFAAQLLRDFVA

SEQ ID NO: 276401 - protein, 79 aa, Glycine max
  Clone ID: PAT_MRT3847_91609C.1.pep
CGHLVPIGTQNVRENTVCDARSSQHSPKRLGVGFFPKEKERASSSFATCHSWRIEHTGRGEHAGPLSKESKEFLIWSFL

SEQ ID NO: 276402 - protein, 62 aa, Glycine max
  Clone ID: PAT_MRT3847_9160C.1.pep
QSSNRNSTTRICIYGLTVLIFRISVRTYLNESRLIHLKREIIKGQIEANSLSIQVVPFCHYL

SEQ ID NO: 276403 - protein, 95 aa, Glycine max
  unsure (1)..(95): unsure at all Xaa locations
  Clone ID: PAT_MRT3847_91610C.1.pep
DKLYXXXVNKXAKIMNLRXSXVGEXKXLTDGXXYEGXXIXVSXNISXGEXXVXXIPXXAQEEILSSSXXXXRMXMVSKHSKPXAXAMHVGAIXIX

SEQ ID NO: 276404 - protein, 249 aa, Glycine max
  unsure (1)..(249): unsure at all Xaa locations
  Clone ID: PAT_MRT3847_91611C.1.pep
MGMAAVESQFHVLAVDDRIIDRILIERLXQPFSIXVTTFDFVHYFLXFSGCHRMMRSISCIPSVLSQQPXTPQEVEVNFVITDYSMPGMTGYDLLMKIKESSSLRNIPVVIMSSENVPSRINRCLEEGAEEFFLKPVRLSDLNKLKPHMKKTKFKDQKQETVERFEDSEVQQQQSQQQIIIQNEHHQAPKLQVLQPESESESHPQPTIEQQQQILQQANNNNKRKTMEQGLSPETDRTRPRYSGIATVV

SEQ ID NO: 276405 - protein, 161 aa, Glycine max
  Clone ID: PAT_MRT3847_91612C.1.pep
TVSHLIKNLPCFNYRKSILILPMSSENVPSRINRCLEEGAEEFFLKPVRLSDLNKLKPHMKKTKLKDQKQGTVEKLEDLEVQQQQPQQQIIIQNEQQQAPKSRDLLQPESESHPHAQPTIEQQQQSLQQANNNSKRKTMEQGLSPETDRTRPRYSGIATVV

SEQ ID NO: 276406 - protein, 161 aa, Glycine max
  Clone ID: PAT_MRT3847_91613C.1.pep
QRSTATGTTQVPARGRRRRNSSQRKARHTSSQPQQDLQVSQALGGHKRPHPPGGLEENTLLTRPSATPAAVHLAHPTQSHQHRLTNREKETSRSQNPGSLPPAPPQALSRSRQLNSLGASKMLSLYPHLIKAITIHRQVGNSAPSPKKKKKKKKKKAAPRG

SEQ ID NO: 276407 - protein, 135 aa, Glycine max
  Clone ID: PAT_MRT3847_91614C.1.pep
IDSEGWLRTGDLGYIDENGFVYIVERIKELIKHNGYQVAPAELESVLLSHPLIVDAAVIPVEDEETGQIPMAYVVRAAGSELSENQVIQFVAGQVAPYKKVRKVSFIDTIPKSAAGKILRKDLVSQSKYQLVSKL

SEQ ID NO: 276408 - protein, 124 aa, Glycine max
  unsure (1)..(124): unsure at all Xaa locations
  Clone ID: PAT_MRT3847_91615C.1.pep
LSKNIYWFGMRTDVXNCLDCQHTKYETKRIVDLLCPLLVPHRPWEDLSLDFITGLLPYHVHTAILVVVDHFSKGIHLGMLPSSHTAHTVACLFIDSVAKLHGLPRSLVSDCDLLFVSHFWQELF

SEQ ID NO: 276409 - protein, 89 aa, Glycine max
  Clone ID: PAT_MRT3847_91616C.1.pep
PTYLWKPKSIPPTVSRNLNWGNSNEAHAPYEIYKQKKAQSDRALPAHHRIDKEEKESPSSVFHHRIIIISRNTKLKNHVLYIQIPICKF

SEQ ID NO: 276410 - protein, 156 aa, Glycine max
  unsure (1)..(156): unsure at all Xaa locations
  Clone ID: PAT_MRT3847_91617C.1.pep
MRENSADMLDYQDLLTGDETXSDSFLYNEIENGMLCEVDGKWVDKGAIDVDIGANPSADGGENKGVEDSSVKVGDIVDTFILQQQPDFDNKQSVTCRKRFIKNITTKLDADKHDFAKKHIDGATKDLLSKINDLQVFGGESMNDDACSDXAYYKDG

SEQ ID NO: 276411 - protein, 50 aa, Glycine max
  Clone ID: PAT_MRT3847_91618C.1.pep
NSARGSIKVLLVEDDDSTRHVVRALLRNCSYEGINVVFVVNHALAPRLTN

SEQ ID NO: 276412 - protein, 140 aa, Glycine max
  unsure (1)..(140): unsure at all Xaa locations
  Clone ID: PAT_MRT3847_91619C.1.pep
PPERKRRALELEKASSTKXKFVSGKXFKYDIIGGGSHSSEDVPEKEDQEKPKKIDARLRQRIDPQHNEALAQTETNSFKPSLDDGETPKGPMADLKSPQSKSALPKNPVGGTTRRSDLLANLSTEGNFRASVDWQATPPE

SEQ ID NO: 276413 - protein, 87 aa, Glycine max
  Clone ID: PAT_MRT3847_9161C.1.pep
LIGMQMSLTKKPTNPSTTIPIAIRTSNHGEFLCDRVSVITSRASRRPASMPVGFLVKILMATSVFSQSKSIYGEIRITLRCWREERY

SEQ ID NO: 276414 - protein, 97 aa, Glycine max
  unsure (1)..(97): unsure at all Xaa locations
  Clone ID: PAT_MRT3847_91620C.1.pep
KARENEHRTTRKTEEHTEGKQARTEERSADASKDSKTKTSTADEXAKEKQGPEATEAGEESDQSREQEKATQRRAKPRQEQKGQPTTKTPKQAGNTN

SEQ ID NO: 276415 - protein, 56 aa, Glycine max
  Clone ID: PAT_MRT3847_91621C.1.pep
EERTRNWKGLMMTSHEGEHITDHSLDYSRPKKKMKVHKTWNLNKQTTYPILRNRNI

SEQ ID NO: 276416 - protein, 65 aa, Glycine max
  Clone ID: PAT_MRT3847_91622C.1.pep
YIMVKGCCVGPKKRVITLRQSLLKQTSRVALEEIKLKFIDTSSKFGHGRFQTTQEKHKFYGRLKA

SEQ ID NO: 276417 - protein, 93 aa, Glycine max
  Clone ID: PAT_MRT3847_91623C.1.pep
NCFFLNNNNNNNIIIIIIIIIIIIIIIIIRPKEQKAPEVPRSPQTDTMNNATKQTKTARLKIILQHAFPIMKALYNPLFSLDLEPIIISTKTN

SEQ ID NO: 276418 - protein, 83 aa, Glycine max
  Clone ID: PAT_MRT3847_91624C.1.pep
LIKITFYMNFMIIITLKLYKLRIYIYIYIYIYIYIYIYILFEKIGYVVIVKKKLDRYHNLLYKINLLIFIIIILKIILILIFD

SEQ ID NO: 276419 - protein, 60 aa, Glycine max
  Clone ID: PAT_MRT3847_91625C.1.pep
MGSRGVIADKWSMRILWACAIGSAVSLYMVAVERQAQNRQRMLAEELKAMESGESNGKDG

SEQ ID NO: 276420 - protein, 435 aa, Glycine max
  Clone ID: PAT_MRT3847_91626C.1.pep
VTFPVTLRAWQVGLVDADAGAGKTVSGNNMRHSKDGSSPSLLIHYAGPMKTSEDTPTNGSTVPPGRRLVVPLQICVLQGLSFVKAQLLSMEFPAHVGETLPKLDDLNNKSTDVESETKMDRLVKIDPFRGSWGLRFLELELSNPTDVVFEINVSVKLENSSNEDNHFADQGATEYVYPKTRIDRDCSARVLVPLEHFKLPVLDDSFFMKDSQADGNGGGRNASFSEKNTKAELNACIKNLISSPRVRPHSGRDARRPQKGKEAILAALHTSVMDVLLPDPLTFGFRLVRDGSESGKPYSDKDSELVESPASKGSVIAHEMTPMEVLVRNNTKDMIKMSLNITCRDVAGENCVDGTKATVLWTGVLSDITMEIPPLQQIKHSFCLHFLVPGEYTLLAAAVIDDANDILRARAKTTSAAEPIFCRGPPYHVRVLGTA

SEQ ID NO: 276421 - protein, 492 aa, Glycine max
  Clone ID: PAT_MRT3847_91627C.1.pep
MEAQSHHRLNVLFLPYPTPGHLLPMVDTARLFAKHGVSVTILTTPAIASTFQNAIDSDFNCGYHIRTQVVPFPSAQVGLIDGLENMKDATTLEMLVKIGYGLSTLQDEIELRFQDLQPDCIVTDMMYPWTVESAEKLGIPRIFFYSSSYFSNCASHFIRKHRPHESLVSDSHKFTIPGLPHRIEMTPSQLADWIRSKTRATAYLEPTFESESRSYGALYNSFHELESEYEQLHKNTLGIKSWNIGPVSAWVNKDDGEKANRGHKEDLAEEPELLNWLNSKQNESVLYVSFGSLTRLPHAQLVELAHGLEHSGHSFIWVIRKKDENGDSFLQEFEQKMKESKNGYIIWNWAPQLLILDHPAIGGIVTHCGWNSILESVSAGLPMITWPMFAEQFFNEKLLVDVLKIGVPVGAKENKLWASMGKEEVMGREEIAKAVVQFMAKEESREVRKRARELGDASKKSIEKGGSSYHNLMQLLDELISLKKTRTCEKPN

SEQ ID NO: 276422 - protein, 86 aa, Glycine max
  Clone ID: PAT_MRT3847_91628C.1.pep
RDQGKKPYTEAKPPKNSILTKFKGEKKKKNRQFKKPNLTNKGSQAEIFAKKYSHLKKKTPPVFLKFQKNHNSAKKPLPANACSILG

SEQ ID NO: 276423 - protein, 63 aa, Glycine max
  Clone ID: PAT_MRT3847_91629C.1.pep
TCGMQNINIIVDPSSVHWILLSYKRWTVVLYTLYLERTQFSVHFSVCDLLVLCHCNLRSYFIE

SEQ ID NO: 276424 - protein, 82 aa, Glycine max
  Clone ID: PAT_MRT3847_9162C.1.pep
PLLLSLKLFFFSQLKLNLQTFSTESFLAEINSPPTLPTGVAETHDSHPTDLPITLYSPFFTSSTNSSPSSFYTCTYTLVTQG

SEQ ID NO: 276425 - protein, 95 aa, Glycine max
  unsure (1)..(95): unsure at all Xaa locations
  Clone ID: PAT_MRT3847_91630C.1.pep
XXXXXXXPXGPEKXNGSPGDXEXXRGXAXGKXXXXNXXEQXXXXAXKXGXGXXEGXXDXXXXXXXEXGXRXRXXXGREXGXXGXXGAWXXXXTRG

SEQ ID NO: 276426 - protein, 53 aa, Glycine max
  Clone ID: PAT_MRT3847_91631C.1.pep
VRMLFLFSFIITKTFRHGEYIQWVNRDTICIQHSTHAQEGCQISNLCLKVYLI

SEQ ID NO: 276427 - protein, 396 aa, Glycine max
  unsure (1)..(396): unsure at all Xaa locations
  Clone ID: PAT_MRT3847_91632C.1.pep
LELGEWWKSDVEAILNQAENSGLPPNISDAHTINGHTGPIPGCTSQGYTLHVESGKTYLLRIINAALNDELFFKIAGHKLTVVEADASYVKPFETDTIFMSPGQTTNVLLTANQVVGKYLIAVTPFMDAPIGFDNVTSIATLRYKGTPXIPKTTLTTIPALNATPLTSDFIDSLRSLNSKEYPAIAPLTVDHSLFFSITVGLNPCHTCLTGARLVSAINNITFLMPTTTSLLEAHYYNIKGVFTDDFPSFPPIAFNYTGTQPANIQTNNGTRLYRLDFNSTVQIILQGTAMIAPENHPFHLHGYNFFVVGQGLGNFDPEKDPLSFNLVDPVERNTIGVPNGGWAAIRFRANNPGVWFLHCHLEVHTTWGLKMAFIVDNGNGPHESSLPPPKDLPMC

SEQ ID NO: 276428 - protein, 317 aa, Glycine max
  Clone ID: PAT_MRT3847_91633C.1.pep
MGSVSYSNLKNAMIAFLVPLPSILFYLSFQSAISTPSSWSSLWTWCYHHPLLLANVLFFFNVNFLFWLIGLIQSSHWMIDPYWTVIPVMLVHYYSTHPLAQYQWWRSRIVTLLTWAWSVRLIHNYFRREKWQWGAREDWRFTDLSHRYGRHWWWASFFAIYVPQQVFLIGLSLPFYVIHSVNQPLSMWDLVAIVVCVSGIVTAYIADTQLYNFVSRKNKEVPILDKGLWYYSRHPNYFGEQVWWWGMAVFAWNLGHGWAFIGALANTMCLAYVTKLVEDRMLKQDSRAEAFRLYQKTTSLWIPWFKSSPLGLKSKDA

SEQ ID NO: 276429 - protein, 333 aa, Glycine max
  unsure (1)..(333): unsure at all Xaa locations
  Clone ID: PAT_MRT3847_91634C.1.pep
NAVPPAGPGPGVEDRPCVFHASAELHRRSIAXLRKVELANPDMHIIGDPSSIPIVISERVMNAPRRTISDNSYLRQGHHLDLRLIRNQWLLIDPKVEFLMSETNEDKTSGDFREMGHRLAQEVISFVRKKMDKASRYGNLGDIRLSFVGHSIGNLIIRTALAESMMEPFLRYLYTYVSVFGRXLGYLYSSNSLFNSGLWLLKKLKGIQCIHQLTFTDDQDIQNTFIYKLCKQKTLDHFRHIILLSSPQVFPCLVTLNSIFRRHFYSRFLTCIXDQIRVYNSKHRVFIYCDIIFDATSYGKNLNSFIGRAAHIEFLESDIFARFIMWSFPELFR

SEQ ID NO: 276430 - protein, 63 aa, Glycine max
  Clone ID: PAT_MRT3847_91635C.1.pep
SVRWEFISSVCLSLCEVPFWVQHHSSRRRRWIGHHLAYPALETEGEHDPMDALTRTPFPLGNE

SEQ ID NO: 276431 - protein, 300 aa, Glycine max
  Clone ID: PAT_MRT3847_91636C.1.pep
MDTPERNQITSTLSKFEDSPVFNYINSLSPIKPVKSVPISQTFNSLSFSSPPSVFTSPHVSCLKESRFLRRHNPLGTSKPKVPSEDVIKVHSSEETLADSTRAHHNSSKLEEENTGKGISVRDASIELSREHIKFSDELPQALKYNCGSPGYDPPPCGDEANSLLELPGEAAENVGYVQEGCKTDSVEGEVHLQEVCQMEPKSEGPDCYWDSLIPDAPDMLIFNSPGEAEAFKGLMHKPLDSSIRLSKFMSMLPHSTINNGRKMHIVDSVASGSAHEIEDNHSEPMTATGTSQTQDNLCR

SEQ ID NO: 276432 - protein, 63 aa, Glycine max
  Clone ID: PAT_MRT3847_91637C.1.pep
HGCRYVSISTLCAKKANVDYTLAELTTRVTVIITTLHSMSPSKHSVNRWRLLLIKILNIPVNL

SEQ ID NO: 276433 - protein, 49 aa, Glycine max
  Clone ID: PAT_MRT3847_91638C.1.pep
LLNFWCSYSLKLTNMAIPPTLGPSIALKQLTASPLAELSLNRCEENIPF

SEQ ID NO: 276434 - protein, 112 aa, Glycine max
  Clone ID: PAT_MRT3847_91639C.1.pep
RGSAPKGTGEEQKGPATPPTIGPEGVTVEGAHRGARSAAGSPLPRTSKTVARVSVHVPTGKQEPPPPPSFFPGSSFARLARVHHADQRNPPYERGVIGIDLFNFNFRVPPPT

SEQ ID NO: 276435 - protein, 362 aa, Glycine max
  unsure (1)..(362): unsure at all Xaa locations
  Clone ID: PAT_MRT3847_9163C.1.pep
MAIYEMDPDVVRWGLHLLDVCTLSHHYSPSIVTQYDPDLSQVEYVTEGFCQHQYVDSDEAVAQAYQEELSQLDSMGASGISNFENEGMQGSVYTQDWPQSSNGNYNFGNESCQNSVDESYNMKEVGNYGPTPSERKNDVHENDVCGSSSGSVEVPATATSDDFWDSLEISDESLDGEVGKRLNQMVPIXVPKTNEKIPSDDEEISDHQRLLDRLQLYDLIECKVQGDGNCQFRSLSDQLYRSPDHHKFVRQQIVQQLKSYPDLYAGYVPMAYIDYLKNMSKSGEWGDHVTLQAAADWYGVKIFVITSFKDTCYIEILPQIQKSGRVIFLSFWAEVHYNSIYPEGELPSSHTKKKKKWWNFGG

SEQ ID NO: 276436 - protein, 113 aa, Glycine max
  Clone ID: PAT_MRT3847_91640C.1.pep
DRTHHYLQKLINLRSNAGASKEELENLKKETVQLKEKDEKASKEIKQLKEELSCLSKSLEKIKSESEEKDKKVETAEAHVASLQKQAADLLLEYDRLLEDNQNLQAQTLGHKS

SEQ ID NO: 276437 - protein, 45 aa, Glycine max
  Clone ID: PAT_MRT3847_91641C.1.pep
PPTLLVSYIYYSSGMNQASHSHQYASQHCHNSGPSPLMLEVCFMS

SEQ ID NO: 276438 - protein, 49 aa, Glycine max
  Clone ID: PAT_MRT3847_91642C.1.pep
FYKRGTIIGVFLLKSRFLGPLPEEPKRKTGVFFSHNVSPLSWKKFSRVV

SEQ ID NO: 276439 - protein, 71 aa, Glycine max
  Clone ID: PAT_MRT3847_91643C.1.pep
LIAGYKFPTLLRMEPGVPHPPSCAWSPSVGSGGLSIPKSPVCKSFCFRIDLFKMICSPPSVSTSYCCLNFM

SEQ ID NO: 276440 - protein, 92 aa, Glycine max
  Clone ID: PAT_MRT3847_91644C.1.pep
GFSRGPSSLVPGCLWAFFRVPPLFSFGLVHALACRVPPCPPLFPGLFGSAPRSGLWVLPARRSRPGPSVFRSGFPVSAARCLCLPALPAAGG

SEQ ID NO: 276441 - protein, 59 aa, Glycine max
  Clone ID: PAT_MRT3847_91645C.1.pep
QMLSDLDVKAATRQLICCQILTADKIVYNSKLSHNLAFLLFNLRTSFNMDIRHQTSSNL

SEQ ID NO: 276442 - protein, 163 aa, Glycine max
  unsure (1)..(163): unsure at all Xaa locations
  Clone ID: PAT_MRT3847_91646C.1.pep
MSEEEEEEEGSVMDGVMEVTKWAQEKKTDPLIWSIQVSSALNSGGVSLPSVELAQRLVSHICFENHVPITWKFLEKAMSVRLLPPLLVLSLLSARXVPQRXXHPXAYALYMDLLRRHAFSPHXHXPNYLKVMGSIHHSLSXXPSNHHPHXGGGLGHFLFSIVS

SEQ ID NO: 276443 - protein, 482 aa, Glycine max
  unsure (1)..(482): unsure at all Xaa locations
  Clone ID: PAT_MRT3847_91647C.1.pep
FRESKSDDRRFYIFTATKTLHLRTDSRKDRVAWIQALVSTRGLYPLRPLSDHLSLAPNHISVSTEGLKKRLLEEGSSESLAKDCEQIMLAEFSELQEQLQILCQERMNLLDTIRQLEAANIEPEATALHDSEYQLTKNEFSSLGRGKYSECSTTESSDDIEKQEMEEVSDEDEISYYDTKEYFTEHGFRCGSTGGLDPMNMSGEVNTQCIDLENSLVGQTINEFRYPLIARRKKLPRNSRVDPRVXLWSIIKDNVGKDLTRVCLPVYFNEPISSLQKCFEDLEYSFLLDRAYEYGKSGNSLLRALNVAAFAISGYASSEGRHCKPFNPLLGETYEADFPDKGVRFFSEKVSHHPTVVACHCQGRGWKFWADSNIRSKFWGRSIQLDPVGVLTLEFDDGEIFQWSKVTTTIYNLILGKIYCDHHGNMDVRGNRQYSCRLKFKEQAILDRNPHQVHGFVEDXNGKKVATLFGKWDDSIYYVMGK

SEQ ID NO: 276444 - protein, 76 aa, Glycine max
  Clone ID: PAT_MRT3847_91648C.1.pep
MAFRTNQTLLLGLLCIVLLLGSGQANVDFNPPGLICLRGACGGNTQCVQRCVSSGHGKGGSCVGFIPGVILCCCYK

SEQ ID NO: 276445 - protein, 75 aa, Glycine max
  Clone ID: PAT_MRT3847_91649C.1.pep
LGLIGDSRVGKSNLLSRFTRNEFSLETKSTIGVEFATRSVPVDSKLVKAQIWDTAGQERLHFFFPSIVIFRDMHV

SEQ ID NO: 276446 - protein, 57 aa, Glycine max
  Clone ID: PAT_MRT3847_9164C.1.pep
NPPLIFGVSKFPPLIFFQVFRNFWGEFVLGGKYFSPQFLGVKKKKKKKKKKKKKNPP

SEQ ID NO: 276447 - protein, 447 aa, Glycine max
  Clone ID: PAT_MRT3847_91650C.1.pep
ISSLLFRDLFPSRQRSVVSVILVESKLQQNLPDLCFEVMASAGVAPASGVRDVNASSVAVERLPDEMNGMKIRDEREMEATVVDGNGTETGHIIVTTIGGKNGQPKQTISYMAERVVGNGSFGVVFQAKCLETGETVAIKKVLQDKRYKNRELQTMRLLDHPNVVTLKHCFFSTTEKDELYLNLVLEYVPETVHRVIRHYNKMNQRMPLIYVKLYFYQICRALAYIHNCIGVSHRDIKPQNLLVNPHTHQLKICDFGSAKVLVKGEPNISYICSRYYRAPELIFGATEYTTAIDIWSAGCVLGELLLGQPLFPGESGVDQLVEIIKVLGTPTREEIKCMNPNYTEFKFPQIKAHPWHKIFHKRLPPEAVDLVSRLLQYSPNLRCTALEALAHPFFDELRDPNTRLPNGRYLPPLFNFRANELKGVPPEMLVKLIPSHARKQCALFAS

SEQ ID NO: 276448 - protein, 139 aa, Glycine max
  unsure (1)..(139): unsure at all Xaa locations
  Clone ID: PAT_MRT3847_91651C.1.pep
MEITKRSSLLIFFLVFVSSLIHAKAYQNLYCGRGTRCYGKHITCPAECPDSETNNPKTKVCQIDCNKPICKAVCRSRKPNCNAPGSGCYDPRFIGGDGXVFYFHGKTNEHFTLVSDSNLQMNARFIGHRPEGRSRDYHG

SEQ ID NO: 276449 - protein, 120 aa, Glycine max
  unsure (1)..(120): unsure at all Xaa locations
  Clone ID: PAT_MRT3847_91652C.1.pep
FXXRSVIHXHXXRYMEFSYEIDRIFSYITVYTVGLCLYTGHLHYSGIDPDTWLRLHSARLHYLHFKDIDAALYDTKMIHHILFFAPSFLHIIYPILNGVLDYPSIPHSLYHICYASYITI

SEQ ID NO: 276450 - protein, 341 aa, Glycine max
  Clone ID: PAT_MRT3847_91653C.1.pep
MEFTKTSSLLIFLLVFVSSLIHAKAYQNLYCGRGTRCYGKYITCPAECPNSETNNPKTKVCQIECNKPTCKAVCRSRKPNCNAPGSGCYDPRFIGGDGRVFYFHGKTNELCEFPQFSDSNLQMNARFIGHRPEGRSRDYTWIQALGILFNSKTFSLEATKTPQWNDELDHFKFTYNGNQVALAEGSLSTWYTEERDIKVERVASKNSVMVTLKDVAEILVNVVPITKEDDRIHNYQVPSDDCFAHLEVQFRFFALSQKVDGVLGRTYRLDFENPAKPGVAMPVVGGEDKYRTNSLLSPHCGSCVFSQGSSTEKETTPQQVMEYGTLDCTKFSYGLGIVCRK

SEQ ID NO: 276451 - protein, 46 aa, Glycine max
  Clone ID: PAT_MRT3847_91654C.1.pep
GYDEEKNKPHLLLEKKDSINSGENINNMVKVNELSHVPPEKNCQFF

SEQ ID NO: 276452 - protein, 102 aa, Glycine max
  Clone ID: PAT_MRT3847_91655C.1.pep
FGAFRCPWFSRDNPLFCLWPASQVFCCPDPLLCSFVPACPFLLCVSPPPFLYYLFFLSMSPFSLCFCFHLLGLGFLPSSYFCPFLSFFFPILLIFLKAFCLP

SEQ ID NO: 276453 - protein, 86 aa, Glycine max
  Clone ID: PAT_MRT3847_91656C.1.pep
FAGAQTSLPAFSPGRLSRGLSEHNALLQRDPLSQPLAPGSRIGSDPYLGQRLDSEASVHALPEDTLTFEEAVATNSGRSSRTSYVS

SEQ ID NO: 276454 - protein, 177 aa, Glycine max
  Clone ID: PAT_MRT3847_91657C.1.pep
MKLLGWMHRKLRQNSSEPFKDLVIGQAPLDDEQVYQKPNLGIRLSKHAQKGHNNLRNSFAGLEAARVDEDYEGEYFPGFLAIGTLGSERVSDPSTTPSFPISVESITEKEDEVTENDLKLINDELEKVLGAETKDDVSIDSSRRTSHVSTGRSSHVSTGRSSHVSIITLSGKPIEGT

SEQ ID NO: 276455 - protein, 39 aa, Glycine max
  Clone ID: PAT_MRT3847_91659C.1.pep
VLQTPFSLLISFHHSLASFLLLAIFHFHTFSVRFSISQL

SEQ ID NO: 276456 - protein, 77 aa, Glycine max
  unsure (1)..(77): unsure at all Xaa locations
  Clone ID: PAT_MRT3847_9165C.1.pep
DMATLRMGDGADKYKKLYNLPNQPKEPRXHTLPGASDRVAXFTDTSNELEYDVHRSKGRHRLXNVTSWPPWKSGEEQ

SEQ ID NO: 276457 - protein, 111 aa, Glycine max
  Clone ID: PAT_MRT3847_91660C.1.pep
APTLSPFALTCAYAVPSIGNAIHGVEKDKEKFAFAFTVDCRARLEPPIPENYCGNCVWGNLVDADPLDFIKEEAVGIAAESIHSKIKEMFYKAIFHGADSSLSKYESMSKD

SEQ ID NO: 276458 - protein, 37 aa, Glycine max
  Clone ID: PAT_MRT3847_91661C.1.pep
VQGEVKSISCKLYLRVVNNNLEIMAYPNMRFVYNLVQ

SEQ ID NO: 276459 - protein, 59 aa, Glycine max
  Clone ID: PAT_MRT3847_91662C.1.pep
LKLSYFAKLARYRLLIQDSFQSCSHKNMMYHEAIPDPYNNKILRDFPDHPDEPSSNPNP

SEQ ID NO: 276460 - protein, 78 aa, Glycine max
  Clone ID: PAT_MRT3847_91663C.1.pep
YFASSEAHAGFSILTSLIRLLLGVYARAVASYSLFNQKLVPPCLNQAHLVDMIYGAVLPPSWLSQVRSPAGPVDWFTR

SEQ ID NO: 276461 - protein, 51 aa, Glycine max
  unsure (1)..(51): unsure at all Xaa locations
  Clone ID: PAT_MRT3847_91664C.1.pep
EMTCKTTXSILDQWKREKKIKKKKKKNKTKNKKKYYKNKRTKSRPILFPFS

SEQ ID NO: 276462 - protein, 73 aa, Glycine max
  Clone ID: PAT_MRT3847_91665C.1.pep
GDCAFTSYCATHADSAPYAARQCDQNKETWTPHSSTLCWTASAMRSTLYLFICTLSIRPLHSLYHDRVGGMLF

SEQ ID NO: 276463 - protein, 121 aa, Glycine max
  Clone ID: PAT_MRT3847_91666C.1.pep
LQLCLLFRRRLHLLFVDSAVARYDSALNMIYFPDLGSTPPTSTLTLLLTRSPLVGNSYRCTDSPPSWRFLMVALSCFLLHTVAATIAYFPFPLSSATTQAQTPIDNPKHNTHTLECDDLLG

SEQ ID NO: 276464 - protein, 91 aa, Glycine max
  Clone ID: PAT_MRT3847_91667C.1.pep
YHARIYGRAHNANGAEELYLLEANFSFDIKSSSRSEKVISTKSQHVGGKTLNFDVFEAGPHYKGDSLEIDNQEPPYEIVTIVQHIIETWYH

SEQ ID NO: 276465 - protein, 72 aa, Glycine max
  Clone ID: PAT_MRT3847_91668C.1.pep
KNSSRRRSGKMTDRGLKRKRHRMTPVEHFLIDIIQIKFRDIIEITIADIGNCKVAIDIFQPTLRNFLTDADR

SEQ ID NO: 276466 - protein, 59 aa, Glycine max
  unsure (1)..(59): unsure at all Xaa locations
  Clone ID: PAT_MRT3847_91669C.1.pep
NPARPTRAEADQQSILDYFNKHGPGXKQAQIAPSTEPAAAPVAPVVPSPSAIGLIATRE

SEQ ID NO: 276467 - protein, 103 aa, Glycine max
  Clone ID: PAT_MRT3847_9166C.1.pep
RDSSASLPLGISCSGTLWSVCEWHYELSDYRWYSVVVTINELVIFSYDLKNETYHYLSLPGGLTEVPPDEPELGVLKGCLCISHDHRRTHFVVWIMREFGLSC

SEQ ID NO: 276468 - protein, 242 aa, Glycine max
  Clone ID: PAT_MRT3847_91670C.1.pep
MEERKQSRYVKLTKDQTPLEDITPGELNQPIQVPQLDVRKCPECRQPLPESYAPPADEPWMTGIFGCAEDRESCLTGLFCPCVLFGRNVERLKEDTPWTGPCICHAICIEGGISLAIATAAATSIFPAINLGTVCLIGEGFIVTWWMCGIYTGQVRQNLQKKYHLENSPCDPCCVHCCMHWCALCQEHREMKGRLSDSFFSETTIVNAPPIQEMKSTDDKEHSETSSSANSKEHTGLELQVV

SEQ ID NO: 276469 - protein, 62 aa, Glycine max
  Clone ID: PAT_MRT3847_91671C.1.pep
ANVFSDRENSFFMETSAFESLYVDNALTEVLTQIYRVDSRNTLDIGDNHEDLPKVQTINVGS

SEQ ID NO: 276470 - protein, 110 aa, Glycine max
  unsure (1)..(110): unsure at all Xaa locations
  Clone ID: PAT_MRT3847_91672C.1.pep
MKRSRDEVLTSCSQLKRPVLSSRGEASGQPQMMNGGAQKLTTNDALAYLKAVKDIFQDKRDKYDDFLEVMKDFKAQRIDTXGVIARVKELFKGHRDLILGFNTSCLKVTK

SEQ ID NO: 276471 - protein, 146 aa, Glycine max
  unsure (1)..(146): unsure at all Xaa locations
  Clone ID: PAT_MRT3847_91673C.1.pep
MNIDSTMQSFGHFSIDLLGGGISADNTGDWITLIQNTPIXHLVXVAARKKGCSMIKMVMSGNAALKRXTWASTVRVLLTNSFSSEHLDACHWTXSKPHSXESMLPLKVWGPKTGLHMWRSDWTYHTXWHWSLLIDNPMQSTVTDTL

SEQ ID NO: 276472 - protein, 344 aa, Glycine max
  Clone ID: PAT_MRT3847_91674C.1.pep
RTRGQHYIHRPGNFNKFDIDIAMRERYENQEKSWSRLNVSYIVADTLGGRNPDAKCLCWKIILCSQMNSRYEMGAASTWLTSKLMPSSDKDVVISSPGLVVWRKWISSQSGINPTCYLSVVRDTAFGSLDEVVSGAGAVMFLVSESISWELQRSHLHNLLMSIPSGACLPLLILCGSYDERFSSAIINELGLQSIDKLKISSFLLVFLSENQQQMEHLGGFFSDTRLREGLQWLAGESPLQPNLGCVKIRELVHAHLNSFSEMLDIAINSNVGPNDYVSLFNEALDRSTKEIIATANSNPTGWPCPEIGLLDKFCDEDRVVKMCLPTLGWSSSVKTEPTICALQ

SEQ ID NO: 276473 - protein, 577 aa, Glycine max
  unsure (1)..(577): unsure at all Xaa locations
  Clone ID: PAT_MRT3847_91675C.1.pep
MAQVVASRSIQSTPLCPTSGSARDRTQNLLKPPSFASKVFPLGENNNKRSKLRLRSLQISARKSAPSEVIPMSPEDDPKIEEHLQHLRGVQPFGENSVGMWSKPTFRRKTKIVCTIGPSTNTREMIWKLAEAGMNVARLNMSHGDHASHQKVIDLVKEYNASHEDNVIAIMLDTKGPEVRSGDLPQPINLTPGQEFTFTIRRGVGTADCVSVNYDDFVNDVDVGDMLLVDGGMMSLVVKSKTEDSVKCEVVDGGELKSRRHLNVRGKSATLPSITEKDWDDIKFGVDNKVDFYAVSFVKDAQVVHELVXKSCADIHVIVXIESADSIPNLHSIITASDGAMVARGDLGAELPIEEVPLLQEEIISICRSMGKAVIVATNMLESMIVHPTPTRAEVSDIAIAVREGSDAIMLSGETAHGKFPLKAVKVMHTVALRTEATIPGGQMPPNIGQVFKNHMSEMFAYHATMMSNTLGTSTVVFTRSGFMAILLSHYRPSGTIFAFTDQKRIQQRLALYQGVCPIYMEFSEDAEETFTRALDLLQKQGMVKSGEEVALVQSGRQPIWRFQSTHNIQVRTVKTK

SEQ ID NO: 276474 - protein, 623 aa, Glycine max
  Clone ID: PAT_MRT3847_91676C.1.pep
MDDKYDVYRGERGGLAGLQNLGNTCFMNSSIQCLVHTPPLSEYFLQDYSDEINMDNPLGMRGELALAFGDLLRKLWSSGRTAIAPRAFKSKLARFAPQFSGYNQHDSQELLAFLLDGLHEDLNRVKQKPYIEMKDSDGRPDEEVASECWKNHMARNDSLIVDVCQGQYKSTLVCPVCGKISITFDPFMYLSLPLPSTVTRTMTITVFYSDGSGLPMPYTVTVLKHGSCRDLCQALGTACCLKSDEMLLLAEVYEHKIYRYLENPMEPLNSIKDDEHIVAYRIKSGARKTKVEIMHRWLDNMKGGDRKLFGTPLVTCLVEDPQFGANIEASVHKMLAPLRKTYSSSKSHDGKENGFISADSDEQSNISNTESESLSLTTGNKEQEGTSCGESSLQLVLTNESCLSCEPIEKASLIKPNQVVRVFLDWTDKEQELYDSSYLRDLPEVHKTGFTVKKTRQEAISLFSCLEAFLTEEPLGPDDMWYCPRCKEHRQATKKLDLWKLPEILVFHLKRFSYSRYLKNKLDTFVNFPIHNLDLTKYVKSKDGESYVYNLYAISNHYGGLGGGHYTAYCKLIDDNKWCHFDDSHVSPVTEAEIKSSAAYVLFYQRNRSKGQMEGETSQVHTV

SEQ ID NO: 276475 - protein, 150 aa, Glycine max
  unsure (1)..(150): unsure at all Xaa locations
  Clone ID: PAT_MRT3847_91677C.1.pep
VMHTVALRTKATIPGGKMPPNIGQVLKNHXMSEMFAYHATMMSNTXLGTSTVVFTRTGFMAVLLSHYRPSGTIFAFTDEKRVQQRLALYQGVCPIYMEFCDDSEATFRRALDLLQKQAMVKEGEEVALVQSGRQPIWRFQSTHNIQVRKV

SEQ ID NO: 276476 - protein, 81 aa, Glycine max
  Clone ID: PAT_MRT3847_91678C.1.pep
SHSLGLKMMVRDSSDCAHDKGDSLLSQTVPIKRRWSPMTVYSWAALRHTDLHSHEMKPMICHYPSRSQGGTAGDEQFNDHI

SEQ ID NO: 276477 - protein, 49 aa, Glycine max
  unsure (1)..(49): unsure at all Xaa locations
  Clone ID: PAT_MRT3847_91679C.1.pep
SYQQASTIEEVRYLWIRDLPYWVDEGYXRPLFGNTGEVISIKIIRTKLT

SEQ ID NO: 276478 - protein, 82 aa, Glycine max
  Clone ID: PAT_MRT3847_9167C.1.pep
GSKHLPFILSALFSPYQGHNPRSSEVDKSRPQNMKRRLPSPHIVLTTVFHNAVRSPPYLPRMYLGPKCPTSPSHHFFTNKQG

SEQ ID NO: 276479 - protein, 67 aa, Glycine max
  Clone ID: PAT_MRT3847_91680C.1.pep
LGGLRGIGHCRRILLRSTLVQGRKNGRRWYAGGTWFTTENIFFTLYITLFCCAIIIIQRDPTTFWVK

SEQ ID NO: 276480 - protein, 93 aa, Glycine max
  Clone ID: PAT_MRT3847_91681C.1.pep
LGIFLSRLKFQPFQCFYCHLELKLKDPDAAVPPVDNTLKKITEPDHADLLLRKKSAIDSFCSSFELKGNPLVRMCVFCSFLLQTNIDYDLQYI

SEQ ID NO: 276481 - protein, 77 aa, Glycine max
  Clone ID: PAT_MRT3847_91682C.1.pep
LEPKPCLPFFIPSLKRNICDGMYGEPAGTLILLATSIPYPTAETTITGRYFLMKVLHSPVHAEEDPAVAGDDDRHCL

SEQ ID NO: 276482 - protein, 206 aa, Glycine max
  Clone ID: PAT_MRT3847_91683C.1.pep
MEEESEFLLEMKLIIISLCTETLSLLSVHSSQPLFSCIVTFCFLILLYLPHLFWKIVFSPVLILSGVLLLLLLRLGAIQRSQNEEKKNSVEPEPIANEENRGNREEKQGNPIEPVETDSLDHVYRWVTSQSQKTIKSQMGFQSSSRFDESFVEWNVKAPLEVIYEGEETEQNQNEKRDEGILRHPSLSRYYPETDSDSSSESGFPA

SEQ ID NO: 276483 - protein, 54 aa, Glycine max
  Clone ID: PAT_MRT3847_91684C.1.pep
LHNQMFLVEKRVSTKKIQVVLFSHFIVLFSHFIHTLCLTGGIVAMAPFGVADFR

SEQ ID NO: 276484 - protein, 159 aa, Glycine max
  Clone ID: PAT_MRT3847_91685C.1.pep
FNFKGHELLEFARESVVVYLDDEDGATRKDAALCCCRLIASSFSGMACSHFGSSRLTRSGGKRRRLVEELVEKLLISAVADADVTVRHSIFTSLHGDRGFDEYLAQADNLSAVFAALNDEDFDVREYAISVAGRLSEKNPAYVLPALRRHLIQLLTYLE

SEQ ID NO: 276485 - protein, 55 aa, Glycine max
  Clone ID: PAT_MRT3847_91686C.1.pep
EGFRRELHFHDVFNRVVMLFIGYDLASLSIIRLRVLIKGRVIYKDELQHAWDPLL

SEQ ID NO: 276486 - protein, 75 aa, Glycine max
  Clone ID: PAT_MRT3847_91687C.1.pep
KKKLIPFVSLQFQFHLQSKLLCLISLFHYLPSLLRLSLSHFSLFDFDFGFVFLIYIFPLFNFVHGVERVTVIGGK

SEQ ID NO: 276487 - protein, 57 aa, Glycine max
  Clone ID: PAT_MRT3847_91688C.1.pep
CCKLRSISFIRGLSIEVLIDDRKKKCCYYQRFIDIAFFSMVGYCKQLRELQIQEWIG

SEQ ID NO: 276488 - protein, 45 aa, Glycine max
  Clone ID: PAT_MRT3847_91689C.1.pep
QHQISNQLLSLTLHTPTYPPKSIIISLINPSNPNSLLPKNSTLFS

SEQ ID NO: 276489 - protein, 83 aa, Glycine max
  Clone ID: PAT_MRT3847_9168C.1.pep
MDFRGNLNCKRRALTVEPVSSDSDRKFLIDFIVTTYLGPDVKSHNPRCSVIQRLIAGSPLYILSDLGPSYVSVSFLERLYYYL

SEQ ID NO: 276490 - protein, 93 aa, Glycine max
  Clone ID: PAT_MRT3847_91690C.1.pep
MAFSTATVTTAPYGSWKSPITSDDVSGATKDLGGTTIDGRGRLIWLEFRPTESGRGVLVLEPENNGGEAVDITPKEFGVRTLAQEYGGGAFTV

SEQ ID NO: 276491 - protein, 85 aa, Glycine max
  unsure (1)..(85): unsure at all Xaa locations
  Clone ID: PAT_MRT3847_91691C.1.pep
VNGAYFLILMVLVFGGTWACCACXKNIMMRFGLKXLEMDLLNFDLXYNGKSCQRWDQDWDDDWDHHGAVKSPAAHAGSISGNGLT

SEQ ID NO: 276492 - protein, 55 aa, Glycine max
  Clone ID: PAT_MRT3847_91692C.1.pep
LSMGQLQVLALTNMGYPDRAALLDKMIVAEVRSAVCTSNSHTQACLCSITELIKK

SEQ ID NO: 276493 - protein, 53 aa, Glycine max
  Clone ID: PAT_MRT3847_91693C.1.pep
KTITSLHMKNESSPSKTVISATSHGRYLIRGLRAHFFLGLKVLLYIKNNSKCL

SEQ ID NO: 276494 - protein, 146 aa, Glycine max
  unsure (1)..(146): unsure at all Xaa locations
  Clone ID: PAT_MRT3847_91694C.1.pep
TLIISDGRGGNRVPFSWNSRLXVARGVARALVYLQLNHNNIVPHGNLRSSNEDDTVLVSDFGLASLIAQPIAAQHMVVYKSPEXVWSYGSLLIELLTGKVSVCSAPQXAVREEWTAEIFDKEICGQKSALAGMLMLLQIAMRCIER

SEQ ID NO: 276495 - protein, 59 aa, Glycine max
  unsure (1)..(59): unsure at all Xaa locations
  Clone ID: PAT_MRT3847_91695C.1.pep
XGRTLTEERCKRHPLCHEKRLLIIHYIHQFLKTIHREGVKRNWLLKLQALKGYSPNIYI

SEQ ID NO: 276496 - protein, 116 aa, Glycine max
  unsure (1)..(116): unsure at all Xaa locations
  Clone ID: PAT_MRT3847_91696C.1.pep
TQSASRNTIMPGAFTSRLNGLVDHFKMALDCFFAVWFVVGNVWIFGGHTSPSDAPQLYRFCIVFLTFSCIGYAMPFILCATICRCLPCIFGLWGIPXDFFPNGGPTKKFAAPSTNF

SEQ ID NO: 276497 - protein, 416 aa, Glycine max
  Clone ID: PAT_MRT3847_91697C.1.pep
MGVSKLGFLGLLFADFLFAVGAVELGRNQPTERISGSAGDVLEDDPVGRLKVFVYELPSKYNKKILQKDPRCLNHMFAAEIFMHRFLLSSPVRTLNPEEADWFYTPVYTTCDLTPNGLPLPFKSPRMMRSAIQLISSNWPYWNRTEGADHFFVVPHDFGACFHYQEEKAIERGILTLLRRATLVQTFGQRNHVCLKEGSITIPPYAPPQKMHTHLIPDKTPRSIFVYFRGLFYDVGNDPEGGYYARGARAAVWENFKDNLLFDISTEHPTTYYEDMQRAVFCLCPLGWAPWSPRLVEAVIFGCIPVIIADDIVLPFADAIPWEEIGVFVDEEDVPKLDTILTSIPPEVILRKQRLLANPSMKQAMLFPQPAQPGDAFHQVLNGLARKLPHDNTVFLKPGEKILNWTAGPVGDLKPW

SEQ ID NO: 276498 - protein, 43 aa, Glycine max
  Clone ID: PAT_MRT3847_91698C.1.pep
FYSLINRHTIPRAVGLDKTRATLNFKQEPHQKIAEEKTEAKVE

SEQ ID NO: 276499 - protein, 478 aa, Glycine max
  unsure (1)..(478): unsure at all Xaa locations
  Clone ID: PAT_MRT3847_91699C.1.pep
SENRKVAPLASLLNMKLLIALLLVLCAPFSSSSKPKDPFLGISPEDDKYYKASDVIRCKDGSGKFTKAQLNDDFCDCADGTDEPGTSACPGGKFYCRNAGHSPVYLFSSRVNDGICDCCDGTDEYDGQVKCPNTCWEAGKVARDRLEKKIATYQEGVKLRKLEMEQAKVAMEKDEAELSKLKKEESILKGIVKQLKDHKEQIEKAEEKERLQKEKEEKQKKESEEKANEAKDGTXSDDDRHKNEAEKEVEEESVXYNHDKQENLEGSSARQDAEQEASQCSVSGVVRADFVFFKTQRHVPGNLPQKGQVLEGYRYDKVXLKPRQISKAETNVLLCESSARTDEXQTPGLPAKEFYSFYDHCFEXKENKYTYKVCPYKQASQEEGYSNTRLGSWDKFEDSYRVMVFSNGDKCWNGPDRSLKVKLRCGLKNEITDVDEPSRCEYVAVLSTPTLCQEERLKELQLKLDLLNSEIPANHDEL

SEQ ID NO: 276500 - protein, 46 aa, Glycine max
  Clone ID: PAT_MRT3847_9169C.1.pep
LVKITFNKKNSIPKITFPPTSIKPEKKPGFSPWPVILTKAWPLLEP

SEQ ID NO: 276501 - protein, 45 aa, Glycine max
  Clone ID: PAT_MRT3847_916C.1.pep
TIYPHFYHNNTFSFTYPFHHQYHTHTSLSFHSLPQTLFHPITTVF

SEQ ID NO: 276502 - protein, 422 aa, Glycine max
  Clone ID: PAT_MRT3847_91700C.1.pep
MDPENSPRLSSMMISAIVLMAPMNLVHRHVLVENNHDKIENLEGSPADQDEAGDKLADVLDDDDDDDDDEASDSHGSEGSLHNKVEENAKEAEEEPIVKSETDIKVRNKESSDEIINKGNDASENTEGLSREELGRLVASRWTGENTDKPSAVPDTTLDNEDREDPKGRNNEEYEGYASETDDDNNKYDDDSHKYDDEDEVDEEYREDEHDDLTSSYKSDSDNEPDLSDNPSWLEKIQRTVRNIFQAVNLFQAPVNQSDAARVRKEYDESSAKLSKIQSRISSLKQKLKHDFGPAKEFYSFYDHCFEGKENKYTYKVCPYKQASQEEGYSNTRLGSWDKFEDSYRVMVFSNGDKCWNGPDRSLKVKLRCGLKNEITDVDEPSRCEYVAVLSTPTLCQEERLKELQLKLDLLNSEIPANHDEL

SEQ ID NO: 276503 - protein, 133 aa, Glycine max
  Clone ID: PAT_MRT3847_91701C.1.pep
YSLKSYSILSTGARTRRSTIKKSESGYKRMEEFLALRLREIMTTNYCDFFVSNVAEIEAKTNSGYYSSRGLNSVKEDISRMCRDAIKVKNRSDASDMNHIITLFIQLATRLEESSRSVHDRNELLKLWDNDLP

SEQ ID NO: 276504 - protein, 48 aa, Glycine max
  Clone ID: PAT_MRT3847_91702C.1.pep
IKNRLCAYHAILNMDFVFHSQVESHSSWSSCHPSVLSLNSNTSQQSHP

SEQ ID NO: 276505 - protein, 91 aa, Glycine max
  Clone ID: PAT_MRT3847_91703C.1.pep
GKLTPGRHRGCSETNLKPWNNKQCEKNAEVEKTKQHISVCFQIINTKAVCEKGRKKIGKKFLYTNLATYLEESLLLLPPVKFWFINMLYGS

SEQ ID NO: 276506 - protein, 69 aa, Glycine max
  Clone ID: PAT_MRT3847_91704C.1.pep
LMILSRKRFKFCRYLLVCFVHDTYNFLLLIMNIINYEFFFFIIFEKLYLIDYIINFKIFIYSLIRDLKH

SEQ ID NO: 276507 - protein, 41 aa, Glycine max
  unsure (1)..(41): unsure at all Xaa locations
  Clone ID: PAT_MRT3847_91705C.1.pep
KHPQFSDTTLLIMSLHFRSKQFNXKNHTRPYHNMCPLNHNI

SEQ ID NO: 276508 - protein, 77 aa, Glycine max
  unsure (1)..(77): unsure at all Xaa locations
  Clone ID: PAT_MRT3847_91706C.1.pep
MASLSSLVLLLAALILSPQVLANYEXXPVYKPPTEKPPXYKPXXEKXPVXKXPVEXPPVXKXPVXKXXVYKPPXGER

SEQ ID NO: 276509 - protein, 92 aa, Glycine max
  Clone ID: PAT_MRT3847_91707C.1.pep
DPNSEENSNDIALVHLSSPLPLTEYIQPVCLPAAGQALVDGKICTVTGWGNTQYYGQQAGVLQEARVPIISNDVCNGADFYGNQIKPKMFCA

SEQ ID NO: 276510 - protein, 81 aa, Glycine max
  unsure (1)..(81): unsure at all Xaa locations
  Clone ID: PAT_MRT3847_91708C.1.pep
MGADLKAELSGKTFVFGLKVWQIIGIAVGLFIVVILXVLPFCLTSRKKTRRARNRIPASHIPPVSKEITEVRVEQVPANGF

SEQ ID NO: 276511 - protein, 196 aa, Glycine max
  Clone ID: PAT_MRT3847_91709C.1.pep
RVLTRLVPEDCHYEPEDLVNLFLLPYVKCIGRKARKLSGEFADVSGEQCNNYESFPSWDNGSVCDDDVTDVHSEMDDSTSLISQPRQINKVEVQYDKTFKQVNVQALKITLWDHIQESVQVPIQGKKEVVSFKHMLTNFPSKCNAAATISDISPHLCFICLLHLANEKGLNIQSCPNLDDLGICLPDDGATITGTV

SEQ ID NO: 276512 - protein, 75 aa, Glycine max
  unsure (1)..(75): unsure at all Xaa locations
  Clone ID: PAT_MRT3847_9170C.1.pep
DSRTTIFXPEGRIYHVECAMDAIDNAXTATGISSNDGXVALAAEKEATCKVIQTPAHTEKEPKGVDHDACAVGAD

SEQ ID NO: 276513 - protein, 106 aa, Glycine max
  Clone ID: PAT_MRT3847_91710C.1.pep
MGADLKAELSGKTFVFGLKVWQIIGIAVGLFIVVILCVLPFCLTSRKKTRRARNRIPASHIPPVSKEITEVRVEQVPANGFVPREGILLTIHDKSSDKESDRVCFI

SEQ ID NO: 276514 - protein, 56 aa, Glycine max
  Clone ID: PAT_MRT3847_91711C.1.pep
IENPSRSKFFIGIMECLWGTYYFGKPLILRPKYSSDTYPAYVYSIKIRKMRQNSLI

SEQ ID NO: 276515 - protein, 158 aa, Glycine max
  Clone ID: PAT_MRT3847_91712C.1.pep
RAYGCEKTTEGERKMRLKQESKSLAAVSAQPSTMSESIAARKIMKKPPLAPRVPLRRITNILPTPPERKPSCSSSMDEQENIARTTSINTQDLVKPRRGVSIAVRPPTTPSTSRTLQPRRRRVSVATLCPVRTPLRSPTQQSPRRPSCSSSMDGQENI

SEQ ID NO: 276516 - protein, 406 aa, Glycine max
  unsure (1)..(406): unsure at all Xaa locations
  Clone ID: PAT_MRT3847_91713C.1.pep
NQARSVGSTSANELSSRSHCVLRVTVLGKNLINGQKQXSHLWLVDLAGSERVVKTEAEGERLKESQFINKYLSALGDVISALASKSAHIPYRNSKLTHILQSSLGGDCKTLMFVQISPSAADLTETLCSLNFAARVRGIESGPARKQTDLTELNKYKQMVEKVKHDEKETRKLQDNLQSLQMRLTSRELMCRNLQEKVRDLENQVTGERKMRLKHENILLAAVSAQPSTMWESIASDQKIMKKPPLDPRLPLRRITNILPPPPERRPSYSSSMDEQENVARTTSINAQDLVKPRRGVSIAVRPPPPPSTSQSLQPRRRRVSVATLCPVRTPLCSPTRQSLIRPSCSSSMDGQESVAKTTSINTQDLMKPRRRGVSIAVRPPPPPSTSQARQPRRRRSVAALCPVRT

SEQ ID NO: 276517 - protein, 99 aa, Glycine max
  Clone ID: PAT_MRT3847_91714C.1.pep
ARARMNGAAVVGGSRGLKLERRTSKKWFYVVRKNAKLGEYVIEKHRAWTQRDEAWDTKHITVVSRKLRISVSTTKSHVAPDVLATLCEPIHQGHWSNVP

SEQ ID NO: 276518 - protein, 74 aa, Glycine max
  Clone ID: PAT_MRT3847_91715C.1.pep
RVLLVSPMRVGVLPEVLVYSRAFRVVFGSCLQARAWHQCRTVADHIQHRAHRGDPEVNVSVMHFSAHFCPRKRK

SEQ ID NO: 276519 - protein, 74 aa, Glycine max
  unsure (1)..(74): unsure at all Xaa locations
  Clone ID: PAT_MRT3847_91716C.1.pep
ITLVDNLLNSNQHVSXFKEQWLNTYPDRDEHDHCFRVLKSNLLRARLHAKLDPFGVHWVTKFFDLTTAEFRRQF

SEQ ID NO: 276520 - protein, 76 aa, Glycine max
  Clone ID: PAT_MRT3847_91717C.1.pep
SPAPPGDPGSSSSSSSFSSTGGTSDSASGTGSSSLGGPGTYNAHFIRDNAFLLNLFVGIMRFLFRHGDGDKYKNRG

SEQ ID NO: 276521 - protein, 73 aa, Glycine max
  Clone ID: PAT_MRT3847_91718C.1.pep
RNIILNALYIASSILHHIHRLSVIINQILWGYLILTIFLWFHTIILLVSSQYNRSLVSVLSSSYYYWTSSDYF

SEQ ID NO: 276522 - protein, 95 aa, Glycine max
  Clone ID: PAT_MRT3847_91719C.1.pep
GSRVPLHRQWMTFLYINASVESMTKIGLCSSSWLSFASPIVRIPTTLSHHNGDVLMTEPGCVRGQGILGFSFASFSFCWINYQSKLYYCFLVAKK

SEQ ID NO: 276523 - protein, 129 aa, Glycine max
  Clone ID: PAT_MRT3847_9171C.1.pep
LLSPSFPKLFPRPLGGVLFFAGPALFFPGCPPGLFLASPIFFCFLPLSWIPVPNLAPPSEFTKGGPRAPEYFAAPYFAPPLCILFPPPLPLEVVAAPFGPPGYRTLFGSPAKIPTLFVFFFVGCFCFLP

SEQ ID NO: 276524 - protein, 74 aa, Glycine max
  unsure (1)..(74): unsure at all Xaa locations
  Clone ID: PAT_MRT3847_91720C.1.pep
VDYVQHHVLFVRXKMNSGHQGLHXIIISQVSSSISNCSKFTYQFNTCFLMVTCHISSFQKTLVFLIFXRPXPML

SEQ ID NO: 276525 - protein, 136 aa, Glycine max
  unsure (1)..(136): unsure at all Xaa locations
  Clone ID: PAT_MRT3847_91721C.1.pep
ILKDKYENDPEVWKMEIELKKVREELETYQNFYELGEREVLMEEIQSLXSQLEFYVDSLFTSSRKQYPLLXLTYSAEPQMXATLTVIPELTEETEDTDETCASYKNDTGAQFEQERIKLTDAESTLIALSEELKAE

SEQ ID NO: 276526 - protein, 65 aa, Glycine max
  Clone ID: PAT_MRT3847_91722C.1.pep
LAIPRSRNCFKSSTLWRLFTQITSLSLSCSRTLLLATRVLYYHHIPIGTLVRCMQKMFSKLNVCP

SEQ ID NO: 276527 - protein, 80 aa, Glycine max
  Clone ID: PAT_MRT3847_91723C.1.pep
MAPRTSSKGAQDLLRALWSAYAAARTNIKIIDLYDTYAVFTALIPAAYMDMVGASPYDYLLSGVLFRVRTAVLADMPKIQ

SEQ ID NO: 276528 - protein, 73 aa, Glycine max
  Clone ID: PAT_MRT3847_91724C.1.pep
IKLFQFGIEKNKLLNKFHEWDFVGKGGLWCKIQLPLKKKAVTFLPKNVRKGCKLSFGFMHWHAQATVFVVNFR

SEQ ID NO: 276529 - protein, 115 aa, Glycine max
  Clone ID: PAT_MRT3847_91725C.1.pep
MEHLEQWKQQFLRWWRVAVHTVPPIQLYAVAAVLILTTVLLLSIRFLKRAKSNTIVLTGLSGAGKTVLFYQLRDGSIHEGTVTSMEPNEDTFLLHSETVPKRKVKPVCVVDVPGH

SEQ ID NO: 276530 - protein, 119 aa, Glycine max
  unsure (1)..(119): unsure at all Xaa locations
  Clone ID: PAT_MRT3847_91726C.1.pep
MAASPSSSAAANIMLAIFEKKTNSVDLYRPLRNYVAFHYSEREAQNLEDDLQTLKQLRSDVERHSDPSLPTRRDLLQTYYKSLCLVETRFPISFDXDHVNALPLSGSTAFKAQQNALQQ

SEQ ID NO: 276531 - protein, 116 aa, Glycine max
  Clone ID: PAT_MRT3847_91727C.1.pep
RGSSSSCGEKFFVNVTCCGRICFHGLRGHKCSSAIFHKTLTGSYPSAPQTKELMTVFLKMSPRKKRKEKEVVVVDPRSHNQRWVVTISKSWGAPPHFSQGVWWGFFITPLYRGENW

SEQ ID NO: 276532 - protein, 173 aa, Glycine max
  Clone ID: PAT_MRT3847_91728C.1.pep
ACRLKFQLITTCTHHLHHPRSTHRCLLHTTILHHLHHQRSHIILVPNSARARLLGKVLPALNGKLTGMAFRVPTVDVSVVDLTVRLEKEASYDEIKNAIKEESEGKLKGILGYTEDDVVSTDFIGDSRSSIFDAKAGIALNKNFVKLVSWYDNEWGYSSRVIDLLVFVAKKSL

SEQ ID NO: 276533 - protein, 118 aa, Glycine max
  Clone ID: PAT_MRT3847_91729C.1.pep
KVLPALNGKLTGMAFRVPTVDVSVVDLTVRLEKEASYDEIKNAIKEESEGKLKGILGYTEDDVVSTDFIGDSRSSIFDAKAGIALNKNFVKLVSWYDNEWGYSSRVIDLLVFVAKKSL

SEQ ID NO: 276534 - protein, 558 aa, Glycine max
  Clone ID: PAT_MRT3847_9172C.1.pep
MPVARRETCDGRVIAHVDMDCFYVQGNITLPFCFNLRSEFSDILYDVVCVCVVEQRKQPNLRGLPSAVIQYNSYKGGALIAVSYEARRCGVKRSMRGDEAKEACPQIQLVQVPVARGKADLNSYRNAGSEVVSVLSQKGRCERASIDEVYLDLTHAAETMLMETPLDSMQDFEDEVLKSHVLGLEIKDGSDAKDEVRKWLCRSDASYQDKLLACGALIVCDLRMKVLKETEFTCSAGIAHNKMLAKLASAMNKPAQQTVVPQSSVEGLLASLPIKKMKHLGGKLGSSLQSDLGVNTVGDLLQFSEEKLQQWYGINTGTWLWNIARGISGEEVEGRLLPKSHGSGKTFPGPQALKTVDSVQHWLNQLCEELNERLHSDLDQNKRIAQTLTLHARAYKVTGDSDSHRKFPSKSCPLRYGTRKIQEDALILFQAGLRDFLGFYNCKAHGNENNNWGVTSLSVSARSHSADNSHSTCIQVEMPAEHPHEEFDTNKSRCSVGNMPQGRQDWSYNINEIDPSIINELPPEIQQEFQIWLRPHKRPNVAKRGSSITHYFSPDKSR

SEQ ID NO: 276535 - protein, 49 aa, Glycine max
  Clone ID: PAT_MRT3847_91730C.1.pep
EEFASCYCQSPSVEQDPLVSSNDNGMGVGKPPVAVSCRPAIMMFLLLSI

SEQ ID NO: 276536 - protein, 88 aa, Glycine max
  Clone ID: PAT_MRT3847_91731C.1.pep
EVGRGKHVTTSTSYTPKYLIIPGRIYTVPTPRYILRFRPFKRGSLSNAWTGMHRANLVPRVHRRIKPLTCSGGLIAYSSSYANPCFHV

SEQ ID NO: 276537 - protein, 37 aa, Glycine max
  unsure (1)..(37): unsure at all Xaa locations
  Clone ID: PAT_MRT3847_91732C.1.pep
VLDDVGTPEGLIAASVXSELKIALPKNTECGTRLRSD

SEQ ID NO: 276538 - protein, 96 aa, Glycine max
  unsure (1)..(96): unsure at all Xaa locations
  Clone ID: PAT_MRT3847_91733C.1.pep
ANSTIQIQILKNQQSHNNNENHIQIKQMTYLHPTHTQLHSQQITKTELKKKNXASSKKHIEEQMRRDRNNAWSENVTPSEKEETKHSRSRSRTGRV

SEQ ID NO: 276539 - protein, 48 aa, Glycine max
  Clone ID: PAT_MRT3847_91734C.1.pep
TEIDLLKTEVSISKSSDKVHVSTMTNEKVNSCKCCTKYVEEIKNLKNS

SEQ ID NO: 276540 - protein, 175 aa, Glycine max
  Clone ID: PAT_MRT3847_91735C.1.pep
MDFESNYDIAASANFIHTHNFIKVALQFPDNLLKHSTRVVTALRNTLQSTEVGLFVMADTAYGSCCIDEVGASHINADCVIHYGHTCFSPTTTLPAFCVFGKASICIADCVESMSKYALTNSKPIMVLFGLEYAHSMQRIKEALLESSMSCRFDPKSEVHFADVPSSVMFPSKDI

SEQ ID NO: 276541 - protein, 81 aa, Glycine max
  Clone ID: PAT_MRT3847_91736C.1.pep
HQYPNSAILQLFFFFFFFIRSIFLFYFIYEASSLAVIFTYYYYFSARYVVLLLNPNPNPNPADFTLICFGESSGLMKLLYL

SEQ ID NO: 276542 - protein, 206 aa, Glycine max
  Clone ID: PAT_MRT3847_91737C.1.pep
WTPHASAPLPVSITSALSLSLSLSLFFFFFFQPFSPPSHFLSLNPTLSLSKTLHCTLLPSDPSPVSLQFPPNSAGPTSAPFPASSCPAPPEFPTASLRSRGGLPAPLPSRRSSATLPSSRNRPSPRPMSTTASPVPTPAAPRMKPVVVRSPYMKRKRGMTDSEGESQAQKWSNSPGYTNVSNVTNNSPFKTPVSAKGGRAQKAKAS

SEQ ID NO: 276543 - protein, 49 aa, Glycine max
  Clone ID: PAT_MRT3847_91738C.1.pep
PTRPPTRPPTRPPTRPPTRPPTRPPTRPPTRPRTRGRTRGRTQDQTRGR

SEQ ID NO: 276544 - protein, 99 aa, Glycine max
  unsure (1)..(99): unsure at all Xaa locations
  Clone ID: PAT_MRT3847_91739C.1.pep
VASAEIKFRHGXPPGDGVLYYXGEVFSTSHQPGVSLRLERILNGLQDIEYLRLYASRYGRDESIALLERMGVYSGPERYTFEHMPIDAMRGQIFNACRS

SEQ ID NO: 276545 - protein, 746 aa, Glycine max
  Clone ID: PAT_MRT3847_9173C.1.pep
MIPPKGVFLDSQWKKGKNRFGGKRREEEMPVARRETCDGRVIAHVDMDCFYVQVEQRKQPNLRGLPSAVIQYNSYKGGALIAVSYEARRCGVKRLLSTLPHYHAVHFIDSMRGDEAKEACPQIQLVQVPVARGKADLNSYRNAGSEVVSVLSQKGRCERASIDEVYLDLTHAAETMLMETPLDSMQDFEDEVLKSHVLGLEIKDGSDAKDEVRKWLCRSDASYQDKLLACGALIVCDLRMKVLKETEFTCSAGIAHNKMLAKLASAMNKPAQQTVVPQSSVEGLLASLPIKKMKHLGGKLGSSLQSDLGVNTVGDLLQFSEEKLQQWYGINTGTWLWNIARGISGEEVEGRLLPKSHGSGKTFPGPQALKTVDSVQHWLNQLCEELNERLHSDLDQNKRIAQTLTLHARAYKTGDSDSHRKFPSKSCPLRYGTRKIQEDALILFQAGLRDFLGFYNCKAHGNENNNWGVTSLSVSASKLVSIPSGTHSIVKYFGGSFPSSSTSNQSLDVVIDEAAPSSPSGSGNCSGLVPNEFELEYPEDTGMKDSKACLDQQDPLCHLSCKADGLTEESSLVSPSGSEDRILHNEPHRDLPATDLRRVSNISSLKAVGKKKTAGKKLQGNCSIVHFFNNYHNSQSSLEQKNVKISSSLGSHSADNSHSTCIQVEMPAEHPHEEFDTNKSRCSVGNMPQGRQDWSYNINEIDPSIINELPPEIQQEFQIWLRPHKRPNVAKRGSSITHYFSPDKSR

SEQ ID NO: 276546 - protein, 648 aa, Glycine max
  unsure (1)..(648): unsure at all Xaa locations
  Clone ID: PAT_MRT3847_91740C.1.pep
MDNSGNPQDVVVPPVEGVAGGGTAYGWNDGGTHGLNVKGPIDPTEIPTKDLVHVWCMPNTANVGPQDMPRHLEPINLLAARNERESVQIAIRPKVSWGGSSVAGTVQIQCSDLCSTSGDRLIVGQSLLLRRVVPILGVPDALVPVDLPVSQINLFPGETTALWISIDVPSSQPPGQYEGEIAITAIKADAESPVQILSKXRNISCIDLKGCLDIVEPIDGKPLDEVVERVKSATTSLRRILLSPSFSEFFSDNGPVDVMDEDAISSLSIRMKLNLTVWEFVLPETPSLPAVFGISDTVIEDRFGVQQGTAEWYEALDQHFKWLLQYRISPYFCKWADGMRVLTYTSPWPADHPKSDEYFSDPRLAAYAVPYKQVVSGNDAAKDYLQKQVEILRTKTHWRKAYFYLWDEPLNLEQYDSVRNMASEIHAYAPDARILTTYYCGPNDAPLAPTPFEAFVKVPSFLRPHNQIYCTSEWVLGNREDLVKDIITELQPENGEEWWTYVCMGPSDPHPNWHLGMRGTQHRAVMWRVWKEGGTGFLYWGANCYEKATVASAEIKFRHGLPPGDGVLYYPGEVFSTSHQPVASLRLERILNGLQDIEYLRLYASRYGRDESIALLERTGVYFGPERYTFEHMPIDAMRGQIFNACRS

SEQ ID NO: 276547 - protein, 75 aa, Glycine max
  Clone ID: PAT_MRT3847_91741C.1.pep
YRMPRRNLGPLLFLFKKVETLVHFMRGGSGWFHLDISVDQIRTRSLCIILSFSWGSSKKYGSMFIYCKQSEKEAG

SEQ ID NO: 276548 - protein, 164 aa, Glycine max
  Clone ID: PAT_MRT3847_91742C.1.pep
MTTNNKPEESSSTPARAWRICSLLSEAIVSSVLSAILALSQISLTCAKRENGAKCAFEGFSIERCIVSLELDRAGLGYRMSGHGMRSSASELVPLDLEIEATFRRNNVERKRKLLHDITVALILKEALFFESSSSQTAEFEAEVMAEEKPRRVTLEDYSSTLVP

SEQ ID NO: 276549 - protein, 54 aa, Glycine max
  Clone ID: PAT_MRT3847_91743C.1.pep
ELMQGDGLTNDQGKSHTQKYRVHTRTDAAACSNHTVVSSWRLVDVIRSMTQTTI

SEQ ID NO: 276550 - protein, 90 aa, Glycine max
  unsure (1)..(90): unsure at all Xaa locations
  Clone ID: PAT_MRT3847_91744C.1.pep
GXVEXGXLKXGMVVXFXXNGXXXEXKXVEMXXEXXXEVXDGXNVGXNVKNVXVKDLKXGYVEXXLKDDXGKDGGXXRVKVIMMNXGGEIG

SEQ ID NO: 276551 - protein, 55 aa, Glycine max
  Clone ID: PAT_MRT3847_91745C.1.pep
KGPREGNCPLPFTPGAPPHLHTGGKVEGEQGALTHVLLMDPNTGSVVQGVPESVA

SEQ ID NO: 276552 - protein, 104 aa, Glycine max
  unsure (1)..(104): unsure at all Xaa locations
  Clone ID: PAT_MRT3847_91746C.1.pep
TSDAIDRHSGLTLDDNNMRLESRIHCERSRRGGKHACXKTITGTTRTLEVGHSDTIEPVKAKIQDTEGISPNQECLKFMGKQLADGRTLDGYNIRKESTVQLVL

SEQ ID NO: 276553 - protein, 43 aa, Glycine max
  Clone ID: PAT_MRT3847_91747C.1.pep
EGRGREAKVPPQGARGPKEGGEIEQRNLNHLARHVLDLLGTWT

SEQ ID NO: 276554 - protein, 119 aa, Glycine max
  unsure (1)..(119): unsure at all Xaa locations
  Clone ID: PAT_MRT3847_91748C.1.pep
LDPNQHCTSPTPPALYLINVWCVAPEGLIRDFNEILSALELNIDRLQRASXATDGRVLDVFYITVGMVLLYTKKRPDDGCEYAIDAYGAMCIDGLLQVSGPEYGHVQGLYSLAPYYADE

SEQ ID NO: 276555 - protein, 162 aa, Glycine max
  unsure (1)..(162): unsure at all Xaa locations
  Clone ID: PAT_MRT3847_91749C.1.pep
GEMMSSISRDTKERTPLQARLDKLTSXIGKVGLAVAFLVLIVLLIRYFTGNSEDDKGNQEFQGSKTDVNDVFNAVVRIVAAAVTIVVVAIPEGLPLAVTLTLAYSMKRMMADQAMVRKLSACETMGSATVICTDKTGTLTLNQMRVSKFWLGLENGMENFSN

SEQ ID NO: 276556 - protein, 134 aa, Glycine max
  Clone ID: PAT_MRT3847_9174C.1.pep
PTRPPTRPYGCEKTTEGDPSVESSLRLLQPTTATRALLRRVRSSSPPRSSWLRIMGRKAGTLFINPKRFGNLQKPCMKEMALFLSCMAANHSDTEACARQKELLNVCIDAQSKKNRKSWGSINYQLQRLNRGRK

SEQ ID NO: 276557 - protein, 71 aa, Glycine max
  unsure (1)..(71): unsure at all Xaa locations
  Clone ID: PAT_MRT3847_91750C.1.pep
FDHTLSCFQLRWFCXXSSGMXLWLALNLSVALXSSXNSPPSKLVRTLLXCIXXDXFXINYXXHIAIXXXCX

SEQ ID NO: 276558 - protein, 449 aa, Glycine max
  Clone ID: PAT_MRT3847_91751C.1.pep
MREILHIQGGQCGNQIGAKFWEVVCAEHGIDPTGRYGGDSELQLERINVYYNEASCGRFVPRAVLMDLEPGTMDSVRSGPYGQIFRPDNFVFGQSGAGNNWAKGHYTEGAELIDSVLDVVRKEAENCDCLQGFQVCHSLGGGTGSGMGTLLISKIREEYPDRMMLTFSVFPSPKVSDTVVEPYNATLSVHQLVENADECMVLDNEALYDICFRTLKLTTPSFGDLNHLISATMSGVTCCLRFPGQLNSDLRKLAVNLIPFPRLHFFMVGFAPLTSRGSQQYRALSVPELTQQMWDSKNMMCAADPRHGRYLTASAMFRGKMSTKEVDEQMINVQNKNSSYFVEWIPHNVKSTVCDIPPTGLKMASTFIGNSTSIQEMFRRVSEQFTAMFRRKAFLHWYTGEGMDEMEFTEAESNMNDLVSEYQQYQDATADEDEYEEEEEEEEYGQHDM

SEQ ID NO: 276559 - protein, 101 aa, Glycine max
  unsure (1)..(101): unsure at all Xaa locations
  Clone ID: PAT_MRT3847_91752C.1.pep
YYCRVREKQISYQIPEFPQLFEERILCIGSNSKRPVLKWENNMAXPGKLTLTDKAIYFELYIEGYIQAMRDSLYRQEYLRVRVIDNHEIVELSAHKLVMGS

SEQ ID NO: 276560 - protein, 449 aa, Glycine max
  Clone ID: PAT_MRT3847_91753C.1.pep
MREILHIQGGQCGNQIGAKFWEVVCAEHGIDPTGRYGGDSELQLERINVYYNEASCGRFVPRAVLMDLEPGTMDSVRSGPYGQIFRPDNFVFGQSGAGNNWAKGHYTEGAELIDSVLDVVRKEAENCDCLQGFQVCHSLGGGTGSGMGTLLISKIREEYPDRMMLTFSVFPSPKVSDTVVEPYNATLSVHQLVENADECMVLDNEALYDICFRTLKLTTPSFGDLNHLISATMSGVTCCLRFPGQLNSDLRKLAVNLIPFPRLHFFMVGFAPLTSRGSQQYRALSVPELTQQMWDSKNMMCAADPRHGRYLTASAMFRGKMSTKEVDEQMINVQNKNSSYFVEWIPHNVKSTVCDIPPTGLKMASTFIGNSTSIQEMFRRVSEQFTAMFRRKAFLHWYTGEGMDEMEFTEAESNMNDLVSEYQQYQDATADEDEYEEEEEEEEFAQHDM

SEQ ID NO: 276561 - protein, 239 aa, Glycine max
  Clone ID: PAT_MRT3847_91754C.1.pep
VSSEFGFRSQATTMDRHIGKTFQMPAASMTVFLIGTILLTVPFYDRFIVPVAKKVLKNPHGFTPLQRIGVGLVLSVVSMVVGALIEIKRLRYAQSHGLVDKPEAKIPMTVFWLIPQNLFVGAGEAFMYMGQLDFFLRECPKGMKTMSTGLFLSTLSLGFFFSTLLVSIVNKMTAHGRPWLADNLNQGRLYDFYWLLAILSAINVVLYLVCAKWYVYKEKRLADEGIVLEETDDAAFHGH

SEQ ID NO: 276562 - protein, 119 aa, Glycine max
  Clone ID: PAT_MRT3847_91755C.1.pep
GAGEAFMYMGQLDFFLRECPKGMKTMSTGLFLSTLSLGFFFSTLLVSIVNKMTAHGRPWLADNLNQGRLYDFYWLLAILSAINVVLYLVCAKWYVYKEKRLAEECIELEEADAAAFHGH

SEQ ID NO: 276563 - protein, 44 aa, Glycine max
  Clone ID: PAT_MRT3847_91756C.1.pep
TYEKFLKINYASEINHTLKFKNKIFIQYNANKSYEIIIIIIIPD

SEQ ID NO: 276564 - protein, 85 aa, Glycine max
  Clone ID: PAT_MRT3847_91757C.1.pep
YIAEKRHYYWEAAALAGENMEMSLRLNCETTFVNRSSLFGAGAGLIFPTTSQCHRLAGWRFIFINASADFSSRRQNRIFTARTNG

SEQ ID NO: 276565 - protein, 116 aa, Glycine max
  Clone ID: PAT_MRT3847_91758C.1.pep
IWGQQLIYFTKNDDIAVLNKAVLYARDNELTNWMKIVHVYKDIPPPQLAQDVKLLDRIYPKTKIDLILVKGEFNPDLVDKLSEILAVPKNFMFISSPGEKFPHDLADFGGIRLITH

SEQ ID NO: 276566 - protein, 45 aa, Glycine max
  Clone ID: PAT_MRT3847_91759C.1.pep
GNENAKQFFYRTNKKQNLIFEFFPKAEKKITNLEVFRSLLPKRTC

SEQ ID NO: 276567 - protein, 52 aa, Glycine max
  Clone ID: PAT_MRT3847_9175C.1.pep
SVKLRQNVEFPMSPVLYKGHKVNMVLASKGARSQSISFLVFFSHSWRMFTQI

SEQ ID NO: 276568 - protein, 265 aa, Glycine max
  Clone ID: PAT_MRT3847_91760C.1.pep
MTTFAFTSLLPLTVSSPSSSSKFSAFHAIRASLDSEYVASRHTLRREFLKGVALMPLPLVVMREPPPSHAREVEVGSFLPPSPSDPSFVLFKATPKDTPALRAGNVQPYKFILPPTWKQARVANILSGNYCQPKCAEPWVEVKFEDEKQGKVQVVASPLIRLTNKPNASIEDIGSPEKLIASLGPFVTGNTLDPDELLETSVEKIGDQTYYKYVLETPYALTGTHNLAKATAKGNTVVLFVVSANDKQWQTSEETLKAVLNSFEV

SEQ ID NO: 276569 - protein, 56 aa, Glycine max
  Clone ID: PAT_MRT3847_91761C.1.pep
EKQRGSTMHLVKGGIKKVCCPPSLKIIISLEFCCKHIFVNQPAFINTVEGGNQDKG

SEQ ID NO: 276570 - protein, 134 aa, Glycine max
  Clone ID: PAT_MRT3847_91762C.1.pep
MLSEPQLLSMFPSQHTLRREFLKGVAALMPLPLVVLIEPPPSDAREVEVGSFLPPSPSDPSFVLFKASAKDTPALRAGNVQPYKFILPPTWKQARVANILSGNYCQPKCAEPWVEVKFEDEKQGIVHVVASPLI

SEQ ID NO: 276571 - protein, 104 aa, Glycine max
  Clone ID: PAT_MRT3847_91763C.1.pep
LTNKPNATIEDIGSPEKLIASLGPFVTGNTFDPEELLETSVKKLGDQTYYKYVLETPYALTGTHNLAKATAKGNTVVLFVVSANDKQWQTSEETLKAVLNSFEV

SEQ ID NO: 276572 - protein, 39 aa, Glycine max
  unsure (1)..(39): unsure at all Xaa locations
  Clone ID: PAT_MRT3847_91764C.1.pep
VQXSINKLCLLXGLFLVLMXLIXLLLIIDNIDDDSGGRF

SEQ ID NO: 276573 - protein, 502 aa, Glycine max
  unsure (1)..(502): unsure at all Xaa locations
  Clone ID: PAT_MRT3847_91765C.1.pep
MGSTPEVLAQRSCGKLIGTRLLQYLNGGPLSFKTHQAIVLIVTFFAYASYHATRKTTSIVKSVLDPQSAATGLTFFPFRPTNFTESNGSKRLSSNLGDGWAPFNGSDGTSLLGQLDVAFLAVYAFGMYFSGHFGDRCNLRIFLTVGMLGTGLFTSLFGVGYWGNIHNFYYYLVVQMIAGLFQSTGWPSVVAVVGNWFGKSKRGLIMGIWNAHTSIGNIAGSLIASAMLSYGWGWSFVVPGLITAFIGLAVFLILPVTPESVGAREEDEFSGPIKSGEEAAEPLLRQETPVEEKEAVGFIEAWKIPGVAPFALCLFFAKLVAYRFLYWIPFYGSHTACDGXYLSSETSGTLSTLFDVGGVLGVLGGILAGHISDHLEARAITAASFMYCAIPALFFYRSYGHVSLIVNGALMFVTGTFETLQGDLITPAVSAAIIDGTGFIGAAVGPLTTGYISAKSWSAVFAMLMAAALIAGLLLTRLVVSEVATKIEESRSNRAQDCSLNV

SEQ ID NO: 276574 - protein, 83 aa, Glycine max
  Clone ID: PAT_MRT3847_91766C.1.pep
IQVRSVIASIIFLKGVGGILFVLGSTFGSYLLLLYLGLSTPILYDFYNYRSNNPEYYLLLNDFIHVCENYCYFMCFYLMILPV

SEQ ID NO: 276575 - protein, 179 aa, Glycine max
  Clone ID: PAT_MRT3847_91767C.1.pep
KYLSSGTSGTLSTLFDVGGVLGGILAGHISDHLEARAITAASFMYCAIPALFFYRSYGHVSLIVNGALMFVTGMFVNGPYALITTAVSADLGTHKSLKGNSRALATVTAIIDGTGSIGAAVGPLLTGYISAKSWSAVFTMLMAAALIAGLLLTRLVVSEVATKIEESRYNRAQDCSFNV

SEQ ID NO: 276576 - protein, 55 aa, Glycine max
  Clone ID: PAT_MRT3847_91768C.1.pep
IIEGRPRQREGAIFRYDNSFFHLSVMGICIVLRYLAYQATCPFHKHIYYRSMSIT

SEQ ID NO: 276577 - protein, 47 aa, Glycine max
  Clone ID: PAT_MRT3847_91769C.1.pep
RKRKQVPLWKLIMNNISNYYILISWLKEKVNYCIFIGIPIRCIRVKK

SEQ ID NO: 276578 - protein, 60 aa, Glycine max
  Clone ID: PAT_MRT3847_9176C.1.pep
FWVIICRSQHQSCLLKLIILFIFLFLSHQVTYDTYTLLSSPFYLSKSMSTNIINSYINFQ

SEQ ID NO: 276579 - protein, 103 aa, Glycine max
  Clone ID: PAT_MRT3847_91770C.1.pep
MGSAPEVLAQRSCGKLIGTRFLQYLNGGPLSFKTHQAIVLIVTFFAYASYHATRKTTSIVKSVLDPQSSAIGLTFFPFRPTNFTESNGSKTLSSNLGDGWRPL

SEQ ID NO: 276580 - protein, 56 aa, Glycine max
  Clone ID: PAT_MRT3847_91771C.1.pep
VQLCLNFFPRISYRIYFSVNFRAYVVEPLFPFLEPPRLLHSPSPPLLLFIIPMILF

SEQ ID NO: 276581 - protein, 64 aa, Glycine max
  Clone ID: PAT_MRT3847_91772C.1.pep
FTTQTFFMSLVSLLFSYALLFACFSVKMCSDEINPSAHADHKFLIKSVCNLKQVTSVKYYSAIL

SEQ ID NO: 276582 - protein, 41 aa, Glycine max
  Clone ID: PAT_MRT3847_91773C.1.pep
YSWVGLELKILLCYDITEIGSDFVAVFSFEESILRGRLVLL

SEQ ID NO: 276583 - protein, 68 aa, Glycine max
  Clone ID: PAT_MRT3847_91774C.1.pep
AWSRGRTPGRTRGLTLARTLVPKTIGQIEPYMNYRVQLVSTTTNGDGGQGKDLAMVEVNVACAAVGLT

SEQ ID NO: 276584 - protein, 76 aa, Glycine max
  Clone ID: PAT_MRT3847_91775C.1.pep
VNPKYVRSKMRVFSQKRLCYFKNHYICLAQVKQRSCSTKSYRTVNSRNLSNGTLNSVRHVPSVGCKTSQPGSERKP

SEQ ID NO: 276585 - protein, 62 aa, Glycine max
  Clone ID: PAT_MRT3847_91776C.1.pep
IRQFTRGYQHILVDLSKNSSLTCFQNGENQSTSTSVGQCHAIQCLAYQICTPSVGRPFPYVR
